United States Patent Application Publication US 2026/0265736 A1 - sequence listing, part 5

SEQ ID NO: 6894 - protein, 2087 aa, synthetic construct
MPAAKRVKLDGGDKKYSIGLDIGTNSVGWAVITDEYKVPSKKFKVLGNTDRHSIKKNLIGALLFDSGETAEATRLKRTARRRYTRRKNRICYLQEIFSNEMAKVDDSFFHRLEESFLVEEDKKHERHPIFGNIVDEVAYHEKYPTIYHLRKKLVDSTDKADLRLIYLALAHMIKFRGHFLIEGDLNPDNSDVDKLFIQLVQTYNQLFEENPINASGVDAKAILSARLSKSRRLENLIAQLPGEKKNGLFGNLIALSLGLTPNFKSNFDLAEDAKLQLSKDTYDDDLDNLLAQIGDQYADLFLAAKNLSDAILLSDILRVNTEITKAPLSASMIKRYDEHHQDLTLLKALVRQQLPEKYKEIFFDQSKNGYAGYIDGGASQEEFYKFIKPILEKMDGTEELLVKLNREDLLRKQRTFDNGSIPHQIHLGELHAILRRQEDFYPFLKDNREKIEKILTFRIPYYVGPLARGNSRFAWMTRKSEETITPWNFEEVVDKGASAQSFIERMTNFDKNLPNEKVLPKHSLLYEYFTVYNELTKVKYVTEGMRKPAFLSGEQKKAIVDLLFKTNRKVTVKQLKEDYFKKIECFDSVEISGVEDRFNASLGTYHDLLKIIKDKDFLDNEENEDILEDIVLTLTLFEDREMIEERLKTYAHLFDDKVMKQLKRRRYTGWGRLSRKLINGIRDKQSGKTILDFLKSDGFANRNFMQLIHDDSLTFKEDIQKAQVSGQGDSLHEHIANLAGSPAIKKGILQTVKVVDELVKVMGRHKPENIVIEMARENQTTQKGQKNSRERMKRIEEGIKELGSQILKEHPVENTQLQNEKLYLYYLQNGRDMYVDQELDINRLSDYDVDHIVPQSFLKDDSIDNKVLTRSDKARGKSDNVPSEEVVKKMKNYWRQLLNAKLITQRKFDNLTKAERGGLSELDKAGFIKRQLVETRQITKHVAQILDSRMNTKYDENDKLIREVKVITLKSKLVSDFRKDFQFYKVREINNYHHAHDAYLNAVVGTALIKKYPKLESEFVYGDYKVYDVRKMIAKSEQEIGKATAKYFFYSNIMNFFKTEITLANGEIRKRPLIETNGETGEIVWDKGRDFATVRKVLSMPQVNIVKKTEVQTGGFSKESILPKRNSDKLIARKKDWDPKKYGGFDSPTVAYSVLVVAKVEKGKSKKLKSVKELLGITIMERSSFEKNPIDFLEAKGYKEVKKDLIIKLPKYSLFELENGRKRMLASAGELQKGNELALPSKYVNFLYLASHYEKLKGSPEDNEQKQLFVEQHKHYLDEIIEQISEFSKRVILADANLDKVLSAYNKHRDKPIREQAENIIHLFTLTNLGAPAAFKYFDTTIDRKRYTSTKEVLDATLIHQSITGLYETRIDLSQLGGDGGGGSGGGEAAAKGGIPWLMKKPLQLTTLVPLQEYEERLLKQTMLTGSYKEKLQSLFLKYDALWQHWENQVGHRRIKPHHIATGTVNPRPQKQYPINPKAKASIQTVINDLLKQGVLIQQNSIMNTPVYPVPKPDGKWRMVLDYREVNKTIPLIAAQNQHSAGILSSIFRGKYKTTLDLSNGFWAHSITPESYWLTAFTWLGQQYCWTRLPQGFLNSPALFNADVVDLLKEVPNVQVYVDDIYISHDDPREHLEQLEKVFSLLLNAGYVVSLKKSEIAQHEVEFLGFNITKEGRGLTETFKQKLLNITPPRDLKQLQSILGLLNFARNFIPNFSELVKPLYNIIATAPGKYITWTTDNSQQLQNIISMLNSAENLEERNPEVRLIMKVNTSPSAGYIRFYNEFAKRPIMYLNYVYTKAEVKFTNTEKLLTTIHKGLIKALDLGMGQEILVYSPIVSMTKIQKTPLPERKALPIRWITWMSYLEDPRIQFHYDKTLPELQQVPTVTDDIIAKIKHPSEFSMVFYTDGSAIKHPNVNKSHNAGMGIAQVQFKPEFTVINTWSIPLGDHTAQLAEVAAVEFACKKALKIDGPVLIVTDSFYVAESVNKELPYWQSNGFFNNKKKPLKHVSKWKSIADCIQLKPDIIIIHEKGHQPTASTFHTEGNNLADKLATQGSYVVNAGKRTADGSEFEKRTADGSEFESPKKKAKVE

SEQ ID NO: 6895 - protein, 2176 aa, synthetic construct
MPAAKRVKLDGGDKKYSIGLDIGTNSVGWAVITDEYKVPSKKFKVLGNTDRHSIKKNLIGALLFDSGETAEATRLKRTARRRYTRRKNRICYLQEIFSNEMAKVDDSFFHRLEESFLVEEDKKHERHPIFGNIVDEVAYHEKYPTIYHLRKKLVDSTDKADLRLIYLALAHMIKFRGHFLIEGDLNPDNSDVDKLFIQLVQTYNQLFEENPINASGVDAKAILSARLSKSRRLENLIAQLPGEKKNGLFGNLIALSLGLTPNFKSNFDLAEDAKLQLSKDTYDDDLDNLLAQIGDQYADLFLAAKNLSDAILLSDILRVNTEITKAPLSASMIKRYDEHHQDLTLLKALVRQQLPEKYKEIFFDQSKNGYAGYIDGGASQEEFYKFIKPILEKMDGTEELLVKLNREDLLRKQRTFDNGSIPHQIHLGELHAILRRQEDFYPFLKDNREKIEKILTFRIPYYVGPLARGNSRFAWMTRKSEETITPWNFEEVVDKGASAQSFIERMTNFDKNLPNEKVLPKHSLLYEYFTVYNELTKVKYVTEGMRKPAFLSGEQKKAIVDLLFKTNRKVTVKQLKEDYFKKIECFDSVEISGVEDRFNASLGTYHDLLKIIKDKDFLDNEENEDILEDIVLTLTLFEDREMIEERLKTYAHLFDDKVMKQLKRRRYTGWGRLSRKLINGIRDKQSGKTILDFLKSDGFANRNFMQLIHDDSLTFKEDIQKAQVSGQGDSLHEHIANLAGSPAIKKGILQTVKVVDELVKVMGRHKPENIVIEMARENQTTQKGQKNSRERMKRIEEGIKELGSQILKEHPVENTQLQNEKLYLYYLQNGRDMYVDQELDINRLSDYDVDHIVPQSFLKDDSIDNKVLTRSDKARGKSDNVPSEEVVKKMKNYWRQLLNAKLITQRKFDNLTKAERGGLSELDKAGFIKRQLVETRQITKHVAQILDSRMNTKYDENDKLIREVKVITLKSKLVSDFRKDFQFYKVREINNYHHAHDAYLNAVVGTALIKKYPKLESEFVYGDYKVYDVRKMIAKSEQEIGKATAKYFFYSNIMNFFKTEITLANGEIRKRPLIETNGETGEIVWDKGRDFATVRKVLSMPQVNIVKKTEVQTGGFSKESILPKRNSDKLIARKKDWDPKKYGGFDSPTVAYSVLVVAKVEKGKSKKLKSVKELLGITIMERSSFEKNPIDFLEAKGYKEVKKDLIIKLPKYSLFELENGRKRMLASAGELQKGNELALPSKYVNFLYLASHYEKLKGSPEDNEQKQLFVEQHKHYLDEIIEQISEFSKRVILADANLDKVLSAYNKHRDKPIREQAENIIHLFTLTNLGAPAAFKYFDTTIDRKRYTSTKEVLDATLIHQSITGLYETRIDLSQLGGDGGGGSGGGEAAAKGGMDPLQLLQPLEAEIKGTKLKAHWNSGATITCVPQAFLEEEVPIKNIWIKTIHGEKEQPVYYLTFKIQGRKVEAEVISSPYDYILVSPSDIPWLMKKPLQLTTLVPLQEYEERLLKQTMLTGSYKEKLQSLFLKYDALWQHWENQVGHRRIKPHHIATGTVNPRPQKQYPINPKAKASIQTVINDLLKQGVLIQQNSIMNTPVYPVPKPDGKWRMVLDYREVNKTIPLIAAQNQHSAGILSSIFRGKYKTTLDLSNGFWAHSITPESYWLTAFTWLGQQYCWTRLPQGFLNSPALFNADVVDLLKEVPNVQVYVDDIYISHDDPREHLEQLEKVFSLLLNAGYVVSLKKSEIAQHEVEFLGFNITKEGRGLTETFKQKLLNITPPRDLKQLQSILGLLNFARNFIPNFSELVKPLYNIIATAPGKYITWTTDNSQQLQNIISMLNSAENLEERNPEVRLIMKVNTSPSAGYIRFYNEFAKRPIMYLNYVYTKAEVKFTNTEKLLTTIHKGLIKALDLGMGQEILVYSPIVSMTKIQKTPLPERKALPIRWITWMSYLEDPRIQFHYDKTLPELQQVPTVTDDIIAKIKHPSEFSMVFYTDGSAIKHPNVNKSHNAGMGIAQVQFKPEFTVINTWSIPLGDHTAQLAEVAAVEFACKKALKIDGPVLIVTDSFYVAESVNKELPYWQSNGFFNNKKKPLKHVSKWKSIADCIQLKPDIIIIHEKGHQPTASTFHTEGNNLADKLATQGSYVVNAGKRTADGSEFEKRTADGSEFESPKKKAKVE

SEQ ID NO: 6896 - protein, 2094 aa, synthetic construct
MPAAKRVKLDGGDKKYSIGLDIGTNSVGWAVITDEYKVPSKKFKVLGNTDRHSIKKNLIGALLFDSGETAEATRLKRTARRRYTRRKNRICYLQEIFSNEMAKVDDSFFHRLEESFLVEEDKKHERHPIFGNIVDEVAYHEKYPTIYHLRKKLVDSTDKADLRLIYLALAHMIKFRGHFLIEGDLNPDNSDVDKLFIQLVQTYNQLFEENPINASGVDAKAILSARLSKSRRLENLIAQLPGEKKNGLFGNLIALSLGLTPNFKSNFDLAEDAKLQLSKDTYDDDLDNLLAQIGDQYADLFLAAKNLSDAILLSDILRVNTEITKAPLSASMIKRYDEHHQDLTLLKALVRQQLPEKYKEIFFDQSKNGYAGYIDGGASQEEFYKFIKPILEKMDGTEELLVKLNREDLLRKQRTFDNGSIPHQIHLGELHAILRRQEDFYPFLKDNREKIEKILTFRIPYYVGPLARGNSRFAWMTRKSEETITPWNFEEVVDKGASAQSFIERMTNFDKNLPNEKVLPKHSLLYEYFTVYNELTKVKYVTEGMRKPAFLSGEQKKAIVDLLFKTNRKVTVKQLKEDYFKKIECFDSVEISGVEDRFNASLGTYHDLLKIIKDKDFLDNEENEDILEDIVLTLTLFEDREMIEERLKTYAHLFDDKVMKQLKRRRYTGWGRLSRKLINGIRDKQSGKTILDFLKSDGFANRNFMQLIHDDSLTFKEDIQKAQVSGQGDSLHEHIANLAGSPAIKKGILQTVKVVDELVKVMGRHKPENIVIEMARENQTTQKGQKNSRERMKRIEEGIKELGSQILKEHPVENTQLQNEKLYLYYLQNGRDMYVDQELDINRLSDYDVDHIVPQSFLKDDSIDNKVLTRSDKARGKSDNVPSEEVVKKMKNYWRQLLNAKLITQRKFDNLTKAERGGLSELDKAGFIKRQLVETRQITKHVAQILDSRMNTKYDENDKLIREVKVITLKSKLVSDFRKDFQFYKVREINNYHHAHDAYLNAVVGTALIKKYPKLESEFVYGDYKVYDVRKMIAKSEQEIGKATAKYFFYSNIMNFFKTEITLANGEIRKRPLIETNGETGEIVWDKGRDFATVRKVLSMPQVNIVKKTEVQTGGFSKESILPKRNSDKLIARKKDWDPKKYGGFDSPTVAYSVLVVAKVEKGKSKKLKSVKELLGITIMERSSFEKNPIDFLEAKGYKEVKKDLIIKLPKYSLFELENGRKRMLASAGELQKGNELALPSKYVNFLYLASHYEKLKGSPEDNEQKQLFVEQHKHYLDEIIEQISEFSKRVILADANLDKVLSAYNKHRDKPIREQAENIIHLFTLTNLGAPAAFKYFDTTIDRKRYTSTKEVLDATLIHQSITGLYETRIDLSQLGGDGGGGSGGGEAAAKGGVLNLEEEYRLHEKPVPSSIDPSWLQLFPTVWAERAGMGLANQVPPVVVELRSGASPVAVRQYPMSKEAREGIRPHIQRFLDLGVLVPCQSPWNTPLLPVKKPGTNDYRPVQDLREINKRVQDIHPTVPNPYNLLSSLPPSHTWYSVLDLKDAFFCLKLHPNSQPLFAFEWRDPEKGNTGQLTWTRLPQGFKNSPTLFNEALHRDLAPFRALNPQVVLLQYVDDLLVAAPTYRDCKEGTQKLLQELSKLGYRVSAKKAQLCQKEVTYLGYLLKEGKRWLTPARKATVMKIPPPTTPRQVREFLGKAGFCRLFIPGFASLAAPLYPLTKPSIPFIWTEEHQKAFDRIKEALLSAPALALPDLTKPFTLYVDERAGVARGVLTQTLGPWRRPVAYLSKKLDPVASGWPTCLKAVAAVALLLKDADKLTLGQNVTVIASHSLESIVRQPPDRWMTNARMTHYQSLLLNERVSFAPPAVLNPATLLPVESEATPVHRCSEILAEETGTRRDLKDQPLPGVPAWYTDGSSFIAEGKRRAGAAIVDGKRTVWASSLPEGTSAQKAELVALTQALRLAEGKDINIYTDSRYAFATAHIHGAIYKQRGWLTSAGKDIKNKEEILALLEAIHLPKRVAIIHCPGHQKGNDPVATGNRRADEAAKQAALSTRVLAETTKPAGKRTADGSEFEKRTADGSEFESPKKKAKVE

SEQ ID NO: 6897 - protein, 2096 aa, synthetic construct
MPAAKRVKLDGGDKKYSIGLDIGTNSVGWAVITDEYKVPSKKFKVLGNTDRHSIKKNLIGALLFDSGETAEATRLKRTARRRYTRRKNRICYLQEIFSNEMAKVDDSFFHRLEESFLVEEDKKHERHPIFGNIVDEVAYHEKYPTIYHLRKKLVDSTDKADLRLIYLALAHMIKFRGHFLIEGDLNPDNSDVDKLFIQLVQTYNQLFEENPINASGVDAKAILSARLSKSRRLENLIAQLPGEKKNGLFGNLIALSLGLTPNFKSNFDLAEDAKLQLSKDTYDDDLDNLLAQIGDQYADLFLAAKNLSDAILLSDILRVNTEITKAPLSASMIKRYDEHHQDLTLLKALVRQQLPEKYKEIFFDQSKNGYAGYIDGGASQEEFYKFIKPILEKMDGTEELLVKLNREDLLRKQRTFDNGSIPHQIHLGELHAILRRQEDFYPFLKDNREKIEKILTFRIPYYVGPLARGNSRFAWMTRKSEETITPWNFEEVVDKGASAQSFIERMTNFDKNLPNEKVLPKHSLLYEYFTVYNELTKVKYVTEGMRKPAFLSGEQKKAIVDLLFKTNRKVTVKQLKEDYFKKIECFDSVEISGVEDRFNASLGTYHDLLKIIKDKDFLDNEENEDILEDIVLTLTLFEDREMIEERLKTYAHLFDDKVMKQLKRRRYTGWGRLSRKLINGIRDKQSGKTILDFLKSDGFANRNFMQLIHDDSLTFKEDIQKAQVSGQGDSLHEHIANLAGSPAIKKGILQTVKVVDELVKVMGRHKPENIVIEMARENQTTQKGQKNSRERMKRIEEGIKELGSQILKEHPVENTQLQNEKLYLYYLQNGRDMYVDQELDINRLSDYDVDHIVPQSFLKDDSIDNKVLTRSDKARGKSDNVPSEEVVKKMKNYWRQLLNAKLITQRKFDNLTKAERGGLSELDKAGFIKRQLVETRQITKHVAQILDSRMNTKYDENDKLIREVKVITLKSKLVSDFRKDFQFYKVREINNYHHAHDAYLNAVVGTALIKKYPKLESEFVYGDYKVYDVRKMIAKSEQEIGKATAKYFFYSNIMNFFKTEITLANGEIRKRPLIETNGETGEIVWDKGRDFATVRKVLSMPQVNIVKKTEVQTGGFSKESILPKRNSDKLIARKKDWDPKKYGGFDSPTVAYSVLVVAKVEKGKSKKLKSVKELLGITIMERSSFEKNPIDFLEAKGYKEVKKDLIIKLPKYSLFELENGRKRMLASAGELQKGNELALPSKYVNFLYLASHYEKLKGSPEDNEQKQLFVEQHKHYLDEIIEQISEFSKRVILADANLDKVLSAYNKHRDKPIREQAENIIHLFTLTNLGAPAAFKYFDTTIDRKRYTSTKEVLDATLIHQSITGLYETRIDLSQLGGDGGGGSGGGEAAAKGGTLNIEDEYRLHETSKEPDVPLGSTWLSDFPQAWAETGGMGLAVRQAPLIIPLKATSTPVSIKQYPMSQEARLGIKPHIQRLLDQGILVPCQSPWNTPLLPVKKPGTNDYRPVQDLREVNKRVEDIHPTVPNPYNLLSGLPPSHQWYTVLDLKDAFFCLRLHPTSQPLFAFEWRDPEMGISGQLTWTRLPQGFKNSPTLFNEALHRDLADFRIQHPDLILLQYVDDLLLAATSEQDCQRGTRALLQTLGNLGYRASAKKAQICQKQVKYLGYLLKEGQRWLTEARKETVMGQPTPKTPRQLREFLGTAGFCRLWIPGFAEMAAPLYPLTKPGTLFNWGPDQQKAYQEIKQALLTAPALGLPDLTKPFELFVDEKQGYAKGVLTQKLGPWRRPVAYLSKKLDPVAAGWPPCLRMVAAIAVLTKDAGKLTMGQPLVILAPHAVEALVKQPPDRWLSNARMTHYQAMLLDTDRVQFGPVVALNPATLLPLPEKEAPHDCLEILAETHGTRPDLTDQPIPDADYTWYTDGSSFLQEGQRRAGAAVTTETEVIWARALPAGTSAQRAELIALTQALKMAEGKKLNVYTDSRYAFATAHVHGEIYRRRGWLTSEGREIKNKNEILALLKALFLPKRLSIIHCPGHQKGNSAEARGNRMADQAAREAAMKAVLETSTLLAGKRTADGSEFEKRTADGSEFESPKKKAKVE

SEQ ID NO: 6898 - protein, 2098 aa, synthetic construct
MPAAKRVKLDGGDKKYSIGLDIGTNSVGWAVITDEYKVPSKKFKVLGNTDRHSIKKNLIGALLFDSGETAEATRLKRTARRRYTRRKNRICYLQEIFSNEMAKVDDSFFHRLEESFLVEEDKKHERHPIFGNIVDEVAYHEKYPTIYHLRKKLVDSTDKADLRLIYLALAHMIKFRGHFLIEGDLNPDNSDVDKLFIQLVQTYNQLFEENPINASGVDAKAILSARLSKSRRLENLIAQLPGEKKNGLFGNLIALSLGLTPNFKSNFDLAEDAKLQLSKDTYDDDLDNLLAQIGDQYADLFLAAKNLSDAILLSDILRVNTEITKAPLSASMIKRYDEHHQDLTLLKALVRQQLPEKYKEIFFDQSKNGYAGYIDGGASQEEFYKFIKPILEKMDGTEELLVKLNREDLLRKQRTFDNGSIPHQIHLGELHAILRRQEDFYPFLKDNREKIEKILTFRIPYYVGPLARGNSRFAWMTRKSEETITPWNFEEVVDKGASAQSFIERMTNFDKNLPNEKVLPKHSLLYEYFTVYNELTKVKYVTEGMRKPAFLSGEQKKAIVDLLFKTNRKVTVKQLKEDYFKKIECFDSVEISGVEDRFNASLGTYHDLLKIIKDKDFLDNEENEDILEDIVLTLTLFEDREMIEERLKTYAHLFDDKVMKQLKRRRYTGWGRLSRKLINGIRDKQSGKTILDFLKSDGFANRNFMQLIHDDSLTFKEDIQKAQVSGQGDSLHEHIANLAGSPAIKKGILQTVKVVDELVKVMGRHKPENIVIEMARENQTTQKGQKNSRERMKRIEEGIKELGSQILKEHPVENTQLQNEKLYLYYLQNGRDMYVDQELDINRLSDYDVDHIVPQSFLKDDSIDNKVLTRSDKARGKSDNVPSEEVVKKMKNYWRQLLNAKLITQRKFDNLTKAERGGLSELDKAGFIKRQLVETRQITKHVAQILDSRMNTKYDENDKLIREVKVITLKSKLVSDFRKDFQFYKVREINNYHHAHDAYLNAVVGTALIKKYPKLESEFVYGDYKVYDVRKMIAKSEQEIGKATAKYFFYSNIMNFFKTEITLANGEIRKRPLIETNGETGEIVWDKGRDFATVRKVLSMPQVNIVKKTEVQTGGFSKESILPKRNSDKLIARKKDWDPKKYGGFDSPTVAYSVLVVAKVEKGKSKKLKSVKELLGITIMERSSFEKNPIDFLEAKGYKEVKKDLIIKLPKYSLFELENGRKRMLASAGELQKGNELALPSKYVNFLYLASHYEKLKGSPEDNEQKQLFVEQHKHYLDEIIEQISEFSKRVILADANLDKVLSAYNKHRDKPIREQAENIIHLFTLTNLGAPAAFKYFDTTIDRKRYTSTKEVLDATLIHQSITGLYETRIDLSQLGGDGGGGSEAAAKGGGGGTAPLEEEYRLFLEAPIQNVTLLEQWKREIPKVWAEINPPGLASTQAPIHVQLLSTALPVRVRQYPITLEAKRSLRETIRKFRAAGILRPVHSPWNTPLLPVRKSGTSEYRMVQDLREVNKRVETIHPTVPNPYTLLSLLPPDRIWYSVLDLKDAFFCIPLAPESQLIFAFEWADAEEGESGQLTWTRLPQGFKNSPTLFNEALNRDLQGFRLDHPSVSLLQYVDDLLIAADTQAACLSATRDLLMTLAELGYRVSGKKAQLCQEEVTYLGFKIHKGSRSLSNSRTQAILQIPVPKTKRQVREFLGTIGYCRLWIPGFAELAQPLYAATRPGNDPLVWGEKEEEAFQSLKLALTQPPALALPSLDKPFQLFVEETSGAAKGVLTQALGPWKRPVAYLSKRLDPVAAGWPRCLRAIAAAALLTREASKLTFGQDIEITSSHNLESLLRSPPDKWLTNARITQYQVLLLDPPRVRFKQTAALNPATLLPETDDTLPIHHCLDTLDSLTSTRPDLTDQPLAQAEATLFTDGSSYIRDGKRYAGAAVVTLDSVIWAEPLPIGTSAQKAELIALTKALEWSKDKSVNIYTDSRYAFATLHVHGMIYRERGWLTAGGKAIKNAPEILALLTAVWLPKRVAVMHCKGHQKDDAPTSTGNRRADEVAREVAIRPLSTQATISAGKRTADGSEFEKRTADGSEFESPKKKAKVE

SEQ ID NO: 6899 - protein, 2102 aa, synthetic construct
MPAAKRVKLDGGDKKYSIGLDIGTNSVGWAVITDEYKVPSKKFKVLGNTDRHSIKKNLIGALLFDSGETAEATRLKRTARRRYTRRKNRICYLQEIFSNEMAKVDDSFFHRLEESFLVEEDKKHERHPIFGNIVDEVAYHEKYPTIYHLRKKLVDSTDKADLRLIYLALAHMIKFRGHFLIEGDLNPDNSDVDKLFIQLVQTYNQLFEENPINASGVDAKAILSARLSKSRRLENLIAQLPGEKKNGLFGNLIALSLGLTPNFKSNFDLAEDAKLQLSKDTYDDDLDNLLAQIGDQYADLFLAAKNLSDAILLSDILRVNTEITKAPLSASMIKRYDEHHQDLTLLKALVRQQLPEKYKEIFFDQSKNGYAGYIDGGASQEEFYKFIKPILEKMDGTEELLVKLNREDLLRKQRTFDNGSIPHQIHLGELHAILRRQEDFYPFLKDNREKIEKILTFRIPYYVGPLARGNSRFAWMTRKSEETITPWNFEEVVDKGASAQSFIERMTNFDKNLPNEKVLPKHSLLYEYFTVYNELTKVKYVTEGMRKPAFLSGEQKKAIVDLLFKTNRKVTVKQLKEDYFKKIECFDSVEISGVEDRFNASLGTYHDLLKIIKDKDFLDNEENEDILEDIVLTLTLFEDREMIEERLKTYAHLFDDKVMKQLKRRRYTGWGRLSRKLINGIRDKQSGKTILDFLKSDGFANRNFMQLIHDDSLTFKEDIQKAQVSGQGDSLHEHIANLAGSPAIKKGILQTVKVVDELVKVMGRHKPENIVIEMARENQTTQKGQKNSRERMKRIEEGIKELGSQILKEHPVENTQLQNEKLYLYYLQNGRDMYVDQELDINRLSDYDVDHIVPQSFLKDDSIDNKVLTRSDKARGKSDNVPSEEVVKKMKNYWRQLLNAKLITQRKFDNLTKAERGGLSELDKAGFIKRQLVETRQITKHVAQILDSRMNTKYDENDKLIREVKVITLKSKLVSDFRKDFQFYKVREINNYHHAHDAYLNAVVGTALIKKYPKLESEFVYGDYKVYDVRKMIAKSEQEIGKATAKYFFYSNIMNFFKTEITLANGEIRKRPLIETNGETGEIVWDKGRDFATVRKVLSMPQVNIVKKTEVQTGGFSKESILPKRNSDKLIARKKDWDPKKYGGFDSPTVAYSVLVVAKVEKGKSKKLKSVKELLGITIMERSSFEKNPIDFLEAKGYKEVKKDLIIKLPKYSLFELENGRKRMLASAGELQKGNELALPSKYVNFLYLASHYEKLKGSPEDNEQKQLFVEQHKHYLDEIIEQISEFSKRVILADANLDKVLSAYNKHRDKPIREQAENIIHLFTLTNLGAPAAFKYFDTTIDRKRYTSTKEVLDATLIHQSITGLYETRIDLSQLGGDGGGGSEAAAKGGGGGTVSLQDEHRLFDIPVTTSLPDVWLQDFPQAWAETGGLGRAKCQAPIIIDLKPTAVPVSIKQYPMSLEAHMGIRQHIIKFLELGVLRPCRSPWNTPLLPVKKPGTQDYRPVQDLREINKRTVDIHPTVPNPYNLLSTLKPDYSWYTVLDLKDAFFCLPLAPQSQELFAFEWKDPERGISGQLTWTRLPQGFKNSPTLFNEALHRDLTDFRTQHPEVTLLQYVDDLLLAAPTKKACTQGTRHLLQELGEKGYRASAKKAQICQTKVTYLGYILSEGKRWLTPGRIETVARIPPPRNPREVREFLGTAGFCRLWIPGFAELAAPLYALTKPSTPFTWQTEHQLAFEALKKALLSAPALGLPDTSKPFTLFLDERQGIAKGVLTQKLGPWKRPVAYLSKKLDPVAAGWPPCLRIMAATAMLVKDSAKLTLGQPLTVITPHTLEAIVRQPPDRWITNARLTHYQALLLDTDRVQFGPPVTLNPATLLPVPENQPSPHDCRQVLAETHGTREDLKDQELPDADHTWYTDGSSYLDSGTRRAGAAVVDGHNTIWAQSLPPGTSAQKAELIALTKALELSKGKKANIYTDSRYAFATAHTHGSIYERRGWLTSEGKEIKNKAEIIALLKALFLPQEVAIIHCPGHQKGQDPVAVGNRQADRVARQAAMAEVLTLATEPDNTSHITAGKRTADGSEFEKRTADGSEFESPKKKAKVE

SEQ ID NO: 6900 - protein, 2087 aa, synthetic construct
MPAAKRVKLDGGDKKYSIGLDIGTNSVGWAVITDEYKVPSKKFKVLGNTDRHSIKKNLIGALLFDSGETAEATRLKRTARRRYTRRKNRICYLQEIFSNEMAKVDDSFFHRLEESFLVEEDKKHERHPIFGNIVDEVAYHEKYPTIYHLRKKLVDSTDKADLRLIYLALAHMIKFRGHFLIEGDLNPDNSDVDKLFIQLVQTYNQLFEENPINASGVDAKAILSARLSKSRRLENLIAQLPGEKKNGLFGNLIALSLGLTPNFKSNFDLAEDAKLQLSKDTYDDDLDNLLAQIGDQYADLFLAAKNLSDAILLSDILRVNTEITKAPLSASMIKRYDEHHQDLTLLKALVRQQLPEKYKEIFFDQSKNGYAGYIDGGASQEEFYKFIKPILEKMDGTEELLVKLNREDLLRKQRTFDNGSIPHQIHLGELHAILRRQEDFYPFLKDNREKIEKILTFRIPYYVGPLARGNSRFAWMTRKSEETITPWNFEEVVDKGASAQSFIERMTNFDKNLPNEKVLPKHSLLYEYFTVYNELTKVKYVTEGMRKPAFLSGEQKKAIVDLLFKTNRKVTVKQLKEDYFKKIECFDSVEISGVEDRFNASLGTYHDLLKIIKDKDFLDNEENEDILEDIVLTLTLFEDREMIEERLKTYAHLFDDKVMKQLKRRRYTGWGRLSRKLINGIRDKQSGKTILDFLKSDGFANRNFMQLIHDDSLTFKEDIQKAQVSGQGDSLHEHIANLAGSPAIKKGILQTVKVVDELVKVMGRHKPENIVIEMARENQTTQKGQKNSRERMKRIEEGIKELGSQILKEHPVENTQLQNEKLYLYYLQNGRDMYVDQELDINRLSDYDVDHIVPQSFLKDDSIDNKVLTRSDKARGKSDNVPSEEVVKKMKNYWRQLLNAKLITQRKFDNLTKAERGGLSELDKAGFIKRQLVETRQITKHVAQILDSRMNTKYDENDKLIREVKVITLKSKLVSDFRKDFQFYKVREINNYHHAHDAYLNAVVGTALIKKYPKLESEFVYGDYKVYDVRKMIAKSEQEIGKATAKYFFYSNIMNFFKTEITLANGEIRKRPLIETNGETGEIVWDKGRDFATVRKVLSMPQVNIVKKTEVQTGGFSKESILPKRNSDKLIARKKDWDPKKYGGFDSPTVAYSVLVVAKVEKGKSKKLKSVKELLGITIMERSSFEKNPIDFLEAKGYKEVKKDLIIKLPKYSLFELENGRKRMLASAGELQKGNELALPSKYVNFLYLASHYEKLKGSPEDNEQKQLFVEQHKHYLDEIIEQISEFSKRVILADANLDKVLSAYNKHRDKPIREQAENIIHLFTLTNLGAPAAFKYFDTTIDRKRYTSTKEVLDATLIHQSITGLYETRIDLSQLGGDGGGGSEAAAKGGGGGVPWILKKPLELTIKLDLEEQQGTLLNNSILSKKGKEELKQLFEKYSALWQSWENQVGHRRIRPHKIATGTVKPTPQKQYHINPKAKPDIQIVINDLLKQGVLIQKESTMNTPVYPVPKPNGRWRMVLDYRAVNKVTPLIAVQNQHSYGILGSLFKGRYKTTIDLSNGFWAHPIVPEDYWITAFTWQGKQYCWTVLPQGFLNSPGLFTGDVVDLLQGIPNVEVYVDDVYISHDSEKEHLEYLDILFNRLKEAGYIISLKKSNIANSIVDFLGFQITNEGRGLTDTFKEKLENITAPTTLKQLQSILGLLNFARNFIPDFTELIAPLYALIPKSTKNYVPWQIEHSTTLETLITKLNGAEYLQGRKGDKTLIMKVNASYTTGYIRYYNEGEKKPISYVSIVFSKTELKFTELEKLLTTVHKGLLKALDLSMGQNIHVYSPIVSMQNIQKTPQTAKKALASRWLSWLSYLEDPRIRFFYDPQMPALKDLPAVDTGKDNKKHPSNFQHIFYTDGSAITSPTKEGHLNAGMGIVYFINKDGNLQKQQEWSISLGNHTAQFAEIAAFEFALKKCLPLGGNILVVTDSNYVAKAYNEELDVWASNGFVNNRKKPLKHISKWKSVADLKRLRPDVVVTHEPGHQKLDSSPHAYGNNLADQLATQASFKVHAGKRTADGSEFEKRTADGSEFESPKKKAKVE

SEQ ID NO: 6901 - protein, 2096 aa, synthetic construct
MPAAKRVKLDGGDKKYSIGLDIGTNSVGWAVITDEYKVPSKKFKVLGNTDRHSIKKNLIGALLFDSGETAEATRLKRTARRRYTRRKNRICYLQEIFSNEMAKVDDSFFHRLEESFLVEEDKKHERHPIFGNIVDEVAYHEKYPTIYHLRKKLVDSTDKADLRLIYLALAHMIKFRGHFLIEGDLNPDNSDVDKLFIQLVQTYNQLFEENPINASGVDAKAILSARLSKSRRLENLIAQLPGEKKNGLFGNLIALSLGLTPNFKSNFDLAEDAKLQLSKDTYDDDLDNLLAQIGDQYADLFLAAKNLSDAILLSDILRVNTEITKAPLSASMIKRYDEHHQDLTLLKALVRQQLPEKYKEIFFDQSKNGYAGYIDGGASQEEFYKFIKPILEKMDGTEELLVKLNREDLLRKQRTFDNGSIPHQIHLGELHAILRRQEDFYPFLKDNREKIEKILTFRIPYYVGPLARGNSRFAWMTRKSEETITPWNFEEVVDKGASAQSFIERMTNFDKNLPNEKVLPKHSLLYEYFTVYNELTKVKYVTEGMRKPAFLSGEQKKAIVDLLFKTNRKVTVKQLKEDYFKKIECFDSVEISGVEDRFNASLGTYHDLLKIIKDKDFLDNEENEDILEDIVLTLTLFEDREMIEERLKTYAHLFDDKVMKQLKRRRYTGWGRLSRKLINGIRDKQSGKTILDFLKSDGFANRNFMQLIHDDSLTFKEDIQKAQVSGQGDSLHEHIANLAGSPAIKKGILQTVKVVDELVKVMGRHKPENIVIEMARENQTTQKGQKNSRERMKRIEEGIKELGSQILKEHPVENTQLQNEKLYLYYLQNGRDMYVDQELDINRLSDYDVDHIVPQSFLKDDSIDNKVLTRSDKARGKSDNVPSEEVVKKMKNYWRQLLNAKLITQRKFDNLTKAERGGLSELDKAGFIKRQLVETRQITKHVAQILDSRMNTKYDENDKLIREVKVITLKSKLVSDFRKDFQFYKVREINNYHHAHDAYLNAVVGTALIKKYPKLESEFVYGDYKVYDVRKMIAKSEQEIGKATAKYFFYSNIMNFFKTEITLANGEIRKRPLIETNGETGEIVWDKGRDFATVRKVLSMPQVNIVKKTEVQTGGFSKESILPKRNSDKLIARKKDWDPKKYGGFDSPTVAYSVLVVAKVEKGKSKKLKSVKELLGITIMERSSFEKNPIDFLEAKGYKEVKKDLIIKLPKYSLFELENGRKRMLASAGELQKGNELALPSKYVNFLYLASHYEKLKGSPEDNEQKQLFVEQHKHYLDEIIEQISEFSKRVILADANLDKVLSAYNKHRDKPIREQAENIIHLFTLTNLGAPAAFKYFDTTIDRKRYTSTKEVLDATLIHQSITGLYETRIDLSQLGGDGGGGSEAAAKGGGGGTLNLEDEYRLYETSAEPEVSPGSTWLSDFPQAWAETGGMGLAVRQAPLIIPLKATSTPVSIKQYPMSQEAKLGIKPHIQRLLDQGILVPCQSPWNTPLLPVKKPGTNDYRPVQDLREVNKRVEDIHPTVPNPYNLLSGLPPSHRWYTVLDLKDAFFCLRLHPTSQPLFAFEWRDPGMGISGQLTWTRLPQGFKNSPTLFNEALHRDLADFRIQHPDLILLQYVDDILLAATSELDCQQGTRALLLTLGNLGYRASAKKAQLCQKQVKYLGYLLKEGQRWLTEARKETVMGQPTPKTPRQLREFLGTAGFCRLWIPGFAEMAAPLYPLTKPGTLFNWGPDQQKAYQEIKQALLTAPALGLPDLTKPFELFVDEKQGYAKGVLTQKLGPWRRPVAYLSKKLDPVAAGWPPCLRMVAAIAVLRKDAGKLTMGQPLVILAPHAVEALVKQPPDRWLSNARMTHYQAMLLDTDRVQFGPVVALNPATLLPLPEEGAPHDCLEILAETHGTRPDLTDQPIPDADHTWYTDGSSFLQEGQRKAGAAVTTETEVIWARALPAGTSAQRAELIALTQALKMAEGKRLNVYTDSRYAFATAHIHGEIYRRRGWLTSEGREIKNKSEILALLKALFLPKRLSIIHCLGHQKGDSAEARGNRLADQAAREAAIKTPPDTSTLLAGKRTADGSEFEKRTADGSEFESPKKKAKVE

SEQ ID NO: 6902 - protein, 2096 aa, synthetic construct
MPAAKRVKLDGGDKKYSIGLDIGTNSVGWAVITDEYKVPSKKFKVLGNTDRHSIKKNLIGALLFDSGETAEATRLKRTARRRYTRRKNRICYLQEIFSNEMAKVDDSFFHRLEESFLVEEDKKHERHPIFGNIVDEVAYHEKYPTIYHLRKKLVDSTDKADLRLIYLALAHMIKFRGHFLIEGDLNPDNSDVDKLFIQLVQTYNQLFEENPINASGVDAKAILSARLSKSRRLENLIAQLPGEKKNGLFGNLIALSLGLTPNFKSNFDLAEDAKLQLSKDTYDDDLDNLLAQIGDQYADLFLAAKNLSDAILLSDILRVNTEITKAPLSASMIKRYDEHHQDLTLLKALVRQQLPEKYKEIFFDQSKNGYAGYIDGGASQEEFYKFIKPILEKMDGTEELLVKLNREDLLRKQRTFDNGSIPHQIHLGELHAILRRQEDFYPFLKDNREKIEKILTFRIPYYVGPLARGNSRFAWMTRKSEETITPWNFEEVVDKGASAQSFIERMTNFDKNLPNEKVLPKHSLLYEYFTVYNELTKVKYVTEGMRKPAFLSGEQKKAIVDLLFKTNRKVTVKQLKEDYFKKIECFDSVEISGVEDRFNASLGTYHDLLKIIKDKDFLDNEENEDILEDIVLTLTLFEDREMIEERLKTYAHLFDDKVMKQLKRRRYTGWGRLSRKLINGIRDKQSGKTILDFLKSDGFANRNFMQLIHDDSLTFKEDIQKAQVSGQGDSLHEHIANLAGSPAIKKGILQTVKVVDELVKVMGRHKPENIVIEMARENQTTQKGQKNSRERMKRIEEGIKELGSQILKEHPVENTQLQNEKLYLYYLQNGRDMYVDQELDINRLSDYDVDHIVPQSFLKDDSIDNKVLTRSDKARGKSDNVPSEEVVKKMKNYWRQLLNAKLITQRKFDNLTKAERGGLSELDKAGFIKRQLVETRQITKHVAQILDSRMNTKYDENDKLIREVKVITLKSKLVSDFRKDFQFYKVREINNYHHAHDAYLNAVVGTALIKKYPKLESEFVYGDYKVYDVRKMIAKSEQEIGKATAKYFFYSNIMNFFKTEITLANGEIRKRPLIETNGETGEIVWDKGRDFATVRKVLSMPQVNIVKKTEVQTGGFSKESILPKRNSDKLIARKKDWDPKKYGGFDSPTVAYSVLVVAKVEKGKSKKLKSVKELLGITIMERSSFEKNPIDFLEAKGYKEVKKDLIIKLPKYSLFELENGRKRMLASAGELQKGNELALPSKYVNFLYLASHYEKLKGSPEDNEQKQLFVEQHKHYLDEIIEQISEFSKRVILADANLDKVLSAYNKHRDKPIREQAENIIHLFTLTNLGAPAAFKYFDTTIDRKRYTSTKEVLDATLIHQSITGLYETRIDLSQLGGDGGGGSEAAAKGGGGGTLNIEDEYRLHETSKGPDVPLGSTWLSDFPQAWAETGGMGLAVRQAPLIIPLKATSTPVSIKQYPMSQEARLGIKPHIQRLLDQGILVPCQSPWNTPLLPVKKPGTNDYRPVQDLREVNKRVEDIHPTVPNPYNLLSGLPPSHQWYTVLDLKDAFFCLRLHPTSQSLFAFEWRDPEMGISGQLTWTRLPQGFKNSPTLFNEALHRDLADFRIQHPDLILLQYVDDLLLAATSELDCQQGTRALLQTLGDLGYRASAKKAQICQKQVKYLGYLLKEGQRWLTEARKETVMGQPTPKTPRQLREFLGTAGFCRLWIPGFAEMAAPLYPLTKPGTLFEWGPDQQKAYQEIKQALLTAPALGLPDLTKPFELFVDEKQGYAKGVLTQKLGPWRRPVAYLSKKLDPVAAGWPPCLRMVAAIAVLTKDAGKLTMGQPLVILAPHAVEALVKQPPDRWLSNARMTHYQALLLDTDRVQFGPIVALNPATLLPLPEEGLQHDCLDILAEAHGTRPDLTDQPLPDADHTWYTDGSSFLQEGQRKAGAAVTTETEVVWAKALPAGTSAQRAELIALTQALKMAEGKKLNVYTDSRYAFATAHIHGEIYRRRGWLTSEGKEIKNKDEILALLKALFLPKRLSIIHCPGHQKGNRAEARGNRMADQAAREVATRETPETSTLLAGKRTADGSEFEKRTADGSEFESPKKKAKVE

SEQ ID NO: 6903 - protein, 2096 aa, synthetic construct
MPAAKRVKLDGGDKKYSIGLDIGTNSVGWAVITDEYKVPSKKFKVLGNTDRHSIKKNLIGALLFDSGETAEATRLKRTARRRYTRRKNRICYLQEIFSNEMAKVDDSFFHRLEESFLVEEDKKHERHPIFGNIVDEVAYHEKYPTIYHLRKKLVDSTDKADLRLIYLALAHMIKFRGHFLIEGDLNPDNSDVDKLFIQLVQTYNQLFEENPINASGVDAKAILSARLSKSRRLENLIAQLPGEKKNGLFGNLIALSLGLTPNFKSNFDLAEDAKLQLSKDTYDDDLDNLLAQIGDQYADLFLAAKNLSDAILLSDILRVNTEITKAPLSASMIKRYDEHHQDLTLLKALVRQQLPEKYKEIFFDQSKNGYAGYIDGGASQEEFYKFIKPILEKMDGTEELLVKLNREDLLRKQRTFDNGSIPHQIHLGELHAILRRQEDFYPFLKDNREKIEKILTFRIPYYVGPLARGNSRFAWMTRKSEETITPWNFEEVVDKGASAQSFIERMTNFDKNLPNEKVLPKHSLLYEYFTVYNELTKVKYVTEGMRKPAFLSGEQKKAIVDLLFKTNRKVTVKQLKEDYFKKIECFDSVEISGVEDRFNASLGTYHDLLKIIKDKDFLDNEENEDILEDIVLTLTLFEDREMIEERLKTYAHLFDDKVMKQLKRRRYTGWGRLSRKLINGIRDKQSGKTILDFLKSDGFANRNFMQLIHDDSLTFKEDIQKAQVSGQGDSLHEHIANLAGSPAIKKGILQTVKVVDELVKVMGRHKPENIVIEMARENQTTQKGQKNSRERMKRIEEGIKELGSQILKEHPVENTQLQNEKLYLYYLQNGRDMYVDQELDINRLSDYDVDHIVPQSFLKDDSIDNKVLTRSDKARGKSDNVPSEEVVKKMKNYWRQLLNAKLITQRKFDNLTKAERGGLSELDKAGFIKRQLVETRQITKHVAQILDSRMNTKYDENDKLIREVKVITLKSKLVSDFRKDFQFYKVREINNYHHAHDAYLNAVVGTALIKKYPKLESEFVYGDYKVYDVRKMIAKSEQEIGKATAKYFFYSNIMNFFKTEITLANGEIRKRPLIETNGETGEIVWDKGRDFATVRKVLSMPQVNIVKKTEVQTGGFSKESILPKRNSDKLIARKKDWDPKKYGGFDSPTVAYSVLVVAKVEKGKSKKLKSVKELLGITIMERSSFEKNPIDFLEAKGYKEVKKDLIIKLPKYSLFELENGRKRMLASAGELQKGNELALPSKYVNFLYLASHYEKLKGSPEDNEQKQLFVEQHKHYLDEIIEQISEFSKRVILADANLDKVLSAYNKHRDKPIREQAENIIHLFTLTNLGAPAAFKYFDTTIDRKRYTSTKEVLDATLIHQSITGLYETRIDLSQLGGDGGGGSEAAAKGGGGGTLNIEDEYRLHEISTEPDVSPGSTWLSDFPQAWAETGGMGLAVRQAPLIIPLKATSTPVSIKQYPMSQEAKLGIKPHIQRLLDQGILVPCQSPWNTPLLPVKKPGTNDYRPVQGLREVNKRVEDIHPTVPNPYNLLSGLPTSHRWYTVLDLKDAFFCLRLHPTSQPLFASEWRDPGMGISGQLTWTRLPQGFKNSPTLFNEALHRGLADFRIQHPDLILLQYVDDLLLAATSELDCQQGTRALLKTLGNLGYRASAKKAQICQKQVKYLGYLLREGQRWLTEARKETVMGQPTPKTPRQLREFLGTAGFCRLWIPRFAEMAAPLYPLTKPGTLFNWGPDQQKAYHEIKQALLTAPALGLPDLTKPFELFVDEKQGYAKGVLTQKLGPWRRPVAYLSKKLDPVAAGWPPCLRMVAAIAVLTKDAGKLTMGQPLVILAPHAVEALVKQPPDRWLSNARMTHYQAMLLDTDRVQFGPVVALNPATLLPLPEEGAPHDCLEILAETHGTEPDLTDQPIPDADHTWYTDGSSFLQEGQRKAGAAVTTETEVIWARALPAGTSAQRAELIALTQALKMAEGKRLNVYTDSRYAFATAHIHGEIYKRRGWLTSEGREIKNKSEILALLKALFLPKRLSIIHCLGHQKGDSAEARGNRLADQAAREAAIKTPPDTSTLLAGKRTADGSEFEKRTADGSEFESPKKKAKVE

SEQ ID NO: 6904 - protein, 2090 aa, synthetic construct
MPAAKRVKLDGGDKKYSIGLDIGTNSVGWAVITDEYKVPSKKFKVLGNTDRHSIKKNLIGALLFDSGETAEATRLKRTARRRYTRRKNRICYLQEIFSNEMAKVDDSFFHRLEESFLVEEDKKHERHPIFGNIVDEVAYHEKYPTIYHLRKKLVDSTDKADLRLIYLALAHMIKFRGHFLIEGDLNPDNSDVDKLFIQLVQTYNQLFEENPINASGVDAKAILSARLSKSRRLENLIAQLPGEKKNGLFGNLIALSLGLTPNFKSNFDLAEDAKLQLSKDTYDDDLDNLLAQIGDQYADLFLAAKNLSDAILLSDILRVNTEITKAPLSASMIKRYDEHHQDLTLLKALVRQQLPEKYKEIFFDQSKNGYAGYIDGGASQEEFYKFIKPILEKMDGTEELLVKLNREDLLRKQRTFDNGSIPHQIHLGELHAILRRQEDFYPFLKDNREKIEKILTFRIPYYVGPLARGNSRFAWMTRKSEETITPWNFEEVVDKGASAQSFIERMTNFDKNLPNEKVLPKHSLLYEYFTVYNELTKVKYVTEGMRKPAFLSGEQKKAIVDLLFKTNRKVTVKQLKEDYFKKIECFDSVEISGVEDRFNASLGTYHDLLKIIKDKDFLDNEENEDILEDIVLTLTLFEDREMIEERLKTYAHLFDDKVMKQLKRRRYTGWGRLSRKLINGIRDKQSGKTILDFLKSDGFANRNFMQLIHDDSLTFKEDIQKAQVSGQGDSLHEHIANLAGSPAIKKGILQTVKVVDELVKVMGRHKPENIVIEMARENQTTQKGQKNSRERMKRIEEGIKELGSQILKEHPVENTQLQNEKLYLYYLQNGRDMYVDQELDINRLSDYDVDHIVPQSFLKDDSIDNKVLTRSDKARGKSDNVPSEEVVKKMKNYWRQLLNAKLITQRKFDNLTKAERGGLSELDKAGFIKRQLVETRQITKHVAQILDSRMNTKYDENDKLIREVKVITLKSKLVSDFRKDFQFYKVREINNYHHAHDAYLNAVVGTALIKKYPKLESEFVYGDYKVYDVRKMIAKSEQEIGKATAKYFFYSNIMNFFKTEITLANGEIRKRPLIETNGETGEIVWDKGRDFATVRKVLSMPQVNIVKKTEVQTGGFSKESILPKRNSDKLIARKKDWDPKKYGGFDSPTVAYSVLVVAKVEKGKSKKLKSVKELLGITIMERSSFEKNPIDFLEAKGYKEVKKDLIIKLPKYSLFELENGRKRMLASAGELQKGNELALPSKYVNFLYLASHYEKLKGSPEDNEQKQLFVEQHKHYLDEIIEQISEFSKRVILADANLDKVLSAYNKHRDKPIREQAENIIHLFTLTNLGAPAAFKYFDTTIDRKRYTSTKEVLDATLIHQSITGLYETRIDLSQLGGDGGGGSEAAAKGGGGGTLQLDDEYRLYSPLVKPDQNIQFWLEQFPQAWAETAGMGLAKQVPPQVIQLKASATPVSVRQYPLSKEAQEGIRPHVQRLIQQGILVPVQSPWNTPLLPVRKPGTNDYRPVQDLREVNKRVQDIHPTVPNPYNLLCALPPQRSWYTVLDLKDAFFCLRLHPTSQPLFAFEWRDPGTGRTGQLTWTRLPQGFKNSPTIFDEALHRDLANFRIQHPQVTLLQYVDDLLLAGATKQDCLEGTKALLLELSDLGYRASAKKAQICRREVTYLGYSLRDGQRWLTEARKKTVVQIPAPTTAKQVREFLGTAGFCRLWIPGFATLAAPLYPLTKEKGEFSWAPEHQKAFDAIKKALLSAPALALPDVTKPFTLYVDERKGVARGVLTQTLGPWRRPVAYLSKKLDPVASGWPVCLKAIAAVAILVKDADKLTLGQNITVIAPHALENIVRQPPDRWMTNARMTHYQSLLLTERVTFAPPAALNPATLLPEETDEPVTHDCHQLLIEETGVRKDLTDIPLTGEVLTWFTDGSSYVVEGKRMAGAAVVDGTRTIWASSLPEGTSAQKAELMALTQALRLAEGKSINIYTDSRYAFATAHVHGAIYKQRGLLTSAGREIKNKEEILSLLEALHLPKRLAIIHCPGHQKAKDPISRGNQMADRVAKQAAQGVNLLAGKRTADGSEFEKRTADGSEFESPKKKAKVE

SEQ ID NO: 6905 - protein, 2096 aa, synthetic construct
MPAAKRVKLDGGDKKYSIGLDIGTNSVGWAVITDEYKVPSKKFKVLGNTDRHSIKKNLIGALLFDSGETAEATRLKRTARRRYTRRKNRICYLQEIFSNEMAKVDDSFFHRLEESFLVEEDKKHERHPIFGNIVDEVAYHEKYPTIYHLRKKLVDSTDKADLRLIYLALAHMIKFRGHFLIEGDLNPDNSDVDKLFIQLVQTYNQLFEENPINASGVDAKAILSARLSKSRRLENLIAQLPGEKKNGLFGNLIALSLGLTPNFKSNFDLAEDAKLQLSKDTYDDDLDNLLAQIGDQYADLFLAAKNLSDAILLSDILRVNTEITKAPLSASMIKRYDEHHQDLTLLKALVRQQLPEKYKEIFFDQSKNGYAGYIDGGASQEEFYKFIKPILEKMDGTEELLVKLNREDLLRKQRTFDNGSIPHQIHLGELHAILRRQEDFYPFLKDNREKIEKILTFRIPYYVGPLARGNSRFAWMTRKSEETITPWNFEEVVDKGASAQSFIERMTNFDKNLPNEKVLPKHSLLYEYFTVYNELTKVKYVTEGMRKPAFLSGEQKKAIVDLLFKTNRKVTVKQLKEDYFKKIECFDSVEISGVEDRFNASLGTYHDLLKIIKDKDFLDNEENEDILEDIVLTLTLFEDREMIEERLKTYAHLFDDKVMKQLKRRRYTGWGRLSRKLINGIRDKQSGKTILDFLKSDGFANRNFMQLIHDDSLTFKEDIQKAQVSGQGDSLHEHIANLAGSPAIKKGILQTVKVVDELVKVMGRHKPENIVIEMARENQTTQKGQKNSRERMKRIEEGIKELGSQILKEHPVENTQLQNEKLYLYYLQNGRDMYVDQELDINRLSDYDVDHIVPQSFLKDDSIDNKVLTRSDKARGKSDNVPSEEVVKKMKNYWRQLLNAKLITQRKFDNLTKAERGGLSELDKAGFIKRQLVETRQITKHVAQILDSRMNTKYDENDKLIREVKVITLKSKLVSDFRKDFQFYKVREINNYHHAHDAYLNAVVGTALIKKYPKLESEFVYGDYKVYDVRKMIAKSEQEIGKATAKYFFYSNIMNFFKTEITLANGEIRKRPLIETNGETGEIVWDKGRDFATVRKVLSMPQVNIVKKTEVQTGGFSKESILPKRNSDKLIARKKDWDPKKYGGFDSPTVAYSVLVVAKVEKGKSKKLKSVKELLGITIMERSSFEKNPIDFLEAKGYKEVKKDLIIKLPKYSLFELENGRKRMLASAGELQKGNELALPSKYVNFLYLASHYEKLKGSPEDNEQKQLFVEQHKHYLDEIIEQISEFSKRVILADANLDKVLSAYNKHRDKPIREQAENIIHLFTLTNLGAPAAFKYFDTTIDRKRYTSTKEVLDATLIHQSITGLYETRIDLSQLGGDGGGGSEAAAKGGGGGTLNIEDEYRLHETSKEPDVPLGSTWLSDFPQAWAETGGMGLAVRQAPLIIPLKATSTPVSIKQYPMSQEARLGIKPHIQRLLDQGILVPCQSPWNTPLLPVKKPGTNDYRPVQDLREVNKRVEDIHPTVPNPYNLLSGLPPSHQWYTVLDLKDAFFCLRLHPTSQPLFAFEWRDPEMGISGQLTWTRLPQGFKNSPTLFDEALHRDLADFRIQHPDLILLQYVDDLLLAATSEQDCQRGTRALLQTLGNLGYRASAKKAQICQKQVKYLGYLLKEGQRWLTEARKETVMGQPTPKTPRQLREFLGTAGFCRLWIPGFAEMAAPLYPLTKTGTLFNWGPDQQKAYQEIKQALLTAPALGLPDLTKPFELFVDEKQGYAKGVLTQKLGPWRRPVAYLSKKLDPVAAGWPPCLRMVAAIAVLTKDAGKLTMGQPLVILAPHAVEALVKQPPDRWLSNARMTHYQAMLLDTDRVQFGPVVALNPATLLPLPEKEAPHDCLEILAETHGTRPDLTDQPIPDADYTWYTDGSSFLQEGQRRAGAAVTTETEVIWARALPAGTSAQRAELIALTQALKMAEGKKLNVYTDSRYAFATAHVHGEIYRRRGLLTSEGREIKNKNEILALLKALFLPKRLSIIHCPGHQKGNSAEARGNRMADQAAREAAMKAVLETSTLLAGKRTADGSEFEKRTADGSEFESPKKKAKVE

SEQ ID NO: 6906 - protein, 2096 aa, synthetic construct
MPAAKRVKLDGGDKKYSIGLDIGTNSVGWAVITDEYKVPSKKFKVLGNTDRHSIKKNLIGALLFDSGETAEATRLKRTARRRYTRRKNRICYLQEIFSNEMAKVDDSFFHRLEESFLVEEDKKHERHPIFGNIVDEVAYHEKYPTIYHLRKKLVDSTDKADLRLIYLALAHMIKFRGHFLIEGDLNPDNSDVDKLFIQLVQTYNQLFEENPINASGVDAKAILSARLSKSRRLENLIAQLPGEKKNGLFGNLIALSLGLTPNFKSNFDLAEDAKLQLSKDTYDDDLDNLLAQIGDQYADLFLAAKNLSDAILLSDILRVNTEITKAPLSASMIKRYDEHHQDLTLLKALVRQQLPEKYKEIFFDQSKNGYAGYIDGGASQEEFYKFIKPILEKMDGTEELLVKLNREDLLRKQRTFDNGSIPHQIHLGELHAILRRQEDFYPFLKDNREKIEKILTFRIPYYVGPLARGNSRFAWMTRKSEETITPWNFEEVVDKGASAQSFIERMTNFDKNLPNEKVLPKHSLLYEYFTVYNELTKVKYVTEGMRKPAFLSGEQKKAIVDLLFKTNRKVTVKQLKEDYFKKIECFDSVEISGVEDRFNASLGTYHDLLKIIKDKDFLDNEENEDILEDIVLTLTLFEDREMIEERLKTYAHLFDDKVMKQLKRRRYTGWGRLSRKLINGIRDKQSGKTILDFLKSDGFANRNFMQLIHDDSLTFKEDIQKAQVSGQGDSLHEHIANLAGSPAIKKGILQTVKVVDELVKVMGRHKPENIVIEMARENQTTQKGQKNSRERMKRIEEGIKELGSQILKEHPVENTQLQNEKLYLYYLQNGRDMYVDQELDINRLSDYDVDHIVPQSFLKDDSIDNKVLTRSDKARGKSDNVPSEEVVKKMKNYWRQLLNAKLITQRKFDNLTKAERGGLSELDKAGFIKRQLVETRQITKHVAQILDSRMNTKYDENDKLIREVKVITLKSKLVSDFRKDFQFYKVREINNYHHAHDAYLNAVVGTALIKKYPKLESEFVYGDYKVYDVRKMIAKSEQEIGKATAKYFFYSNIMNFFKTEITLANGEIRKRPLIETNGETGEIVWDKGRDFATVRKVLSMPQVNIVKKTEVQTGGFSKESILPKRNSDKLIARKKDWDPKKYGGFDSPTVAYSVLVVAKVEKGKSKKLKSVKELLGITIMERSSFEKNPIDFLEAKGYKEVKKDLIIKLPKYSLFELENGRKRMLASAGELQKGNELALPSKYVNFLYLASHYEKLKGSPEDNEQKQLFVEQHKHYLDEIIEQISEFSKRVILADANLDKVLSAYNKHRDKPIREQAENIIHLFTLTNLGAPAAFKYFDTTIDRKRYTSTKEVLDATLIHQSITGLYETRIDLSQLGGDGGGGSEAAAKGGGGGTLNIEDEYRLHETSKEPDVPLGSTWLSDFPQAWAETGGMGLAVRQAPLIIPLKATSTPVSIKQYPMSQEARLGIKPHIQRLLDQGILVPCQSPWNTPLLPVKKPGTNDYRPVQDLREVNKRVEDIHPTVPNPYNLLSGLPPSHQWYTVLDLKDAFFCLRLHPTSQPLFAFEWRDPEMGISGQLTWTRLPQGFKNSPTLFNEALHRDLADFRIQHPDLILLQYVDDLLLAATSEQDCQRGTRALLQTLGNLGYRASAKKAQICQKQVKYLGYLLKEGQRWLTEARKETVMGQPTPKTPRQLREFLGTAGFCRLWIPGFAEMAAPLYPLTKPGTLFNWGPDQQKAYQEIKQALLTAPALGLPDLTKPFELFVDEKQGYAKGVLTQKLGPWRRPVAYLSKKLDPVAAGWPPCLRMVAAIAVLTKDAGKLTMGQPLVILAPHAVEALVKQPPDRWLSNARMTHYQAMLLDTDRVQFGPVVALNPATLLPLPEKEAPHDCLEILAETHGTRPDLTDQPIPDADYTWYTDGSSFLQEGQRRAGAAVTTETEVIWARALPAGTSAQRAELIALTQALKMAEGKKLNVYTDSRYAFATAHVHGEIYRRRGWLTSEGREIKNKNEILALLKALFLPKRLSIIHCPGHQKGNSAEARGNRMADQAAREAAMKAVLETSTLLAGKRTADGSEFEKRTADGSEFESPKKKAKVE

SEQ ID NO: 6907 - protein, 2098 aa, synthetic construct
MPAAKRVKLDGGDKKYSIGLDIGTNSVGWAVITDEYKVPSKKFKVLGNTDRHSIKKNLIGALLFDSGETAEATRLKRTARRRYTRRKNRICYLQEIFSNEMAKVDDSFFHRLEESFLVEEDKKHERHPIFGNIVDEVAYHEKYPTIYHLRKKLVDSTDKADLRLIYLALAHMIKFRGHFLIEGDLNPDNSDVDKLFIQLVQTYNQLFEENPINASGVDAKAILSARLSKSRRLENLIAQLPGEKKNGLFGNLIALSLGLTPNFKSNFDLAEDAKLQLSKDTYDDDLDNLLAQIGDQYADLFLAAKNLSDAILLSDILRVNTEITKAPLSASMIKRYDEHHQDLTLLKALVRQQLPEKYKEIFFDQSKNGYAGYIDGGASQEEFYKFIKPILEKMDGTEELLVKLNREDLLRKQRTFDNGSIPHQIHLGELHAILRRQEDFYPFLKDNREKIEKILTFRIPYYVGPLARGNSRFAWMTRKSEETITPWNFEEVVDKGASAQSFIERMTNFDKNLPNEKVLPKHSLLYEYFTVYNELTKVKYVTEGMRKPAFLSGEQKKAIVDLLFKTNRKVTVKQLKEDYFKKIECFDSVEISGVEDRFNASLGTYHDLLKIIKDKDFLDNEENEDILEDIVLTLTLFEDREMIEERLKTYAHLFDDKVMKQLKRRRYTGWGRLSRKLINGIRDKQSGKTILDFLKSDGFANRNFMQLIHDDSLTFKEDIQKAQVSGQGDSLHEHIANLAGSPAIKKGILQTVKVVDELVKVMGRHKPENIVIEMARENQTTQKGQKNSRERMKRIEEGIKELGSQILKEHPVENTQLQNEKLYLYYLQNGRDMYVDQELDINRLSDYDVDHIVPQSFLKDDSIDNKVLTRSDKARGKSDNVPSEEVVKKMKNYWRQLLNAKLITQRKFDNLTKAERGGLSELDKAGFIKRQLVETRQITKHVAQILDSRMNTKYDENDKLIREVKVITLKSKLVSDFRKDFQFYKVREINNYHHAHDAYLNAVVGTALIKKYPKLESEFVYGDYKVYDVRKMIAKSEQEIGKATAKYFFYSNIMNFFKTEITLANGEIRKRPLIETNGETGEIVWDKGRDFATVRKVLSMPQVNIVKKTEVQTGGFSKESILPKRNSDKLIARKKDWDPKKYGGFDSPTVAYSVLVVAKVEKGKSKKLKSVKELLGITIMERSSFEKNPIDFLEAKGYKEVKKDLIIKLPKYSLFELENGRKRMLASAGELQKGNELALPSKYVNFLYLASHYEKLKGSPEDNEQKQLFVEQHKHYLDEIIEQISEFSKRVILADANLDKVLSAYNKHRDKPIREQAENIIHLFTLTNLGAPAAFKYFDTTIDRKRYTSTKEVLDATLIHQSITGLYETRIDLSQLGGDGGGGGGGSEAAAKGGTAPLEEEYRLFLEAPIQNVTLLEQWKREIPKVWAEINPPGLASTQAPIHVQLLSTALPVRVRQYPITLEAKRSLRETIRKFRAAGILRPVHSPWNTPLLPVRKSGTSEYRMVQDLREVNKRVETIHPTVPNPYTLLSLLPPDRIWYSVLDLKDAFFCIPLAPESQLIFAFEWADAEEGESGQLTWTRLPQGFKNSPTLFDEALNRDLQGFRLDHPSVSLLQYVDDLLIAADTQAACLSATRDLLMTLAELGYRVSGKKAQLCQEEVTYLGFKIHKGSRSLSNSRTQAILQIPVPKTKRQVREFLGTIGYCRLWIPGFAELAQPLYAATRGGNDPLVWGEKEEEAFQSLKLALTQPPALALPSLDKPFQLFVEETSGAAKGVLTQALGPWKRPVAYLSKRLDPVAAGWPRCLRAIAAAALLTREASKLTFGQDIEITSSHNLESLLRSPPDKWLTNARITQYQVLLLDPPRVRFKQTAALNPATLLPETDDTLPIHHCLDTLDSLTSTRPDLTDQPLAQAEATLFTDGSSYIRDGKRYAGAAVVTLDSVIWAEPLPIGTSAQKAELIALTKALEWSKDKSVNIYTDSRYAFATLHVHGMIYRERGLLTAGGKAIKNAPEILALLTAVWLPKRVAVMHCKGHQKDDAPTSTGNRRADEVAREVAIRPLSTQATISAGKRTADGSEFEKRTADGSEFESPKKKAKVE

SEQ ID NO: 6908 - protein, 2098 aa, synthetic construct
MPAAKRVKLDGGDKKYSIGLDIGTNSVGWAVITDEYKVPSKKFKVLGNTDRHSIKKNLIGALLFDSGETAEATRLKRTARRRYTRRKNRICYLQEIFSNEMAKVDDSFFHRLEESFLVEEDKKHERHPIFGNIVDEVAYHEKYPTIYHLRKKLVDSTDKADLRLIYLALAHMIKFRGHFLIEGDLNPDNSDVDKLFIQLVQTYNQLFEENPINASGVDAKAILSARLSKSRRLENLIAQLPGEKKNGLFGNLIALSLGLTPNFKSNFDLAEDAKLQLSKDTYDDDLDNLLAQIGDQYADLFLAAKNLSDAILLSDILRVNTEITKAPLSASMIKRYDEHHQDLTLLKALVRQQLPEKYKEIFFDQSKNGYAGYIDGGASQEEFYKFIKPILEKMDGTEELLVKLNREDLLRKQRTFDNGSIPHQIHLGELHAILRRQEDFYPFLKDNREKIEKILTFRIPYYVGPLARGNSRFAWMTRKSEETITPWNFEEVVDKGASAQSFIERMTNFDKNLPNEKVLPKHSLLYEYFTVYNELTKVKYVTEGMRKPAFLSGEQKKAIVDLLFKTNRKVTVKQLKEDYFKKIECFDSVEISGVEDRFNASLGTYHDLLKIIKDKDFLDNEENEDILEDIVLTLTLFEDREMIEERLKTYAHLFDDKVMKQLKRRRYTGWGRLSRKLINGIRDKQSGKTILDFLKSDGFANRNFMQLIHDDSLTFKEDIQKAQVSGQGDSLHEHIANLAGSPAIKKGILQTVKVVDELVKVMGRHKPENIVIEMARENQTTQKGQKNSRERMKRIEEGIKELGSQILKEHPVENTQLQNEKLYLYYLQNGRDMYVDQELDINRLSDYDVDHIVPQSFLKDDSIDNKVLTRSDKARGKSDNVPSEEVVKKMKNYWRQLLNAKLITQRKFDNLTKAERGGLSELDKAGFIKRQLVETRQITKHVAQILDSRMNTKYDENDKLIREVKVITLKSKLVSDFRKDFQFYKVREINNYHHAHDAYLNAVVGTALIKKYPKLESEFVYGDYKVYDVRKMIAKSEQEIGKATAKYFFYSNIMNFFKTEITLANGEIRKRPLIETNGETGEIVWDKGRDFATVRKVLSMPQVNIVKKTEVQTGGFSKESILPKRNSDKLIARKKDWDPKKYGGFDSPTVAYSVLVVAKVEKGKSKKLKSVKELLGITIMERSSFEKNPIDFLEAKGYKEVKKDLIIKLPKYSLFELENGRKRMLASAGELQKGNELALPSKYVNFLYLASHYEKLKGSPEDNEQKQLFVEQHKHYLDEIIEQISEFSKRVILADANLDKVLSAYNKHRDKPIREQAENIIHLFTLTNLGAPAAFKYFDTTIDRKRYTSTKEVLDATLIHQSITGLYETRIDLSQLGGDGGGGGGGSEAAAKGGTAPLEEEYRLFLEAPIQNVTLLEQWKREIPKVWAEINPPGLASTQAPIHVQLLSTALPVRVRQYPITLEAKRSLRETIRKFRAAGILRPVHSPWNTPLLPVRKSGTSEYRMVQDLREVNKRVETIHPTVPNPYTLLSLLPPDRIWYSVLDLKDAFFCIPLAPESQLIFAFEWADAEEGESGQLTWTRLPQGFKNSPTLFNEALNRDLQGFRLDHPSVSLLQYVDDLLIAADTQAACLSATRDLLMTLAELGYRVSGKKAQLCQEEVTYLGFKIHKGSRSLSNSRTQAILQIPVPKTKRQVREFLGTIGYCRLWIPGFAELAQPLYAATRPGNDPLVWGEKEEEAFQSLKLALTQPPALALPSLDKPFQLFVEETSGAAKGVLTQALGPWKRPVAYLSKRLDPVAAGWPRCLRAIAAAALLTREASKLTFGQDIEITSSHNLESLLRSPPDKWLTNARITQYQVLLLDPPRVRFKQTAALNPATLLPETDDTLPIHHCLDTLDSLTSTRPDLTDQPLAQAEATLFTDGSSYIRDGKRYAGAAVVTLDSVIWAEPLPIGTSAQKAELIALTKALEWSKDKSVNIYTDSRYAFATLHVHGMIYRERGWLTAGGKAIKNAPEILALLTAVWLPKRVAVMHCKGHQKDDAPTSTGNRRADEVAREVAIRPLSTQATISAGKRTADGSEFEKRTADGSEFESPKKKAKVE

SEQ ID NO: 6909 - protein, 2102 aa, synthetic construct
MPAAKRVKLDGGDKKYSIGLDIGTNSVGWAVITDEYKVPSKKFKVLGNTDRHSIKKNLIGALLFDSGETAEATRLKRTARRRYTRRKNRICYLQEIFSNEMAKVDDSFFHRLEESFLVEEDKKHERHPIFGNIVDEVAYHEKYPTIYHLRKKLVDSTDKADLRLIYLALAHMIKFRGHFLIEGDLNPDNSDVDKLFIQLVQTYNQLFEENPINASGVDAKAILSARLSKSRRLENLIAQLPGEKKNGLFGNLIALSLGLTPNFKSNFDLAEDAKLQLSKDTYDDDLDNLLAQIGDQYADLFLAAKNLSDAILLSDILRVNTEITKAPLSASMIKRYDEHHQDLTLLKALVRQQLPEKYKEIFFDQSKNGYAGYIDGGASQEEFYKFIKPILEKMDGTEELLVKLNREDLLRKQRTFDNGSIPHQIHLGELHAILRRQEDFYPFLKDNREKIEKILTFRIPYYVGPLARGNSRFAWMTRKSEETITPWNFEEVVDKGASAQSFIERMTNFDKNLPNEKVLPKHSLLYEYFTVYNELTKVKYVTEGMRKPAFLSGEQKKAIVDLLFKTNRKVTVKQLKEDYFKKIECFDSVEISGVEDRFNASLGTYHDLLKIIKDKDFLDNEENEDILEDIVLTLTLFEDREMIEERLKTYAHLFDDKVMKQLKRRRYTGWGRLSRKLINGIRDKQSGKTILDFLKSDGFANRNFMQLIHDDSLTFKEDIQKAQVSGQGDSLHEHIANLAGSPAIKKGILQTVKVVDELVKVMGRHKPENIVIEMARENQTTQKGQKNSRERMKRIEEGIKELGSQILKEHPVENTQLQNEKLYLYYLQNGRDMYVDQELDINRLSDYDVDHIVPQSFLKDDSIDNKVLTRSDKARGKSDNVPSEEVVKKMKNYWRQLLNAKLITQRKFDNLTKAERGGLSELDKAGFIKRQLVETRQITKHVAQILDSRMNTKYDENDKLIREVKVITLKSKLVSDFRKDFQFYKVREINNYHHAHDAYLNAVVGTALIKKYPKLESEFVYGDYKVYDVRKMIAKSEQEIGKATAKYFFYSNIMNFFKTEITLANGEIRKRPLIETNGETGEIVWDKGRDFATVRKVLSMPQVNIVKKTEVQTGGFSKESILPKRNSDKLIARKKDWDPKKYGGFDSPTVAYSVLVVAKVEKGKSKKLKSVKELLGITIMERSSFEKNPIDFLEAKGYKEVKKDLIIKLPKYSLFELENGRKRMLASAGELQKGNELALPSKYVNFLYLASHYEKLKGSPEDNEQKQLFVEQHKHYLDEIIEQISEFSKRVILADANLDKVLSAYNKHRDKPIREQAENIIHLFTLTNLGAPAAFKYFDTTIDRKRYTSTKEVLDATLIHQSITGLYETRIDLSQLGGDGGGGGGGSEAAAKGGTVSLQDEHRLFDIPVTTSLPDVWLQDFPQAWAETGGLGRAKCQAPIIIDLKPTAVPVSIKQYPMSLEAHMGIRQHIIKFLELGVLRPCRSPWNTPLLPVKKPGTQDYRPVQDLREINKRTVDIHPTVPNPYNLLSTLKPDYSWYTVLDLKDAFFCLPLAPQSQELFAFEWKDPERGISGQLTWTRLPQGFKNSPTLFNEALHRDLTDFRTQHPEVTLLQYVDDLLLAAPTKKACTQGTRHLLQELGEKGYRASAKKAQICQTKVTYLGYILSEGKRWLTPGRIETVARIPPPRNPREVREFLGTAGFCRLWIPGFAELAAPLYALTKPSTPFTWQTEHQLAFEALKKALLSAPALGLPDTSKPFTLFLDERQGIAKGVLTQKLGPWKRPVAYLSKKLDPVAAGWPPCLRIMAATAMLVKDSAKLTLGQPLTVITPHTLEAIVRQPPDRWITNARLTHYQALLLDTDRVQFGPPVTLNPATLLPVPENQPSPHDCRQVLAETHGTREDLKDQELPDADHTWYTDGSSYLDSGTRRAGAAVVDGHNTIWAQSLPPGTSAQKAELIALTKALELSKGKKANIYTDSRYAFATAHTHGSIYERRGWLTSEGKEIKNKAEIIALLKALFLPQEVAIIHCPGHQKGQDPVAVGNRQADRVARQAAMAEVLTLATEPDNTSHITAGKRTADGSEFEKRTADGSEFESPKKKAKVE

SEQ ID NO: 6910 - protein, 2173 aa, synthetic construct
MPAAKRVKLDGGDKKYSIGLDIGTNSVGWAVITDEYKVPSKKFKVLGNTDRHSIKKNLIGALLFDSGETAEATRLKRTARRRYTRRKNRICYLQEIFSNEMAKVDDSFFHRLEESFLVEEDKKHERHPIFGNIVDEVAYHEKYPTIYHLRKKLVDSTDKADLRLIYLALAHMIKFRGHFLIEGDLNPDNSDVDKLFIQLVQTYNQLFEENPINASGVDAKAILSARLSKSRRLENLIAQLPGEKKNGLFGNLIALSLGLTPNFKSNFDLAEDAKLQLSKDTYDDDLDNLLAQIGDQYADLFLAAKNLSDAILLSDILRVNTEITKAPLSASMIKRYDEHHQDLTLLKALVRQQLPEKYKEIFFDQSKNGYAGYIDGGASQEEFYKFIKPILEKMDGTEELLVKLNREDLLRKQRTFDNGSIPHQIHLGELHAILRRQEDFYPFLKDNREKIEKILTFRIPYYVGPLARGNSRFAWMTRKSEETITPWNFEEVVDKGASAQSFIERMTNFDKNLPNEKVLPKHSLLYEYFTVYNELTKVKYVTEGMRKPAFLSGEQKKAIVDLLFKTNRKVTVKQLKEDYFKKIECFDSVEISGVEDRFNASLGTYHDLLKIIKDKDFLDNEENEDILEDIVLTLTLFEDREMIEERLKTYAHLFDDKVMKQLKRRRYTGWGRLSRKLINGIRDKQSGKTILDFLKSDGFANRNFMQLIHDDSLTFKEDIQKAQVSGQGDSLHEHIANLAGSPAIKKGILQTVKVVDELVKVMGRHKPENIVIEMARENQTTQKGQKNSRERMKRIEEGIKELGSQILKEHPVENTQLQNEKLYLYYLQNGRDMYVDQELDINRLSDYDVDHIVPQSFLKDDSIDNKVLTRSDKARGKSDNVPSEEVVKKMKNYWRQLLNAKLITQRKFDNLTKAERGGLSELDKAGFIKRQLVETRQITKHVAQILDSRMNTKYDENDKLIREVKVITLKSKLVSDFRKDFQFYKVREINNYHHAHDAYLNAVVGTALIKKYPKLESEFVYGDYKVYDVRKMIAKSEQEIGKATAKYFFYSNIMNFFKTEITLANGEIRKRPLIETNGETGEIVWDKGRDFATVRKVLSMPQVNIVKKTEVQTGGFSKESILPKRNSDKLIARKKDWDPKKYGGFDSPTVAYSVLVVAKVEKGKSKKLKSVKELLGITIMERSSFEKNPIDFLEAKGYKEVKKDLIIKLPKYSLFELENGRKRMLASAGELQKGNELALPSKYVNFLYLASHYEKLKGSPEDNEQKQLFVEQHKHYLDEIIEQISEFSKRVILADANLDKVLSAYNKHRDKPIREQAENIIHLFTLTNLGAPAAFKYFDTTIDRKRYTSTKEVLDATLIHQSITGLYETRIDLSQLGGDGGGGGGGSEAAAKGGMDLLKPLTVERKGVKIKGYWNSQADITCVPKDLLQGEEPVRQQNVTTIHGTQEGDVYYVNLKIDGRRINTEVIGTTLDYAIITPGDVPWILKKPLELTIKLDLEEQQGTLLNNSILSKKGKEELKQLFEKYSALWQSWENQVGHRRIRPHKIATGTVKPTPQKQYHINPKAKPDIQIVINDLLKQGVLIQKESTMNTPVYPVPKPNGRWRMVLDYRAVNKVTPLIAVQNQHSYGILGSLFKGRYKTTIDLSNGFWAHPIVPEDYWITAFTWQGKQYCWTVLPQGFLNSPGLFTGDVVDLLQGIPNVEVYVDDVYISHDSEKEHLEYLDILFNRLKEAGYIISLKKSNIANSIVDFLGFQITNEGRGLTDTFKEKLENITAPTTLKQLQSILGLLNFARNFIPDFTELIAPLYALIPKSTKNYVPWQIEHSTTLETLITKLNGAEYLQGRKGDKTLIMKVNASYTTGYIRYYNEGEKKPISYVSIVFSKTELKFTELEKLLTTVHKGLLKALDLSMGQNIHVYSPIVSMQNIQKTPQTAKKALASRWLSWLSYLEDPRIRFFYDPQMPALKDLPAVDTGKDNKKHPSNFQHIFYTDGSAITSPTKEGHLNAGMGIVYFINKDGNLQKQQEWSISLGNHTAQFAEIAAFEFALKKCLPLGGNILVVTDSNYVAKAYNEELDVWASNGFVNNRKKPLKHISKWKSVADLKRLRPDVVVTHEPGHQKLDSSPHAYGNNLADQLATQASFKVHAGKRTADGSEFEKRTADGSEFESPKKKAKVE

SEQ ID NO: 6911 - protein, 2095 aa, synthetic construct
MPAAKRVKLDGGDKKYSIGLDIGTNSVGWAVITDEYKVPSKKFKVLGNTDRHSIKKNLIGALLFDSGETAEATRLKRTARRRYTRRKNRICYLQEIFSNEMAKVDDSFFHRLEESFLVEEDKKHERHPIFGNIVDEVAYHEKYPTIYHLRKKLVDSTDKADLRLIYLALAHMIKFRGHFLIEGDLNPDNSDVDKLFIQLVQTYNQLFEENPINASGVDAKAILSARLSKSRRLENLIAQLPGEKKNGLFGNLIALSLGLTPNFKSNFDLAEDAKLQLSKDTYDDDLDNLLAQIGDQYADLFLAAKNLSDAILLSDILRVNTEITKAPLSASMIKRYDEHHQDLTLLKALVRQQLPEKYKEIFFDQSKNGYAGYIDGGASQEEFYKFIKPILEKMDGTEELLVKLNREDLLRKQRTFDNGSIPHQIHLGELHAILRRQEDFYPFLKDNREKIEKILTFRIPYYVGPLARGNSRFAWMTRKSEETITPWNFEEVVDKGASAQSFIERMTNFDKNLPNEKVLPKHSLLYEYFTVYNELTKVKYVTEGMRKPAFLSGEQKKAIVDLLFKTNRKVTVKQLKEDYFKKIECFDSVEISGVEDRFNASLGTYHDLLKIIKDKDFLDNEENEDILEDIVLTLTLFEDREMIEERLKTYAHLFDDKVMKQLKRRRYTGWGRLSRKLINGIRDKQSGKTILDFLKSDGFANRNFMQLIHDDSLTFKEDIQKAQVSGQGDSLHEHIANLAGSPAIKKGILQTVKVVDELVKVMGRHKPENIVIEMARENQTTQKGQKNSRERMKRIEEGIKELGSQILKEHPVENTQLQNEKLYLYYLQNGRDMYVDQELDINRLSDYDVDHIVPQSFLKDDSIDNKVLTRSDKARGKSDNVPSEEVVKKMKNYWRQLLNAKLITQRKFDNLTKAERGGLSELDKAGFIKRQLVETRQITKHVAQILDSRMNTKYDENDKLIREVKVITLKSKLVSDFRKDFQFYKVREINNYHHAHDAYLNAVVGTALIKKYPKLESEFVYGDYKVYDVRKMIAKSEQEIGKATAKYFFYSNIMNFFKTEITLANGEIRKRPLIETNGETGEIVWDKGRDFATVRKVLSMPQVNIVKKTEVQTGGFSKESILPKRNSDKLIARKKDWDPKKYGGFDSPTVAYSVLVVAKVEKGKSKKLKSVKELLGITIMERSSFEKNPIDFLEAKGYKEVKKDLIIKLPKYSLFELENGRKRMLASAGELQKGNELALPSKYVNFLYLASHYEKLKGSPEDNEQKQLFVEQHKHYLDEIIEQISEFSKRVILADANLDKVLSAYNKHRDKPIREQAENIIHLFTLTNLGAPAAFKYFDTTIDRKRYTSTKEVLDATLIHQSITGLYETRIDLSQLGGDGGGGGGGSEAAAKGGTLQLEEEYRLFEPESTQKQEMDIWLKNFPQAWAETGGMGTAHCQAPVLIQLKATATPISIRQYPMPHEAYQGIKPHIRRMLDQGILKPCQSPWNTPLLPVKKPGTEDYRPVQDLREVNKRVEDIHPTVPNPYNLLSTLPPSHPWYTVLDLKDAFFCLRLHSESQLLFAFEWRDPEIGLSGQLTWTRLPQGFKNSPTLFNEALHSDLADFRVRYPALVLLQYVDDLLLAAATRTECLEGTKALLETLGNKGYRASAKKAQICLQEVTYLGYSLKDGQRWLTKARKEAILSIPVPKNSRQVREFLGKAGYCRLFIPGFAELAAPLYPLTRPGTLFQWGTEQQLAFEDIKKALLSSPALGLPDITKPFELFIDENSGFAKGVLVQKLGPWKRPVAYLSKKLDTVASGWPPCLRMVAAIAILVKDAGKLTLGQPLTILTSHPVEALVRQPPNKWLSNARMTHYQAMLLDAERVHFGPTVSLNPATLLPLPSGGNHHDCLQILAETHGTRPDLTDQPLPDADLTWYTDGSSFIRNGEREAGAAVTTESEVIWAAPLPPGTSAQRAELIALTQALKMAEGKKLTVYTDSRYAFATTHVHGEIYRRRGWLTSEGKEIKNKNEILALLEALFLPKRLSIIHCPGHQKGDSPQAKGNRLADDTAKKAATETHSSLTVLPAGKRTADGSEFEKRTADGSEFESPKKKAKVE

SEQ ID NO: 6912 - protein, 2176 aa, synthetic construct
MPAAKRVKLDGGDKKYSIGLDIGTNSVGWAVITDEYKVPSKKFKVLGNTDRHSIKKNLIGALLFDSGETAEATRLKRTARRRYTRRKNRICYLQEIFSNEMAKVDDSFFHRLEESFLVEEDKKHERHPIFGNIVDEVAYHEKYPTIYHLRKKLVDSTDKADLRLIYLALAHMIKFRGHFLIEGDLNPDNSDVDKLFIQLVQTYNQLFEENPINASGVDAKAILSARLSKSRRLENLIAQLPGEKKNGLFGNLIALSLGLTPNFKSNFDLAEDAKLQLSKDTYDDDLDNLLAQIGDQYADLFLAAKNLSDAILLSDILRVNTEITKAPLSASMIKRYDEHHQDLTLLKALVRQQLPEKYKEIFFDQSKNGYAGYIDGGASQEEFYKFIKPILEKMDGTEELLVKLNREDLLRKQRTFDNGSIPHQIHLGELHAILRRQEDFYPFLKDNREKIEKILTFRIPYYVGPLARGNSRFAWMTRKSEETITPWNFEEVVDKGASAQSFIERMTNFDKNLPNEKVLPKHSLLYEYFTVYNELTKVKYVTEGMRKPAFLSGEQKKAIVDLLFKTNRKVTVKQLKEDYFKKIECFDSVEISGVEDRFNASLGTYHDLLKIIKDKDFLDNEENEDILEDIVLTLTLFEDREMIEERLKTYAHLFDDKVMKQLKRRRYTGWGRLSRKLINGIRDKQSGKTILDFLKSDGFANRNFMQLIHDDSLTFKEDIQKAQVSGQGDSLHEHIANLAGSPAIKKGILQTVKVVDELVKVMGRHKPENIVIEMARENQTTQKGQKNSRERMKRIEEGIKELGSQILKEHPVENTQLQNEKLYLYYLQNGRDMYVDQELDINRLSDYDVDHIVPQSFLKDDSIDNKVLTRSDKARGKSDNVPSEEVVKKMKNYWRQLLNAKLITQRKFDNLTKAERGGLSELDKAGFIKRQLVETRQITKHVAQILDSRMNTKYDENDKLIREVKVITLKSKLVSDFRKDFQFYKVREINNYHHAHDAYLNAVVGTALIKKYPKLESEFVYGDYKVYDVRKMIAKSEQEIGKATAKYFFYSNIMNFFKTEITLANGEIRKRPLIETNGETGEIVWDKGRDFATVRKVLSMPQVNIVKKTEVQTGGFSKESILPKRNSDKLIARKKDWDPKKYGGFDSPTVAYSVLVVAKVEKGKSKKLKSVKELLGITIMERSSFEKNPIDFLEAKGYKEVKKDLIIKLPKYSLFELENGRKRMLASAGELQKGNELALPSKYVNFLYLASHYEKLKGSPEDNEQKQLFVEQHKHYLDEIIEQISEFSKRVILADANLDKVLSAYNKHRDKPIREQAENIIHLFTLTNLGAPAAFKYFDTTIDRKRYTSTKEVLDATLIHQSITGLYETRIDLSQLGGDGGGGGGGSEAAAKGGMNPLQLLQPLPAEIKGTKLLAHWNSGATITCIPESFLEDEQPIKKTLIKTIHGEKQQNVYYVTFKVKGRKVEAEVIASPYEYILLSPTDVPWLTQQPLQLTILVPLQEYQEKILSKTALPEDQKQQLKTLFVKYDNLWQHWENQVGHRKIRPHNIATGDYPPRPQKQYPINPKAKPSIQIVIDDLLKQGVLTPQNSTMNTPVYPVPKPDGRWRMVLDYREVNKTIPLTAAQNQHSAGILATIVRQKYKTTLDLANGFWAHPITPESYWLTAFTWQGKQYCWTRLPQGFLNSPALFTADVVDLLKEIPNVQVYVDDIYLSHDDPKEHVQQLEKVFQILLQAGYVVSLKKSEIGQKTVEFLGFNITKEGRGLTDTFKTKLLNITPPKDLKQLQSILGLLNFARNFIPNFAELVQPLYNLIASAKGKYIEWSEENTKQLNMVIEALNTASNLEERLPEQRLVIKVNTSPSAGYVRYYNETGKKPIMYLNYVFSKAELKFSMLEKLLTTMHKALIKAMDLAMGQEILVYSPIVSMTKIQKTPLPERKALPIRWITWMTYLEDPRIQFHYDKTLPELKHIPDVYTSSQSPVKHPSQYEGVFYTDGSAIKSPDPTKSNNAGMGIVHATYKPEYQVLNQWSIPLGNHTAQMAEIAAVEFACKKALKIPGPVLVITDSFYVAESANKELPYWKSNGFVNNKKKPLKHISKWKSIAECLSMKPDITIQHEKGISLQIPVFILKGNALADKLATQGSYVVNAGKRTADGSEFEKRTADGSEFESPKKKAKVE

SEQ ID NO: 6913 - protein, 2176 aa, synthetic construct
MPAAKRVKLDGGDKKYSIGLDIGTNSVGWAVITDEYKVPSKKFKVLGNTDRHSIKKNLIGALLFDSGETAEATRLKRTARRRYTRRKNRICYLQEIFSNEMAKVDDSFFHRLEESFLVEEDKKHERHPIFGNIVDEVAYHEKYPTIYHLRKKLVDSTDKADLRLIYLALAHMIKFRGHFLIEGDLNPDNSDVDKLFIQLVQTYNQLFEENPINASGVDAKAILSARLSKSRRLENLIAQLPGEKKNGLFGNLIALSLGLTPNFKSNFDLAEDAKLQLSKDTYDDDLDNLLAQIGDQYADLFLAAKNLSDAILLSDILRVNTEITKAPLSASMIKRYDEHHQDLTLLKALVRQQLPEKYKEIFFDQSKNGYAGYIDGGASQEEFYKFIKPILEKMDGTEELLVKLNREDLLRKQRTFDNGSIPHQIHLGELHAILRRQEDFYPFLKDNREKIEKILTFRIPYYVGPLARGNSRFAWMTRKSEETITPWNFEEVVDKGASAQSFIERMTNFDKNLPNEKVLPKHSLLYEYFTVYNELTKVKYVTEGMRKPAFLSGEQKKAIVDLLFKTNRKVTVKQLKEDYFKKIECFDSVEISGVEDRFNASLGTYHDLLKIIKDKDFLDNEENEDILEDIVLTLTLFEDREMIEERLKTYAHLFDDKVMKQLKRRRYTGWGRLSRKLINGIRDKQSGKTILDFLKSDGFANRNFMQLIHDDSLTFKEDIQKAQVSGQGDSLHEHIANLAGSPAIKKGILQTVKVVDELVKVMGRHKPENIVIEMARENQTTQKGQKNSRERMKRIEEGIKELGSQILKEHPVENTQLQNEKLYLYYLQNGRDMYVDQELDINRLSDYDVDHIVPQSFLKDDSIDNKVLTRSDKARGKSDNVPSEEVVKKMKNYWRQLLNAKLITQRKFDNLTKAERGGLSELDKAGFIKRQLVETRQITKHVAQILDSRMNTKYDENDKLIREVKVITLKSKLVSDFRKDFQFYKVREINNYHHAHDAYLNAVVGTALIKKYPKLESEFVYGDYKVYDVRKMIAKSEQEIGKATAKYFFYSNIMNFFKTEITLANGEIRKRPLIETNGETGEIVWDKGRDFATVRKVLSMPQVNIVKKTEVQTGGFSKESILPKRNSDKLIARKKDWDPKKYGGFDSPTVAYSVLVVAKVEKGKSKKLKSVKELLGITIMERSSFEKNPIDFLEAKGYKEVKKDLIIKLPKYSLFELENGRKRMLASAGELQKGNELALPSKYVNFLYLASHYEKLKGSPEDNEQKQLFVEQHKHYLDEIIEQISEFSKRVILADANLDKVLSAYNKHRDKPIREQAENIIHLFTLTNLGAPAAFKYFDTTIDRKRYTSTKEVLDATLIHQSITGLYETRIDLSQLGGDGGGGGGGSEAAAKGGMNPLQLLQPLPAEIKGTKLLAHWNSGATITCIPESFLEDEQPIKKTLIKTIHGEKQQNVYYVTFKVKGRKVEAEVIASPYEYILLSPTDVPWLTQQPLQLTILVPLQEYQEKILSKTALPEDQKQQLKTLFVKYDNLWQHWENQVGHRKIRPHNIATGDYPPRPQKQYPINPKAKPSIQIVIDDLLKQGVLTPQNSTMNTPVYPVPKPDGRWRMVLDYREVNKTIPLTAAQNQHSAGILATIVRQKYKTTLDLANGFWAHPITPESYWLTAFTWQGKQYCWTRLPQGFLNSPALFNADVVDLLKEIPNVQVYVDDIYLSHDDPKEHVQQLEKVFQILLQAGYVVSLKKSEIGQKTVEFLGFNITKEGRGLTDTFKTKLLNITPPKDLKQLQSILGKLNFARNFIPNFAELVQPLYNLIAPAKGKYIEWSEENTKQLNMVIEALNTASNLEERLPEQRLVIKVNTSPSAGYVRYYNETGKKPIMYLNYVFSKAELKFSMLEKLLTTMHKALIKAMDLAMGQEILVYSPIVSMTKIQKTPLPERKALPIRWITWMTYLEDPRIQFHYDKTLPELKHIPDVYTSSQSPVKHPSQYEGVFYTDGSAIKSPDPTKSNNAGMGIVHATYKPEYQVLNQWSIPLGNHTAQMAEIAAVEFACKKALKIPGPVLVITDSFYVAESANKELPYWKSNGFVNNKKKPLKHISKWKSIAECLSMKPDITIQHEKGISLQIPVFILKGNALADKLATQGSYVVNAGKRTADGSEFEKRTADGSEFESPKKKAKVE

SEQ ID NO: 6914 - protein, 2218 aa, synthetic construct
MPAAKRVKLDGGDKKYSIGLDIGTNSVGWAVITDEYKVPSKKFKVLGNTDRHSIKKNLIGALLFDSGETAEATRLKRTARRRYTRRKNRICYLQEIFSNEMAKVDDSFFHRLEESFLVEEDKKHERHPIFGNIVDEVAYHEKYPTIYHLRKKLVDSTDKADLRLIYLALAHMIKFRGHFLIEGDLNPDNSDVDKLFIQLVQTYNQLFEENPINASGVDAKAILSARLSKSRRLENLIAQLPGEKKNGLFGNLIALSLGLTPNFKSNFDLAEDAKLQLSKDTYDDDLDNLLAQIGDQYADLFLAAKNLSDAILLSDILRVNTEITKAPLSASMIKRYDEHHQDLTLLKALVRQQLPEKYKEIFFDQSKNGYAGYIDGGASQEEFYKFIKPILEKMDGTEELLVKLNREDLLRKQRTFDNGSIPHQIHLGELHAILRRQEDFYPFLKDNREKIEKILTFRIPYYVGPLARGNSRFAWMTRKSEETITPWNFEEVVDKGASAQSFIERMTNFDKNLPNEKVLPKHSLLYEYFTVYNELTKVKYVTEGMRKPAFLSGEQKKAIVDLLFKTNRKVTVKQLKEDYFKKIECFDSVEISGVEDRFNASLGTYHDLLKIIKDKDFLDNEENEDILEDIVLTLTLFEDREMIEERLKTYAHLFDDKVMKQLKRRRYTGWGRLSRKLINGIRDKQSGKTILDFLKSDGFANRNFMQLIHDDSLTFKEDIQKAQVSGQGDSLHEHIANLAGSPAIKKGILQTVKVVDELVKVMGRHKPENIVIEMARENQTTQKGQKNSRERMKRIEEGIKELGSQILKEHPVENTQLQNEKLYLYYLQNGRDMYVDQELDINRLSDYDVDHIVPQSFLKDDSIDNKVLTRSDKARGKSDNVPSEEVVKKMKNYWRQLLNAKLITQRKFDNLTKAERGGLSELDKAGFIKRQLVETRQITKHVAQILDSRMNTKYDENDKLIREVKVITLKSKLVSDFRKDFQFYKVREINNYHHAHDAYLNAVVGTALIKKYPKLESEFVYGDYKVYDVRKMIAKSEQEIGKATAKYFFYSNIMNFFKTEITLANGEIRKRPLIETNGETGEIVWDKGRDFATVRKVLSMPQVNIVKKTEVQTGGFSKESILPKRNSDKLIARKKDWDPKKYGGFDSPTVAYSVLVVAKVEKGKSKKLKSVKELLGITIMERSSFEKNPIDFLEAKGYKEVKKDLIIKLPKYSLFELENGRKRMLASAGELQKGNELALPSKYVNFLYLASHYEKLKGSPEDNEQKQLFVEQHKHYLDEIIEQISEFSKRVILADANLDKVLSAYNKHRDKPIREQAENIIHLFTLTNLGAPAAFKYFDTTIDRKRYTSTKEVLDATLIHQSITGLYETRIDLSQLGGDGGGGGGGSEAAAKGGTLGDQGSRGSDPLPEPRVTLTVEGIPTEFLVNTGAEHSVLTKPMGKMGSKRTVVAGATGSKVYPWTTKRLLKIGQKQVTHSFLVIPECPAPLLGRDLLTKLKAQIQFSTEGPQVTWEDRPAMCLVLNLEEEYRLHEKPVPPSIDPSWLQLFPMVWAEKAGMGLANQVPPVVVELKSDASPVAVRQYPMSKEAREGIRPHIQRFLDLGILVPCQSPWNTPLLPVKKPGTNDYRPVQDLREVNKRVQDIHPTVPNPYNLLSSLPPSHTWYSVLDLKDAFFCLKLHPNSQPLFAFEWRDPEKGNTGQLTWTRLPQGFKNSPTLFDEALHRDLASFRALNPQVVMLQYVDDLLVAAPTYRDCKEGTRRLLQELSKLGYRVSAKKAQLCREEVTYLGYLLKGGKRWLTPARKATVMKIPTPTTPRQVREFLGTAGFCRLWIPGFASLAAPLYPLTREKVPFTWTEAHQEAFGRIKEALLSAPALALPDLTKPFALYVDEKEGVARGVLTQTLGPWRRPVAYLSKKLDPVASGWPTCLKAIAAVALLLKDADKLTLGQNVLVIAPHNLESIVRQPPDRWMTNARMTHYQSLLLNERVSFAPPAILNPATLLPVESDDTPIHICSEILAEETGTRPDLRDQPLPGVPAWYTDGSSFIMDGRRQAGAAIVDNKRTVWASNLPEGTSAQKAELIALTQALRLAEGKSINIYTDSRYAFATAHVHGAIYKQRGLLTSAGKDIKNKEEILALLEAIHLPKRVAIIHCPGHQRGTDPVATGNRKADEAAKQAAQSTRILTETTKNAGKRTADGSEFEKRTADGSEFESPKKKAKVE

SEQ ID NO: 6915 - protein, 2127 aa, synthetic construct
MPAAKRVKLDGGDKKYSIGLDIGTNSVGWAVITDEYKVPSKKFKVLGNTDRHSIKKNLIGALLFDSGETAEATRLKRTARRRYTRRKNRICYLQEIFSNEMAKVDDSFFHRLEESFLVEEDKKHERHPIFGNIVDEVAYHEKYPTIYHLRKKLVDSTDKADLRLIYLALAHMIKFRGHFLIEGDLNPDNSDVDKLFIQLVQTYNQLFEENPINASGVDAKAILSARLSKSRRLENLIAQLPGEKKNGLFGNLIALSLGLTPNFKSNFDLAEDAKLQLSKDTYDDDLDNLLAQIGDQYADLFLAAKNLSDAILLSDILRVNTEITKAPLSASMIKRYDEHHQDLTLLKALVRQQLPEKYKEIFFDQSKNGYAGYIDGGASQEEFYKFIKPILEKMDGTEELLVKLNREDLLRKQRTFDNGSIPHQIHLGELHAILRRQEDFYPFLKDNREKIEKILTFRIPYYVGPLARGNSRFAWMTRKSEETITPWNFEEVVDKGASAQSFIERMTNFDKNLPNEKVLPKHSLLYEYFTVYNELTKVKYVTEGMRKPAFLSGEQKKAIVDLLFKTNRKVTVKQLKEDYFKKIECFDSVEISGVEDRFNASLGTYHDLLKIIKDKDFLDNEENEDILEDIVLTLTLFEDREMIEERLKTYAHLFDDKVMKQLKRRRYTGWGRLSRKLINGIRDKQSGKTILDFLKSDGFANRNFMQLIHDDSLTFKEDIQKAQVSGQGDSLHEHIANLAGSPAIKKGILQTVKVVDELVKVMGRHKPENIVIEMARENQTTQKGQKNSRERMKRIEEGIKELGSQILKEHPVENTQLQNEKLYLYYLQNGRDMYVDQELDINRLSDYDVDHIVPQSFLKDDSIDNKVLTRSDKARGKSDNVPSEEVVKKMKNYWRQLLNAKLITQRKFDNLTKAERGGLSELDKAGFIKRQLVETRQITKHVAQILDSRMNTKYDENDKLIREVKVITLKSKLVSDFRKDFQFYKVREINNYHHAHDAYLNAVVGTALIKKYPKLESEFVYGDYKVYDVRKMIAKSEQEIGKATAKYFFYSNIMNFFKTEITLANGEIRKRPLIETNGETGEIVWDKGRDFATVRKVLSMPQVNIVKKTEVQTGGFSKESILPKRNSDKLIARKKDWDPKKYGGFDSPTVAYSVLVVAKVEKGKSKKLKSVKELLGITIMERSSFEKNPIDFLEAKGYKEVKKDLIIKLPKYSLFELENGRKRMLASAGELQKGNELALPSKYVNFLYLASHYEKLKGSPEDNEQKQLFVEQHKHYLDEIIEQISEFSKRVILADANLDKVLSAYNKHRDKPIREQAENIIHLFTLTNLGAPAAFKYFDTTIDRKRYTSTKEVLDATLIHQSITGLYETRIDLSQLGGDGGGGGGGSEAAAKGGLLGRDLLTKLKAQIQFSTEGPQVTWEDRPAMCLVLNLEEEYRLHEKPVPPSIDPSWLQLFPMVWAEKAGMGLANQVPPVVVELKSDASPVAVRQYPMSKEAREGIRPHIQRFLDLGILVPCQSPWNTPLLPVKKPGTNDYRPVQDLREVNKRVQDIHPTVPNPYNLLSSLPPSHTWYSVLDLKDAFFCLKLHPNSQPLFAFEWRDPEKGNTGQLTWTRLPQGFKNSPTLFNEALHRDLASFRALNPQVVMLQYVDDLLVAAPTYRDCKEGTRRLLQELSKLGYRVSAKKAQLCREEVTYLGYLLKGGKRWLTPARKATVMKIPTPTTPRQVREFLGTAGFCRLWIPGFASLAAPLYPLTRPKVPFTWTEAHQEAFGRIKEALLSAPALALPDLTKPFALYVDEKEGVARGVLTQTLGPWRRPVAYLSKKLDPVASGWPTCLKAIAAVALLLKDADKLTLGQNVLVIAPHNLESIVRQPPDRWMTNARMTHYQSLLLNERVSFAPPAILNPATLLPVESDDTPIHICSEILAEETGTRPDLRDQPLPGVPAWYTDGSSFIMDGRRQAGAAIVDNKRTVWASNLPEGTSAQKAELIALTQALRLAEGKSINIYTDSRYAFATAHVHGAIYKQRGWLTSAGKDIKNKEEILALLEAIHLPKRVAIIHCPGHQRGTDPVATGNRKADEAAKQAAQSTRILTETTKNAGKRTADGSEFEKRTADGSEFESPKKKAKVE

SEQ ID NO: 6916 - protein, 2218 aa, synthetic construct
MPAAKRVKLDGGDKKYSIGLDIGTNSVGWAVITDEYKVPSKKFKVLGNTDRHSIKKNLIGALLFDSGETAEATRLKRTARRRYTRRKNRICYLQEIFSNEMAKVDDSFFHRLEESFLVEEDKKHERHPIFGNIVDEVAYHEKYPTIYHLRKKLVDSTDKADLRLIYLALAHMIKFRGHFLIEGDLNPDNSDVDKLFIQLVQTYNQLFEENPINASGVDAKAILSARLSKSRRLENLIAQLPGEKKNGLFGNLIALSLGLTPNFKSNFDLAEDAKLQLSKDTYDDDLDNLLAQIGDQYADLFLAAKNLSDAILLSDILRVNTEITKAPLSASMIKRYDEHHQDLTLLKALVRQQLPEKYKEIFFDQSKNGYAGYIDGGASQEEFYKFIKPILEKMDGTEELLVKLNREDLLRKQRTFDNGSIPHQIHLGELHAILRRQEDFYPFLKDNREKIEKILTFRIPYYVGPLARGNSRFAWMTRKSEETITPWNFEEVVDKGASAQSFIERMTNFDKNLPNEKVLPKHSLLYEYFTVYNELTKVKYVTEGMRKPAFLSGEQKKAIVDLLFKTNRKVTVKQLKEDYFKKIECFDSVEISGVEDRFNASLGTYHDLLKIIKDKDFLDNEENEDILEDIVLTLTLFEDREMIEERLKTYAHLFDDKVMKQLKRRRYTGWGRLSRKLINGIRDKQSGKTILDFLKSDGFANRNFMQLIHDDSLTFKEDIQKAQVSGQGDSLHEHIANLAGSPAIKKGILQTVKVVDELVKVMGRHKPENIVIEMARENQTTQKGQKNSRERMKRIEEGIKELGSQILKEHPVENTQLQNEKLYLYYLQNGRDMYVDQELDINRLSDYDVDHIVPQSFLKDDSIDNKVLTRSDKARGKSDNVPSEEVVKKMKNYWRQLLNAKLITQRKFDNLTKAERGGLSELDKAGFIKRQLVETRQITKHVAQILDSRMNTKYDENDKLIREVKVITLKSKLVSDFRKDFQFYKVREINNYHHAHDAYLNAVVGTALIKKYPKLESEFVYGDYKVYDVRKMIAKSEQEIGKATAKYFFYSNIMNFFKTEITLANGEIRKRPLIETNGETGEIVWDKGRDFATVRKVLSMPQVNIVKKTEVQTGGFSKESILPKRNSDKLIARKKDWDPKKYGGFDSPTVAYSVLVVAKVEKGKSKKLKSVKELLGITIMERSSFEKNPIDFLEAKGYKEVKKDLIIKLPKYSLFELENGRKRMLASAGELQKGNELALPSKYVNFLYLASHYEKLKGSPEDNEQKQLFVEQHKHYLDEIIEQISEFSKRVILADANLDKVLSAYNKHRDKPIREQAENIIHLFTLTNLGAPAAFKYFDTTIDRKRYTSTKEVLDATLIHQSITGLYETRIDLSQLGGDGGGGGGGSEAAAKGGTLGDQGSRGSDPLPEPRVTLTVEGIPTEFLVNTGAEHSVLTKPMGKMGSKRTVVAGATGSKVYPWTTKRLLKIGQKQVTHSFLVIPECPAPLLGRDLLTKLKAQIQFSTEGPQVTWEDRPAMCLVLNLEEEYRLHEKPVPPSIDPSWLQLFPMVWAEKAGMGLANQVPPVVVELKSDASPVAVRQYPMSKEAREGIRPHIQRFLDLGILVPCQSPWNTPLLPVKKPGTNDYRPVQDLREVNKRVQDIHPTVPNPYNLLSSLPPSHTWYSVLDLKDAFFCLKLHPNSQPLFAFEWRDPEKGNTGQLTWTRLPQGFKNSPTLFNEALHRDLASFRALNPQVVMLQYVDDLLVAAPTYRDCKEGTRRLLQELSKLGYRVSAKKAQLCREEVTYLGYLLKGGKRWLTPARKATVMKIPTPTTPRQVREFLGTAGFCRLWIPGFASLAAPLYPLTRPKVPFTWTEAHQEAFGRIKEALLSAPALALPDLTKPFALYVDEKEGVARGVLTQTLGPWRRPVAYLSKKLDPVASGWPTCLKAIAAVALLLKDADKLTLGQNVLVIAPHNLESIVRQPPDRWMTNARMTHYQSLLLNERVSFAPPAILNPATLLPVESDDTPIHICSEILAEETGTRPDLRDQPLPGVPAWYTDGSSFIMDGRRQAGAAIVDNKRTVWASNLPEGTSAQKAELIALTQALRLAEGKSINIYTDSRYAFATAHVHGAIYKQRGWLTSAGKDIKNKEEILALLEAIHLPKRVAIIHCPGHQRGTDPVATGNRKADEAAKQAAQSTRILTETTKNAGKRTADGSEFEKRTADGSEFESPKKKAKVE

SEQ ID NO: 6917 - protein, 2096 aa, synthetic construct
MPAAKRVKLDGGDKKYSIGLDIGTNSVGWAVITDEYKVPSKKFKVLGNTDRHSIKKNLIGALLFDSGETAEATRLKRTARRRYTRRKNRICYLQEIFSNEMAKVDDSFFHRLEESFLVEEDKKHERHPIFGNIVDEVAYHEKYPTIYHLRKKLVDSTDKADLRLIYLALAHMIKFRGHFLIEGDLNPDNSDVDKLFIQLVQTYNQLFEENPINASGVDAKAILSARLSKSRRLENLIAQLPGEKKNGLFGNLIALSLGLTPNFKSNFDLAEDAKLQLSKDTYDDDLDNLLAQIGDQYADLFLAAKNLSDAILLSDILRVNTEITKAPLSASMIKRYDEHHQDLTLLKALVRQQLPEKYKEIFFDQSKNGYAGYIDGGASQEEFYKFIKPILEKMDGTEELLVKLNREDLLRKQRTFDNGSIPHQIHLGELHAILRRQEDFYPFLKDNREKIEKILTFRIPYYVGPLARGNSRFAWMTRKSEETITPWNFEEVVDKGASAQSFIERMTNFDKNLPNEKVLPKHSLLYEYFTVYNELTKVKYVTEGMRKPAFLSGEQKKAIVDLLFKTNRKVTVKQLKEDYFKKIECFDSVEISGVEDRFNASLGTYHDLLKIIKDKDFLDNEENEDILEDIVLTLTLFEDREMIEERLKTYAHLFDDKVMKQLKRRRYTGWGRLSRKLINGIRDKQSGKTILDFLKSDGFANRNFMQLIHDDSLTFKEDIQKAQVSGQGDSLHEHIANLAGSPAIKKGILQTVKVVDELVKVMGRHKPENIVIEMARENQTTQKGQKNSRERMKRIEEGIKELGSQILKEHPVENTQLQNEKLYLYYLQNGRDMYVDQELDINRLSDYDVDHIVPQSFLKDDSIDNKVLTRSDKARGKSDNVPSEEVVKKMKNYWRQLLNAKLITQRKFDNLTKAERGGLSELDKAGFIKRQLVETRQITKHVAQILDSRMNTKYDENDKLIREVKVITLKSKLVSDFRKDFQFYKVREINNYHHAHDAYLNAVVGTALIKKYPKLESEFVYGDYKVYDVRKMIAKSEQEIGKATAKYFFYSNIMNFFKTEITLANGEIRKRPLIETNGETGEIVWDKGRDFATVRKVLSMPQVNIVKKTEVQTGGFSKESILPKRNSDKLIARKKDWDPKKYGGFDSPTVAYSVLVVAKVEKGKSKKLKSVKELLGITIMERSSFEKNPIDFLEAKGYKEVKKDLIIKLPKYSLFELENGRKRMLASAGELQKGNELALPSKYVNFLYLASHYEKLKGSPEDNEQKQLFVEQHKHYLDEIIEQISEFSKRVILADANLDKVLSAYNKHRDKPIREQAENIIHLFTLTNLGAPAAFKYFDTTIDRKRYTSTKEVLDATLIHQSITGLYETRIDLSQLGGDGGGGGGGSEAAAKGGTLNLEDEYRLYETSAEPEVSPGSTWLSDFPQAWAETGGMGLAVRQAPLIIPLKATSTPVSIKQYPMSQEAKLGIKPHIQRLLDQGILVPCQSPWNTPLLPVKKPGTNDYRPVQDLREVNKRVEDIHPTVPNPYNLLSGLPPSHRWYTVLDLKDAFFCLRLHPTSQPLFAFEWRDPGMGISGQLTWTRLPQGFKNSPTLFNEALHRDLADFRIQHPDLILLQYVDDILLAATSELDCQQGTRALLLTLGNLGYRASAKKAQLCQKQVKYLGYLLKEGQRWLTEARKETVMGQPTPKTPRQLREFLGTAGFCRLWIPGFAEMAAPLYPLTKPGTLFNWGPDQQKAYQEIKQALLTAPALGLPDLTKPFELFVDEKQGYAKGVLTQKLGPWRRPVAYLSKKLDPVAAGWPPCLRMVAAIAVLRKDAGKLTMGQPLVILAPHAVEALVKQPPDRWLSNARMTHYQAMLLDTDRVQFGPVVALNPATLLPLPEEGAPHDCLEILAETHGTRPDLTDQPIPDADHTWYTDGSSFLQEGQRKAGAAVTTETEVIWARALPAGTSAQRAELIALTQALKMAEGKRLNVYTDSRYAFATAHIHGEIYRRRGWLTSEGREIKNKSEILALLKALFLPKRLSIIHCLGHQKGDSAEARGNRLADQAAREAAIKTPPDTSTLLAGKRTADGSEFEKRTADGSEFESPKKKAKVE

SEQ ID NO: 6918 - protein, 2096 aa, synthetic construct
MPAAKRVKLDGGDKKYSIGLDIGTNSVGWAVITDEYKVPSKKFKVLGNTDRHSIKKNLIGALLFDSGETAEATRLKRTARRRYTRRKNRICYLQEIFSNEMAKVDDSFFHRLEESFLVEEDKKHERHPIFGNIVDEVAYHEKYPTIYHLRKKLVDSTDKADLRLIYLALAHMIKFRGHFLIEGDLNPDNSDVDKLFIQLVQTYNQLFEENPINASGVDAKAILSARLSKSRRLENLIAQLPGEKKNGLFGNLIALSLGLTPNFKSNFDLAEDAKLQLSKDTYDDDLDNLLAQIGDQYADLFLAAKNLSDAILLSDILRVNTEITKAPLSASMIKRYDEHHQDLTLLKALVRQQLPEKYKEIFFDQSKNGYAGYIDGGASQEEFYKFIKPILEKMDGTEELLVKLNREDLLRKQRTFDNGSIPHQIHLGELHAILRRQEDFYPFLKDNREKIEKILTFRIPYYVGPLARGNSRFAWMTRKSEETITPWNFEEVVDKGASAQSFIERMTNFDKNLPNEKVLPKHSLLYEYFTVYNELTKVKYVTEGMRKPAFLSGEQKKAIVDLLFKTNRKVTVKQLKEDYFKKIECFDSVEISGVEDRFNASLGTYHDLLKIIKDKDFLDNEENEDILEDIVLTLTLFEDREMIEERLKTYAHLFDDKVMKQLKRRRYTGWGRLSRKLINGIRDKQSGKTILDFLKSDGFANRNFMQLIHDDSLTFKEDIQKAQVSGQGDSLHEHIANLAGSPAIKKGILQTVKVVDELVKVMGRHKPENIVIEMARENQTTQKGQKNSRERMKRIEEGIKELGSQILKEHPVENTQLQNEKLYLYYLQNGRDMYVDQELDINRLSDYDVDHIVPQSFLKDDSIDNKVLTRSDKARGKSDNVPSEEVVKKMKNYWRQLLNAKLITQRKFDNLTKAERGGLSELDKAGFIKRQLVETRQITKHVAQILDSRMNTKYDENDKLIREVKVITLKSKLVSDFRKDFQFYKVREINNYHHAHDAYLNAVVGTALIKKYPKLESEFVYGDYKVYDVRKMIAKSEQEIGKATAKYFFYSNIMNFFKTEITLANGEIRKRPLIETNGETGEIVWDKGRDFATVRKVLSMPQVNIVKKTEVQTGGFSKESILPKRNSDKLIARKKDWDPKKYGGFDSPTVAYSVLVVAKVEKGKSKKLKSVKELLGITIMERSSFEKNPIDFLEAKGYKEVKKDLIIKLPKYSLFELENGRKRMLASAGELQKGNELALPSKYVNFLYLASHYEKLKGSPEDNEQKQLFVEQHKHYLDEIIEQISEFSKRVILADANLDKVLSAYNKHRDKPIREQAENIIHLFTLTNLGAPAAFKYFDTTIDRKRYTSTKEVLDATLIHQSITGLYETRIDLSQLGGDGGGGGGGSEAAAKGGTLNIEDEYRLHETSKGPDVPLGSTWLSDFPQAWAETGGMGLAFRQAPLIISLKATSTPVSIKQYPMSQEARLGIKPHIQRLLDQGILVPCQSPWNTPLLPVKKPGTNDYRPVQDLREVNKRVEDIHPTVPNPYNLLSGLPPSHQWYTVLDLKDAFFCLRLHPTSQSLFAFEWKDPEMGISGQLTWTRLPQGFKNSPTLFDEALHRDLADFRIQHPDLILLQYVDDLLLAATSELDCQQGTRALLQTLGDLGYRASAKKAQICQKQVKYLGYLLKEGQRWLTEARKETVMGQPTPKTPRQLREFLGTAGLCRLWIPGFAEMAAPLYPLTKTGTLFKWGPDQQKAYQEIKQALLTAPALGLPDLTKPFELFVDEKQGYAKGVLTQKLGPWRRPVAYLSKKLDPVAAGWPPCLRMVAAIAVLTKDVGKLTMGQPLVILAPHAVEALVKQPPDRWLSNARMTHYQALLLDTDRVQFGPIVALNPATLLPLPEEGLQHDCLDILAEAHGTRPDLTDQPLPDADHTWYTDGSSFLQEGQRRAGAAVTTETEVIWAKALPAGTSAQRAELIALTQALKMAAGKKLNVYTDSRYAFATAHIHGEIYRRRGLLTSEGKEIKNKDEILALLKALFLPKRLSIIHCPGHQKGNHAEARGNRMADQAAREVATRETPETSTLLAGKRTADGSEFEKRTADGSEFESPKKKAKVE

SEQ ID NO: 6919 - protein, 2096 aa, synthetic construct
MPAAKRVKLDGGDKKYSIGLDIGTNSVGWAVITDEYKVPSKKFKVLGNTDRHSIKKNLIGALLFDSGETAEATRLKRTARRRYTRRKNRICYLQEIFSNEMAKVDDSFFHRLEESFLVEEDKKHERHPIFGNIVDEVAYHEKYPTIYHLRKKLVDSTDKADLRLIYLALAHMIKFRGHFLIEGDLNPDNSDVDKLFIQLVQTYNQLFEENPINASGVDAKAILSARLSKSRRLENLIAQLPGEKKNGLFGNLIALSLGLTPNFKSNFDLAEDAKLQLSKDTYDDDLDNLLAQIGDQYADLFLAAKNLSDAILLSDILRVNTEITKAPLSASMIKRYDEHHQDLTLLKALVRQQLPEKYKEIFFDQSKNGYAGYIDGGASQEEFYKFIKPILEKMDGTEELLVKLNREDLLRKQRTFDNGSIPHQIHLGELHAILRRQEDFYPFLKDNREKIEKILTFRIPYYVGPLARGNSRFAWMTRKSEETITPWNFEEVVDKGASAQSFIERMTNFDKNLPNEKVLPKHSLLYEYFTVYNELTKVKYVTEGMRKPAFLSGEQKKAIVDLLFKTNRKVTVKQLKEDYFKKIECFDSVEISGVEDRFNASLGTYHDLLKIIKDKDFLDNEENEDILEDIVLTLTLFEDREMIEERLKTYAHLFDDKVMKQLKRRRYTGWGRLSRKLINGIRDKQSGKTILDFLKSDGFANRNFMQLIHDDSLTFKEDIQKAQVSGQGDSLHEHIANLAGSPAIKKGILQTVKVVDELVKVMGRHKPENIVIEMARENQTTQKGQKNSRERMKRIEEGIKELGSQILKEHPVENTQLQNEKLYLYYLQNGRDMYVDQELDINRLSDYDVDHIVPQSFLKDDSIDNKVLTRSDKARGKSDNVPSEEVVKKMKNYWRQLLNAKLITQRKFDNLTKAERGGLSELDKAGFIKRQLVETRQITKHVAQILDSRMNTKYDENDKLIREVKVITLKSKLVSDFRKDFQFYKVREINNYHHAHDAYLNAVVGTALIKKYPKLESEFVYGDYKVYDVRKMIAKSEQEIGKATAKYFFYSNIMNFFKTEITLANGEIRKRPLIETNGETGEIVWDKGRDFATVRKVLSMPQVNIVKKTEVQTGGFSKESILPKRNSDKLIARKKDWDPKKYGGFDSPTVAYSVLVVAKVEKGKSKKLKSVKELLGITIMERSSFEKNPIDFLEAKGYKEVKKDLIIKLPKYSLFELENGRKRMLASAGELQKGNELALPSKYVNFLYLASHYEKLKGSPEDNEQKQLFVEQHKHYLDEIIEQISEFSKRVILADANLDKVLSAYNKHRDKPIREQAENIIHLFTLTNLGAPAAFKYFDTTIDRKRYTSTKEVLDATLIHQSITGLYETRIDLSQLGGDGGGGGGGSEAAAKGGTLNIEDEYRLHETSKGPDVPLGSTWLSDFPQAWAETGGMGLAVRQAPLIIPLKATSTPVSIKQYPMSQEARLGIKPHIQRLLDQGILVPCQSPWNTPLLPVKKPGTNDYRPVQDLREVNKRVEDIHPTVPNPYNLLSGLPPSHQWYTVLDLKDAFFCLRLHPTSQSLFAFEWRDPEMGISGQLTWTRLPQGFKNSPTLFNEALHRDLADFRIQHPDLILLQYVDDLLLAATSELDCQQGTRALLQTLGDLGYRASAKKAQICQKQVKYLGYLLKEGQRWLTEARKETVMGQPTPKTPRQLREFLGTAGFCRLWIPGFAEMAAPLYPLTKPGTLFEWGPDQQKAYQEIKQALLTAPALGLPDLTKPFELFVDEKQGYAKGVLTQKLGPWRRPVAYLSKKLDPVAAGWPPCLRMVAAIAVLTKDAGKLTMGQPLVILAPHAVEALVKQPPDRWLSNARMTHYQALLLDTDRVQFGPIVALNPATLLPLPEEGLQHDCLDILAEAHGTRPDLTDQPLPDADHTWYTDGSSFLQEGQRKAGAAVTTETEVVWAKALPAGTSAQRAELIALTQALKMAEGKKLNVYTDSRYAFATAHIHGEIYRRRGWLTSEGKEIKNKDEILALLKALFLPKRLSIIHCPGHQKGNRAEARGNRMADQAAREVATRETPETSTLLAGKRTADGSEFEKRTADGSEFESPKKKAKVE

SEQ ID NO: 6920 - protein, 2090 aa, synthetic construct
MPAAKRVKLDGGDKKYSIGLDIGTNSVGWAVITDEYKVPSKKFKVLGNTDRHSIKKNLIGALLFDSGETAEATRLKRTARRRYTRRKNRICYLQEIFSNEMAKVDDSFFHRLEESFLVEEDKKHERHPIFGNIVDEVAYHEKYPTIYHLRKKLVDSTDKADLRLIYLALAHMIKFRGHFLIEGDLNPDNSDVDKLFIQLVQTYNQLFEENPINASGVDAKAILSARLSKSRRLENLIAQLPGEKKNGLFGNLIALSLGLTPNFKSNFDLAEDAKLQLSKDTYDDDLDNLLAQIGDQYADLFLAAKNLSDAILLSDILRVNTEITKAPLSASMIKRYDEHHQDLTLLKALVRQQLPEKYKEIFFDQSKNGYAGYIDGGASQEEFYKFIKPILEKMDGTEELLVKLNREDLLRKQRTFDNGSIPHQIHLGELHAILRRQEDFYPFLKDNREKIEKILTFRIPYYVGPLARGNSRFAWMTRKSEETITPWNFEEVVDKGASAQSFIERMTNFDKNLPNEKVLPKHSLLYEYFTVYNELTKVKYVTEGMRKPAFLSGEQKKAIVDLLFKTNRKVTVKQLKEDYFKKIECFDSVEISGVEDRFNASLGTYHDLLKIIKDKDFLDNEENEDILEDIVLTLTLFEDREMIEERLKTYAHLFDDKVMKQLKRRRYTGWGRLSRKLINGIRDKQSGKTILDFLKSDGFANRNFMQLIHDDSLTFKEDIQKAQVSGQGDSLHEHIANLAGSPAIKKGILQTVKVVDELVKVMGRHKPENIVIEMARENQTTQKGQKNSRERMKRIEEGIKELGSQILKEHPVENTQLQNEKLYLYYLQNGRDMYVDQELDINRLSDYDVDHIVPQSFLKDDSIDNKVLTRSDKARGKSDNVPSEEVVKKMKNYWRQLLNAKLITQRKFDNLTKAERGGLSELDKAGFIKRQLVETRQITKHVAQILDSRMNTKYDENDKLIREVKVITLKSKLVSDFRKDFQFYKVREINNYHHAHDAYLNAVVGTALIKKYPKLESEFVYGDYKVYDVRKMIAKSEQEIGKATAKYFFYSNIMNFFKTEITLANGEIRKRPLIETNGETGEIVWDKGRDFATVRKVLSMPQVNIVKKTEVQTGGFSKESILPKRNSDKLIARKKDWDPKKYGGFDSPTVAYSVLVVAKVEKGKSKKLKSVKELLGITIMERSSFEKNPIDFLEAKGYKEVKKDLIIKLPKYSLFELENGRKRMLASAGELQKGNELALPSKYVNFLYLASHYEKLKGSPEDNEQKQLFVEQHKHYLDEIIEQISEFSKRVILADANLDKVLSAYNKHRDKPIREQAENIIHLFTLTNLGAPAAFKYFDTTIDRKRYTSTKEVLDATLIHQSITGLYETRIDLSQLGGDGGGGGGGSEAAAKGGTLQLDDEYRLYSPLVKPDQNIQFWLEQFPQAWAETAGMGLAKQVPPQVIQLKASATPVSVRQYPLSKEAQEGIRPHVQRLIQQGILVPVQSPWNTPLLPVRKPGTNDYRPVQDLREVNKRVQDIHPTVPNPYNLLCALPPQRSWYTVLDLKDAFFCLRLHPTSQPLFAFEWRDPGTGRTGQLTWTRLPQGFKNSPTIFDEALHRDLANFRIQHPQVTLLQYVDDLLLAGATKQDCLEGTKALLLELSDLGYRASAKKAQICRREVTYLGYSLRDGQRWLTEARKKTVVQIPAPTTAKQVREFLGTAGFCRLWIPGFATLAAPLYPLTKEKGEFSWAPEHQKAFDAIKKALLSAPALALPDVTKPFTLYVDERKGVARGVLTQTLGPWRRPVAYLSKKLDPVASGWPVCLKAIAAVAILVKDADKLTLGQNITVIAPHALENIVRQPPDRWMTNARMTHYQSLLLTERVTFAPPAALNPATLLPEETDEPVTHDCHQLLIEETGVRKDLTDIPLTGEVLTWFTDGSSYVVEGKRMAGAAVVDGTRTIWASSLPEGTSAQKAELMALTQALRLAEGKSINIYTDSRYAFATAHVHGAIYKQRGLLTSAGREIKNKEEILSLLEALHLPKRLAIIHCPGHQKAKDPISRGNQMADRVAKQAAQGVNLLAGKRTADGSEFEKRTADGSEFESPKKKAKVE

SEQ ID NO: 6921 - protein, 2087 aa, synthetic construct
MPAAKRVKLDGGDKKYSIGLDIGTNSVGWAVITDEYKVPSKKFKVLGNTDRHSIKKNLIGALLFDSGETAEATRLKRTARRRYTRRKNRICYLQEIFSNEMAKVDDSFFHRLEESFLVEEDKKHERHPIFGNIVDEVAYHEKYPTIYHLRKKLVDSTDKADLRLIYLALAHMIKFRGHFLIEGDLNPDNSDVDKLFIQLVQTYNQLFEENPINASGVDAKAILSARLSKSRRLENLIAQLPGEKKNGLFGNLIALSLGLTPNFKSNFDLAEDAKLQLSKDTYDDDLDNLLAQIGDQYADLFLAAKNLSDAILLSDILRVNTEITKAPLSASMIKRYDEHHQDLTLLKALVRQQLPEKYKEIFFDQSKNGYAGYIDGGASQEEFYKFIKPILEKMDGTEELLVKLNREDLLRKQRTFDNGSIPHQIHLGELHAILRRQEDFYPFLKDNREKIEKILTFRIPYYVGPLARGNSRFAWMTRKSEETITPWNFEEVVDKGASAQSFIERMTNFDKNLPNEKVLPKHSLLYEYFTVYNELTKVKYVTEGMRKPAFLSGEQKKAIVDLLFKTNRKVTVKQLKEDYFKKIECFDSVEISGVEDRFNASLGTYHDLLKIIKDKDFLDNEENEDILEDIVLTLTLFEDREMIEERLKTYAHLFDDKVMKQLKRRRYTGWGRLSRKLINGIRDKQSGKTILDFLKSDGFANRNFMQLIHDDSLTFKEDIQKAQVSGQGDSLHEHIANLAGSPAIKKGILQTVKVVDELVKVMGRHKPENIVIEMARENQTTQKGQKNSRERMKRIEEGIKELGSQILKEHPVENTQLQNEKLYLYYLQNGRDMYVDQELDINRLSDYDVDHIVPQSFLKDDSIDNKVLTRSDKARGKSDNVPSEEVVKKMKNYWRQLLNAKLITQRKFDNLTKAERGGLSELDKAGFIKRQLVETRQITKHVAQILDSRMNTKYDENDKLIREVKVITLKSKLVSDFRKDFQFYKVREINNYHHAHDAYLNAVVGTALIKKYPKLESEFVYGDYKVYDVRKMIAKSEQEIGKATAKYFFYSNIMNFFKTEITLANGEIRKRPLIETNGETGEIVWDKGRDFATVRKVLSMPQVNIVKKTEVQTGGFSKESILPKRNSDKLIARKKDWDPKKYGGFDSPTVAYSVLVVAKVEKGKSKKLKSVKELLGITIMERSSFEKNPIDFLEAKGYKEVKKDLIIKLPKYSLFELENGRKRMLASAGELQKGNELALPSKYVNFLYLASHYEKLKGSPEDNEQKQLFVEQHKHYLDEIIEQISEFSKRVILADANLDKVLSAYNKHRDKPIREQAENIIHLFTLTNLGAPAAFKYFDTTIDRKRYTSTKEVLDATLIHQSITGLYETRIDLSQLGGDGGGGGGGSEAAAKGGVPWLMKKPLQLTVLVPLHEYQERLLQQTALPKEQKELLQKLFLKYDALWQHWENQVGHRRIKPHNIATGTLAPRPQKQYPINPKAKPSIQIVIDDLLKQGVLIQQNSTMNTPVYPVPKPDGKWRMVLDYREVNKTIPLIAAQNQHSAGILSSIYRGKYKTTLDLTNGFWAHPITPESYWLTAFTWQGKQYCWTRLPQGFLNSPALFTADVVDLLKEIPNVQAYVDDIYISHDDPQEHLEQLEKIFSILLNAGYVVSLKKSEIAQREVEFLGFNITKEGRGLTDTFKQKLLNITPPKDLKQLQSILGLLNFARNFIPNYSELVKPLYTIVANANGKFISWTEDNSNQLQHIISVLNQADNLEERNPETRLIIKVNSSPSAGYIRYYNEGSKRPIMYVNYIFSKAEAKFTQTEKLLTTMHKGLIKAMDLAMGQEILVYSPIVSMTKIQRTPLPERKALPVRWITWMTYLEDPRIQFHYDKSLPELQQIPNVTEDVIAKTKHPSEFAMVFYTDGSAIKHPDVNKSHSAGMGIAQVQFIPEYKIVHQWSIPLGDHTAQLAEIAAVEFACKKALKISGPVLIVTDSFYVAESANKELPYWKSNGFLNNKKKPLRHVSKWKSIAECLQLKPDIIIMHEKGHQQPMTTLHTEGNNLADKLATQGSYVVHAGKRTADGSEFEKRTADGSEFESPKKKAKVE

SEQ ID NO: 6922 - protein, 2087 aa, synthetic construct
MPAAKRVKLDGGDKKYSIGLDIGTNSVGWAVITDEYKVPSKKFKVLGNTDRHSIKKNLIGALLFDSGETAEATRLKRTARRRYTRRKNRICYLQEIFSNEMAKVDDSFFHRLEESFLVEEDKKHERHPIFGNIVDEVAYHEKYPTIYHLRKKLVDSTDKADLRLIYLALAHMIKFRGHFLIEGDLNPDNSDVDKLFIQLVQTYNQLFEENPINASGVDAKAILSARLSKSRRLENLIAQLPGEKKNGLFGNLIALSLGLTPNFKSNFDLAEDAKLQLSKDTYDDDLDNLLAQIGDQYADLFLAAKNLSDAILLSDILRVNTEITKAPLSASMIKRYDEHHQDLTLLKALVRQQLPEKYKEIFFDQSKNGYAGYIDGGASQEEFYKFIKPILEKMDGTEELLVKLNREDLLRKQRTFDNGSIPHQIHLGELHAILRRQEDFYPFLKDNREKIEKILTFRIPYYVGPLARGNSRFAWMTRKSEETITPWNFEEVVDKGASAQSFIERMTNFDKNLPNEKVLPKHSLLYEYFTVYNELTKVKYVTEGMRKPAFLSGEQKKAIVDLLFKTNRKVTVKQLKEDYFKKIECFDSVEISGVEDRFNASLGTYHDLLKIIKDKDFLDNEENEDILEDIVLTLTLFEDREMIEERLKTYAHLFDDKVMKQLKRRRYTGWGRLSRKLINGIRDKQSGKTILDFLKSDGFANRNFMQLIHDDSLTFKEDIQKAQVSGQGDSLHEHIANLAGSPAIKKGILQTVKVVDELVKVMGRHKPENIVIEMARENQTTQKGQKNSRERMKRIEEGIKELGSQILKEHPVENTQLQNEKLYLYYLQNGRDMYVDQELDINRLSDYDVDHIVPQSFLKDDSIDNKVLTRSDKARGKSDNVPSEEVVKKMKNYWRQLLNAKLITQRKFDNLTKAERGGLSELDKAGFIKRQLVETRQITKHVAQILDSRMNTKYDENDKLIREVKVITLKSKLVSDFRKDFQFYKVREINNYHHAHDAYLNAVVGTALIKKYPKLESEFVYGDYKVYDVRKMIAKSEQEIGKATAKYFFYSNIMNFFKTEITLANGEIRKRPLIETNGETGEIVWDKGRDFATVRKVLSMPQVNIVKKTEVQTGGFSKESILPKRNSDKLIARKKDWDPKKYGGFDSPTVAYSVLVVAKVEKGKSKKLKSVKELLGITIMERSSFEKNPIDFLEAKGYKEVKKDLIIKLPKYSLFELENGRKRMLASAGELQKGNELALPSKYVNFLYLASHYEKLKGSPEDNEQKQLFVEQHKHYLDEIIEQISEFSKRVILADANLDKVLSAYNKHRDKPIREQAENIIHLFTLTNLGAPAAFKYFDTTIDRKRYTSTKEVLDATLIHQSITGLYETRIDLSQLGGDGGGGGGGSEAAAKGGVPWLMKKPLQLTVLVPLHEYQERLLQQTALPKEQKELLQKLFLKYDALWQHWENQVGHRRIKPHNIATGTLAPRPQKQYPINPKAKPSIQIVIDDLLKQGVLIQQNSTMNTPVYPVPKPDGKWRMVLDYREVNKTIPLIAAQNQHSAGILSSIYRGKYKTTLDLTNGFWAHPITPESYWLTAFTWQGKQYCWTRLPQGFLNSPALFNADVVDLLKEIPNVQAYVDDIYISHDDPQEHLEQLEKIFSILLNAGYVVSLKKSEIAQREVEFLGFNITKEGRGLTDTFKQKLLNITPPKDLKQLQSILGLLNFARNFIPNYSELVKPLYTIVAPANGKFISWTEDNSNQLQHIISVLNQADNLEERNPETRLIIKVNSSPSAGYIRYYNEGSKRPIMYVNYIFSKAEAKFTQTEKLLTTMHKGLIKAMDLAMGQEILVYSPIVSMTKIQRTPLPERKALPVRWITWMTYLEDPRIQFHYDKSLPELQQIPNVTEDVIAKTKHPSEFAMVFYTDGSAIKHPDVNKSHSAGMGIAQVQFIPEYKIVHQWSIPLGDHTAQLAEIAAVEFACKKALKISGPVLIVTDSFYVAESANKELPYWKSNGFLNNKKKPLRHVSKWKSIAECLQLKPDIIIMHEKGHQQPMTTLHTEGNNLADKLATQGSYVVHAGKRTADGSEFEKRTADGSEFESPKKKAKVE

SEQ ID NO: 6923 - protein, 2087 aa, synthetic construct
MPAAKRVKLDGGDKKYSIGLDIGTNSVGWAVITDEYKVPSKKFKVLGNTDRHSIKKNLIGALLFDSGETAEATRLKRTARRRYTRRKNRICYLQEIFSNEMAKVDDSFFHRLEESFLVEEDKKHERHPIFGNIVDEVAYHEKYPTIYHLRKKLVDSTDKADLRLIYLALAHMIKFRGHFLIEGDLNPDNSDVDKLFIQLVQTYNQLFEENPINASGVDAKAILSARLSKSRRLENLIAQLPGEKKNGLFGNLIALSLGLTPNFKSNFDLAEDAKLQLSKDTYDDDLDNLLAQIGDQYADLFLAAKNLSDAILLSDILRVNTEITKAPLSASMIKRYDEHHQDLTLLKALVRQQLPEKYKEIFFDQSKNGYAGYIDGGASQEEFYKFIKPILEKMDGTEELLVKLNREDLLRKQRTFDNGSIPHQIHLGELHAILRRQEDFYPFLKDNREKIEKILTFRIPYYVGPLARGNSRFAWMTRKSEETITPWNFEEVVDKGASAQSFIERMTNFDKNLPNEKVLPKHSLLYEYFTVYNELTKVKYVTEGMRKPAFLSGEQKKAIVDLLFKTNRKVTVKQLKEDYFKKIECFDSVEISGVEDRFNASLGTYHDLLKIIKDKDFLDNEENEDILEDIVLTLTLFEDREMIEERLKTYAHLFDDKVMKQLKRRRYTGWGRLSRKLINGIRDKQSGKTILDFLKSDGFANRNFMQLIHDDSLTFKEDIQKAQVSGQGDSLHEHIANLAGSPAIKKGILQTVKVVDELVKVMGRHKPENIVIEMARENQTTQKGQKNSRERMKRIEEGIKELGSQILKEHPVENTQLQNEKLYLYYLQNGRDMYVDQELDINRLSDYDVDHIVPQSFLKDDSIDNKVLTRSDKARGKSDNVPSEEVVKKMKNYWRQLLNAKLITQRKFDNLTKAERGGLSELDKAGFIKRQLVETRQITKHVAQILDSRMNTKYDENDKLIREVKVITLKSKLVSDFRKDFQFYKVREINNYHHAHDAYLNAVVGTALIKKYPKLESEFVYGDYKVYDVRKMIAKSEQEIGKATAKYFFYSNIMNFFKTEITLANGEIRKRPLIETNGETGEIVWDKGRDFATVRKVLSMPQVNIVKKTEVQTGGFSKESILPKRNSDKLIARKKDWDPKKYGGFDSPTVAYSVLVVAKVEKGKSKKLKSVKELLGITIMERSSFEKNPIDFLEAKGYKEVKKDLIIKLPKYSLFELENGRKRMLASAGELQKGNELALPSKYVNFLYLASHYEKLKGSPEDNEQKQLFVEQHKHYLDEIIEQISEFSKRVILADANLDKVLSAYNKHRDKPIREQAENIIHLFTLTNLGAPAAFKYFDTTIDRKRYTSTKEVLDATLIHQSITGLYETRIDLSQLGGDGGGGGGGSEAAAKGGIPWLMKKPLQLTTLVPLQEYEERLLKQTMLTGSYKEKLQSLFLKYDALWQHWENQVGHRRIKPHHIATGTVNPRPQKQYPINPKAKASIQTVINDLLKQGVLIQQNSIMNTPVYPVPKPDGKWRMVLDYREVNKTIPLIAAQNQHSAGILSSIFRGKYKTTLDLSNGFWAHSITPESYWLTAFTWLGQQYCWTRLPQGFLNSPALFNADVVDLLKEVPNVQVYVDDIYISHDDPREHLEQLEKVFSLLLNAGYVVSLKKSEIAQHEVEFLGFNITKEGRGLTETFKQKLLNITPPRDLKQLQSILGKLNFARNFIPNFSELVKPLYNIIATAPGKYITWTTDNSQQLQNIISMLNSAENLEERNPEVRLIMKVNTSPSAGYIRFYNEFAKRPIMYLNYVYTKAEVKFTNTEKLLTTIHKGLIKALDLGMGQEILVYSPIVSMTKIQKTPLPERKALPIRWITWMSYLEDPRIQFHYDKTLPELQQVPTVTDDIIAKIKHPSEFSMVFYTDGSAIKHPNVNKSHNAGMGIAQVQFKPEFTVINTWSIPLGDHTAQLAEVAAVEFACKKALKIDGPVLIVTDSFYVAESVNKELPYWQSNGFFNNKKKPLKHVSKWKSIADCIQLKPDIIIIHEKGHQPTASTFHTEGNNLADKLATQGSYVVNAGKRTADGSEFEKRTADGSEFESPKKKAKVE

SEQ ID NO: 6924 - protein, 2094 aa, synthetic construct
MPAAKRVKLDGGDKKYSIGLDIGTNSVGWAVITDEYKVPSKKFKVLGNTDRHSIKKNLIGALLFDSGETAEATRLKRTARRRYTRRKNRICYLQEIFSNEMAKVDDSFFHRLEESFLVEEDKKHERHPIFGNIVDEVAYHEKYPTIYHLRKKLVDSTDKADLRLIYLALAHMIKFRGHFLIEGDLNPDNSDVDKLFIQLVQTYNQLFEENPINASGVDAKAILSARLSKSRRLENLIAQLPGEKKNGLFGNLIALSLGLTPNFKSNFDLAEDAKLQLSKDTYDDDLDNLLAQIGDQYADLFLAAKNLSDAILLSDILRVNTEITKAPLSASMIKRYDEHHQDLTLLKALVRQQLPEKYKEIFFDQSKNGYAGYIDGGASQEEFYKFIKPILEKMDGTEELLVKLNREDLLRKQRTFDNGSIPHQIHLGELHAILRRQEDFYPFLKDNREKIEKILTFRIPYYVGPLARGNSRFAWMTRKSEETITPWNFEEVVDKGASAQSFIERMTNFDKNLPNEKVLPKHSLLYEYFTVYNELTKVKYVTEGMRKPAFLSGEQKKAIVDLLFKTNRKVTVKQLKEDYFKKIECFDSVEISGVEDRFNASLGTYHDLLKIIKDKDFLDNEENEDILEDIVLTLTLFEDREMIEERLKTYAHLFDDKVMKQLKRRRYTGWGRLSRKLINGIRDKQSGKTILDFLKSDGFANRNFMQLIHDDSLTFKEDIQKAQVSGQGDSLHEHIANLAGSPAIKKGILQTVKVVDELVKVMGRHKPENIVIEMARENQTTQKGQKNSRERMKRIEEGIKELGSQILKEHPVENTQLQNEKLYLYYLQNGRDMYVDQELDINRLSDYDVDHIVPQSFLKDDSIDNKVLTRSDKARGKSDNVPSEEVVKKMKNYWRQLLNAKLITQRKFDNLTKAERGGLSELDKAGFIKRQLVETRQITKHVAQILDSRMNTKYDENDKLIREVKVITLKSKLVSDFRKDFQFYKVREINNYHHAHDAYLNAVVGTALIKKYPKLESEFVYGDYKVYDVRKMIAKSEQEIGKATAKYFFYSNIMNFFKTEITLANGEIRKRPLIETNGETGEIVWDKGRDFATVRKVLSMPQVNIVKKTEVQTGGFSKESILPKRNSDKLIARKKDWDPKKYGGFDSPTVAYSVLVVAKVEKGKSKKLKSVKELLGITIMERSSFEKNPIDFLEAKGYKEVKKDLIIKLPKYSLFELENGRKRMLASAGELQKGNELALPSKYVNFLYLASHYEKLKGSPEDNEQKQLFVEQHKHYLDEIIEQISEFSKRVILADANLDKVLSAYNKHRDKPIREQAENIIHLFTLTNLGAPAAFKYFDTTIDRKRYTSTKEVLDATLIHQSITGLYETRIDLSQLGGDGGGGGGGSEAAAKGGVLNLEEEYRLHEKPVPSSIDPSWLQLFPTVWAERAGMGLANQVPPVVVELRSGASPVAVRQYPMSKEAREGIRPHIQRFLDLGVLVPCQSPWNTPLLPVKKPGTNDYRPVQDLREINKRVQDIHPTVPNPYNLLSSLPPSHTWYSVLDLKDAFFCLKLHPNSQPLFAFEWRDPEKGNTGQLTWTRLPQGFKNSPTLFNEALHRDLAPFRALNPQVVLLQYVDDLLVAAPTYRDCKEGTQKLLQELSKLGYRVSAKKAQLCQKEVTYLGYLLKEGKRWLTPARKATVMKIPPPTTPRQVREFLGKAGFCRLFIPGFASLAAPLYPLTKPSIPFIWTEEHQKAFDRIKEALLSAPALALPDLTKPFTLYVDERAGVARGVLTQTLGPWRRPVAYLSKKLDPVASGWPTCLKAVAAVALLLKDADKLTLGQNVTVIASHSLESIVRQPPDRWMTNARMTHYQSLLLNERVSFAPPAVLNPATLLPVESEATPVHRCSEILAEETGTRRDLKDQPLPGVPAWYTDGSSFIAEGKRRAGAAIVDGKRTVWASSLPEGTSAQKAELVALTQALRLAEGKDINIYTDSRYAFATAHIHGAIYKQRGWLTSAGKDIKNKEEILALLEAIHLPKRVAIIHCPGHQKGNDPVATGNRRADEAAKQAALSTRVLAETTKPAGKRTADGSEFEKRTADGSEFESPKKKAKVE

SEQ ID NO: 6925 - protein, 2096 aa, synthetic construct; identical to SEQ ID NO: 4519

SEQ ID NO: 6926 - protein, 2095 aa, synthetic construct
MPAAKRVKLDGGDKKYSIGLDIGTNSVGWAVITDEYKVPSKKFKVLGNTDRHSIKKNLIGALLFDSGETAEATRLKRTARRRYTRRKNRICYLQEIFSNEMAKVDDSFFHRLEESFLVEEDKKHERHPIFGNIVDEVAYHEKYPTIYHLRKKLVDSTDKADLRLIYLALAHMIKFRGHFLIEGDLNPDNSDVDKLFIQLVQTYNQLFEENPINASGVDAKAILSARLSKSRRLENLIAQLPGEKKNGLFGNLIALSLGLTPNFKSNFDLAEDAKLQLSKDTYDDDLDNLLAQIGDQYADLFLAAKNLSDAILLSDILRVNTEITKAPLSASMIKRYDEHHQDLTLLKALVRQQLPEKYKEIFFDQSKNGYAGYIDGGASQEEFYKFIKPILEKMDGTEELLVKLNREDLLRKQRTFDNGSIPHQIHLGELHAILRRQEDFYPFLKDNREKIEKILTFRIPYYVGPLARGNSRFAWMTRKSEETITPWNFEEVVDKGASAQSFIERMTNFDKNLPNEKVLPKHSLLYEYFTVYNELTKVKYVTEGMRKPAFLSGEQKKAIVDLLFKTNRKVTVKQLKEDYFKKIECFDSVEISGVEDRFNASLGTYHDLLKIIKDKDFLDNEENEDILEDIVLTLTLFEDREMIEERLKTYAHLFDDKVMKQLKRRRYTGWGRLSRKLINGIRDKQSGKTILDFLKSDGFANRNFMQLIHDDSLTFKEDIQKAQVSGQGDSLHEHIANLAGSPAIKKGILQTVKVVDELVKVMGRHKPENIVIEMARENQTTQKGQKNSRERMKRIEEGIKELGSQILKEHPVENTQLQNEKLYLYYLQNGRDMYVDQELDINRLSDYDVDHIVPQSFLKDDSIDNKVLTRSDKARGKSDNVPSEEVVKKMKNYWRQLLNAKLITQRKFDNLTKAERGGLSELDKAGFIKRQLVETRQITKHVAQILDSRMNTKYDENDKLIREVKVITLKSKLVSDFRKDFQFYKVREINNYHHAHDAYLNAVVGTALIKKYPKLESEFVYGDYKVYDVRKMIAKSEQEIGKATAKYFFYSNIMNFFKTEITLANGEIRKRPLIETNGETGEIVWDKGRDFATVRKVLSMPQVNIVKKTEVQTGGFSKESILPKRNSDKLIARKKDWDPKKYGGFDSPTVAYSVLVVAKVEKGKSKKLKSVKELLGITIMERSSFEKNPIDFLEAKGYKEVKKDLIIKLPKYSLFELENGRKRMLASAGELQKGNELALPSKYVNFLYLASHYEKLKGSPEDNEQKQLFVEQHKHYLDEIIEQISEFSKRVILADANLDKVLSAYNKHRDKPIREQAENIIHLFTLTNLGAPAAFKYFDTTIDRKRYTSTKEVLDATLIHQSITGLYETRIDLSQLGGDGGGGGEAAAKGGSGGTLQLEEEYRLFEPESTQKQEMDIWLKNFPQAWAETGGMGTAHCQAPVLIQLKATATPISIRQYPMPHEAYQGIKPHIRRMLDQGILKPCQSPWNTPLLPVKKPGTEDYRPVQDLREVNKRVEDIHPTVPNPYNLLSTLPPSHPWYTVLDLKDAFFCLRLHSESQLLFAFEWRDPEIGLSGQLTWTRLPQGFKNSPTLFNEALHSDLADFRVRYPALVLLQYVDDLLLAAATRTECLEGTKALLETLGNKGYRASAKKAQICLQEVTYLGYSLKDGQRWLTKARKEAILSIPVPKNSRQVREFLGTAGYCRLWIPGFAELAAPLYPLTRPGTLFQWGTEQQLAFEDIKKALLSSPALGLPDITKPFELFIDENSGFAKGVLVQKLGPWKRPVAYLSKKLDTVASGWPPCLRMVAAIAILVKDAGKLTLGQPLTILTSHPVEALVRQPPNKWLSNARMTHYQAMLLDAERVHFGPTVSLNPATLLPLPSGGNHHDCLQILAETHGTRPDLTDQPLPDADLTWYTDGSSFIRNGEREAGAAVTTESEVIWAAPLPPGTSAQRAELIALTQALKMAEGKKLTVYTDSRYAFATTHVHGEIYRRRGWLTSEGKEIKNKNEILALLEALFLPKRLSIIHCPGHQKGDSPQAKGNRLADDTAKKAATETHSSLTVLPAGKRTADGSEFEKRTADGSEFESPKKKAKVE

SEQ ID NO: 6927 - protein, 2094 aa, synthetic construct
MPAAKRVKLDGGDKKYSIGLDIGTNSVGWAVITDEYKVPSKKFKVLGNTDRHSIKKNLIGALLFDSGETAEATRLKRTARRRYTRRKNRICYLQEIFSNEMAKVDDSFFHRLEESFLVEEDKKHERHPIFGNIVDEVAYHEKYPTIYHLRKKLVDSTDKADLRLIYLALAHMIKFRGHFLIEGDLNPDNSDVDKLFIQLVQTYNQLFEENPINASGVDAKAILSARLSKSRRLENLIAQLPGEKKNGLFGNLIALSLGLTPNFKSNFDLAEDAKLQLSKDTYDDDLDNLLAQIGDQYADLFLAAKNLSDAILLSDILRVNTEITKAPLSASMIKRYDEHHQDLTLLKALVRQQLPEKYKEIFFDQSKNGYAGYIDGGASQEEFYKFIKPILEKMDGTEELLVKLNREDLLRKQRTFDNGSIPHQIHLGELHAILRRQEDFYPFLKDNREKIEKILTFRIPYYVGPLARGNSRFAWMTRKSEETITPWNFEEVVDKGASAQSFIERMTNFDKNLPNEKVLPKHSLLYEYFTVYNELTKVKYVTEGMRKPAFLSGEQKKAIVDLLFKTNRKVTVKQLKEDYFKKIECFDSVEISGVEDRFNASLGTYHDLLKIIKDKDFLDNEENEDILEDIVLTLTLFEDREMIEERLKTYAHLFDDKVMKQLKRRRYTGWGRLSRKLINGIRDKQSGKTILDFLKSDGFANRNFMQLIHDDSLTFKEDIQKAQVSGQGDSLHEHIANLAGSPAIKKGILQTVKVVDELVKVMGRHKPENIVIEMARENQTTQKGQKNSRERMKRIEEGIKELGSQILKEHPVENTQLQNEKLYLYYLQNGRDMYVDQELDINRLSDYDVDHIVPQSFLKDDSIDNKVLTRSDKARGKSDNVPSEEVVKKMKNYWRQLLNAKLITQRKFDNLTKAERGGLSELDKAGFIKRQLVETRQITKHVAQILDSRMNTKYDENDKLIREVKVITLKSKLVSDFRKDFQFYKVREINNYHHAHDAYLNAVVGTALIKKYPKLESEFVYGDYKVYDVRKMIAKSEQEIGKATAKYFFYSNIMNFFKTEITLANGEIRKRPLIETNGETGEIVWDKGRDFATVRKVLSMPQVNIVKKTEVQTGGFSKESILPKRNSDKLIARKKDWDPKKYGGFDSPTVAYSVLVVAKVEKGKSKKLKSVKELLGITIMERSSFEKNPIDFLEAKGYKEVKKDLIIKLPKYSLFELENGRKRMLASAGELQKGNELALPSKYVNFLYLASHYEKLKGSPEDNEQKQLFVEQHKHYLDEIIEQISEFSKRVILADANLDKVLSAYNKHRDKPIREQAENIIHLFTLTNLGAPAAFKYFDTTIDRKRYTSTKEVLDATLIHQSITGLYETRIDLSQLGGDGGGGGEAAAKGGSGGVLNLEEEYRLHEKPVPSSIDPSWLQLFPTVWAERAGMGLANQVPPVVVELRSGASPVAVRQYPMSKEAREGIRPHIQKFLDLGVLVPCRSPWNTPLLPVKKPGTNDYRPVQDLREINKRVQDIHPTVPNPYNLLSSLPPSYTWYSVLDLKDAFFCLRLHPNSQPLFAFEWKDPEKGNTGQLTWTRLPQGFKNSPTLFNEALHRDLAPFRALNPQVVLLQYVDDLLVAAPTYEDCKKGTQKLLQELSKLGYRVSAKKAQLCQREVTYLGYLLKEGKRWLTPARKATVMKIPVPTTPRQVREFLGKAGFCRLFIPGFASLAAPLYPLTKPSIPFIWTEEHQQAFDHIKKALLSAPALALPDLTKPFTLYIDERAGVARGVLTQTLGPWRRPVAYLSKKLDPVASGWPTCLKAVAAVALLLKDADKLTLGQNVTVIASHSLESIVRQPPDRWMTNARMTHYQSLLLNERVSFAPPAVLNPATLLPVESEATPVHRCSEILAEETGTRRDLEDQPLPGVPTWYTDGSSFITEGKRRAGAPIVDGKRTVWASSLPEGTSAQKAELVALTQALRLAEGKNINIYTDSRYAFATAHIHGAIYKQRGWLTSAGKDIKNKEEILALLEAIHLPRRVAIIHCPGHQRGSNPVATGNRRADEAAKQAALSTRVLAGTTKPAGKRTADGSEFEKRTADGSEFESPKKKAKVE

SEQ ID NO: 6928 - protein, 2218 aa, synthetic construct
MPAAKRVKLDGGDKKYSIGLDIGTNSVGWAVITDEYKVPSKKFKVLGNTDRHSIKKNLIGALLFDSGETAEATRLKRTARRRYTRRKNRICYLQEIFSNEMAKVDDSFFHRLEESFLVEEDKKHERHPIFGNIVDEVAYHEKYPTIYHLRKKLVDSTDKADLRLIYLALAHMIKFRGHFLIEGDLNPDNSDVDKLFIQLVQTYNQLFEENPINASGVDAKAILSARLSKSRRLENLIAQLPGEKKNGLFGNLIALSLGLTPNFKSNFDLAEDAKLQLSKDTYDDDLDNLLAQIGDQYADLFLAAKNLSDAILLSDILRVNTEITKAPLSASMIKRYDEHHQDLTLLKALVRQQLPEKYKEIFFDQSKNGYAGYIDGGASQEEFYKFIKPILEKMDGTEELLVKLNREDLLRKQRTFDNGSIPHQIHLGELHAILRRQEDFYPFLKDNREKIEKILTFRIPYYVGPLARGNSRFAWMTRKSEETITPWNFEEVVDKGASAQSFIERMTNFDKNLPNEKVLPKHSLLYEYFTVYNELTKVKYVTEGMRKPAFLSGEQKKAIVDLLFKTNRKVTVKQLKEDYFKKIECFDSVEISGVEDRFNASLGTYHDLLKIIKDKDFLDNEENEDILEDIVLTLTLFEDREMIEERLKTYAHLFDDKVMKQLKRRRYTGWGRLSRKLINGIRDKQSGKTILDFLKSDGFANRNFMQLIHDDSLTFKEDIQKAQVSGQGDSLHEHIANLAGSPAIKKGILQTVKVVDELVKVMGRHKPENIVIEMARENQTTQKGQKNSRERMKRIEEGIKELGSQILKEHPVENTQLQNEKLYLYYLQNGRDMYVDQELDINRLSDYDVDHIVPQSFLKDDSIDNKVLTRSDKARGKSDNVPSEEVVKKMKNYWRQLLNAKLITQRKFDNLTKAERGGLSELDKAGFIKRQLVETRQITKHVAQILDSRMNTKYDENDKLIREVKVITLKSKLVSDFRKDFQFYKVREINNYHHAHDAYLNAVVGTALIKKYPKLESEFVYGDYKVYDVRKMIAKSEQEIGKATAKYFFYSNIMNFFKTEITLANGEIRKRPLIETNGETGEIVWDKGRDFATVRKVLSMPQVNIVKKTEVQTGGFSKESILPKRNSDKLIARKKDWDPKKYGGFDSPTVAYSVLVVAKVEKGKSKKLKSVKELLGITIMERSSFEKNPIDFLEAKGYKEVKKDLIIKLPKYSLFELENGRKRMLASAGELQKGNELALPSKYVNFLYLASHYEKLKGSPEDNEQKQLFVEQHKHYLDEIIEQISEFSKRVILADANLDKVLSAYNKHRDKPIREQAENIIHLFTLTNLGAPAAFKYFDTTIDRKRYTSTKEVLDATLIHQSITGLYETRIDLSQLGGDGGGGGEAAAKGGSGGTLGDQGSRGSDPLPEPRVTLTVEGIPTEFLVNTGAEHSVLTKPMGKMGSKRTVVAGATGSKVYPWTTKRLLKIGQKQVTHSFLVIPECPAPLLGRDLLTKLKAQIQFSTEGPQVTWEDRPAMCLVLNLEEEYRLHEKPVPPSIDPSWLQLFPMVWAEKAGMGLANQVPPVVVELKSDASPVAVRQYPMSKEAREGIRPHIQRFLDLGILVPCQSPWNTPLLPVKKPGTNDYRPVQDLREVNKRVQDIHPTVPNPYNLLSSLPPSHTWYSVLDLKDAFFCLKLHPNSQPLFAFEWRDPEKGNTGQLTWTRLPQGFKNSPTLFNEALHRDLASFRALNPQVVMLQYVDDLLVAAPTYRDCKEGTRRLLQELSKLGYRVSAKKAQLCREEVTYLGYLLKGGKRWLTPARKATVMKIPTPTTPRQVREFLGTAGFCRLWIPGFASLAAPLYPLTRPKVPFTWTEAHQEAFGRIKEALLSAPALALPDLTKPFALYVDEKEGVARGVLTQTLGPWRRPVAYLSKKLDPVASGWPTCLKAIAAVALLLKDADKLTLGQNVLVIAPHNLESIVRQPPDRWMTNARMTHYQSLLLNERVSFAPPAILNPATLLPVESDDTPIHICSEILAEETGTRPDLRDQPLPGVPAWYTDGSSFIMDGRRQAGAAIVDNKRTVWASNLPEGTSAQKAELIALTQALRLAEGKSINIYTDSRYAFATAHVHGAIYKQRGWLTSAGKDIKNKEEILALLEAIHLPKRVAIIHCPGHQRGTDPVATGNRKADEAAKQAAQSTRILTETTKNAGKRTADGSEFEKRTADGSEFESPKKKAKVE

SEQ ID NO: 6929 - protein, 2096 aa, synthetic construct
MPAAKRVKLDGGDKKYSIGLDIGTNSVGWAVITDEYKVPSKKFKVLGNTDRHSIKKNLIGALLFDSGETAEATRLKRTARRRYTRRKNRICYLQEIFSNEMAKVDDSFFHRLEESFLVEEDKKHERHPIFGNIVDEVAYHEKYPTIYHLRKKLVDSTDKADLRLIYLALAHMIKFRGHFLIEGDLNPDNSDVDKLFIQLVQTYNQLFEENPINASGVDAKAILSARLSKSRRLENLIAQLPGEKKNGLFGNLIALSLGLTPNFKSNFDLAEDAKLQLSKDTYDDDLDNLLAQIGDQYADLFLAAKNLSDAILLSDILRVNTEITKAPLSASMIKRYDEHHQDLTLLKALVRQQLPEKYKEIFFDQSKNGYAGYIDGGASQEEFYKFIKPILEKMDGTEELLVKLNREDLLRKQRTFDNGSIPHQIHLGELHAILRRQEDFYPFLKDNREKIEKILTFRIPYYVGPLARGNSRFAWMTRKSEETITPWNFEEVVDKGASAQSFIERMTNFDKNLPNEKVLPKHSLLYEYFTVYNELTKVKYVTEGMRKPAFLSGEQKKAIVDLLFKTNRKVTVKQLKEDYFKKIECFDSVEISGVEDRFNASLGTYHDLLKIIKDKDFLDNEENEDILEDIVLTLTLFEDREMIEERLKTYAHLFDDKVMKQLKRRRYTGWGRLSRKLINGIRDKQSGKTILDFLKSDGFANRNFMQLIHDDSLTFKEDIQKAQVSGQGDSLHEHIANLAGSPAIKKGILQTVKVVDELVKVMGRHKPENIVIEMARENQTTQKGQKNSRERMKRIEEGIKELGSQILKEHPVENTQLQNEKLYLYYLQNGRDMYVDQELDINRLSDYDVDHIVPQSFLKDDSIDNKVLTRSDKARGKSDNVPSEEVVKKMKNYWRQLLNAKLITQRKFDNLTKAERGGLSELDKAGFIKRQLVETRQITKHVAQILDSRMNTKYDENDKLIREVKVITLKSKLVSDFRKDFQFYKVREINNYHHAHDAYLNAVVGTALIKKYPKLESEFVYGDYKVYDVRKMIAKSEQEIGKATAKYFFYSNIMNFFKTEITLANGEIRKRPLIETNGETGEIVWDKGRDFATVRKVLSMPQVNIVKKTEVQTGGFSKESILPKRNSDKLIARKKDWDPKKYGGFDSPTVAYSVLVVAKVEKGKSKKLKSVKELLGITIMERSSFEKNPIDFLEAKGYKEVKKDLIIKLPKYSLFELENGRKRMLASAGELQKGNELALPSKYVNFLYLASHYEKLKGSPEDNEQKQLFVEQHKHYLDEIIEQISEFSKRVILADANLDKVLSAYNKHRDKPIREQAENIIHLFTLTNLGAPAAFKYFDTTIDRKRYTSTKEVLDATLIHQSITGLYETRIDLSQLGGDGGGGGEAAAKGGSGGTLNIEDEYRLHETSKGPDVPLGSTWLSDFPQAWAETGGMGLAFRQAPLIISLKATSTPVSIKQYPMSQEARLGIKPHIQRLLDQGILVPCQSPWNTPLLPVKKPGTNDYRPVQDLREVNKRVEDIHPTVPNPYNLLSGLPPSHQWYTVLDLKDAFFCLRLHPTSQSLFAFEWKDPEMGISGQLTWTRLPQGFKNSPTLFNEALHRDLADFRIQHPDLILLQYVDDLLLAATSELDCQQGTRALLQTLGDLGYRASAKKAQICQKQVKYLGYLLKEGQRWLTEARKETVMGQPTPKTPRQLREFLGKAGLCRLFIPGFAEMAAPLYPLTKPGTLFKWGPDQQKAYQEIKQALLTAPALGLPDLTKPFELFVDEKQGYAKGVLTQKLGPWRRPVAYLSKKLDPVAAGWPPCLRMVAAIAVLTKDVGKLTMGQPLVILAPHAVEALVKQPPDRWLSNARMTHYQALLLDTDRVQFGPIVALNPATLLPLPEEGLQHDCLDILAEAHGTRPDLTDQPLPDADHTWYTDGSSFLQEGQRRAGAAVTTETEVIWAKALPAGTSAQRAELIALTQALKMAAGKKLNVYTDSRYAFATAHIHGEIYRRRGWLTSEGKEIKNKDEILALLKALFLPKRLSIIHCPGHQKGNHAEARGNRMADQAAREVATRETPETSTLLAGKRTADGSEFEKRTADGSEFESPKKKAKVE

SEQ ID NO: 6930 - protein, 2096 aa, synthetic construct
MPAAKRVKLDGGDKKYSIGLDIGTNSVGWAVITDEYKVPSKKFKVLGNTDRHSIKKNLIGALLFDSGETAEATRLKRTARRRYTRRKNRICYLQEIFSNEMAKVDDSFFHRLEESFLVEEDKKHERHPIFGNIVDEVAYHEKYPTIYHLRKKLVDSTDKADLRLIYLALAHMIKFRGHFLIEGDLNPDNSDVDKLFIQLVQTYNQLFEENPINASGVDAKAILSARLSKSRRLENLIAQLPGEKKNGLFGNLIALSLGLTPNFKSNFDLAEDAKLQLSKDTYDDDLDNLLAQIGDQYADLFLAAKNLSDAILLSDILRVNTEITKAPLSASMIKRYDEHHQDLTLLKALVRQQLPEKYKEIFFDQSKNGYAGYIDGGASQEEFYKFIKPILEKMDGTEELLVKLNREDLLRKQRTFDNGSIPHQIHLGELHAILRRQEDFYPFLKDNREKIEKILTFRIPYYVGPLARGNSRFAWMTRKSEETITPWNFEEVVDKGASAQSFIERMTNFDKNLPNEKVLPKHSLLYEYFTVYNELTKVKYVTEGMRKPAFLSGEQKKAIVDLLFKTNRKVTVKQLKEDYFKKIECFDSVEISGVEDRFNASLGTYHDLLKIIKDKDFLDNEENEDILEDIVLTLTLFEDREMIEERLKTYAHLFDDKVMKQLKRRRYTGWGRLSRKLINGIRDKQSGKTILDFLKSDGFANRNFMQLIHDDSLTFKEDIQKAQVSGQGDSLHEHIANLAGSPAIKKGILQTVKVVDELVKVMGRHKPENIVIEMARENQTTQKGQKNSRERMKRIEEGIKELGSQILKEHPVENTQLQNEKLYLYYLQNGRDMYVDQELDINRLSDYDVDHIVPQSFLKDDSIDNKVLTRSDKARGKSDNVPSEEVVKKMKNYWRQLLNAKLITQRKFDNLTKAERGGLSELDKAGFIKRQLVETRQITKHVAQILDSRMNTKYDENDKLIREVKVITLKSKLVSDFRKDFQFYKVREINNYHHAHDAYLNAVVGTALIKKYPKLESEFVYGDYKVYDVRKMIAKSEQEIGKATAKYFFYSNIMNFFKTEITLANGEIRKRPLIETNGETGEIVWDKGRDFATVRKVLSMPQVNIVKKTEVQTGGFSKESILPKRNSDKLIARKKDWDPKKYGGFDSPTVAYSVLVVAKVEKGKSKKLKSVKELLGITIMERSSFEKNPIDFLEAKGYKEVKKDLIIKLPKYSLFELENGRKRMLASAGELQKGNELALPSKYVNFLYLASHYEKLKGSPEDNEQKQLFVEQHKHYLDEIIEQISEFSKRVILADANLDKVLSAYNKHRDKPIREQAENIIHLFTLTNLGAPAAFKYFDTTIDRKRYTSTKEVLDATLIHQSITGLYETRIDLSQLGGDGGGGGEAAAKGGSGGTLNIEDEYRLHETSKGPDVPLGSTWLSDFPQAWAETGGMGLAVRQAPLIIPLKATSTPVSIKQYPMSQEARLGIKPHIQRLLDQGILVPCQSPWNTPLLPVKKPGTNDYRPVQDLREVNKRVEDIHPTVPNPYNLLSGLPPSHQWYTVLDLKDAFFCLRLHPTSQSLFAFEWRDPEMGISGQLTWTRLPQGFKNSPTLFNEALHRDLADFRIQHPDLILLQYVDDLLLAATSELDCQQGTRALLQTLGDLGYRASAKKAQICQKQVKYLGYLLKEGQRWLTEARKETVMGQPTPKTPRQLREFLGTAGFCRLWIPGFAEMAAPLYPLTKPGTLFEWGPDQQKAYQEIKQALLTAPALGLPDLTKPFELFVDEKQGYAKGVLTQKLGPWRRPVAYLSKKLDPVAAGWPPCLRMVAAIAVLTKDAGKLTMGQPLVILAPHAVEALVKQPPDRWLSNARMTHYQALLLDTDRVQFGPIVALNPATLLPLPEEGLQHDCLDILAEAHGTRPDLTDQPLPDADHTWYTDGSSFLQEGQRKAGAAVTTETEVVWAKALPAGTSAQRAELIALTQALKMAEGKKLNVYTDSRYAFATAHIHGEIYRRRGWLTSEGKEIKNKDEILALLKALFLPKRLSIIHCPGHQKGNRAEARGNRMADQAAREVATRETPETSTLLAGKRTADGSEFEKRTADGSEFESPKKKAKVE

SEQ ID NO: 6931 - protein, 2090 aa, synthetic construct
MPAAKRVKLDGGDKKYSIGLDIGTNSVGWAVITDEYKVPSKKFKVLGNTDRHSIKKNLIGALLFDSGETAEATRLKRTARRRYTRRKNRICYLQEIFSNEMAKVDDSFFHRLEESFLVEEDKKHERHPIFGNIVDEVAYHEKYPTIYHLRKKLVDSTDKADLRLIYLALAHMIKFRGHFLIEGDLNPDNSDVDKLFIQLVQTYNQLFEENPINASGVDAKAILSARLSKSRRLENLIAQLPGEKKNGLFGNLIALSLGLTPNFKSNFDLAEDAKLQLSKDTYDDDLDNLLAQIGDQYADLFLAAKNLSDAILLSDILRVNTEITKAPLSASMIKRYDEHHQDLTLLKALVRQQLPEKYKEIFFDQSKNGYAGYIDGGASQEEFYKFIKPILEKMDGTEELLVKLNREDLLRKQRTFDNGSIPHQIHLGELHAILRRQEDFYPFLKDNREKIEKILTFRIPYYVGPLARGNSRFAWMTRKSEETITPWNFEEVVDKGASAQSFIERMTNFDKNLPNEKVLPKHSLLYEYFTVYNELTKVKYVTEGMRKPAFLSGEQKKAIVDLLFKTNRKVTVKQLKEDYFKKIECFDSVEISGVEDRFNASLGTYHDLLKIIKDKDFLDNEENEDILEDIVLTLTLFEDREMIEERLKTYAHLFDDKVMKQLKRRRYTGWGRLSRKLINGIRDKQSGKTILDFLKSDGFANRNFMQLIHDDSLTFKEDIQKAQVSGQGDSLHEHIANLAGSPAIKKGILQTVKVVDELVKVMGRHKPENIVIEMARENQTTQKGQKNSRERMKRIEEGIKELGSQILKEHPVENTQLQNEKLYLYYLQNGRDMYVDQELDINRLSDYDVDHIVPQSFLKDDSIDNKVLTRSDKARGKSDNVPSEEVVKKMKNYWRQLLNAKLITQRKFDNLTKAERGGLSELDKAGFIKRQLVETRQITKHVAQILDSRMNTKYDENDKLIREVKVITLKSKLVSDFRKDFQFYKVREINNYHHAHDAYLNAVVGTALIKKYPKLESEFVYGDYKVYDVRKMIAKSEQEIGKATAKYFFYSNIMNFFKTEITLANGEIRKRPLIETNGETGEIVWDKGRDFATVRKVLSMPQVNIVKKTEVQTGGFSKESILPKRNSDKLIARKKDWDPKKYGGFDSPTVAYSVLVVAKVEKGKSKKLKSVKELLGITIMERSSFEKNPIDFLEAKGYKEVKKDLIIKLPKYSLFELENGRKRMLASAGELQKGNELALPSKYVNFLYLASHYEKLKGSPEDNEQKQLFVEQHKHYLDEIIEQISEFSKRVILADANLDKVLSAYNKHRDKPIREQAENIIHLFTLTNLGAPAAFKYFDTTIDRKRYTSTKEVLDATLIHQSITGLYETRIDLSQLGGDGGGGGEAAAKGGSGGTLQLDDEYRLYSPLVKPDQNIQFWLEQFPQAWAETAGMGLAKQVPPQVIQLKASATPVSVRQYPLSKEAQEGIRPHVQRLIQQGILVPVQSPWNTPLLPVRKPGTNDYRPVQDLREVNKRVQDIHPTVPNPYNLLCALPPQRSWYTVLDLKDAFFCLRLHPTSQPLFAFEWRDPGTGRTGQLTWTRLPQGFKNSPTIFDEALHRDLANFRIQHPQVTLLQYVDDLLLAGATKQDCLEGTKALLLELSDLGYRASAKKAQICRREVTYLGYSLRDGQRWLTEARKKTVVQIPAPTTAKQVREFLGTAGFCRLWIPGFATLAAPLYPLTKEKGEFSWAPEHQKAFDAIKKALLSAPALALPDVTKPFTLYVDERKGVARGVLTQTLGPWRRPVAYLSKKLDPVASGWPVCLKAIAAVAILVKDADKLTLGQNITVIAPHALENIVRQPPDRWMTNARMTHYQSLLLTERVTFAPPAALNPATLLPEETDEPVTHDCHQLLIEETGVRKDLTDIPLTGEVLTWFTDGSSYVVEGKRMAGAAVVDGTRTIWASSLPEGTSAQKAELMALTQALRLAEGKSINIYTDSRYAFATAHVHGAIYKQRGLLTSAGREIKNKEEILSLLEALHLPKRLAIIHCPGHQKAKDPISRGNQMADRVAKQAAQGVNLLAGKRTADGSEFEKRTADGSEFESPKKKAKVE

SEQ ID NO: 6932 - protein, 2087 aa, synthetic construct
MPAAKRVKLDGGDKKYSIGLDIGTNSVGWAVITDEYKVPSKKFKVLGNTDRHSIKKNLIGALLFDSGETAEATRLKRTARRRYTRRKNRICYLQEIFSNEMAKVDDSFFHRLEESFLVEEDKKHERHPIFGNIVDEVAYHEKYPTIYHLRKKLVDSTDKADLRLIYLALAHMIKFRGHFLIEGDLNPDNSDVDKLFIQLVQTYNQLFEENPINASGVDAKAILSARLSKSRRLENLIAQLPGEKKNGLFGNLIALSLGLTPNFKSNFDLAEDAKLQLSKDTYDDDLDNLLAQIGDQYADLFLAAKNLSDAILLSDILRVNTEITKAPLSASMIKRYDEHHQDLTLLKALVRQQLPEKYKEIFFDQSKNGYAGYIDGGASQEEFYKFIKPILEKMDGTEELLVKLNREDLLRKQRTFDNGSIPHQIHLGELHAILRRQEDFYPFLKDNREKIEKILTFRIPYYVGPLARGNSRFAWMTRKSEETITPWNFEEVVDKGASAQSFIERMTNFDKNLPNEKVLPKHSLLYEYFTVYNELTKVKYVTEGMRKPAFLSGEQKKAIVDLLFKTNRKVTVKQLKEDYFKKIECFDSVEISGVEDRFNASLGTYHDLLKIIKDKDFLDNEENEDILEDIVLTLTLFEDREMIEERLKTYAHLFDDKVMKQLKRRRYTGWGRLSRKLINGIRDKQSGKTILDFLKSDGFANRNFMQLIHDDSLTFKEDIQKAQVSGQGDSLHEHIANLAGSPAIKKGILQTVKVVDELVKVMGRHKPENIVIEMARENQTTQKGQKNSRERMKRIEEGIKELGSQILKEHPVENTQLQNEKLYLYYLQNGRDMYVDQELDINRLSDYDVDHIVPQSFLKDDSIDNKVLTRSDKARGKSDNVPSEEVVKKMKNYWRQLLNAKLITQRKFDNLTKAERGGLSELDKAGFIKRQLVETRQITKHVAQILDSRMNTKYDENDKLIREVKVITLKSKLVSDFRKDFQFYKVREINNYHHAHDAYLNAVVGTALIKKYPKLESEFVYGDYKVYDVRKMIAKSEQEIGKATAKYFFYSNIMNFFKTEITLANGEIRKRPLIETNGETGEIVWDKGRDFATVRKVLSMPQVNIVKKTEVQTGGFSKESILPKRNSDKLIARKKDWDPKKYGGFDSPTVAYSVLVVAKVEKGKSKKLKSVKELLGITIMERSSFEKNPIDFLEAKGYKEVKKDLIIKLPKYSLFELENGRKRMLASAGELQKGNELALPSKYVNFLYLASHYEKLKGSPEDNEQKQLFVEQHKHYLDEIIEQISEFSKRVILADANLDKVLSAYNKHRDKPIREQAENIIHLFTLTNLGAPAAFKYFDTTIDRKRYTSTKEVLDATLIHQSITGLYETRIDLSQLGGDGGGGGEAAAKGGSGGIPWLMKKPLQLTTLVPLQEYEERLLKQTMLTGSYKEKLQSLFLKYDALWQHWENQVGHRRIKPHHIATGTVNPRPQKQYPINPKAKASIQTVINDLLKQGVLIQQNSIMNTPVYPVPKPDGKWRMVLDYREVNKTIPLIAAQNQHSAGILSSIFRGKYKTTLDLSNGFWAHSITPESYWLTAFTWLGQQYCWTRLPQGFLNSPALFNADVVDLLKEVPNVQVYVDDIYISHDDPREHLEQLEKVFSLLLNAGYVVSLKKSEIAQHEVEFLGFNITKEGRGLTETFKQKLLNITPPRDLKQLQSILGLLNFARNFIPNFSELVKPLYNIIATAPGKYITWTTDNSQQLQNIISMLNSAENLEERNPEVRLIMKVNTSPSAGYIRFYNEFAKRPIMYLNYVYTKAEVKFTNTEKLLTTIHKGLIKALDLGMGQEILVYSPIVSMTKIQKTPLPERKALPIRWITWMSYLEDPRIQFHYDKTLPELQQVPTVTDDIIAKIKHPSEFSMVFYTDGSAIKHPNVNKSHNAGMGIAQVQFKPEFTVINTWSIPLGDHTAQLAEVAAVEFACKKALKIDGPVLIVTDSFYVAESVNKELPYWQSNGFFNNKKKPLKHVSKWKSIADCIQLKPDIIIIHEKGHQPTASTFHTEGNNLADKLATQGSYVVNAGKRTADGSEFEKRTADGSEFESPKKKAKVE

SEQ ID NO: 6933 - protein, 2098 aa, synthetic construct
MPAAKRVKLDGGDKKYSIGLDIGTNSVGWAVITDEYKVPSKKFKVLGNTDRHSIKKNLIGALLFDSGETAEATRLKRTARRRYTRRKNRICYLQEIFSNEMAKVDDSFFHRLEESFLVEEDKKHERHPIFGNIVDEVAYHEKYPTIYHLRKKLVDSTDKADLRLIYLALAHMIKFRGHFLIEGDLNPDNSDVDKLFIQLVQTYNQLFEENPINASGVDAKAILSARLSKSRRLENLIAQLPGEKKNGLFGNLIALSLGLTPNFKSNFDLAEDAKLQLSKDTYDDDLDNLLAQIGDQYADLFLAAKNLSDAILLSDILRVNTEITKAPLSASMIKRYDEHHQDLTLLKALVRQQLPEKYKEIFFDQSKNGYAGYIDGGASQEEFYKFIKPILEKMDGTEELLVKLNREDLLRKQRTFDNGSIPHQIHLGELHAILRRQEDFYPFLKDNREKIEKILTFRIPYYVGPLARGNSRFAWMTRKSEETITPWNFEEVVDKGASAQSFIERMTNFDKNLPNEKVLPKHSLLYEYFTVYNELTKVKYVTEGMRKPAFLSGEQKKAIVDLLFKTNRKVTVKQLKEDYFKKIECFDSVEISGVEDRFNASLGTYHDLLKIIKDKDFLDNEENEDILEDIVLTLTLFEDREMIEERLKTYAHLFDDKVMKQLKRRRYTGWGRLSRKLINGIRDKQSGKTILDFLKSDGFANRNFMQLIHDDSLTFKEDIQKAQVSGQGDSLHEHIANLAGSPAIKKGILQTVKVVDELVKVMGRHKPENIVIEMARENQTTQKGQKNSRERMKRIEEGIKELGSQILKEHPVENTQLQNEKLYLYYLQNGRDMYVDQELDINRLSDYDVDHIVPQSFLKDDSIDNKVLTRSDKARGKSDNVPSEEVVKKMKNYWRQLLNAKLITQRKFDNLTKAERGGLSELDKAGFIKRQLVETRQITKHVAQILDSRMNTKYDENDKLIREVKVITLKSKLVSDFRKDFQFYKVREINNYHHAHDAYLNAVVGTALIKKYPKLESEFVYGDYKVYDVRKMIAKSEQEIGKATAKYFFYSNIMNFFKTEITLANGEIRKRPLIETNGETGEIVWDKGRDFATVRKVLSMPQVNIVKKTEVQTGGFSKESILPKRNSDKLIARKKDWDPKKYGGFDSPTVAYSVLVVAKVEKGKSKKLKSVKELLGITIMERSSFEKNPIDFLEAKGYKEVKKDLIIKLPKYSLFELENGRKRMLASAGELQKGNELALPSKYVNFLYLASHYEKLKGSPEDNEQKQLFVEQHKHYLDEIIEQISEFSKRVILADANLDKVLSAYNKHRDKPIREQAENIIHLFTLTNLGAPAAFKYFDTTIDRKRYTSTKEVLDATLIHQSITGLYETRIDLSQLGGDGGEAAAKGGSGGGGGTAPLEEEYRLFLEAPIQNVTLLEQWKREIPKVWAEINPPGLASTQAPIHVQLLSTALPVRVRQYPITLEAKRSLRETIRKFRAAGILRPVHSPWNTPLLPVRKSGTSEYRMVQDLREVNKRVETIHPTVPNPYTLLSLLPPDRIWYSVLDLKDAFFCIPLAPESQLIFAFEWADAEEGESGQLTWTRLPQGFKNSPTLFNEALNRDLQGFRLDHPSVSLLQYVDDLLIAADTQAACLSATRDLLMTLAELGYRVSGKKAQLCQEEVTYLGFKIHKGSRSLSNSRTQAILQIPVPKTKRQVREFLGTIGYCRLWIPGFAELAQPLYAATRPGNDPLVWGEKEEEAFQSLKLALTQPPALALPSLDKPFQLFVEETSGAAKGVLTQALGPWKRPVAYLSKRLDPVAAGWPRCLRAIAAAALLTREASKLTFGQDIEITSSHNLESLLRSPPDKWLTNARITQYQVLLLDPPRVRFKQTAALNPATLLPETDDTLPIHHCLDTLDSLTSTRPDLTDQPLAQAEATLFTDGSSYIRDGKRYAGAAVVTLDSVIWAEPLPIGTSAQKAELIALTKALEWSKDKSVNIYTDSRYAFATLHVHGMIYRERGWLTAGGKAIKNAPEILALLTAVWLPKRVAVMHCKGHQKDDAPTSTGNRRADEVAREVAIRPLSTQATISAGKRTADGSEFEKRTADGSEFESPKKKAKVE

SEQ ID NO: 6934 - protein, 2102 aa, synthetic construct
MPAAKRVKLDGGDKKYSIGLDIGTNSVGWAVITDEYKVPSKKFKVLGNTDRHSIKKNLIGALLFDSGETAEATRLKRTARRRYTRRKNRICYLQEIFSNEMAKVDDSFFHRLEESFLVEEDKKHERHPIFGNIVDEVAYHEKYPTIYHLRKKLVDSTDKADLRLIYLALAHMIKFRGHFLIEGDLNPDNSDVDKLFIQLVQTYNQLFEENPINASGVDAKAILSARLSKSRRLENLIAQLPGEKKNGLFGNLIALSLGLTPNFKSNFDLAEDAKLQLSKDTYDDDLDNLLAQIGDQYADLFLAAKNLSDAILLSDILRVNTEITKAPLSASMIKRYDEHHQDLTLLKALVRQQLPEKYKEIFFDQSKNGYAGYIDGGASQEEFYKFIKPILEKMDGTEELLVKLNREDLLRKQRTFDNGSIPHQIHLGELHAILRRQEDFYPFLKDNREKIEKILTFRIPYYVGPLARGNSRFAWMTRKSEETITPWNFEEVVDKGASAQSFIERMTNFDKNLPNEKVLPKHSLLYEYFTVYNELTKVKYVTEGMRKPAFLSGEQKKAIVDLLFKTNRKVTVKQLKEDYFKKIECFDSVEISGVEDRFNASLGTYHDLLKIIKDKDFLDNEENEDILEDIVLTLTLFEDREMIEERLKTYAHLFDDKVMKQLKRRRYTGWGRLSRKLINGIRDKQSGKTILDFLKSDGFANRNFMQLIHDDSLTFKEDIQKAQVSGQGDSLHEHIANLAGSPAIKKGILQTVKVVDELVKVMGRHKPENIVIEMARENQTTQKGQKNSRERMKRIEEGIKELGSQILKEHPVENTQLQNEKLYLYYLQNGRDMYVDQELDINRLSDYDVDHIVPQSFLKDDSIDNKVLTRSDKARGKSDNVPSEEVVKKMKNYWRQLLNAKLITQRKFDNLTKAERGGLSELDKAGFIKRQLVETRQITKHVAQILDSRMNTKYDENDKLIREVKVITLKSKLVSDFRKDFQFYKVREINNYHHAHDAYLNAVVGTALIKKYPKLESEFVYGDYKVYDVRKMIAKSEQEIGKATAKYFFYSNIMNFFKTEITLANGEIRKRPLIETNGETGEIVWDKGRDFATVRKVLSMPQVNIVKKTEVQTGGFSKESILPKRNSDKLIARKKDWDPKKYGGFDSPTVAYSVLVVAKVEKGKSKKLKSVKELLGITIMERSSFEKNPIDFLEAKGYKEVKKDLIIKLPKYSLFELENGRKRMLASAGELQKGNELALPSKYVNFLYLASHYEKLKGSPEDNEQKQLFVEQHKHYLDEIIEQISEFSKRVILADANLDKVLSAYNKHRDKPIREQAENIIHLFTLTNLGAPAAFKYFDTTIDRKRYTSTKEVLDATLIHQSITGLYETRIDLSQLGGDGGEAAAKGGSGGGGGTVSLQDEHRLFDIPVTTSLPDVWLQDFPQAWAETGGLGRAKCQAPIIIDLKPTAVPVSIKQYPMSLEAHMGIRQHIIKFLELGVLRPCRSPWNTPLLPVKKPGTQDYRPVQDLREINKRTVDIHPTVPNPYNLLSTLKPDYSWYTVLDLKDAFFCLPLAPQSQELFAFEWKDPERGISGQLTWTRLPQGFKNSPTLFDEALHRDLTDFRTQHPEVTLLQYVDDLLLAAPTKKACTQGTRHLLQELGEKGYRASAKKAQICQTKVTYLGYILSEGKRWLTPGRIETVARIPPPRNPREVREFLGTAGFCRLWIPGFAELAAPLYALTKESTPFTWQTEHQLAFEALKKALLSAPALGLPDTSKPFTLFLDERQGIAKGVLTQKLGPWKRPVAYLSKKLDPVAAGWPPCLRIMAATAMLVKDSAKLTLGQPLTVITPHTLEAIVRQPPDRWITNARLTHYQALLLDTDRVQFGPPVTLNPATLLPVPENQPSPHDCRQVLAETHGTREDLKDQELPDADHTWYTDGSSYLDSGTRRAGAAVVDGHNTIWAQSLPPGTSAQKAELIALTKALELSKGKKANIYTDSRYAFATAHTHGSIYERRGLLTSEGKEIKNKAEIIALLKALFLPQEVAIIHCPGHQKGQDPVAVGNRQADRVARQAAMAEVLTLATEPDNTSHITAGKRTADGSEFEKRTADGSEFESPKKKAKVE

SEQ ID NO: 6935 - protein, 2102 aa, synthetic construct
MPAAKRVKLDGGDKKYSIGLDIGTNSVGWAVITDEYKVPSKKFKVLGNTDRHSIKKNLIGALLFDSGETAEATRLKRTARRRYTRRKNRICYLQEIFSNEMAKVDDSFFHRLEESFLVEEDKKHERHPIFGNIVDEVAYHEKYPTIYHLRKKLVDSTDKADLRLIYLALAHMIKFRGHFLIEGDLNPDNSDVDKLFIQLVQTYNQLFEENPINASGVDAKAILSARLSKSRRLENLIAQLPGEKKNGLFGNLIALSLGLTPNFKSNFDLAEDAKLQLSKDTYDDDLDNLLAQIGDQYADLFLAAKNLSDAILLSDILRVNTEITKAPLSASMIKRYDEHHQDLTLLKALVRQQLPEKYKEIFFDQSKNGYAGYIDGGASQEEFYKFIKPILEKMDGTEELLVKLNREDLLRKQRTFDNGSIPHQIHLGELHAILRRQEDFYPFLKDNREKIEKILTFRIPYYVGPLARGNSRFAWMTRKSEETITPWNFEEVVDKGASAQSFIERMTNFDKNLPNEKVLPKHSLLYEYFTVYNELTKVKYVTEGMRKPAFLSGEQKKAIVDLLFKTNRKVTVKQLKEDYFKKIECFDSVEISGVEDRFNASLGTYHDLLKIIKDKDFLDNEENEDILEDIVLTLTLFEDREMIEERLKTYAHLFDDKVMKQLKRRRYTGWGRLSRKLINGIRDKQSGKTILDFLKSDGFANRNFMQLIHDDSLTFKEDIQKAQVSGQGDSLHEHIANLAGSPAIKKGILQTVKVVDELVKVMGRHKPENIVIEMARENQTTQKGQKNSRERMKRIEEGIKELGSQILKEHPVENTQLQNEKLYLYYLQNGRDMYVDQELDINRLSDYDVDHIVPQSFLKDDSIDNKVLTRSDKARGKSDNVPSEEVVKKMKNYWRQLLNAKLITQRKFDNLTKAERGGLSELDKAGFIKRQLVETRQITKHVAQILDSRMNTKYDENDKLIREVKVITLKSKLVSDFRKDFQFYKVREINNYHHAHDAYLNAVVGTALIKKYPKLESEFVYGDYKVYDVRKMIAKSEQEIGKATAKYFFYSNIMNFFKTEITLANGEIRKRPLIETNGETGEIVWDKGRDFATVRKVLSMPQVNIVKKTEVQTGGFSKESILPKRNSDKLIARKKDWDPKKYGGFDSPTVAYSVLVVAKVEKGKSKKLKSVKELLGITIMERSSFEKNPIDFLEAKGYKEVKKDLIIKLPKYSLFELENGRKRMLASAGELQKGNELALPSKYVNFLYLASHYEKLKGSPEDNEQKQLFVEQHKHYLDEIIEQISEFSKRVILADANLDKVLSAYNKHRDKPIREQAENIIHLFTLTNLGAPAAFKYFDTTIDRKRYTSTKEVLDATLIHQSITGLYETRIDLSQLGGDGGEAAAKGGSGGGGGTVSLQDEHRLFDIPVTTSLPDVWLQDFPQAWAETGGLGRAKCQAPIIIDLKPTAVPVSIKQYPMSLEAHMGIRQHIIKFLELGVLRPCRSPWNTPLLPVKKPGTQDYRPVQDLREINKRTVDIHPTVPNPYNLLSTLKPDYSWYTVLDLKDAFFCLPLAPQSQELFAFEWKDPERGISGQLTWTRLPQGFKNSPTLFNEALHRDLTDFRTQHPEVTLLQYVDDLLLAAPTKKACTQGTRHLLQELGEKGYRASAKKAQICQTKVTYLGYILSEGKRWLTPGRIETVARIPPPRNPREVREFLGTAGFCRLWIPGFAELAAPLYALTKPSTPFTWQTEHQLAFEALKKALLSAPALGLPDTSKPFTLFLDERQGIAKGVLTQKLGPWKRPVAYLSKKLDPVAAGWPPCLRIMAATAMLVKDSAKLTLGQPLTVITPHTLEAIVRQPPDRWITNARLTHYQALLLDTDRVQFGPPVTLNPATLLPVPENQPSPHDCRQVLAETHGTREDLKDQELPDADHTWYTDGSSYLDSGTRRAGAAVVDGHNTIWAQSLPPGTSAQKAELIALTKALELSKGKKANIYTDSRYAFATAHTHGSIYERRGWLTSEGKEIKNKAEIIALLKALFLPQEVAIIHCPGHQKGQDPVAVGNRQADRVARQAAMAEVLTLATEPDNTSHITAGKRTADGSEFEKRTADGSEFESPKKKAKVE

SEQ ID NO: 6936 - protein, 2087 aa, synthetic construct
MPAAKRVKLDGGDKKYSIGLDIGTNSVGWAVITDEYKVPSKKFKVLGNTDRHSIKKNLIGALLFDSGETAEATRLKRTARRRYTRRKNRICYLQEIFSNEMAKVDDSFFHRLEESFLVEEDKKHERHPIFGNIVDEVAYHEKYPTIYHLRKKLVDSTDKADLRLIYLALAHMIKFRGHFLIEGDLNPDNSDVDKLFIQLVQTYNQLFEENPINASGVDAKAILSARLSKSRRLENLIAQLPGEKKNGLFGNLIALSLGLTPNFKSNFDLAEDAKLQLSKDTYDDDLDNLLAQIGDQYADLFLAAKNLSDAILLSDILRVNTEITKAPLSASMIKRYDEHHQDLTLLKALVRQQLPEKYKEIFFDQSKNGYAGYIDGGASQEEFYKFIKPILEKMDGTEELLVKLNREDLLRKQRTFDNGSIPHQIHLGELHAILRRQEDFYPFLKDNREKIEKILTFRIPYYVGPLARGNSRFAWMTRKSEETITPWNFEEVVDKGASAQSFIERMTNFDKNLPNEKVLPKHSLLYEYFTVYNELTKVKYVTEGMRKPAFLSGEQKKAIVDLLFKTNRKVTVKQLKEDYFKKIECFDSVEISGVEDRFNASLGTYHDLLKIIKDKDFLDNEENEDILEDIVLTLTLFEDREMIEERLKTYAHLFDDKVMKQLKRRRYTGWGRLSRKLINGIRDKQSGKTILDFLKSDGFANRNFMQLIHDDSLTFKEDIQKAQVSGQGDSLHEHIANLAGSPAIKKGILQTVKVVDELVKVMGRHKPENIVIEMARENQTTQKGQKNSRERMKRIEEGIKELGSQILKEHPVENTQLQNEKLYLYYLQNGRDMYVDQELDINRLSDYDVDHIVPQSFLKDDSIDNKVLTRSDKARGKSDNVPSEEVVKKMKNYWRQLLNAKLITQRKFDNLTKAERGGLSELDKAGFIKRQLVETRQITKHVAQILDSRMNTKYDENDKLIREVKVITLKSKLVSDFRKDFQFYKVREINNYHHAHDAYLNAVVGTALIKKYPKLESEFVYGDYKVYDVRKMIAKSEQEIGKATAKYFFYSNIMNFFKTEITLANGEIRKRPLIETNGETGEIVWDKGRDFATVRKVLSMPQVNIVKKTEVQTGGFSKESILPKRNSDKLIARKKDWDPKKYGGFDSPTVAYSVLVVAKVEKGKSKKLKSVKELLGITIMERSSFEKNPIDFLEAKGYKEVKKDLIIKLPKYSLFELENGRKRMLASAGELQKGNELALPSKYVNFLYLASHYEKLKGSPEDNEQKQLFVEQHKHYLDEIIEQISEFSKRVILADANLDKVLSAYNKHRDKPIREQAENIIHLFTLTNLGAPAAFKYFDTTIDRKRYTSTKEVLDATLIHQSITGLYETRIDLSQLGGDGGEAAAKGGSGGGGGVPWILKKPLELTIKLDLEEQQGTLLNNSILSKKGKEELKQLFEKYSALWQSWENQVGHRRIRPHKIATGTVKPTPQKQYHINPKAKPDIQIVINDLLKQGVLIQKESTMNTPVYPVPKPNGRWRMVLDYRAVNKVTPLIAVQNQHSYGILGSLFKGRYKTTIDLSNGFWAHPIVPEDYWITAFTWQGKQYCWTVLPQGFLNSPGLFTGDVVDLLQGIPNVEVYVDDVYISHDSEKEHLEYLDILFNRLKEAGYIISLKKSNIANSIVDFLGFQITNEGRGLTDTFKEKLENITAPTTLKQLQSILGLLNFARNFIPDFTELIAPLYALIPKSTKNYVPWQIEHSTTLETLITKLNGAEYLQGRKGDKTLIMKVNASYTTGYIRYYNEGEKKPISYVSIVFSKTELKFTELEKLLTTVHKGLLKALDLSMGQNIHVYSPIVSMQNIQKTPQTAKKALASRWLSWLSYLEDPRIRFFYDPQMPALKDLPAVDTGKDNKKHPSNFQHIFYTDGSAITSPTKEGHLNAGMGIVYFINKDGNLQKQQEWSISLGNHTAQFAEIAAFEFALKKCLPLGGNILVVTDSNYVAKAYNEELDVWASNGFVNNRKKPLKHISKWKSVADLKRLRPDVVVTHEPGHQKLDSSPHAYGNNLADQLATQASFKVHAGKRTADGSEFEKRTADGSEFESPKKKAKVE

SEQ ID NO: 6937 - protein, 2173 aa, synthetic construct
MPAAKRVKLDGGDKKYSIGLDIGTNSVGWAVITDEYKVPSKKFKVLGNTDRHSIKKNLIGALLFDSGETAEATRLKRTARRRYTRRKNRICYLQEIFSNEMAKVDDSFFHRLEESFLVEEDKKHERHPIFGNIVDEVAYHEKYPTIYHLRKKLVDSTDKADLRLIYLALAHMIKFRGHFLIEGDLNPDNSDVDKLFIQLVQTYNQLFEENPINASGVDAKAILSARLSKSRRLENLIAQLPGEKKNGLFGNLIALSLGLTPNFKSNFDLAEDAKLQLSKDTYDDDLDNLLAQIGDQYADLFLAAKNLSDAILLSDILRVNTEITKAPLSASMIKRYDEHHQDLTLLKALVRQQLPEKYKEIFFDQSKNGYAGYIDGGASQEEFYKFIKPILEKMDGTEELLVKLNREDLLRKQRTFDNGSIPHQIHLGELHAILRRQEDFYPFLKDNREKIEKILTFRIPYYVGPLARGNSRFAWMTRKSEETITPWNFEEVVDKGASAQSFIERMTNFDKNLPNEKVLPKHSLLYEYFTVYNELTKVKYVTEGMRKPAFLSGEQKKAIVDLLFKTNRKVTVKQLKEDYFKKIECFDSVEISGVEDRFNASLGTYHDLLKIIKDKDFLDNEENEDILEDIVLTLTLFEDREMIEERLKTYAHLFDDKVMKQLKRRRYTGWGRLSRKLINGIRDKQSGKTILDFLKSDGFANRNFMQLIHDDSLTFKEDIQKAQVSGQGDSLHEHIANLAGSPAIKKGILQTVKVVDELVKVMGRHKPENIVIEMARENQTTQKGQKNSRERMKRIEEGIKELGSQILKEHPVENTQLQNEKLYLYYLQNGRDMYVDQELDINRLSDYDVDHIVPQSFLKDDSIDNKVLTRSDKARGKSDNVPSEEVVKKMKNYWRQLLNAKLITQRKFDNLTKAERGGLSELDKAGFIKRQLVETRQITKHVAQILDSRMNTKYDENDKLIREVKVITLKSKLVSDFRKDFQFYKVREINNYHHAHDAYLNAVVGTALIKKYPKLESEFVYGDYKVYDVRKMIAKSEQEIGKATAKYFFYSNIMNFFKTEITLANGEIRKRPLIETNGETGEIVWDKGRDFATVRKVLSMPQVNIVKKTEVQTGGFSKESILPKRNSDKLIARKKDWDPKKYGGFDSPTVAYSVLVVAKVEKGKSKKLKSVKELLGITIMERSSFEKNPIDFLEAKGYKEVKKDLIIKLPKYSLFELENGRKRMLASAGELQKGNELALPSKYVNFLYLASHYEKLKGSPEDNEQKQLFVEQHKHYLDEIIEQISEFSKRVILADANLDKVLSAYNKHRDKPIREQAENIIHLFTLTNLGAPAAFKYFDTTIDRKRYTSTKEVLDATLIHQSITGLYETRIDLSQLGGDGGEAAAKGGSGGGGGMDLLKPLTVERKGVKIKGYWNSQADITCVPKDLLQGEEPVRQQNVTTIHGTQEGDVYYVNLKIDGRRINTEVIGTTLDYAIITPGDVPWILKKPLELTIKLDLEEQQGTLLNNSILSKKGKEELKQLFEKYSALWQSWENQVGHRRIRPHKIATGTVKPTPQKQYHINPKAKPDIQIVINDLLKQGVLIQKESTMNTPVYPVPKPNGRWRMVLDYRAVNKVTPLIAVQNQHSYGILGSLFKGRYKTTIDLSNGFWAHPIVPEDYWITAFTWQGKQYCWTVLPQGFLNSPGLFNGDVVDLLQGIPNVEVYVDDVYISHDSEKEHLEYLDILFNRLKEAGYIISLKKSNIANSIVDFLGFQITNEGRGLTDTFKEKLENITAPTTLKQLQSILGKLNFARNFIPDFTELIAPLYALIPKSPKNYVPWQIEHSTTLETLITKLNGAEYLQGRKGDKTLIMKVNASYTTGYIRYYNEGEKKPISYVSIVFSKTELKFTELEKLLTTVHKGLLKALDLSMGQNIHVYSPIVSMQNIQKTPQTAKKALASRWLSWLSYLEDPRIRFFYDPQMPALKDLPAVDTGKDNKKHPSNFQHIFYTDGSAITSPTKEGHLNAGMGIVYFINKDGNLQKQQEWSISLGNHTAQFAEIAAFEFALKKCLPLGGNILVVTDSNYVAKAYNEELDVWASNGFVNNRKKPLKHISKWKSVADLKRLRPDVVVTHEPGHQKLDSSPHAYGNNLADQLATQASFKVHAGKRTADGSEFEKRTADGSEFESPKKKAKVE

SEQ ID NO: 6938 - protein, 2095 aa, synthetic construct
MPAAKRVKLDGGDKKYSIGLDIGTNSVGWAVITDEYKVPSKKFKVLGNTDRHSIKKNLIGALLFDSGETAEATRLKRTARRRYTRRKNRICYLQEIFSNEMAKVDDSFFHRLEESFLVEEDKKHERHPIFGNIVDEVAYHEKYPTIYHLRKKLVDSTDKADLRLIYLALAHMIKFRGHFLIEGDLNPDNSDVDKLFIQLVQTYNQLFEENPINASGVDAKAILSARLSKSRRLENLIAQLPGEKKNGLFGNLIALSLGLTPNFKSNFDLAEDAKLQLSKDTYDDDLDNLLAQIGDQYADLFLAAKNLSDAILLSDILRVNTEITKAPLSASMIKRYDEHHQDLTLLKALVRQQLPEKYKEIFFDQSKNGYAGYIDGGASQEEFYKFIKPILEKMDGTEELLVKLNREDLLRKQRTFDNGSIPHQIHLGELHAILRRQEDFYPFLKDNREKIEKILTFRIPYYVGPLARGNSRFAWMTRKSEETITPWNFEEVVDKGASAQSFIERMTNFDKNLPNEKVLPKHSLLYEYFTVYNELTKVKYVTEGMRKPAFLSGEQKKAIVDLLFKTNRKVTVKQLKEDYFKKIECFDSVEISGVEDRFNASLGTYHDLLKIIKDKDFLDNEENEDILEDIVLTLTLFEDREMIEERLKTYAHLFDDKVMKQLKRRRYTGWGRLSRKLINGIRDKQSGKTILDFLKSDGFANRNFMQLIHDDSLTFKEDIQKAQVSGQGDSLHEHIANLAGSPAIKKGILQTVKVVDELVKVMGRHKPENIVIEMARENQTTQKGQKNSRERMKRIEEGIKELGSQILKEHPVENTQLQNEKLYLYYLQNGRDMYVDQELDINRLSDYDVDHIVPQSFLKDDSIDNKVLTRSDKARGKSDNVPSEEVVKKMKNYWRQLLNAKLITQRKFDNLTKAERGGLSELDKAGFIKRQLVETRQITKHVAQILDSRMNTKYDENDKLIREVKVITLKSKLVSDFRKDFQFYKVREINNYHHAHDAYLNAVVGTALIKKYPKLESEFVYGDYKVYDVRKMIAKSEQEIGKATAKYFFYSNIMNFFKTEITLANGEIRKRPLIETNGETGEIVWDKGRDFATVRKVLSMPQVNIVKKTEVQTGGFSKESILPKRNSDKLIARKKDWDPKKYGGFDSPTVAYSVLVVAKVEKGKSKKLKSVKELLGITIMERSSFEKNPIDFLEAKGYKEVKKDLIIKLPKYSLFELENGRKRMLASAGELQKGNELALPSKYVNFLYLASHYEKLKGSPEDNEQKQLFVEQHKHYLDEIIEQISEFSKRVILADANLDKVLSAYNKHRDKPIREQAENIIHLFTLTNLGAPAAFKYFDTTIDRKRYTSTKEVLDATLIHQSITGLYETRIDLSQLGGDGGEAAAKGGSGGGGGTLQLEEEYRLFEPESTQKQEMDIWLKNFPQAWAETGGMGTAHCQAPVLIQLKATATPISIRQYPMPHEAYQGIKPHIRRMLDQGILKPCQSPWNTPLLPVKKPGTEDYRPVQDLREVNKRVEDIHPTVPNPYNLLSTLPPSHPWYTVLDLKDAFFCLRLHSESQLLFAFEWRDPEIGLSGQLTWTRLPQGFKNSPTLFNEALHSDLADFRVRYPALVLLQYVDDLLLAAATRTECLEGTKALLETLGNKGYRASAKKAQICLQEVTYLGYSLKDGQRWLTKARKEAILSIPVPKNSRQVREFLGTAGYCRLWIPGFAELAAPLYPLTRPGTLFQWGTEQQLAFEDIKKALLSSPALGLPDITKPFELFIDENSGFAKGVLVQKLGPWKRPVAYLSKKLDTVASGWPPCLRMVAAIAILVKDAGKLTLGQPLTILTSHPVEALVRQPPNKWLSNARMTHYQAMLLDAERVHFGPTVSLNPATLLPLPSGGNHHDCLQILAETHGTRPDLTDQPLPDADLTWYTDGSSFIRNGEREAGAAVTTESEVIWAAPLPPGTSAQRAELIALTQALKMAEGKKLTVYTDSRYAFATTHVHGEIYRRRGWLTSEGKEIKNKNEILALLEALFLPKRLSIIHCPGHQKGDSPQAKGNRLADDTAKKAATETHSSLTVLPAGKRTADGSEFEKRTADGSEFESPKKKAKVE

SEQ ID NO: 6939 - protein, 2176 aa, synthetic construct
MPAAKRVKLDGGDKKYSIGLDIGTNSVGWAVITDEYKVPSKKFKVLGNTDRHSIKKNLIGALLFDSGETAEATRLKRTARRRYTRRKNRICYLQEIFSNEMAKVDDSFFHRLEESFLVEEDKKHERHPIFGNIVDEVAYHEKYPTIYHLRKKLVDSTDKADLRLIYLALAHMIKFRGHFLIEGDLNPDNSDVDKLFIQLVQTYNQLFEENPINASGVDAKAILSARLSKSRRLENLIAQLPGEKKNGLFGNLIALSLGLTPNFKSNFDLAEDAKLQLSKDTYDDDLDNLLAQIGDQYADLFLAAKNLSDAILLSDILRVNTEITKAPLSASMIKRYDEHHQDLTLLKALVRQQLPEKYKEIFFDQSKNGYAGYIDGGASQEEFYKFIKPILEKMDGTEELLVKLNREDLLRKQRTFDNGSIPHQIHLGELHAILRRQEDFYPFLKDNREKIEKILTFRIPYYVGPLARGNSRFAWMTRKSEETITPWNFEEVVDKGASAQSFIERMTNFDKNLPNEKVLPKHSLLYEYFTVYNELTKVKYVTEGMRKPAFLSGEQKKAIVDLLFKTNRKVTVKQLKEDYFKKIECFDSVEISGVEDRFNASLGTYHDLLKIIKDKDFLDNEENEDILEDIVLTLTLFEDREMIEERLKTYAHLFDDKVMKQLKRRRYTGWGRLSRKLINGIRDKQSGKTILDFLKSDGFANRNFMQLIHDDSLTFKEDIQKAQVSGQGDSLHEHIANLAGSPAIKKGILQTVKVVDELVKVMGRHKPENIVIEMARENQTTQKGQKNSRERMKRIEEGIKELGSQILKEHPVENTQLQNEKLYLYYLQNGRDMYVDQELDINRLSDYDVDHIVPQSFLKDDSIDNKVLTRSDKARGKSDNVPSEEVVKKMKNYWRQLLNAKLITQRKFDNLTKAERGGLSELDKAGFIKRQLVETRQITKHVAQILDSRMNTKYDENDKLIREVKVITLKSKLVSDFRKDFQFYKVREINNYHHAHDAYLNAVVGTALIKKYPKLESEFVYGDYKVYDVRKMIAKSEQEIGKATAKYFFYSNIMNFFKTEITLANGEIRKRPLIETNGETGEIVWDKGRDFATVRKVLSMPQVNIVKKTEVQTGGFSKESILPKRNSDKLIARKKDWDPKKYGGFDSPTVAYSVLVVAKVEKGKSKKLKSVKELLGITIMERSSFEKNPIDFLEAKGYKEVKKDLIIKLPKYSLFELENGRKRMLASAGELQKGNELALPSKYVNFLYLASHYEKLKGSPEDNEQKQLFVEQHKHYLDEIIEQISEFSKRVILADANLDKVLSAYNKHRDKPIREQAENIIHLFTLTNLGAPAAFKYFDTTIDRKRYTSTKEVLDATLIHQSITGLYETRIDLSQLGGDGGEAAAKGGSGGGGGMNPLQLLQPLPAEIKGTKLLAHWNSGATITCIPESFLEDEQPIKKTLIKTIHGEKQQNVYYVTFKVKGRKVEAEVIASPYEYILLSPTDVPWLTQQPLQLTILVPLQEYQEKILSKTALPEDQKQQLKTLFVKYDNLWQHWENQVGHRKIRPHNIATGDYPPRPQKQYPINPKAKPSIQIVIDDLLKQGVLTPQNSTMNTPVYPVPKPDGRWRMVLDYREVNKTIPLTAAQNQHSAGILATIVRQKYKTTLDLANGFWAHPITPESYWLTAFTWQGKQYCWTRLPQGFLNSPALFNADVVDLLKEIPNVQVYVDDIYLSHDDPKEHVQQLEKVFQILLQAGYVVSLKKSEIGQKTVEFLGFNITKEGRGLTDTFKTKLLNITPPKDLKQLQSILGKLNFARNFIPNFAELVQPLYNLIAPAKGKYIEWSEENTKQLNMVIEALNTASNLEERLPEQRLVIKVNTSPSAGYVRYYNETGKKPIMYLNYVFSKAELKFSMLEKLLTTMHKALIKAMDLAMGQEILVYSPIVSMTKIQKTPLPERKALPIRWITWMTYLEDPRIQFHYDKTLPELKHIPDVYTSSQSPVKHPSQYEGVFYTDGSAIKSPDPTKSNNAGMGIVHATYKPEYQVLNQWSIPLGNHTAQMAEIAAVEFACKKALKIPGPVLVITDSFYVAESANKELPYWKSNGFVNNKKKPLKHISKWKSIAECLSMKPDITIQHEKGISLQIPVFILKGNALADKLATQGSYVVNAGKRTADGSEFEKRTADGSEFESPKKKAKVE

SEQ ID NO: 6940 - protein, 2094 aa, synthetic construct
MPAAKRVKLDGGDKKYSIGLDIGTNSVGWAVITDEYKVPSKKFKVLGNTDRHSIKKNLIGALLFDSGETAEATRLKRTARRRYTRRKNRICYLQEIFSNEMAKVDDSFFHRLEESFLVEEDKKHERHPIFGNIVDEVAYHEKYPTIYHLRKKLVDSTDKADLRLIYLALAHMIKFRGHFLIEGDLNPDNSDVDKLFIQLVQTYNQLFEENPINASGVDAKAILSARLSKSRRLENLIAQLPGEKKNGLFGNLIALSLGLTPNFKSNFDLAEDAKLQLSKDTYDDDLDNLLAQIGDQYADLFLAAKNLSDAILLSDILRVNTEITKAPLSASMIKRYDEHHQDLTLLKALVRQQLPEKYKEIFFDQSKNGYAGYIDGGASQEEFYKFIKPILEKMDGTEELLVKLNREDLLRKQRTFDNGSIPHQIHLGELHAILRRQEDFYPFLKDNREKIEKILTFRIPYYVGPLARGNSRFAWMTRKSEETITPWNFEEVVDKGASAQSFIERMTNFDKNLPNEKVLPKHSLLYEYFTVYNELTKVKYVTEGMRKPAFLSGEQKKAIVDLLFKTNRKVTVKQLKEDYFKKIECFDSVEISGVEDRFNASLGTYHDLLKIIKDKDFLDNEENEDILEDIVLTLTLFEDREMIEERLKTYAHLFDDKVMKQLKRRRYTGWGRLSRKLINGIRDKQSGKTILDFLKSDGFANRNFMQLIHDDSLTFKEDIQKAQVSGQGDSLHEHIANLAGSPAIKKGILQTVKVVDELVKVMGRHKPENIVIEMARENQTTQKGQKNSRERMKRIEEGIKELGSQILKEHPVENTQLQNEKLYLYYLQNGRDMYVDQELDINRLSDYDVDHIVPQSFLKDDSIDNKVLTRSDKARGKSDNVPSEEVVKKMKNYWRQLLNAKLITQRKFDNLTKAERGGLSELDKAGFIKRQLVETRQITKHVAQILDSRMNTKYDENDKLIREVKVITLKSKLVSDFRKDFQFYKVREINNYHHAHDAYLNAVVGTALIKKYPKLESEFVYGDYKVYDVRKMIAKSEQEIGKATAKYFFYSNIMNFFKTEITLANGEIRKRPLIETNGETGEIVWDKGRDFATVRKVLSMPQVNIVKKTEVQTGGFSKESILPKRNSDKLIARKKDWDPKKYGGFDSPTVAYSVLVVAKVEKGKSKKLKSVKELLGITIMERSSFEKNPIDFLEAKGYKEVKKDLIIKLPKYSLFELENGRKRMLASAGELQKGNELALPSKYVNFLYLASHYEKLKGSPEDNEQKQLFVEQHKHYLDEIIEQISEFSKRVILADANLDKVLSAYNKHRDKPIREQAENIIHLFTLTNLGAPAAFKYFDTTIDRKRYTSTKEVLDATLIHQSITGLYETRIDLSQLGGDGGEAAAKGGSGGGGGVLNLEEEYRLHEKPVPSSIDPSWLQLFPTVWAERAGMGLANQVPPVVVELRSGASPVAVRQYPMSKEAREGIRPHIQKFLDLGVLVPCRSPWNTPLLPVKKPGTNDYRPVQDLREINKRVQDIHPTVPNPYNLLSSLPPSYTWYSVLDLKDAFFCLRLHPNSQPLFAFEWKDPEKGNTGQLTWTRLPQGFKNSPTLFNEALHRDLAPFRALNPQVVLLQYVDDLLVAAPTYEDCKKGTQKLLQELSKLGYRVSAKKAQLCQREVTYLGYLLKEGKRWLTPARKATVMKIPVPTTPRQVREFLGKAGFCRLFIPGFASLAAPLYPLTKPSIPFIWTEEHQQAFDHIKKALLSAPALALPDLTKPFTLYIDERAGVARGVLTQTLGPWRRPVAYLSKKLDPVASGWPTCLKAVAAVALLLKDADKLTLGQNVTVIASHSLESIVRQPPDRWMTNARMTHYQSLLLNERVSFAPPAVLNPATLLPVESEATPVHRCSEILAEETGTRRDLEDQPLPGVPTWYTDGSSFITEGKRRAGAPIVDGKRTVWASSLPEGTSAQKAELVALTQALRLAEGKNINIYTDSRYAFATAHIHGAIYKQRGWLTSAGKDIKNKEEILALLEAIHLPRRVAIIHCPGHQRGSNPVATGNRRADEAAKQAALSTRVLAGTTKPAGKRTADGSEFEKRTADGSEFESPKKKAKVE

SEQ ID NO: 6941 - protein, 2218 aa, synthetic construct
MPAAKRVKLDGGDKKYSIGLDIGTNSVGWAVITDEYKVPSKKFKVLGNTDRHSIKKNLIGALLFDSGETAEATRLKRTARRRYTRRKNRICYLQEIFSNEMAKVDDSFFHRLEESFLVEEDKKHERHPIFGNIVDEVAYHEKYPTIYHLRKKLVDSTDKADLRLIYLALAHMIKFRGHFLIEGDLNPDNSDVDKLFIQLVQTYNQLFEENPINASGVDAKAILSARLSKSRRLENLIAQLPGEKKNGLFGNLIALSLGLTPNFKSNFDLAEDAKLQLSKDTYDDDLDNLLAQIGDQYADLFLAAKNLSDAILLSDILRVNTEITKAPLSASMIKRYDEHHQDLTLLKALVRQQLPEKYKEIFFDQSKNGYAGYIDGGASQEEFYKFIKPILEKMDGTEELLVKLNREDLLRKQRTFDNGSIPHQIHLGELHAILRRQEDFYPFLKDNREKIEKILTFRIPYYVGPLARGNSRFAWMTRKSEETITPWNFEEVVDKGASAQSFIERMTNFDKNLPNEKVLPKHSLLYEYFTVYNELTKVKYVTEGMRKPAFLSGEQKKAIVDLLFKTNRKVTVKQLKEDYFKKIECFDSVEISGVEDRFNASLGTYHDLLKIIKDKDFLDNEENEDILEDIVLTLTLFEDREMIEERLKTYAHLFDDKVMKQLKRRRYTGWGRLSRKLINGIRDKQSGKTILDFLKSDGFANRNFMQLIHDDSLTFKEDIQKAQVSGQGDSLHEHIANLAGSPAIKKGILQTVKVVDELVKVMGRHKPENIVIEMARENQTTQKGQKNSRERMKRIEEGIKELGSQILKEHPVENTQLQNEKLYLYYLQNGRDMYVDQELDINRLSDYDVDHIVPQSFLKDDSIDNKVLTRSDKARGKSDNVPSEEVVKKMKNYWRQLLNAKLITQRKFDNLTKAERGGLSELDKAGFIKRQLVETRQITKHVAQILDSRMNTKYDENDKLIREVKVITLKSKLVSDFRKDFQFYKVREINNYHHAHDAYLNAVVGTALIKKYPKLESEFVYGDYKVYDVRKMIAKSEQEIGKATAKYFFYSNIMNFFKTEITLANGEIRKRPLIETNGETGEIVWDKGRDFATVRKVLSMPQVNIVKKTEVQTGGFSKESILPKRNSDKLIARKKDWDPKKYGGFDSPTVAYSVLVVAKVEKGKSKKLKSVKELLGITIMERSSFEKNPIDFLEAKGYKEVKKDLIIKLPKYSLFELENGRKRMLASAGELQKGNELALPSKYVNFLYLASHYEKLKGSPEDNEQKQLFVEQHKHYLDEIIEQISEFSKRVILADANLDKVLSAYNKHRDKPIREQAENIIHLFTLTNLGAPAAFKYFDTTIDRKRYTSTKEVLDATLIHQSITGLYETRIDLSQLGGDGGEAAAKGGSGGGGGTLGDQGSRGSDPLPEPRVTLTVEGIPTEFLVNTGAEHSVLTKPMGKMGSKRTVVAGATGSKVYPWTTKRLLKIGQKQVTHSFLVIPECPAPLLGRDLLTKLKAQIQFSTEGPQVTWEDRPAMCLVLNLEEEYRLHEKPVPPSIDPSWLQLFPMVWAEKAGMGLANQVPPVVVELKSDASPVAVRQYPMSKEAREGIRPHIQRFLDLGILVPCQSPWNTPLLPVKKPGTNDYRPVQDLREVNKRVQDIHPTVPNPYNLLSSLPPSHTWYSVLDLKDAFFCLKLHPNSQPLFAFEWRDPEKGNTGQLTWTRLPQGFKNSPTLFDEALHRDLASFRALNPQVVMLQYVDDLLVAAPTYRDCKEGTRRLLQELSKLGYRVSAKKAQLCREEVTYLGYLLKGGKRWLTPARKATVMKIPTPTTPRQVREFLGTAGFCRLWIPGFASLAAPLYPLTREKVPFTWTEAHQEAFGRIKEALLSAPALALPDLTKPFALYVDEKEGVARGVLTQTLGPWRRPVAYLSKKLDPVASGWPTCLKAIAAVALLLKDADKLTLGQNVLVIAPHNLESIVRQPPDRWMTNARMTHYQSLLLNERVSFAPPAILNPATLLPVESDDTPIHICSEILAEETGTRPDLRDQPLPGVPAWYTDGSSFIMDGRRQAGAAIVDNKRTVWASNLPEGTSAQKAELIALTQALRLAEGKSINIYTDSRYAFATAHVHGAIYKQRGLLTSAGKDIKNKEEILALLEAIHLPKRVAIIHCPGHQRGTDPVATGNRKADEAAKQAAQSTRILTETTKNAGKRTADGSEFEKRTADGSEFESPKKKAKVE

SEQ ID NO: 6942 - protein, 2127 aa, synthetic construct
MPAAKRVKLDGGDKKYSIGLDIGTNSVGWAVITDEYKVPSKKFKVLGNTDRHSIKKNLIGALLFDSGETAEATRLKRTARRRYTRRKNRICYLQEIFSNEMAKVDDSFFHRLEESFLVEEDKKHERHPIFGNIVDEVAYHEKYPTIYHLRKKLVDSTDKADLRLIYLALAHMIKFRGHFLIEGDLNPDNSDVDKLFIQLVQTYNQLFEENPINASGVDAKAILSARLSKSRRLENLIAQLPGEKKNGLFGNLIALSLGLTPNFKSNFDLAEDAKLQLSKDTYDDDLDNLLAQIGDQYADLFLAAKNLSDAILLSDILRVNTEITKAPLSASMIKRYDEHHQDLTLLKALVRQQLPEKYKEIFFDQSKNGYAGYIDGGASQEEFYKFIKPILEKMDGTEELLVKLNREDLLRKQRTFDNGSIPHQIHLGELHAILRRQEDFYPFLKDNREKIEKILTFRIPYYVGPLARGNSRFAWMTRKSEETITPWNFEEVVDKGASAQSFIERMTNFDKNLPNEKVLPKHSLLYEYFTVYNELTKVKYVTEGMRKPAFLSGEQKKAIVDLLFKTNRKVTVKQLKEDYFKKIECFDSVEISGVEDRFNASLGTYHDLLKIIKDKDFLDNEENEDILEDIVLTLTLFEDREMIEERLKTYAHLFDDKVMKQLKRRRYTGWGRLSRKLINGIRDKQSGKTILDFLKSDGFANRNFMQLIHDDSLTFKEDIQKAQVSGQGDSLHEHIANLAGSPAIKKGILQTVKVVDELVKVMGRHKPENIVIEMARENQTTQKGQKNSRERMKRIEEGIKELGSQILKEHPVENTQLQNEKLYLYYLQNGRDMYVDQELDINRLSDYDVDHIVPQSFLKDDSIDNKVLTRSDKARGKSDNVPSEEVVKKMKNYWRQLLNAKLITQRKFDNLTKAERGGLSELDKAGFIKRQLVETRQITKHVAQILDSRMNTKYDENDKLIREVKVITLKSKLVSDFRKDFQFYKVREINNYHHAHDAYLNAVVGTALIKKYPKLESEFVYGDYKVYDVRKMIAKSEQEIGKATAKYFFYSNIMNFFKTEITLANGEIRKRPLIETNGETGEIVWDKGRDFATVRKVLSMPQVNIVKKTEVQTGGFSKESILPKRNSDKLIARKKDWDPKKYGGFDSPTVAYSVLVVAKVEKGKSKKLKSVKELLGITIMERSSFEKNPIDFLEAKGYKEVKKDLIIKLPKYSLFELENGRKRMLASAGELQKGNELALPSKYVNFLYLASHYEKLKGSPEDNEQKQLFVEQHKHYLDEIIEQISEFSKRVILADANLDKVLSAYNKHRDKPIREQAENIIHLFTLTNLGAPAAFKYFDTTIDRKRYTSTKEVLDATLIHQSITGLYETRIDLSQLGGDGGEAAAKGGSGGGGGLLGRDLLTKLKAQIQFSTEGPQVTWEDRPAMCLVLNLEEEYRLHEKPVPPSIDPSWLQLFPMVWAEKAGMGLANQVPPVVVELKSDASPVAVRQYPMSKEAREGIRPHIQRFLDLGILVPCQSPWNTPLLPVKKPGTNDYRPVQDLREVNKRVQDIHPTVPNPYNLLSSLPPSHTWYSVLDLKDAFFCLKLHPNSQPLFAFEWRDPEKGNTGQLTWTRLPQGFKNSPTLFNEALHRDLASFRALNPQVVMLQYVDDLLVAAPTYRDCKEGTRRLLQELSKLGYRVSAKKAQLCREEVTYLGYLLKGGKRWLTPARKATVMKIPTPTTPRQVREFLGTAGFCRLWIPGFASLAAPLYPLTRPKVPFTWTEAHQEAFGRIKEALLSAPALALPDLTKPFALYVDEKEGVARGVLTQTLGPWRRPVAYLSKKLDPVASGWPTCLKAIAAVALLLKDADKLTLGQNVLVIAPHNLESIVRQPPDRWMTNARMTHYQSLLLNERVSFAPPAILNPATLLPVESDDTPIHICSEILAEETGTRPDLRDQPLPGVPAWYTDGSSFIMDGRRQAGAAIVDNKRTVWASNLPEGTSAQKAELIALTQALRLAEGKSINIYTDSRYAFATAHVHGAIYKQRGWLTSAGKDIKNKEEILALLEAIHLPKRVAIIHCPGHQRGTDPVATGNRKADEAAKQAAQSTRILTETTKNAGKRTADGSEFEKRTADGSEFESPKKKAKVE

SEQ ID NO: 6943 - protein, 2127 aa, synthetic construct
MPAAKRVKLDGGDKKYSIGLDIGTNSVGWAVITDEYKVPSKKFKVLGNTDRHSIKKNLIGALLFDSGETAEATRLKRTARRRYTRRKNRICYLQEIFSNEMAKVDDSFFHRLEESFLVEEDKKHERHPIFGNIVDEVAYHEKYPTIYHLRKKLVDSTDKADLRLIYLALAHMIKFRGHFLIEGDLNPDNSDVDKLFIQLVQTYNQLFEENPINASGVDAKAILSARLSKSRRLENLIAQLPGEKKNGLFGNLIALSLGLTPNFKSNFDLAEDAKLQLSKDTYDDDLDNLLAQIGDQYADLFLAAKNLSDAILLSDILRVNTEITKAPLSASMIKRYDEHHQDLTLLKALVRQQLPEKYKEIFFDQSKNGYAGYIDGGASQEEFYKFIKPILEKMDGTEELLVKLNREDLLRKQRTFDNGSIPHQIHLGELHAILRRQEDFYPFLKDNREKIEKILTFRIPYYVGPLARGNSRFAWMTRKSEETITPWNFEEVVDKGASAQSFIERMTNFDKNLPNEKVLPKHSLLYEYFTVYNELTKVKYVTEGMRKPAFLSGEQKKAIVDLLFKTNRKVTVKQLKEDYFKKIECFDSVEISGVEDRFNASLGTYHDLLKIIKDKDFLDNEENEDILEDIVLTLTLFEDREMIEERLKTYAHLFDDKVMKQLKRRRYTGWGRLSRKLINGIRDKQSGKTILDFLKSDGFANRNFMQLIHDDSLTFKEDIQKAQVSGQGDSLHEHIANLAGSPAIKKGILQTVKVVDELVKVMGRHKPENIVIEMARENQTTQKGQKNSRERMKRIEEGIKELGSQILKEHPVENTQLQNEKLYLYYLQNGRDMYVDQELDINRLSDYDVDHIVPQSFLKDDSIDNKVLTRSDKARGKSDNVPSEEVVKKMKNYWRQLLNAKLITQRKFDNLTKAERGGLSELDKAGFIKRQLVETRQITKHVAQILDSRMNTKYDENDKLIREVKVITLKSKLVSDFRKDFQFYKVREINNYHHAHDAYLNAVVGTALIKKYPKLESEFVYGDYKVYDVRKMIAKSEQEIGKATAKYFFYSNIMNFFKTEITLANGEIRKRPLIETNGETGEIVWDKGRDFATVRKVLSMPQVNIVKKTEVQTGGFSKESILPKRNSDKLIARKKDWDPKKYGGFDSPTVAYSVLVVAKVEKGKSKKLKSVKELLGITIMERSSFEKNPIDFLEAKGYKEVKKDLIIKLPKYSLFELENGRKRMLASAGELQKGNELALPSKYVNFLYLASHYEKLKGSPEDNEQKQLFVEQHKHYLDEIIEQISEFSKRVILADANLDKVLSAYNKHRDKPIREQAENIIHLFTLTNLGAPAAFKYFDTTIDRKRYTSTKEVLDATLIHQSITGLYETRIDLSQLGGDGGEAAAKGGSGGGGGLLGRDLLTKLKAQIQFSTEGPQVTWEDRPAMCLVLNLEEEYRLHEKPVPPSIDPSWLQLFPMVWAEKAGMGLANQVPPVVVELKSDASPVAVRQYPMSKEAREGIRPHIQRFLDLGILVPCQSPWNTPLLPVKKPGTNDYRPVQDLREVNKRVQDIHPTVPNPYNLLSSLPPSHTWYSVLDLKDAFFCLKLHPNSQPLFAFEWRDPEKGNTGQLTWTRLPQGFKNSPTLFNEALHRDLASFRALNPQVVMLQYVDDLLVAAPTYRDCKEGTRRLLQELSKLGYRVSAKKAQLCREEVTYLGYLLKGGKRWLTPARKATVMKIPTPTTPRQVREFLGKAGFCRLFIPGFASLAAPLYPLTRPKVPFTWTEAHQEAFGRIKEALLSAPALALPDLTKPFALYVDEKEGVARGVLTQTLGPWRRPVAYLSKKLDPVASGWPTCLKAIAAVALLLKDADKLTLGQNVLVIAPHNLESIVRQPPDRWMTNARMTHYQSLLLNERVSFAPPAILNPATLLPVESDDTPIHICSEILAEETGTRPDLRDQPLPGVPAWYTDGSSFIMDGRRQAGAAIVDNKRTVWASNLPEGTSAQKAELIALTQALRLAEGKSINIYTDSRYAFATAHVHGAIYKQRGWLTSAGKDIKNKEEILALLEAIHLPKRVAIIHCPGHQRGTDPVATGNRKADEAAKQAAQSTRILTETTKNAGKRTADGSEFEKRTADGSEFESPKKKAKVE

SEQ ID NO: 6944 - protein, 2218 aa, synthetic construct
MPAAKRVKLDGGDKKYSIGLDIGTNSVGWAVITDEYKVPSKKFKVLGNTDRHSIKKNLIGALLFDSGETAEATRLKRTARRRYTRRKNRICYLQEIFSNEMAKVDDSFFHRLEESFLVEEDKKHERHPIFGNIVDEVAYHEKYPTIYHLRKKLVDSTDKADLRLIYLALAHMIKFRGHFLIEGDLNPDNSDVDKLFIQLVQTYNQLFEENPINASGVDAKAILSARLSKSRRLENLIAQLPGEKKNGLFGNLIALSLGLTPNFKSNFDLAEDAKLQLSKDTYDDDLDNLLAQIGDQYADLFLAAKNLSDAILLSDILRVNTEITKAPLSASMIKRYDEHHQDLTLLKALVRQQLPEKYKEIFFDQSKNGYAGYIDGGASQEEFYKFIKPILEKMDGTEELLVKLNREDLLRKQRTFDNGSIPHQIHLGELHAILRRQEDFYPFLKDNREKIEKILTFRIPYYVGPLARGNSRFAWMTRKSEETITPWNFEEVVDKGASAQSFIERMTNFDKNLPNEKVLPKHSLLYEYFTVYNELTKVKYVTEGMRKPAFLSGEQKKAIVDLLFKTNRKVTVKQLKEDYFKKIECFDSVEISGVEDRFNASLGTYHDLLKIIKDKDFLDNEENEDILEDIVLTLTLFEDREMIEERLKTYAHLFDDKVMKQLKRRRYTGWGRLSRKLINGIRDKQSGKTILDFLKSDGFANRNFMQLIHDDSLTFKEDIQKAQVSGQGDSLHEHIANLAGSPAIKKGILQTVKVVDELVKVMGRHKPENIVIEMARENQTTQKGQKNSRERMKRIEEGIKELGSQILKEHPVENTQLQNEKLYLYYLQNGRDMYVDQELDINRLSDYDVDHIVPQSFLKDDSIDNKVLTRSDKARGKSDNVPSEEVVKKMKNYWRQLLNAKLITQRKFDNLTKAERGGLSELDKAGFIKRQLVETRQITKHVAQILDSRMNTKYDENDKLIREVKVITLKSKLVSDFRKDFQFYKVREINNYHHAHDAYLNAVVGTALIKKYPKLESEFVYGDYKVYDVRKMIAKSEQEIGKATAKYFFYSNIMNFFKTEITLANGEIRKRPLIETNGETGEIVWDKGRDFATVRKVLSMPQVNIVKKTEVQTGGFSKESILPKRNSDKLIARKKDWDPKKYGGFDSPTVAYSVLVVAKVEKGKSKKLKSVKELLGITIMERSSFEKNPIDFLEAKGYKEVKKDLIIKLPKYSLFELENGRKRMLASAGELQKGNELALPSKYVNFLYLASHYEKLKGSPEDNEQKQLFVEQHKHYLDEIIEQISEFSKRVILADANLDKVLSAYNKHRDKPIREQAENIIHLFTLTNLGAPAAFKYFDTTIDRKRYTSTKEVLDATLIHQSITGLYETRIDLSQLGGDGGEAAAKGGSGGGGGTLGDQGSRGSDPLPEPRVTLTVEGIPTEFLVNTGAEHSVLTKPMGKMGSKRTVVAGATGSKVYPWTTKRLLKIGQKQVTHSFLVIPECPAPLLGRDLLTKLKAQIQFSTEGPQVTWEDRPAMCLVLNLEEEYRLHEKPVPPSIDPSWLQLFPMVWAEKAGMGLANQVPPVVVELKSDASPVAVRQYPMSKEAREGIRPHIQRFLDLGILVPCQSPWNTPLLPVKKPGTNDYRPVQDLREVNKRVQDIHPTVPNPYNLLSSLPPSHTWYSVLDLKDAFFCLKLHPNSQPLFAFEWRDPEKGNTGQLTWTRLPQGFKNSPTLFNEALHRDLASFRALNPQVVMLQYVDDLLVAAPTYRDCKEGTRRLLQELSKLGYRVSAKKAQLCREEVTYLGYLLKGGKRWLTPARKATVMKIPTPTTPRQVREFLGTAGFCRLWIPGFASLAAPLYPLTRPKVPFTWTEAHQEAFGRIKEALLSAPALALPDLTKPFALYVDEKEGVARGVLTQTLGPWRRPVAYLSKKLDPVASGWPTCLKAIAAVALLLKDADKLTLGQNVLVIAPHNLESIVRQPPDRWMTNARMTHYQSLLLNERVSFAPPAILNPATLLPVESDDTPIHICSEILAEETGTRPDLRDQPLPGVPAWYTDGSSFIMDGRRQAGAAIVDNKRTVWASNLPEGTSAQKAELIALTQALRLAEGKSINIYTDSRYAFATAHVHGAIYKQRGWLTSAGKDIKNKEEILALLEAIHLPKRVAIIHCPGHQRGTDPVATGNRKADEAAKQAAQSTRILTETTKNAGKRTADGSEFEKRTADGSEFESPKKKAKVE

SEQ ID NO: 6945 - protein, 2218 aa, synthetic construct
MPAAKRVKLDGGDKKYSIGLDIGTNSVGWAVITDEYKVPSKKFKVLGNTDRHSIKKNLIGALLFDSGETAEATRLKRTARRRYTRRKNRICYLQEIFSNEMAKVDDSFFHRLEESFLVEEDKKHERHPIFGNIVDEVAYHEKYPTIYHLRKKLVDSTDKADLRLIYLALAHMIKFRGHFLIEGDLNPDNSDVDKLFIQLVQTYNQLFEENPINASGVDAKAILSARLSKSRRLENLIAQLPGEKKNGLFGNLIALSLGLTPNFKSNFDLAEDAKLQLSKDTYDDDLDNLLAQIGDQYADLFLAAKNLSDAILLSDILRVNTEITKAPLSASMIKRYDEHHQDLTLLKALVRQQLPEKYKEIFFDQSKNGYAGYIDGGASQEEFYKFIKPILEKMDGTEELLVKLNREDLLRKQRTFDNGSIPHQIHLGELHAILRRQEDFYPFLKDNREKIEKILTFRIPYYVGPLARGNSRFAWMTRKSEETITPWNFEEVVDKGASAQSFIERMTNFDKNLPNEKVLPKHSLLYEYFTVYNELTKVKYVTEGMRKPAFLSGEQKKAIVDLLFKTNRKVTVKQLKEDYFKKIECFDSVEISGVEDRFNASLGTYHDLLKIIKDKDFLDNEENEDILEDIVLTLTLFEDREMIEERLKTYAHLFDDKVMKQLKRRRYTGWGRLSRKLINGIRDKQSGKTILDFLKSDGFANRNFMQLIHDDSLTFKEDIQKAQVSGQGDSLHEHIANLAGSPAIKKGILQTVKVVDELVKVMGRHKPENIVIEMARENQTTQKGQKNSRERMKRIEEGIKELGSQILKEHPVENTQLQNEKLYLYYLQNGRDMYVDQELDINRLSDYDVDHIVPQSFLKDDSIDNKVLTRSDKARGKSDNVPSEEVVKKMKNYWRQLLNAKLITQRKFDNLTKAERGGLSELDKAGFIKRQLVETRQITKHVAQILDSRMNTKYDENDKLIREVKVITLKSKLVSDFRKDFQFYKVREINNYHHAHDAYLNAVVGTALIKKYPKLESEFVYGDYKVYDVRKMIAKSEQEIGKATAKYFFYSNIMNFFKTEITLANGEIRKRPLIETNGETGEIVWDKGRDFATVRKVLSMPQVNIVKKTEVQTGGFSKESILPKRNSDKLIARKKDWDPKKYGGFDSPTVAYSVLVVAKVEKGKSKKLKSVKELLGITIMERSSFEKNPIDFLEAKGYKEVKKDLIIKLPKYSLFELENGRKRMLASAGELQKGNELALPSKYVNFLYLASHYEKLKGSPEDNEQKQLFVEQHKHYLDEIIEQISEFSKRVILADANLDKVLSAYNKHRDKPIREQAENIIHLFTLTNLGAPAAFKYFDTTIDRKRYTSTKEVLDATLIHQSITGLYETRIDLSQLGGDGGEAAAKGGSGGGGGTLGDQGSRGSDPLPEPRVTLTVEGIPTEFLVNTGAEHSVLTKPMGKMGSKRTVVAGATGSKVYPWTTKRLLKIGQKQVTHSFLVIPECPAPLLGRDLLTKLKAQIQFSTEGPQVTWEDRPAMCLVLNLEEEYRLHEKPVPPSIDPSWLQLFPMVWAEKAGMGLANQVPPVVVELKSDASPVAVRQYPMSKEAREGIRPHIQRFLDLGILVPCQSPWNTPLLPVKKPGTNDYRPVQDLREVNKRVQDIHPTVPNPYNLLSSLPPSHTWYSVLDLKDAFFCLKLHPNSQPLFAFEWRDPEKGNTGQLTWTRLPQGFKNSPTLFNEALHRDLASFRALNPQVVMLQYVDDLLVAAPTYRDCKEGTRRLLQELSKLGYRVSAKKAQLCREEVTYLGYLLKGGKRWLTPARKATVMKIPTPTTPRQVREFLGKAGFCRLFIPGFASLAAPLYPLTRPKVPFTWTEAHQEAFGRIKEALLSAPALALPDLTKPFALYVDEKEGVARGVLTQTLGPWRRPVAYLSKKLDPVASGWPTCLKAIAAVALLLKDADKLTLGQNVLVIAPHNLESIVRQPPDRWMTNARMTHYQSLLLNERVSFAPPAILNPATLLPVESDDTPIHICSEILAEETGTRPDLRDQPLPGVPAWYTDGSSFIMDGRRQAGAAIVDNKRTVWASNLPEGTSAQKAELIALTQALRLAEGKSINIYTDSRYAFATAHVHGAIYKQRGWLTSAGKDIKNKEEILALLEAIHLPKRVAIIHCPGHQRGTDPVATGNRKADEAAKQAAQSTRILTETTKNAGKRTADGSEFEKRTADGSEFESPKKKAKVE

SEQ ID NO: 6946 - protein, 2096 aa, synthetic construct
MPAAKRVKLDGGDKKYSIGLDIGTNSVGWAVITDEYKVPSKKFKVLGNTDRHSIKKNLIGALLFDSGETAEATRLKRTARRRYTRRKNRICYLQEIFSNEMAKVDDSFFHRLEESFLVEEDKKHERHPIFGNIVDEVAYHEKYPTIYHLRKKLVDSTDKADLRLIYLALAHMIKFRGHFLIEGDLNPDNSDVDKLFIQLVQTYNQLFEENPINASGVDAKAILSARLSKSRRLENLIAQLPGEKKNGLFGNLIALSLGLTPNFKSNFDLAEDAKLQLSKDTYDDDLDNLLAQIGDQYADLFLAAKNLSDAILLSDILRVNTEITKAPLSASMIKRYDEHHQDLTLLKALVRQQLPEKYKEIFFDQSKNGYAGYIDGGASQEEFYKFIKPILEKMDGTEELLVKLNREDLLRKQRTFDNGSIPHQIHLGELHAILRRQEDFYPFLKDNREKIEKILTFRIPYYVGPLARGNSRFAWMTRKSEETITPWNFEEVVDKGASAQSFIERMTNFDKNLPNEKVLPKHSLLYEYFTVYNELTKVKYVTEGMRKPAFLSGEQKKAIVDLLFKTNRKVTVKQLKEDYFKKIECFDSVEISGVEDRFNASLGTYHDLLKIIKDKDFLDNEENEDILEDIVLTLTLFEDREMIEERLKTYAHLFDDKVMKQLKRRRYTGWGRLSRKLINGIRDKQSGKTILDFLKSDGFANRNFMQLIHDDSLTFKEDIQKAQVSGQGDSLHEHIANLAGSPAIKKGILQTVKVVDELVKVMGRHKPENIVIEMARENQTTQKGQKNSRERMKRIEEGIKELGSQILKEHPVENTQLQNEKLYLYYLQNGRDMYVDQELDINRLSDYDVDHIVPQSFLKDDSIDNKVLTRSDKARGKSDNVPSEEVVKKMKNYWRQLLNAKLITQRKFDNLTKAERGGLSELDKAGFIKRQLVETRQITKHVAQILDSRMNTKYDENDKLIREVKVITLKSKLVSDFRKDFQFYKVREINNYHHAHDAYLNAVVGTALIKKYPKLESEFVYGDYKVYDVRKMIAKSEQEIGKATAKYFFYSNIMNFFKTEITLANGEIRKRPLIETNGETGEIVWDKGRDFATVRKVLSMPQVNIVKKTEVQTGGFSKESILPKRNSDKLIARKKDWDPKKYGGFDSPTVAYSVLVVAKVEKGKSKKLKSVKELLGITIMERSSFEKNPIDFLEAKGYKEVKKDLIIKLPKYSLFELENGRKRMLASAGELQKGNELALPSKYVNFLYLASHYEKLKGSPEDNEQKQLFVEQHKHYLDEIIEQISEFSKRVILADANLDKVLSAYNKHRDKPIREQAENIIHLFTLTNLGAPAAFKYFDTTIDRKRYTSTKEVLDATLIHQSITGLYETRIDLSQLGGDGGEAAAKGGSGGGGGTLNLEDEYRLYETSAEPEVSPGSTWLSDFPQAWAETGGMGLAVRQAPLIIPLKATSTPVSIKQYPMSQEAKLGIKPHIQRLLDQGILVPCQSPWNTPLLPVKKPGTNDYRPVQDLREVNKRVEDIHPTVPNPYNLLSGLPPSHRWYTVLDLKDAFFCLRLHPTSQPLFAFEWRDPGMGISGQLTWTRLPQGFKNSPTLFNEALHRDLADFRIQHPDLILLQYVDDILLAATSELDCQQGTRALLLTLGNLGYRASAKKAQLCQKQVKYLGYLLKEGQRWLTEARKETVMGQPTPKTPRQLREFLGTAGFCRLWIPGFAEMAAPLYPLTKPGTLFNWGPDQQKAYQEIKQALLTAPALGLPDLTKPFELFVDEKQGYAKGVLTQKLGPWRRPVAYLSKKLDPVAAGWPPCLRMVAAIAVLRKDAGKLTMGQPLVILAPHAVEALVKQPPDRWLSNARMTHYQAMLLDTDRVQFGPVVALNPATLLPLPEEGAPHDCLEILAETHGTRPDLTDQPIPDADHTWYTDGSSFLQEGQRKAGAAVTTETEVIWARALPAGTSAQRAELIALTQALKMAEGKRLNVYTDSRYAFATAHIHGEIYRRRGWLTSEGREIKNKSEILALLKALFLPKRLSIIHCLGHQKGDSAEARGNRLADQAAREAAIKTPPDTSTLLAGKRTADGSEFEKRTADGSEFESPKKKAKVE

SEQ ID NO: 6947 - protein, 2096 aa, synthetic construct
MPAAKRVKLDGGDKKYSIGLDIGTNSVGWAVITDEYKVPSKKFKVLGNTDRHSIKKNLIGALLFDSGETAEATRLKRTARRRYTRRKNRICYLQEIFSNEMAKVDDSFFHRLEESFLVEEDKKHERHPIFGNIVDEVAYHEKYPTIYHLRKKLVDSTDKADLRLIYLALAHMIKFRGHFLIEGDLNPDNSDVDKLFIQLVQTYNQLFEENPINASGVDAKAILSARLSKSRRLENLIAQLPGEKKNGLFGNLIALSLGLTPNFKSNFDLAEDAKLQLSKDTYDDDLDNLLAQIGDQYADLFLAAKNLSDAILLSDILRVNTEITKAPLSASMIKRYDEHHQDLTLLKALVRQQLPEKYKEIFFDQSKNGYAGYIDGGASQEEFYKFIKPILEKMDGTEELLVKLNREDLLRKQRTFDNGSIPHQIHLGELHAILRRQEDFYPFLKDNREKIEKILTFRIPYYVGPLARGNSRFAWMTRKSEETITPWNFEEVVDKGASAQSFIERMTNFDKNLPNEKVLPKHSLLYEYFTVYNELTKVKYVTEGMRKPAFLSGEQKKAIVDLLFKTNRKVTVKQLKEDYFKKIECFDSVEISGVEDRFNASLGTYHDLLKIIKDKDFLDNEENEDILEDIVLTLTLFEDREMIEERLKTYAHLFDDKVMKQLKRRRYTGWGRLSRKLINGIRDKQSGKTILDFLKSDGFANRNFMQLIHDDSLTFKEDIQKAQVSGQGDSLHEHIANLAGSPAIKKGILQTVKVVDELVKVMGRHKPENIVIEMARENQTTQKGQKNSRERMKRIEEGIKELGSQILKEHPVENTQLQNEKLYLYYLQNGRDMYVDQELDINRLSDYDVDHIVPQSFLKDDSIDNKVLTRSDKARGKSDNVPSEEVVKKMKNYWRQLLNAKLITQRKFDNLTKAERGGLSELDKAGFIKRQLVETRQITKHVAQILDSRMNTKYDENDKLIREVKVITLKSKLVSDFRKDFQFYKVREINNYHHAHDAYLNAVVGTALIKKYPKLESEFVYGDYKVYDVRKMIAKSEQEIGKATAKYFFYSNIMNFFKTEITLANGEIRKRPLIETNGETGEIVWDKGRDFATVRKVLSMPQVNIVKKTEVQTGGFSKESILPKRNSDKLIARKKDWDPKKYGGFDSPTVAYSVLVVAKVEKGKSKKLKSVKELLGITIMERSSFEKNPIDFLEAKGYKEVKKDLIIKLPKYSLFELENGRKRMLASAGELQKGNELALPSKYVNFLYLASHYEKLKGSPEDNEQKQLFVEQHKHYLDEIIEQISEFSKRVILADANLDKVLSAYNKHRDKPIREQAENIIHLFTLTNLGAPAAFKYFDTTIDRKRYTSTKEVLDATLIHQSITGLYETRIDLSQLGGDGGEAAAKGGSGGGGGLGIEDEYRLHETSTEPDVSLGSTWLSDFPQAWAETGGMGLAVRQAPLIIPLKATSTPVSIQQYPMSHEARLGIKPHIQRLLDQGILVPCQSPWNTPLLPVKKPGTNDYRPVQDLREVNKRVEDIHPTVPNPYNLLSGLPPSHQWYTVLDLKDAFFCLRLHPTSQPLFAFEWRDPGMGISGQLTWTRLPQGFKNSPTLFNEALHRDLADFRIQHPDLILLQYVDDILLAATSELDCQQGTRALLQTLGDLGYRASAKKAQICQKQVKYLGYLLREGQRWLTEARKETVMGQPVPKTPRQLREFLGKAGFCRLFIPGFAEMAAPLYPLTKPGTLFSWGPDQQKAYQEIKQALLTAPALGLPDLTKPFELFVDEKQGYAKGVLTQKLGPWRRPVAYLSKKLDPVAAGWPPCLRMVAAIAVLTKDAGKLTMGQPLVILAPHAVEALVKQPPDRWLSNARMTHYQAMLLDTDRVQFGPVVALNPATLLPLPEEGAPHDCLEILAETHGTRPDLTDQPIPDADHTWYTDGSSFLQEGQRKAGAAVTTETEVIWAGALPAGTSAQRAELIALTQALKMAEGKRLNVYTDSRYAFATAHIHGEIYRRRGWLTSEGREIKNKSEILALLKALFLPKRLSIIHCLGHQKGDSAEARGNRLADQAAREAAIKTPPDTSTLLIAGKRTADGSEFEKRTADGSEFESPKKKAKVE

SEQ ID NO: 6948 - protein, 2096 aa, synthetic construct; identical to SEQ ID NO: 6947

SEQ ID NO: 6949 - protein, 2096 aa, synthetic construct
MPAAKRVKLDGGDKKYSIGLDIGTNSVGWAVITDEYKVPSKKFKVLGNTDRHSIKKNLIGALLFDSGETAEATRLKRTARRRYTRRKNRICYLQEIFSNEMAKVDDSFFHRLEESFLVEEDKKHERHPIFGNIVDEVAYHEKYPTIYHLRKKLVDSTDKADLRLIYLALAHMIKFRGHFLIEGDLNPDNSDVDKLFIQLVQTYNQLFEENPINASGVDAKAILSARLSKSRRLENLIAQLPGEKKNGLFGNLIALSLGLTPNFKSNFDLAEDAKLQLSKDTYDDDLDNLLAQIGDQYADLFLAAKNLSDAILLSDILRVNTEITKAPLSASMIKRYDEHHQDLTLLKALVRQQLPEKYKEIFFDQSKNGYAGYIDGGASQEEFYKFIKPILEKMDGTEELLVKLNREDLLRKQRTFDNGSIPHQIHLGELHAILRRQEDFYPFLKDNREKIEKILTFRIPYYVGPLARGNSRFAWMTRKSEETITPWNFEEVVDKGASAQSFIERMTNFDKNLPNEKVLPKHSLLYEYFTVYNELTKVKYVTEGMRKPAFLSGEQKKAIVDLLFKTNRKVTVKQLKEDYFKKIECFDSVEISGVEDRFNASLGTYHDLLKIIKDKDFLDNEENEDILEDIVLTLTLFEDREMIEERLKTYAHLFDDKVMKQLKRRRYTGWGRLSRKLINGIRDKQSGKTILDFLKSDGFANRNFMQLIHDDSLTFKEDIQKAQVSGQGDSLHEHIANLAGSPAIKKGILQTVKVVDELVKVMGRHKPENIVIEMARENQTTQKGQKNSRERMKRIEEGIKELGSQILKEHPVENTQLQNEKLYLYYLQNGRDMYVDQELDINRLSDYDVDHIVPQSFLKDDSIDNKVLTRSDKARGKSDNVPSEEVVKKMKNYWRQLLNAKLITQRKFDNLTKAERGGLSELDKAGFIKRQLVETRQITKHVAQILDSRMNTKYDENDKLIREVKVITLKSKLVSDFRKDFQFYKVREINNYHHAHDAYLNAVVGTALIKKYPKLESEFVYGDYKVYDVRKMIAKSEQEIGKATAKYFFYSNIMNFFKTEITLANGEIRKRPLIETNGETGEIVWDKGRDFATVRKVLSMPQVNIVKKTEVQTGGFSKESILPKRNSDKLIARKKDWDPKKYGGFDSPTVAYSVLVVAKVEKGKSKKLKSVKELLGITIMERSSFEKNPIDFLEAKGYKEVKKDLIIKLPKYSLFELENGRKRMLASAGELQKGNELALPSKYVNFLYLASHYEKLKGSPEDNEQKQLFVEQHKHYLDEIIEQISEFSKRVILADANLDKVLSAYNKHRDKPIREQAENIIHLFTLTNLGAPAAFKYFDTTIDRKRYTSTKEVLDATLIHQSITGLYETRIDLSQLGGDGGEAAAKGGSGGGGGTLNIEDEYRLHETSKEPDVSLGSTWLSDFPQAWAETGGMGLAVRQAPLIIPLKATSTPVSIKQYPMSQEARLGIKPHIQRLLDQGILVPCQSPWNTPLLPVKKPGTNDYRPVQDLREVNKRVEDIHPTVPNPYNLLSGLPPSHQWYTVLDLKDAFFCLRLHPTSQPLFAFEWRDPEMGISGQLTWTRLPQGFKNSPTLFNEALHRDLAGFRIQHPDLILLQYVDDLLLAATSELDCQQGTRALLQTLGDLGYRASAKKAQICQKQVKYLGYLLKEGQRWLTEARKETVMGQPIPKTPRQLREFLGTAGFCRLWIPGFAEMAAPLYPLTKPGTLFNWGPDQQKAFQEIKQALLTAPALGLPDLTKPFELFVDEKQGYAKGVLTQKLGPWRRPVAYLSKKLDPVAAGWPPCLRMVAAIAVLTKDAGKLTMGQPLVILAPHAVEALVKQPPDRWLSNARMTHYQALLLDTDRVQFGPVVALNPATLLPLPEEGLQHDCLDILAEAHGTRSDLMDQPLPDADHTWYTDGSSFLQEGQRKAGAAVTTETEVIWARALPAGTSAQRAELIALTQALKMAEGKKLNVYTDSRYAFATAHIHGEIYRRRGWLTSEGKEIKNKDEILALLKALFLPKRLSIIHCPGHQKGNSAEARGNRMADQAAREVATRETPETSTLLAGKRTADGSEFEKRTADGSEFESPKKKAKVE

SEQ ID NO: 6950 - protein, 2090 aa, synthetic construct
MPAAKRVKLDGGDKKYSIGLDIGTNSVGWAVITDEYKVPSKKFKVLGNTDRHSIKKNLIGALLFDSGETAEATRLKRTARRRYTRRKNRICYLQEIFSNEMAKVDDSFFHRLEESFLVEEDKKHERHPIFGNIVDEVAYHEKYPTIYHLRKKLVDSTDKADLRLIYLALAHMIKFRGHFLIEGDLNPDNSDVDKLFIQLVQTYNQLFEENPINASGVDAKAILSARLSKSRRLENLIAQLPGEKKNGLFGNLIALSLGLTPNFKSNFDLAEDAKLQLSKDTYDDDLDNLLAQIGDQYADLFLAAKNLSDAILLSDILRVNTEITKAPLSASMIKRYDEHHQDLTLLKALVRQQLPEKYKEIFFDQSKNGYAGYIDGGASQEEFYKFIKPILEKMDGTEELLVKLNREDLLRKQRTFDNGSIPHQIHLGELHAILRRQEDFYPFLKDNREKIEKILTFRIPYYVGPLARGNSRFAWMTRKSEETITPWNFEEVVDKGASAQSFIERMTNFDKNLPNEKVLPKHSLLYEYFTVYNELTKVKYVTEGMRKPAFLSGEQKKAIVDLLFKTNRKVTVKQLKEDYFKKIECFDSVEISGVEDRFNASLGTYHDLLKIIKDKDFLDNEENEDILEDIVLTLTLFEDREMIEERLKTYAHLFDDKVMKQLKRRRYTGWGRLSRKLINGIRDKQSGKTILDFLKSDGFANRNFMQLIHDDSLTFKEDIQKAQVSGQGDSLHEHIANLAGSPAIKKGILQTVKVVDELVKVMGRHKPENIVIEMARENQTTQKGQKNSRERMKRIEEGIKELGSQILKEHPVENTQLQNEKLYLYYLQNGRDMYVDQELDINRLSDYDVDHIVPQSFLKDDSIDNKVLTRSDKARGKSDNVPSEEVVKKMKNYWRQLLNAKLITQRKFDNLTKAERGGLSELDKAGFIKRQLVETRQITKHVAQILDSRMNTKYDENDKLIREVKVITLKSKLVSDFRKDFQFYKVREINNYHHAHDAYLNAVVGTALIKKYPKLESEFVYGDYKVYDVRKMIAKSEQEIGKATAKYFFYSNIMNFFKTEITLANGEIRKRPLIETNGETGEIVWDKGRDFATVRKVLSMPQVNIVKKTEVQTGGFSKESILPKRNSDKLIARKKDWDPKKYGGFDSPTVAYSVLVVAKVEKGKSKKLKSVKELLGITIMERSSFEKNPIDFLEAKGYKEVKKDLIIKLPKYSLFELENGRKRMLASAGELQKGNELALPSKYVNFLYLASHYEKLKGSPEDNEQKQLFVEQHKHYLDEIIEQISEFSKRVILADANLDKVLSAYNKHRDKPIREQAENIIHLFTLTNLGAPAAFKYFDTTIDRKRYTSTKEVLDATLIHQSITGLYETRIDLSQLGGDGGEAAAKGGSGGGGGTLQLDDEYRLYSPLVKPDQNIQFWLEQFPQAWAETAGMGLAKQVPPQVIQLKASATPVSVRQYPLSKEAQEGIRPHVQRLIQQGILVPVQSPWNTPLLPVRKPGTNDYRPVQDLREVNKRVQDIHPTVPNPYNLLCALPPQRSWYTVLDLKDAFFCLRLHPTSQPLFAFEWRDPGTGRTGQLTWTRLPQGFKNSPTIFDEALHRDLANFRIQHPQVTLLQYVDDLLLAGATKQDCLEGTKALLLELSDLGYRASAKKAQICRREVTYLGYSLRDGQRWLTEARKKTVVQIPAPTTAKQVREFLGTAGFCRLWIPGFATLAAPLYPLTKEKGEFSWAPEHQKAFDAIKKALLSAPALALPDVTKPFTLYVDERKGVARGVLTQTLGPWRRPVAYLSKKLDPVASGWPVCLKAIAAVAILVKDADKLTLGQNITVIAPHALENIVRQPPDRWMTNARMTHYQSLLLTERVTFAPPAALNPATLLPEETDEPVTHDCHQLLIEETGVRKDLTDIPLTGEVLTWFTDGSSYVVEGKRMAGAAVVDGTRTIWASSLPEGTSAQKAELMALTQALRLAEGKSINIYTDSRYAFATAHVHGAIYKQRGLLTSAGREIKNKEEILSLLEALHLPKRLAIIHCPGHQKAKDPISRGNQMADRVAKQAAQGVNLLAGKRTADGSEFEKRTADGSEFESPKKKAKVE

SEQ ID NO: 6951 - protein, 2087 aa, synthetic construct
MPAAKRVKLDGGDKKYSIGLDIGTNSVGWAVITDEYKVPSKKFKVLGNTDRHSIKKNLIGALLFDSGETAEATRLKRTARRRYTRRKNRICYLQEIFSNEMAKVDDSFFHRLEESFLVEEDKKHERHPIFGNIVDEVAYHEKYPTIYHLRKKLVDSTDKADLRLIYLALAHMIKFRGHFLIEGDLNPDNSDVDKLFIQLVQTYNQLFEENPINASGVDAKAILSARLSKSRRLENLIAQLPGEKKNGLFGNLIALSLGLTPNFKSNFDLAEDAKLQLSKDTYDDDLDNLLAQIGDQYADLFLAAKNLSDAILLSDILRVNTEITKAPLSASMIKRYDEHHQDLTLLKALVRQQLPEKYKEIFFDQSKNGYAGYIDGGASQEEFYKFIKPILEKMDGTEELLVKLNREDLLRKQRTFDNGSIPHQIHLGELHAILRRQEDFYPFLKDNREKIEKILTFRIPYYVGPLARGNSRFAWMTRKSEETITPWNFEEVVDKGASAQSFIERMTNFDKNLPNEKVLPKHSLLYEYFTVYNELTKVKYVTEGMRKPAFLSGEQKKAIVDLLFKTNRKVTVKQLKEDYFKKIECFDSVEISGVEDRFNASLGTYHDLLKIIKDKDFLDNEENEDILEDIVLTLTLFEDREMIEERLKTYAHLFDDKVMKQLKRRRYTGWGRLSRKLINGIRDKQSGKTILDFLKSDGFANRNFMQLIHDDSLTFKEDIQKAQVSGQGDSLHEHIANLAGSPAIKKGILQTVKVVDELVKVMGRHKPENIVIEMARENQTTQKGQKNSRERMKRIEEGIKELGSQILKEHPVENTQLQNEKLYLYYLQNGRDMYVDQELDINRLSDYDVDHIVPQSFLKDDSIDNKVLTRSDKARGKSDNVPSEEVVKKMKNYWRQLLNAKLITQRKFDNLTKAERGGLSELDKAGFIKRQLVETRQITKHVAQILDSRMNTKYDENDKLIREVKVITLKSKLVSDFRKDFQFYKVREINNYHHAHDAYLNAVVGTALIKKYPKLESEFVYGDYKVYDVRKMIAKSEQEIGKATAKYFFYSNIMNFFKTEITLANGEIRKRPLIETNGETGEIVWDKGRDFATVRKVLSMPQVNIVKKTEVQTGGFSKESILPKRNSDKLIARKKDWDPKKYGGFDSPTVAYSVLVVAKVEKGKSKKLKSVKELLGITIMERSSFEKNPIDFLEAKGYKEVKKDLIIKLPKYSLFELENGRKRMLASAGELQKGNELALPSKYVNFLYLASHYEKLKGSPEDNEQKQLFVEQHKHYLDEIIEQISEFSKRVILADANLDKVLSAYNKHRDKPIREQAENIIHLFTLTNLGAPAAFKYFDTTIDRKRYTSTKEVLDATLIHQSITGLYETRIDLSQLGGDGGEAAAKGGSGGGGGIPWLMKKPLQLTTLVPLQEYEERLLKQTMLTGSYKEKLQSLFLKYDALWQHWENQVGHRRIKPHHIATGTVNPRPQKQYPINPKAKASIQTVINDLLKQGVLIQQNSIMNTPVYPVPKPDGKWRMVLDYREVNKTIPLIAAQNQHSAGILSSIFRGKYKTTLDLSNGFWAHSITPESYWLTAFTWLGQQYCWTRLPQGFLNSPALFTADVVDLLKEVPNVQVYVDDIYISHDDPREHLEQLEKVFSLLLNAGYVVSLKKSEIAQHEVEFLGFNITKEGRGLTETFKQKLLNITPPRDLKQLQSILGLLNFARNFIPNFSELVKPLYNIIATANGKYITWTTDNSQQLQNIISMLNSAENLEERNPEVRLIMKVNTSPSAGYIRFYNEFAKRPIMYLNYVYTKAEVKFTNTEKLLTTIHKGLIKALDLGMGQEILVYSPIVSMTKIQKTPLPERKALPIRWITWMSYLEDPRIQFHYDKTLPELQQVPTVTDDIIAKIKHPSEFSMVFYTDGSAIKHPNVNKSHNAGMGIAQVQFKPEFTVINTWSIPLGDHTAQLAEVAAVEFACKKALKIDGPVLIVTDSFYVAESVNKELPYWQSNGFFNNKKKPLKHVSKWKSIADCIQLKPDIIIIHEKGHQPTASTFHTEGNNLADKLATQGSYVVNAGKRTADGSEFEKRTADGSEFESPKKKAKVE

SEQ ID NO: 6952 - protein, 2176 aa, synthetic construct
MPAAKRVKLDGGDKKYSIGLDIGTNSVGWAVITDEYKVPSKKFKVLGNTDRHSIKKNLIGALLFDSGETAEATRLKRTARRRYTRRKNRICYLQEIFSNEMAKVDDSFFHRLEESFLVEEDKKHERHPIFGNIVDEVAYHEKYPTIYHLRKKLVDSTDKADLRLIYLALAHMIKFRGHFLIEGDLNPDNSDVDKLFIQLVQTYNQLFEENPINASGVDAKAILSARLSKSRRLENLIAQLPGEKKNGLFGNLIALSLGLTPNFKSNFDLAEDAKLQLSKDTYDDDLDNLLAQIGDQYADLFLAAKNLSDAILLSDILRVNTEITKAPLSASMIKRYDEHHQDLTLLKALVRQQLPEKYKEIFFDQSKNGYAGYIDGGASQEEFYKFIKPILEKMDGTEELLVKLNREDLLRKQRTFDNGSIPHQIHLGELHAILRRQEDFYPFLKDNREKIEKILTFRIPYYVGPLARGNSRFAWMTRKSEETITPWNFEEVVDKGASAQSFIERMTNFDKNLPNEKVLPKHSLLYEYFTVYNELTKVKYVTEGMRKPAFLSGEQKKAIVDLLFKTNRKVTVKQLKEDYFKKIECFDSVEISGVEDRFNASLGTYHDLLKIIKDKDFLDNEENEDILEDIVLTLTLFEDREMIEERLKTYAHLFDDKVMKQLKRRRYTGWGRLSRKLINGIRDKQSGKTILDFLKSDGFANRNFMQLIHDDSLTFKEDIQKAQVSGQGDSLHEHIANLAGSPAIKKGILQTVKVVDELVKVMGRHKPENIVIEMARENQTTQKGQKNSRERMKRIEEGIKELGSQILKEHPVENTQLQNEKLYLYYLQNGRDMYVDQELDINRLSDYDVDHIVPQSFLKDDSIDNKVLTRSDKARGKSDNVPSEEVVKKMKNYWRQLLNAKLITQRKFDNLTKAERGGLSELDKAGFIKRQLVETRQITKHVAQILDSRMNTKYDENDKLIREVKVITLKSKLVSDFRKDFQFYKVREINNYHHAHDAYLNAVVGTALIKKYPKLESEFVYGDYKVYDVRKMIAKSEQEIGKATAKYFFYSNIMNFFKTEITLANGEIRKRPLIETNGETGEIVWDKGRDFATVRKVLSMPQVNIVKKTEVQTGGFSKESILPKRNSDKLIARKKDWDPKKYGGFDSPTVAYSVLVVAKVEKGKSKKLKSVKELLGITIMERSSFEKNPIDFLEAKGYKEVKKDLIIKLPKYSLFELENGRKRMLASAGELQKGNELALPSKYVNFLYLASHYEKLKGSPEDNEQKQLFVEQHKHYLDEIIEQISEFSKRVILADANLDKVLSAYNKHRDKPIREQAENIIHLFTLTNLGAPAAFKYFDTTIDRKRYTSTKEVLDATLIHQSITGLYETRIDLSQLGGDGGEAAAKGGSGGGGGMDPLQLLQPLEAEIKGTKLKAHWNSGATITCVPQAFLEEEVPIKNIWIKTIHGEKEQPVYYLTFKIQGRKVEAEVISSPYDYILVSPSDIPWLMKKPLQLTTLVPLQEYEERLLKQTMLTGSYKEKLQSLFLKYDALWQHWENQVGHRRIKPHHIATGTVNPRPQKQYPINPKAKASIQTVINDLLKQGVLIQQNSIMNTPVYPVPKPDGKWRMVLDYREVNKTIPLIAAQNQHSAGILSSIFRGKYKTTLDLSNGFWAHSITPESYWLTAFTWLGQQYCWTRLPQGFLNSPALFNADVVDLLKEVPNVQVYVDDIYISHDDPREHLEQLEKVFSLLLNAGYVVSLKKSEIAQHEVEFLGFNITKEGRGLTETFKQKLLNITPPRDLKQLQSILGKLNFARNFIPNFSELVKPLYNIIATAPGKYITWTTDNSQQLQNIISMLNSAENLEERNPEVRLIMKVNTSPSAGYIRFYNEFAKRPIMYLNYVYTKAEVKFTNTEKLLTTIHKGLIKALDLGMGQEILVYSPIVSMTKIQKTPLPERKALPIRWITWMSYLEDPRIQFHYDKTLPELQQVPTVTDDIIAKIKHPSEFSMVFYTDGSAIKHPNVNKSHNAGMGIAQVQFKPEFTVINTWSIPLGDHTAQLAEVAAVEFACKKALKIDGPVLIVTDSFYVAESVNKELPYWQSNGFFNNKKKPLKHVSKWKSIADCIQLKPDIIIIHEKGHQPTASTFHTEGNNLADKLATQGSYVVNAGKRTADGSEFEKRTADGSEFESPKKKAKVE

SEQ ID NO: 6953 - protein, 2094 aa, synthetic construct
MPAAKRVKLDGGDKKYSIGLDIGTNSVGWAVITDEYKVPSKKFKVLGNTDRHSIKKNLIGALLFDSGETAEATRLKRTARRRYTRRKNRICYLQEIFSNEMAKVDDSFFHRLEESFLVEEDKKHERHPIFGNIVDEVAYHEKYPTIYHLRKKLVDSTDKADLRLIYLALAHMIKFRGHFLIEGDLNPDNSDVDKLFIQLVQTYNQLFEENPINASGVDAKAILSARLSKSRRLENLIAQLPGEKKNGLFGNLIALSLGLTPNFKSNFDLAEDAKLQLSKDTYDDDLDNLLAQIGDQYADLFLAAKNLSDAILLSDILRVNTEITKAPLSASMIKRYDEHHQDLTLLKALVRQQLPEKYKEIFFDQSKNGYAGYIDGGASQEEFYKFIKPILEKMDGTEELLVKLNREDLLRKQRTFDNGSIPHQIHLGELHAILRRQEDFYPFLKDNREKIEKILTFRIPYYVGPLARGNSRFAWMTRKSEETITPWNFEEVVDKGASAQSFIERMTNFDKNLPNEKVLPKHSLLYEYFTVYNELTKVKYVTEGMRKPAFLSGEQKKAIVDLLFKTNRKVTVKQLKEDYFKKIECFDSVEISGVEDRFNASLGTYHDLLKIIKDKDFLDNEENEDILEDIVLTLTLFEDREMIEERLKTYAHLFDDKVMKQLKRRRYTGWGRLSRKLINGIRDKQSGKTILDFLKSDGFANRNFMQLIHDDSLTFKEDIQKAQVSGQGDSLHEHIANLAGSPAIKKGILQTVKVVDELVKVMGRHKPENIVIEMARENQTTQKGQKNSRERMKRIEEGIKELGSQILKEHPVENTQLQNEKLYLYYLQNGRDMYVDQELDINRLSDYDVDHIVPQSFLKDDSIDNKVLTRSDKARGKSDNVPSEEVVKKMKNYWRQLLNAKLITQRKFDNLTKAERGGLSELDKAGFIKRQLVETRQITKHVAQILDSRMNTKYDENDKLIREVKVITLKSKLVSDFRKDFQFYKVREINNYHHAHDAYLNAVVGTALIKKYPKLESEFVYGDYKVYDVRKMIAKSEQEIGKATAKYFFYSNIMNFFKTEITLANGEIRKRPLIETNGETGEIVWDKGRDFATVRKVLSMPQVNIVKKTEVQTGGFSKESILPKRNSDKLIARKKDWDPKKYGGFDSPTVAYSVLVVAKVEKGKSKKLKSVKELLGITIMERSSFEKNPIDFLEAKGYKEVKKDLIIKLPKYSLFELENGRKRMLASAGELQKGNELALPSKYVNFLYLASHYEKLKGSPEDNEQKQLFVEQHKHYLDEIIEQISEFSKRVILADANLDKVLSAYNKHRDKPIREQAENIIHLFTLTNLGAPAAFKYFDTTIDRKRYTSTKEVLDATLIHQSITGLYETRIDLSQLGGDGGEAAAKGGSGGGGGVLNLEEEYRLHEKPVPSSIDPSWLQLFPTVWAERAGMGLANQVPPVVVELRSGASPVAVRQYPMSKEAREGIRPHIQRFLDLGVLVPCQSPWNTPLLPVKKPGTNDYRPVQDLREINKRVQDIHPTVPNPYNLLSSLPPSHTWYSVLDLKDAFFCLKLHPNSQPLFAFEWRDPEKGNTGQLTWTRLPQGFKNSPTLFNEALHRDLAPFRALNPQVVLLQYVDDLLVAAPTYRDCKEGTQKLLQELSKLGYRVSAKKAQLCQKEVTYLGYLLKEGKRWLTPARKATVMKIPPPTTPRQVREFLGTAGFCRLWIPGFASLAAPLYPLTKPSIPFIWTEEHQKAFDRIKEALLSAPALALPDLTKPFTLYVDERAGVARGVLTQTLGPWRRPVAYLSKKLDPVASGWPTCLKAVAAVALLLKDADKLTLGQNVTVIASHSLESIVRQPPDRWMTNARMTHYQSLLLNERVSFAPPAVLNPATLLPVESEATPVHRCSEILAEETGTRRDLKDQPLPGVPAWYTDGSSFIAEGKRRAGAAIVDGKRTVWASSLPEGTSAQKAELVALTQALRLAEGKDINIYTDSRYAFATAHIHGAIYKQRGWLTSAGKDIKNKEEILALLEAIHLPKRVAIIHCPGHQKGNDPVATGNRRADEAAKQAALSTRVLAETTKPAGKRTADGSEFEKRTADGSEFESPKKKAKVE

SEQ ID NO: 6954 - protein, 2094 aa, synthetic construct
MPAAKRVKLDGGDKKYSIGLDIGTNSVGWAVITDEYKVPSKKFKVLGNTDRHSIKKNLIGALLFDSGETAEATRLKRTARRRYTRRKNRICYLQEIFSNEMAKVDDSFFHRLEESFLVEEDKKHERHPIFGNIVDEVAYHEKYPTIYHLRKKLVDSTDKADLRLIYLALAHMIKFRGHFLIEGDLNPDNSDVDKLFIQLVQTYNQLFEENPINASGVDAKAILSARLSKSRRLENLIAQLPGEKKNGLFGNLIALSLGLTPNFKSNFDLAEDAKLQLSKDTYDDDLDNLLAQIGDQYADLFLAAKNLSDAILLSDILRVNTEITKAPLSASMIKRYDEHHQDLTLLKALVRQQLPEKYKEIFFDQSKNGYAGYIDGGASQEEFYKFIKPILEKMDGTEELLVKLNREDLLRKQRTFDNGSIPHQIHLGELHAILRRQEDFYPFLKDNREKIEKILTFRIPYYVGPLARGNSRFAWMTRKSEETITPWNFEEVVDKGASAQSFIERMTNFDKNLPNEKVLPKHSLLYEYFTVYNELTKVKYVTEGMRKPAFLSGEQKKAIVDLLFKTNRKVTVKQLKEDYFKKIECFDSVEISGVEDRFNASLGTYHDLLKIIKDKDFLDNEENEDILEDIVLTLTLFEDREMIEERLKTYAHLFDDKVMKQLKRRRYTGWGRLSRKLINGIRDKQSGKTILDFLKSDGFANRNFMQLIHDDSLTFKEDIQKAQVSGQGDSLHEHIANLAGSPAIKKGILQTVKVVDELVKVMGRHKPENIVIEMARENQTTQKGQKNSRERMKRIEEGIKELGSQILKEHPVENTQLQNEKLYLYYLQNGRDMYVDQELDINRLSDYDVDHIVPQSFLKDDSIDNKVLTRSDKARGKSDNVPSEEVVKKMKNYWRQLLNAKLITQRKFDNLTKAERGGLSELDKAGFIKRQLVETRQITKHVAQILDSRMNTKYDENDKLIREVKVITLKSKLVSDFRKDFQFYKVREINNYHHAHDAYLNAVVGTALIKKYPKLESEFVYGDYKVYDVRKMIAKSEQEIGKATAKYFFYSNIMNFFKTEITLANGEIRKRPLIETNGETGEIVWDKGRDFATVRKVLSMPQVNIVKKTEVQTGGFSKESILPKRNSDKLIARKKDWDPKKYGGFDSPTVAYSVLVVAKVEKGKSKKLKSVKELLGITIMERSSFEKNPIDFLEAKGYKEVKKDLIIKLPKYSLFELENGRKRMLASAGELQKGNELALPSKYVNFLYLASHYEKLKGSPEDNEQKQLFVEQHKHYLDEIIEQISEFSKRVILADANLDKVLSAYNKHRDKPIREQAENIIHLFTLTNLGAPAAFKYFDTTIDRKRYTSTKEVLDATLIHQSITGLYETRIDLSQLGGDGGEAAAKGGSGGGGGVLNLEEEYRLHEKPVPSSIDPSWLQLFPTVWAERAGMGLANQVPPVVVELRSGASPVAVRQYPMSKEAREGIRPHIQRFLDLGVLVPCQSPWNTPLLPVKKPGTNDYRPVQDLREINKRVQDIHPTVPNPYNLLSSLPPSHTWYSVLDLKDAFFCLKLHPNSQPLFAFEWRDPEKGNTGQLTWTRLPQGFKNSPTLFNEALHRDLAPFRALNPQVVLLQYVDDLLVAAPTYRDCKEGTQKLLQELSKLGYRVSAKKAQLCQKEVTYLGYLLKEGKRWLTPARKATVMKIPPPTTPRQVREFLGKAGFCRLFIPGFASLAAPLYPLTKPSIPFIWTEEHQKAFDRIKEALLSAPALALPDLTKPFTLYVDERAGVARGVLTQTLGPWRRPVAYLSKKLDPVASGWPTCLKAVAAVALLLKDADKLTLGQNVTVIASHSLESIVRQPPDRWMTNARMTHYQSLLLNERVSFAPPAVLNPATLLPVESEATPVHRCSEILAEETGTRRDLKDQPLPGVPAWYTDGSSFIAEGKRRAGAAIVDGKRTVWASSLPEGTSAQKAELVALTQALRLAEGKDINIYTDSRYAFATAHIHGAIYKQRGWLTSAGKDIKNKEEILALLEAIHLPKRVAIIHCPGHQKGNDPVATGNRRADEAAKQAALSTRVLAETTKPAGKRTADGSEFEKRTADGSEFESPKKKAKVE

SEQ ID NO: 6955 - protein, 2096 aa, synthetic construct
MPAAKRVKLDGGDKKYSIGLDIGTNSVGWAVITDEYKVPSKKFKVLGNTDRHSIKKNLIGALLFDSGETAEATRLKRTARRRYTRRKNRICYLQEIFSNEMAKVDDSFFHRLEESFLVEEDKKHERHPIFGNIVDEVAYHEKYPTIYHLRKKLVDSTDKADLRLIYLALAHMIKFRGHFLIEGDLNPDNSDVDKLFIQLVQTYNQLFEENPINASGVDAKAILSARLSKSRRLENLIAQLPGEKKNGLFGNLIALSLGLTPNFKSNFDLAEDAKLQLSKDTYDDDLDNLLAQIGDQYADLFLAAKNLSDAILLSDILRVNTEITKAPLSASMIKRYDEHHQDLTLLKALVRQQLPEKYKEIFFDQSKNGYAGYIDGGASQEEFYKFIKPILEKMDGTEELLVKLNREDLLRKQRTFDNGSIPHQIHLGELHAILRRQEDFYPFLKDNREKIEKILTFRIPYYVGPLARGNSRFAWMTRKSEETITPWNFEEVVDKGASAQSFIERMTNFDKNLPNEKVLPKHSLLYEYFTVYNELTKVKYVTEGMRKPAFLSGEQKKAIVDLLFKTNRKVTVKQLKEDYFKKIECFDSVEISGVEDRFNASLGTYHDLLKIIKDKDFLDNEENEDILEDIVLTLTLFEDREMIEERLKTYAHLFDDKVMKQLKRRRYTGWGRLSRKLINGIRDKQSGKTILDFLKSDGFANRNFMQLIHDDSLTFKEDIQKAQVSGQGDSLHEHIANLAGSPAIKKGILQTVKVVDELVKVMGRHKPENIVIEMARENQTTQKGQKNSRERMKRIEEGIKELGSQILKEHPVENTQLQNEKLYLYYLQNGRDMYVDQELDINRLSDYDVDHIVPQSFLKDDSIDNKVLTRSDKARGKSDNVPSEEVVKKMKNYWRQLLNAKLITQRKFDNLTKAERGGLSELDKAGFIKRQLVETRQITKHVAQILDSRMNTKYDENDKLIREVKVITLKSKLVSDFRKDFQFYKVREINNYHHAHDAYLNAVVGTALIKKYPKLESEFVYGDYKVYDVRKMIAKSEQEIGKATAKYFFYSNIMNFFKTEITLANGEIRKRPLIETNGETGEIVWDKGRDFATVRKVLSMPQVNIVKKTEVQTGGFSKESILPKRNSDKLIARKKDWDPKKYGGFDSPTVAYSVLVVAKVEKGKSKKLKSVKELLGITIMERSSFEKNPIDFLEAKGYKEVKKDLIIKLPKYSLFELENGRKRMLASAGELQKGNELALPSKYVNFLYLASHYEKLKGSPEDNEQKQLFVEQHKHYLDEIIEQISEFSKRVILADANLDKVLSAYNKHRDKPIREQAENIIHLFTLTNLGAPAAFKYFDTTIDRKRYTSTKEVLDATLIHQSITGLYETRIDLSQLGGDGGEAAAKGGSGGGGGTLNIEDEYRLHETSKEPDVPLGSTWLSDFPQAWAETGGMGLAVRQAPLIIPLKATSTPVSIKQYPMSQEARLGIKPHIQRLLDQGILVPCQSPWNTPLLPVKKPGTNDYRPVQDLREVNKRVEDIHPTVPNPYNLLSGLPPSHQWYTVLDLKDAFFCLRLHPTSQPLFAFEWRDPEMGISGQLTWTRLPQGFKNSPTLFDEALHRDLADFRIQHPDLILLQYVDDLLLAATSEQDCQRGTRALLQTLGNLGYRASAKKAQICQKQVKYLGYLLKEGQRWLTEARKETVMGQPTPKTPRQLREFLGTAGFCRLWIPGFAEMAAPLYPLTKTGTLFNWGPDQQKAYQEIKQALLTAPALGLPDLTKPFELFVDEKQGYAKGVLTQKLGPWRRPVAYLSKKLDPVAAGWPPCLRMVAAIAVLTKDAGKLTMGQPLVILAPHAVEALVKQPPDRWLSNARMTHYQAMLLDTDRVQFGPVVALNPATLLPLPEKEAPHDCLEILAETHGTRPDLTDQPIPDADYTWYTDGSSFLQEGQRRAGAAVTTETEVIWARALPAGTSAQRAELIALTQALKMAEGKKLNVYTDSRYAFATAHVHGEIYRRRGLLTSEGREIKNKNEILALLKALFLPKRLSIIHCPGHQKGNSAEARGNRMADQAAREAAMKAVLETSTLLAGKRTADGSEFEKRTADGSEFESPKKKAKVE

SEQ ID NO: 6956 - protein, 2096 aa, synthetic construct
MPAAKRVKLDGGDKKYSIGLDIGTNSVGWAVITDEYKVPSKKFKVLGNTDRHSIKKNLIGALLFDSGETAEATRLKRTARRRYTRRKNRICYLQEIFSNEMAKVDDSFFHRLEESFLVEEDKKHERHPIFGNIVDEVAYHEKYPTIYHLRKKLVDSTDKADLRLIYLALAHMIKFRGHFLIEGDLNPDNSDVDKLFIQLVQTYNQLFEENPINASGVDAKAILSARLSKSRRLENLIAQLPGEKKNGLFGNLIALSLGLTPNFKSNFDLAEDAKLQLSKDTYDDDLDNLLAQIGDQYADLFLAAKNLSDAILLSDILRVNTEITKAPLSASMIKRYDEHHQDLTLLKALVRQQLPEKYKEIFFDQSKNGYAGYIDGGASQEEFYKFIKPILEKMDGTEELLVKLNREDLLRKQRTFDNGSIPHQIHLGELHAILRRQEDFYPFLKDNREKIEKILTFRIPYYVGPLARGNSRFAWMTRKSEETITPWNFEEVVDKGASAQSFIERMTNFDKNLPNEKVLPKHSLLYEYFTVYNELTKVKYVTEGMRKPAFLSGEQKKAIVDLLFKTNRKVTVKQLKEDYFKKIECFDSVEISGVEDRFNASLGTYHDLLKIIKDKDFLDNEENEDILEDIVLTLTLFEDREMIEERLKTYAHLFDDKVMKQLKRRRYTGWGRLSRKLINGIRDKQSGKTILDFLKSDGFANRNFMQLIHDDSLTFKEDIQKAQVSGQGDSLHEHIANLAGSPAIKKGILQTVKVVDELVKVMGRHKPENIVIEMARENQTTQKGQKNSRERMKRIEEGIKELGSQILKEHPVENTQLQNEKLYLYYLQNGRDMYVDQELDINRLSDYDVDHIVPQSFLKDDSIDNKVLTRSDKARGKSDNVPSEEVVKKMKNYWRQLLNAKLITQRKFDNLTKAERGGLSELDKAGFIKRQLVETRQITKHVAQILDSRMNTKYDENDKLIREVKVITLKSKLVSDFRKDFQFYKVREINNYHHAHDAYLNAVVGTALIKKYPKLESEFVYGDYKVYDVRKMIAKSEQEIGKATAKYFFYSNIMNFFKTEITLANGEIRKRPLIETNGETGEIVWDKGRDFATVRKVLSMPQVNIVKKTEVQTGGFSKESILPKRNSDKLIARKKDWDPKKYGGFDSPTVAYSVLVVAKVEKGKSKKLKSVKELLGITIMERSSFEKNPIDFLEAKGYKEVKKDLIIKLPKYSLFELENGRKRMLASAGELQKGNELALPSKYVNFLYLASHYEKLKGSPEDNEQKQLFVEQHKHYLDEIIEQISEFSKRVILADANLDKVLSAYNKHRDKPIREQAENIIHLFTLTNLGAPAAFKYFDTTIDRKRYTSTKEVLDATLIHQSITGLYETRIDLSQLGGDGGEAAAKGGSGGGGGTLNIEDEYRLHETSKEPDVPLGSTWLSDFPQAWAETGGMGLAVRQAPLIIPLKATSTPVSIKQYPMSQEARLGIKPHIQRLLDQGILVPCQSPWNTPLLPVKKPGTNDYRPVQDLREVNKRVEDIHPTVPNPYNLLSGLPPSHQWYTVLDLKDAFFCLRLHPTSQPLFAFEWRDPEMGISGQLTWTRLPQGFKNSPTLFNEALHRDLADFRIQHPDLILLQYVDDLLLAATSEQDCQRGTRALLQTLGNLGYRASAKKAQICQKQVKYLGYLLKEGQRWLTEARKETVMGQPTPKTPRQLREFLGTAGFCRLWIPGFAEMAAPLYPLTKPGTLFNWGPDQQKAYQEIKQALLTAPALGLPDLTKPFELFVDEKQGYAKGVLTQKLGPWRRPVAYLSKKLDPVAAGWPPCLRMVAAIAVLTKDAGKLTMGQPLVILAPHAVEALVKQPPDRWLSNARMTHYQAMLLDTDRVQFGPVVALNPATLLPLPEKEAPHDCLEILAETHGTRPDLTDQPIPDADYTWYTDGSSFLQEGQRRAGAAVTTETEVIWARALPAGTSAQRAELIALTQALKMAEGKKLNVYTDSRYAFATAHVHGEIYRRRGWLTSEGREIKNKNEILALLKALFLPKRLSIIHCPGHQKGNSAEARGNRMADQAAREAAMKAVLETSTLLAGKRTADGSEFEKRTADGSEFESPKKKAKVE

SEQ ID NO: 6957 - protein, 2102 aa, synthetic construct
MPAAKRVKLDGGDKKYSIGLDIGTNSVGWAVITDEYKVPSKKFKVLGNTDRHSIKKNLIGALLFDSGETAEATRLKRTARRRYTRRKNRICYLQEIFSNEMAKVDDSFFHRLEESFLVEEDKKHERHPIFGNIVDEVAYHEKYPTIYHLRKKLVDSTDKADLRLIYLALAHMIKFRGHFLIEGDLNPDNSDVDKLFIQLVQTYNQLFEENPINASGVDAKAILSARLSKSRRLENLIAQLPGEKKNGLFGNLIALSLGLTPNFKSNFDLAEDAKLQLSKDTYDDDLDNLLAQIGDQYADLFLAAKNLSDAILLSDILRVNTEITKAPLSASMIKRYDEHHQDLTLLKALVRQQLPEKYKEIFFDQSKNGYAGYIDGGASQEEFYKFIKPILEKMDGTEELLVKLNREDLLRKQRTFDNGSIPHQIHLGELHAILRRQEDFYPFLKDNREKIEKILTFRIPYYVGPLARGNSRFAWMTRKSEETITPWNFEEVVDKGASAQSFIERMTNFDKNLPNEKVLPKHSLLYEYFTVYNELTKVKYVTEGMRKPAFLSGEQKKAIVDLLFKTNRKVTVKQLKEDYFKKIECFDSVEISGVEDRFNASLGTYHDLLKIIKDKDFLDNEENEDILEDIVLTLTLFEDREMIEERLKTYAHLFDDKVMKQLKRRRYTGWGRLSRKLINGIRDKQSGKTILDFLKSDGFANRNFMQLIHDDSLTFKEDIQKAQVSGQGDSLHEHIANLAGSPAIKKGILQTVKVVDELVKVMGRHKPENIVIEMARENQTTQKGQKNSRERMKRIEEGIKELGSQILKEHPVENTQLQNEKLYLYYLQNGRDMYVDQELDINRLSDYDVDHIVPQSFLKDDSIDNKVLTRSDKARGKSDNVPSEEVVKKMKNYWRQLLNAKLITQRKFDNLTKAERGGLSELDKAGFIKRQLVETRQITKHVAQILDSRMNTKYDENDKLIREVKVITLKSKLVSDFRKDFQFYKVREINNYHHAHDAYLNAVVGTALIKKYPKLESEFVYGDYKVYDVRKMIAKSEQEIGKATAKYFFYSNIMNFFKTEITLANGEIRKRPLIETNGETGEIVWDKGRDFATVRKVLSMPQVNIVKKTEVQTGGFSKESILPKRNSDKLIARKKDWDPKKYGGFDSPTVAYSVLVVAKVEKGKSKKLKSVKELLGITIMERSSFEKNPIDFLEAKGYKEVKKDLIIKLPKYSLFELENGRKRMLASAGELQKGNELALPSKYVNFLYLASHYEKLKGSPEDNEQKQLFVEQHKHYLDEIIEQISEFSKRVILADANLDKVLSAYNKHRDKPIREQAENIIHLFTLTNLGAPAAFKYFDTTIDRKRYTSTKEVLDATLIHQSITGLYETRIDLSQLGGDGGEAAAKGGGGGSGGTVSLQDEHRLFDIPVTTSLPDVWLQDFPQAWAETGGLGRAKCQAPIIIDLKPTAVPVSIKQYPMSLEAHMGIRQHIIKFLELGVLRPCRSPWNTPLLPVKKPGTQDYRPVQDLREINKRTVDIHPTVPNPYNLLSTLKPDYSWYTVLDLKDAFFCLPLAPQSQELFAFEWKDPERGISGQLTWTRLPQGFKNSPTLFNEALHRDLTDFRTQHPEVTLLQYVDDLLLAAPTKKACTQGTRHLLQELGEKGYRASAKKAQICQTKVTYLGYILSEGKRWLTPGRIETVARIPPPRNPREVREFLGKAGFCRLFIPGFAELAAPLYALTKPSTPFTWQTEHQLAFEALKKALLSAPALGLPDTSKPFTLFLDERQGIAKGVLTQKLGPWKRPVAYLSKKLDPVAAGWPPCLRIMAATAMLVKDSAKLTLGQPLTVITPHTLEAIVRQPPDRWITNARLTHYQALLLDTDRVQFGPPVTLNPATLLPVPENQPSPHDCRQVLAETHGTREDLKDQELPDADHTWYTDGSSYLDSGTRRAGAAVVDGHNTIWAQSLPPGTSAQKAELIALTKALELSKGKKANIYTDSRYAFATAHTHGSIYERRGWLTSEGKEIKNKAEIIALLKALFLPQEVAIIHCPGHQKGQDPVAVGNRQADRVARQAAMAEVLTLATEPDNTSHITAGKRTADGSEFEKRTADGSEFESPKKKAKVE

SEQ ID NO: 6958 - protein, 2095 aa, synthetic construct
MPAAKRVKLDGGDKKYSIGLDIGTNSVGWAVITDEYKVPSKKFKVLGNTDRHSIKKNLIGALLFDSGETAEATRLKRTARRRYTRRKNRICYLQEIFSNEMAKVDDSFFHRLEESFLVEEDKKHERHPIFGNIVDEVAYHEKYPTIYHLRKKLVDSTDKADLRLIYLALAHMIKFRGHFLIEGDLNPDNSDVDKLFIQLVQTYNQLFEENPINASGVDAKAILSARLSKSRRLENLIAQLPGEKKNGLFGNLIALSLGLTPNFKSNFDLAEDAKLQLSKDTYDDDLDNLLAQIGDQYADLFLAAKNLSDAILLSDILRVNTEITKAPLSASMIKRYDEHHQDLTLLKALVRQQLPEKYKEIFFDQSKNGYAGYIDGGASQEEFYKFIKPILEKMDGTEELLVKLNREDLLRKQRTFDNGSIPHQIHLGELHAILRRQEDFYPFLKDNREKIEKILTFRIPYYVGPLARGNSRFAWMTRKSEETITPWNFEEVVDKGASAQSFIERMTNFDKNLPNEKVLPKHSLLYEYFTVYNELTKVKYVTEGMRKPAFLSGEQKKAIVDLLFKTNRKVTVKQLKEDYFKKIECFDSVEISGVEDRFNASLGTYHDLLKIIKDKDFLDNEENEDILEDIVLTLTLFEDREMIEERLKTYAHLFDDKVMKQLKRRRYTGWGRLSRKLINGIRDKQSGKTILDFLKSDGFANRNFMQLIHDDSLTFKEDIQKAQVSGQGDSLHEHIANLAGSPAIKKGILQTVKVVDELVKVMGRHKPENIVIEMARENQTTQKGQKNSRERMKRIEEGIKELGSQILKEHPVENTQLQNEKLYLYYLQNGRDMYVDQELDINRLSDYDVDHIVPQSFLKDDSIDNKVLTRSDKARGKSDNVPSEEVVKKMKNYWRQLLNAKLITQRKFDNLTKAERGGLSELDKAGFIKRQLVETRQITKHVAQILDSRMNTKYDENDKLIREVKVITLKSKLVSDFRKDFQFYKVREINNYHHAHDAYLNAVVGTALIKKYPKLESEFVYGDYKVYDVRKMIAKSEQEIGKATAKYFFYSNIMNFFKTEITLANGEIRKRPLIETNGETGEIVWDKGRDFATVRKVLSMPQVNIVKKTEVQTGGFSKESILPKRNSDKLIARKKDWDPKKYGGFDSPTVAYSVLVVAKVEKGKSKKLKSVKELLGITIMERSSFEKNPIDFLEAKGYKEVKKDLIIKLPKYSLFELENGRKRMLASAGELQKGNELALPSKYVNFLYLASHYEKLKGSPEDNEQKQLFVEQHKHYLDEIIEQISEFSKRVILADANLDKVLSAYNKHRDKPIREQAENIIHLFTLTNLGAPAAFKYFDTTIDRKRYTSTKEVLDATLIHQSITGLYETRIDLSQLGGDGGEAAAKGGGGGSGGTLQLEEEYRLFEPESTQKQEMDIWLKNFPQAWAETGGMGTAHCQAPVLIQLKATATPISIRQYPMPHEAYQGIKPHIRRMLDQGILKPCQSPWNTPLLPVKKPGTEDYRPVQDLREVNKRVEDIHPTVPNPYNLLSTLPPSHPWYTVLDLKDAFFCLRLHSESQLLFAFEWRDPEIGLSGQLTWTRLPQGFKNSPTLFNEALHSDLADFRVRYPALVLLQYVDDLLLAAATRTECLEGTKALLETLGNKGYRASAKKAQICLQEVTYLGYSLKDGQRWLTKARKEAILSIPVPKNSRQVREFLGTAGYCRLWIPGFAELAAPLYPLTRPGTLFQWGTEQQLAFEDIKKALLSSPALGLPDITKPFELFIDENSGFAKGVLVQKLGPWKRPVAYLSKKLDTVASGWPPCLRMVAAIAILVKDAGKLTLGQPLTILTSHPVEALVRQPPNKWLSNARMTHYQAMLLDAERVHFGPTVSLNPATLLPLPSGGNHHDCLQILAETHGTRPDLTDQPLPDADLTWYTDGSSFIRNGEREAGAAVTTESEVIWAAPLPPGTSAQRAELIALTQALKMAEGKKLTVYTDSRYAFATTHVHGEIYRRRGWLTSEGKEIKNKNEILALLEALFLPKRLSIIHCPGHQKGDSPQAKGNRLADDTAKKAATETHSSLTVLPAGKRTADGSEFEKRTADGSEFESPKKKAKVE

SEQ ID NO: 6959 - protein, 2087 aa, synthetic construct
MPAAKRVKLDGGDKKYSIGLDIGTNSVGWAVITDEYKVPSKKFKVLGNTDRHSIKKNLIGALLFDSGETAEATRLKRTARRRYTRRKNRICYLQEIFSNEMAKVDDSFFHRLEESFLVEEDKKHERHPIFGNIVDEVAYHEKYPTIYHLRKKLVDSTDKADLRLIYLALAHMIKFRGHFLIEGDLNPDNSDVDKLFIQLVQTYNQLFEENPINASGVDAKAILSARLSKSRRLENLIAQLPGEKKNGLFGNLIALSLGLTPNFKSNFDLAEDAKLQLSKDTYDDDLDNLLAQIGDQYADLFLAAKNLSDAILLSDILRVNTEITKAPLSASMIKRYDEHHQDLTLLKALVRQQLPEKYKEIFFDQSKNGYAGYIDGGASQEEFYKFIKPILEKMDGTEELLVKLNREDLLRKQRTFDNGSIPHQIHLGELHAILRRQEDFYPFLKDNREKIEKILTFRIPYYVGPLARGNSRFAWMTRKSEETITPWNFEEVVDKGASAQSFIERMTNFDKNLPNEKVLPKHSLLYEYFTVYNELTKVKYVTEGMRKPAFLSGEQKKAIVDLLFKTNRKVTVKQLKEDYFKKIECFDSVEISGVEDRFNASLGTYHDLLKIIKDKDFLDNEENEDILEDIVLTLTLFEDREMIEERLKTYAHLFDDKVMKQLKRRRYTGWGRLSRKLINGIRDKQSGKTILDFLKSDGFANRNFMQLIHDDSLTFKEDIQKAQVSGQGDSLHEHIANLAGSPAIKKGILQTVKVVDELVKVMGRHKPENIVIEMARENQTTQKGQKNSRERMKRIEEGIKELGSQILKEHPVENTQLQNEKLYLYYLQNGRDMYVDQELDINRLSDYDVDHIVPQSFLKDDSIDNKVLTRSDKARGKSDNVPSEEVVKKMKNYWRQLLNAKLITQRKFDNLTKAERGGLSELDKAGFIKRQLVETRQITKHVAQILDSRMNTKYDENDKLIREVKVITLKSKLVSDFRKDFQFYKVREINNYHHAHDAYLNAVVGTALIKKYPKLESEFVYGDYKVYDVRKMIAKSEQEIGKATAKYFFYSNIMNFFKTEITLANGEIRKRPLIETNGETGEIVWDKGRDFATVRKVLSMPQVNIVKKTEVQTGGFSKESILPKRNSDKLIARKKDWDPKKYGGFDSPTVAYSVLVVAKVEKGKSKKLKSVKELLGITIMERSSFEKNPIDFLEAKGYKEVKKDLIIKLPKYSLFELENGRKRMLASAGELQKGNELALPSKYVNFLYLASHYEKLKGSPEDNEQKQLFVEQHKHYLDEIIEQISEFSKRVILADANLDKVLSAYNKHRDKPIREQAENIIHLFTLTNLGAPAAFKYFDTTIDRKRYTSTKEVLDATLIHQSITGLYETRIDLSQLGGDGGEAAAKGGGGGSGGVPWLTQQPLQLTILVPLQEYQEKILSKTALPEDQKQQLKTLFVKYDNLWQHWENQVGHRKIRPHNIATGDYPPRPQKQYPINPKAKPSIQIVIDDLLKQGVLTPQNSTMNTPVYPVPKPDGRWRMVLDYREVNKTIPLTAAQNQHSAGILATIVRQKYKTTLDLANGFWAHPITPESYWLTAFTWQGKQYCWTRLPQGFLNSPALFNADVVDLLKEIPNVQVYVDDIYLSHDDPKEHVQQLEKVFQILLQAGYVVSLKKSEIGQKTVEFLGFNITKEGRGLTDTFKTKLLNITPPKDLKQLQSILGKLNFARNFIPNFAELVQPLYNLIAPAKGKYIEWSEENTKQLNMVIEALNTASNLEERLPEQRLVIKVNTSPSAGYVRYYNETGKKPIMYLNYVFSKAELKFSMLEKLLTTMHKALIKAMDLAMGQEILVYSPIVSMTKIQKTPLPERKALPIRWITWMTYLEDPRIQFHYDKTLPELKHIPDVYTSSQSPVKHPSQYEGVFYTDGSAIKSPDPTKSNNAGMGIVHATYKPEYQVLNQWSIPLGNHTAQMAEIAAVEFACKKALKIPGPVLVITDSFYVAESANKELPYWKSNGFVNNKKKPLKHISKWKSIAECLSMKPDITIQHEKGISLQIPVFILKGNALADKLATQGSYVVNAGKRTADGSEFEKRTADGSEFESPKKKAKVE

SEQ ID NO: 6960 - protein, 2218 aa, synthetic construct
MPAAKRVKLDGGDKKYSIGLDIGTNSVGWAVITDEYKVPSKKFKVLGNTDRHSIKKNLIGALLFDSGETAEATRLKRTARRRYTRRKNRICYLQEIFSNEMAKVDDSFFHRLEESFLVEEDKKHERHPIFGNIVDEVAYHEKYPTIYHLRKKLVDSTDKADLRLIYLALAHMIKFRGHFLIEGDLNPDNSDVDKLFIQLVQTYNQLFEENPINASGVDAKAILSARLSKSRRLENLIAQLPGEKKNGLFGNLIALSLGLTPNFKSNFDLAEDAKLQLSKDTYDDDLDNLLAQIGDQYADLFLAAKNLSDAILLSDILRVNTEITKAPLSASMIKRYDEHHQDLTLLKALVRQQLPEKYKEIFFDQSKNGYAGYIDGGASQEEFYKFIKPILEKMDGTEELLVKLNREDLLRKQRTFDNGSIPHQIHLGELHAILRRQEDFYPFLKDNREKIEKILTFRIPYYVGPLARGNSRFAWMTRKSEETITPWNFEEVVDKGASAQSFIERMTNFDKNLPNEKVLPKHSLLYEYFTVYNELTKVKYVTEGMRKPAFLSGEQKKAIVDLLFKTNRKVTVKQLKEDYFKKIECFDSVEISGVEDRFNASLGTYHDLLKIIKDKDFLDNEENEDILEDIVLTLTLFEDREMIEERLKTYAHLFDDKVMKQLKRRRYTGWGRLSRKLINGIRDKQSGKTILDFLKSDGFANRNFMQLIHDDSLTFKEDIQKAQVSGQGDSLHEHIANLAGSPAIKKGILQTVKVVDELVKVMGRHKPENIVIEMARENQTTQKGQKNSRERMKRIEEGIKELGSQILKEHPVENTQLQNEKLYLYYLQNGRDMYVDQELDINRLSDYDVDHIVPQSFLKDDSIDNKVLTRSDKARGKSDNVPSEEVVKKMKNYWRQLLNAKLITQRKFDNLTKAERGGLSELDKAGFIKRQLVETRQITKHVAQILDSRMNTKYDENDKLIREVKVITLKSKLVSDFRKDFQFYKVREINNYHHAHDAYLNAVVGTALIKKYPKLESEFVYGDYKVYDVRKMIAKSEQEIGKATAKYFFYSNIMNFFKTEITLANGEIRKRPLIETNGETGEIVWDKGRDFATVRKVLSMPQVNIVKKTEVQTGGFSKESILPKRNSDKLIARKKDWDPKKYGGFDSPTVAYSVLVVAKVEKGKSKKLKSVKELLGITIMERSSFEKNPIDFLEAKGYKEVKKDLIIKLPKYSLFELENGRKRMLASAGELQKGNELALPSKYVNFLYLASHYEKLKGSPEDNEQKQLFVEQHKHYLDEIIEQISEFSKRVILADANLDKVLSAYNKHRDKPIREQAENIIHLFTLTNLGAPAAFKYFDTTIDRKRYTSTKEVLDATLIHQSITGLYETRIDLSQLGGDGGEAAAKGGGGGSGGTLGDQGSRGSDPLPEPRVTLTVEGIPTEFLVNTGAEHSVLTKPMGKMGSKRTVVAGATGSKVYPWTTKRLLKIGQKQVTHSFLVIPECPAPLLGRDLLTKLKAQIQFSTEGPQVTWEDRPAMCLVLNLEEEYRLHEKPVPPSIDPSWLQLFPMVWAEKAGMGLANQVPPVVVELKSDASPVAVRQYPMSKEAREGIRPHIQRFLDLGILVPCQSPWNTPLLPVKKPGTNDYRPVQDLREVNKRVQDIHPTVPNPYNLLSSLPPSHTWYSVLDLKDAFFCLKLHPNSQPLFAFEWRDPEKGNTGQLTWTRLPQGFKNSPTLFDEALHRDLASFRALNPQVVMLQYVDDLLVAAPTYRDCKEGTRRLLQELSKLGYRVSAKKAQLCREEVTYLGYLLKGGKRWLTPARKATVMKIPTPTTPRQVREFLGTAGFCRLWIPGFASLAAPLYPLTREKVPFTWTEAHQEAFGRIKEALLSAPALALPDLTKPFALYVDEKEGVARGVLTQTLGPWRRPVAYLSKKLDPVASGWPTCLKAIAAVALLLKDADKLTLGQNVLVIAPHNLESIVRQPPDRWMTNARMTHYQSLLLNERVSFAPPAILNPATLLPVESDDTPIHICSEILAEETGTRPDLRDQPLPGVPAWYTDGSSFIMDGRRQAGAAIVDNKRTVWASNLPEGTSAQKAELIALTQALRLAEGKSINIYTDSRYAFATAHVHGAIYKQRGLLTSAGKDIKNKEEILALLEAIHLPKRVAIIHCPGHQRGTDPVATGNRKADEAAKQAAQSTRILTETTKNAGKRTADGSEFEKRTADGSEFESPKKKAKVE

SEQ ID NO: 6961 - protein, 2218 aa, synthetic construct
MPAAKRVKLDGGDKKYSIGLDIGTNSVGWAVITDEYKVPSKKFKVLGNTDRHSIKKNLIGALLFDSGETAEATRLKRTARRRYTRRKNRICYLQEIFSNEMAKVDDSFFHRLEESFLVEEDKKHERHPIFGNIVDEVAYHEKYPTIYHLRKKLVDSTDKADLRLIYLALAHMIKFRGHFLIEGDLNPDNSDVDKLFIQLVQTYNQLFEENPINASGVDAKAILSARLSKSRRLENLIAQLPGEKKNGLFGNLIALSLGLTPNFKSNFDLAEDAKLQLSKDTYDDDLDNLLAQIGDQYADLFLAAKNLSDAILLSDILRVNTEITKAPLSASMIKRYDEHHQDLTLLKALVRQQLPEKYKEIFFDQSKNGYAGYIDGGASQEEFYKFIKPILEKMDGTEELLVKLNREDLLRKQRTFDNGSIPHQIHLGELHAILRRQEDFYPFLKDNREKIEKILTFRIPYYVGPLARGNSRFAWMTRKSEETITPWNFEEVVDKGASAQSFIERMTNFDKNLPNEKVLPKHSLLYEYFTVYNELTKVKYVTEGMRKPAFLSGEQKKAIVDLLFKTNRKVTVKQLKEDYFKKIECFDSVEISGVEDRFNASLGTYHDLLKIIKDKDFLDNEENEDILEDIVLTLTLFEDREMIEERLKTYAHLFDDKVMKQLKRRRYTGWGRLSRKLINGIRDKQSGKTILDFLKSDGFANRNFMQLIHDDSLTFKEDIQKAQVSGQGDSLHEHIANLAGSPAIKKGILQTVKVVDELVKVMGRHKPENIVIEMARENQTTQKGQKNSRERMKRIEEGIKELGSQILKEHPVENTQLQNEKLYLYYLQNGRDMYVDQELDINRLSDYDVDHIVPQSFLKDDSIDNKVLTRSDKARGKSDNVPSEEVVKKMKNYWRQLLNAKLITQRKFDNLTKAERGGLSELDKAGFIKRQLVETRQITKHVAQILDSRMNTKYDENDKLIREVKVITLKSKLVSDFRKDFQFYKVREINNYHHAHDAYLNAVVGTALIKKYPKLESEFVYGDYKVYDVRKMIAKSEQEIGKATAKYFFYSNIMNFFKTEITLANGEIRKRPLIETNGETGEIVWDKGRDFATVRKVLSMPQVNIVKKTEVQTGGFSKESILPKRNSDKLIARKKDWDPKKYGGFDSPTVAYSVLVVAKVEKGKSKKLKSVKELLGITIMERSSFEKNPIDFLEAKGYKEVKKDLIIKLPKYSLFELENGRKRMLASAGELQKGNELALPSKYVNFLYLASHYEKLKGSPEDNEQKQLFVEQHKHYLDEIIEQISEFSKRVILADANLDKVLSAYNKHRDKPIREQAENIIHLFTLTNLGAPAAFKYFDTTIDRKRYTSTKEVLDATLIHQSITGLYETRIDLSQLGGDGGEAAAKGGGGGSGGTLGDQGSRGSDPLPEPRVTLTVEGIPTEFLVNTGAEHSVLTKPMGKMGSKRTVVAGATGSKVYPWTTKRLLKIGQKQVTHSFLVIPECPAPLLGRDLLTKLKAQIQFSTEGPQVTWEDRPAMCLVLNLEEEYRLHEKPVPPSIDPSWLQLFPMVWAEKAGMGLANQVPPVVVELKSDASPVAVRQYPMSKEAREGIRPHIQRFLDLGILVPCQSPWNTPLLPVKKPGTNDYRPVQDLREVNKRVQDIHPTVPNPYNLLSSLPPSHTWYSVLDLKDAFFCLKLHPNSQPLFAFEWRDPEKGNTGQLTWTRLPQGFKNSPTLFNEALHRDLASFRALNPQVVMLQYVDDLLVAAPTYRDCKEGTRRLLQELSKLGYRVSAKKAQLCREEVTYLGYLLKGGKRWLTPARKATVMKIPTPTTPRQVREFLGTAGFCRLWIPGFASLAAPLYPLTRPKVPFTWTEAHQEAFGRIKEALLSAPALALPDLTKPFALYVDEKEGVARGVLTQTLGPWRRPVAYLSKKLDPVASGWPTCLKAIAAVALLLKDADKLTLGQNVLVIAPHNLESIVRQPPDRWMTNARMTHYQSLLLNERVSFAPPAILNPATLLPVESDDTPIHICSEILAEETGTRPDLRDQPLPGVPAWYTDGSSFIMDGRRQAGAAIVDNKRTVWASNLPEGTSAQKAELIALTQALRLAEGKSINIYTDSRYAFATAHVHGAIYKQRGWLTSAGKDIKNKEEILALLEAIHLPKRVAIIHCPGHQRGTDPVATGNRKADEAAKQAAQSTRILTETTKNAGKRTADGSEFEKRTADGSEFESPKKKAKVE

SEQ ID NO: 6962 - protein, 2218 aa, synthetic construct
MPAAKRVKLDGGDKKYSIGLDIGTNSVGWAVITDEYKVPSKKFKVLGNTDRHSIKKNLIGALLFDSGETAEATRLKRTARRRYTRRKNRICYLQEIFSNEMAKVDDSFFHRLEESFLVEEDKKHERHPIFGNIVDEVAYHEKYPTIYHLRKKLVDSTDKADLRLIYLALAHMIKFRGHFLIEGDLNPDNSDVDKLFIQLVQTYNQLFEENPINASGVDAKAILSARLSKSRRLENLIAQLPGEKKNGLFGNLIALSLGLTPNFKSNFDLAEDAKLQLSKDTYDDDLDNLLAQIGDQYADLFLAAKNLSDAILLSDILRVNTEITKAPLSASMIKRYDEHHQDLTLLKALVRQQLPEKYKEIFFDQSKNGYAGYIDGGASQEEFYKFIKPILEKMDGTEELLVKLNREDLLRKQRTFDNGSIPHQIHLGELHAILRRQEDFYPFLKDNREKIEKILTFRIPYYVGPLARGNSRFAWMTRKSEETITPWNFEEVVDKGASAQSFIERMTNFDKNLPNEKVLPKHSLLYEYFTVYNELTKVKYVTEGMRKPAFLSGEQKKAIVDLLFKTNRKVTVKQLKEDYFKKIECFDSVEISGVEDRFNASLGTYHDLLKIIKDKDFLDNEENEDILEDIVLTLTLFEDREMIEERLKTYAHLFDDKVMKQLKRRRYTGWGRLSRKLINGIRDKQSGKTILDFLKSDGFANRNFMQLIHDDSLTFKEDIQKAQVSGQGDSLHEHIANLAGSPAIKKGILQTVKVVDELVKVMGRHKPENIVIEMARENQTTQKGQKNSRERMKRIEEGIKELGSQILKEHPVENTQLQNEKLYLYYLQNGRDMYVDQELDINRLSDYDVDHIVPQSFLKDDSIDNKVLTRSDKARGKSDNVPSEEVVKKMKNYWRQLLNAKLITQRKFDNLTKAERGGLSELDKAGFIKRQLVETRQITKHVAQILDSRMNTKYDENDKLIREVKVITLKSKLVSDFRKDFQFYKVREINNYHHAHDAYLNAVVGTALIKKYPKLESEFVYGDYKVYDVRKMIAKSEQEIGKATAKYFFYSNIMNFFKTEITLANGEIRKRPLIETNGETGEIVWDKGRDFATVRKVLSMPQVNIVKKTEVQTGGFSKESILPKRNSDKLIARKKDWDPKKYGGFDSPTVAYSVLVVAKVEKGKSKKLKSVKELLGITIMERSSFEKNPIDFLEAKGYKEVKKDLIIKLPKYSLFELENGRKRMLASAGELQKGNELALPSKYVNFLYLASHYEKLKGSPEDNEQKQLFVEQHKHYLDEIIEQISEFSKRVILADANLDKVLSAYNKHRDKPIREQAENIIHLFTLTNLGAPAAFKYFDTTIDRKRYTSTKEVLDATLIHQSITGLYETRIDLSQLGGDGGEAAAKGGGGGSGGTLGDQGSRGSDPLPEPRVTLTVEGIPTEFLVNTGAEHSVLTKPMGKMGSKRTVVAGATGSKVYPWTTKRLLKIGQKQVTHSFLVIPECPAPLLGRDLLTKLKAQIQFSTEGPQVTWEDRPAMCLVLNLEEEYRLHEKPVPPSIDPSWLQLFPMVWAEKAGMGLANQVPPVVVELKSDASPVAVRQYPMSKEAREGIRPHIQRFLDLGILVPCQSPWNTPLLPVKKPGTNDYRPVQDLREVNKRVQDIHPTVPNPYNLLSSLPPSHTWYSVLDLKDAFFCLKLHPNSQPLFAFEWRDPEKGNTGQLTWTRLPQGFKNSPTLFNEALHRDLASFRALNPQVVMLQYVDDLLVAAPTYRDCKEGTRRLLQELSKLGYRVSAKKAQLCREEVTYLGYLLKGGKRWLTPARKATVMKIPTPTTPRQVREFLGKAGFCRLFIPGFASLAAPLYPLTRPKVPFTWTEAHQEAFGRIKEALLSAPALALPDLTKPFALYVDEKEGVARGVLTQTLGPWRRPVAYLSKKLDPVASGWPTCLKAIAAVALLLKDADKLTLGQNVLVIAPHNLESIVRQPPDRWMTNARMTHYQSLLLNERVSFAPPAILNPATLLPVESDDTPIHICSEILAEETGTRPDLRDQPLPGVPAWYTDGSSFIMDGRRQAGAAIVDNKRTVWASNLPEGTSAQKAELIALTQALRLAEGKSINIYTDSRYAFATAHVHGAIYKQRGWLTSAGKDIKNKEEILALLEAIHLPKRVAIIHCPGHQRGTDPVATGNRKADEAAKQAAQSTRILTETTKNAGKRTADGSEFEKRTADGSEFESPKKKAKVE

SEQ ID NO: 6963 - protein, 2096 aa, synthetic construct
MPAAKRVKLDGGDKKYSIGLDIGTNSVGWAVITDEYKVPSKKFKVLGNTDRHSIKKNLIGALLFDSGETAEATRLKRTARRRYTRRKNRICYLQEIFSNEMAKVDDSFFHRLEESFLVEEDKKHERHPIFGNIVDEVAYHEKYPTIYHLRKKLVDSTDKADLRLIYLALAHMIKFRGHFLIEGDLNPDNSDVDKLFIQLVQTYNQLFEENPINASGVDAKAILSARLSKSRRLENLIAQLPGEKKNGLFGNLIALSLGLTPNFKSNFDLAEDAKLQLSKDTYDDDLDNLLAQIGDQYADLFLAAKNLSDAILLSDILRVNTEITKAPLSASMIKRYDEHHQDLTLLKALVRQQLPEKYKEIFFDQSKNGYAGYIDGGASQEEFYKFIKPILEKMDGTEELLVKLNREDLLRKQRTFDNGSIPHQIHLGELHAILRRQEDFYPFLKDNREKIEKILTFRIPYYVGPLARGNSRFAWMTRKSEETITPWNFEEVVDKGASAQSFIERMTNFDKNLPNEKVLPKHSLLYEYFTVYNELTKVKYVTEGMRKPAFLSGEQKKAIVDLLFKTNRKVTVKQLKEDYFKKIECFDSVEISGVEDRFNASLGTYHDLLKIIKDKDFLDNEENEDILEDIVLTLTLFEDREMIEERLKTYAHLFDDKVMKQLKRRRYTGWGRLSRKLINGIRDKQSGKTILDFLKSDGFANRNFMQLIHDDSLTFKEDIQKAQVSGQGDSLHEHIANLAGSPAIKKGILQTVKVVDELVKVMGRHKPENIVIEMARENQTTQKGQKNSRERMKRIEEGIKELGSQILKEHPVENTQLQNEKLYLYYLQNGRDMYVDQELDINRLSDYDVDHIVPQSFLKDDSIDNKVLTRSDKARGKSDNVPSEEVVKKMKNYWRQLLNAKLITQRKFDNLTKAERGGLSELDKAGFIKRQLVETRQITKHVAQILDSRMNTKYDENDKLIREVKVITLKSKLVSDFRKDFQFYKVREINNYHHAHDAYLNAVVGTALIKKYPKLESEFVYGDYKVYDVRKMIAKSEQEIGKATAKYFFYSNIMNFFKTEITLANGEIRKRPLIETNGETGEIVWDKGRDFATVRKVLSMPQVNIVKKTEVQTGGFSKESILPKRNSDKLIARKKDWDPKKYGGFDSPTVAYSVLVVAKVEKGKSKKLKSVKELLGITIMERSSFEKNPIDFLEAKGYKEVKKDLIIKLPKYSLFELENGRKRMLASAGELQKGNELALPSKYVNFLYLASHYEKLKGSPEDNEQKQLFVEQHKHYLDEIIEQISEFSKRVILADANLDKVLSAYNKHRDKPIREQAENIIHLFTLTNLGAPAAFKYFDTTIDRKRYTSTKEVLDATLIHQSITGLYETRIDLSQLGGDGGEAAAKGGGGGSGGTLNLEDEYRLYETSAEPEVSPGSTWLSDFPQAWAETGGMGLAVRQAPLIIPLKATSTPVSIKQYPMSQEAKLGIKPHIQRLLDQGILVPCQSPWNTPLLPVKKPGTNDYRPVQDLREVNKRVEDIHPTVPNPYNLLSGLPPSHRWYTVLDLKDAFFCLRLHPTSQPLFAFEWRDPGMGISGQLTWTRLPQGFKNSPTLFNEALHRDLADFRIQHPDLILLQYVDDILLAATSELDCQQGTRALLLTLGNLGYRASAKKAQLCQKQVKYLGYLLKEGQRWLTEARKETVMGQPTPKTPRQLREFLGKAGFCRLFIPGFAEMAAPLYPLTKPGTLFNWGPDQQKAYQEIKQALLTAPALGLPDLTKPFELFVDEKQGYAKGVLTQKLGPWRRPVAYLSKKLDPVAAGWPPCLRMVAAIAVLRKDAGKLTMGQPLVILAPHAVEALVKQPPDRWLSNARMTHYQAMLLDTDRVQFGPVVALNPATLLPLPEEGAPHDCLEILAETHGTRPDLTDQPIPDADHTWYTDGSSFLQEGQRKAGAAVTTETEVIWARALPAGTSAQRAELIALTQALKMAEGKRLNVYTDSRYAFATAHIHGEIYRRRGWLTSEGREIKNKSEILALLKALFLPKRLSIIHCLGHQKGDSAEARGNRLADQAAREAAIKTPPDTSTLLAGKRTADGSEFEKRTADGSEFESPKKKAKVE

SEQ ID NO: 6964 - protein, 2096 aa, synthetic construct
MPAAKRVKLDGGDKKYSIGLDIGTNSVGWAVITDEYKVPSKKFKVLGNTDRHSIKKNLIGALLFDSGETAEATRLKRTARRRYTRRKNRICYLQEIFSNEMAKVDDSFFHRLEESFLVEEDKKHERHPIFGNIVDEVAYHEKYPTIYHLRKKLVDSTDKADLRLIYLALAHMIKFRGHFLIEGDLNPDNSDVDKLFIQLVQTYNQLFEENPINASGVDAKAILSARLSKSRRLENLIAQLPGEKKNGLFGNLIALSLGLTPNFKSNFDLAEDAKLQLSKDTYDDDLDNLLAQIGDQYADLFLAAKNLSDAILLSDILRVNTEITKAPLSASMIKRYDEHHQDLTLLKALVRQQLPEKYKEIFFDQSKNGYAGYIDGGASQEEFYKFIKPILEKMDGTEELLVKLNREDLLRKQRTFDNGSIPHQIHLGELHAILRRQEDFYPFLKDNREKIEKILTFRIPYYVGPLARGNSRFAWMTRKSEETITPWNFEEVVDKGASAQSFIERMTNFDKNLPNEKVLPKHSLLYEYFTVYNELTKVKYVTEGMRKPAFLSGEQKKAIVDLLFKTNRKVTVKQLKEDYFKKIECFDSVEISGVEDRFNASLGTYHDLLKIIKDKDFLDNEENEDILEDIVLTLTLFEDREMIEERLKTYAHLFDDKVMKQLKRRRYTGWGRLSRKLINGIRDKQSGKTILDFLKSDGFANRNFMQLIHDDSLTFKEDIQKAQVSGQGDSLHEHIANLAGSPAIKKGILQTVKVVDELVKVMGRHKPENIVIEMARENQTTQKGQKNSRERMKRIEEGIKELGSQILKEHPVENTQLQNEKLYLYYLQNGRDMYVDQELDINRLSDYDVDHIVPQSFLKDDSIDNKVLTRSDKARGKSDNVPSEEVVKKMKNYWRQLLNAKLITQRKFDNLTKAERGGLSELDKAGFIKRQLVETRQITKHVAQILDSRMNTKYDENDKLIREVKVITLKSKLVSDFRKDFQFYKVREINNYHHAHDAYLNAVVGTALIKKYPKLESEFVYGDYKVYDVRKMIAKSEQEIGKATAKYFFYSNIMNFFKTEITLANGEIRKRPLIETNGETGEIVWDKGRDFATVRKVLSMPQVNIVKKTEVQTGGFSKESILPKRNSDKLIARKKDWDPKKYGGFDSPTVAYSVLVVAKVEKGKSKKLKSVKELLGITIMERSSFEKNPIDFLEAKGYKEVKKDLIIKLPKYSLFELENGRKRMLASAGELQKGNELALPSKYVNFLYLASHYEKLKGSPEDNEQKQLFVEQHKHYLDEIIEQISEFSKRVILADANLDKVLSAYNKHRDKPIREQAENIIHLFTLTNLGAPAAFKYFDTTIDRKRYTSTKEVLDATLIHQSITGLYETRIDLSQLGGDGGEAAAKGGGGGSGGTLGIEDEYRLHETSTEPDVSLGSTWLSDFPQAWAETGGMGLAVRQAPLIIPLKATSTPVSIQQYPMSHEARLGIKPHIQRLLDQGILVPCQSPWNTPLLPVKKPGTNDYRPVQDLREVNKRVEDIHPTVPNPYNLLSGLPPSHQWYTVLDLKDAFFCLRLHPTSQPLFAFEWRDPGMGISGQLTWTRLPQGFKNSPTLFDEALHRDLADFRIQHPDLILLQYVDDILLAATSELDCQQGTRALLQTLGDLGYRASAKKAQICQKQVKYLGYLLREGQRWLTEARKETVMGQPVPKTPRQLREFLGTAGFCRLWIPGFAEMAAPLYPLTKTGTLFSWGPDQQKAYQEIKQALLTAPALGLPDLTKPFELFVDEKQGYAKGVLTQKLGPWRRPVAYLSKKLDPVAAGWPPCLRMVAAIAVLTKDAGKLTMGQPLVILAPHAVEALVKQPPDRWLSNARMTHYQAMLLDTDRVQFGPVVALNPATLLPLPEEGAPHDCLEILAETHGTRPDLTDQPIPDADHTWYTDGSSFLQEGQRKAGAAVTTETEVIWAGALPAGTSAQRAELIALTQALKMAEGKRLNVYTDSRYAFATAHIHGEIYRRRGLLTSEGREIKNKSEILALLKALFLPKRLSIIHCLGHQKGDSAEARGNRLADQAAREAAIKTPPDTSTLLAGKRTADGSEFEKRTADGSEFESPKKKAKVE

SEQ ID NO: 6965 - protein, 2096 aa, synthetic construct
MPAAKRVKLDGGDKKYSIGLDIGTNSVGWAVITDEYKVPSKKFKVLGNTDRHSIKKNLIGALLFDSGETAEATRLKRTARRRYTRRKNRICYLQEIFSNEMAKVDDSFFHRLEESFLVEEDKKHERHPIFGNIVDEVAYHEKYPTIYHLRKKLVDSTDKADLRLIYLALAHMIKFRGHFLIEGDLNPDNSDVDKLFIQLVQTYNQLFEENPINASGVDAKAILSARLSKSRRLENLIAQLPGEKKNGLFGNLIALSLGLTPNFKSNFDLAEDAKLQLSKDTYDDDLDNLLAQIGDQYADLFLAAKNLSDAILLSDILRVNTEITKAPLSASMIKRYDEHHQDLTLLKALVRQQLPEKYKEIFFDQSKNGYAGYIDGGASQEEFYKFIKPILEKMDGTEELLVKLNREDLLRKQRTFDNGSIPHQIHLGELHAILRRQEDFYPFLKDNREKIEKILTFRIPYYVGPLARGNSRFAWMTRKSEETITPWNFEEVVDKGASAQSFIERMTNFDKNLPNEKVLPKHSLLYEYFTVYNELTKVKYVTEGMRKPAFLSGEQKKAIVDLLFKTNRKVTVKQLKEDYFKKIECFDSVEISGVEDRFNASLGTYHDLLKIIKDKDFLDNEENEDILEDIVLTLTLFEDREMIEERLKTYAHLFDDKVMKQLKRRRYTGWGRLSRKLINGIRDKQSGKTILDFLKSDGFANRNFMQLIHDDSLTFKEDIQKAQVSGQGDSLHEHIANLAGSPAIKKGILQTVKVVDELVKVMGRHKPENIVIEMARENQTTQKGQKNSRERMKRIEEGIKELGSQILKEHPVENTQLQNEKLYLYYLQNGRDMYVDQELDINRLSDYDVDHIVPQSFLKDDSIDNKVLTRSDKARGKSDNVPSEEVVKKMKNYWRQLLNAKLITQRKFDNLTKAERGGLSELDKAGFIKRQLVETRQITKHVAQILDSRMNTKYDENDKLIREVKVITLKSKLVSDFRKDFQFYKVREINNYHHAHDAYLNAVVGTALIKKYPKLESEFVYGDYKVYDVRKMIAKSEQEIGKATAKYFFYSNIMNFFKTEITLANGEIRKRPLIETNGETGEIVWDKGRDFATVRKVLSMPQVNIVKKTEVQTGGFSKESILPKRNSDKLIARKKDWDPKKYGGFDSPTVAYSVLVVAKVEKGKSKKLKSVKELLGITIMERSSFEKNPIDFLEAKGYKEVKKDLIIKLPKYSLFELENGRKRMLASAGELQKGNELALPSKYVNFLYLASHYEKLKGSPEDNEQKQLFVEQHKHYLDEIIEQISEFSKRVILADANLDKVLSAYNKHRDKPIREQAENIIHLFTLTNLGAPAAFKYFDTTIDRKRYTSTKEVLDATLIHQSITGLYETRIDLSQLGGDGGEAAAKGGGGGSGGTLNIEDEYRLHETSKGPDVPLGSTWLSDFPQAWAETGGMGLAVRQAPLIIPLKATSTPVSIKQYPMSQEARLGIKPHIQRLLDQGILVPCQSPWNTPLLPVKKPGTNDYRPVQDLREVNKRVEDIHPTVPNPYNLLSGLPPSHQWYTVLDLKDAFFCLRLHPTSQSLFAFEWRDPEMGISGQLTWTRLPQGFKNSPTLFDEALHRDLADFRIQHPDLILLQYVDDLLLAATSELDCQQGTRALLQTLGDLGYRASAKKAQICQKQVKYLGYLLKEGQRWLTEARKETVMGQPTPKTPRQLREFLGTAGFCRLWIPGFAEMAAPLYPLTKTGTLFEWGPDQQKAYQEIKQALLTAPALGLPDLTKPFELFVDEKQGYAKGVLTQKLGPWRRPVAYLSKKLDPVAAGWPPCLRMVAAIAVLTKDAGKLTMGQPLVILAPHAVEALVKQPPDRWLSNARMTHYQALLLDTDRVQFGPIVALNPATLLPLPEEGLQHDCLDILAEAHGTRPDLTDQPLPDADHTWYTDGSSFLQEGQRKAGAAVTTETEVVWAKALPAGTSAQRAELIALTQALKMAEGKKLNVYTDSRYAFATAHIHGEIYRRRGLLTSEGKEIKNKDEILALLKALFLPKRLSIIHCPGHQKGNRAEARGNRMADQAAREVATRETPETSTLLAGKRTADGSEFEKRTADGSEFESPKKKAKVE

SEQ ID NO: 6966 - protein, 2087 aa, synthetic construct
MPAAKRVKLDGGDKKYSIGLDIGTNSVGWAVITDEYKVPSKKFKVLGNTDRHSIKKNLIGALLFDSGETAEATRLKRTARRRYTRRKNRICYLQEIFSNEMAKVDDSFFHRLEESFLVEEDKKHERHPIFGNIVDEVAYHEKYPTIYHLRKKLVDSTDKADLRLIYLALAHMIKFRGHFLIEGDLNPDNSDVDKLFIQLVQTYNQLFEENPINASGVDAKAILSARLSKSRRLENLIAQLPGEKKNGLFGNLIALSLGLTPNFKSNFDLAEDAKLQLSKDTYDDDLDNLLAQIGDQYADLFLAAKNLSDAILLSDILRVNTEITKAPLSASMIKRYDEHHQDLTLLKALVRQQLPEKYKEIFFDQSKNGYAGYIDGGASQEEFYKFIKPILEKMDGTEELLVKLNREDLLRKQRTFDNGSIPHQIHLGELHAILRRQEDFYPFLKDNREKIEKILTFRIPYYVGPLARGNSRFAWMTRKSEETITPWNFEEVVDKGASAQSFIERMTNFDKNLPNEKVLPKHSLLYEYFTVYNELTKVKYVTEGMRKPAFLSGEQKKAIVDLLFKTNRKVTVKQLKEDYFKKIECFDSVEISGVEDRFNASLGTYHDLLKIIKDKDFLDNEENEDILEDIVLTLTLFEDREMIEERLKTYAHLFDDKVMKQLKRRRYTGWGRLSRKLINGIRDKQSGKTILDFLKSDGFANRNFMQLIHDDSLTFKEDIQKAQVSGQGDSLHEHIANLAGSPAIKKGILQTVKVVDELVKVMGRHKPENIVIEMARENQTTQKGQKNSRERMKRIEEGIKELGSQILKEHPVENTQLQNEKLYLYYLQNGRDMYVDQELDINRLSDYDVDHIVPQSFLKDDSIDNKVLTRSDKARGKSDNVPSEEVVKKMKNYWRQLLNAKLITQRKFDNLTKAERGGLSELDKAGFIKRQLVETRQITKHVAQILDSRMNTKYDENDKLIREVKVITLKSKLVSDFRKDFQFYKVREINNYHHAHDAYLNAVVGTALIKKYPKLESEFVYGDYKVYDVRKMIAKSEQEIGKATAKYFFYSNIMNFFKTEITLANGEIRKRPLIETNGETGEIVWDKGRDFATVRKVLSMPQVNIVKKTEVQTGGFSKESILPKRNSDKLIARKKDWDPKKYGGFDSPTVAYSVLVVAKVEKGKSKKLKSVKELLGITIMERSSFEKNPIDFLEAKGYKEVKKDLIIKLPKYSLFELENGRKRMLASAGELQKGNELALPSKYVNFLYLASHYEKLKGSPEDNEQKQLFVEQHKHYLDEIIEQISEFSKRVILADANLDKVLSAYNKHRDKPIREQAENIIHLFTLTNLGAPAAFKYFDTTIDRKRYTSTKEVLDATLIHQSITGLYETRIDLSQLGGDGGEAAAKGGGGGSGGIPWLMKKPLQLTTLVPLQEYEERLLKQTMLTGSYKEKLQSLFLKYDALWQHWENQVGHRRIKPHHIATGTVNPRPQKQYPINPKAKASIQTVINDLLKQGVLIQQNSIMNTPVYPVPKPDGKWRMVLDYREVNKTIPLIAAQNQHSAGILSSIFRGKYKTTLDLSNGFWAHSITPESYWLTAFTWLGQQYCWTRLPQGFLNSPALFNADVVDLLKEVPNVQVYVDDIYISHDDPREHLEQLEKVFSLLLNAGYVVSLKKSEIAQHEVEFLGFNITKEGRGLTETFKQKLLNITPPRDLKQLQSILGLLNFARNFIPNFSELVKPLYNIIATAPGKYITWTTDNSQQLQNIISMLNSAENLEERNPEVRLIMKVNTSPSAGYIRFYNEFAKRPIMYLNYVYTKAEVKFTNTEKLLTTIHKGLIKALDLGMGQEILVYSPIVSMTKIQKTPLPERKALPIRWITWMSYLEDPRIQFHYDKTLPELQQVPTVTDDIIAKIKHPSEFSMVFYTDGSAIKHPNVNKSHNAGMGIAQVQFKPEFTVINTWSIPLGDHTAQLAEVAAVEFACKKALKIDGPVLIVTDSFYVAESVNKELPYWQSNGFFNNKKKPLKHVSKWKSIADCIQLKPDIIIIHEKGHQPTASTFHTEGNNLADKLATQGSYVVNAGKRTADGSEFEKRTADGSEFESPKKKAKVE

SEQ ID NO: 6967 - protein, 2087 aa, synthetic construct
MPAAKRVKLDGGDKKYSIGLDIGTNSVGWAVITDEYKVPSKKFKVLGNTDRHSIKKNLIGALLFDSGETAEATRLKRTARRRYTRRKNRICYLQEIFSNEMAKVDDSFFHRLEESFLVEEDKKHERHPIFGNIVDEVAYHEKYPTIYHLRKKLVDSTDKADLRLIYLALAHMIKFRGHFLIEGDLNPDNSDVDKLFIQLVQTYNQLFEENPINASGVDAKAILSARLSKSRRLENLIAQLPGEKKNGLFGNLIALSLGLTPNFKSNFDLAEDAKLQLSKDTYDDDLDNLLAQIGDQYADLFLAAKNLSDAILLSDILRVNTEITKAPLSASMIKRYDEHHQDLTLLKALVRQQLPEKYKEIFFDQSKNGYAGYIDGGASQEEFYKFIKPILEKMDGTEELLVKLNREDLLRKQRTFDNGSIPHQIHLGELHAILRRQEDFYPFLKDNREKIEKILTFRIPYYVGPLARGNSRFAWMTRKSEETITPWNFEEVVDKGASAQSFIERMTNFDKNLPNEKVLPKHSLLYEYFTVYNELTKVKYVTEGMRKPAFLSGEQKKAIVDLLFKTNRKVTVKQLKEDYFKKIECFDSVEISGVEDRFNASLGTYHDLLKIIKDKDFLDNEENEDILEDIVLTLTLFEDREMIEERLKTYAHLFDDKVMKQLKRRRYTGWGRLSRKLINGIRDKQSGKTILDFLKSDGFANRNFMQLIHDDSLTFKEDIQKAQVSGQGDSLHEHIANLAGSPAIKKGILQTVKVVDELVKVMGRHKPENIVIEMARENQTTQKGQKNSRERMKRIEEGIKELGSQILKEHPVENTQLQNEKLYLYYLQNGRDMYVDQELDINRLSDYDVDHIVPQSFLKDDSIDNKVLTRSDKARGKSDNVPSEEVVKKMKNYWRQLLNAKLITQRKFDNLTKAERGGLSELDKAGFIKRQLVETRQITKHVAQILDSRMNTKYDENDKLIREVKVITLKSKLVSDFRKDFQFYKVREINNYHHAHDAYLNAVVGTALIKKYPKLESEFVYGDYKVYDVRKMIAKSEQEIGKATAKYFFYSNIMNFFKTEITLANGEIRKRPLIETNGETGEIVWDKGRDFATVRKVLSMPQVNIVKKTEVQTGGFSKESILPKRNSDKLIARKKDWDPKKYGGFDSPTVAYSVLVVAKVEKGKSKKLKSVKELLGITIMERSSFEKNPIDFLEAKGYKEVKKDLIIKLPKYSLFELENGRKRMLASAGELQKGNELALPSKYVNFLYLASHYEKLKGSPEDNEQKQLFVEQHKHYLDEIIEQISEFSKRVILADANLDKVLSAYNKHRDKPIREQAENIIHLFTLTNLGAPAAFKYFDTTIDRKRYTSTKEVLDATLIHQSITGLYETRIDLSQLGGDGGEAAAKGGGGGSGGIPWLMKKPLQLTTLVPLQEYEERLLKQTMLTGSYKEKLQSLFLKYDALWQHWENQVGHRRIKPHHIATGTVNPRPQKQYPINPKAKASIQTVINDLLKQGVLIQQNSIMNTPVYPVPKPDGKWRMVLDYREVNKTIPLIAAQNQHSAGILSSIFRGKYKTTLDLSNGFWAHSITPESYWLTAFTWLGQQYCWTRLPQGFLNSPALFNADVVDLLKEVPNVQVYVDDIYISHDDPREHLEQLEKVFSLLLNAGYVVSLKKSEIAQHEVEFLGFNITKEGRGLTETFKQKLLNITPPRDLKQLQSILGKLNFARNFIPNFSELVKPLYNIIATAPGKYITWTTDNSQQLQNIISMLNSAENLEERNPEVRLIMKVNTSPSAGYIRFYNEFAKRPIMYLNYVYTKAEVKFTNTEKLLTTIHKGLIKALDLGMGQEILVYSPIVSMTKIQKTPLPERKALPIRWITWMSYLEDPRIQFHYDKTLPELQQVPTVTDDIIAKIKHPSEFSMVFYTDGSAIKHPNVNKSHNAGMGIAQVQFKPEFTVINTWSIPLGDHTAQLAEVAAVEFACKKALKIDGPVLIVTDSFYVAESVNKELPYWQSNGFFNNKKKPLKHVSKWKSIADCIQLKPDIIIIHEKGHQPTASTFHTEGNNLADKLATQGSYVVNAGKRTADGSEFEKRTADGSEFESPKKKAKVE

SEQ ID NO: 6968 - protein, 2094 aa, synthetic construct
MPAAKRVKLDGGDKKYSIGLDIGTNSVGWAVITDEYKVPSKKFKVLGNTDRHSIKKNLIGALLFDSGETAEATRLKRTARRRYTRRKNRICYLQEIFSNEMAKVDDSFFHRLEESFLVEEDKKHERHPIFGNIVDEVAYHEKYPTIYHLRKKLVDSTDKADLRLIYLALAHMIKFRGHFLIEGDLNPDNSDVDKLFIQLVQTYNQLFEENPINASGVDAKAILSARLSKSRRLENLIAQLPGEKKNGLFGNLIALSLGLTPNFKSNFDLAEDAKLQLSKDTYDDDLDNLLAQIGDQYADLFLAAKNLSDAILLSDILRVNTEITKAPLSASMIKRYDEHHQDLTLLKALVRQQLPEKYKEIFFDQSKNGYAGYIDGGASQEEFYKFIKPILEKMDGTEELLVKLNREDLLRKQRTFDNGSIPHQIHLGELHAILRRQEDFYPFLKDNREKIEKILTFRIPYYVGPLARGNSRFAWMTRKSEETITPWNFEEVVDKGASAQSFIERMTNFDKNLPNEKVLPKHSLLYEYFTVYNELTKVKYVTEGMRKPAFLSGEQKKAIVDLLFKTNRKVTVKQLKEDYFKKIECFDSVEISGVEDRFNASLGTYHDLLKIIKDKDFLDNEENEDILEDIVLTLTLFEDREMIEERLKTYAHLFDDKVMKQLKRRRYTGWGRLSRKLINGIRDKQSGKTILDFLKSDGFANRNFMQLIHDDSLTFKEDIQKAQVSGQGDSLHEHIANLAGSPAIKKGILQTVKVVDELVKVMGRHKPENIVIEMARENQTTQKGQKNSRERMKRIEEGIKELGSQILKEHPVENTQLQNEKLYLYYLQNGRDMYVDQELDINRLSDYDVDHIVPQSFLKDDSIDNKVLTRSDKARGKSDNVPSEEVVKKMKNYWRQLLNAKLITQRKFDNLTKAERGGLSELDKAGFIKRQLVETRQITKHVAQILDSRMNTKYDENDKLIREVKVITLKSKLVSDFRKDFQFYKVREINNYHHAHDAYLNAVVGTALIKKYPKLESEFVYGDYKVYDVRKMIAKSEQEIGKATAKYFFYSNIMNFFKTEITLANGEIRKRPLIETNGETGEIVWDKGRDFATVRKVLSMPQVNIVKKTEVQTGGFSKESILPKRNSDKLIARKKDWDPKKYGGFDSPTVAYSVLVVAKVEKGKSKKLKSVKELLGITIMERSSFEKNPIDFLEAKGYKEVKKDLIIKLPKYSLFELENGRKRMLASAGELQKGNELALPSKYVNFLYLASHYEKLKGSPEDNEQKQLFVEQHKHYLDEIIEQISEFSKRVILADANLDKVLSAYNKHRDKPIREQAENIIHLFTLTNLGAPAAFKYFDTTIDRKRYTSTKEVLDATLIHQSITGLYETRIDLSQLGGDGGEAAAKGGGGGSGGVLNLEEEYRLHEKPVPSSIDPSWLQLFPTVWAERAGMGLANQVPPVVVELRSGASPVAVRQYPMSKEAREGIRPHIQRFLDLGVLVPCQSPWNTPLLPVKKPGTNDYRPVQDLREINKRVQDIHPTVPNPYNLLSSLPPSHTWYSVLDLKDAFFCLKLHPNSQPLFAFEWRDPEKGNTGQLTWTRLPQGFKNSPTLFNEALHRDLAPFRALNPQVVLLQYVDDLLVAAPTYRDCKEGTQKLLQELSKLGYRVSAKKAQLCQKEVTYLGYLLKEGKRWLTPARKATVMKIPPPTTPRQVREFLGKAGFCRLFIPGFASLAAPLYPLTKPSIPFIWTEEHQKAFDRIKEALLSAPALALPDLTKPFTLYVDERAGVARGVLTQTLGPWRRPVAYLSKKLDPVASGWPTCLKAVAAVALLLKDADKLTLGQNVTVIASHSLESIVRQPPDRWMTNARMTHYQSLLLNERVSFAPPAVLNPATLLPVESEATPVHRCSEILAEETGTRRDLKDQPLPGVPAWYTDGSSFIAEGKRRAGAAIVDGKRTVWASSLPEGTSAQKAELVALTQALRLAEGKDINIYTDSRYAFATAHIHGAIYKQRGWLTSAGKDIKNKEEILALLEAIHLPKRVAIIHCPGHQKGNDPVATGNRRADEAAKQAALSTRVLAETTKPAGKRTADGSEFEKRTADGSEFESPKKKAKVE

SEQ ID NO: 6969 - protein, 2096 aa, synthetic construct
MPAAKRVKLDGGDKKYSIGLDIGTNSVGWAVITDEYKVPSKKFKVLGNTDRHSIKKNLIGALLFDSGETAEATRLKRTARRRYTRRKNRICYLQEIFSNEMAKVDDSFFHRLEESFLVEEDKKHERHPIFGNIVDEVAYHEKYPTIYHLRKKLVDSTDKADLRLIYLALAHMIKFRGHFLIEGDLNPDNSDVDKLFIQLVQTYNQLFEENPINASGVDAKAILSARLSKSRRLENLIAQLPGEKKNGLFGNLIALSLGLTPNFKSNFDLAEDAKLQLSKDTYDDDLDNLLAQIGDQYADLFLAAKNLSDAILLSDILRVNTEITKAPLSASMIKRYDEHHQDLTLLKALVRQQLPEKYKEIFFDQSKNGYAGYIDGGASQEEFYKFIKPILEKMDGTEELLVKLNREDLLRKQRTFDNGSIPHQIHLGELHAILRRQEDFYPFLKDNREKIEKILTFRIPYYVGPLARGNSRFAWMTRKSEETITPWNFEEVVDKGASAQSFIERMTNFDKNLPNEKVLPKHSLLYEYFTVYNELTKVKYVTEGMRKPAFLSGEQKKAIVDLLFKTNRKVTVKQLKEDYFKKIECFDSVEISGVEDRFNASLGTYHDLLKIIKDKDFLDNEENEDILEDIVLTLTLFEDREMIEERLKTYAHLFDDKVMKQLKRRRYTGWGRLSRKLINGIRDKQSGKTILDFLKSDGFANRNFMQLIHDDSLTFKEDIQKAQVSGQGDSLHEHIANLAGSPAIKKGILQTVKVVDELVKVMGRHKPENIVIEMARENQTTQKGQKNSRERMKRIEEGIKELGSQILKEHPVENTQLQNEKLYLYYLQNGRDMYVDQELDINRLSDYDVDHIVPQSFLKDDSIDNKVLTRSDKARGKSDNVPSEEVVKKMKNYWRQLLNAKLITQRKFDNLTKAERGGLSELDKAGFIKRQLVETRQITKHVAQILDSRMNTKYDENDKLIREVKVITLKSKLVSDFRKDFQFYKVREINNYHHAHDAYLNAVVGTALIKKYPKLESEFVYGDYKVYDVRKMIAKSEQEIGKATAKYFFYSNIMNFFKTEITLANGEIRKRPLIETNGETGEIVWDKGRDFATVRKVLSMPQVNIVKKTEVQTGGFSKESILPKRNSDKLIARKKDWDPKKYGGFDSPTVAYSVLVVAKVEKGKSKKLKSVKELLGITIMERSSFEKNPIDFLEAKGYKEVKKDLIIKLPKYSLFELENGRKRMLASAGELQKGNELALPSKYVNFLYLASHYEKLKGSPEDNEQKQLFVEQHKHYLDEIIEQISEFSKRVILADANLDKVLSAYNKHRDKPIREQAENIIHLFTLTNLGAPAAFKYFDTTIDRKRYTSTKEVLDATLIHQSITGLYETRIDLSQLGGDGGEAAAKGGGGGSGGTLNIEDEYRLHETSKEPDVPLGSTWLSDFPQAWAETGGMGLAVRQAPLIIPLKATSTPVSIKQYPMSQEARLGIKPHIQRLLDQGILVPCQSPWNTPLLPVKKPGTNDYRPVQDLREVNKRVEDIHPTVPNPYNLLSGLPPSHQWYTVLDLKDAFFCLRLHPTSQPLFAFEWRDPEMGISGQLTWTRLPQGFKNSPTLFNEALHRDLADFRIQHPDLILLQYVDDLLLAATSEQDCQRGTRALLQTLGNLGYRASAKKAQICQKQVKYLGYLLKEGQRWLTEARKETVMGQPTPKTPRQLREFLGTAGFCRLWIPGFAEMAAPLYPLTKPGTLFNWGPDQQKAYQEIKQALLTAPALGLPDLTKPFELFVDEKQGYAKGVLTQKLGPWRRPVAYLSKKLDPVAAGWPPCLRMVAAIAVLTKDAGKLTMGQPLVILAPHAVEALVKQPPDRWLSNARMTHYQAMLLDTDRVQFGPVVALNPATLLPLPEKEAPHDCLEILAETHGTRPDLTDQPIPDADYTWYTDGSSFLQEGQRRAGAAVTTETEVIWARALPAGTSAQRAELIALTQALKMAEGKKLNVYTDSRYAFATAHVHGEIYRRRGWLTSEGREIKNKNEILALLKALFLPKRLSIIHCPGHQKGNSAEARGNRMADQAAREAAMKAVLETSTLLAGKRTADGSEFEKRTADGSEFESPKKKAKVE

SEQ ID NO: 6970 - protein, 2096 aa, synthetic construct
MPAAKRVKLDGGDKKYSIGLDIGTNSVGWAVITDEYKVPSKKFKVLGNTDRHSIKKNLIGALLFDSGETAEATRLKRTARRRYTRRKNRICYLQEIFSNEMAKVDDSFFHRLEESFLVEEDKKHERHPIFGNIVDEVAYHEKYPTIYHLRKKLVDSTDKADLRLIYLALAHMIKFRGHFLIEGDLNPDNSDVDKLFIQLVQTYNQLFEENPINASGVDAKAILSARLSKSRRLENLIAQLPGEKKNGLFGNLIALSLGLTPNFKSNFDLAEDAKLQLSKDTYDDDLDNLLAQIGDQYADLFLAAKNLSDAILLSDILRVNTEITKAPLSASMIKRYDEHHQDLTLLKALVRQQLPEKYKEIFFDQSKNGYAGYIDGGASQEEFYKFIKPILEKMDGTEELLVKLNREDLLRKQRTFDNGSIPHQIHLGELHAILRRQEDFYPFLKDNREKIEKILTFRIPYYVGPLARGNSRFAWMTRKSEETITPWNFEEVVDKGASAQSFIERMTNFDKNLPNEKVLPKHSLLYEYFTVYNELTKVKYVTEGMRKPAFLSGEQKKAIVDLLFKTNRKVTVKQLKEDYFKKIECFDSVEISGVEDRFNASLGTYHDLLKIIKDKDFLDNEENEDILEDIVLTLTLFEDREMIEERLKTYAHLFDDKVMKQLKRRRYTGWGRLSRKLINGIRDKQSGKTILDFLKSDGFANRNFMQLIHDDSLTFKEDIQKAQVSGQGDSLHEHIANLAGSPAIKKGILQTVKVVDELVKVMGRHKPENIVIEMARENQTTQKGQKNSRERMKRIEEGIKELGSQILKEHPVENTQLQNEKLYLYYLQNGRDMYVDQELDINRLSDYDVDHIVPQSFLKDDSIDNKVLTRSDKARGKSDNVPSEEVVKKMKNYWRQLLNAKLITQRKFDNLTKAERGGLSELDKAGFIKRQLVETRQITKHVAQILDSRMNTKYDENDKLIREVKVITLKSKLVSDFRKDFQFYKVREINNYHHAHDAYLNAVVGTALIKKYPKLESEFVYGDYKVYDVRKMIAKSEQEIGKATAKYFFYSNIMNFFKTEITLANGEIRKRPLIETNGETGEIVWDKGRDFATVRKVLSMPQVNIVKKTEVQTGGFSKESILPKRNSDKLIARKKDWDPKKYGGFDSPTVAYSVLVVAKVEKGKSKKLKSVKELLGITIMERSSFEKNPIDFLEAKGYKEVKKDLIIKLPKYSLFELENGRKRMLASAGELQKGNELALPSKYVNFLYLASHYEKLKGSPEDNEQKQLFVEQHKHYLDEIIEQISEFSKRVILADANLDKVLSAYNKHRDKPIREQAENIIHLFTLTNLGAPAAFKYFDTTIDRKRYTSTKEVLDATLIHQSITGLYETRIDLSQLGGDGGGGSGGGPAPGGTAPLEEEYRLFLEAPIQNVTLLEQWKREIPKVWAEINPPGLASTQAPIHVQLLSTALPVRVRQYPITLEAKRSLRETIRKFRAAGILRPVHSPWNTPLLPVRKSGTSEYRMVQDLREVNKRVETIHPTVPNPYTLLSLLPPDRIWYSVLDLKDAFFCIPLAPESQLIFAFEWADAEEGESGQLTWTRLPQGFKNSPTLFDEALNRDLQGFRLDHPSVSLLQYVDDLLIAADTQAACLSATRDLLMTLAELGYRVSGKKAQLCQEEVTYLGFKIHKGSRSLSNSRTQAILQIPVPKTKRQVREFLGTIGYCRLWIPGFAELAQPLYAATRGGNDPLVWGEKEEEAFQSLKLALTQPPALALPSLDKPFQLFVEETSGAAKGVLTQALGPWKRPVAYLSKRLDPVAAGWPRCLRAIAAAALLTREASKLTFGQDIEITSSHNLESLLRSPPDKWLTNARITQYQVLLLDPPRVRFKQTAALNPATLLPETDDTLPIHHCLDTLDSLTSTRPDLTDQPLAQAEATLFTDGSSYIRDGKRYAGAAVVTLDSVIWAEPLPIGTSAQKAELIALTKALEWSKDKSVNIYTDSRYAFATLHVHGMIYRERGLLTAGGKAIKNAPEILALLTAVWLPKRVAVMHCKGHQKDDAPTSTGNRRADEVAREVAIRPLSTQATISAGKRTADGSEFEKRTADGSEFESPKKKAKVE

SEQ ID NO: 6971 - protein, 2096 aa, synthetic construct
MPAAKRVKLDGGDKKYSIGLDIGTNSVGWAVITDEYKVPSKKFKVLGNTDRHSIKKNLIGALLFDSGETAEATRLKRTARRRYTRRKNRICYLQEIFSNEMAKVDDSFFHRLEESFLVEEDKKHERHPIFGNIVDEVAYHEKYPTIYHLRKKLVDSTDKADLRLIYLALAHMIKFRGHFLIEGDLNPDNSDVDKLFIQLVQTYNQLFEENPINASGVDAKAILSARLSKSRRLENLIAQLPGEKKNGLFGNLIALSLGLTPNFKSNFDLAEDAKLQLSKDTYDDDLDNLLAQIGDQYADLFLAAKNLSDAILLSDILRVNTEITKAPLSASMIKRYDEHHQDLTLLKALVRQQLPEKYKEIFFDQSKNGYAGYIDGGASQEEFYKFIKPILEKMDGTEELLVKLNREDLLRKQRTFDNGSIPHQIHLGELHAILRRQEDFYPFLKDNREKIEKILTFRIPYYVGPLARGNSRFAWMTRKSEETITPWNFEEVVDKGASAQSFIERMTNFDKNLPNEKVLPKHSLLYEYFTVYNELTKVKYVTEGMRKPAFLSGEQKKAIVDLLFKTNRKVTVKQLKEDYFKKIECFDSVEISGVEDRFNASLGTYHDLLKIIKDKDFLDNEENEDILEDIVLTLTLFEDREMIEERLKTYAHLFDDKVMKQLKRRRYTGWGRLSRKLINGIRDKQSGKTILDFLKSDGFANRNFMQLIHDDSLTFKEDIQKAQVSGQGDSLHEHIANLAGSPAIKKGILQTVKVVDELVKVMGRHKPENIVIEMARENQTTQKGQKNSRERMKRIEEGIKELGSQILKEHPVENTQLQNEKLYLYYLQNGRDMYVDQELDINRLSDYDVDHIVPQSFLKDDSIDNKVLTRSDKARGKSDNVPSEEVVKKMKNYWRQLLNAKLITQRKFDNLTKAERGGLSELDKAGFIKRQLVETRQITKHVAQILDSRMNTKYDENDKLIREVKVITLKSKLVSDFRKDFQFYKVREINNYHHAHDAYLNAVVGTALIKKYPKLESEFVYGDYKVYDVRKMIAKSEQEIGKATAKYFFYSNIMNFFKTEITLANGEIRKRPLIETNGETGEIVWDKGRDFATVRKVLSMPQVNIVKKTEVQTGGFSKESILPKRNSDKLIARKKDWDPKKYGGFDSPTVAYSVLVVAKVEKGKSKKLKSVKELLGITIMERSSFEKNPIDFLEAKGYKEVKKDLIIKLPKYSLFELENGRKRMLASAGELQKGNELALPSKYVNFLYLASHYEKLKGSPEDNEQKQLFVEQHKHYLDEIIEQISEFSKRVILADANLDKVLSAYNKHRDKPIREQAENIIHLFTLTNLGAPAAFKYFDTTIDRKRYTSTKEVLDATLIHQSITGLYETRIDLSQLGGDGGGGSGGGPAPGGTAPLEEEYRLFLEAPIQNVTLLEQWKREIPKVWAEINPPGLASTQAPIHVQLLSTALPVRVRQYPITLEAKRSLRETIRKFRAAGILRPVHSPWNTPLLPVRKSGTSEYRMVQDLREVNKRVETIHPTVPNPYTLLSLLPPDRIWYSVLDLKDAFFCIPLAPESQLIFAFEWADAEEGESGQLTWTRLPQGFKNSPTLFNEALNRDLQGFRLDHPSVSLLQYVDDLLIAADTQAACLSATRDLLMTLAELGYRVSGKKAQLCQEEVTYLGFKIHKGSRSLSNSRTQAILQIPVPKTKRQVREFLGTIGYCRLWIPGFAELAQPLYAATRPGNDPLVWGEKEEEAFQSLKLALTQPPALALPSLDKPFQLFVEETSGAAKGVLTQALGPWKRPVAYLSKRLDPVAAGWPRCLRAIAAAALLTREASKLTFGQDIEITSSHNLESLLRSPPDKWLTNARITQYQVLLLDPPRVRFKQTAALNPATLLPETDDTLPIHHCLDTLDSLTSTRPDLTDQPLAQAEATLFTDGSSYIRDGKRYAGAAVVTLDSVIWAEPLPIGTSAQKAELIALTKALEWSKDKSVNIYTDSRYAFATLHVHGMIYRERGWLTAGGKAIKNAPEILALLTAVWLPKRVAVMHCKGHQKDDAPTSTGNRRADEVAREVAIRPLSTQATISAGKRTADGSEFEKRTADGSEFESPKKKAKVE

SEQ ID NO: 6972 - protein, 2096 aa, synthetic construct
MPAAKRVKLDGGDKKYSIGLDIGTNSVGWAVITDEYKVPSKKFKVLGNTDRHSIKKNLIGALLFDSGETAEATRLKRTARRRYTRRKNRICYLQEIFSNEMAKVDDSFFHRLEESFLVEEDKKHERHPIFGNIVDEVAYHEKYPTIYHLRKKLVDSTDKADLRLIYLALAHMIKFRGHFLIEGDLNPDNSDVDKLFIQLVQTYNQLFEENPINASGVDAKAILSARLSKSRRLENLIAQLPGEKKNGLFGNLIALSLGLTPNFKSNFDLAEDAKLQLSKDTYDDDLDNLLAQIGDQYADLFLAAKNLSDAILLSDILRVNTEITKAPLSASMIKRYDEHHQDLTLLKALVRQQLPEKYKEIFFDQSKNGYAGYIDGGASQEEFYKFIKPILEKMDGTEELLVKLNREDLLRKQRTFDNGSIPHQIHLGELHAILRRQEDFYPFLKDNREKIEKILTFRIPYYVGPLARGNSRFAWMTRKSEETITPWNFEEVVDKGASAQSFIERMTNFDKNLPNEKVLPKHSLLYEYFTVYNELTKVKYVTEGMRKPAFLSGEQKKAIVDLLFKTNRKVTVKQLKEDYFKKIECFDSVEISGVEDRFNASLGTYHDLLKIIKDKDFLDNEENEDILEDIVLTLTLFEDREMIEERLKTYAHLFDDKVMKQLKRRRYTGWGRLSRKLINGIRDKQSGKTILDFLKSDGFANRNFMQLIHDDSLTFKEDIQKAQVSGQGDSLHEHIANLAGSPAIKKGILQTVKVVDELVKVMGRHKPENIVIEMARENQTTQKGQKNSRERMKRIEEGIKELGSQILKEHPVENTQLQNEKLYLYYLQNGRDMYVDQELDINRLSDYDVDHIVPQSFLKDDSIDNKVLTRSDKARGKSDNVPSEEVVKKMKNYWRQLLNAKLITQRKFDNLTKAERGGLSELDKAGFIKRQLVETRQITKHVAQILDSRMNTKYDENDKLIREVKVITLKSKLVSDFRKDFQFYKVREINNYHHAHDAYLNAVVGTALIKKYPKLESEFVYGDYKVYDVRKMIAKSEQEIGKATAKYFFYSNIMNFFKTEITLANGEIRKRPLIETNGETGEIVWDKGRDFATVRKVLSMPQVNIVKKTEVQTGGFSKESILPKRNSDKLIARKKDWDPKKYGGFDSPTVAYSVLVVAKVEKGKSKKLKSVKELLGITIMERSSFEKNPIDFLEAKGYKEVKKDLIIKLPKYSLFELENGRKRMLASAGELQKGNELALPSKYVNFLYLASHYEKLKGSPEDNEQKQLFVEQHKHYLDEIIEQISEFSKRVILADANLDKVLSAYNKHRDKPIREQAENIIHLFTLTNLGAPAAFKYFDTTIDRKRYTSTKEVLDATLIHQSITGLYETRIDLSQLGGDGGGGSGGGPAPGGTAPLEEEYRLFLEAPIQNVTLLEQWKREIPKVWAEINPPGLASTQAPIHVQLLSTALPVRVRQYPITLEAKRSLRETIRKFRAAGILRPVHSPWNTPLLPVRKSGTSEYRMVQDLREVNKRVETIHPTVPNPYTLLSLLPPDRIWYSVLDLKDAFFCIPLAPESQLIFAFEWADAEEGESGQLTWTRLPQGFKNSPTLFNEALNRDLQGFRLDHPSVSLLQYVDDLLIAADTQAACLSATRDLLMTLAELGYRVSGKKAQLCQEEVTYLGFKIHKGSRSLSNSRTQAILQIPVPKTKRQVREFLGKIGYCRLFIPGFAELAQPLYAATRPGNDPLVWGEKEEEAFQSLKLALTQPPALALPSLDKPFQLFVEETSGAAKGVLTQALGPWKRPVAYLSKRLDPVAAGWPRCLRAIAAAALLTREASKLTFGQDIEITSSHNLESLLRSPPDKWLTNARITQYQVLLLDPPRVRFKQTAALNPATLLPETDDTLPIHHCLDTLDSLTSTRPDLTDQPLAQAEATLFTDGSSYIRDGKRYAGAAVVTLDSVIWAEPLPIGTSAQKAELIALTKALEWSKDKSVNIYTDSRYAFATLHVHGMIYRERGWLTAGGKAIKNAPEILALLTAVWLPKRVAVMHCKGHQKDDAPTSTGNRRADEVAREVAIRPLSTQATISAGKRTADGSEFEKRTADGSEFESPKKKAKVE

SEQ ID NO: 6973 - protein, 2100 aa, synthetic construct
MPAAKRVKLDGGDKKYSIGLDIGTNSVGWAVITDEYKVPSKKFKVLGNTDRHSIKKNLIGALLFDSGETAEATRLKRTARRRYTRRKNRICYLQEIFSNEMAKVDDSFFHRLEESFLVEEDKKHERHPIFGNIVDEVAYHEKYPTIYHLRKKLVDSTDKADLRLIYLALAHMIKFRGHFLIEGDLNPDNSDVDKLFIQLVQTYNQLFEENPINASGVDAKAILSARLSKSRRLENLIAQLPGEKKNGLFGNLIALSLGLTPNFKSNFDLAEDAKLQLSKDTYDDDLDNLLAQIGDQYADLFLAAKNLSDAILLSDILRVNTEITKAPLSASMIKRYDEHHQDLTLLKALVRQQLPEKYKEIFFDQSKNGYAGYIDGGASQEEFYKFIKPILEKMDGTEELLVKLNREDLLRKQRTFDNGSIPHQIHLGELHAILRRQEDFYPFLKDNREKIEKILTFRIPYYVGPLARGNSRFAWMTRKSEETITPWNFEEVVDKGASAQSFIERMTNFDKNLPNEKVLPKHSLLYEYFTVYNELTKVKYVTEGMRKPAFLSGEQKKAIVDLLFKTNRKVTVKQLKEDYFKKIECFDSVEISGVEDRFNASLGTYHDLLKIIKDKDFLDNEENEDILEDIVLTLTLFEDREMIEERLKTYAHLFDDKVMKQLKRRRYTGWGRLSRKLINGIRDKQSGKTILDFLKSDGFANRNFMQLIHDDSLTFKEDIQKAQVSGQGDSLHEHIANLAGSPAIKKGILQTVKVVDELVKVMGRHKPENIVIEMARENQTTQKGQKNSRERMKRIEEGIKELGSQILKEHPVENTQLQNEKLYLYYLQNGRDMYVDQELDINRLSDYDVDHIVPQSFLKDDSIDNKVLTRSDKARGKSDNVPSEEVVKKMKNYWRQLLNAKLITQRKFDNLTKAERGGLSELDKAGFIKRQLVETRQITKHVAQILDSRMNTKYDENDKLIREVKVITLKSKLVSDFRKDFQFYKVREINNYHHAHDAYLNAVVGTALIKKYPKLESEFVYGDYKVYDVRKMIAKSEQEIGKATAKYFFYSNIMNFFKTEITLANGEIRKRPLIETNGETGEIVWDKGRDFATVRKVLSMPQVNIVKKTEVQTGGFSKESILPKRNSDKLIARKKDWDPKKYGGFDSPTVAYSVLVVAKVEKGKSKKLKSVKELLGITIMERSSFEKNPIDFLEAKGYKEVKKDLIIKLPKYSLFELENGRKRMLASAGELQKGNELALPSKYVNFLYLASHYEKLKGSPEDNEQKQLFVEQHKHYLDEIIEQISEFSKRVILADANLDKVLSAYNKHRDKPIREQAENIIHLFTLTNLGAPAAFKYFDTTIDRKRYTSTKEVLDATLIHQSITGLYETRIDLSQLGGDGGGGSGGGPAPGGTVSLQDEHRLFDIPVTTSLPDVWLQDFPQAWAETGGLGRAKCQAPIIIDLKPTAVPVSIKQYPMSLEAHMGIRQHIIKFLELGVLRPCRSPWNTPLLPVKKPGTQDYRPVQDLREINKRTVDIHPTVPNPYNLLSTLKPDYSWYTVLDLKDAFFCLPLAPQSQELFAFEWKDPERGISGQLTWTRLPQGFKNSPTLFNEALHRDLTDFRTQHPEVTLLQYVDDLLLAAPTKKACTQGTRHLLQELGEKGYRASAKKAQICQTKVTYLGYILSEGKRWLTPGRIETVARIPPPRNPREVREFLGTAGFCRLWIPGFAELAAPLYALTKPSTPFTWQTEHQLAFEALKKALLSAPALGLPDTSKPFTLFLDERQGIAKGVLTQKLGPWKRPVAYLSKKLDPVAAGWPPCLRIMAATAMLVKDSAKLTLGQPLTVITPHTLEAIVRQPPDRWITNARLTHYQALLLDTDRVQFGPPVTLNPATLLPVPENQPSPHDCRQVLAETHGTREDLKDQELPDADHTWYTDGSSYLDSGTRRAGAAVVDGHNTIWAQSLPPGTSAQKAELIALTKALELSKGKKANIYTDSRYAFATAHTHGSIYERRGWLTSEGKEIKNKAEIIALLKALFLPQEVAIIHCPGHQKGQDPVAVGNRQADRVARQAAMAEVLTLATEPDNTSHITAGKRTADGSEFEKRTADGSEFESPKKKAKVE

SEQ ID NO: 6974 - protein, 2092 aa, synthetic construct
MPAAKRVKLDGGDKKYSIGLDIGTNSVGWAVITDEYKVPSKKFKVLGNTDRHSIKKNLIGALLFDSGETAEATRLKRTARRRYTRRKNRICYLQEIFSNEMAKVDDSFFHRLEESFLVEEDKKHERHPIFGNIVDEVAYHEKYPTIYHLRKKLVDSTDKADLRLIYLALAHMIKFRGHFLIEGDLNPDNSDVDKLFIQLVQTYNQLFEENPINASGVDAKAILSARLSKSRRLENLIAQLPGEKKNGLFGNLIALSLGLTPNFKSNFDLAEDAKLQLSKDTYDDDLDNLLAQIGDQYADLFLAAKNLSDAILLSDILRVNTEITKAPLSASMIKRYDEHHQDLTLLKALVRQQLPEKYKEIFFDQSKNGYAGYIDGGASQEEFYKFIKPILEKMDGTEELLVKLNREDLLRKQRTFDNGSIPHQIHLGELHAILRRQEDFYPFLKDNREKIEKILTFRIPYYVGPLARGNSRFAWMTRKSEETITPWNFEEVVDKGASAQSFIERMTNFDKNLPNEKVLPKHSLLYEYFTVYNELTKVKYVTEGMRKPAFLSGEQKKAIVDLLFKTNRKVTVKQLKEDYFKKIECFDSVEISGVEDRFNASLGTYHDLLKIIKDKDFLDNEENEDILEDIVLTLTLFEDREMIEERLKTYAHLFDDKVMKQLKRRRYTGWGRLSRKLINGIRDKQSGKTILDFLKSDGFANRNFMQLIHDDSLTFKEDIQKAQVSGQGDSLHEHIANLAGSPAIKKGILQTVKVVDELVKVMGRHKPENIVIEMARENQTTQKGQKNSRERMKRIEEGIKELGSQILKEHPVENTQLQNEKLYLYYLQNGRDMYVDQELDINRLSDYDVDHIVPQSFLKDDSIDNKVLTRSDKARGKSDNVPSEEVVKKMKNYWRQLLNAKLITQRKFDNLTKAERGGLSELDKAGFIKRQLVETRQITKHVAQILDSRMNTKYDENDKLIREVKVITLKSKLVSDFRKDFQFYKVREINNYHHAHDAYLNAVVGTALIKKYPKLESEFVYGDYKVYDVRKMIAKSEQEIGKATAKYFFYSNIMNFFKTEITLANGEIRKRPLIETNGETGEIVWDKGRDFATVRKVLSMPQVNIVKKTEVQTGGFSKESILPKRNSDKLIARKKDWDPKKYGGFDSPTVAYSVLVVAKVEKGKSKKLKSVKELLGITIMERSSFEKNPIDFLEAKGYKEVKKDLIIKLPKYSLFELENGRKRMLASAGELQKGNELALPSKYVNFLYLASHYEKLKGSPEDNEQKQLFVEQHKHYLDEIIEQISEFSKRVILADANLDKVLSAYNKHRDKPIREQAENIIHLFTLTNLGAPAAFKYFDTTIDRKRYTSTKEVLDATLIHQSITGLYETRIDLSQLGGDGGGGSGGGPAPGGVLNLEEEYRLHEKPVPSSIDPSWLQLFPTVWAERAGMGLANQVPPVVVELRSGASPVAVRQYPMSKEAREGIRPHIQKFLDLGVLVPCRSPWNTPLLPVKKPGTNDYRPVQDLREINKRVQDIHPTVPNPYNLLSSLPPSYTWYSVLDLKDAFFCLRLHPNSQPLFAFEWKDPEKGNTGQLTWTRLPQGFKNSPTLFNEALHRDLAPFRALNPQVVLLQYVDDLLVAAPTYEDCKKGTQKLLQELSKLGYRVSAKKAQLCQREVTYLGYLLKEGKRWLTPARKATVMKIPVPTTPRQVREFLGTAGFCRLWIPGFASLAAPLYPLTKPSIPFIWTEEHQQAFDHIKKALLSAPALALPDLTKPFTLYIDERAGVARGVLTQTLGPWRRPVAYLSKKLDPVASGWPTCLKAVAAVALLLKDADKLTLGQNVTVIASHSLESIVRQPPDRWMTNARMTHYQSLLLNERVSFAPPAVLNPATLLPVESEATPVHRCSEILAEETGTRRDLEDQPLPGVPTWYTDGSSFITEGKRRAGAPIVDGKRTVWASSLPEGTSAQKAELVALTQALRLAEGKNINIYTDSRYAFATAHIHGAIYKQRGWLTSAGKDIKNKEEILALLEAIHLPRRVAIIHCPGHQRGSNPVATGNRRADEAAKQAALSTRVLAGTTKPAGKRTADGSEFEKRTADGSEFESPKKKAKVE

SEQ ID NO: 6975 - protein, 2092 aa, synthetic construct
MPAAKRVKLDGGDKKYSIGLDIGTNSVGWAVITDEYKVPSKKFKVLGNTDRHSIKKNLIGALLFDSGETAEATRLKRTARRRYTRRKNRICYLQEIFSNEMAKVDDSFFHRLEESFLVEEDKKHERHPIFGNIVDEVAYHEKYPTIYHLRKKLVDSTDKADLRLIYLALAHMIKFRGHFLIEGDLNPDNSDVDKLFIQLVQTYNQLFEENPINASGVDAKAILSARLSKSRRLENLIAQLPGEKKNGLFGNLIALSLGLTPNFKSNFDLAEDAKLQLSKDTYDDDLDNLLAQIGDQYADLFLAAKNLSDAILLSDILRVNTEITKAPLSASMIKRYDEHHQDLTLLKALVRQQLPEKYKEIFFDQSKNGYAGYIDGGASQEEFYKFIKPILEKMDGTEELLVKLNREDLLRKQRTFDNGSIPHQIHLGELHAILRRQEDFYPFLKDNREKIEKILTFRIPYYVGPLARGNSRFAWMTRKSEETITPWNFEEVVDKGASAQSFIERMTNFDKNLPNEKVLPKHSLLYEYFTVYNELTKVKYVTEGMRKPAFLSGEQKKAIVDLLFKTNRKVTVKQLKEDYFKKIECFDSVEISGVEDRFNASLGTYHDLLKIIKDKDFLDNEENEDILEDIVLTLTLFEDREMIEERLKTYAHLFDDKVMKQLKRRRYTGWGRLSRKLINGIRDKQSGKTILDFLKSDGFANRNFMQLIHDDSLTFKEDIQKAQVSGQGDSLHEHIANLAGSPAIKKGILQTVKVVDELVKVMGRHKPENIVIEMARENQTTQKGQKNSRERMKRIEEGIKELGSQILKEHPVENTQLQNEKLYLYYLQNGRDMYVDQELDINRLSDYDVDHIVPQSFLKDDSIDNKVLTRSDKARGKSDNVPSEEVVKKMKNYWRQLLNAKLITQRKFDNLTKAERGGLSELDKAGFIKRQLVETRQITKHVAQILDSRMNTKYDENDKLIREVKVITLKSKLVSDFRKDFQFYKVREINNYHHAHDAYLNAVVGTALIKKYPKLESEFVYGDYKVYDVRKMIAKSEQEIGKATAKYFFYSNIMNFFKTEITLANGEIRKRPLIETNGETGEIVWDKGRDFATVRKVLSMPQVNIVKKTEVQTGGFSKESILPKRNSDKLIARKKDWDPKKYGGFDSPTVAYSVLVVAKVEKGKSKKLKSVKELLGITIMERSSFEKNPIDFLEAKGYKEVKKDLIIKLPKYSLFELENGRKRMLASAGELQKGNELALPSKYVNFLYLASHYEKLKGSPEDNEQKQLFVEQHKHYLDEIIEQISEFSKRVILADANLDKVLSAYNKHRDKPIREQAENIIHLFTLTNLGAPAAFKYFDTTIDRKRYTSTKEVLDATLIHQSITGLYETRIDLSQLGGDGGGGSGGGPAPGGVLNLEEEYRLHEKPVPSSIDPSWLQLFPTVWAERAGMGLANQVPPVVVELRSGASPVAVRQYPMSKEAREGIRPHIQKFLDLGVLVPCRSPWNTPLLPVKKPGTNDYRPVQDLREINKRVQDIHPTVPNPYNLLSSLPPSYTWYSVLDLKDAFFCLRLHPNSQPLFAFEWKDPEKGNTGQLTWTRLPQGFKNSPTLFNEALHRDLAPFRALNPQVVLLQYVDDLLVAAPTYEDCKKGTQKLLQELSKLGYRVSAKKAQLCQREVTYLGYLLKEGKRWLTPARKATVMKIPVPTTPRQVREFLGKAGFCRLFIPGFASLAAPLYPLTKPSIPFIWTEEHQQAFDHIKKALLSAPALALPDLTKPFTLYIDERAGVARGVLTQTLGPWRRPVAYLSKKLDPVASGWPTCLKAVAAVALLLKDADKLTLGQNVTVIASHSLESIVRQPPDRWMTNARMTHYQSLLLNERVSFAPPAVLNPATLLPVESEATPVHRCSEILAEETGTRRDLEDQPLPGVPTWYTDGSSFITEGKRRAGAPIVDGKRTVWASSLPEGTSAQKAELVALTQALRLAEGKNINIYTDSRYAFATAHIHGAIYKQRGWLTSAGKDIKNKEEILALLEAIHLPRRVAIIHCPGHQRGSNPVATGNRRADEAAKQAALSTRVLAGTTKPAGKRTADGSEFEKRTADGSEFESPKKKAKVE

SEQ ID NO: 6976 - protein, 2125 aa, synthetic construct
MPAAKRVKLDGGDKKYSIGLDIGTNSVGWAVITDEYKVPSKKFKVLGNTDRHSIKKNLIGALLFDSGETAEATRLKRTARRRYTRRKNRICYLQEIFSNEMAKVDDSFFHRLEESFLVEEDKKHERHPIFGNIVDEVAYHEKYPTIYHLRKKLVDSTDKADLRLIYLALAHMIKFRGHFLIEGDLNPDNSDVDKLFIQLVQTYNQLFEENPINASGVDAKAILSARLSKSRRLENLIAQLPGEKKNGLFGNLIALSLGLTPNFKSNFDLAEDAKLQLSKDTYDDDLDNLLAQIGDQYADLFLAAKNLSDAILLSDILRVNTEITKAPLSASMIKRYDEHHQDLTLLKALVRQQLPEKYKEIFFDQSKNGYAGYIDGGASQEEFYKFIKPILEKMDGTEELLVKLNREDLLRKQRTFDNGSIPHQIHLGELHAILRRQEDFYPFLKDNREKIEKILTFRIPYYVGPLARGNSRFAWMTRKSEETITPWNFEEVVDKGASAQSFIERMTNFDKNLPNEKVLPKHSLLYEYFTVYNELTKVKYVTEGMRKPAFLSGEQKKAIVDLLFKTNRKVTVKQLKEDYFKKIECFDSVEISGVEDRFNASLGTYHDLLKIIKDKDFLDNEENEDILEDIVLTLTLFEDREMIEERLKTYAHLFDDKVMKQLKRRRYTGWGRLSRKLINGIRDKQSGKTILDFLKSDGFANRNFMQLIHDDSLTFKEDIQKAQVSGQGDSLHEHIANLAGSPAIKKGILQTVKVVDELVKVMGRHKPENIVIEMARENQTTQKGQKNSRERMKRIEEGIKELGSQILKEHPVENTQLQNEKLYLYYLQNGRDMYVDQELDINRLSDYDVDHIVPQSFLKDDSIDNKVLTRSDKARGKSDNVPSEEVVKKMKNYWRQLLNAKLITQRKFDNLTKAERGGLSELDKAGFIKRQLVETRQITKHVAQILDSRMNTKYDENDKLIREVKVITLKSKLVSDFRKDFQFYKVREINNYHHAHDAYLNAVVGTALIKKYPKLESEFVYGDYKVYDVRKMIAKSEQEIGKATAKYFFYSNIMNFFKTEITLANGEIRKRPLIETNGETGEIVWDKGRDFATVRKVLSMPQVNIVKKTEVQTGGFSKESILPKRNSDKLIARKKDWDPKKYGGFDSPTVAYSVLVVAKVEKGKSKKLKSVKELLGITIMERSSFEKNPIDFLEAKGYKEVKKDLIIKLPKYSLFELENGRKRMLASAGELQKGNELALPSKYVNFLYLASHYEKLKGSPEDNEQKQLFVEQHKHYLDEIIEQISEFSKRVILADANLDKVLSAYNKHRDKPIREQAENIIHLFTLTNLGAPAAFKYFDTTIDRKRYTSTKEVLDATLIHQSITGLYETRIDLSQLGGDGGGGSGGGPAPGGLLGRDLLTKLKAQIQFSTEGPQVTWEDRPAMCLVLNLEEEYRLHEKPVPPSIDPSWLQLFPMVWAEKAGMGLANQVPPVVVELKSDASPVAVRQYPMSKEAREGIRPHIQRFLDLGILVPCQSPWNTPLLPVKKPGTNDYRPVQDLREVNKRVQDIHPTVPNPYNLLSSLPPSHTWYSVLDLKDAFFCLKLHPNSQPLFAFEWRDPEKGNTGQLTWTRLPQGFKNSPTLFNEALHRDLASFRALNPQVVMLQYVDDLLVAAPTYRDCKEGTRRLLQELSKLGYRVSAKKAQLCREEVTYLGYLLKGGKRWLTPARKATVMKIPTPTTPRQVREFLGTAGFCRLWIPGFASLAAPLYPLTRPKVPFTWTEAHQEAFGRIKEALLSAPALALPDLTKPFALYVDEKEGVARGVLTQTLGPWRRPVAYLSKKLDPVASGWPTCLKAIAAVALLLKDADKLTLGQNVLVIAPHNLESIVRQPPDRWMTNARMTHYQSLLLNERVSFAPPAILNPATLLPVESDDTPIHICSEILAEETGTRPDLRDQPLPGVPAWYTDGSSFIMDGRRQAGAAIVDNKRTVWASNLPEGTSAQKAELIALTQALRLAEGKSINIYTDSRYAFATAHVHGAIYKQRGWLTSAGKDIKNKEEILALLEAIHLPKRVAIIHCPGHQRGTDPVATGNRKADEAAKQAAQSTRILTETTKNAGKRTADGSEFEKRTADGSEFESPKKKAKVE

SEQ ID NO: 6977 - protein, 2125 aa, synthetic construct
MPAAKRVKLDGGDKKYSIGLDIGTNSVGWAVITDEYKVPSKKFKVLGNTDRHSIKKNLIGALLFDSGETAEATRLKRTARRRYTRRKNRICYLQEIFSNEMAKVDDSFFHRLEESFLVEEDKKHERHPIFGNIVDEVAYHEKYPTIYHLRKKLVDSTDKADLRLIYLALAHMIKFRGHFLIEGDLNPDNSDVDKLFIQLVQTYNQLFEENPINASGVDAKAILSARLSKSRRLENLIAQLPGEKKNGLFGNLIALSLGLTPNFKSNFDLAEDAKLQLSKDTYDDDLDNLLAQIGDQYADLFLAAKNLSDAILLSDILRVNTEITKAPLSASMIKRYDEHHQDLTLLKALVRQQLPEKYKEIFFDQSKNGYAGYIDGGASQEEFYKFIKPILEKMDGTEELLVKLNREDLLRKQRTFDNGSIPHQIHLGELHAILRRQEDFYPFLKDNREKIEKILTFRIPYYVGPLARGNSRFAWMTRKSEETITPWNFEEVVDKGASAQSFIERMTNFDKNLPNEKVLPKHSLLYEYFTVYNELTKVKYVTEGMRKPAFLSGEQKKAIVDLLFKTNRKVTVKQLKEDYFKKIECFDSVEISGVEDRFNASLGTYHDLLKIIKDKDFLDNEENEDILEDIVLTLTLFEDREMIEERLKTYAHLFDDKVMKQLKRRRYTGWGRLSRKLINGIRDKQSGKTILDFLKSDGFANRNFMQLIHDDSLTFKEDIQKAQVSGQGDSLHEHIANLAGSPAIKKGILQTVKVVDELVKVMGRHKPENIVIEMARENQTTQKGQKNSRERMKRIEEGIKELGSQILKEHPVENTQLQNEKLYLYYLQNGRDMYVDQELDINRLSDYDVDHIVPQSFLKDDSIDNKVLTRSDKARGKSDNVPSEEVVKKMKNYWRQLLNAKLITQRKFDNLTKAERGGLSELDKAGFIKRQLVETRQITKHVAQILDSRMNTKYDENDKLIREVKVITLKSKLVSDFRKDFQFYKVREINNYHHAHDAYLNAVVGTALIKKYPKLESEFVYGDYKVYDVRKMIAKSEQEIGKATAKYFFYSNIMNFFKTEITLANGEIRKRPLIETNGETGEIVWDKGRDFATVRKVLSMPQVNIVKKTEVQTGGFSKESILPKRNSDKLIARKKDWDPKKYGGFDSPTVAYSVLVVAKVEKGKSKKLKSVKELLGITIMERSSFEKNPIDFLEAKGYKEVKKDLIIKLPKYSLFELENGRKRMLASAGELQKGNELALPSKYVNFLYLASHYEKLKGSPEDNEQKQLFVEQHKHYLDEIIEQISEFSKRVILADANLDKVLSAYNKHRDKPIREQAENIIHLFTLTNLGAPAAFKYFDTTIDRKRYTSTKEVLDATLIHQSITGLYETRIDLSQLGGDGGGGSGGGPAPGGLLGRDLLTKLKAQIQFSTEGPQVTWEDRPAMCLVLNLEEEYRLHEKPVPPSIDPSWLQLFPMVWAEKAGMGLANQVPPVVVELKSDASPVAVRQYPMSKEAREGIRPHIQRFLDLGILVPCQSPWNTPLLPVKKPGTNDYRPVQDLREVNKRVQDIHPTVPNPYNLLSSLPPSHTWYSVLDLKDAFFCLKLHPNSQPLFAFEWRDPEKGNTGQLTWTRLPQGFKNSPTLFNEALHRDLASFRALNPQVVMLQYVDDLLVAAPTYRDCKEGTRRLLQELSKLGYRVSAKKAQLCREEVTYLGYLLKGGKRWLTPARKATVMKIPTPTTPRQVREFLGKAGFCRLFIPGFASLAAPLYPLTRPKVPFTWTEAHQEAFGRIKEALLSAPALALPDLTKPFALYVDEKEGVARGVLTQTLGPWRRPVAYLSKKLDPVASGWPTCLKAIAAVALLLKDADKLTLGQNVLVIAPHNLESIVRQPPDRWMTNARMTHYQSLLLNERVSFAPPAILNPATLLPVESDDTPIHICSEILAEETGTRPDLRDQPLPGVPAWYTDGSSFIMDGRRQAGAAIVDNKRTVWASNLPEGTSAQKAELIALTQALRLAEGKSINIYTDSRYAFATAHVHGAIYKQRGWLTSAGKDIKNKEEILALLEAIHLPKRVAIIHCPGHQRGTDPVATGNRKADEAAKQAAQSTRILTETTKNAGKRTADGSEFEKRTADGSEFESPKKKAKVE

SEQ ID NO: 6978 - protein, 2094 aa, synthetic construct
MPAAKRVKLDGGDKKYSIGLDIGTNSVGWAVITDEYKVPSKKFKVLGNTDRHSIKKNLIGALLFDSGETAEATRLKRTARRRYTRRKNRICYLQEIFSNEMAKVDDSFFHRLEESFLVEEDKKHERHPIFGNIVDEVAYHEKYPTIYHLRKKLVDSTDKADLRLIYLALAHMIKFRGHFLIEGDLNPDNSDVDKLFIQLVQTYNQLFEENPINASGVDAKAILSARLSKSRRLENLIAQLPGEKKNGLFGNLIALSLGLTPNFKSNFDLAEDAKLQLSKDTYDDDLDNLLAQIGDQYADLFLAAKNLSDAILLSDILRVNTEITKAPLSASMIKRYDEHHQDLTLLKALVRQQLPEKYKEIFFDQSKNGYAGYIDGGASQEEFYKFIKPILEKMDGTEELLVKLNREDLLRKQRTFDNGSIPHQIHLGELHAILRRQEDFYPFLKDNREKIEKILTFRIPYYVGPLARGNSRFAWMTRKSEETITPWNFEEVVDKGASAQSFIERMTNFDKNLPNEKVLPKHSLLYEYFTVYNELTKVKYVTEGMRKPAFLSGEQKKAIVDLLFKTNRKVTVKQLKEDYFKKIECFDSVEISGVEDRFNASLGTYHDLLKIIKDKDFLDNEENEDILEDIVLTLTLFEDREMIEERLKTYAHLFDDKVMKQLKRRRYTGWGRLSRKLINGIRDKQSGKTILDFLKSDGFANRNFMQLIHDDSLTFKEDIQKAQVSGQGDSLHEHIANLAGSPAIKKGILQTVKVVDELVKVMGRHKPENIVIEMARENQTTQKGQKNSRERMKRIEEGIKELGSQILKEHPVENTQLQNEKLYLYYLQNGRDMYVDQELDINRLSDYDVDHIVPQSFLKDDSIDNKVLTRSDKARGKSDNVPSEEVVKKMKNYWRQLLNAKLITQRKFDNLTKAERGGLSELDKAGFIKRQLVETRQITKHVAQILDSRMNTKYDENDKLIREVKVITLKSKLVSDFRKDFQFYKVREINNYHHAHDAYLNAVVGTALIKKYPKLESEFVYGDYKVYDVRKMIAKSEQEIGKATAKYFFYSNIMNFFKTEITLANGEIRKRPLIETNGETGEIVWDKGRDFATVRKVLSMPQVNIVKKTEVQTGGFSKESILPKRNSDKLIARKKDWDPKKYGGFDSPTVAYSVLVVAKVEKGKSKKLKSVKELLGITIMERSSFEKNPIDFLEAKGYKEVKKDLIIKLPKYSLFELENGRKRMLASAGELQKGNELALPSKYVNFLYLASHYEKLKGSPEDNEQKQLFVEQHKHYLDEIIEQISEFSKRVILADANLDKVLSAYNKHRDKPIREQAENIIHLFTLTNLGAPAAFKYFDTTIDRKRYTSTKEVLDATLIHQSITGLYETRIDLSQLGGDGGGGSGGGPAPGGTLNLEDEYRLYETSAEPEVSPGSTWLSDFPQAWAETGGMGLAVRQAPLIIPLKATSTPVSIKQYPMSQEAKLGIKPHIQRLLDQGILVPCQSPWNTPLLPVKKPGTNDYRPVQDLREVNKRVEDIHPTVPNPYNLLSGLPPSHRWYTVLDLKDAFFCLRLHPTSQPLFAFEWRDPGMGISGQLTWTRLPQGFKNSPTLFNEALHRDLADFRIQHPDLILLQYVDDILLAATSELDCQQGTRALLLTLGNLGYRASAKKAQLCQKQVKYLGYLLKEGQRWLTEARKETVMGQPTPKTPRQLREFLGTAGFCRLWIPGFAEMAAPLYPLTKPGTLFNWGPDQQKAYQEIKQALLTAPALGLPDLTKPFELFVDEKQGYAKGVLTQKLGPWRRPVAYLSKKLDPVAAGWPPCLRMVAAIAVLRKDAGKLTMGQPLVILAPHAVEALVKQPPDRWLSNARMTHYQAMLLDTDRVQFGPVVALNPATLLPLPEEGAPHDCLEILAETHGTRPDLTDQPIPDADHTWYTDGSSFLQEGQRKAGAAVTTETEVIWARALPAGTSAQRAELIALTQALKMAEGKRLNVYTDSRYAFATAHIHGEIYRRRGWLTSEGREIKNKSEILALLKALFLPKRLSIIHCLGHQKGDSAEARGNRLADQAAREAAIKTPPDTSTLLAGKRTADGSEFEKRTADGSEFESPKKKAKVE

SEQ ID NO: 6979 - protein, 2094 aa, synthetic construct
MPAAKRVKLDGGDKKYSIGLDIGTNSVGWAVITDEYKVPSKKFKVLGNTDRHSIKKNLIGALLFDSGETAEATRLKRTARRRYTRRKNRICYLQEIFSNEMAKVDDSFFHRLEESFLVEEDKKHERHPIFGNIVDEVAYHEKYPTIYHLRKKLVDSTDKADLRLIYLALAHMIKFRGHFLIEGDLNPDNSDVDKLFIQLVQTYNQLFEENPINASGVDAKAILSARLSKSRRLENLIAQLPGEKKNGLFGNLIALSLGLTPNFKSNFDLAEDAKLQLSKDTYDDDLDNLLAQIGDQYADLFLAAKNLSDAILLSDILRVNTEITKAPLSASMIKRYDEHHQDLTLLKALVRQQLPEKYKEIFFDQSKNGYAGYIDGGASQEEFYKFIKPILEKMDGTEELLVKLNREDLLRKQRTFDNGSIPHQIHLGELHAILRRQEDFYPFLKDNREKIEKILTFRIPYYVGPLARGNSRFAWMTRKSEETITPWNFEEVVDKGASAQSFIERMTNFDKNLPNEKVLPKHSLLYEYFTVYNELTKVKYVTEGMRKPAFLSGEQKKAIVDLLFKTNRKVTVKQLKEDYFKKIECFDSVEISGVEDRFNASLGTYHDLLKIIKDKDFLDNEENEDILEDIVLTLTLFEDREMIEERLKTYAHLFDDKVMKQLKRRRYTGWGRLSRKLINGIRDKQSGKTILDFLKSDGFANRNFMQLIHDDSLTFKEDIQKAQVSGQGDSLHEHIANLAGSPAIKKGILQTVKVVDELVKVMGRHKPENIVIEMARENQTTQKGQKNSRERMKRIEEGIKELGSQILKEHPVENTQLQNEKLYLYYLQNGRDMYVDQELDINRLSDYDVDHIVPQSFLKDDSIDNKVLTRSDKARGKSDNVPSEEVVKKMKNYWRQLLNAKLITQRKFDNLTKAERGGLSELDKAGFIKRQLVETRQITKHVAQILDSRMNTKYDENDKLIREVKVITLKSKLVSDFRKDFQFYKVREINNYHHAHDAYLNAVVGTALIKKYPKLESEFVYGDYKVYDVRKMIAKSEQEIGKATAKYFFYSNIMNFFKTEITLANGEIRKRPLIETNGETGEIVWDKGRDFATVRKVLSMPQVNIVKKTEVQTGGFSKESILPKRNSDKLIARKKDWDPKKYGGFDSPTVAYSVLVVAKVEKGKSKKLKSVKELLGITIMERSSFEKNPIDFLEAKGYKEVKKDLIIKLPKYSLFELENGRKRMLASAGELQKGNELALPSKYVNFLYLASHYEKLKGSPEDNEQKQLFVEQHKHYLDEIIEQISEFSKRVILADANLDKVLSAYNKHRDKPIREQAENIIHLFTLTNLGAPAAFKYFDTTIDRKRYTSTKEVLDATLIHQSITGLYETRIDLSQLGGDGGGGSGGGPAPGGTLNLEDEYRLYETSAEPEVSPGSTWLSDFPQAWAETGGMGLAVRQAPLIIPLKATSTPVSIKQYPMSQEAKLGIKPHIQRLLDQGILVPCQSPWNTPLLPVKKPGTNDYRPVQDLREVNKRVEDIHPTVPNPYNLLSGLPPSHRWYTVLDLKDAFFCLRLHPTSQPLFAFEWRDPGMGISGQLTWTRLPQGFKNSPTLFNEALHRDLADFRIQHPDLILLQYVDDILLAATSELDCQQGTRALLLTLGNLGYRASAKKAQLCQKQVKYLGYLLKEGQRWLTEARKETVMGQPTPKTPRQLREFLGKAGFCRLFIPGFAEMAAPLYPLTKPGTLFNWGPDQQKAYQEIKQALLTAPALGLPDLTKPFELFVDEKQGYAKGVLTQKLGPWRRPVAYLSKKLDPVAAGWPPCLRMVAAIAVLRKDAGKLTMGQPLVILAPHAVEALVKQPPDRWLSNARMTHYQAMLLDTDRVQFGPVVALNPATLLPLPEEGAPHDCLEILAETHGTRPDLTDQPIPDADHTWYTDGSSFLQEGQRKAGAAVTTETEVIWARALPAGTSAQRAELIALTQALKMAEGKRLNVYTDSRYAFATAHIHGEIYRRRGWLTSEGREIKNKSEILALLKALFLPKRLSIIHCLGHQKGDSAEARGNRLADQAAREAAIKTPPDTSTLLAGKRTADGSEFEKRTADGSEFESPKKKAKVE

SEQ ID NO: 6980 - protein, 2094 aa, synthetic construct
MPAAKRVKLDGGDKKYSIGLDIGTNSVGWAVITDEYKVPSKKFKVLGNTDRHSIKKNLIGALLFDSGETAEATRLKRTARRRYTRRKNRICYLQEIFSNEMAKVDDSFFHRLEESFLVEEDKKHERHPIFGNIVDEVAYHEKYPTIYHLRKKLVDSTDKADLRLIYLALAHMIKFRGHFLIEGDLNPDNSDVDKLFIQLVQTYNQLFEENPINASGVDAKAILSARLSKSRRLENLIAQLPGEKKNGLFGNLIALSLGLTPNFKSNFDLAEDAKLQLSKDTYDDDLDNLLAQIGDQYADLFLAAKNLSDAILLSDILRVNTEITKAPLSASMIKRYDEHHQDLTLLKALVRQQLPEKYKEIFFDQSKNGYAGYIDGGASQEEFYKFIKPILEKMDGTEELLVKLNREDLLRKQRTFDNGSIPHQIHLGELHAILRRQEDFYPFLKDNREKIEKILTFRIPYYVGPLARGNSRFAWMTRKSEETITPWNFEEVVDKGASAQSFIERMTNFDKNLPNEKVLPKHSLLYEYFTVYNELTKVKYVTEGMRKPAFLSGEQKKAIVDLLFKTNRKVTVKQLKEDYFKKIECFDSVEISGVEDRFNASLGTYHDLLKIIKDKDFLDNEENEDILEDIVLTLTLFEDREMIEERLKTYAHLFDDKVMKQLKRRRYTGWGRLSRKLINGIRDKQSGKTILDFLKSDGFANRNFMQLIHDDSLTFKEDIQKAQVSGQGDSLHEHIANLAGSPAIKKGILQTVKVVDELVKVMGRHKPENIVIEMARENQTTQKGQKNSRERMKRIEEGIKELGSQILKEHPVENTQLQNEKLYLYYLQNGRDMYVDQELDINRLSDYDVDHIVPQSFLKDDSIDNKVLTRSDKARGKSDNVPSEEVVKKMKNYWRQLLNAKLITQRKFDNLTKAERGGLSELDKAGFIKRQLVETRQITKHVAQILDSRMNTKYDENDKLIREVKVITLKSKLVSDFRKDFQFYKVREINNYHHAHDAYLNAVVGTALIKKYPKLESEFVYGDYKVYDVRKMIAKSEQEIGKATAKYFFYSNIMNFFKTEITLANGEIRKRPLIETNGETGEIVWDKGRDFATVRKVLSMPQVNIVKKTEVQTGGFSKESILPKRNSDKLIARKKDWDPKKYGGFDSPTVAYSVLVVAKVEKGKSKKLKSVKELLGITIMERSSFEKNPIDFLEAKGYKEVKKDLIIKLPKYSLFELENGRKRMLASAGELQKGNELALPSKYVNFLYLASHYEKLKGSPEDNEQKQLFVEQHKHYLDEIIEQISEFSKRVILADANLDKVLSAYNKHRDKPIREQAENIIHLFTLTNLGAPAAFKYFDTTIDRKRYTSTKEVLDATLIHQSITGLYETRIDLSQLGGDGGGGSGGGPAPGGTLNIEDEYRLHETSKGPDVPLGSTWLSDFPQAWAETGGMGLAVRQAPLIIPLKATSTPVSIKQYPMSQEARLGIKPHIQRLLDQGILVPCQSPWNTPLLPVKKPGTNDYRPVQDLREVNKRVEDIHPTVPNPYNLLSGLPPSHQWYTVLDLKDAFFCLRLHPTSQSLFAFEWRDPEMGISGQLTWTRLPQGFKNSPTLFNEALHRDLADFRIQHPDLILLQYVDDLLLAATSELDCQQGTRALLQTLGDLGYRASAKKAQICQKQVKYLGYLLKEGQRWLTEARKETVMGQPTPKTPRQLREFLGKAGFCRLFIPGFAEMAAPLYPLTKPGTLFEWGPDQQKAYQEIKQALLTAPALGLPDLTKPFELFVDEKQGYAKGVLTQKLGPWRRPVAYLSKKLDPVAAGWPPCLRMVAAIAVLTKDAGKLTMGQPLVILAPHAVEALVKQPPDRWLSNARMTHYQALLLDTDRVQFGPIVALNPATLLPLPEEGLQHDCLDILAEAHGTRPDLTDQPLPDADHTWYTDGSSFLQEGQRKAGAAVTTETEVVWAKALPAGTSAQRAELIALTQALKMAEGKKLNVYTDSRYAFATAHIHGEIYRRRGWLTSEGKEIKNKDEILALLKALFLPKRLSIIHCPGHQKGNRAEARGNRMADQAAREVATRETPETSTLLAGKRTADGSEFEKRTADGSEFESPKKKAKVE

SEQ ID NO: 6981 - protein, 2114 aa, synthetic construct
MPAAKRVKLDGGDKKYSIGLDIGTNSVGWAVITDEYKVPSKKFKVLGNTDRHSIKKNLIGALLFDSGETAEATRLKRTARRRYTRRKNRICYLQEIFSNEMAKVDDSFFHRLEESFLVEEDKKHERHPIFGNIVDEVAYHEKYPTIYHLRKKLVDSTDKADLRLIYLALAHMIKFRGHFLIEGDLNPDNSDVDKLFIQLVQTYNQLFEENPINASGVDAKAILSARLSKSRRLENLIAQLPGEKKNGLFGNLIALSLGLTPNFKSNFDLAEDAKLQLSKDTYDDDLDNLLAQIGDQYADLFLAAKNLSDAILLSDILRVNTEITKAPLSASMIKRYDEHHQDLTLLKALVRQQLPEKYKEIFFDQSKNGYAGYIDGGASQEEFYKFIKPILEKMDGTEELLVKLNREDLLRKQRTFDNGSIPHQIHLGELHAILRRQEDFYPFLKDNREKIEKILTFRIPYYVGPLARGNSRFAWMTRKSEETITPWNFEEVVDKGASAQSFIERMTNFDKNLPNEKVLPKHSLLYEYFTVYNELTKVKYVTEGMRKPAFLSGEQKKAIVDLLFKTNRKVTVKQLKEDYFKKIECFDSVEISGVEDRFNASLGTYHDLLKIIKDKDFLDNEENEDILEDIVLTLTLFEDREMIEERLKTYAHLFDDKVMKQLKRRRYTGWGRLSRKLINGIRDKQSGKTILDFLKSDGFANRNFMQLIHDDSLTFKEDIQKAQVSGQGDSLHEHIANLAGSPAIKKGILQTVKVVDELVKVMGRHKPENIVIEMARENQTTQKGQKNSRERMKRIEEGIKELGSQILKEHPVENTQLQNEKLYLYYLQNGRDMYVDQELDINRLSDYDVDHIVPQSFLKDDSIDNKVLTRSDKARGKSDNVPSEEVVKKMKNYWRQLLNAKLITQRKFDNLTKAERGGLSELDKAGFIKRQLVETRQITKHVAQILDSRMNTKYDENDKLIREVKVITLKSKLVSDFRKDFQFYKVREINNYHHAHDAYLNAVVGTALIKKYPKLESEFVYGDYKVYDVRKMIAKSEQEIGKATAKYFFYSNIMNFFKTEITLANGEIRKRPLIETNGETGEIVWDKGRDFATVRKVLSMPQVNIVKKTEVQTGGFSKESILPKRNSDKLIARKKDWDPKKYGGFDSPTVAYSVLVVAKVEKGKSKKLKSVKELLGITIMERSSFEKNPIDFLEAKGYKEVKKDLIIKLPKYSLFELENGRKRMLASAGELQKGNELALPSKYVNFLYLASHYEKLKGSPEDNEQKQLFVEQHKHYLDEIIEQISEFSKRVILADANLDKVLSAYNKHRDKPIREQAENIIHLFTLTNLGAPAAFKYFDTTIDRKRYTSTKEVLDATLIHQSITGLYETRIDLSQLGGDGGGGSGGGPAPGGVQEISDSRPMLHIYLNGRRFLGLLDTGADKTCIAGRDWPANWPIHQTESSLQGLGMACGVARSSQPLRWQHEDKSGIIHPFVIPTLPFTLWGRDIMKDIKVRLMTDSPDDSQDLMIGAIESNLFADQISWKSDQPVWLNQWPLKQEKLQALQQLVTEQLQLGHLEESNSPWNTPVFVIKKKSGKWRLLQDLRAVNATMHDMGALQPGLPSPPAVPKGWEIIIIDLQDCFFNIKLHPEDCKRFAFSVPSPNFKRPYQRFQWKVLPQGMKNSPTLCQKFVDKAILTVRDKYQDSYIVHYMDDILLAHPSRSIVDEILTSMIQALNKHGLVVSTEKIQKYDNLKYLGTHIQGDSVSYQKLQIRTDKLRTLNDFQKLLGNINWIRPFLKLTTGELKPLFEILNPDSNPISTRKLTPEACKALQLMNERLSTARVKRLDLSQPWSLCILKTEYTPTACLWQDGVVEWIHLPHISPKVITPYDIFCTQLIIKGRHRSKELFSKDPDYIVVPYTKVQFDLLLQEKEDWPISLLGFLGEVHFHLPKDPLLTFTLQTAIIFPHMTSTTPLEKGIVIFTDGSANGRSVTYIQGREPIIKENTQNTAQQAEIVAVITAFEEVSQPFNLYTDSKYVTGLFPEIETATLSPRTKIYTELKHLQRLIHKRQEKFYIGHIRGHTGLPGPLAQGNAYADSLTRILTAAGKRTADGSEFEKRTADGSEFESPKKKAKVE

SEQ ID NO: 6982 - protein, 2088 aa, synthetic construct
MPAAKRVKLDGGDKKYSIGLDIGTNSVGWAVITDEYKVPSKKFKVLGNTDRHSIKKNLIGALLFDSGETAEATRLKRTARRRYTRRKNRICYLQEIFSNEMAKVDDSFFHRLEESFLVEEDKKHERHPIFGNIVDEVAYHEKYPTIYHLRKKLVDSTDKADLRLIYLALAHMIKFRGHFLIEGDLNPDNSDVDKLFIQLVQTYNQLFEENPINASGVDAKAILSARLSKSRRLENLIAQLPGEKKNGLFGNLIALSLGLTPNFKSNFDLAEDAKLQLSKDTYDDDLDNLLAQIGDQYADLFLAAKNLSDAILLSDILRVNTEITKAPLSASMIKRYDEHHQDLTLLKALVRQQLPEKYKEIFFDQSKNGYAGYIDGGASQEEFYKFIKPILEKMDGTEELLVKLNREDLLRKQRTFDNGSIPHQIHLGELHAILRRQEDFYPFLKDNREKIEKILTFRIPYYVGPLARGNSRFAWMTRKSEETITPWNFEEVVDKGASAQSFIERMTNFDKNLPNEKVLPKHSLLYEYFTVYNELTKVKYVTEGMRKPAFLSGEQKKAIVDLLFKTNRKVTVKQLKEDYFKKIECFDSVEISGVEDRFNASLGTYHDLLKIIKDKDFLDNEENEDILEDIVLTLTLFEDREMIEERLKTYAHLFDDKVMKQLKRRRYTGWGRLSRKLINGIRDKQSGKTILDFLKSDGFANRNFMQLIHDDSLTFKEDIQKAQVSGQGDSLHEHIANLAGSPAIKKGILQTVKVVDELVKVMGRHKPENIVIEMARENQTTQKGQKNSRERMKRIEEGIKELGSQILKEHPVENTQLQNEKLYLYYLQNGRDMYVDQELDINRLSDYDVDHIVPQSFLKDDSIDNKVLTRSDKARGKSDNVPSEEVVKKMKNYWRQLLNAKLITQRKFDNLTKAERGGLSELDKAGFIKRQLVETRQITKHVAQILDSRMNTKYDENDKLIREVKVITLKSKLVSDFRKDFQFYKVREINNYHHAHDAYLNAVVGTALIKKYPKLESEFVYGDYKVYDVRKMIAKSEQEIGKATAKYFFYSNIMNFFKTEITLANGEIRKRPLIETNGETGEIVWDKGRDFATVRKVLSMPQVNIVKKTEVQTGGFSKESILPKRNSDKLIARKKDWDPKKYGGFDSPTVAYSVLVVAKVEKGKSKKLKSVKELLGITIMERSSFEKNPIDFLEAKGYKEVKKDLIIKLPKYSLFELENGRKRMLASAGELQKGNELALPSKYVNFLYLASHYEKLKGSPEDNEQKQLFVEQHKHYLDEIIEQISEFSKRVILADANLDKVLSAYNKHRDKPIREQAENIIHLFTLTNLGAPAAFKYFDTTIDRKRYTSTKEVLDATLIHQSITGLYETRIDLSQLGGDGGGGSGGGPAPGGTLQLDDEYRLYSPLVKPDQNIQFWLEQFPQAWAETAGMGLAKQVPPQVIQLKASATPVSVRQYPLSKEAQEGIRPHVQRLIQQGILVPVQSPWNTPLLPVRKPGTNDYRPVQDLREVNKRVQDIHPTVPNPYNLLCALPPQRSWYTVLDLKDAFFCLRLHPTSQPLFAFEWRDPGTGRTGQLTWTRLPQGFKNSPTIFDEALHRDLANFRIQHPQVTLLQYVDDLLLAGATKQDCLEGTKALLLELSDLGYRASAKKAQICRREVTYLGYSLRDGQRWLTEARKKTVVQIPAPTTAKQVREFLGTAGFCRLWIPGFATLAAPLYPLTKEKGEFSWAPEHQKAFDAIKKALLSAPALALPDVTKPFTLYVDERKGVARGVLTQTLGPWRRPVAYLSKKLDPVASGWPVCLKAIAAVAILVKDADKLTLGQNITVIAPHALENIVRQPPDRWMTNARMTHYQSLLLTERVTFAPPAALNPATLLPEETDEPVTHDCHQLLIEETGVRKDLTDIPLTGEVLTWFTDGSSYVVEGKRMAGAAVVDGTRTIWASSLPEGTSAQKAELMALTQALRLAEGKSINIYTDSRYAFATAHVHGAIYKQRGLLTSAGREIKNKEEILSLLEALHLPKRLAIIHCPGHQKAKDPISRGNQMADRVAKQAAQGVNLLAGKRTADGSEFEKRTADGSEFESPKKKAKVE

SEQ ID NO: 6983 - protein, 2085 aa, synthetic construct
MPAAKRVKLDGGDKKYSIGLDIGTNSVGWAVITDEYKVPSKKFKVLGNTDRHSIKKNLIGALLFDSGETAEATRLKRTARRRYTRRKNRICYLQEIFSNEMAKVDDSFFHRLEESFLVEEDKKHERHPIFGNIVDEVAYHEKYPTIYHLRKKLVDSTDKADLRLIYLALAHMIKFRGHFLIEGDLNPDNSDVDKLFIQLVQTYNQLFEENPINASGVDAKAILSARLSKSRRLENLIAQLPGEKKNGLFGNLIALSLGLTPNFKSNFDLAEDAKLQLSKDTYDDDLDNLLAQIGDQYADLFLAAKNLSDAILLSDILRVNTEITKAPLSASMIKRYDEHHQDLTLLKALVRQQLPEKYKEIFFDQSKNGYAGYIDGGASQEEFYKFIKPILEKMDGTEELLVKLNREDLLRKQRTFDNGSIPHQIHLGELHAILRRQEDFYPFLKDNREKIEKILTFRIPYYVGPLARGNSRFAWMTRKSEETITPWNFEEVVDKGASAQSFIERMTNFDKNLPNEKVLPKHSLLYEYFTVYNELTKVKYVTEGMRKPAFLSGEQKKAIVDLLFKTNRKVTVKQLKEDYFKKIECFDSVEISGVEDRFNASLGTYHDLLKIIKDKDFLDNEENEDILEDIVLTLTLFEDREMIEERLKTYAHLFDDKVMKQLKRRRYTGWGRLSRKLINGIRDKQSGKTILDFLKSDGFANRNFMQLIHDDSLTFKEDIQKAQVSGQGDSLHEHIANLAGSPAIKKGILQTVKVVDELVKVMGRHKPENIVIEMARENQTTQKGQKNSRERMKRIEEGIKELGSQILKEHPVENTQLQNEKLYLYYLQNGRDMYVDQELDINRLSDYDVDHIVPQSFLKDDSIDNKVLTRSDKARGKSDNVPSEEVVKKMKNYWRQLLNAKLITQRKFDNLTKAERGGLSELDKAGFIKRQLVETRQITKHVAQILDSRMNTKYDENDKLIREVKVITLKSKLVSDFRKDFQFYKVREINNYHHAHDAYLNAVVGTALIKKYPKLESEFVYGDYKVYDVRKMIAKSEQEIGKATAKYFFYSNIMNFFKTEITLANGEIRKRPLIETNGETGEIVWDKGRDFATVRKVLSMPQVNIVKKTEVQTGGFSKESILPKRNSDKLIARKKDWDPKKYGGFDSPTVAYSVLVVAKVEKGKSKKLKSVKELLGITIMERSSFEKNPIDFLEAKGYKEVKKDLIIKLPKYSLFELENGRKRMLASAGELQKGNELALPSKYVNFLYLASHYEKLKGSPEDNEQKQLFVEQHKHYLDEIIEQISEFSKRVILADANLDKVLSAYNKHRDKPIREQAENIIHLFTLTNLGAPAAFKYFDTTIDRKRYTSTKEVLDATLIHQSITGLYETRIDLSQLGGDGGGGSGGGPAPGGVPWLMKKPLQLTVLVPLHEYQERLLQQTALPKEQKELLQKLFLKYDALWQHWENQVGHRRIKPHNIATGTLAPRPQKQYPINPKAKPSIQIVIDDLLKQGVLIQQNSTMNTPVYPVPKPDGKWRMVLDYREVNKTIPLIAAQNQHSAGILSSIYRGKYKTTLDLTNGFWAHPITPESYWLTAFTWQGKQYCWTRLPQGFLNSPALFTADVVDLLKEIPNVQAYVDDIYISHDDPQEHLEQLEKIFSILLNAGYVVSLKKSEIAQREVEFLGFNITKEGRGLTDTFKQKLLNITPPKDLKQLQSILGLLNFARNFIPNYSELVKPLYTIVANANGKFISWTEDNSNQLQHIISVLNQADNLEERNPETRLIIKVNSSPSAGYIRYYNEGSKRPIMYVNYIFSKAEAKFTQTEKLLTTMHKGLIKAMDLAMGQEILVYSPIVSMTKIQRTPLPERKALPVRWITWMTYLEDPRIQFHYDKSLPELQQIPNVTEDVIAKTKHPSEFAMVFYTDGSAIKHPDVNKSHSAGMGIAQVQFIPEYKIVHQWSIPLGDHTAQLAEIAAVEFACKKALKISGPVLIVTDSFYVAESANKELPYWKSNGFLNNKKKPLRHVSKWKSIAECLQLKPDIIIMHEKGHQQPMTTLHTEGNNLADKLATQGSYVVHAGKRTADGSEFEKRTADGSEFESPKKKAKVE

SEQ ID NO: 6984 - protein, 2085 aa, synthetic construct
MPAAKRVKLDGGDKKYSIGLDIGTNSVGWAVITDEYKVPSKKFKVLGNTDRHSIKKNLIGALLFDSGETAEATRLKRTARRRYTRRKNRICYLQEIFSNEMAKVDDSFFHRLEESFLVEEDKKHERHPIFGNIVDEVAYHEKYPTIYHLRKKLVDSTDKADLRLIYLALAHMIKFRGHFLIEGDLNPDNSDVDKLFIQLVQTYNQLFEENPINASGVDAKAILSARLSKSRRLENLIAQLPGEKKNGLFGNLIALSLGLTPNFKSNFDLAEDAKLQLSKDTYDDDLDNLLAQIGDQYADLFLAAKNLSDAILLSDILRVNTEITKAPLSASMIKRYDEHHQDLTLLKALVRQQLPEKYKEIFFDQSKNGYAGYIDGGASQEEFYKFIKPILEKMDGTEELLVKLNREDLLRKQRTFDNGSIPHQIHLGELHAILRRQEDFYPFLKDNREKIEKILTFRIPYYVGPLARGNSRFAWMTRKSEETITPWNFEEVVDKGASAQSFIERMTNFDKNLPNEKVLPKHSLLYEYFTVYNELTKVKYVTEGMRKPAFLSGEQKKAIVDLLFKTNRKVTVKQLKEDYFKKIECFDSVEISGVEDRFNASLGTYHDLLKIIKDKDFLDNEENEDILEDIVLTLTLFEDREMIEERLKTYAHLFDDKVMKQLKRRRYTGWGRLSRKLINGIRDKQSGKTILDFLKSDGFANRNFMQLIHDDSLTFKEDIQKAQVSGQGDSLHEHIANLAGSPAIKKGILQTVKVVDELVKVMGRHKPENIVIEMARENQTTQKGQKNSRERMKRIEEGIKELGSQILKEHPVENTQLQNEKLYLYYLQNGRDMYVDQELDINRLSDYDVDHIVPQSFLKDDSIDNKVLTRSDKARGKSDNVPSEEVVKKMKNYWRQLLNAKLITQRKFDNLTKAERGGLSELDKAGFIKRQLVETRQITKHVAQILDSRMNTKYDENDKLIREVKVITLKSKLVSDFRKDFQFYKVREINNYHHAHDAYLNAVVGTALIKKYPKLESEFVYGDYKVYDVRKMIAKSEQEIGKATAKYFFYSNIMNFFKTEITLANGEIRKRPLIETNGETGEIVWDKGRDFATVRKVLSMPQVNIVKKTEVQTGGFSKESILPKRNSDKLIARKKDWDPKKYGGFDSPTVAYSVLVVAKVEKGKSKKLKSVKELLGITIMERSSFEKNPIDFLEAKGYKEVKKDLIIKLPKYSLFELENGRKRMLASAGELQKGNELALPSKYVNFLYLASHYEKLKGSPEDNEQKQLFVEQHKHYLDEIIEQISEFSKRVILADANLDKVLSAYNKHRDKPIREQAENIIHLFTLTNLGAPAAFKYFDTTIDRKRYTSTKEVLDATLIHQSITGLYETRIDLSQLGGDGGGGSGGGPAPGGIPWLMKKPLQLTTLVPLQEYEERLLKQTMLTGSYKEKLQSLFLKYDALWQHWENQVGHRRIKPHHIATGTVNPRPQKQYPINPKAKASIQTVINDLLKQGVLIQQNSIMNTPVYPVPKPDGKWRMVLDYREVNKTIPLIAAQNQHSAGILSSIFRGKYKTTLDLSNGFWAHSITPESYWLTAFTWLGQQYCWTRLPQGFLNSPALFNADVVDLLKEVPNVQVYVDDIYISHDDPREHLEQLEKVFSLLLNAGYVVSLKKSEIAQHEVEFLGFNITKEGRGLTETFKQKLLNITPPRDLKQLQSILGLLNFARNFIPNFSELVKPLYNIIATAPGKYITWTTDNSQQLQNIISMLNSAENLEERNPEVRLIMKVNTSPSAGYIRFYNEFAKRPIMYLNYVYTKAEVKFTNTEKLLTTIHKGLIKALDLGMGQEILVYSPIVSMTKIQKTPLPERKALPIRWITWMSYLEDPRIQFHYDKTLPELQQVPTVTDDIIAKIKHPSEFSMVFYTDGSAIKHPNVNKSHNAGMGIAQVQFKPEFTVINTWSIPLGDHTAQLAEVAAVEFACKKALKIDGPVLIVTDSFYVAESVNKELPYWQSNGFFNNKKKPLKHVSKWKSIADCIQLKPDIIIIHEKGHQPTASTFHTEGNNLADKLATQGSYVVNAGKRTADGSEFEKRTADGSEFESPKKKAKVE

SEQ ID NO: 6985 - protein, 2100 aa, synthetic construct
MPAAKRVKLDGGDKKYSIGLDIGTNSVGWAVITDEYKVPSKKFKVLGNTDRHSIKKNLIGALLFDSGETAEATRLKRTARRRYTRRKNRICYLQEIFSNEMAKVDDSFFHRLEESFLVEEDKKHERHPIFGNIVDEVAYHEKYPTIYHLRKKLVDSTDKADLRLIYLALAHMIKFRGHFLIEGDLNPDNSDVDKLFIQLVQTYNQLFEENPINASGVDAKAILSARLSKSRRLENLIAQLPGEKKNGLFGNLIALSLGLTPNFKSNFDLAEDAKLQLSKDTYDDDLDNLLAQIGDQYADLFLAAKNLSDAILLSDILRVNTEITKAPLSASMIKRYDEHHQDLTLLKALVRQQLPEKYKEIFFDQSKNGYAGYIDGGASQEEFYKFIKPILEKMDGTEELLVKLNREDLLRKQRTFDNGSIPHQIHLGELHAILRRQEDFYPFLKDNREKIEKILTFRIPYYVGPLARGNSRFAWMTRKSEETITPWNFEEVVDKGASAQSFIERMTNFDKNLPNEKVLPKHSLLYEYFTVYNELTKVKYVTEGMRKPAFLSGEQKKAIVDLLFKTNRKVTVKQLKEDYFKKIECFDSVEISGVEDRFNASLGTYHDLLKIIKDKDFLDNEENEDILEDIVLTLTLFEDREMIEERLKTYAHLFDDKVMKQLKRRRYTGWGRLSRKLINGIRDKQSGKTILDFLKSDGFANRNFMQLIHDDSLTFKEDIQKAQVSGQGDSLHEHIANLAGSPAIKKGILQTVKVVDELVKVMGRHKPENIVIEMARENQTTQKGQKNSRERMKRIEEGIKELGSQILKEHPVENTQLQNEKLYLYYLQNGRDMYVDQELDINRLSDYDVDHIVPQSFLKDDSIDNKVLTRSDKARGKSDNVPSEEVVKKMKNYWRQLLNAKLITQRKFDNLTKAERGGLSELDKAGFIKRQLVETRQITKHVAQILDSRMNTKYDENDKLIREVKVITLKSKLVSDFRKDFQFYKVREINNYHHAHDAYLNAVVGTALIKKYPKLESEFVYGDYKVYDVRKMIAKSEQEIGKATAKYFFYSNIMNFFKTEITLANGEIRKRPLIETNGETGEIVWDKGRDFATVRKVLSMPQVNIVKKTEVQTGGFSKESILPKRNSDKLIARKKDWDPKKYGGFDSPTVAYSVLVVAKVEKGKSKKLKSVKELLGITIMERSSFEKNPIDFLEAKGYKEVKKDLIIKLPKYSLFELENGRKRMLASAGELQKGNELALPSKYVNFLYLASHYEKLKGSPEDNEQKQLFVEQHKHYLDEIIEQISEFSKRVILADANLDKVLSAYNKHRDKPIREQAENIIHLFTLTNLGAPAAFKYFDTTIDRKRYTSTKEVLDATLIHQSITGLYETRIDLSQLGGDGGGGSPAPGGGGGTVSLQDEHRLFDIPVTTSLPDVWLQDFPQAWAETGGLGRAKCQAPIIIDLKPTAVPVSIKQYPMSLEAHMGIRQHIIKFLELGVLRPCRSPWNTPLLPVKKPGTQDYRPVQDLREINKRTVDIHPTVPNPYNLLSTLKPDYSWYTVLDLKDAFFCLPLAPQSQELFAFEWKDPERGISGQLTWTRLPQGFKNSPTLFNEALHRDLTDFRTQHPEVTLLQYVDDLLLAAPTKKACTQGTRHLLQELGEKGYRASAKKAQICQTKVTYLGYILSEGKRWLTPGRIETVARIPPPRNPREVREFLGTAGFCRLWIPGFAELAAPLYALTKPSTPFTWQTEHQLAFEALKKALLSAPALGLPDTSKPFTLFLDERQGIAKGVLTQKLGPWKRPVAYLSKKLDPVAAGWPPCLRIMAATAMLVKDSAKLTLGQPLTVITPHTLEAIVRQPPDRWITNARLTHYQALLLDTDRVQFGPPVTLNPATLLPVPENQPSPHDCRQVLAETHGTREDLKDQELPDADHTWYTDGSSYLDSGTRRAGAAVVDGHNTIWAQSLPPGTSAQKAELIALTKALELSKGKKANIYTDSRYAFATAHTHGSIYERRGWLTSEGKEIKNKAEIIALLKALFLPQEVAIIHCPGHQKGQDPVAVGNRQADRVARQAAMAEVLTLATEPDNTSHITAGKRTADGSEFEKRTADGSEFESPKKKAKVE

SEQ ID NO: 6986 - protein, 2092 aa, synthetic construct
MPAAKRVKLDGGDKKYSIGLDIGTNSVGWAVITDEYKVPSKKFKVLGNTDRHSIKKNLIGALLFDSGETAEATRLKRTARRRYTRRKNRICYLQEIFSNEMAKVDDSFFHRLEESFLVEEDKKHERHPIFGNIVDEVAYHEKYPTIYHLRKKLVDSTDKADLRLIYLALAHMIKFRGHFLIEGDLNPDNSDVDKLFIQLVQTYNQLFEENPINASGVDAKAILSARLSKSRRLENLIAQLPGEKKNGLFGNLIALSLGLTPNFKSNFDLAEDAKLQLSKDTYDDDLDNLLAQIGDQYADLFLAAKNLSDAILLSDILRVNTEITKAPLSASMIKRYDEHHQDLTLLKALVRQQLPEKYKEIFFDQSKNGYAGYIDGGASQEEFYKFIKPILEKMDGTEELLVKLNREDLLRKQRTFDNGSIPHQIHLGELHAILRRQEDFYPFLKDNREKIEKILTFRIPYYVGPLARGNSRFAWMTRKSEETITPWNFEEVVDKGASAQSFIERMTNFDKNLPNEKVLPKHSLLYEYFTVYNELTKVKYVTEGMRKPAFLSGEQKKAIVDLLFKTNRKVTVKQLKEDYFKKIECFDSVEISGVEDRFNASLGTYHDLLKIIKDKDFLDNEENEDILEDIVLTLTLFEDREMIEERLKTYAHLFDDKVMKQLKRRRYTGWGRLSRKLINGIRDKQSGKTILDFLKSDGFANRNFMQLIHDDSLTFKEDIQKAQVSGQGDSLHEHIANLAGSPAIKKGILQTVKVVDELVKVMGRHKPENIVIEMARENQTTQKGQKNSRERMKRIEEGIKELGSQILKEHPVENTQLQNEKLYLYYLQNGRDMYVDQELDINRLSDYDVDHIVPQSFLKDDSIDNKVLTRSDKARGKSDNVPSEEVVKKMKNYWRQLLNAKLITQRKFDNLTKAERGGLSELDKAGFIKRQLVETRQITKHVAQILDSRMNTKYDENDKLIREVKVITLKSKLVSDFRKDFQFYKVREINNYHHAHDAYLNAVVGTALIKKYPKLESEFVYGDYKVYDVRKMIAKSEQEIGKATAKYFFYSNIMNFFKTEITLANGEIRKRPLIETNGETGEIVWDKGRDFATVRKVLSMPQVNIVKKTEVQTGGFSKESILPKRNSDKLIARKKDWDPKKYGGFDSPTVAYSVLVVAKVEKGKSKKLKSVKELLGITIMERSSFEKNPIDFLEAKGYKEVKKDLIIKLPKYSLFELENGRKRMLASAGELQKGNELALPSKYVNFLYLASHYEKLKGSPEDNEQKQLFVEQHKHYLDEIIEQISEFSKRVILADANLDKVLSAYNKHRDKPIREQAENIIHLFTLTNLGAPAAFKYFDTTIDRKRYTSTKEVLDATLIHQSITGLYETRIDLSQLGGDGGGGSPAPGGGGGVLNLEEEYRLHEKPVPSSIDPSWLQLFPTVWAERAGMGLANQVPPVVVELRSGASPVAVRQYPMSKEAREGIRPHIQKFLDLGVLVPCRSPWNTPLLPVKKPGTNDYRPVQDLREINKRVQDIHPTVPNPYNLLSSLPPSYTWYSVLDLKDAFFCLRLHPNSQPLFAFEWKDPEKGNTGQLTWTRLPQGFKNSPTLFDEALHRDLAPFRALNPQVVLLQYVDDLLVAAPTYEDCKKGTQKLLQELSKLGYRVSAKKAQLCQREVTYLGYLLKEGKRWLTPARKATVMKIPVPTTPRQVREFLGTAGFCRLWIPGFASLAAPLYPLTKESIPFIWTEEHQQAFDHIKKALLSAPALALPDLTKPFTLYIDERAGVARGVLTQTLGPWRRPVAYLSKKLDPVASGWPTCLKAVAAVALLLKDADKLTLGQNVTVIASHSLESIVRQPPDRWMTNARMTHYQSLLLNERVSFAPPAVLNPATLLPVESEATPVHRCSEILAEETGTRRDLEDQPLPGVPTWYTDGSSFITEGKRRAGAPIVDGKRTVWASSLPEGTSAQKAELVALTQALRLAEGKNINIYTDSRYAFATAHIHGAIYKQRGLLTSAGKDIKNKEEILALLEAIHLPRRVAIIHCPGHQRGSNPVATGNRRADEAAKQAALSTRVLAGTTKPAGKRTADGSEFEKRTADGSEFESPKKKAKVE

SEQ ID NO: 6987 - protein, 2092 aa, synthetic construct
MPAAKRVKLDGGDKKYSIGLDIGTNSVGWAVITDEYKVPSKKFKVLGNTDRHSIKKNLIGALLFDSGETAEATRLKRTARRRYTRRKNRICYLQEIFSNEMAKVDDSFFHRLEESFLVEEDKKHERHPIFGNIVDEVAYHEKYPTIYHLRKKLVDSTDKADLRLIYLALAHMIKFRGHFLIEGDLNPDNSDVDKLFIQLVQTYNQLFEENPINASGVDAKAILSARLSKSRRLENLIAQLPGEKKNGLFGNLIALSLGLTPNFKSNFDLAEDAKLQLSKDTYDDDLDNLLAQIGDQYADLFLAAKNLSDAILLSDILRVNTEITKAPLSASMIKRYDEHHQDLTLLKALVRQQLPEKYKEIFFDQSKNGYAGYIDGGASQEEFYKFIKPILEKMDGTEELLVKLNREDLLRKQRTFDNGSIPHQIHLGELHAILRRQEDFYPFLKDNREKIEKILTFRIPYYVGPLARGNSRFAWMTRKSEETITPWNFEEVVDKGASAQSFIERMTNFDKNLPNEKVLPKHSLLYEYFTVYNELTKVKYVTEGMRKPAFLSGEQKKAIVDLLFKTNRKVTVKQLKEDYFKKIECFDSVEISGVEDRFNASLGTYHDLLKIIKDKDFLDNEENEDILEDIVLTLTLFEDREMIEERLKTYAHLFDDKVMKQLKRRRYTGWGRLSRKLINGIRDKQSGKTILDFLKSDGFANRNFMQLIHDDSLTFKEDIQKAQVSGQGDSLHEHIANLAGSPAIKKGILQTVKVVDELVKVMGRHKPENIVIEMARENQTTQKGQKNSRERMKRIEEGIKELGSQILKEHPVENTQLQNEKLYLYYLQNGRDMYVDQELDINRLSDYDVDHIVPQSFLKDDSIDNKVLTRSDKARGKSDNVPSEEVVKKMKNYWRQLLNAKLITQRKFDNLTKAERGGLSELDKAGFIKRQLVETRQITKHVAQILDSRMNTKYDENDKLIREVKVITLKSKLVSDFRKDFQFYKVREINNYHHAHDAYLNAVVGTALIKKYPKLESEFVYGDYKVYDVRKMIAKSEQEIGKATAKYFFYSNIMNFFKTEITLANGEIRKRPLIETNGETGEIVWDKGRDFATVRKVLSMPQVNIVKKTEVQTGGFSKESILPKRNSDKLIARKKDWDPKKYGGFDSPTVAYSVLVVAKVEKGKSKKLKSVKELLGITIMERSSFEKNPIDFLEAKGYKEVKKDLIIKLPKYSLFELENGRKRMLASAGELQKGNELALPSKYVNFLYLASHYEKLKGSPEDNEQKQLFVEQHKHYLDEIIEQISEFSKRVILADANLDKVLSAYNKHRDKPIREQAENIIHLFTLTNLGAPAAFKYFDTTIDRKRYTSTKEVLDATLIHQSITGLYETRIDLSQLGGDGGGGSPAPGGGGGVLNLEEEYRLHEKPVPSSIDPSWLQLFPTVWAERAGMGLANQVPPVVVELRSGASPVAVRQYPMSKEAREGIRPHIQKFLDLGVLVPCRSPWNTPLLPVKKPGTNDYRPVQDLREINKRVQDIHPTVPNPYNLLSSLPPSYTWYSVLDLKDAFFCLRLHPNSQPLFAFEWKDPEKGNTGQLTWTRLPQGFKNSPTLFNEALHRDLAPFRALNPQVVLLQYVDDLLVAAPTYEDCKKGTQKLLQELSKLGYRVSAKKAQLCQREVTYLGYLLKEGKRWLTPARKATVMKIPVPTTPRQVREFLGTAGFCRLWIPGFASLAAPLYPLTKPSIPFIWTEEHQQAFDHIKKALLSAPALALPDLTKPFTLYIDERAGVARGVLTQTLGPWRRPVAYLSKKLDPVASGWPTCLKAVAAVALLLKDADKLTLGQNVTVIASHSLESIVRQPPDRWMTNARMTHYQSLLLNERVSFAPPAVLNPATLLPVESEATPVHRCSEILAEETGTRRDLEDQPLPGVPTWYTDGSSFITEGKRRAGAPIVDGKRTVWASSLPEGTSAQKAELVALTQALRLAEGKNINIYTDSRYAFATAHIHGAIYKQRGWLTSAGKDIKNKEEILALLEAIHLPRRVAIIHCPGHQRGSNPVATGNRRADEAAKQAALSTRVLAGTTKPAGKRTADGSEFEKRTADGSEFESPKKKAKVE

SEQ ID NO: 6988 - protein, 2125 aa, synthetic construct
MPAAKRVKLDGGDKKYSIGLDIGTNSVGWAVITDEYKVPSKKFKVLGNTDRHSIKKNLIGALLFDSGETAEATRLKRTARRRYTRRKNRICYLQEIFSNEMAKVDDSFFHRLEESFLVEEDKKHERHPIFGNIVDEVAYHEKYPTIYHLRKKLVDSTDKADLRLIYLALAHMIKFRGHFLIEGDLNPDNSDVDKLFIQLVQTYNQLFEENPINASGVDAKAILSARLSKSRRLENLIAQLPGEKKNGLFGNLIALSLGLTPNFKSNFDLAEDAKLQLSKDTYDDDLDNLLAQIGDQYADLFLAAKNLSDAILLSDILRVNTEITKAPLSASMIKRYDEHHQDLTLLKALVRQQLPEKYKEIFFDQSKNGYAGYIDGGASQEEFYKFIKPILEKMDGTEELLVKLNREDLLRKQRTFDNGSIPHQIHLGELHAILRRQEDFYPFLKDNREKIEKILTFRIPYYVGPLARGNSRFAWMTRKSEETITPWNFEEVVDKGASAQSFIERMTNFDKNLPNEKVLPKHSLLYEYFTVYNELTKVKYVTEGMRKPAFLSGEQKKAIVDLLFKTNRKVTVKQLKEDYFKKIECFDSVEISGVEDRFNASLGTYHDLLKIIKDKDFLDNEENEDILEDIVLTLTLFEDREMIEERLKTYAHLFDDKVMKQLKRRRYTGWGRLSRKLINGIRDKQSGKTILDFLKSDGFANRNFMQLIHDDSLTFKEDIQKAQVSGQGDSLHEHIANLAGSPAIKKGILQTVKVVDELVKVMGRHKPENIVIEMARENQTTQKGQKNSRERMKRIEEGIKELGSQILKEHPVENTQLQNEKLYLYYLQNGRDMYVDQELDINRLSDYDVDHIVPQSFLKDDSIDNKVLTRSDKARGKSDNVPSEEVVKKMKNYWRQLLNAKLITQRKFDNLTKAERGGLSELDKAGFIKRQLVETRQITKHVAQILDSRMNTKYDENDKLIREVKVITLKSKLVSDFRKDFQFYKVREINNYHHAHDAYLNAVVGTALIKKYPKLESEFVYGDYKVYDVRKMIAKSEQEIGKATAKYFFYSNIMNFFKTEITLANGEIRKRPLIETNGETGEIVWDKGRDFATVRKVLSMPQVNIVKKTEVQTGGFSKESILPKRNSDKLIARKKDWDPKKYGGFDSPTVAYSVLVVAKVEKGKSKKLKSVKELLGITIMERSSFEKNPIDFLEAKGYKEVKKDLIIKLPKYSLFELENGRKRMLASAGELQKGNELALPSKYVNFLYLASHYEKLKGSPEDNEQKQLFVEQHKHYLDEIIEQISEFSKRVILADANLDKVLSAYNKHRDKPIREQAENIIHLFTLTNLGAPAAFKYFDTTIDRKRYTSTKEVLDATLIHQSITGLYETRIDLSQLGGDGGGGSPAPGGGGGLLGRDLLTKLKAQIQFSTEGPQVTWEDRPAMCLVLNLEEEYRLHEKPVPPSIDPSWLQLFPMVWAEKAGMGLANQVPPVVVELKSDASPVAVRQYPMSKEAREGIRPHIQRFLDLGILVPCQSPWNTPLLPVKKPGTNDYRPVQDLREVNKRVQDIHPTVPNPYNLLSSLPPSHTWYSVLDLKDAFFCLKLHPNSQPLFAFEWRDPEKGNTGQLTWTRLPQGFKNSPTLFNEALHRDLASFRALNPQVVMLQYVDDLLVAAPTYRDCKEGTRRLLQELSKLGYRVSAKKAQLCREEVTYLGYLLKGGKRWLTPARKATVMKIPTPTTPRQVREFLGTAGFCRLWIPGFASLAAPLYPLTRPKVPFTWTEAHQEAFGRIKEALLSAPALALPDLTKPFALYVDEKEGVARGVLTQTLGPWRRPVAYLSKKLDPVASGWPTCLKAIAAVALLLKDADKLTLGQNVLVIAPHNLESIVRQPPDRWMTNARMTHYQSLLLNERVSFAPPAILNPATLLPVESDDTPIHICSEILAEETGTRPDLRDQPLPGVPAWYTDGSSFIMDGRRQAGAAIVDNKRTVWASNLPEGTSAQKAELIALTQALRLAEGKSINIYTDSRYAFATAHVHGAIYKQRGWLTSAGKDIKNKEEILALLEAIHLPKRVAIIHCPGHQRGTDPVATGNRKADEAAKQAAQSTRILTETTKNAGKRTADGSEFEKRTADGSEFESPKKKAKVE

SEQ ID NO: 6989 - protein, 2216 aa, synthetic construct
MPAAKRVKLDGGDKKYSIGLDIGTNSVGWAVITDEYKVPSKKFKVLGNTDRHSIKKNLIGALLFDSGETAEATRLKRTARRRYTRRKNRICYLQEIFSNEMAKVDDSFFHRLEESFLVEEDKKHERHPIFGNIVDEVAYHEKYPTIYHLRKKLVDSTDKADLRLIYLALAHMIKFRGHFLIEGDLNPDNSDVDKLFIQLVQTYNQLFEENPINASGVDAKAILSARLSKSRRLENLIAQLPGEKKNGLFGNLIALSLGLTPNFKSNFDLAEDAKLQLSKDTYDDDLDNLLAQIGDQYADLFLAAKNLSDAILLSDILRVNTEITKAPLSASMIKRYDEHHQDLTLLKALVRQQLPEKYKEIFFDQSKNGYAGYIDGGASQEEFYKFIKPILEKMDGTEELLVKLNREDLLRKQRTFDNGSIPHQIHLGELHAILRRQEDFYPFLKDNREKIEKILTFRIPYYVGPLARGNSRFAWMTRKSEETITPWNFEEVVDKGASAQSFIERMTNFDKNLPNEKVLPKHSLLYEYFTVYNELTKVKYVTEGMRKPAFLSGEQKKAIVDLLFKTNRKVTVKQLKEDYFKKIECFDSVEISGVEDRFNASLGTYHDLLKIIKDKDFLDNEENEDILEDIVLTLTLFEDREMIEERLKTYAHLFDDKVMKQLKRRRYTGWGRLSRKLINGIRDKQSGKTILDFLKSDGFANRNFMQLIHDDSLTFKEDIQKAQVSGQGDSLHEHIANLAGSPAIKKGILQTVKVVDELVKVMGRHKPENIVIEMARENQTTQKGQKNSRERMKRIEEGIKELGSQILKEHPVENTQLQNEKLYLYYLQNGRDMYVDQELDINRLSDYDVDHIVPQSFLKDDSIDNKVLTRSDKARGKSDNVPSEEVVKKMKNYWRQLLNAKLITQRKFDNLTKAERGGLSELDKAGFIKRQLVETRQITKHVAQILDSRMNTKYDENDKLIREVKVITLKSKLVSDFRKDFQFYKVREINNYHHAHDAYLNAVVGTALIKKYPKLESEFVYGDYKVYDVRKMIAKSEQEIGKATAKYFFYSNIMNFFKTEITLANGEIRKRPLIETNGETGEIVWDKGRDFATVRKVLSMPQVNIVKKTEVQTGGFSKESILPKRNSDKLIARKKDWDPKKYGGFDSPTVAYSVLVVAKVEKGKSKKLKSVKELLGITIMERSSFEKNPIDFLEAKGYKEVKKDLIIKLPKYSLFELENGRKRMLASAGELQKGNELALPSKYVNFLYLASHYEKLKGSPEDNEQKQLFVEQHKHYLDEIIEQISEFSKRVILADANLDKVLSAYNKHRDKPIREQAENIIHLFTLTNLGAPAAFKYFDTTIDRKRYTSTKEVLDATLIHQSITGLYETRIDLSQLGGDGGGGSPAPGGGGGTLGDQGSRGSDPLPEPRVTLTVEGIPTEFLVNTGAEHSVLTKPMGKMGSKRTVVAGATGSKVYPWTTKRLLKIGQKQVTHSFLVIPECPAPLLGRDLLTKLKAQIQFSTEGPQVTWEDRPAMCLVLNLEEEYRLHEKPVPPSIDPSWLQLFPMVWAEKAGMGLANQVPPVVVELKSDASPVAVRQYPMSKEAREGIRPHIQRFLDLGILVPCQSPWNTPLLPVKKPGTNDYRPVQDLREVNKRVQDIHPTVPNPYNLLSSLPPSHTWYSVLDLKDAFFCLKLHPNSQPLFAFEWRDPEKGNTGQLTWTRLPQGFKNSPTLFNEALHRDLASFRALNPQVVMLQYVDDLLVAAPTYRDCKEGTRRLLQELSKLGYRVSAKKAQLCREEVTYLGYLLKGGKRWLTPARKATVMKIPTPTTPRQVREFLGTAGFCRLWIPGFASLAAPLYPLTRPKVPFTWTEAHQEAFGRIKEALLSAPALALPDLTKPFALYVDEKEGVARGVLTQTLGPWRRPVAYLSKKLDPVASGWPTCLKAIAAVALLLKDADKLTLGQNVLVIAPHNLESIVRQPPDRWMTNARMTHYQSLLLNERVSFAPPAILNPATLLPVESDDTPIHICSEILAEETGTRPDLRDQPLPGVPAWYTDGSSFIMDGRRQAGAAIVDNKRTVWASNLPEGTSAQKAELIALTQALRLAEGKSINIYTDSRYAFATAHVHGAIYKQRGWLTSAGKDIKNKEEILALLEAIHLPKRVAIIHCPGHQRGTDPVATGNRKADEAAKQAAQSTRILTETTKNAGKRTADGSEFEKRTADGSEFESPKKKAKVE

SEQ ID NO: 6990 - protein, 2088 aa, synthetic construct
MPAAKRVKLDGGDKKYSIGLDIGTNSVGWAVITDEYKVPSKKFKVLGNTDRHSIKKNLIGALLFDSGETAEATRLKRTARRRYTRRKNRICYLQEIFSNEMAKVDDSFFHRLEESFLVEEDKKHERHPIFGNIVDEVAYHEKYPTIYHLRKKLVDSTDKADLRLIYLALAHMIKFRGHFLIEGDLNPDNSDVDKLFIQLVQTYNQLFEENPINASGVDAKAILSARLSKSRRLENLIAQLPGEKKNGLFGNLIALSLGLTPNFKSNFDLAEDAKLQLSKDTYDDDLDNLLAQIGDQYADLFLAAKNLSDAILLSDILRVNTEITKAPLSASMIKRYDEHHQDLTLLKALVRQQLPEKYKEIFFDQSKNGYAGYIDGGASQEEFYKFIKPILEKMDGTEELLVKLNREDLLRKQRTFDNGSIPHQIHLGELHAILRRQEDFYPFLKDNREKIEKILTFRIPYYVGPLARGNSRFAWMTRKSEETITPWNFEEVVDKGASAQSFIERMTNFDKNLPNEKVLPKHSLLYEYFTVYNELTKVKYVTEGMRKPAFLSGEQKKAIVDLLFKTNRKVTVKQLKEDYFKKIECFDSVEISGVEDRFNASLGTYHDLLKIIKDKDFLDNEENEDILEDIVLTLTLFEDREMIEERLKTYAHLFDDKVMKQLKRRRYTGWGRLSRKLINGIRDKQSGKTILDFLKSDGFANRNFMQLIHDDSLTFKEDIQKAQVSGQGDSLHEHIANLAGSPAIKKGILQTVKVVDELVKVMGRHKPENIVIEMARENQTTQKGQKNSRERMKRIEEGIKELGSQILKEHPVENTQLQNEKLYLYYLQNGRDMYVDQELDINRLSDYDVDHIVPQSFLKDDSIDNKVLTRSDKARGKSDNVPSEEVVKKMKNYWRQLLNAKLITQRKFDNLTKAERGGLSELDKAGFIKRQLVETRQITKHVAQILDSRMNTKYDENDKLIREVKVITLKSKLVSDFRKDFQFYKVREINNYHHAHDAYLNAVVGTALIKKYPKLESEFVYGDYKVYDVRKMIAKSEQEIGKATAKYFFYSNIMNFFKTEITLANGEIRKRPLIETNGETGEIVWDKGRDFATVRKVLSMPQVNIVKKTEVQTGGFSKESILPKRNSDKLIARKKDWDPKKYGGFDSPTVAYSVLVVAKVEKGKSKKLKSVKELLGITIMERSSFEKNPIDFLEAKGYKEVKKDLIIKLPKYSLFELENGRKRMLASAGELQKGNELALPSKYVNFLYLASHYEKLKGSPEDNEQKQLFVEQHKHYLDEIIEQISEFSKRVILADANLDKVLSAYNKHRDKPIREQAENIIHLFTLTNLGAPAAFKYFDTTIDRKRYTSTKEVLDATLIHQSITGLYETRIDLSQLGGDGGGGSPAPGGGGGTLQLDDEYRLYSPLVKPDQNIQFWLEQFPQAWAETAGMGLAKQVPPQVIQLKASATPVSVRQYPLSKEAQEGIRPHVQRLIQQGILVPVQSPWNTPLLPVRKPGTNDYRPVQDLREVNKRVQDIHPTVPNPYNLLCALPPQRSWYTVLDLKDAFFCLRLHPTSQPLFAFEWRDPGTGRTGQLTWTRLPQGFKNSPTIFDEALHRDLANFRIQHPQVTLLQYVDDLLLAGATKQDCLEGTKALLLELSDLGYRASAKKAQICRREVTYLGYSLRDGQRWLTEARKKTVVQIPAPTTAKQVREFLGTAGFCRLWIPGFATLAAPLYPLTKEKGEFSWAPEHQKAFDAIKKALLSAPALALPDVTKPFTLYVDERKGVARGVLTQTLGPWRRPVAYLSKKLDPVASGWPVCLKAIAAVAILVKDADKLTLGQNITVIAPHALENIVRQPPDRWMTNARMTHYQSLLLTERVTFAPPAALNPATLLPEETDEPVTHDCHQLLIEETGVRKDLTDIPLTGEVLTWFTDGSSYVVEGKRMAGAAVVDGTRTIWASSLPEGTSAQKAELMALTQALRLAEGKSINIYTDSRYAFATAHVHGAIYKQRGLLTSAGREIKNKEEILSLLEALHLPKRLAIIHCPGHQKAKDPISRGNQMADRVAKQAAQGVNLLAGKRTADGSEFEKRTADGSEFESPKKKAKVE

SEQ ID NO: 6991 - protein, 2174 aa, synthetic construct
MPAAKRVKLDGGDKKYSIGLDIGTNSVGWAVITDEYKVPSKKFKVLGNTDRHSIKKNLIGALLFDSGETAEATRLKRTARRRYTRRKNRICYLQEIFSNEMAKVDDSFFHRLEESFLVEEDKKHERHPIFGNIVDEVAYHEKYPTIYHLRKKLVDSTDKADLRLIYLALAHMIKFRGHFLIEGDLNPDNSDVDKLFIQLVQTYNQLFEENPINASGVDAKAILSARLSKSRRLENLIAQLPGEKKNGLFGNLIALSLGLTPNFKSNFDLAEDAKLQLSKDTYDDDLDNLLAQIGDQYADLFLAAKNLSDAILLSDILRVNTEITKAPLSASMIKRYDEHHQDLTLLKALVRQQLPEKYKEIFFDQSKNGYAGYIDGGASQEEFYKFIKPILEKMDGTEELLVKLNREDLLRKQRTFDNGSIPHQIHLGELHAILRRQEDFYPFLKDNREKIEKILTFRIPYYVGPLARGNSRFAWMTRKSEETITPWNFEEVVDKGASAQSFIERMTNFDKNLPNEKVLPKHSLLYEYFTVYNELTKVKYVTEGMRKPAFLSGEQKKAIVDLLFKTNRKVTVKQLKEDYFKKIECFDSVEISGVEDRFNASLGTYHDLLKIIKDKDFLDNEENEDILEDIVLTLTLFEDREMIEERLKTYAHLFDDKVMKQLKRRRYTGWGRLSRKLINGIRDKQSGKTILDFLKSDGFANRNFMQLIHDDSLTFKEDIQKAQVSGQGDSLHEHIANLAGSPAIKKGILQTVKVVDELVKVMGRHKPENIVIEMARENQTTQKGQKNSRERMKRIEEGIKELGSQILKEHPVENTQLQNEKLYLYYLQNGRDMYVDQELDINRLSDYDVDHIVPQSFLKDDSIDNKVLTRSDKARGKSDNVPSEEVVKKMKNYWRQLLNAKLITQRKFDNLTKAERGGLSELDKAGFIKRQLVETRQITKHVAQILDSRMNTKYDENDKLIREVKVITLKSKLVSDFRKDFQFYKVREINNYHHAHDAYLNAVVGTALIKKYPKLESEFVYGDYKVYDVRKMIAKSEQEIGKATAKYFFYSNIMNFFKTEITLANGEIRKRPLIETNGETGEIVWDKGRDFATVRKVLSMPQVNIVKKTEVQTGGFSKESILPKRNSDKLIARKKDWDPKKYGGFDSPTVAYSVLVVAKVEKGKSKKLKSVKELLGITIMERSSFEKNPIDFLEAKGYKEVKKDLIIKLPKYSLFELENGRKRMLASAGELQKGNELALPSKYVNFLYLASHYEKLKGSPEDNEQKQLFVEQHKHYLDEIIEQISEFSKRVILADANLDKVLSAYNKHRDKPIREQAENIIHLFTLTNLGAPAAFKYFDTTIDRKRYTSTKEVLDATLIHQSITGLYETRIDLSQLGGDGGGGSPAPGGGGGMDPLQLLQPLEAEIKGTKLKAHWNSGATITCVPEAFLEDERPIQTMLIKTIHGEKQQDVYYLTFKVQGRKVEAEVLASPYDYILLNPSDVPWLMKKPLQLTVLVPLHEYQERLLQQTALPKEQKELLQKLFLKYDALWQHWENQVGHRRIKPHNIATGTLAPRPQKQYPINPKAKPSIQIVIDDLLKQGVLIQQNSTMNTPVYPVPKPDGKWRMVLDYREVNKTIPLIAAQNQHSAGILSSIYRGKYKTTLDLTNGFWAHPITPESYWLTAFTWQGKQYCWTRLPQGFLNSPALFNADVVDLLKEIPNVQAYVDDIYISHDDPQEHLEQLEKIFSILLNAGYVVSLKKSEIAQREVEFLGFNITKEGRGLTDTFKQKLLNITPPKDLKQLQSILGLLNFARNFIPNYSELVKPLYTIVAPANGKFISWTEDNSNQLQHIISVLNQADNLEERNPETRLIIKVNSSPSAGYIRYYNEGSKRPIMYVNYIFSKAEAKFTQTEKLLTTMHKGLIKAMDLAMGQEILVYSPIVSMTKIQRTPLPERKALPVRWITWMTYLEDPRIQFHYDKSLPELQQIPNVTEDVIAKTKHPSEFAMVFYTDGSAIKHPDVNKSHSAGMGIAQVQFIPEYKIVHQWSIPLGDHTAQLAEIAAVEFACKKALKISGPVLIVTDSFYVAESANKELPYWKSNGFLNNKKKPLRHVSKWKSIAECLQLKPDIIIMHEKGHQQPMTTLHTEGNNLADKLATQGSYVVHAGKRTADGSEFEKRTADGSEFESPKKKAKVE

SEQ ID NO: 6992 - protein, 2092 aa, synthetic construct
MPAAKRVKLDGGDKKYSIGLDIGTNSVGWAVITDEYKVPSKKFKVLGNTDRHSIKKNLIGALLFDSGETAEATRLKRTARRRYTRRKNRICYLQEIFSNEMAKVDDSFFHRLEESFLVEEDKKHERHPIFGNIVDEVAYHEKYPTIYHLRKKLVDSTDKADLRLIYLALAHMIKFRGHFLIEGDLNPDNSDVDKLFIQLVQTYNQLFEENPINASGVDAKAILSARLSKSRRLENLIAQLPGEKKNGLFGNLIALSLGLTPNFKSNFDLAEDAKLQLSKDTYDDDLDNLLAQIGDQYADLFLAAKNLSDAILLSDILRVNTEITKAPLSASMIKRYDEHHQDLTLLKALVRQQLPEKYKEIFFDQSKNGYAGYIDGGASQEEFYKFIKPILEKMDGTEELLVKLNREDLLRKQRTFDNGSIPHQIHLGELHAILRRQEDFYPFLKDNREKIEKILTFRIPYYVGPLARGNSRFAWMTRKSEETITPWNFEEVVDKGASAQSFIERMTNFDKNLPNEKVLPKHSLLYEYFTVYNELTKVKYVTEGMRKPAFLSGEQKKAIVDLLFKTNRKVTVKQLKEDYFKKIECFDSVEISGVEDRFNASLGTYHDLLKIIKDKDFLDNEENEDILEDIVLTLTLFEDREMIEERLKTYAHLFDDKVMKQLKRRRYTGWGRLSRKLINGIRDKQSGKTILDFLKSDGFANRNFMQLIHDDSLTFKEDIQKAQVSGQGDSLHEHIANLAGSPAIKKGILQTVKVVDELVKVMGRHKPENIVIEMARENQTTQKGQKNSRERMKRIEEGIKELGSQILKEHPVENTQLQNEKLYLYYLQNGRDMYVDQELDINRLSDYDVDHIVPQSFLKDDSIDNKVLTRSDKARGKSDNVPSEEVVKKMKNYWRQLLNAKLITQRKFDNLTKAERGGLSELDKAGFIKRQLVETRQITKHVAQILDSRMNTKYDENDKLIREVKVITLKSKLVSDFRKDFQFYKVREINNYHHAHDAYLNAVVGTALIKKYPKLESEFVYGDYKVYDVRKMIAKSEQEIGKATAKYFFYSNIMNFFKTEITLANGEIRKRPLIETNGETGEIVWDKGRDFATVRKVLSMPQVNIVKKTEVQTGGFSKESILPKRNSDKLIARKKDWDPKKYGGFDSPTVAYSVLVVAKVEKGKSKKLKSVKELLGITIMERSSFEKNPIDFLEAKGYKEVKKDLIIKLPKYSLFELENGRKRMLASAGELQKGNELALPSKYVNFLYLASHYEKLKGSPEDNEQKQLFVEQHKHYLDEIIEQISEFSKRVILADANLDKVLSAYNKHRDKPIREQAENIIHLFTLTNLGAPAAFKYFDTTIDRKRYTSTKEVLDATLIHQSITGLYETRIDLSQLGGDGGGGSPAPGGGGGVLNLEEEYRLHEKPVPSSIDPSWLQLFPTVWAERAGMGLANQVPPVVVELRSGASPVAVRQYPMSKEAREGIRPHIQRFLDLGVLVPCQSPWNTPLLPVKKPGTNDYRPVQDLREINKRVQDIHPTVPNPYNLLSSLPPSHTWYSVLDLKDAFFCLKLHPNSQPLFAFEWRDPEKGNTGQLTWTRLPQGFKNSPTLFDEALHRDLAPFRALNPQVVLLQYVDDLLVAAPTYRDCKEGTQKLLQELSKLGYRVSAKKAQLCQKEVTYLGYLLKEGKRWLTPARKATVMKIPPPTTPRQVREFLGTAGFCRLWIPGFASLAAPLYPLTKESIPFIWTEEHQKAFDRIKEALLSAPALALPDLTKPFTLYVDERAGVARGVLTQTLGPWRRPVAYLSKKLDPVASGWPTCLKAVAAVALLLKDADKLTLGQNVTVIASHSLESIVRQPPDRWMTNARMTHYQSLLLNERVSFAPPAVLNPATLLPVESEATPVHRCSEILAEETGTRRDLKDQPLPGVPAWYTDGSSFIAEGKRRAGAAIVDGKRTVWASSLPEGTSAQKAELVALTQALRLAEGKDINIYTDSRYAFATAHIHGAIYKQRGLLTSAGKDIKNKEEILALLEAIHLPKRVAIIHCPGHQKGNDPVATGNRRADEAAKQAALSTRVLAETTKPAGKRTADGSEFEKRTADGSEFESPKKKAKVE

SEQ ID NO: 6993 - protein, 2100 aa, synthetic construct
MPAAKRVKLDGGDKKYSIGLDIGTNSVGWAVITDEYKVPSKKFKVLGNTDRHSIKKNLIGALLFDSGETAEATRLKRTARRRYTRRKNRICYLQEIFSNEMAKVDDSFFHRLEESFLVEEDKKHERHPIFGNIVDEVAYHEKYPTIYHLRKKLVDSTDKADLRLIYLALAHMIKFRGHFLIEGDLNPDNSDVDKLFIQLVQTYNQLFEENPINASGVDAKAILSARLSKSRRLENLIAQLPGEKKNGLFGNLIALSLGLTPNFKSNFDLAEDAKLQLSKDTYDDDLDNLLAQIGDQYADLFLAAKNLSDAILLSDILRVNTEITKAPLSASMIKRYDEHHQDLTLLKALVRQQLPEKYKEIFFDQSKNGYAGYIDGGASQEEFYKFIKPILEKMDGTEELLVKLNREDLLRKQRTFDNGSIPHQIHLGELHAILRRQEDFYPFLKDNREKIEKILTFRIPYYVGPLARGNSRFAWMTRKSEETITPWNFEEVVDKGASAQSFIERMTNFDKNLPNEKVLPKHSLLYEYFTVYNELTKVKYVTEGMRKPAFLSGEQKKAIVDLLFKTNRKVTVKQLKEDYFKKIECFDSVEISGVEDRFNASLGTYHDLLKIIKDKDFLDNEENEDILEDIVLTLTLFEDREMIEERLKTYAHLFDDKVMKQLKRRRYTGWGRLSRKLINGIRDKQSGKTILDFLKSDGFANRNFMQLIHDDSLTFKEDIQKAQVSGQGDSLHEHIANLAGSPAIKKGILQTVKVVDELVKVMGRHKPENIVIEMARENQTTQKGQKNSRERMKRIEEGIKELGSQILKEHPVENTQLQNEKLYLYYLQNGRDMYVDQELDINRLSDYDVDHIVPQSFLKDDSIDNKVLTRSDKARGKSDNVPSEEVVKKMKNYWRQLLNAKLITQRKFDNLTKAERGGLSELDKAGFIKRQLVETRQITKHVAQILDSRMNTKYDENDKLIREVKVITLKSKLVSDFRKDFQFYKVREINNYHHAHDAYLNAVVGTALIKKYPKLESEFVYGDYKVYDVRKMIAKSEQEIGKATAKYFFYSNIMNFFKTEITLANGEIRKRPLIETNGETGEIVWDKGRDFATVRKVLSMPQVNIVKKTEVQTGGFSKESILPKRNSDKLIARKKDWDPKKYGGFDSPTVAYSVLVVAKVEKGKSKKLKSVKELLGITIMERSSFEKNPIDFLEAKGYKEVKKDLIIKLPKYSLFELENGRKRMLASAGELQKGNELALPSKYVNFLYLASHYEKLKGSPEDNEQKQLFVEQHKHYLDEIIEQISEFSKRVILADANLDKVLSAYNKHRDKPIREQAENIIHLFTLTNLGAPAAFKYFDTTIDRKRYTSTKEVLDATLIHQSITGLYETRIDLSQLGGDGGGGGGGSPAPGGTVSLQDEHRLFDIPVTTSLPDVWLQDFPQAWAETGGLGRAKCQAPIIIDLKPTAVPVSIKQYPMSLEAHMGIRQHIIKFLELGVLRPCRSPWNTPLLPVKKPGTQDYRPVQDLREINKRTVDIHPTVPNPYNLLSTLKPDYSWYTVLDLKDAFFCLPLAPQSQELFAFEWKDPERGISGQLTWTRLPQGFKNSPTLFNEALHRDLTDFRTQHPEVTLLQYVDDLLLAAPTKKACTQGTRHLLQELGEKGYRASAKKAQICQTKVTYLGYILSEGKRWLTPGRIETVARIPPPRNPREVREFLGTAGFCRLWIPGFAELAAPLYALTKPSTPFTWQTEHQLAFEALKKALLSAPALGLPDTSKPFTLFLDERQGIAKGVLTQKLGPWKRPVAYLSKKLDPVAAGWPPCLRIMAATAMLVKDSAKLTLGQPLTVITPHTLEAIVRQPPDRWITNARLTHYQALLLDTDRVQFGPPVTLNPATLLPVPENQPSPHDCRQVLAETHGTREDLKDQELPDADHTWYTDGSSYLDSGTRRAGAAVVDGHNTIWAQSLPPGTSAQKAELIALTKALELSKGKKANIYTDSRYAFATAHTHGSIYERRGWLTSEGKEIKNKAEIIALLKALFLPQEVAIIHCPGHQKGQDPVAVGNRQADRVARQAAMAEVLTLATEPDNTSHITAGKRTADGSEFEKRTADGSEFESPKKKAKVE

SEQ ID NO: 6994 - protein, 2171 aa, synthetic construct
MPAAKRVKLDGGDKKYSIGLDIGTNSVGWAVITDEYKVPSKKFKVLGNTDRHSIKKNLIGALLFDSGETAEATRLKRTARRRYTRRKNRICYLQEIFSNEMAKVDDSFFHRLEESFLVEEDKKHERHPIFGNIVDEVAYHEKYPTIYHLRKKLVDSTDKADLRLIYLALAHMIKFRGHFLIEGDLNPDNSDVDKLFIQLVQTYNQLFEENPINASGVDAKAILSARLSKSRRLENLIAQLPGEKKNGLFGNLIALSLGLTPNFKSNFDLAEDAKLQLSKDTYDDDLDNLLAQIGDQYADLFLAAKNLSDAILLSDILRVNTEITKAPLSASMIKRYDEHHQDLTLLKALVRQQLPEKYKEIFFDQSKNGYAGYIDGGASQEEFYKFIKPILEKMDGTEELLVKLNREDLLRKQRTFDNGSIPHQIHLGELHAILRRQEDFYPFLKDNREKIEKILTFRIPYYVGPLARGNSRFAWMTRKSEETITPWNFEEVVDKGASAQSFIERMTNFDKNLPNEKVLPKHSLLYEYFTVYNELTKVKYVTEGMRKPAFLSGEQKKAIVDLLFKTNRKVTVKQLKEDYFKKIECFDSVEISGVEDRFNASLGTYHDLLKIIKDKDFLDNEENEDILEDIVLTLTLFEDREMIEERLKTYAHLFDDKVMKQLKRRRYTGWGRLSRKLINGIRDKQSGKTILDFLKSDGFANRNFMQLIHDDSLTFKEDIQKAQVSGQGDSLHEHIANLAGSPAIKKGILQTVKVVDELVKVMGRHKPENIVIEMARENQTTQKGQKNSRERMKRIEEGIKELGSQILKEHPVENTQLQNEKLYLYYLQNGRDMYVDQELDINRLSDYDVDHIVPQSFLKDDSIDNKVLTRSDKARGKSDNVPSEEVVKKMKNYWRQLLNAKLITQRKFDNLTKAERGGLSELDKAGFIKRQLVETRQITKHVAQILDSRMNTKYDENDKLIREVKVITLKSKLVSDFRKDFQFYKVREINNYHHAHDAYLNAVVGTALIKKYPKLESEFVYGDYKVYDVRKMIAKSEQEIGKATAKYFFYSNIMNFFKTEITLANGEIRKRPLIETNGETGEIVWDKGRDFATVRKVLSMPQVNIVKKTEVQTGGFSKESILPKRNSDKLIARKKDWDPKKYGGFDSPTVAYSVLVVAKVEKGKSKKLKSVKELLGITIMERSSFEKNPIDFLEAKGYKEVKKDLIIKLPKYSLFELENGRKRMLASAGELQKGNELALPSKYVNFLYLASHYEKLKGSPEDNEQKQLFVEQHKHYLDEIIEQISEFSKRVILADANLDKVLSAYNKHRDKPIREQAENIIHLFTLTNLGAPAAFKYFDTTIDRKRYTSTKEVLDATLIHQSITGLYETRIDLSQLGGDGGGGGGGSPAPGGMDLLKPLTVERKGVKIKGYWNSQADITCVPKDLLQGEEPVRQQNVTTIHGTQEGDVYYVNLKIDGRRINTEVIGTTLDYAIITPGDVPWILKKPLELTIKLDLEEQQGTLLNNSILSKKGKEELKQLFEKYSALWQSWENQVGHRRIRPHKIATGTVKPTPQKQYHINPKAKPDIQIVINDLLKQGVLIQKESTMNTPVYPVPKPNGRWRMVLDYRAVNKVTPLIAVQNQHSYGILGSLFKGRYKTTIDLSNGFWAHPIVPEDYWITAFTWQGKQYCWTVLPQGFLNSPGLFTGDVVDLLQGIPNVEVYVDDVYISHDSEKEHLEYLDILFNRLKEAGYIISLKKSNIANSIVDFLGFQITNEGRGLTDTFKEKLENITAPTTLKQLQSILGLLNFARNFIPDFTELIAPLYALIPKSTKNYVPWQIEHSTTLETLITKLNGAEYLQGRKGDKTLIMKVNASYTTGYIRYYNEGEKKPISYVSIVFSKTELKFTELEKLLTTVHKGLLKALDLSMGQNIHVYSPIVSMQNIQKTPQTAKKALASRWLSWLSYLEDPRIRFFYDPQMPALKDLPAVDTGKDNKKHPSNFQHIFYTDGSAITSPTKEGHLNAGMGIVYFINKDGNLQKQQEWSISLGNHTAQFAEIAAFEFALKKCLPLGGNILVVTDSNYVAKAYNEELDVWASNGFVNNRKKPLKHISKWKSVADLKRLRPDVVVTHEPGHQKLDSSPHAYGNNLADQLATQASFKVHAGKRTADGSEFEKRTADGSEFESPKKKAKVE

SEQ ID NO: 6995 - protein, 2093 aa, synthetic construct
MPAAKRVKLDGGDKKYSIGLDIGTNSVGWAVITDEYKVPSKKFKVLGNTDRHSIKKNLIGALLFDSGETAEATRLKRTARRRYTRRKNRICYLQEIFSNEMAKVDDSFFHRLEESFLVEEDKKHERHPIFGNIVDEVAYHEKYPTIYHLRKKLVDSTDKADLRLIYLALAHMIKFRGHFLIEGDLNPDNSDVDKLFIQLVQTYNQLFEENPINASGVDAKAILSARLSKSRRLENLIAQLPGEKKNGLFGNLIALSLGLTPNFKSNFDLAEDAKLQLSKDTYDDDLDNLLAQIGDQYADLFLAAKNLSDAILLSDILRVNTEITKAPLSASMIKRYDEHHQDLTLLKALVRQQLPEKYKEIFFDQSKNGYAGYIDGGASQEEFYKFIKPILEKMDGTEELLVKLNREDLLRKQRTFDNGSIPHQIHLGELHAILRRQEDFYPFLKDNREKIEKILTFRIPYYVGPLARGNSRFAWMTRKSEETITPWNFEEVVDKGASAQSFIERMTNFDKNLPNEKVLPKHSLLYEYFTVYNELTKVKYVTEGMRKPAFLSGEQKKAIVDLLFKTNRKVTVKQLKEDYFKKIECFDSVEISGVEDRFNASLGTYHDLLKIIKDKDFLDNEENEDILEDIVLTLTLFEDREMIEERLKTYAHLFDDKVMKQLKRRRYTGWGRLSRKLINGIRDKQSGKTILDFLKSDGFANRNFMQLIHDDSLTFKEDIQKAQVSGQGDSLHEHIANLAGSPAIKKGILQTVKVVDELVKVMGRHKPENIVIEMARENQTTQKGQKNSRERMKRIEEGIKELGSQILKEHPVENTQLQNEKLYLYYLQNGRDMYVDQELDINRLSDYDVDHIVPQSFLKDDSIDNKVLTRSDKARGKSDNVPSEEVVKKMKNYWRQLLNAKLITQRKFDNLTKAERGGLSELDKAGFIKRQLVETRQITKHVAQILDSRMNTKYDENDKLIREVKVITLKSKLVSDFRKDFQFYKVREINNYHHAHDAYLNAVVGTALIKKYPKLESEFVYGDYKVYDVRKMIAKSEQEIGKATAKYFFYSNIMNFFKTEITLANGEIRKRPLIETNGETGEIVWDKGRDFATVRKVLSMPQVNIVKKTEVQTGGFSKESILPKRNSDKLIARKKDWDPKKYGGFDSPTVAYSVLVVAKVEKGKSKKLKSVKELLGITIMERSSFEKNPIDFLEAKGYKEVKKDLIIKLPKYSLFELENGRKRMLASAGELQKGNELALPSKYVNFLYLASHYEKLKGSPEDNEQKQLFVEQHKHYLDEIIEQISEFSKRVILADANLDKVLSAYNKHRDKPIREQAENIIHLFTLTNLGAPAAFKYFDTTIDRKRYTSTKEVLDATLIHQSITGLYETRIDLSQLGGDGGGGGGGSPAPGGTLQLEEEYRLFEPESTQKQEMDIWLKNFPQAWAETGGMGTAHCQAPVLIQLKATATPISIRQYPMPHEAYQGIKPHIRRMLDQGILKPCQSPWNTPLLPVKKPGTEDYRPVQDLREVNKRVEDIHPTVPNPYNLLSTLPPSHPWYTVLDLKDAFFCLRLHSESQLLFAFEWRDPEIGLSGQLTWTRLPQGFKNSPTLFDEALHSDLADFRVRYPALVLLQYVDDLLLAAATRTECLEGTKALLETLGNKGYRASAKKAQICLQEVTYLGYSLKDGQRWLTKARKEAILSIPVPKNSRQVREFLGTAGYCRLWIPGFAELAAPLYPLTRPGTLFQWGTEQQLAFEDIKKALLSSPALGLPDITKPFELFIDENSGFAKGVLVQKLGPWKRPVAYLSKKLDTVASGWPPCLRMVAAIAILVKDAGKLTLGQPLTILTSHPVEALVRQPPNKWLSNARMTHYQAMLLDAERVHFGPTVSLNPATLLPLPSGGNHHDCLQILAETHGTRPDLTDQPLPDADLTWYTDGSSFIRNGEREAGAAVTTESEVIWAAPLPPGTSAQRAELIALTQALKMAEGKKLTVYTDSRYAFATTHVHGEIYRRRGLLTSEGKEIKNKNEILALLEALFLPKRLSIIHCPGHQKGDSPQAKGNRLADDTAKKAATETHSSLTVLPAGKRTADGSEFEKRTADGSEFESPKKKAKVE

SEQ ID NO: 6996 - protein, 2085 aa, synthetic construct
MPAAKRVKLDGGDKKYSIGLDIGTNSVGWAVITDEYKVPSKKFKVLGNTDRHSIKKNLIGALLFDSGETAEATRLKRTARRRYTRRKNRICYLQEIFSNEMAKVDDSFFHRLEESFLVEEDKKHERHPIFGNIVDEVAYHEKYPTIYHLRKKLVDSTDKADLRLIYLALAHMIKFRGHFLIEGDLNPDNSDVDKLFIQLVQTYNQLFEENPINASGVDAKAILSARLSKSRRLENLIAQLPGEKKNGLFGNLIALSLGLTPNFKSNFDLAEDAKLQLSKDTYDDDLDNLLAQIGDQYADLFLAAKNLSDAILLSDILRVNTEITKAPLSASMIKRYDEHHQDLTLLKALVRQQLPEKYKEIFFDQSKNGYAGYIDGGASQEEFYKFIKPILEKMDGTEELLVKLNREDLLRKQRTFDNGSIPHQIHLGELHAILRRQEDFYPFLKDNREKIEKILTFRIPYYVGPLARGNSRFAWMTRKSEETITPWNFEEVVDKGASAQSFIERMTNFDKNLPNEKVLPKHSLLYEYFTVYNELTKVKYVTEGMRKPAFLSGEQKKAIVDLLFKTNRKVTVKQLKEDYFKKIECFDSVEISGVEDRFNASLGTYHDLLKIIKDKDFLDNEENEDILEDIVLTLTLFEDREMIEERLKTYAHLFDDKVMKQLKRRRYTGWGRLSRKLINGIRDKQSGKTILDFLKSDGFANRNFMQLIHDDSLTFKEDIQKAQVSGQGDSLHEHIANLAGSPAIKKGILQTVKVVDELVKVMGRHKPENIVIEMARENQTTQKGQKNSRERMKRIEEGIKELGSQILKEHPVENTQLQNEKLYLYYLQNGRDMYVDQELDINRLSDYDVDHIVPQSFLKDDSIDNKVLTRSDKARGKSDNVPSEEVVKKMKNYWRQLLNAKLITQRKFDNLTKAERGGLSELDKAGFIKRQLVETRQITKHVAQILDSRMNTKYDENDKLIREVKVITLKSKLVSDFRKDFQFYKVREINNYHHAHDAYLNAVVGTALIKKYPKLESEFVYGDYKVYDVRKMIAKSEQEIGKATAKYFFYSNIMNFFKTEITLANGEIRKRPLIETNGETGEIVWDKGRDFATVRKVLSMPQVNIVKKTEVQTGGFSKESILPKRNSDKLIARKKDWDPKKYGGFDSPTVAYSVLVVAKVEKGKSKKLKSVKELLGITIMERSSFEKNPIDFLEAKGYKEVKKDLIIKLPKYSLFELENGRKRMLASAGELQKGNELALPSKYVNFLYLASHYEKLKGSPEDNEQKQLFVEQHKHYLDEIIEQISEFSKRVILADANLDKVLSAYNKHRDKPIREQAENIIHLFTLTNLGAPAAFKYFDTTIDRKRYTSTKEVLDATLIHQSITGLYETRIDLSQLGGDGGGGGGGSPAPGGVPWLTQQPLQLTILVPLQEYQEKILSKTALPEDQKQQLKTLFVKYDNLWQHWENQVGHRKIRPHNIATGDYPPRPQKQYPINPKAKPSIQIVIDDLLKQGVLTPQNSTMNTPVYPVPKPDGRWRMVLDYREVNKTIPLTAAQNQHSAGILATIVRQKYKTTLDLANGFWAHPITPESYWLTAFTWQGKQYCWTRLPQGFLNSPALFNADVVDLLKEIPNVQVYVDDIYLSHDDPKEHVQQLEKVFQILLQAGYVVSLKKSEIGQKTVEFLGFNITKEGRGLTDTFKTKLLNITPPKDLKQLQSILGLLNFARNFIPNFAELVQPLYNLIAPAKGKYIEWSEENTKQLNMVIEALNTASNLEERLPEQRLVIKVNTSPSAGYVRYYNETGKKPIMYLNYVFSKAELKFSMLEKLLTTMHKALIKAMDLAMGQEILVYSPIVSMTKIQKTPLPERKALPIRWITWMTYLEDPRIQFHYDKTLPELKHIPDVYTSSQSPVKHPSQYEGVFYTDGSAIKSPDPTKSNNAGMGIVHATYKPEYQVLNQWSIPLGNHTAQMAEIAAVEFACKKALKIPGPVLVITDSFYVAESANKELPYWKSNGFVNNKKKPLKHISKWKSIAECLSMKPDITIQHEKGISLQIPVFILKGNALADKLATQGSYVVNAGKRTADGSEFEKRTADGSEFESPKKKAKVE

SEQ ID NO: 6997 - protein, 2085 aa, synthetic construct
MPAAKRVKLDGGDKKYSIGLDIGTNSVGWAVITDEYKVPSKKFKVLGNTDRHSIKKNLIGALLFDSGETAEATRLKRTARRRYTRRKNRICYLQEIFSNEMAKVDDSFFHRLEESFLVEEDKKHERHPIFGNIVDEVAYHEKYPTIYHLRKKLVDSTDKADLRLIYLALAHMIKFRGHFLIEGDLNPDNSDVDKLFIQLVQTYNQLFEENPINASGVDAKAILSARLSKSRRLENLIAQLPGEKKNGLFGNLIALSLGLTPNFKSNFDLAEDAKLQLSKDTYDDDLDNLLAQIGDQYADLFLAAKNLSDAILLSDILRVNTEITKAPLSASMIKRYDEHHQDLTLLKALVRQQLPEKYKEIFFDQSKNGYAGYIDGGASQEEFYKFIKPILEKMDGTEELLVKLNREDLLRKQRTFDNGSIPHQIHLGELHAILRRQEDFYPFLKDNREKIEKILTFRIPYYVGPLARGNSRFAWMTRKSEETITPWNFEEVVDKGASAQSFIERMTNFDKNLPNEKVLPKHSLLYEYFTVYNELTKVKYVTEGMRKPAFLSGEQKKAIVDLLFKTNRKVTVKQLKEDYFKKIECFDSVEISGVEDRFNASLGTYHDLLKIIKDKDFLDNEENEDILEDIVLTLTLFEDREMIEERLKTYAHLFDDKVMKQLKRRRYTGWGRLSRKLINGIRDKQSGKTILDFLKSDGFANRNFMQLIHDDSLTFKEDIQKAQVSGQGDSLHEHIANLAGSPAIKKGILQTVKVVDELVKVMGRHKPENIVIEMARENQTTQKGQKNSRERMKRIEEGIKELGSQILKEHPVENTQLQNEKLYLYYLQNGRDMYVDQELDINRLSDYDVDHIVPQSFLKDDSIDNKVLTRSDKARGKSDNVPSEEVVKKMKNYWRQLLNAKLITQRKFDNLTKAERGGLSELDKAGFIKRQLVETRQITKHVAQILDSRMNTKYDENDKLIREVKVITLKSKLVSDFRKDFQFYKVREINNYHHAHDAYLNAVVGTALIKKYPKLESEFVYGDYKVYDVRKMIAKSEQEIGKATAKYFFYSNIMNFFKTEITLANGEIRKRPLIETNGETGEIVWDKGRDFATVRKVLSMPQVNIVKKTEVQTGGFSKESILPKRNSDKLIARKKDWDPKKYGGFDSPTVAYSVLVVAKVEKGKSKKLKSVKELLGITIMERSSFEKNPIDFLEAKGYKEVKKDLIIKLPKYSLFELENGRKRMLASAGELQKGNELALPSKYVNFLYLASHYEKLKGSPEDNEQKQLFVEQHKHYLDEIIEQISEFSKRVILADANLDKVLSAYNKHRDKPIREQAENIIHLFTLTNLGAPAAFKYFDTTIDRKRYTSTKEVLDATLIHQSITGLYETRIDLSQLGGDGGGGGGGSPAPGGVPWLTQQPLQLTILVPLQEYQEKILSKTALPEDQKQQLKTLFVKYDNLWQHWENQVGHRKIRPHNIATGDYPPRPQKQYPINPKAKPSIQIVIDDLLKQGVLTPQNSTMNTPVYPVPKPDGRWRMVLDYREVNKTIPLTAAQNQHSAGILATIVRQKYKTTLDLANGFWAHPITPESYWLTAFTWQGKQYCWTRLPQGFLNSPALFNADVVDLLKEIPNVQVYVDDIYLSHDDPKEHVQQLEKVFQILLQAGYVVSLKKSEIGQKTVEFLGFNITKEGRGLTDTFKTKLLNITPPKDLKQLQSILGKLNFARNFIPNFAELVQPLYNLIAPAKGKYIEWSEENTKQLNMVIEALNTASNLEERLPEQRLVIKVNTSPSAGYVRYYNETGKKPIMYLNYVFSKAELKFSMLEKLLTTMHKALIKAMDLAMGQEILVYSPIVSMTKIQKTPLPERKALPIRWITWMTYLEDPRIQFHYDKTLPELKHIPDVYTSSQSPVKHPSQYEGVFYTDGSAIKSPDPTKSNNAGMGIVHATYKPEYQVLNQWSIPLGNHTAQMAEIAAVEFACKKALKIPGPVLVITDSFYVAESANKELPYWKSNGFVNNKKKPLKHISKWKSIAECLSMKPDITIQHEKGISLQIPVFILKGNALADKLATQGSYVVNAGKRTADGSEFEKRTADGSEFESPKKKAKVE

SEQ ID NO: 6998 - protein, 2094 aa, synthetic construct; identical to SEQ ID NO: 4520

SEQ ID NO: 6999 - protein, 2094 aa, synthetic construct
MPAAKRVKLDGGDKKYSIGLDIGTNSVGWAVITDEYKVPSKKFKVLGNTDRHSIKKNLIGALLFDSGETAEATRLKRTARRRYTRRKNRICYLQEIFSNEMAKVDDSFFHRLEESFLVEEDKKHERHPIFGNIVDEVAYHEKYPTIYHLRKKLVDSTDKADLRLIYLALAHMIKFRGHFLIEGDLNPDNSDVDKLFIQLVQTYNQLFEENPINASGVDAKAILSARLSKSRRLENLIAQLPGEKKNGLFGNLIALSLGLTPNFKSNFDLAEDAKLQLSKDTYDDDLDNLLAQIGDQYADLFLAAKNLSDAILLSDILRVNTEITKAPLSASMIKRYDEHHQDLTLLKALVRQQLPEKYKEIFFDQSKNGYAGYIDGGASQEEFYKFIKPILEKMDGTEELLVKLNREDLLRKQRTFDNGSIPHQIHLGELHAILRRQEDFYPFLKDNREKIEKILTFRIPYYVGPLARGNSRFAWMTRKSEETITPWNFEEVVDKGASAQSFIERMTNFDKNLPNEKVLPKHSLLYEYFTVYNELTKVKYVTEGMRKPAFLSGEQKKAIVDLLFKTNRKVTVKQLKEDYFKKIECFDSVEISGVEDRFNASLGTYHDLLKIIKDKDFLDNEENEDILEDIVLTLTLFEDREMIEERLKTYAHLFDDKVMKQLKRRRYTGWGRLSRKLINGIRDKQSGKTILDFLKSDGFANRNFMQLIHDDSLTFKEDIQKAQVSGQGDSLHEHIANLAGSPAIKKGILQTVKVVDELVKVMGRHKPENIVIEMARENQTTQKGQKNSRERMKRIEEGIKELGSQILKEHPVENTQLQNEKLYLYYLQNGRDMYVDQELDINRLSDYDVDHIVPQSFLKDDSIDNKVLTRSDKARGKSDNVPSEEVVKKMKNYWRQLLNAKLITQRKFDNLTKAERGGLSELDKAGFIKRQLVETRQITKHVAQILDSRMNTKYDENDKLIREVKVITLKSKLVSDFRKDFQFYKVREINNYHHAHDAYLNAVVGTALIKKYPKLESEFVYGDYKVYDVRKMIAKSEQEIGKATAKYFFYSNIMNFFKTEITLANGEIRKRPLIETNGETGEIVWDKGRDFATVRKVLSMPQVNIVKKTEVQTGGFSKESILPKRNSDKLIARKKDWDPKKYGGFDSPTVAYSVLVVAKVEKGKSKKLKSVKELLGITIMERSSFEKNPIDFLEAKGYKEVKKDLIIKLPKYSLFELENGRKRMLASAGELQKGNELALPSKYVNFLYLASHYEKLKGSPEDNEQKQLFVEQHKHYLDEIIEQISEFSKRVILADANLDKVLSAYNKHRDKPIREQAENIIHLFTLTNLGAPAAFKYFDTTIDRKRYTSTKEVLDATLIHQSITGLYETRIDLSQLGGDGGGGGGGSPAPGGTLGIEDEYRLHETSTEPDVSLGSTWLSDFPQAWAETGGMGLAVRQAPLIIPLKATSTPVSIQQYPMSHEARLGIKPHIQRLLDQGILVPCQSPWNTPLLPVKKPGTNDYRPVQDLREVNKRVEDIHPTVPNPYNLLSGLPPSHQWYTVLDLKDAFFCLRLHPTSQPLFAFEWRDPGMGISGQLTWTRLPQGFKNSPTLFNEALHRDLADFRIQHPDLILLQYVDDILLAATSELDCQQGTRALLQTLGDLGYRASAKKAQICQKQVKYLGYLLREGQRWLTEARKETVMGQPVPKTPRQLREFLGTAGFCRLWIPGFAEMAAPLYPLTKPGTLFSWGPDQQKAYQEIKQALLTAPALGLPDLTKPFELFVDEKQGYAKGVLTQKLGPWRRPVAYLSKKLDPVAAGWPPCLRMVAAIAVLTKDAGKLTMGQPLVILAPHAVEALVKQPPDRWLSNARMTHYQAMLLDTDRVQFGPVVALNPATLLPLPEEGAPHDCLEILAETHGTRPDLTDQPIPDADHTWYTDGSSFLQEGQRKAGAAVTTETEVIWAGALPAGTSAQRAELIALTQALKMAEGKRLNVYTDSRYAFATAHIHGEIYRRRGWLTSEGREIKNKSEILALLKALFLPKRLSIIHCLGHQKGDSAEARGNRLADQAAREAAIKTPPDTSTLLAGKRTADGSEFEKRTADGSEFESPKKKAKVE

SEQ ID NO: 7000 - protein, 2094 aa, synthetic construct
MPAAKRVKLDGGDKKYSIGLDIGTNSVGWAVITDEYKVPSKKFKVLGNTDRHSIKKNLIGALLFDSGETAEATRLKRTARRRYTRRKNRICYLQEIFSNEMAKVDDSFFHRLEESFLVEEDKKHERHPIFGNIVDEVAYHEKYPTIYHLRKKLVDSTDKADLRLIYLALAHMIKFRGHFLIEGDLNPDNSDVDKLFIQLVQTYNQLFEENPINASGVDAKAILSARLSKSRRLENLIAQLPGEKKNGLFGNLIALSLGLTPNFKSNFDLAEDAKLQLSKDTYDDDLDNLLAQIGDQYADLFLAAKNLSDAILLSDILRVNTEITKAPLSASMIKRYDEHHQDLTLLKALVRQQLPEKYKEIFFDQSKNGYAGYIDGGASQEEFYKFIKPILEKMDGTEELLVKLNREDLLRKQRTFDNGSIPHQIHLGELHAILRRQEDFYPFLKDNREKIEKILTFRIPYYVGPLARGNSRFAWMTRKSEETITPWNFEEVVDKGASAQSFIERMTNFDKNLPNEKVLPKHSLLYEYFTVYNELTKVKYVTEGMRKPAFLSGEQKKAIVDLLFKTNRKVTVKQLKEDYFKKIECFDSVEISGVEDRFNASLGTYHDLLKIIKDKDFLDNEENEDILEDIVLTLTLFEDREMIEERLKTYAHLFDDKVMKQLKRRRYTGWGRLSRKLINGIRDKQSGKTILDFLKSDGFANRNFMQLIHDDSLTFKEDIQKAQVSGQGDSLHEHIANLAGSPAIKKGILQTVKVVDELVKVMGRHKPENIVIEMARENQTTQKGQKNSRERMKRIEEGIKELGSQILKEHPVENTQLQNEKLYLYYLQNGRDMYVDQELDINRLSDYDVDHIVPQSFLKDDSIDNKVLTRSDKARGKSDNVPSEEVVKKMKNYWRQLLNAKLITQRKFDNLTKAERGGLSELDKAGFIKRQLVETRQITKHVAQILDSRMNTKYDENDKLIREVKVITLKSKLVSDFRKDFQFYKVREINNYHHAHDAYLNAVVGTALIKKYPKLESEFVYGDYKVYDVRKMIAKSEQEIGKATAKYFFYSNIMNFFKTEITLANGEIRKRPLIETNGETGEIVWDKGRDFATVRKVLSMPQVNIVKKTEVQTGGFSKESILPKRNSDKLIARKKDWDPKKYGGFDSPTVAYSVLVVAKVEKGKSKKLKSVKELLGITIMERSSFEKNPIDFLEAKGYKEVKKDLIIKLPKYSLFELENGRKRMLASAGELQKGNELALPSKYVNFLYLASHYEKLKGSPEDNEQKQLFVEQHKHYLDEIIEQISEFSKRVILADANLDKVLSAYNKHRDKPIREQAENIIHLFTLTNLGAPAAFKYFDTTIDRKRYTSTKEVLDATLIHQSITGLYETRIDLSQLGGDGGGGGGGSPAPGGTLNIEDEYRLHETSKEPDVSLGSTWLSDFPQAWAETGGMGLAVRQAPLIIPLKATSTPVSIKQYPMSQEARLGIKPHIQRLLDQGILVPCQSPWNTPLLPVKKPGTNDYRPVQDLREVNKRVEDIHPTVPNPYNLLSGLPPSHQWYTVLDLKDAFFCLRLHPTSQPLFAFEWRDPEMGISGQLTWTRLPQGFKNSPTLFDEALHRDLAGFRIQHPDLILLQYVDDLLLAATSELDCQQGTRALLQTLGDLGYRASAKKAQICQKQVKYLGYLLKEGQRWLTEARKETVMGQPIPKTPRQLREFLGTAGFCRLWIPGFAEMAAPLYPLTKTGTLFNWGPDQQKAFQEIKQALLTAPALGLPDLTKPFELFVDEKQGYAKGVLTQKLGPWRRPVAYLSKKLDPVAAGWPPCLRMVAAIAVLTKDAGKLTMGQPLVILAPHAVEALVKQPPDRWLSNARMTHYQALLLDTDRVQFGPVVALNPATLLPLPEEGLQHDCLDILAEAHGTRSDLMDQPLPDADHTWYTDGSSFLQEGQRKAGAAVTTETEVIWARALPAGTSAQRAELIALTQALKMAEGKKLNVYTDSRYAFATAHIHGEIYRRRGLLTSEGKEIKNKDEILALLKALFLPKRLSIIHCPGHQKGNSAEARGNRMADQAAREVATRETPETSTLLAGKRTADGSEFEKRTADGSEFESPKKKAKVE

SEQ ID NO: 7001 - protein, 2094 aa, synthetic construct
MPAAKRVKLDGGDKKYSIGLDIGTNSVGWAVITDEYKVPSKKFKVLGNTDRHSIKKNLIGALLFDSGETAEATRLKRTARRRYTRRKNRICYLQEIFSNEMAKVDDSFFHRLEESFLVEEDKKHERHPIFGNIVDEVAYHEKYPTIYHLRKKLVDSTDKADLRLIYLALAHMIKFRGHFLIEGDLNPDNSDVDKLFIQLVQTYNQLFEENPINASGVDAKAILSARLSKSRRLENLIAQLPGEKKNGLFGNLIALSLGLTPNFKSNFDLAEDAKLQLSKDTYDDDLDNLLAQIGDQYADLFLAAKNLSDAILLSDILRVNTEITKAPLSASMIKRYDEHHQDLTLLKALVRQQLPEKYKEIFFDQSKNGYAGYIDGGASQEEFYKFIKPILEKMDGTEELLVKLNREDLLRKQRTFDNGSIPHQIHLGELHAILRRQEDFYPFLKDNREKIEKILTFRIPYYVGPLARGNSRFAWMTRKSEETITPWNFEEVVDKGASAQSFIERMTNFDKNLPNEKVLPKHSLLYEYFTVYNELTKVKYVTEGMRKPAFLSGEQKKAIVDLLFKTNRKVTVKQLKEDYFKKIECFDSVEISGVEDRFNASLGTYHDLLKIIKDKDFLDNEENEDILEDIVLTLTLFEDREMIEERLKTYAHLFDDKVMKQLKRRRYTGWGRLSRKLINGIRDKQSGKTILDFLKSDGFANRNFMQLIHDDSLTFKEDIQKAQVSGQGDSLHEHIANLAGSPAIKKGILQTVKVVDELVKVMGRHKPENIVIEMARENQTTQKGQKNSRERMKRIEEGIKELGSQILKEHPVENTQLQNEKLYLYYLQNGRDMYVDQELDINRLSDYDVDHIVPQSFLKDDSIDNKVLTRSDKARGKSDNVPSEEVVKKMKNYWRQLLNAKLITQRKFDNLTKAERGGLSELDKAGFIKRQLVETRQITKHVAQILDSRMNTKYDENDKLIREVKVITLKSKLVSDFRKDFQFYKVREINNYHHAHDAYLNAVVGTALIKKYPKLESEFVYGDYKVYDVRKMIAKSEQEIGKATAKYFFYSNIMNFFKTEITLANGEIRKRPLIETNGETGEIVWDKGRDFATVRKVLSMPQVNIVKKTEVQTGGFSKESILPKRNSDKLIARKKDWDPKKYGGFDSPTVAYSVLVVAKVEKGKSKKLKSVKELLGITIMERSSFEKNPIDFLEAKGYKEVKKDLIIKLPKYSLFELENGRKRMLASAGELQKGNELALPSKYVNFLYLASHYEKLKGSPEDNEQKQLFVEQHKHYLDEIIEQISEFSKRVILADANLDKVLSAYNKHRDKPIREQAENIIHLFTLTNLGAPAAFKYFDTTIDRKRYTSTKEVLDATLIHQSITGLYETRIDLSQLGGDGGGGGGGSPAPGGTLNIEDEYRLHETSKEPDVSLGSTWLSDFPQAWAETGGMGLAVRQAPLIIPLKATSTPVSIKQYPMSQEARLGIKPHIQRLLDQGILVPCQSPWNTPLLPVKKPGTNDYRPVQDLREVNKRVEDIHPTVPNPYNLLSGLPPSHQWYTVLDLKDAFFCLRLHPTSQPLFAFEWRDPEMGISGQLTWTRLPQGFKNSPTLFNEALHRDLAGFRIQHPDLILLQYVDDLLLAATSELDCQQGTRALLQTLGDLGYRASAKKAQICQKQVKYLGYLLKEGQRWLTEARKETVMGQPIPKTPRQLREFLGTAGFCRLWIPGFAEMAAPLYPLTKPGTLFNWGPDQQKAFQEIKQALLTAPALGLPDLTKPFELFVDEKQGYAKGVLTQKLGPWRRPVAYLSKKLDPVAAGWPPCLRMVAAIAVLTKDAGKLTMGQPLVILAPHAVEALVKQPPDRWLSNARMTHYQALLLDTDRVQFGPVVALNPATLLPLPEEGLQHDCLDILAEAHGTRSDLMDQPLPDADHTWYTDGSSFLQEGQRKAGAAVTTETEVIWARALPAGTSAQRAELIALTQALKMAEGKKLNVYTDSRYAFATAHIHGEIYRRRGWLTSEGKEIKNKDEILALLKALFLPKRLSIIHCPGHQKGNSAEARGNRMADQAAREVATRETPETSTLLAGKRTADGSEFEKRTADGSEFESPKKKAKVE

SEQ ID NO: 7002 - protein, 2114 aa, synthetic construct
MPAAKRVKLDGGDKKYSIGLDIGTNSVGWAVITDEYKVPSKKFKVLGNTDRHSIKKNLIGALLFDSGETAEATRLKRTARRRYTRRKNRICYLQEIFSNEMAKVDDSFFHRLEESFLVEEDKKHERHPIFGNIVDEVAYHEKYPTIYHLRKKLVDSTDKADLRLIYLALAHMIKFRGHFLIEGDLNPDNSDVDKLFIQLVQTYNQLFEENPINASGVDAKAILSARLSKSRRLENLIAQLPGEKKNGLFGNLIALSLGLTPNFKSNFDLAEDAKLQLSKDTYDDDLDNLLAQIGDQYADLFLAAKNLSDAILLSDILRVNTEITKAPLSASMIKRYDEHHQDLTLLKALVRQQLPEKYKEIFFDQSKNGYAGYIDGGASQEEFYKFIKPILEKMDGTEELLVKLNREDLLRKQRTFDNGSIPHQIHLGELHAILRRQEDFYPFLKDNREKIEKILTFRIPYYVGPLARGNSRFAWMTRKSEETITPWNFEEVVDKGASAQSFIERMTNFDKNLPNEKVLPKHSLLYEYFTVYNELTKVKYVTEGMRKPAFLSGEQKKAIVDLLFKTNRKVTVKQLKEDYFKKIECFDSVEISGVEDRFNASLGTYHDLLKIIKDKDFLDNEENEDILEDIVLTLTLFEDREMIEERLKTYAHLFDDKVMKQLKRRRYTGWGRLSRKLINGIRDKQSGKTILDFLKSDGFANRNFMQLIHDDSLTFKEDIQKAQVSGQGDSLHEHIANLAGSPAIKKGILQTVKVVDELVKVMGRHKPENIVIEMARENQTTQKGQKNSRERMKRIEEGIKELGSQILKEHPVENTQLQNEKLYLYYLQNGRDMYVDQELDINRLSDYDVDHIVPQSFLKDDSIDNKVLTRSDKARGKSDNVPSEEVVKKMKNYWRQLLNAKLITQRKFDNLTKAERGGLSELDKAGFIKRQLVETRQITKHVAQILDSRMNTKYDENDKLIREVKVITLKSKLVSDFRKDFQFYKVREINNYHHAHDAYLNAVVGTALIKKYPKLESEFVYGDYKVYDVRKMIAKSEQEIGKATAKYFFYSNIMNFFKTEITLANGEIRKRPLIETNGETGEIVWDKGRDFATVRKVLSMPQVNIVKKTEVQTGGFSKESILPKRNSDKLIARKKDWDPKKYGGFDSPTVAYSVLVVAKVEKGKSKKLKSVKELLGITIMERSSFEKNPIDFLEAKGYKEVKKDLIIKLPKYSLFELENGRKRMLASAGELQKGNELALPSKYVNFLYLASHYEKLKGSPEDNEQKQLFVEQHKHYLDEIIEQISEFSKRVILADANLDKVLSAYNKHRDKPIREQAENIIHLFTLTNLGAPAAFKYFDTTIDRKRYTSTKEVLDATLIHQSITGLYETRIDLSQLGGDGGGGGGGSPAPGGVQEISDSRPMLHIYLNGRRFLGLLDTGADKTCIAGRDWPANWPIHQTESSLQGLGMACGVARSSQPLRWQHEDKSGIIHPFVIPTLPFTLWGRDIMKDIKVRLMTDSPDDSQDLMIGAIESNLFADQISWKSDQPVWLNQWPLKQEKLQALQQLVTEQLQLGHLEESNSPWNTPVFVIKKKSGKWRLLQDLRAVNATMHDMGALQPGLPSPVAVPKGWEIIIIDLQDCFFNIKLHPEDCKRFAFSVPSPNFKRPYQRFQWKVLPQGMKNSPTLCQKFVDKAILTVRDKYQDSYIVHYMDDILLAHPSRSIVDEILTSMIQALNKHGLVVSTEKIQKYDNLKYLGTHIQGDSVSYQKLQIRTDKLRTLNDFQKLLGNINWIRPFLKLTTGELKPLFEILNGDSNPISTRKLTPEACKALQLMNERLSTARVKRLDLSQPWSLCILKTEYTPTACLWQDGVVEWIHLPHISPKVITPYDIFCTQLIIKGRHRSKELFSKDPDYIVVPYTKVQFDLLLQEKEDWPISLLGFLGEVHFHLPKDPLLTFTLQTAIIFPHMTSTTPLEKGIVIFTDGSANGRSVTYIQGREPIIKENTQNTAQQAEIVAVITAFEEVSQPFNLYTDSKYVTGLFPEIETATLSPRTKIYTELKHLQRLIHKRQEKFYIGHIRGHTGLPGPLAQGNAYADSLTRILTAAGKRTADGSEFEKRTADGSEFESPKKKAKVE

SEQ ID NO: 7003 - protein, 2088 aa, synthetic construct
MPAAKRVKLDGGDKKYSIGLDIGTNSVGWAVITDEYKVPSKKFKVLGNTDRHSIKKNLIGALLFDSGETAEATRLKRTARRRYTRRKNRICYLQEIFSNEMAKVDDSFFHRLEESFLVEEDKKHERHPIFGNIVDEVAYHEKYPTIYHLRKKLVDSTDKADLRLIYLALAHMIKFRGHFLIEGDLNPDNSDVDKLFIQLVQTYNQLFEENPINASGVDAKAILSARLSKSRRLENLIAQLPGEKKNGLFGNLIALSLGLTPNFKSNFDLAEDAKLQLSKDTYDDDLDNLLAQIGDQYADLFLAAKNLSDAILLSDILRVNTEITKAPLSASMIKRYDEHHQDLTLLKALVRQQLPEKYKEIFFDQSKNGYAGYIDGGASQEEFYKFIKPILEKMDGTEELLVKLNREDLLRKQRTFDNGSIPHQIHLGELHAILRRQEDFYPFLKDNREKIEKILTFRIPYYVGPLARGNSRFAWMTRKSEETITPWNFEEVVDKGASAQSFIERMTNFDKNLPNEKVLPKHSLLYEYFTVYNELTKVKYVTEGMRKPAFLSGEQKKAIVDLLFKTNRKVTVKQLKEDYFKKIECFDSVEISGVEDRFNASLGTYHDLLKIIKDKDFLDNEENEDILEDIVLTLTLFEDREMIEERLKTYAHLFDDKVMKQLKRRRYTGWGRLSRKLINGIRDKQSGKTILDFLKSDGFANRNFMQLIHDDSLTFKEDIQKAQVSGQGDSLHEHIANLAGSPAIKKGILQTVKVVDELVKVMGRHKPENIVIEMARENQTTQKGQKNSRERMKRIEEGIKELGSQILKEHPVENTQLQNEKLYLYYLQNGRDMYVDQELDINRLSDYDVDHIVPQSFLKDDSIDNKVLTRSDKARGKSDNVPSEEVVKKMKNYWRQLLNAKLITQRKFDNLTKAERGGLSELDKAGFIKRQLVETRQITKHVAQILDSRMNTKYDENDKLIREVKVITLKSKLVSDFRKDFQFYKVREINNYHHAHDAYLNAVVGTALIKKYPKLESEFVYGDYKVYDVRKMIAKSEQEIGKATAKYFFYSNIMNFFKTEITLANGEIRKRPLIETNGETGEIVWDKGRDFATVRKVLSMPQVNIVKKTEVQTGGFSKESILPKRNSDKLIARKKDWDPKKYGGFDSPTVAYSVLVVAKVEKGKSKKLKSVKELLGITIMERSSFEKNPIDFLEAKGYKEVKKDLIIKLPKYSLFELENGRKRMLASAGELQKGNELALPSKYVNFLYLASHYEKLKGSPEDNEQKQLFVEQHKHYLDEIIEQISEFSKRVILADANLDKVLSAYNKHRDKPIREQAENIIHLFTLTNLGAPAAFKYFDTTIDRKRYTSTKEVLDATLIHQSITGLYETRIDLSQLGGDGGGGGGGSPAPGGTLQLDDEYRLYSPLVKPDQNIQFWLEQFPQAWAETAGMGLAKQVPPQVIQLKASATPVSVRQYPLSKEAQEGIRPHVQRLIQQGILVPVQSPWNTPLLPVRKPGTNDYRPVQDLREVNKRVQDIHPTVPNPYNLLCALPPQRSWYTVLDLKDAFFCLRLHPTSQPLFAFEWRDPGTGRTGQLTWTRLPQGFKNSPTIFDEALHRDLANFRIQHPQVTLLQYVDDLLLAGATKQDCLEGTKALLLELSDLGYRASAKKAQICRREVTYLGYSLRDGQRWLTEARKKTVVQIPAPTTAKQVREFLGTAGFCRLWIPGFATLAAPLYPLTKEKGEFSWAPEHQKAFDAIKKALLSAPALALPDVTKPFTLYVDERKGVARGVLTQTLGPWRRPVAYLSKKLDPVASGWPVCLKAIAAVAILVKDADKLTLGQNITVIAPHALENIVRQPPDRWMTNARMTHYQSLLLTERVTFAPPAALNPATLLPEETDEPVTHDCHQLLIEETGVRKDLTDIPLTGEVLTWFTDGSSYVVEGKRMAGAAVVDGTRTIWASSLPEGTSAQKAELMALTQALRLAEGKSINIYTDSRYAFATAHVHGAIYKQRGLLTSAGREIKNKEEILSLLEALHLPKRLAIIHCPGHQKAKDPISRGNQMADRVAKQAAQGVNLLAGKRTADGSEFEKRTADGSEFESPKKKAKVE

SEQ ID NO: 7004 - protein, 2174 aa, synthetic construct
MPAAKRVKLDGGDKKYSIGLDIGTNSVGWAVITDEYKVPSKKFKVLGNTDRHSIKKNLIGALLFDSGETAEATRLKRTARRRYTRRKNRICYLQEIFSNEMAKVDDSFFHRLEESFLVEEDKKHERHPIFGNIVDEVAYHEKYPTIYHLRKKLVDSTDKADLRLIYLALAHMIKFRGHFLIEGDLNPDNSDVDKLFIQLVQTYNQLFEENPINASGVDAKAILSARLSKSRRLENLIAQLPGEKKNGLFGNLIALSLGLTPNFKSNFDLAEDAKLQLSKDTYDDDLDNLLAQIGDQYADLFLAAKNLSDAILLSDILRVNTEITKAPLSASMIKRYDEHHQDLTLLKALVRQQLPEKYKEIFFDQSKNGYAGYIDGGASQEEFYKFIKPILEKMDGTEELLVKLNREDLLRKQRTFDNGSIPHQIHLGELHAILRRQEDFYPFLKDNREKIEKILTFRIPYYVGPLARGNSRFAWMTRKSEETITPWNFEEVVDKGASAQSFIERMTNFDKNLPNEKVLPKHSLLYEYFTVYNELTKVKYVTEGMRKPAFLSGEQKKAIVDLLFKTNRKVTVKQLKEDYFKKIECFDSVEISGVEDRFNASLGTYHDLLKIIKDKDFLDNEENEDILEDIVLTLTLFEDREMIEERLKTYAHLFDDKVMKQLKRRRYTGWGRLSRKLINGIRDKQSGKTILDFLKSDGFANRNFMQLIHDDSLTFKEDIQKAQVSGQGDSLHEHIANLAGSPAIKKGILQTVKVVDELVKVMGRHKPENIVIEMARENQTTQKGQKNSRERMKRIEEGIKELGSQILKEHPVENTQLQNEKLYLYYLQNGRDMYVDQELDINRLSDYDVDHIVPQSFLKDDSIDNKVLTRSDKARGKSDNVPSEEVVKKMKNYWRQLLNAKLITQRKFDNLTKAERGGLSELDKAGFIKRQLVETRQITKHVAQILDSRMNTKYDENDKLIREVKVITLKSKLVSDFRKDFQFYKVREINNYHHAHDAYLNAVVGTALIKKYPKLESEFVYGDYKVYDVRKMIAKSEQEIGKATAKYFFYSNIMNFFKTEITLANGEIRKRPLIETNGETGEIVWDKGRDFATVRKVLSMPQVNIVKKTEVQTGGFSKESILPKRNSDKLIARKKDWDPKKYGGFDSPTVAYSVLVVAKVEKGKSKKLKSVKELLGITIMERSSFEKNPIDFLEAKGYKEVKKDLIIKLPKYSLFELENGRKRMLASAGELQKGNELALPSKYVNFLYLASHYEKLKGSPEDNEQKQLFVEQHKHYLDEIIEQISEFSKRVILADANLDKVLSAYNKHRDKPIREQAENIIHLFTLTNLGAPAAFKYFDTTIDRKRYTSTKEVLDATLIHQSITGLYETRIDLSQLGGDGGGGGGGSPAPGGMDPLQLLQPLEAEIKGTKLKAHWNSGATITCVPEAFLEDERPIQTMLIKTIHGEKQQDVYYLTFKVQGRKVEAEVLASPYDYILLNPSDVPWLMKKPLQLTVLVPLHEYQERLLQQTALPKEQKELLQKLFLKYDALWQHWENQVGHRRIKPHNIATGTLAPRPQKQYPINPKAKPSIQIVIDDLLKQGVLIQQNSTMNTPVYPVPKPDGKWRMVLDYREVNKTIPLIAAQNQHSAGILSSIYRGKYKTTLDLTNGFWAHPITPESYWLTAFTWQGKQYCWTRLPQGFLNSPALFNADVVDLLKEIPNVQAYVDDIYISHDDPQEHLEQLEKIFSILLNAGYVVSLKKSEIAQREVEFLGFNITKEGRGLTDTFKQKLLNITPPKDLKQLQSILGLLNFARNFIPNYSELVKPLYTIVAPANGKFISWTEDNSNQLQHIISVLNQADNLEERNPETRLIIKVNSSPSAGYIRYYNEGSKRPIMYVNYIFSKAEAKFTQTEKLLTTMHKGLIKAMDLAMGQEILVYSPIVSMTKIQRTPLPERKALPVRWITWMTYLEDPRIQFHYDKSLPELQQIPNVTEDVIAKTKHPSEFAMVFYTDGSAIKHPDVNKSHSAGMGIAQVQFIPEYKIVHQWSIPLGDHTAQLAEIAAVEFACKKALKISGPVLIVTDSFYVAESANKELPYWKSNGFLNNKKKPLRHVSKWKSIAECLQLKPDIIIMHEKGHQQPMTTLHTEGNNLADKLATQGSYVVHAGKRTADGSEFEKRTADGSEFESPKKKAKVE

SEQ ID NO: 7005 - protein, 2085 aa, synthetic construct
MPAAKRVKLDGGDKKYSIGLDIGTNSVGWAVITDEYKVPSKKFKVLGNTDRHSIKKNLIGALLFDSGETAEATRLKRTARRRYTRRKNRICYLQEIFSNEMAKVDDSFFHRLEESFLVEEDKKHERHPIFGNIVDEVAYHEKYPTIYHLRKKLVDSTDKADLRLIYLALAHMIKFRGHFLIEGDLNPDNSDVDKLFIQLVQTYNQLFEENPINASGVDAKAILSARLSKSRRLENLIAQLPGEKKNGLFGNLIALSLGLTPNFKSNFDLAEDAKLQLSKDTYDDDLDNLLAQIGDQYADLFLAAKNLSDAILLSDILRVNTEITKAPLSASMIKRYDEHHQDLTLLKALVRQQLPEKYKEIFFDQSKNGYAGYIDGGASQEEFYKFIKPILEKMDGTEELLVKLNREDLLRKQRTFDNGSIPHQIHLGELHAILRRQEDFYPFLKDNREKIEKILTFRIPYYVGPLARGNSRFAWMTRKSEETITPWNFEEVVDKGASAQSFIERMTNFDKNLPNEKVLPKHSLLYEYFTVYNELTKVKYVTEGMRKPAFLSGEQKKAIVDLLFKTNRKVTVKQLKEDYFKKIECFDSVEISGVEDRFNASLGTYHDLLKIIKDKDFLDNEENEDILEDIVLTLTLFEDREMIEERLKTYAHLFDDKVMKQLKRRRYTGWGRLSRKLINGIRDKQSGKTILDFLKSDGFANRNFMQLIHDDSLTFKEDIQKAQVSGQGDSLHEHIANLAGSPAIKKGILQTVKVVDELVKVMGRHKPENIVIEMARENQTTQKGQKNSRERMKRIEEGIKELGSQILKEHPVENTQLQNEKLYLYYLQNGRDMYVDQELDINRLSDYDVDHIVPQSFLKDDSIDNKVLTRSDKARGKSDNVPSEEVVKKMKNYWRQLLNAKLITQRKFDNLTKAERGGLSELDKAGFIKRQLVETRQITKHVAQILDSRMNTKYDENDKLIREVKVITLKSKLVSDFRKDFQFYKVREINNYHHAHDAYLNAVVGTALIKKYPKLESEFVYGDYKVYDVRKMIAKSEQEIGKATAKYFFYSNIMNFFKTEITLANGEIRKRPLIETNGETGEIVWDKGRDFATVRKVLSMPQVNIVKKTEVQTGGFSKESILPKRNSDKLIARKKDWDPKKYGGFDSPTVAYSVLVVAKVEKGKSKKLKSVKELLGITIMERSSFEKNPIDFLEAKGYKEVKKDLIIKLPKYSLFELENGRKRMLASAGELQKGNELALPSKYVNFLYLASHYEKLKGSPEDNEQKQLFVEQHKHYLDEIIEQISEFSKRVILADANLDKVLSAYNKHRDKPIREQAENIIHLFTLTNLGAPAAFKYFDTTIDRKRYTSTKEVLDATLIHQSITGLYETRIDLSQLGGDGGGGGGGSPAPGGIPWLMKKPLQLTTLVPLQEYEERLLKQTMLTGSYKEKLQSLFLKYDALWQHWENQVGHRRIKPHHIATGTVNPRPQKQYPINPKAKASIQTVINDLLKQGVLIQQNSIMNTPVYPVPKPDGKWRMVLDYREVNKTIPLIAAQNQHSAGILSSIFRGKYKTTLDLSNGFWAHSITPESYWLTAFTWLGQQYCWTRLPQGFLNSPALFNADVVDLLKEVPNVQVYVDDIYISHDDPREHLEQLEKVFSLLLNAGYVVSLKKSEIAQHEVEFLGFNITKEGRGLTETFKQKLLNITPPRDLKQLQSILGLLNFARNFIPNFSELVKPLYNIIATAPGKYITWTTDNSQQLQNIISMLNSAENLEERNPEVRLIMKVNTSPSAGYIRFYNEFAKRPIMYLNYVYTKAEVKFTNTEKLLTTIHKGLIKALDLGMGQEILVYSPIVSMTKIQKTPLPERKALPIRWITWMSYLEDPRIQFHYDKTLPELQQVPTVTDDIIAKIKHPSEFSMVFYTDGSAIKHPNVNKSHNAGMGIAQVQFKPEFTVINTWSIPLGDHTAQLAEVAAVEFACKKALKIDGPVLIVTDSFYVAESVNKELPYWQSNGFFNNKKKPLKHVSKWKSIADCIQLKPDIIIIHEKGHQPTASTFHTEGNNLADKLATQGSYVVNAGKRTADGSEFEKRTADGSEFESPKKKAKVE

SEQ ID NO: 7006 - protein, 2085 aa, synthetic construct
MPAAKRVKLDGGDKKYSIGLDIGTNSVGWAVITDEYKVPSKKFKVLGNTDRHSIKKNLIGALLFDSGETAEATRLKRTARRRYTRRKNRICYLQEIFSNEMAKVDDSFFHRLEESFLVEEDKKHERHPIFGNIVDEVAYHEKYPTIYHLRKKLVDSTDKADLRLIYLALAHMIKFRGHFLIEGDLNPDNSDVDKLFIQLVQTYNQLFEENPINASGVDAKAILSARLSKSRRLENLIAQLPGEKKNGLFGNLIALSLGLTPNFKSNFDLAEDAKLQLSKDTYDDDLDNLLAQIGDQYADLFLAAKNLSDAILLSDILRVNTEITKAPLSASMIKRYDEHHQDLTLLKALVRQQLPEKYKEIFFDQSKNGYAGYIDGGASQEEFYKFIKPILEKMDGTEELLVKLNREDLLRKQRTFDNGSIPHQIHLGELHAILRRQEDFYPFLKDNREKIEKILTFRIPYYVGPLARGNSRFAWMTRKSEETITPWNFEEVVDKGASAQSFIERMTNFDKNLPNEKVLPKHSLLYEYFTVYNELTKVKYVTEGMRKPAFLSGEQKKAIVDLLFKTNRKVTVKQLKEDYFKKIECFDSVEISGVEDRFNASLGTYHDLLKIIKDKDFLDNEENEDILEDIVLTLTLFEDREMIEERLKTYAHLFDDKVMKQLKRRRYTGWGRLSRKLINGIRDKQSGKTILDFLKSDGFANRNFMQLIHDDSLTFKEDIQKAQVSGQGDSLHEHIANLAGSPAIKKGILQTVKVVDELVKVMGRHKPENIVIEMARENQTTQKGQKNSRERMKRIEEGIKELGSQILKEHPVENTQLQNEKLYLYYLQNGRDMYVDQELDINRLSDYDVDHIVPQSFLKDDSIDNKVLTRSDKARGKSDNVPSEEVVKKMKNYWRQLLNAKLITQRKFDNLTKAERGGLSELDKAGFIKRQLVETRQITKHVAQILDSRMNTKYDENDKLIREVKVITLKSKLVSDFRKDFQFYKVREINNYHHAHDAYLNAVVGTALIKKYPKLESEFVYGDYKVYDVRKMIAKSEQEIGKATAKYFFYSNIMNFFKTEITLANGEIRKRPLIETNGETGEIVWDKGRDFATVRKVLSMPQVNIVKKTEVQTGGFSKESILPKRNSDKLIARKKDWDPKKYGGFDSPTVAYSVLVVAKVEKGKSKKLKSVKELLGITIMERSSFEKNPIDFLEAKGYKEVKKDLIIKLPKYSLFELENGRKRMLASAGELQKGNELALPSKYVNFLYLASHYEKLKGSPEDNEQKQLFVEQHKHYLDEIIEQISEFSKRVILADANLDKVLSAYNKHRDKPIREQAENIIHLFTLTNLGAPAAFKYFDTTIDRKRYTSTKEVLDATLIHQSITGLYETRIDLSQLGGDGGGGGGGSPAPGGIPWLMKKPLQLTTLVPLQEYEERLLKQTMLTGSYKEKLQSLFLKYDALWQHWENQVGHRRIKPHHIATGTVNPRPQKQYPINPKAKASIQTVINDLLKQGVLIQQNSIMNTPVYPVPKPDGKWRMVLDYREVNKTIPLIAAQNQHSAGILSSIFRGKYKTTLDLSNGFWAHSITPESYWLTAFTWLGQQYCWTRLPQGFLNSPALFNADVVDLLKEVPNVQVYVDDIYISHDDPREHLEQLEKVFSLLLNAGYVVSLKKSEIAQHEVEFLGFNITKEGRGLTETFKQKLLNITPPRDLKQLQSILGKLNFARNFIPNFSELVKPLYNIIATAPGKYITWTTDNSQQLQNIISMLNSAENLEERNPEVRLIMKVNTSPSAGYIRFYNEFAKRPIMYLNYVYTKAEVKFTNTEKLLTTIHKGLIKALDLGMGQEILVYSPIVSMTKIQKTPLPERKALPIRWITWMSYLEDPRIQFHYDKTLPELQQVPTVTDDIIAKIKHPSEFSMVFYTDGSAIKHPNVNKSHNAGMGIAQVQFKPEFTVINTWSIPLGDHTAQLAEVAAVEFACKKALKIDGPVLIVTDSFYVAESVNKELPYWQSNGFFNNKKKPLKHVSKWKSIADCIQLKPDIIIIHEKGHQPTASTFHTEGNNLADKLATQGSYVVNAGKRTADGSEFEKRTADGSEFESPKKKAKVE

SEQ ID NO: 7007 - protein, 2174 aa, synthetic construct
MPAAKRVKLDGGDKKYSIGLDIGTNSVGWAVITDEYKVPSKKFKVLGNTDRHSIKKNLIGALLFDSGETAEATRLKRTARRRYTRRKNRICYLQEIFSNEMAKVDDSFFHRLEESFLVEEDKKHERHPIFGNIVDEVAYHEKYPTIYHLRKKLVDSTDKADLRLIYLALAHMIKFRGHFLIEGDLNPDNSDVDKLFIQLVQTYNQLFEENPINASGVDAKAILSARLSKSRRLENLIAQLPGEKKNGLFGNLIALSLGLTPNFKSNFDLAEDAKLQLSKDTYDDDLDNLLAQIGDQYADLFLAAKNLSDAILLSDILRVNTEITKAPLSASMIKRYDEHHQDLTLLKALVRQQLPEKYKEIFFDQSKNGYAGYIDGGASQEEFYKFIKPILEKMDGTEELLVKLNREDLLRKQRTFDNGSIPHQIHLGELHAILRRQEDFYPFLKDNREKIEKILTFRIPYYVGPLARGNSRFAWMTRKSEETITPWNFEEVVDKGASAQSFIERMTNFDKNLPNEKVLPKHSLLYEYFTVYNELTKVKYVTEGMRKPAFLSGEQKKAIVDLLFKTNRKVTVKQLKEDYFKKIECFDSVEISGVEDRFNASLGTYHDLLKIIKDKDFLDNEENEDILEDIVLTLTLFEDREMIEERLKTYAHLFDDKVMKQLKRRRYTGWGRLSRKLINGIRDKQSGKTILDFLKSDGFANRNFMQLIHDDSLTFKEDIQKAQVSGQGDSLHEHIANLAGSPAIKKGILQTVKVVDELVKVMGRHKPENIVIEMARENQTTQKGQKNSRERMKRIEEGIKELGSQILKEHPVENTQLQNEKLYLYYLQNGRDMYVDQELDINRLSDYDVDHIVPQSFLKDDSIDNKVLTRSDKARGKSDNVPSEEVVKKMKNYWRQLLNAKLITQRKFDNLTKAERGGLSELDKAGFIKRQLVETRQITKHVAQILDSRMNTKYDENDKLIREVKVITLKSKLVSDFRKDFQFYKVREINNYHHAHDAYLNAVVGTALIKKYPKLESEFVYGDYKVYDVRKMIAKSEQEIGKATAKYFFYSNIMNFFKTEITLANGEIRKRPLIETNGETGEIVWDKGRDFATVRKVLSMPQVNIVKKTEVQTGGFSKESILPKRNSDKLIARKKDWDPKKYGGFDSPTVAYSVLVVAKVEKGKSKKLKSVKELLGITIMERSSFEKNPIDFLEAKGYKEVKKDLIIKLPKYSLFELENGRKRMLASAGELQKGNELALPSKYVNFLYLASHYEKLKGSPEDNEQKQLFVEQHKHYLDEIIEQISEFSKRVILADANLDKVLSAYNKHRDKPIREQAENIIHLFTLTNLGAPAAFKYFDTTIDRKRYTSTKEVLDATLIHQSITGLYETRIDLSQLGGDGGGGGGGSPAPGGMDPLQLLQPLEAEIKGTKLKAHWNSGATITCVPQAFLEEEVPIKNIWIKTIHGEKEQPVYYLTFKIQGRKVEAEVISSPYDYILVSPSDIPWLMKKPLQLTTLVPLQEYEERLLKQTMLTGSYKEKLQSLFLKYDALWQHWENQVGHRRIKPHHIATGTVNPRPQKQYPINPKAKASIQTVINDLLKQGVLIQQNSIMNTPVYPVPKPDGKWRMVLDYREVNKTIPLIAAQNQHSAGILSSIFRGKYKTTLDLSNGFWAHSITPESYWLTAFTWLGQQYCWTRLPQGFLNSPALFNADVVDLLKEVPNVQVYVDDIYISHDDPREHLEQLEKVFSLLLNAGYVVSLKKSEIAQHEVEFLGFNITKEGRGLTETFKQKLLNITPPRDLKQLQSILGKLNFARNFIPNFSELVKPLYNIIATAPGKYITWTTDNSQQLQNIISMLNSAENLEERNPEVRLIMKVNTSPSAGYIRFYNEFAKRPIMYLNYVYTKAEVKFTNTEKLLTTIHKGLIKALDLGMGQEILVYSPIVSMTKIQKTPLPERKALPIRWITWMSYLEDPRIQFHYDKTLPELQQVPTVTDDIIAKIKHPSEFSMVFYTDGSAIKHPNVNKSHNAGMGIAQVQFKPEFTVINTWSIPLGDHTAQLAEVAAVEFACKKALKIDGPVLIVTDSFYVAESVNKELPYWQSNGFFNNKKKPLKHVSKWKSIADCIQLKPDIIIIHEKGHQPTASTFHTEGNNLADKLATQGSYVVNAGKRTADGSEFEKRTADGSEFESPKKKAKVE

SEQ ID NO: 7008 - protein, 2092 aa, synthetic construct
MPAAKRVKLDGGDKKYSIGLDIGTNSVGWAVITDEYKVPSKKFKVLGNTDRHSIKKNLIGALLFDSGETAEATRLKRTARRRYTRRKNRICYLQEIFSNEMAKVDDSFFHRLEESFLVEEDKKHERHPIFGNIVDEVAYHEKYPTIYHLRKKLVDSTDKADLRLIYLALAHMIKFRGHFLIEGDLNPDNSDVDKLFIQLVQTYNQLFEENPINASGVDAKAILSARLSKSRRLENLIAQLPGEKKNGLFGNLIALSLGLTPNFKSNFDLAEDAKLQLSKDTYDDDLDNLLAQIGDQYADLFLAAKNLSDAILLSDILRVNTEITKAPLSASMIKRYDEHHQDLTLLKALVRQQLPEKYKEIFFDQSKNGYAGYIDGGASQEEFYKFIKPILEKMDGTEELLVKLNREDLLRKQRTFDNGSIPHQIHLGELHAILRRQEDFYPFLKDNREKIEKILTFRIPYYVGPLARGNSRFAWMTRKSEETITPWNFEEVVDKGASAQSFIERMTNFDKNLPNEKVLPKHSLLYEYFTVYNELTKVKYVTEGMRKPAFLSGEQKKAIVDLLFKTNRKVTVKQLKEDYFKKIECFDSVEISGVEDRFNASLGTYHDLLKIIKDKDFLDNEENEDILEDIVLTLTLFEDREMIEERLKTYAHLFDDKVMKQLKRRRYTGWGRLSRKLINGIRDKQSGKTILDFLKSDGFANRNFMQLIHDDSLTFKEDIQKAQVSGQGDSLHEHIANLAGSPAIKKGILQTVKVVDELVKVMGRHKPENIVIEMARENQTTQKGQKNSRERMKRIEEGIKELGSQILKEHPVENTQLQNEKLYLYYLQNGRDMYVDQELDINRLSDYDVDHIVPQSFLKDDSIDNKVLTRSDKARGKSDNVPSEEVVKKMKNYWRQLLNAKLITQRKFDNLTKAERGGLSELDKAGFIKRQLVETRQITKHVAQILDSRMNTKYDENDKLIREVKVITLKSKLVSDFRKDFQFYKVREINNYHHAHDAYLNAVVGTALIKKYPKLESEFVYGDYKVYDVRKMIAKSEQEIGKATAKYFFYSNIMNFFKTEITLANGEIRKRPLIETNGETGEIVWDKGRDFATVRKVLSMPQVNIVKKTEVQTGGFSKESILPKRNSDKLIARKKDWDPKKYGGFDSPTVAYSVLVVAKVEKGKSKKLKSVKELLGITIMERSSFEKNPIDFLEAKGYKEVKKDLIIKLPKYSLFELENGRKRMLASAGELQKGNELALPSKYVNFLYLASHYEKLKGSPEDNEQKQLFVEQHKHYLDEIIEQISEFSKRVILADANLDKVLSAYNKHRDKPIREQAENIIHLFTLTNLGAPAAFKYFDTTIDRKRYTSTKEVLDATLIHQSITGLYETRIDLSQLGGDGGGGGGGSPAPGGVLNLEEEYRLHEKPVPSSIDPSWLQLFPTVWAERAGMGLANQVPPVVVELRSGASPVAVRQYPMSKEAREGIRPHIQRFLDLGVLVPCQSPWNTPLLPVKKPGTNDYRPVQDLREINKRVQDIHPTVPNPYNLLSSLPPSHTWYSVLDLKDAFFCLKLHPNSQPLFAFEWRDPEKGNTGQLTWTRLPQGFKNSPTLFNEALHRDLAPFRALNPQVVLLQYVDDLLVAAPTYRDCKEGTQKLLQELSKLGYRVSAKKAQLCQKEVTYLGYLLKEGKRWLTPARKATVMKIPPPTTPRQVREFLGKAGFCRLFIPGFASLAAPLYPLTKPSIPFIWTEEHQKAFDRIKEALLSAPALALPDLTKPFTLYVDERAGVARGVLTQTLGPWRRPVAYLSKKLDPVASGWPTCLKAVAAVALLLKDADKLTLGQNVTVIASHSLESIVRQPPDRWMTNARMTHYQSLLLNERVSFAPPAVLNPATLLPVESEATPVHRCSEILAEETGTRRDLKDQPLPGVPAWYTDGSSFIAEGKRRAGAAIVDGKRTVWASSLPEGTSAQKAELVALTQALRLAEGKDINIYTDSRYAFATAHIHGAIYKQRGWLTSAGKDIKNKEEILALLEAIHLPKRVAIIHCPGHQKGNDPVATGNRRADEAAKQAALSTRVLAETTKPAGKRTADGSEFEKRTADGSEFESPKKKAKVE

SEQ ID NO: 7009 - protein, 2096 aa, synthetic construct
MPAAKRVKLDGGDKKYSIGLDIGTNSVGWAVITDEYKVPSKKFKVLGNTDRHSIKKNLIGALLFDSGETAEATRLKRTARRRYTRRKNRICYLQEIFSNEMAKVDDSFFHRLEESFLVEEDKKHERHPIFGNIVDEVAYHEKYPTIYHLRKKLVDSTDKADLRLIYLALAHMIKFRGHFLIEGDLNPDNSDVDKLFIQLVQTYNQLFEENPINASGVDAKAILSARLSKSRRLENLIAQLPGEKKNGLFGNLIALSLGLTPNFKSNFDLAEDAKLQLSKDTYDDDLDNLLAQIGDQYADLFLAAKNLSDAILLSDILRVNTEITKAPLSASMIKRYDEHHQDLTLLKALVRQQLPEKYKEIFFDQSKNGYAGYIDGGASQEEFYKFIKPILEKMDGTEELLVKLNREDLLRKQRTFDNGSIPHQIHLGELHAILRRQEDFYPFLKDNREKIEKILTFRIPYYVGPLARGNSRFAWMTRKSEETITPWNFEEVVDKGASAQSFIERMTNFDKNLPNEKVLPKHSLLYEYFTVYNELTKVKYVTEGMRKPAFLSGEQKKAIVDLLFKTNRKVTVKQLKEDYFKKIECFDSVEISGVEDRFNASLGTYHDLLKIIKDKDFLDNEENEDILEDIVLTLTLFEDREMIEERLKTYAHLFDDKVMKQLKRRRYTGWGRLSRKLINGIRDKQSGKTILDFLKSDGFANRNFMQLIHDDSLTFKEDIQKAQVSGQGDSLHEHIANLAGSPAIKKGILQTVKVVDELVKVMGRHKPENIVIEMARENQTTQKGQKNSRERMKRIEEGIKELGSQILKEHPVENTQLQNEKLYLYYLQNGRDMYVDQELDINRLSDYDVDHIVPQSFLKDDSIDNKVLTRSDKARGKSDNVPSEEVVKKMKNYWRQLLNAKLITQRKFDNLTKAERGGLSELDKAGFIKRQLVETRQITKHVAQILDSRMNTKYDENDKLIREVKVITLKSKLVSDFRKDFQFYKVREINNYHHAHDAYLNAVVGTALIKKYPKLESEFVYGDYKVYDVRKMIAKSEQEIGKATAKYFFYSNIMNFFKTEITLANGEIRKRPLIETNGETGEIVWDKGRDFATVRKVLSMPQVNIVKKTEVQTGGFSKESILPKRNSDKLIARKKDWDPKKYGGFDSPTVAYSVLVVAKVEKGKSKKLKSVKELLGITIMERSSFEKNPIDFLEAKGYKEVKKDLIIKLPKYSLFELENGRKRMLASAGELQKGNELALPSKYVNFLYLASHYEKLKGSPEDNEQKQLFVEQHKHYLDEIIEQISEFSKRVILADANLDKVLSAYNKHRDKPIREQAENIIHLFTLTNLGAPAAFKYFDTTIDRKRYTSTKEVLDATLIHQSITGLYETRIDLSQLGGDGGGGGPAPGGSGGTAPLEEEYRLFLEAPIQNVTLLEQWKREIPKVWAEINPPGLASTQAPIHVQLLSTALPVRVRQYPITLEAKRSLRETIRKFRAAGILRPVHSPWNTPLLPVRKSGTSEYRMVQDLREVNKRVETIHPTVPNPYTLLSLLPPDRIWYSVLDLKDAFFCIPLAPESQLIFAFEWADAEEGESGQLTWTRLPQGFKNSPTLFNEALNRDLQGFRLDHPSVSLLQYVDDLLIAADTQAACLSATRDLLMTLAELGYRVSGKKAQLCQEEVTYLGFKIHKGSRSLSNSRTQAILQIPVPKTKRQVREFLGTIGYCRLWIPGFAELAQPLYAATRPGNDPLVWGEKEEEAFQSLKLALTQPPALALPSLDKPFQLFVEETSGAAKGVLTQALGPWKRPVAYLSKRLDPVAAGWPRCLRAIAAAALLTREASKLTFGQDIEITSSHNLESLLRSPPDKWLTNARITQYQVLLLDPPRVRFKQTAALNPATLLPETDDTLPIHHCLDTLDSLTSTRPDLTDQPLAQAEATLFTDGSSYIRDGKRYAGAAVVTLDSVIWAEPLPIGTSAQKAELIALTKALEWSKDKSVNIYTDSRYAFATLHVHGMIYRERGWLTAGGKAIKNAPEILALLTAVWLPKRVAVMHCKGHQKDDAPTSTGNRRADEVAREVAIRPLSTQATISAGKRTADGSEFEKRTADGSEFESPKKKAKVE

SEQ ID NO: 7010 - protein, 2216 aa, synthetic construct
MPAAKRVKLDGGDKKYSIGLDIGTNSVGWAVITDEYKVPSKKFKVLGNTDRHSIKKNLIGALLFDSGETAEATRLKRTARRRYTRRKNRICYLQEIFSNEMAKVDDSFFHRLEESFLVEEDKKHERHPIFGNIVDEVAYHEKYPTIYHLRKKLVDSTDKADLRLIYLALAHMIKFRGHFLIEGDLNPDNSDVDKLFIQLVQTYNQLFEENPINASGVDAKAILSARLSKSRRLENLIAQLPGEKKNGLFGNLIALSLGLTPNFKSNFDLAEDAKLQLSKDTYDDDLDNLLAQIGDQYADLFLAAKNLSDAILLSDILRVNTEITKAPLSASMIKRYDEHHQDLTLLKALVRQQLPEKYKEIFFDQSKNGYAGYIDGGASQEEFYKFIKPILEKMDGTEELLVKLNREDLLRKQRTFDNGSIPHQIHLGELHAILRRQEDFYPFLKDNREKIEKILTFRIPYYVGPLARGNSRFAWMTRKSEETITPWNFEEVVDKGASAQSFIERMTNFDKNLPNEKVLPKHSLLYEYFTVYNELTKVKYVTEGMRKPAFLSGEQKKAIVDLLFKTNRKVTVKQLKEDYFKKIECFDSVEISGVEDRFNASLGTYHDLLKIIKDKDFLDNEENEDILEDIVLTLTLFEDREMIEERLKTYAHLFDDKVMKQLKRRRYTGWGRLSRKLINGIRDKQSGKTILDFLKSDGFANRNFMQLIHDDSLTFKEDIQKAQVSGQGDSLHEHIANLAGSPAIKKGILQTVKVVDELVKVMGRHKPENIVIEMARENQTTQKGQKNSRERMKRIEEGIKELGSQILKEHPVENTQLQNEKLYLYYLQNGRDMYVDQELDINRLSDYDVDHIVPQSFLKDDSIDNKVLTRSDKARGKSDNVPSEEVVKKMKNYWRQLLNAKLITQRKFDNLTKAERGGLSELDKAGFIKRQLVETRQITKHVAQILDSRMNTKYDENDKLIREVKVITLKSKLVSDFRKDFQFYKVREINNYHHAHDAYLNAVVGTALIKKYPKLESEFVYGDYKVYDVRKMIAKSEQEIGKATAKYFFYSNIMNFFKTEITLANGEIRKRPLIETNGETGEIVWDKGRDFATVRKVLSMPQVNIVKKTEVQTGGFSKESILPKRNSDKLIARKKDWDPKKYGGFDSPTVAYSVLVVAKVEKGKSKKLKSVKELLGITIMERSSFEKNPIDFLEAKGYKEVKKDLIIKLPKYSLFELENGRKRMLASAGELQKGNELALPSKYVNFLYLASHYEKLKGSPEDNEQKQLFVEQHKHYLDEIIEQISEFSKRVILADANLDKVLSAYNKHRDKPIREQAENIIHLFTLTNLGAPAAFKYFDTTIDRKRYTSTKEVLDATLIHQSITGLYETRIDLSQLGGDGGGGGPAPGGSGGTLGDQGSRGSDPLPEPRVTLTVEGIPTEFLVNTGAEHSVLTKPMGKMGSKRTVVAGATGSKVYPWTTKRLLKIGQKQVTHSFLVIPECPAPLLGRDLLTKLKAQIQFSTEGPQVTWEDRPAMCLVLNLEEEYRLHEKPVPPSIDPSWLQLFPMVWAEKAGMGLANQVPPVVVELKSDASPVAVRQYPMSKEAREGIRPHIQRFLDLGILVPCQSPWNTPLLPVKKPGTNDYRPVQDLREVNKRVQDIHPTVPNPYNLLSSLPPSHTWYSVLDLKDAFFCLKLHPNSQPLFAFEWRDPEKGNTGQLTWTRLPQGFKNSPTLFDEALHRDLASFRALNPQVVMLQYVDDLLVAAPTYRDCKEGTRRLLQELSKLGYRVSAKKAQLCREEVTYLGYLLKGGKRWLTPARKATVMKIPTPTTPRQVREFLGTAGFCRLWIPGFASLAAPLYPLTREKVPFTWTEAHQEAFGRIKEALLSAPALALPDLTKPFALYVDEKEGVARGVLTQTLGPWRRPVAYLSKKLDPVASGWPTCLKAIAAVALLLKDADKLTLGQNVLVIAPHNLESIVRQPPDRWMTNARMTHYQSLLLNERVSFAPPAILNPATLLPVESDDTPIHICSEILAEETGTRPDLRDQPLPGVPAWYTDGSSFIMDGRRQAGAAIVDNKRTVWASNLPEGTSAQKAELIALTQALRLAEGKSINIYTDSRYAFATAHVHGAIYKQRGLLTSAGKDIKNKEEILALLEAIHLPKRVAIIHCPGHQRGTDPVATGNRKADEAAKQAAQSTRILTETTKNAGKRTADGSEFEKRTADGSEFESPKKKAKVE

SEQ ID NO: 7011 - protein, 2125 aa, synthetic construct
MPAAKRVKLDGGDKKYSIGLDIGTNSVGWAVITDEYKVPSKKFKVLGNTDRHSIKKNLIGALLFDSGETAEATRLKRTARRRYTRRKNRICYLQEIFSNEMAKVDDSFFHRLEESFLVEEDKKHERHPIFGNIVDEVAYHEKYPTIYHLRKKLVDSTDKADLRLIYLALAHMIKFRGHFLIEGDLNPDNSDVDKLFIQLVQTYNQLFEENPINASGVDAKAILSARLSKSRRLENLIAQLPGEKKNGLFGNLIALSLGLTPNFKSNFDLAEDAKLQLSKDTYDDDLDNLLAQIGDQYADLFLAAKNLSDAILLSDILRVNTEITKAPLSASMIKRYDEHHQDLTLLKALVRQQLPEKYKEIFFDQSKNGYAGYIDGGASQEEFYKFIKPILEKMDGTEELLVKLNREDLLRKQRTFDNGSIPHQIHLGELHAILRRQEDFYPFLKDNREKIEKILTFRIPYYVGPLARGNSRFAWMTRKSEETITPWNFEEVVDKGASAQSFIERMTNFDKNLPNEKVLPKHSLLYEYFTVYNELTKVKYVTEGMRKPAFLSGEQKKAIVDLLFKTNRKVTVKQLKEDYFKKIECFDSVEISGVEDRFNASLGTYHDLLKIIKDKDFLDNEENEDILEDIVLTLTLFEDREMIEERLKTYAHLFDDKVMKQLKRRRYTGWGRLSRKLINGIRDKQSGKTILDFLKSDGFANRNFMQLIHDDSLTFKEDIQKAQVSGQGDSLHEHIANLAGSPAIKKGILQTVKVVDELVKVMGRHKPENIVIEMARENQTTQKGQKNSRERMKRIEEGIKELGSQILKEHPVENTQLQNEKLYLYYLQNGRDMYVDQELDINRLSDYDVDHIVPQSFLKDDSIDNKVLTRSDKARGKSDNVPSEEVVKKMKNYWRQLLNAKLITQRKFDNLTKAERGGLSELDKAGFIKRQLVETRQITKHVAQILDSRMNTKYDENDKLIREVKVITLKSKLVSDFRKDFQFYKVREINNYHHAHDAYLNAVVGTALIKKYPKLESEFVYGDYKVYDVRKMIAKSEQEIGKATAKYFFYSNIMNFFKTEITLANGEIRKRPLIETNGETGEIVWDKGRDFATVRKVLSMPQVNIVKKTEVQTGGFSKESILPKRNSDKLIARKKDWDPKKYGGFDSPTVAYSVLVVAKVEKGKSKKLKSVKELLGITIMERSSFEKNPIDFLEAKGYKEVKKDLIIKLPKYSLFELENGRKRMLASAGELQKGNELALPSKYVNFLYLASHYEKLKGSPEDNEQKQLFVEQHKHYLDEIIEQISEFSKRVILADANLDKVLSAYNKHRDKPIREQAENIIHLFTLTNLGAPAAFKYFDTTIDRKRYTSTKEVLDATLIHQSITGLYETRIDLSQLGGDGGGGGPAPGGSGGLLGRDLLTKLKAQIQFSTEGPQVTWEDRPAMCLVLNLEEEYRLHEKPVPPSIDPSWLQLFPMVWAEKAGMGLANQVPPVVVELKSDASPVAVRQYPMSKEAREGIRPHIQRFLDLGILVPCQSPWNTPLLPVKKPGTNDYRPVQDLREVNKRVQDIHPTVPNPYNLLSSLPPSHTWYSVLDLKDAFFCLKLHPNSQPLFAFEWRDPEKGNTGQLTWTRLPQGFKNSPTLFNEALHRDLASFRALNPQVVMLQYVDDLLVAAPTYRDCKEGTRRLLQELSKLGYRVSAKKAQLCREEVTYLGYLLKGGKRWLTPARKATVMKIPTPTTPRQVREFLGTAGFCRLWIPGFASLAAPLYPLTRPKVPFTWTEAHQEAFGRIKEALLSAPALALPDLTKPFALYVDEKEGVARGVLTQTLGPWRRPVAYLSKKLDPVASGWPTCLKAIAAVALLLKDADKLTLGQNVLVIAPHNLESIVRQPPDRWMTNARMTHYQSLLLNERVSFAPPAILNPATLLPVESDDTPIHICSEILAEETGTRPDLRDQPLPGVPAWYTDGSSFIMDGRRQAGAAIVDNKRTVWASNLPEGTSAQKAELIALTQALRLAEGKSINIYTDSRYAFATAHVHGAIYKQRGWLTSAGKDIKNKEEILALLEAIHLPKRVAIIHCPGHQRGTDPVATGNRKADEAAKQAAQSTRILTETTKNAGKRTADGSEFEKRTADGSEFESPKKKAKVE

SEQ ID NO: 7012 - protein, 2094 aa, synthetic construct
MPAAKRVKLDGGDKKYSIGLDIGTNSVGWAVITDEYKVPSKKFKVLGNTDRHSIKKNLIGALLFDSGETAEATRLKRTARRRYTRRKNRICYLQEIFSNEMAKVDDSFFHRLEESFLVEEDKKHERHPIFGNIVDEVAYHEKYPTIYHLRKKLVDSTDKADLRLIYLALAHMIKFRGHFLIEGDLNPDNSDVDKLFIQLVQTYNQLFEENPINASGVDAKAILSARLSKSRRLENLIAQLPGEKKNGLFGNLIALSLGLTPNFKSNFDLAEDAKLQLSKDTYDDDLDNLLAQIGDQYADLFLAAKNLSDAILLSDILRVNTEITKAPLSASMIKRYDEHHQDLTLLKALVRQQLPEKYKEIFFDQSKNGYAGYIDGGASQEEFYKFIKPILEKMDGTEELLVKLNREDLLRKQRTFDNGSIPHQIHLGELHAILRRQEDFYPFLKDNREKIEKILTFRIPYYVGPLARGNSRFAWMTRKSEETITPWNFEEVVDKGASAQSFIERMTNFDKNLPNEKVLPKHSLLYEYFTVYNELTKVKYVTEGMRKPAFLSGEQKKAIVDLLFKTNRKVTVKQLKEDYFKKIECFDSVEISGVEDRFNASLGTYHDLLKIIKDKDFLDNEENEDILEDIVLTLTLFEDREMIEERLKTYAHLFDDKVMKQLKRRRYTGWGRLSRKLINGIRDKQSGKTILDFLKSDGFANRNFMQLIHDDSLTFKEDIQKAQVSGQGDSLHEHIANLAGSPAIKKGILQTVKVVDELVKVMGRHKPENIVIEMARENQTTQKGQKNSRERMKRIEEGIKELGSQILKEHPVENTQLQNEKLYLYYLQNGRDMYVDQELDINRLSDYDVDHIVPQSFLKDDSIDNKVLTRSDKARGKSDNVPSEEVVKKMKNYWRQLLNAKLITQRKFDNLTKAERGGLSELDKAGFIKRQLVETRQITKHVAQILDSRMNTKYDENDKLIREVKVITLKSKLVSDFRKDFQFYKVREINNYHHAHDAYLNAVVGTALIKKYPKLESEFVYGDYKVYDVRKMIAKSEQEIGKATAKYFFYSNIMNFFKTEITLANGEIRKRPLIETNGETGEIVWDKGRDFATVRKVLSMPQVNIVKKTEVQTGGFSKESILPKRNSDKLIARKKDWDPKKYGGFDSPTVAYSVLVVAKVEKGKSKKLKSVKELLGITIMERSSFEKNPIDFLEAKGYKEVKKDLIIKLPKYSLFELENGRKRMLASAGELQKGNELALPSKYVNFLYLASHYEKLKGSPEDNEQKQLFVEQHKHYLDEIIEQISEFSKRVILADANLDKVLSAYNKHRDKPIREQAENIIHLFTLTNLGAPAAFKYFDTTIDRKRYTSTKEVLDATLIHQSITGLYETRIDLSQLGGDGGGGGPAPGGSGGTLGIEDEYRLHETSTEPDVSLGSTWLSDFPQAWAETGGMGLAVRQAPLIIPLKATSTPVSIQQYPMSHEARLGIKPHIQRLLDQGILVPCQSPWNTPLLPVKKPGTNDYRPVQDLREVNKRVEDIHPTVPNPYNLLSGLPPSHQWYTVLDLKDAFFCLRLHPTSQPLFAFEWRDPGMGISGQLTWTRLPQGFKNSPTLFNEALHRDLADFRIQHPDLILLQYVDDILLAATSELDCQQGTRALLQTLGDLGYRASAKKAQICQKQVKYLGYLLREGQRWLTEARKETVMGQPVPKTPRQLREFLGTAGFCRLWIPGFAEMAAPLYPLTKPGTLFSWGPDQQKAYQEIKQALLTAPALGLPDLTKPFELFVDEKQGYAKGVLTQKLGPWRRPVAYLSKKLDPVAAGWPPCLRMVAAIAVLTKDAGKLTMGQPLVILAPHAVEALVKQPPDRWLSNARMTHYQAMLLDTDRVQFGPVVALNPATLLPLPEEGAPHDCLEILAETHGTRPDLTDQPIPDADHTWYTDGSSFLQEGQRKAGAAVTTETEVIWAGALPAGTSAQRAELIALTQALKMAEGKRLNVYTDSRYAFATAHIHGEIYRRRGWLTSEGREIKNKSEILALLKALFLPKRLSIIHCLGHQKGDSAEARGNRLADQAAREAAIKTPPDTSTLLAGKRTADGSEFEKRTADGSEFESPKKKAKVE

SEQ ID NO: 7013 - protein, 2086 aa, synthetic construct
MPAAKRVKLDGGDKKYSIGLDIGTNSVGWAVITDEYKVPSKKFKVLGNTDRHSIKKNLIGALLFDSGETAEATRLKRTARRRYTRRKNRICYLQEIFSNEMAKVDDSFFHRLEESFLVEEDKKHERHPIFGNIVDEVAYHEKYPTIYHLRKKLVDSTDKADLRLIYLALAHMIKFRGHFLIEGDLNPDNSDVDKLFIQLVQTYNQLFEENPINASGVDAKAILSARLSKSRRLENLIAQLPGEKKNGLFGNLIALSLGLTPNFKSNFDLAEDAKLQLSKDTYDDDLDNLLAQIGDQYADLFLAAKNLSDAILLSDILRVNTEITKAPLSASMIKRYDEHHQDLTLLKALVRQQLPEKYKEIFFDQSKNGYAGYIDGGASQEEFYKFIKPILEKMDGTEELLVKLNREDLLRKQRTFDNGSIPHQIHLGELHAILRRQEDFYPFLKDNREKIEKILTFRIPYYVGPLARGNSRFAWMTRKSEETITPWNFEEVVDKGASAQSFIERMTNFDKNLPNEKVLPKHSLLYEYFTVYNELTKVKYVTEGMRKPAFLSGEQKKAIVDLLFKTNRKVTVKQLKEDYFKKIECFDSVEISGVEDRFNASLGTYHDLLKIIKDKDFLDNEENEDILEDIVLTLTLFEDREMIEERLKTYAHLFDDKVMKQLKRRRYTGWGRLSRKLINGIRDKQSGKTILDFLKSDGFANRNFMQLIHDDSLTFKEDIQKAQVSGQGDSLHEHIANLAGSPAIKKGILQTVKVVDELVKVMGRHKPENIVIEMARENQTTQKGQKNSRERMKRIEEGIKELGSQILKEHPVENTQLQNEKLYLYYLQNGRDMYVDQELDINRLSDYDVDHIVPQSFLKDDSIDNKVLTRSDKARGKSDNVPSEEVVKKMKNYWRQLLNAKLITQRKFDNLTKAERGGLSELDKAGFIKRQLVETRQITKHVAQILDSRMNTKYDENDKLIREVKVITLKSKLVSDFRKDFQFYKVREINNYHHAHDAYLNAVVGTALIKKYPKLESEFVYGDYKVYDVRKMIAKSEQEIGKATAKYFFYSNIMNFFKTEITLANGEIRKRPLIETNGETGEIVWDKGRDFATVRKVLSMPQVNIVKKTEVQTGGFSKESILPKRNSDKLIARKKDWDPKKYGGFDSPTVAYSVLVVAKVEKGKSKKLKSVKELLGITIMERSSFEKNPIDFLEAKGYKEVKKDLIIKLPKYSLFELENGRKRMLASAGELQKGNELALPSKYVNFLYLASHYEKLKGSPEDNEQKQLFVEQHKHYLDEIIEQISEFSKRVILADANLDKVLSAYNKHRDKPIREQAENIIHLFTLTNLGAPAAFKYFDTTIDRKRYTSTKEVLDATLIHQSITGLYETRIDLSQLGGDGGGGGPAPGGSGGLDDEYRLYSPLVKPDQNIQFWLEQFPQAWAETAGMGLAKQVPPQVIQLKASATPVSVRQYPLSKEAQEGIRPHVQRLIQQGILVPVQSPWNTPLLPVRKPGTNDYRPVQDLREVNKRVQDIHPTVPNPYNLLCALPPQRSWYTVLDLKDAFFCLRLHPTSQPLFAFEWRDPGTGRTGQLTWTRLPQGFKNSPTIFNEALHRDLANFRIQHPQVTLLQYVDDLLLAGATKQDCLEGTKALLLELSDLGYRASAKKAQICRREVTYLGYSLRDGQRWLTEARKKTVVQIPAPTTAKQVREFLGKAGFCRLFIPGFATLAAPLYPLTKPKGEFSWAPEHQKAFDAIKKALLSAPALALPDVTKPFTLYVDERKGVARGVLTQTLGPWRRPVAYLSKKLDPVASGWPVCLKAIAAVAILVKDADKLTLGQNITVIAPHALENIVRQPPDRWMTNARMTHYQSLLLTERVTFAPPAALNPATLLPEETDEPVTHDCHQLLIEETGVRKDLTDIPLTGEVLTWFTDGSSYVVEGKRMAGAAVVDGTRTIWASSLPEGTSAQKAELMALTQALRLAEGKSINIYTDSRYAFATAHVHGAIYKQRGWLTSAGREIKNKEEILSLLEALHLPKRLAIIHCPGHQKAKDPISRGNQMADRVAKQAAQGVNLLPAGKRTADGSEFEKRTADGSEFESPKKKAKVE

SEQ ID NO: 7014 - protein, 2088 aa, synthetic construct
MPAAKRVKLDGGDKKYSIGLDIGTNSVGWAVITDEYKVPSKKFKVLGNTDRHSIKKNLIGALLFDSGETAEATRLKRTARRRYTRRKNRICYLQEIFSNEMAKVDDSFFHRLEESFLVEEDKKHERHPIFGNIVDEVAYHEKYPTIYHLRKKLVDSTDKADLRLIYLALAHMIKFRGHFLIEGDLNPDNSDVDKLFIQLVQTYNQLFEENPINASGVDAKAILSARLSKSRRLENLIAQLPGEKKNGLFGNLIALSLGLTPNFKSNFDLAEDAKLQLSKDTYDDDLDNLLAQIGDQYADLFLAAKNLSDAILLSDILRVNTEITKAPLSASMIKRYDEHHQDLTLLKALVRQQLPEKYKEIFFDQSKNGYAGYIDGGASQEEFYKFIKPILEKMDGTEELLVKLNREDLLRKQRTFDNGSIPHQIHLGELHAILRRQEDFYPFLKDNREKIEKILTFRIPYYVGPLARGNSRFAWMTRKSEETITPWNFEEVVDKGASAQSFIERMTNFDKNLPNEKVLPKHSLLYEYFTVYNELTKVKYVTEGMRKPAFLSGEQKKAIVDLLFKTNRKVTVKQLKEDYFKKIECFDSVEISGVEDRFNASLGTYHDLLKIIKDKDFLDNEENEDILEDIVLTLTLFEDREMIEERLKTYAHLFDDKVMKQLKRRRYTGWGRLSRKLINGIRDKQSGKTILDFLKSDGFANRNFMQLIHDDSLTFKEDIQKAQVSGQGDSLHEHIANLAGSPAIKKGILQTVKVVDELVKVMGRHKPENIVIEMARENQTTQKGQKNSRERMKRIEEGIKELGSQILKEHPVENTQLQNEKLYLYYLQNGRDMYVDQELDINRLSDYDVDHIVPQSFLKDDSIDNKVLTRSDKARGKSDNVPSEEVVKKMKNYWRQLLNAKLITQRKFDNLTKAERGGLSELDKAGFIKRQLVETRQITKHVAQILDSRMNTKYDENDKLIREVKVITLKSKLVSDFRKDFQFYKVREINNYHHAHDAYLNAVVGTALIKKYPKLESEFVYGDYKVYDVRKMIAKSEQEIGKATAKYFFYSNIMNFFKTEITLANGEIRKRPLIETNGETGEIVWDKGRDFATVRKVLSMPQVNIVKKTEVQTGGFSKESILPKRNSDKLIARKKDWDPKKYGGFDSPTVAYSVLVVAKVEKGKSKKLKSVKELLGITIMERSSFEKNPIDFLEAKGYKEVKKDLIIKLPKYSLFELENGRKRMLASAGELQKGNELALPSKYVNFLYLASHYEKLKGSPEDNEQKQLFVEQHKHYLDEIIEQISEFSKRVILADANLDKVLSAYNKHRDKPIREQAENIIHLFTLTNLGAPAAFKYFDTTIDRKRYTSTKEVLDATLIHQSITGLYETRIDLSQLGGDGGGGGPAPGGSGGTLQLDDEYRLYSPLVKPDQNIQFWLEQFPQAWAETAGMGLAKQVPPQVIQLKASATPVSVRQYPLSKEAQEGIRPHVQRLIQQGILVPVQSPWNTPLLPVRKPGTNDYRPVQDLREVNKRVQDIHPTVPNPYNLLCALPPQRSWYTVLDLKDAFFCLRLHPTSQPLFAFEWRDPGTGRTGQLTWTRLPQGFKNSPTIFDEALHRDLANFRIQHPQVTLLQYVDDLLLAGATKQDCLEGTKALLLELSDLGYRASAKKAQICRREVTYLGYSLRDGQRWLTEARKKTVVQIPAPTTAKQVREFLGTAGFCRLWIPGFATLAAPLYPLTKEKGEFSWAPEHQKAFDAIKKALLSAPALALPDVTKPFTLYVDERKGVARGVLTQTLGPWRRPVAYLSKKLDPVASGWPVCLKAIAAVAILVKDADKLTLGQNITVIAPHALENIVRQPPDRWMTNARMTHYQSLLLTERVTFAPPAALNPATLLPEETDEPVTHDCHQLLIEETGVRKDLTDIPLTGEVLTWFTDGSSYVVEGKRMAGAAVVDGTRTIWASSLPEGTSAQKAELMALTQALRLAEGKSINIYTDSRYAFATAHVHGAIYKQRGLLTSAGREIKNKEEILSLLEALHLPKRLAIIHCPGHQKAKDPISRGNQMADRVAKQAAQGVNLLAGKRTADGSEFEKRTADGSEFESPKKKAKVE

SEQ ID NO: 7015 - protein, 2086 aa, synthetic construct; identical to SEQ ID NO: 7013

SEQ ID NO: 7016 - protein, 2085 aa, synthetic construct
MPAAKRVKLDGGDKKYSIGLDIGTNSVGWAVITDEYKVPSKKFKVLGNTDRHSIKKNLIGALLFDSGETAEATRLKRTARRRYTRRKNRICYLQEIFSNEMAKVDDSFFHRLEESFLVEEDKKHERHPIFGNIVDEVAYHEKYPTIYHLRKKLVDSTDKADLRLIYLALAHMIKFRGHFLIEGDLNPDNSDVDKLFIQLVQTYNQLFEENPINASGVDAKAILSARLSKSRRLENLIAQLPGEKKNGLFGNLIALSLGLTPNFKSNFDLAEDAKLQLSKDTYDDDLDNLLAQIGDQYADLFLAAKNLSDAILLSDILRVNTEITKAPLSASMIKRYDEHHQDLTLLKALVRQQLPEKYKEIFFDQSKNGYAGYIDGGASQEEFYKFIKPILEKMDGTEELLVKLNREDLLRKQRTFDNGSIPHQIHLGELHAILRRQEDFYPFLKDNREKIEKILTFRIPYYVGPLARGNSRFAWMTRKSEETITPWNFEEVVDKGASAQSFIERMTNFDKNLPNEKVLPKHSLLYEYFTVYNELTKVKYVTEGMRKPAFLSGEQKKAIVDLLFKTNRKVTVKQLKEDYFKKIECFDSVEISGVEDRFNASLGTYHDLLKIIKDKDFLDNEENEDILEDIVLTLTLFEDREMIEERLKTYAHLFDDKVMKQLKRRRYTGWGRLSRKLINGIRDKQSGKTILDFLKSDGFANRNFMQLIHDDSLTFKEDIQKAQVSGQGDSLHEHIANLAGSPAIKKGILQTVKVVDELVKVMGRHKPENIVIEMARENQTTQKGQKNSRERMKRIEEGIKELGSQILKEHPVENTQLQNEKLYLYYLQNGRDMYVDQELDINRLSDYDVDHIVPQSFLKDDSIDNKVLTRSDKARGKSDNVPSEEVVKKMKNYWRQLLNAKLITQRKFDNLTKAERGGLSELDKAGFIKRQLVETRQITKHVAQILDSRMNTKYDENDKLIREVKVITLKSKLVSDFRKDFQFYKVREINNYHHAHDAYLNAVVGTALIKKYPKLESEFVYGDYKVYDVRKMIAKSEQEIGKATAKYFFYSNIMNFFKTEITLANGEIRKRPLIETNGETGEIVWDKGRDFATVRKVLSMPQVNIVKKTEVQTGGFSKESILPKRNSDKLIARKKDWDPKKYGGFDSPTVAYSVLVVAKVEKGKSKKLKSVKELLGITIMERSSFEKNPIDFLEAKGYKEVKKDLIIKLPKYSLFELENGRKRMLASAGELQKGNELALPSKYVNFLYLASHYEKLKGSPEDNEQKQLFVEQHKHYLDEIIEQISEFSKRVILADANLDKVLSAYNKHRDKPIREQAENIIHLFTLTNLGAPAAFKYFDTTIDRKRYTSTKEVLDATLIHQSITGLYETRIDLSQLGGDGGGGGPAPGGSGGIPWLMKKPLQLTTLVPLQEYEERLLKQTMLTGSYKEKLQSLFLKYDALWQHWENQVGHRRIKPHHIATGTVNPRPQKQYPINPKAKASIQTVINDLLKQGVLIQQNSIMNTPVYPVPKPDGKWRMVLDYREVNKTIPLIAAQNQHSAGILSSIFRGKYKTTLDLSNGFWAHSITPESYWLTAFTWLGQQYCWTRLPQGFLNSPALFNADVVDLLKEVPNVQVYVDDIYISHDDPREHLEQLEKVFSLLLNAGYVVSLKKSEIAQHEVEFLGFNITKEGRGLTETFKQKLLNITPPRDLKQLQSILGLLNFARNFIPNFSELVKPLYNIIATAPGKYITWTTDNSQQLQNIISMLNSAENLEERNPEVRLIMKVNTSPSAGYIRFYNEFAKRPIMYLNYVYTKAEVKFTNTEKLLTTIHKGLIKALDLGMGQEILVYSPIVSMTKIQKTPLPERKALPIRWITWMSYLEDPRIQFHYDKTLPELQQVPTVTDDIIAKIKHPSEFSMVFYTDGSAIKHPNVNKSHNAGMGIAQVQFKPEFTVINTWSIPLGDHTAQLAEVAAVEFACKKALKIDGPVLIVTDSFYVAESVNKELPYWQSNGFFNNKKKPLKHVSKWKSIADCIQLKPDIIIIHEKGHQPTASTFHTEGNNLADKLATQGSYVVNAGKRTADGSEFEKRTADGSEFESPKKKAKVE

SEQ ID NO: 7017 - protein, 2092 aa, synthetic construct
MPAAKRVKLDGGDKKYSIGLDIGTNSVGWAVITDEYKVPSKKFKVLGNTDRHSIKKNLIGALLFDSGETAEATRLKRTARRRYTRRKNRICYLQEIFSNEMAKVDDSFFHRLEESFLVEEDKKHERHPIFGNIVDEVAYHEKYPTIYHLRKKLVDSTDKADLRLIYLALAHMIKFRGHFLIEGDLNPDNSDVDKLFIQLVQTYNQLFEENPINASGVDAKAILSARLSKSRRLENLIAQLPGEKKNGLFGNLIALSLGLTPNFKSNFDLAEDAKLQLSKDTYDDDLDNLLAQIGDQYADLFLAAKNLSDAILLSDILRVNTEITKAPLSASMIKRYDEHHQDLTLLKALVRQQLPEKYKEIFFDQSKNGYAGYIDGGASQEEFYKFIKPILEKMDGTEELLVKLNREDLLRKQRTFDNGSIPHQIHLGELHAILRRQEDFYPFLKDNREKIEKILTFRIPYYVGPLARGNSRFAWMTRKSEETITPWNFEEVVDKGASAQSFIERMTNFDKNLPNEKVLPKHSLLYEYFTVYNELTKVKYVTEGMRKPAFLSGEQKKAIVDLLFKTNRKVTVKQLKEDYFKKIECFDSVEISGVEDRFNASLGTYHDLLKIIKDKDFLDNEENEDILEDIVLTLTLFEDREMIEERLKTYAHLFDDKVMKQLKRRRYTGWGRLSRKLINGIRDKQSGKTILDFLKSDGFANRNFMQLIHDDSLTFKEDIQKAQVSGQGDSLHEHIANLAGSPAIKKGILQTVKVVDELVKVMGRHKPENIVIEMARENQTTQKGQKNSRERMKRIEEGIKELGSQILKEHPVENTQLQNEKLYLYYLQNGRDMYVDQELDINRLSDYDVDHIVPQSFLKDDSIDNKVLTRSDKARGKSDNVPSEEVVKKMKNYWRQLLNAKLITQRKFDNLTKAERGGLSELDKAGFIKRQLVETRQITKHVAQILDSRMNTKYDENDKLIREVKVITLKSKLVSDFRKDFQFYKVREINNYHHAHDAYLNAVVGTALIKKYPKLESEFVYGDYKVYDVRKMIAKSEQEIGKATAKYFFYSNIMNFFKTEITLANGEIRKRPLIETNGETGEIVWDKGRDFATVRKVLSMPQVNIVKKTEVQTGGFSKESILPKRNSDKLIARKKDWDPKKYGGFDSPTVAYSVLVVAKVEKGKSKKLKSVKELLGITIMERSSFEKNPIDFLEAKGYKEVKKDLIIKLPKYSLFELENGRKRMLASAGELQKGNELALPSKYVNFLYLASHYEKLKGSPEDNEQKQLFVEQHKHYLDEIIEQISEFSKRVILADANLDKVLSAYNKHRDKPIREQAENIIHLFTLTNLGAPAAFKYFDTTIDRKRYTSTKEVLDATLIHQSITGLYETRIDLSQLGGDGGGGGPAPGGSGGVLNLEEEYRLHEKPVPSSIDPSWLQLFPTVWAERAGMGLANQVPPVVVELRSGASPVAVRQYPMSKEAREGIRPHIQRFLDLGVLVPCQSPWNTPLLPVKKPGTNDYRPVQDLREINKRVQDIHPTVPNPYNLLSSLPPSHTWYSVLDLKDAFFCLKLHPNSQPLFAFEWRDPEKGNTGQLTWTRLPQGFKNSPTLFNEALHRDLAPFRALNPQVVLLQYVDDLLVAAPTYRDCKEGTQKLLQELSKLGYRVSAKKAQLCQKEVTYLGYLLKEGKRWLTPARKATVMKIPPPTTPRQVREFLGTAGFCRLWIPGFASLAAPLYPLTKPSIPFIWTEEHQKAFDRIKEALLSAPALALPDLTKPFTLYVDERAGVARGVLTQTLGPWRRPVAYLSKKLDPVASGWPTCLKAVAAVALLLKDADKLTLGQNVTVIASHSLESIVRQPPDRWMTNARMTHYQSLLLNERVSFAPPAVLNPATLLPVESEATPVHRCSEILAEETGTRRDLKDQPLPGVPAWYTDGSSFIAEGKRRAGAAIVDGKRTVWASSLPEGTSAQKAELVALTQALRLAEGKDINIYTDSRYAFATAHIHGAIYKQRGWLTSAGKDIKNKEEILALLEAIHLPKRVAIIHCPGHQKGNDPVATGNRRADEAAKQAALSTRVLAETTKPAGKRTADGSEFEKRTADGSEFESPKKKAKVE

SEQ ID NO: 7018 - protein, 2096 aa, synthetic construct
MPAAKRVKLDGGDKKYSIGLDIGTNSVGWAVITDEYKVPSKKFKVLGNTDRHSIKKNLIGALLFDSGETAEATRLKRTARRRYTRRKNRICYLQEIFSNEMAKVDDSFFHRLEESFLVEEDKKHERHPIFGNIVDEVAYHEKYPTIYHLRKKLVDSTDKADLRLIYLALAHMIKFRGHFLIEGDLNPDNSDVDKLFIQLVQTYNQLFEENPINASGVDAKAILSARLSKSRRLENLIAQLPGEKKNGLFGNLIALSLGLTPNFKSNFDLAEDAKLQLSKDTYDDDLDNLLAQIGDQYADLFLAAKNLSDAILLSDILRVNTEITKAPLSASMIKRYDEHHQDLTLLKALVRQQLPEKYKEIFFDQSKNGYAGYIDGGASQEEFYKFIKPILEKMDGTEELLVKLNREDLLRKQRTFDNGSIPHQIHLGELHAILRRQEDFYPFLKDNREKIEKILTFRIPYYVGPLARGNSRFAWMTRKSEETITPWNFEEVVDKGASAQSFIERMTNFDKNLPNEKVLPKHSLLYEYFTVYNELTKVKYVTEGMRKPAFLSGEQKKAIVDLLFKTNRKVTVKQLKEDYFKKIECFDSVEISGVEDRFNASLGTYHDLLKIIKDKDFLDNEENEDILEDIVLTLTLFEDREMIEERLKTYAHLFDDKVMKQLKRRRYTGWGRLSRKLINGIRDKQSGKTILDFLKSDGFANRNFMQLIHDDSLTFKEDIQKAQVSGQGDSLHEHIANLAGSPAIKKGILQTVKVVDELVKVMGRHKPENIVIEMARENQTTQKGQKNSRERMKRIEEGIKELGSQILKEHPVENTQLQNEKLYLYYLQNGRDMYVDQELDINRLSDYDVDHIVPQSFLKDDSIDNKVLTRSDKARGKSDNVPSEEVVKKMKNYWRQLLNAKLITQRKFDNLTKAERGGLSELDKAGFIKRQLVETRQITKHVAQILDSRMNTKYDENDKLIREVKVITLKSKLVSDFRKDFQFYKVREINNYHHAHDAYLNAVVGTALIKKYPKLESEFVYGDYKVYDVRKMIAKSEQEIGKATAKYFFYSNIMNFFKTEITLANGEIRKRPLIETNGETGEIVWDKGRDFATVRKVLSMPQVNIVKKTEVQTGGFSKESILPKRNSDKLIARKKDWDPKKYGGFDSPTVAYSVLVVAKVEKGKSKKLKSVKELLGITIMERSSFEKNPIDFLEAKGYKEVKKDLIIKLPKYSLFELENGRKRMLASAGELQKGNELALPSKYVNFLYLASHYEKLKGSPEDNEQKQLFVEQHKHYLDEIIEQISEFSKRVILADANLDKVLSAYNKHRDKPIREQAENIIHLFTLTNLGAPAAFKYFDTTIDRKRYTSTKEVLDATLIHQSITGLYETRIDLSQLGGDGGPAPGGSGGGGGTAPLEEEYRLFLEAPIQNVTLLEQWKREIPKVWAEINPPGLASTQAPIHVQLLSTALPVRVRQYPITLEAKRSLRETIRKFRAAGILRPVHSPWNTPLLPVRKSGTSEYRMVQDLREVNKRVETIHPTVPNPYTLLSLLPPDRIWYSVLDLKDAFFCIPLAPESQLIFAFEWADAEEGESGQLTWTRLPQGFKNSPTLFNEALNRDLQGFRLDHPSVSLLQYVDDLLIAADTQAACLSATRDLLMTLAELGYRVSGKKAQLCQEEVTYLGFKIHKGSRSLSNSRTQAILQIPVPKTKRQVREFLGTIGYCRLWIPGFAELAQPLYAATRPGNDPLVWGEKEEEAFQSLKLALTQPPALALPSLDKPFQLFVEETSGAAKGVLTQALGPWKRPVAYLSKRLDPVAAGWPRCLRAIAAAALLTREASKLTFGQDIEITSSHNLESLLRSPPDKWLTNARITQYQVLLLDPPRVRFKQTAALNPATLLPETDDTLPIHHCLDTLDSLTSTRPDLTDQPLAQAEATLFTDGSSYIRDGKRYAGAAVVTLDSVIWAEPLPIGTSAQKAELIALTKALEWSKDKSVNIYTDSRYAFATLHVHGMIYRERGWLTAGGKAIKNAPEILALLTAVWLPKRVAVMHCKGHQKDDAPTSTGNRRADEVAREVAIRPLSTQATISAGKRTADGSEFEKRTADGSEFESPKKKAKVE

SEQ ID NO: 7019 - protein, 2092 aa, synthetic construct
MPAAKRVKLDGGDKKYSIGLDIGTNSVGWAVITDEYKVPSKKFKVLGNTDRHSIKKNLIGALLFDSGETAEATRLKRTARRRYTRRKNRICYLQEIFSNEMAKVDDSFFHRLEESFLVEEDKKHERHPIFGNIVDEVAYHEKYPTIYHLRKKLVDSTDKADLRLIYLALAHMIKFRGHFLIEGDLNPDNSDVDKLFIQLVQTYNQLFEENPINASGVDAKAILSARLSKSRRLENLIAQLPGEKKNGLFGNLIALSLGLTPNFKSNFDLAEDAKLQLSKDTYDDDLDNLLAQIGDQYADLFLAAKNLSDAILLSDILRVNTEITKAPLSASMIKRYDEHHQDLTLLKALVRQQLPEKYKEIFFDQSKNGYAGYIDGGASQEEFYKFIKPILEKMDGTEELLVKLNREDLLRKQRTFDNGSIPHQIHLGELHAILRRQEDFYPFLKDNREKIEKILTFRIPYYVGPLARGNSRFAWMTRKSEETITPWNFEEVVDKGASAQSFIERMTNFDKNLPNEKVLPKHSLLYEYFTVYNELTKVKYVTEGMRKPAFLSGEQKKAIVDLLFKTNRKVTVKQLKEDYFKKIECFDSVEISGVEDRFNASLGTYHDLLKIIKDKDFLDNEENEDILEDIVLTLTLFEDREMIEERLKTYAHLFDDKVMKQLKRRRYTGWGRLSRKLINGIRDKQSGKTILDFLKSDGFANRNFMQLIHDDSLTFKEDIQKAQVSGQGDSLHEHIANLAGSPAIKKGILQTVKVVDELVKVMGRHKPENIVIEMARENQTTQKGQKNSRERMKRIEEGIKELGSQILKEHPVENTQLQNEKLYLYYLQNGRDMYVDQELDINRLSDYDVDHIVPQSFLKDDSIDNKVLTRSDKARGKSDNVPSEEVVKKMKNYWRQLLNAKLITQRKFDNLTKAERGGLSELDKAGFIKRQLVETRQITKHVAQILDSRMNTKYDENDKLIREVKVITLKSKLVSDFRKDFQFYKVREINNYHHAHDAYLNAVVGTALIKKYPKLESEFVYGDYKVYDVRKMIAKSEQEIGKATAKYFFYSNIMNFFKTEITLANGEIRKRPLIETNGETGEIVWDKGRDFATVRKVLSMPQVNIVKKTEVQTGGFSKESILPKRNSDKLIARKKDWDPKKYGGFDSPTVAYSVLVVAKVEKGKSKKLKSVKELLGITIMERSSFEKNPIDFLEAKGYKEVKKDLIIKLPKYSLFELENGRKRMLASAGELQKGNELALPSKYVNFLYLASHYEKLKGSPEDNEQKQLFVEQHKHYLDEIIEQISEFSKRVILADANLDKVLSAYNKHRDKPIREQAENIIHLFTLTNLGAPAAFKYFDTTIDRKRYTSTKEVLDATLIHQSITGLYETRIDLSQLGGDGGPAPGGSGGGGGVLNLEEEYRLHEKPVPSSIDPSWLQLFPTVWAERAGMGLANQVPPVVVELRSGASPVAVRQYPMSKEAREGIRPHIQKFLDLGVLVPCRSPWNTPLLPVKKPGTNDYRPVQDLREINKRVQDIHPTVPNPYNLLSSLPPSYTWYSVLDLKDAFFCLRLHPNSQPLFAFEWKDPEKGNTGQLTWTRLPQGFKNSPTLFNEALHRDLAPFRALNPQVVLLQYVDDLLVAAPTYEDCKKGTQKLLQELSKLGYRVSAKKAQLCQREVTYLGYLLKEGKRWLTPARKATVMKIPVPTTPRQVREFLGKAGFCRLFIPGFASLAAPLYPLTKPSIPFIWTEEHQQAFDHIKKALLSAPALALPDLTKPFTLYIDERAGVARGVLTQTLGPWRRPVAYLSKKLDPVASGWPTCLKAVAAVALLLKDADKLTLGQNVTVIASHSLESIVRQPPDRWMTNARMTHYQSLLLNERVSFAPPAVLNPATLLPVESEATPVHRCSEILAEETGTRRDLEDQPLPGVPTWYTDGSSFITEGKRRAGAPIVDGKRTVWASSLPEGTSAQKAELVALTQALRLAEGKNINIYTDSRYAFATAHIHGAIYKQRGWLTSAGKDIKNKEEILALLEAIHLPRRVAIIHCPGHQRGSNPVATGNRRADEAAKQAALSTRVLAGTTKPAGKRTADGSEFEKRTADGSEFESPKKKAKVE

SEQ ID NO: 7020 - protein, 2094 aa, synthetic construct
MPAAKRVKLDGGDKKYSIGLDIGTNSVGWAVITDEYKVPSKKFKVLGNTDRHSIKKNLIGALLFDSGETAEATRLKRTARRRYTRRKNRICYLQEIFSNEMAKVDDSFFHRLEESFLVEEDKKHERHPIFGNIVDEVAYHEKYPTIYHLRKKLVDSTDKADLRLIYLALAHMIKFRGHFLIEGDLNPDNSDVDKLFIQLVQTYNQLFEENPINASGVDAKAILSARLSKSRRLENLIAQLPGEKKNGLFGNLIALSLGLTPNFKSNFDLAEDAKLQLSKDTYDDDLDNLLAQIGDQYADLFLAAKNLSDAILLSDILRVNTEITKAPLSASMIKRYDEHHQDLTLLKALVRQQLPEKYKEIFFDQSKNGYAGYIDGGASQEEFYKFIKPILEKMDGTEELLVKLNREDLLRKQRTFDNGSIPHQIHLGELHAILRRQEDFYPFLKDNREKIEKILTFRIPYYVGPLARGNSRFAWMTRKSEETITPWNFEEVVDKGASAQSFIERMTNFDKNLPNEKVLPKHSLLYEYFTVYNELTKVKYVTEGMRKPAFLSGEQKKAIVDLLFKTNRKVTVKQLKEDYFKKIECFDSVEISGVEDRFNASLGTYHDLLKIIKDKDFLDNEENEDILEDIVLTLTLFEDREMIEERLKTYAHLFDDKVMKQLKRRRYTGWGRLSRKLINGIRDKQSGKTILDFLKSDGFANRNFMQLIHDDSLTFKEDIQKAQVSGQGDSLHEHIANLAGSPAIKKGILQTVKVVDELVKVMGRHKPENIVIEMARENQTTQKGQKNSRERMKRIEEGIKELGSQILKEHPVENTQLQNEKLYLYYLQNGRDMYVDQELDINRLSDYDVDHIVPQSFLKDDSIDNKVLTRSDKARGKSDNVPSEEVVKKMKNYWRQLLNAKLITQRKFDNLTKAERGGLSELDKAGFIKRQLVETRQITKHVAQILDSRMNTKYDENDKLIREVKVITLKSKLVSDFRKDFQFYKVREINNYHHAHDAYLNAVVGTALIKKYPKLESEFVYGDYKVYDVRKMIAKSEQEIGKATAKYFFYSNIMNFFKTEITLANGEIRKRPLIETNGETGEIVWDKGRDFATVRKVLSMPQVNIVKKTEVQTGGFSKESILPKRNSDKLIARKKDWDPKKYGGFDSPTVAYSVLVVAKVEKGKSKKLKSVKELLGITIMERSSFEKNPIDFLEAKGYKEVKKDLIIKLPKYSLFELENGRKRMLASAGELQKGNELALPSKYVNFLYLASHYEKLKGSPEDNEQKQLFVEQHKHYLDEIIEQISEFSKRVILADANLDKVLSAYNKHRDKPIREQAENIIHLFTLTNLGAPAAFKYFDTTIDRKRYTSTKEVLDATLIHQSITGLYETRIDLSQLGGDGGPAPGGSGGGGGTLNLEDEYRLYETSAEPEVSPGSTWLSDFPQAWAETGGMGLAVRQAPLIIPLKATSTPVSIKQYPMSQEAKLGIKPHIQRLLDQGILVPCQSPWNTPLLPVKKPGTNDYRPVQDLREVNKRVEDIHPTVPNPYNLLSGLPPSHRWYTVLDLKDAFFCLRLHPTSQPLFAFEWRDPGMGISGQLTWTRLPQGFKNSPTLFNEALHRDLADFRIQHPDLILLQYVDDILLAATSELDCQQGTRALLLTLGNLGYRASAKKAQLCQKQVKYLGYLLKEGQRWLTEARKETVMGQPTPKTPRQLREFLGKAGFCRLFIPGFAEMAAPLYPLTKPGTLFNWGPDQQKAYQEIKQALLTAPALGLPDLTKPFELFVDEKQGYAKGVLTQKLGPWRRPVAYLSKKLDPVAAGWPPCLRMVAAIAVLRKDAGKLTMGQPLVILAPHAVEALVKQPPDRWLSNARMTHYQAMLLDTDRVQFGPVVALNPATLLPLPEEGAPHDCLEILAETHGTRPDLTDQPIPDADHTWYTDGSSFLQEGQRKAGAAVTTETEVIWARALPAGTSAQRAELIALTQALKMAEGKRLNVYTDSRYAFATAHIHGEIYRRRGWLTSEGREIKNKSEILALLKALFLPKRLSIIHCLGHQKGDSAEARGNRLADQAAREAAIKTPPDTSTLLAGKRTADGSEFEKRTADGSEFESPKKKAKVE

SEQ ID NO: 7021 - protein, 2094 aa, synthetic construct
MPAAKRVKLDGGDKKYSIGLDIGTNSVGWAVITDEYKVPSKKFKVLGNTDRHSIKKNLIGALLFDSGETAEATRLKRTARRRYTRRKNRICYLQEIFSNEMAKVDDSFFHRLEESFLVEEDKKHERHPIFGNIVDEVAYHEKYPTIYHLRKKLVDSTDKADLRLIYLALAHMIKFRGHFLIEGDLNPDNSDVDKLFIQLVQTYNQLFEENPINASGVDAKAILSARLSKSRRLENLIAQLPGEKKNGLFGNLIALSLGLTPNFKSNFDLAEDAKLQLSKDTYDDDLDNLLAQIGDQYADLFLAAKNLSDAILLSDILRVNTEITKAPLSASMIKRYDEHHQDLTLLKALVRQQLPEKYKEIFFDQSKNGYAGYIDGGASQEEFYKFIKPILEKMDGTEELLVKLNREDLLRKQRTFDNGSIPHQIHLGELHAILRRQEDFYPFLKDNREKIEKILTFRIPYYVGPLARGNSRFAWMTRKSEETITPWNFEEVVDKGASAQSFIERMTNFDKNLPNEKVLPKHSLLYEYFTVYNELTKVKYVTEGMRKPAFLSGEQKKAIVDLLFKTNRKVTVKQLKEDYFKKIECFDSVEISGVEDRFNASLGTYHDLLKIIKDKDFLDNEENEDILEDIVLTLTLFEDREMIEERLKTYAHLFDDKVMKQLKRRRYTGWGRLSRKLINGIRDKQSGKTILDFLKSDGFANRNFMQLIHDDSLTFKEDIQKAQVSGQGDSLHEHIANLAGSPAIKKGILQTVKVVDELVKVMGRHKPENIVIEMARENQTTQKGQKNSRERMKRIEEGIKELGSQILKEHPVENTQLQNEKLYLYYLQNGRDMYVDQELDINRLSDYDVDHIVPQSFLKDDSIDNKVLTRSDKARGKSDNVPSEEVVKKMKNYWRQLLNAKLITQRKFDNLTKAERGGLSELDKAGFIKRQLVETRQITKHVAQILDSRMNTKYDENDKLIREVKVITLKSKLVSDFRKDFQFYKVREINNYHHAHDAYLNAVVGTALIKKYPKLESEFVYGDYKVYDVRKMIAKSEQEIGKATAKYFFYSNIMNFFKTEITLANGEIRKRPLIETNGETGEIVWDKGRDFATVRKVLSMPQVNIVKKTEVQTGGFSKESILPKRNSDKLIARKKDWDPKKYGGFDSPTVAYSVLVVAKVEKGKSKKLKSVKELLGITIMERSSFEKNPIDFLEAKGYKEVKKDLIIKLPKYSLFELENGRKRMLASAGELQKGNELALPSKYVNFLYLASHYEKLKGSPEDNEQKQLFVEQHKHYLDEIIEQISEFSKRVILADANLDKVLSAYNKHRDKPIREQAENIIHLFTLTNLGAPAAFKYFDTTIDRKRYTSTKEVLDATLIHQSITGLYETRIDLSQLGGDGGPAPGGSGGGGGTLGIEDEYRLHETSTEPDVSLGSTWLSDFPQAWAETGGMGLAVRQAPLIIPLKATSTPVSIQQYPMSHEARLGIKPHIQRLLDQGILVPCQSPWNTPLLPVKKPGTNDYRPVQDLREVNKRVEDIHPTVPNPYNLLSGLPPSHQWYTVLDLKDAFFCLRLHPTSQPLFAFEWRDPGMGISGQLTWTRLPQGFKNSPTLFDEALHRDLADFRIQHPDLILLQYVDDILLAATSELDCQQGTRALLQTLGDLGYRASAKKAQICQKQVKYLGYLLREGQRWLTEARKETVMGQPVPKTPRQLREFLGTAGFCRLWIPGFAEMAAPLYPLTKTGTLFSWGPDQQKAYQEIKQALLTAPALGLPDLTKPFELFVDEKQGYAKGVLTQKLGPWRRPVAYLSKKLDPVAAGWPPCLRMVAAIAVLTKDAGKLTMGQPLVILAPHAVEALVKQPPDRWLSNARMTHYQAMLLDTDRVQFGPVVALNPATLLPLPEEGAPHDCLEILAETHGTRPDLTDQPIPDADHTWYTDGSSFLQEGQRKAGAAVTTETEVIWAGALPAGTSAQRAELIALTQALKMAEGKRLNVYTDSRYAFATAHIHGEIYRRRGLLTSEGREIKNKSEILALLKALFLPKRLSIIHCLGHQKGDSAEARGNRLADQAAREAAIKTPPDTSTLLAGKRTADGSEFEKRTADGSEFESPKKKAKVE

SEQ ID NO: 7022 - protein, 2094 aa, synthetic construct
MPAAKRVKLDGGDKKYSIGLDIGTNSVGWAVITDEYKVPSKKFKVLGNTDRHSIKKNLIGALLFDSGETAEATRLKRTARRRYTRRKNRICYLQEIFSNEMAKVDDSFFHRLEESFLVEEDKKHERHPIFGNIVDEVAYHEKYPTIYHLRKKLVDSTDKADLRLIYLALAHMIKFRGHFLIEGDLNPDNSDVDKLFIQLVQTYNQLFEENPINASGVDAKAILSARLSKSRRLENLIAQLPGEKKNGLFGNLIALSLGLTPNFKSNFDLAEDAKLQLSKDTYDDDLDNLLAQIGDQYADLFLAAKNLSDAILLSDILRVNTEITKAPLSASMIKRYDEHHQDLTLLKALVRQQLPEKYKEIFFDQSKNGYAGYIDGGASQEEFYKFIKPILEKMDGTEELLVKLNREDLLRKQRTFDNGSIPHQIHLGELHAILRRQEDFYPFLKDNREKIEKILTFRIPYYVGPLARGNSRFAWMTRKSEETITPWNFEEVVDKGASAQSFIERMTNFDKNLPNEKVLPKHSLLYEYFTVYNELTKVKYVTEGMRKPAFLSGEQKKAIVDLLFKTNRKVTVKQLKEDYFKKIECFDSVEISGVEDRFNASLGTYHDLLKIIKDKDFLDNEENEDILEDIVLTLTLFEDREMIEERLKTYAHLFDDKVMKQLKRRRYTGWGRLSRKLINGIRDKQSGKTILDFLKSDGFANRNFMQLIHDDSLTFKEDIQKAQVSGQGDSLHEHIANLAGSPAIKKGILQTVKVVDELVKVMGRHKPENIVIEMARENQTTQKGQKNSRERMKRIEEGIKELGSQILKEHPVENTQLQNEKLYLYYLQNGRDMYVDQELDINRLSDYDVDHIVPQSFLKDDSIDNKVLTRSDKARGKSDNVPSEEVVKKMKNYWRQLLNAKLITQRKFDNLTKAERGGLSELDKAGFIKRQLVETRQITKHVAQILDSRMNTKYDENDKLIREVKVITLKSKLVSDFRKDFQFYKVREINNYHHAHDAYLNAVVGTALIKKYPKLESEFVYGDYKVYDVRKMIAKSEQEIGKATAKYFFYSNIMNFFKTEITLANGEIRKRPLIETNGETGEIVWDKGRDFATVRKVLSMPQVNIVKKTEVQTGGFSKESILPKRNSDKLIARKKDWDPKKYGGFDSPTVAYSVLVVAKVEKGKSKKLKSVKELLGITIMERSSFEKNPIDFLEAKGYKEVKKDLIIKLPKYSLFELENGRKRMLASAGELQKGNELALPSKYVNFLYLASHYEKLKGSPEDNEQKQLFVEQHKHYLDEIIEQISEFSKRVILADANLDKVLSAYNKHRDKPIREQAENIIHLFTLTNLGAPAAFKYFDTTIDRKRYTSTKEVLDATLIHQSITGLYETRIDLSQLGGDGGPAPGGSGGGGGTLNIEDEHRLHETSKEPDVSLGSTWLSDFPQAWAETGGMGLAVRQAPLIIPLKATSTPVSIKQYPMSQEARLGIKPHIQRLLDQGILVPCQSPWNTPLLPVKKPGTNDYRPVQDLREVNKRVEDIHPTVPNPYNLLSGLPPSHQWYTVLDLKDAFFCLRLHPTSQPLFAFEWRDPEMGISGQLTWTRLPQGFKNSPTLFDEALHRDLADFRIQHPDLILLQYVDDLLLAATSELDCQQGTRALLQTLGNLGYRASAKKAQICQKQVKYLGYLLKEGQRWLTEARKETVMGQPTPKTPRQLREFLGTAGFCRLWIPGFAEMAAPLYPLTKTGTLFNWGPDQQKAYQEIKQALLTAPALGLPDLTKPFELFVDEKQGYAKGVLTQKLGPWRRPVAYLSKKLDPVAAGWPPCLRMVAAIAVLTKDAGKLTMGQPLVILAPHAVEALVKQPPDRWLSNARMTHYQALLLDTDRVQFGPVVALNPATLLPLPEEGLQHNCLDILAEAHGTRPDLTDQPLPDADHTWYTDGSSLLQEGQRKAGAAVTTETEVIWAKALPAGTSAQRAELIALTQALKMAEGKKLNVYTDSRYAFATAHIHGEIYRRRGLLTSEGKEIKNKDEILALLKALFLPKRLSIIHCPGHQKGHSAEARGNRMADQAARKAAITETPDTSTLLAGKRTADGSEFEKRTADGSEFESPKKKAKVE

SEQ ID NO: 7023 - protein, 2088 aa, synthetic construct
MPAAKRVKLDGGDKKYSIGLDIGTNSVGWAVITDEYKVPSKKFKVLGNTDRHSIKKNLIGALLFDSGETAEATRLKRTARRRYTRRKNRICYLQEIFSNEMAKVDDSFFHRLEESFLVEEDKKHERHPIFGNIVDEVAYHEKYPTIYHLRKKLVDSTDKADLRLIYLALAHMIKFRGHFLIEGDLNPDNSDVDKLFIQLVQTYNQLFEENPINASGVDAKAILSARLSKSRRLENLIAQLPGEKKNGLFGNLIALSLGLTPNFKSNFDLAEDAKLQLSKDTYDDDLDNLLAQIGDQYADLFLAAKNLSDAILLSDILRVNTEITKAPLSASMIKRYDEHHQDLTLLKALVRQQLPEKYKEIFFDQSKNGYAGYIDGGASQEEFYKFIKPILEKMDGTEELLVKLNREDLLRKQRTFDNGSIPHQIHLGELHAILRRQEDFYPFLKDNREKIEKILTFRIPYYVGPLARGNSRFAWMTRKSEETITPWNFEEVVDKGASAQSFIERMTNFDKNLPNEKVLPKHSLLYEYFTVYNELTKVKYVTEGMRKPAFLSGEQKKAIVDLLFKTNRKVTVKQLKEDYFKKIECFDSVEISGVEDRFNASLGTYHDLLKIIKDKDFLDNEENEDILEDIVLTLTLFEDREMIEERLKTYAHLFDDKVMKQLKRRRYTGWGRLSRKLINGIRDKQSGKTILDFLKSDGFANRNFMQLIHDDSLTFKEDIQKAQVSGQGDSLHEHIANLAGSPAIKKGILQTVKVVDELVKVMGRHKPENIVIEMARENQTTQKGQKNSRERMKRIEEGIKELGSQILKEHPVENTQLQNEKLYLYYLQNGRDMYVDQELDINRLSDYDVDHIVPQSFLKDDSIDNKVLTRSDKARGKSDNVPSEEVVKKMKNYWRQLLNAKLITQRKFDNLTKAERGGLSELDKAGFIKRQLVETRQITKHVAQILDSRMNTKYDENDKLIREVKVITLKSKLVSDFRKDFQFYKVREINNYHHAHDAYLNAVVGTALIKKYPKLESEFVYGDYKVYDVRKMIAKSEQEIGKATAKYFFYSNIMNFFKTEITLANGEIRKRPLIETNGETGEIVWDKGRDFATVRKVLSMPQVNIVKKTEVQTGGFSKESILPKRNSDKLIARKKDWDPKKYGGFDSPTVAYSVLVVAKVEKGKSKKLKSVKELLGITIMERSSFEKNPIDFLEAKGYKEVKKDLIIKLPKYSLFELENGRKRMLASAGELQKGNELALPSKYVNFLYLASHYEKLKGSPEDNEQKQLFVEQHKHYLDEIIEQISEFSKRVILADANLDKVLSAYNKHRDKPIREQAENIIHLFTLTNLGAPAAFKYFDTTIDRKRYTSTKEVLDATLIHQSITGLYETRIDLSQLGGDGGPAPGGSGGGGGTLQLDDEYRLYSPLVKPDQNIQFWLEQFPQAWAETAGMGLAKQVPPQVIQLKASATPVSVRQYPLSKEAQEGIRPHVQRLIQQGILVPVQSPWNTPLLPVRKPGTNDYRPVQDLREVNKRVQDIHPTVPNPYNLLCALPPQRSWYTVLDLKDAFFCLRLHPTSQPLFAFEWRDPGTGRTGQLTWTRLPQGFKNSPTIFDEALHRDLANFRIQHPQVTLLQYVDDLLLAGATKQDCLEGTKALLLELSDLGYRASAKKAQICRREVTYLGYSLRDGQRWLTEARKKTVVQIPAPTTAKQVREFLGTAGFCRLWIPGFATLAAPLYPLTKEKGEFSWAPEHQKAFDAIKKALLSAPALALPDVTKPFTLYVDERKGVARGVLTQTLGPWRRPVAYLSKKLDPVASGWPVCLKAIAAVAILVKDADKLTLGQNITVIAPHALENIVRQPPDRWMTNARMTHYQSLLLTERVTFAPPAALNPATLLPEETDEPVTHDCHQLLIEETGVRKDLTDIPLTGEVLTWFTDGSSYVVEGKRMAGAAVVDGTRTIWASSLPEGTSAQKAELMALTQALRLAEGKSINIYTDSRYAFATAHVHGAIYKQRGLLTSAGREIKNKEEILSLLEALHLPKRLAIIHCPGHQKAKDPISRGNQMADRVAKQAAQGVNLLAGKRTADGSEFEKRTADGSEFESPKKKAKVE

SEQ ID NO: 7024 - protein, 2085 aa, synthetic construct
MPAAKRVKLDGGDKKYSIGLDIGTNSVGWAVITDEYKVPSKKFKVLGNTDRHSIKKNLIGALLFDSGETAEATRLKRTARRRYTRRKNRICYLQEIFSNEMAKVDDSFFHRLEESFLVEEDKKHERHPIFGNIVDEVAYHEKYPTIYHLRKKLVDSTDKADLRLIYLALAHMIKFRGHFLIEGDLNPDNSDVDKLFIQLVQTYNQLFEENPINASGVDAKAILSARLSKSRRLENLIAQLPGEKKNGLFGNLIALSLGLTPNFKSNFDLAEDAKLQLSKDTYDDDLDNLLAQIGDQYADLFLAAKNLSDAILLSDILRVNTEITKAPLSASMIKRYDEHHQDLTLLKALVRQQLPEKYKEIFFDQSKNGYAGYIDGGASQEEFYKFIKPILEKMDGTEELLVKLNREDLLRKQRTFDNGSIPHQIHLGELHAILRRQEDFYPFLKDNREKIEKILTFRIPYYVGPLARGNSRFAWMTRKSEETITPWNFEEVVDKGASAQSFIERMTNFDKNLPNEKVLPKHSLLYEYFTVYNELTKVKYVTEGMRKPAFLSGEQKKAIVDLLFKTNRKVTVKQLKEDYFKKIECFDSVEISGVEDRFNASLGTYHDLLKIIKDKDFLDNEENEDILEDIVLTLTLFEDREMIEERLKTYAHLFDDKVMKQLKRRRYTGWGRLSRKLINGIRDKQSGKTILDFLKSDGFANRNFMQLIHDDSLTFKEDIQKAQVSGQGDSLHEHIANLAGSPAIKKGILQTVKVVDELVKVMGRHKPENIVIEMARENQTTQKGQKNSRERMKRIEEGIKELGSQILKEHPVENTQLQNEKLYLYYLQNGRDMYVDQELDINRLSDYDVDHIVPQSFLKDDSIDNKVLTRSDKARGKSDNVPSEEVVKKMKNYWRQLLNAKLITQRKFDNLTKAERGGLSELDKAGFIKRQLVETRQITKHVAQILDSRMNTKYDENDKLIREVKVITLKSKLVSDFRKDFQFYKVREINNYHHAHDAYLNAVVGTALIKKYPKLESEFVYGDYKVYDVRKMIAKSEQEIGKATAKYFFYSNIMNFFKTEITLANGEIRKRPLIETNGETGEIVWDKGRDFATVRKVLSMPQVNIVKKTEVQTGGFSKESILPKRNSDKLIARKKDWDPKKYGGFDSPTVAYSVLVVAKVEKGKSKKLKSVKELLGITIMERSSFEKNPIDFLEAKGYKEVKKDLIIKLPKYSLFELENGRKRMLASAGELQKGNELALPSKYVNFLYLASHYEKLKGSPEDNEQKQLFVEQHKHYLDEIIEQISEFSKRVILADANLDKVLSAYNKHRDKPIREQAENIIHLFTLTNLGAPAAFKYFDTTIDRKRYTSTKEVLDATLIHQSITGLYETRIDLSQLGGDGGPAPGGSGGGGGIPWLMKKPLQLTTLVPLQEYEERLLKQTMLTGSYKEKLQSLFLKYDALWQHWENQVGHRRIKPHHIATGTVNPRPQKQYPINPKAKASIQTVINDLLKQGVLIQQNSIMNTPVYPVPKPDGKWRMVLDYREVNKTIPLIAAQNQHSAGILSSIFRGKYKTTLDLSNGFWAHSITPESYWLTAFTWLGQQYCWTRLPQGFLNSPALFNADVVDLLKEVPNVQVYVDDIYISHDDPREHLEQLEKVFSLLLNAGYVVSLKKSEIAQHEVEFLGFNITKEGRGLTETFKQKLLNITPPRDLKQLQSILGKLNFARNFIPNFSELVKPLYNIIATAPGKYITWTTDNSQQLQNIISMLNSAENLEERNPEVRLIMKVNTSPSAGYIRFYNEFAKRPIMYLNYVYTKAEVKFTNTEKLLTTIHKGLIKALDLGMGQEILVYSPIVSMTKIQKTPLPERKALPIRWITWMSYLEDPRIQFHYDKTLPELQQVPTVTDDIIAKIKHPSEFSMVFYTDGSAIKHPNVNKSHNAGMGIAQVQFKPEFTVINTWSIPLGDHTAQLAEVAAVEFACKKALKIDGPVLIVTDSFYVAESVNKELPYWQSNGFFNNKKKPLKHVSKWKSIADCIQLKPDIIIIHEKGHQPTASTFHTEGNNLADKLATQGSYVVNAGKRTADGSEFEKRTADGSEFESPKKKAKVE

SEQ ID NO: 7025 - protein, 2096 aa, synthetic construct
MPAAKRVKLDGGDKKYSIGLDIGTNSVGWAVITDEYKVPSKKFKVLGNTDRHSIKKNLIGALLFDSGETAEATRLKRTARRRYTRRKNRICYLQEIFSNEMAKVDDSFFHRLEESFLVEEDKKHERHPIFGNIVDEVAYHEKYPTIYHLRKKLVDSTDKADLRLIYLALAHMIKFRGHFLIEGDLNPDNSDVDKLFIQLVQTYNQLFEENPINASGVDAKAILSARLSKSRRLENLIAQLPGEKKNGLFGNLIALSLGLTPNFKSNFDLAEDAKLQLSKDTYDDDLDNLLAQIGDQYADLFLAAKNLSDAILLSDILRVNTEITKAPLSASMIKRYDEHHQDLTLLKALVRQQLPEKYKEIFFDQSKNGYAGYIDGGASQEEFYKFIKPILEKMDGTEELLVKLNREDLLRKQRTFDNGSIPHQIHLGELHAILRRQEDFYPFLKDNREKIEKILTFRIPYYVGPLARGNSRFAWMTRKSEETITPWNFEEVVDKGASAQSFIERMTNFDKNLPNEKVLPKHSLLYEYFTVYNELTKVKYVTEGMRKPAFLSGEQKKAIVDLLFKTNRKVTVKQLKEDYFKKIECFDSVEISGVEDRFNASLGTYHDLLKIIKDKDFLDNEENEDILEDIVLTLTLFEDREMIEERLKTYAHLFDDKVMKQLKRRRYTGWGRLSRKLINGIRDKQSGKTILDFLKSDGFANRNFMQLIHDDSLTFKEDIQKAQVSGQGDSLHEHIANLAGSPAIKKGILQTVKVVDELVKVMGRHKPENIVIEMARENQTTQKGQKNSRERMKRIEEGIKELGSQILKEHPVENTQLQNEKLYLYYLQNGRDMYVDQELDINRLSDYDVDHIVPQSFLKDDSIDNKVLTRSDKARGKSDNVPSEEVVKKMKNYWRQLLNAKLITQRKFDNLTKAERGGLSELDKAGFIKRQLVETRQITKHVAQILDSRMNTKYDENDKLIREVKVITLKSKLVSDFRKDFQFYKVREINNYHHAHDAYLNAVVGTALIKKYPKLESEFVYGDYKVYDVRKMIAKSEQEIGKATAKYFFYSNIMNFFKTEITLANGEIRKRPLIETNGETGEIVWDKGRDFATVRKVLSMPQVNIVKKTEVQTGGFSKESILPKRNSDKLIARKKDWDPKKYGGFDSPTVAYSVLVVAKVEKGKSKKLKSVKELLGITIMERSSFEKNPIDFLEAKGYKEVKKDLIIKLPKYSLFELENGRKRMLASAGELQKGNELALPSKYVNFLYLASHYEKLKGSPEDNEQKQLFVEQHKHYLDEIIEQISEFSKRVILADANLDKVLSAYNKHRDKPIREQAENIIHLFTLTNLGAPAAFKYFDTTIDRKRYTSTKEVLDATLIHQSITGLYETRIDLSQLGGDGGPAPGGGGGSGGTAPLEEEYRLFLEAPIQNVTLLEQWKREIPKVWAEINPPGLASTQAPIHVQLLSTALPVRVRQYPITLEAKRSLRETIRKFRAAGILRPVHSPWNTPLLPVRKSGTSEYRMVQDLREVNKRVETIHPTVPNPYTLLSLLPPDRIWYSVLDLKDAFFCIPLAPESQLIFAFEWADAEEGESGQLTWTRLPQGFKNSPTLFDEALNRDLQGFRLDHPSVSLLQYVDDLLIAADTQAACLSATRDLLMTLAELGYRVSGKKAQLCQEEVTYLGFKIHKGSRSLSNSRTQAILQIPVPKTKRQVREFLGTIGYCRLWIPGFAELAQPLYAATRGGNDPLVWGEKEEEAFQSLKLALTQPPALALPSLDKPFQLFVEETSGAAKGVLTQALGPWKRPVAYLSKRLDPVAAGWPRCLRAIAAAALLTREASKLTFGQDIEITSSHNLESLLRSPPDKWLTNARITQYQVLLLDPPRVRFKQTAALNPATLLPETDDTLPIHHCLDTLDSLTSTRPDLTDQPLAQAEATLFTDGSSYIRDGKRYAGAAVVTLDSVIWAEPLPIGTSAQKAELIALTKALEWSKDKSVNIYTDSRYAFATLHVHGMIYRERGLLTAGGKAIKNAPEILALLTAVWLPKRVAVMHCKGHQKDDAPTSTGNRRADEVAREVAIRPLSTQATISAGKRTADGSEFEKRTADGSEFESPKKKAKVE

SEQ ID NO: 7026 - protein, 2100 aa, synthetic construct
MPAAKRVKLDGGDKKYSIGLDIGTNSVGWAVITDEYKVPSKKFKVLGNTDRHSIKKNLIGALLFDSGETAEATRLKRTARRRYTRRKNRICYLQEIFSNEMAKVDDSFFHRLEESFLVEEDKKHERHPIFGNIVDEVAYHEKYPTIYHLRKKLVDSTDKADLRLIYLALAHMIKFRGHFLIEGDLNPDNSDVDKLFIQLVQTYNQLFEENPINASGVDAKAILSARLSKSRRLENLIAQLPGEKKNGLFGNLIALSLGLTPNFKSNFDLAEDAKLQLSKDTYDDDLDNLLAQIGDQYADLFLAAKNLSDAILLSDILRVNTEITKAPLSASMIKRYDEHHQDLTLLKALVRQQLPEKYKEIFFDQSKNGYAGYIDGGASQEEFYKFIKPILEKMDGTEELLVKLNREDLLRKQRTFDNGSIPHQIHLGELHAILRRQEDFYPFLKDNREKIEKILTFRIPYYVGPLARGNSRFAWMTRKSEETITPWNFEEVVDKGASAQSFIERMTNFDKNLPNEKVLPKHSLLYEYFTVYNELTKVKYVTEGMRKPAFLSGEQKKAIVDLLFKTNRKVTVKQLKEDYFKKIECFDSVEISGVEDRFNASLGTYHDLLKIIKDKDFLDNEENEDILEDIVLTLTLFEDREMIEERLKTYAHLFDDKVMKQLKRRRYTGWGRLSRKLINGIRDKQSGKTILDFLKSDGFANRNFMQLIHDDSLTFKEDIQKAQVSGQGDSLHEHIANLAGSPAIKKGILQTVKVVDELVKVMGRHKPENIVIEMARENQTTQKGQKNSRERMKRIEEGIKELGSQILKEHPVENTQLQNEKLYLYYLQNGRDMYVDQELDINRLSDYDVDHIVPQSFLKDDSIDNKVLTRSDKARGKSDNVPSEEVVKKMKNYWRQLLNAKLITQRKFDNLTKAERGGLSELDKAGFIKRQLVETRQITKHVAQILDSRMNTKYDENDKLIREVKVITLKSKLVSDFRKDFQFYKVREINNYHHAHDAYLNAVVGTALIKKYPKLESEFVYGDYKVYDVRKMIAKSEQEIGKATAKYFFYSNIMNFFKTEITLANGEIRKRPLIETNGETGEIVWDKGRDFATVRKVLSMPQVNIVKKTEVQTGGFSKESILPKRNSDKLIARKKDWDPKKYGGFDSPTVAYSVLVVAKVEKGKSKKLKSVKELLGITIMERSSFEKNPIDFLEAKGYKEVKKDLIIKLPKYSLFELENGRKRMLASAGELQKGNELALPSKYVNFLYLASHYEKLKGSPEDNEQKQLFVEQHKHYLDEIIEQISEFSKRVILADANLDKVLSAYNKHRDKPIREQAENIIHLFTLTNLGAPAAFKYFDTTIDRKRYTSTKEVLDATLIHQSITGLYETRIDLSQLGGDGGPAPGGGGGSGGTVSLQDEHRLFDIPVTTSLPDVWLQDFPQAWAETGGLGRAKCQAPIIIDLKPTAVPVSIKQYPMSLEAHMGIRQHIIKFLELGVLRPCRSPWNTPLLPVKKPGTQDYRPVQDLREINKRTVDIHPTVPNPYNLLSTLKPDYSWYTVLDLKDAFFCLPLAPQSQELFAFEWKDPERGISGQLTWTRLPQGFKNSPTLFNEALHRDLTDFRTQHPEVTLLQYVDDLLLAAPTKKACTQGTRHLLQELGEKGYRASAKKAQICQTKVTYLGYILSEGKRWLTPGRIETVARIPPPRNPREVREFLGTAGFCRLWIPGFAELAAPLYALTKPSTPFTWQTEHQLAFEALKKALLSAPALGLPDTSKPFTLFLDERQGIAKGVLTQKLGPWKRPVAYLSKKLDPVAAGWPPCLRIMAATAMLVKDSAKLTLGQPLTVITPHTLEAIVRQPPDRWITNARLTHYQALLLDTDRVQFGPPVTLNPATLLPVPENQPSPHDCRQVLAETHGTREDLKDQELPDADHTWYTDGSSYLDSGTRRAGAAVVDGHNTIWAQSLPPGTSAQKAELIALTKALELSKGKKANIYTDSRYAFATAHTHGSIYERRGWLTSEGKEIKNKAEIIALLKALFLPQEVAIIHCPGHQKGQDPVAVGNRQADRVARQAAMAEVLTLATEPDNTSHITAGKRTADGSEFEKRTADGSEFESPKKKAKVE

SEQ ID NO: 7027 - protein, 2171 aa, synthetic construct
MPAAKRVKLDGGDKKYSIGLDIGTNSVGWAVITDEYKVPSKKFKVLGNTDRHSIKKNLIGALLFDSGETAEATRLKRTARRRYTRRKNRICYLQEIFSNEMAKVDDSFFHRLEESFLVEEDKKHERHPIFGNIVDEVAYHEKYPTIYHLRKKLVDSTDKADLRLIYLALAHMIKFRGHFLIEGDLNPDNSDVDKLFIQLVQTYNQLFEENPINASGVDAKAILSARLSKSRRLENLIAQLPGEKKNGLFGNLIALSLGLTPNFKSNFDLAEDAKLQLSKDTYDDDLDNLLAQIGDQYADLFLAAKNLSDAILLSDILRVNTEITKAPLSASMIKRYDEHHQDLTLLKALVRQQLPEKYKEIFFDQSKNGYAGYIDGGASQEEFYKFIKPILEKMDGTEELLVKLNREDLLRKQRTFDNGSIPHQIHLGELHAILRRQEDFYPFLKDNREKIEKILTFRIPYYVGPLARGNSRFAWMTRKSEETITPWNFEEVVDKGASAQSFIERMTNFDKNLPNEKVLPKHSLLYEYFTVYNELTKVKYVTEGMRKPAFLSGEQKKAIVDLLFKTNRKVTVKQLKEDYFKKIECFDSVEISGVEDRFNASLGTYHDLLKIIKDKDFLDNEENEDILEDIVLTLTLFEDREMIEERLKTYAHLFDDKVMKQLKRRRYTGWGRLSRKLINGIRDKQSGKTILDFLKSDGFANRNFMQLIHDDSLTFKEDIQKAQVSGQGDSLHEHIANLAGSPAIKKGILQTVKVVDELVKVMGRHKPENIVIEMARENQTTQKGQKNSRERMKRIEEGIKELGSQILKEHPVENTQLQNEKLYLYYLQNGRDMYVDQELDINRLSDYDVDHIVPQSFLKDDSIDNKVLTRSDKARGKSDNVPSEEVVKKMKNYWRQLLNAKLITQRKFDNLTKAERGGLSELDKAGFIKRQLVETRQITKHVAQILDSRMNTKYDENDKLIREVKVITLKSKLVSDFRKDFQFYKVREINNYHHAHDAYLNAVVGTALIKKYPKLESEFVYGDYKVYDVRKMIAKSEQEIGKATAKYFFYSNIMNFFKTEITLANGEIRKRPLIETNGETGEIVWDKGRDFATVRKVLSMPQVNIVKKTEVQTGGFSKESILPKRNSDKLIARKKDWDPKKYGGFDSPTVAYSVLVVAKVEKGKSKKLKSVKELLGITIMERSSFEKNPIDFLEAKGYKEVKKDLIIKLPKYSLFELENGRKRMLASAGELQKGNELALPSKYVNFLYLASHYEKLKGSPEDNEQKQLFVEQHKHYLDEIIEQISEFSKRVILADANLDKVLSAYNKHRDKPIREQAENIIHLFTLTNLGAPAAFKYFDTTIDRKRYTSTKEVLDATLIHQSITGLYETRIDLSQLGGDGGPAPGGGGGSGGMDLLKPLTVERKGVKIKGYWNSQADITCVPKDLLQGEEPVRQQNVTTIHGTQEGDVYYVNLKIDGRRINTEVIGTTLDYAIITPGDVPWILKKPLELTIKLDLEEQQGTLLNNSILSKKGKEELKQLFEKYSALWQSWENQVGHRRIRPHKIATGTVKPTPQKQYHINPKAKPDIQIVINDLLKQGVLIQKESTMNTPVYPVPKPNGRWRMVLDYRAVNKVTPLIAVQNQHSYGILGSLFKGRYKTTIDLSNGFWAHPIVPEDYWITAFTWQGKQYCWTVLPQGFLNSPGLFTGDVVDLLQGIPNVEVYVDDVYISHDSEKEHLEYLDILFNRLKEAGYIISLKKSNIANSIVDFLGFQITNEGRGLTDTFKEKLENITAPTTLKQLQSILGLLNFARNFIPDFTELIAPLYALIPKSTKNYVPWQIEHSTTLETLITKLNGAEYLQGRKGDKTLIMKVNASYTTGYIRYYNEGEKKPISYVSIVFSKTELKFTELEKLLTTVHKGLLKALDLSMGQNIHVYSPIVSMQNIQKTPQTAKKALASRWLSWLSYLEDPRIRFFYDPQMPALKDLPAVDTGKDNKKHPSNFQHIFYTDGSAITSPTKEGHLNAGMGIVYFINKDGNLQKQQEWSISLGNHTAQFAEIAAFEFALKKCLPLGGNILVVTDSNYVAKAYNEELDVWASNGFVNNRKKPLKHISKWKSVADLKRLRPDVVVTHEPGHQKLDSSPHAYGNNLADQLATQASFKVHAGKRTADGSEFEKRTADGSEFESPKKKAKVE

SEQ ID NO: 7028 - protein, 2085 aa, synthetic construct
MPAAKRVKLDGGDKKYSIGLDIGTNSVGWAVITDEYKVPSKKFKVLGNTDRHSIKKNLIGALLFDSGETAEATRLKRTARRRYTRRKNRICYLQEIFSNEMAKVDDSFFHRLEESFLVEEDKKHERHPIFGNIVDEVAYHEKYPTIYHLRKKLVDSTDKADLRLIYLALAHMIKFRGHFLIEGDLNPDNSDVDKLFIQLVQTYNQLFEENPINASGVDAKAILSARLSKSRRLENLIAQLPGEKKNGLFGNLIALSLGLTPNFKSNFDLAEDAKLQLSKDTYDDDLDNLLAQIGDQYADLFLAAKNLSDAILLSDILRVNTEITKAPLSASMIKRYDEHHQDLTLLKALVRQQLPEKYKEIFFDQSKNGYAGYIDGGASQEEFYKFIKPILEKMDGTEELLVKLNREDLLRKQRTFDNGSIPHQIHLGELHAILRRQEDFYPFLKDNREKIEKILTFRIPYYVGPLARGNSRFAWMTRKSEETITPWNFEEVVDKGASAQSFIERMTNFDKNLPNEKVLPKHSLLYEYFTVYNELTKVKYVTEGMRKPAFLSGEQKKAIVDLLFKTNRKVTVKQLKEDYFKKIECFDSVEISGVEDRFNASLGTYHDLLKIIKDKDFLDNEENEDILEDIVLTLTLFEDREMIEERLKTYAHLFDDKVMKQLKRRRYTGWGRLSRKLINGIRDKQSGKTILDFLKSDGFANRNFMQLIHDDSLTFKEDIQKAQVSGQGDSLHEHIANLAGSPAIKKGILQTVKVVDELVKVMGRHKPENIVIEMARENQTTQKGQKNSRERMKRIEEGIKELGSQILKEHPVENTQLQNEKLYLYYLQNGRDMYVDQELDINRLSDYDVDHIVPQSFLKDDSIDNKVLTRSDKARGKSDNVPSEEVVKKMKNYWRQLLNAKLITQRKFDNLTKAERGGLSELDKAGFIKRQLVETRQITKHVAQILDSRMNTKYDENDKLIREVKVITLKSKLVSDFRKDFQFYKVREINNYHHAHDAYLNAVVGTALIKKYPKLESEFVYGDYKVYDVRKMIAKSEQEIGKATAKYFFYSNIMNFFKTEITLANGEIRKRPLIETNGETGEIVWDKGRDFATVRKVLSMPQVNIVKKTEVQTGGFSKESILPKRNSDKLIARKKDWDPKKYGGFDSPTVAYSVLVVAKVEKGKSKKLKSVKELLGITIMERSSFEKNPIDFLEAKGYKEVKKDLIIKLPKYSLFELENGRKRMLASAGELQKGNELALPSKYVNFLYLASHYEKLKGSPEDNEQKQLFVEQHKHYLDEIIEQISEFSKRVILADANLDKVLSAYNKHRDKPIREQAENIIHLFTLTNLGAPAAFKYFDTTIDRKRYTSTKEVLDATLIHQSITGLYETRIDLSQLGGDGGPAPGGGGGSGGVPWILKKPLELTIKLDLEEQQGTLLNNSILSKKGKEELKQLFEKYSALWQSWENQVGHRRIRPHKIATGTVKPTPQKQYHINPKAKPDIQIVINDLLKQGVLIQKESTMNTPVYPVPKPNGRWRMVLDYRAVNKVTPLIAVQNQHSYGILGSLFKGRYKTTIDLSNGFWAHPIVPEDYWITAFTWQGKQYCWTVLPQGFLNSPGLFTGDVVDLLQGIPNVEVYVDDVYISHDSEKEHLEYLDILFNRLKEAGYIISLKKSNIANSIVDFLGFQITNEGRGLTDTFKEKLENITAPTTLKQLQSILGLLNFARNFIPDFTELIAPLYALIPKSTKNYVPWQIEHSTTLETLITKLNGAEYLQGRKGDKTLIMKVNASYTTGYIRYYNEGEKKPISYVSIVFSKTELKFTELEKLLTTVHKGLLKALDLSMGQNIHVYSPIVSMQNIQKTPQTAKKALASRWLSWLSYLEDPRIRFFYDPQMPALKDLPAVDTGKDNKKHPSNFQHIFYTDGSAITSPTKEGHLNAGMGIVYFINKDGNLQKQQEWSISLGNHTAQFAEIAAFEFALKKCLPLGGNILVVTDSNYVAKAYNEELDVWASNGFVNNRKKPLKHISKWKSVADLKRLRPDVVVTHEPGHQKLDSSPHAYGNNLADQLATQASFKVHAGKRTADGSEFEKRTADGSEFESPKKKAKVE

SEQ ID NO: 7029 - protein, 2093 aa, synthetic construct
MPAAKRVKLDGGDKKYSIGLDIGTNSVGWAVITDEYKVPSKKFKVLGNTDRHSIKKNLIGALLFDSGETAEATRLKRTARRRYTRRKNRICYLQEIFSNEMAKVDDSFFHRLEESFLVEEDKKHERHPIFGNIVDEVAYHEKYPTIYHLRKKLVDSTDKADLRLIYLALAHMIKFRGHFLIEGDLNPDNSDVDKLFIQLVQTYNQLFEENPINASGVDAKAILSARLSKSRRLENLIAQLPGEKKNGLFGNLIALSLGLTPNFKSNFDLAEDAKLQLSKDTYDDDLDNLLAQIGDQYADLFLAAKNLSDAILLSDILRVNTEITKAPLSASMIKRYDEHHQDLTLLKALVRQQLPEKYKEIFFDQSKNGYAGYIDGGASQEEFYKFIKPILEKMDGTEELLVKLNREDLLRKQRTFDNGSIPHQIHLGELHAILRRQEDFYPFLKDNREKIEKILTFRIPYYVGPLARGNSRFAWMTRKSEETITPWNFEEVVDKGASAQSFIERMTNFDKNLPNEKVLPKHSLLYEYFTVYNELTKVKYVTEGMRKPAFLSGEQKKAIVDLLFKTNRKVTVKQLKEDYFKKIECFDSVEISGVEDRFNASLGTYHDLLKIIKDKDFLDNEENEDILEDIVLTLTLFEDREMIEERLKTYAHLFDDKVMKQLKRRRYTGWGRLSRKLINGIRDKQSGKTILDFLKSDGFANRNFMQLIHDDSLTFKEDIQKAQVSGQGDSLHEHIANLAGSPAIKKGILQTVKVVDELVKVMGRHKPENIVIEMARENQTTQKGQKNSRERMKRIEEGIKELGSQILKEHPVENTQLQNEKLYLYYLQNGRDMYVDQELDINRLSDYDVDHIVPQSFLKDDSIDNKVLTRSDKARGKSDNVPSEEVVKKMKNYWRQLLNAKLITQRKFDNLTKAERGGLSELDKAGFIKRQLVETRQITKHVAQILDSRMNTKYDENDKLIREVKVITLKSKLVSDFRKDFQFYKVREINNYHHAHDAYLNAVVGTALIKKYPKLESEFVYGDYKVYDVRKMIAKSEQEIGKATAKYFFYSNIMNFFKTEITLANGEIRKRPLIETNGETGEIVWDKGRDFATVRKVLSMPQVNIVKKTEVQTGGFSKESILPKRNSDKLIARKKDWDPKKYGGFDSPTVAYSVLVVAKVEKGKSKKLKSVKELLGITIMERSSFEKNPIDFLEAKGYKEVKKDLIIKLPKYSLFELENGRKRMLASAGELQKGNELALPSKYVNFLYLASHYEKLKGSPEDNEQKQLFVEQHKHYLDEIIEQISEFSKRVILADANLDKVLSAYNKHRDKPIREQAENIIHLFTLTNLGAPAAFKYFDTTIDRKRYTSTKEVLDATLIHQSITGLYETRIDLSQLGGDGGPAPGGGGGSGGTLQLEEEYRLFEPESTQKQEMDIWLKNFPQAWAETGGMGTAHCQAPVLIQLKATATPISIRQYPMPHEAYQGIKPHIRRMLDQGILKPCQSPWNTPLLPVKKPGTEDYRPVQDLREVNKRVEDIHPTVPNPYNLLSTLPPSHPWYTVLDLKDAFFCLRLHSESQLLFAFEWRDPEIGLSGQLTWTRLPQGFKNSPTLFNEALHSDLADFRVRYPALVLLQYVDDLLLAAATRTECLEGTKALLETLGNKGYRASAKKAQICLQEVTYLGYSLKDGQRWLTKARKEAILSIPVPKNSRQVREFLGTAGYCRLWIPGFAELAAPLYPLTRPGTLFQWGTEQQLAFEDIKKALLSSPALGLPDITKPFELFIDENSGFAKGVLVQKLGPWKRPVAYLSKKLDTVASGWPPCLRMVAAIAILVKDAGKLTLGQPLTILTSHPVEALVRQPPNKWLSNARMTHYQAMLLDAERVHFGPTVSLNPATLLPLPSGGNHHDCLQILAETHGTRPDLTDQPLPDADLTWYTDGSSFIRNGEREAGAAVTTESEVIWAAPLPPGTSAQRAELIALTQALKMAEGKKLTVYTDSRYAFATTHVHGEIYRRRGWLTSEGKEIKNKNEILALLEALFLPKRLSIIHCPGHQKGDSPQAKGNRLADDTAKKAATETHSSLTVLPAGKRTADGSEFEKRTADGSEFESPKKKAKVE

SEQ ID NO: 7030 - protein, 2125 aa, synthetic construct
MPAAKRVKLDGGDKKYSIGLDIGTNSVGWAVITDEYKVPSKKFKVLGNTDRHSIKKNLIGALLFDSGETAEATRLKRTARRRYTRRKNRICYLQEIFSNEMAKVDDSFFHRLEESFLVEEDKKHERHPIFGNIVDEVAYHEKYPTIYHLRKKLVDSTDKADLRLIYLALAHMIKFRGHFLIEGDLNPDNSDVDKLFIQLVQTYNQLFEENPINASGVDAKAILSARLSKSRRLENLIAQLPGEKKNGLFGNLIALSLGLTPNFKSNFDLAEDAKLQLSKDTYDDDLDNLLAQIGDQYADLFLAAKNLSDAILLSDILRVNTEITKAPLSASMIKRYDEHHQDLTLLKALVRQQLPEKYKEIFFDQSKNGYAGYIDGGASQEEFYKFIKPILEKMDGTEELLVKLNREDLLRKQRTFDNGSIPHQIHLGELHAILRRQEDFYPFLKDNREKIEKILTFRIPYYVGPLARGNSRFAWMTRKSEETITPWNFEEVVDKGASAQSFIERMTNFDKNLPNEKVLPKHSLLYEYFTVYNELTKVKYVTEGMRKPAFLSGEQKKAIVDLLFKTNRKVTVKQLKEDYFKKIECFDSVEISGVEDRFNASLGTYHDLLKIIKDKDFLDNEENEDILEDIVLTLTLFEDREMIEERLKTYAHLFDDKVMKQLKRRRYTGWGRLSRKLINGIRDKQSGKTILDFLKSDGFANRNFMQLIHDDSLTFKEDIQKAQVSGQGDSLHEHIANLAGSPAIKKGILQTVKVVDELVKVMGRHKPENIVIEMARENQTTQKGQKNSRERMKRIEEGIKELGSQILKEHPVENTQLQNEKLYLYYLQNGRDMYVDQELDINRLSDYDVDHIVPQSFLKDDSIDNKVLTRSDKARGKSDNVPSEEVVKKMKNYWRQLLNAKLITQRKFDNLTKAERGGLSELDKAGFIKRQLVETRQITKHVAQILDSRMNTKYDENDKLIREVKVITLKSKLVSDFRKDFQFYKVREINNYHHAHDAYLNAVVGTALIKKYPKLESEFVYGDYKVYDVRKMIAKSEQEIGKATAKYFFYSNIMNFFKTEITLANGEIRKRPLIETNGETGEIVWDKGRDFATVRKVLSMPQVNIVKKTEVQTGGFSKESILPKRNSDKLIARKKDWDPKKYGGFDSPTVAYSVLVVAKVEKGKSKKLKSVKELLGITIMERSSFEKNPIDFLEAKGYKEVKKDLIIKLPKYSLFELENGRKRMLASAGELQKGNELALPSKYVNFLYLASHYEKLKGSPEDNEQKQLFVEQHKHYLDEIIEQISEFSKRVILADANLDKVLSAYNKHRDKPIREQAENIIHLFTLTNLGAPAAFKYFDTTIDRKRYTSTKEVLDATLIHQSITGLYETRIDLSQLGGDGGPAPGGGGGSGGLLGRDLLTKLKAQIQFSTEGPQVTWEDRPAMCLVLNLEEEYRLHEKPVPPSIDPSWLQLFPMVWAEKAGMGLANQVPPVVVELKSDASPVAVRQYPMSKEAREGIRPHIQRFLDLGILVPCQSPWNTPLLPVKKPGTNDYRPVQDLREVNKRVQDIHPTVPNPYNLLSSLPPSHTWYSVLDLKDAFFCLKLHPNSQPLFAFEWRDPEKGNTGQLTWTRLPQGFKNSPTLFNEALHRDLASFRALNPQVVMLQYVDDLLVAAPTYRDCKEGTRRLLQELSKLGYRVSAKKAQLCREEVTYLGYLLKGGKRWLTPARKATVMKIPTPTTPRQVREFLGTAGFCRLWIPGFASLAAPLYPLTRPKVPFTWTEAHQEAFGRIKEALLSAPALALPDLTKPFALYVDEKEGVARGVLTQTLGPWRRPVAYLSKKLDPVASGWPTCLKAIAAVALLLKDADKLTLGQNVLVIAPHNLESIVRQPPDRWMTNARMTHYQSLLLNERVSFAPPAILNPATLLPVESDDTPIHICSEILAEETGTRPDLRDQPLPGVPAWYTDGSSFIMDGRRQAGAAIVDNKRTVWASNLPEGTSAQKAELIALTQALRLAEGKSINIYTDSRYAFATAHVHGAIYKQRGWLTSAGKDIKNKEEILALLEAIHLPKRVAIIHCPGHQRGTDPVATGNRKADEAAKQAAQSTRILTETTKNAGKRTADGSEFEKRTADGSEFESPKKKAKVE

SEQ ID NO: 7031 - protein, 2125 aa, synthetic construct
MPAAKRVKLDGGDKKYSIGLDIGTNSVGWAVITDEYKVPSKKFKVLGNTDRHSIKKNLIGALLFDSGETAEATRLKRTARRRYTRRKNRICYLQEIFSNEMAKVDDSFFHRLEESFLVEEDKKHERHPIFGNIVDEVAYHEKYPTIYHLRKKLVDSTDKADLRLIYLALAHMIKFRGHFLIEGDLNPDNSDVDKLFIQLVQTYNQLFEENPINASGVDAKAILSARLSKSRRLENLIAQLPGEKKNGLFGNLIALSLGLTPNFKSNFDLAEDAKLQLSKDTYDDDLDNLLAQIGDQYADLFLAAKNLSDAILLSDILRVNTEITKAPLSASMIKRYDEHHQDLTLLKALVRQQLPEKYKEIFFDQSKNGYAGYIDGGASQEEFYKFIKPILEKMDGTEELLVKLNREDLLRKQRTFDNGSIPHQIHLGELHAILRRQEDFYPFLKDNREKIEKILTFRIPYYVGPLARGNSRFAWMTRKSEETITPWNFEEVVDKGASAQSFIERMTNFDKNLPNEKVLPKHSLLYEYFTVYNELTKVKYVTEGMRKPAFLSGEQKKAIVDLLFKTNRKVTVKQLKEDYFKKIECFDSVEISGVEDRFNASLGTYHDLLKIIKDKDFLDNEENEDILEDIVLTLTLFEDREMIEERLKTYAHLFDDKVMKQLKRRRYTGWGRLSRKLINGIRDKQSGKTILDFLKSDGFANRNFMQLIHDDSLTFKEDIQKAQVSGQGDSLHEHIANLAGSPAIKKGILQTVKVVDELVKVMGRHKPENIVIEMARENQTTQKGQKNSRERMKRIEEGIKELGSQILKEHPVENTQLQNEKLYLYYLQNGRDMYVDQELDINRLSDYDVDHIVPQSFLKDDSIDNKVLTRSDKARGKSDNVPSEEVVKKMKNYWRQLLNAKLITQRKFDNLTKAERGGLSELDKAGFIKRQLVETRQITKHVAQILDSRMNTKYDENDKLIREVKVITLKSKLVSDFRKDFQFYKVREINNYHHAHDAYLNAVVGTALIKKYPKLESEFVYGDYKVYDVRKMIAKSEQEIGKATAKYFFYSNIMNFFKTEITLANGEIRKRPLIETNGETGEIVWDKGRDFATVRKVLSMPQVNIVKKTEVQTGGFSKESILPKRNSDKLIARKKDWDPKKYGGFDSPTVAYSVLVVAKVEKGKSKKLKSVKELLGITIMERSSFEKNPIDFLEAKGYKEVKKDLIIKLPKYSLFELENGRKRMLASAGELQKGNELALPSKYVNFLYLASHYEKLKGSPEDNEQKQLFVEQHKHYLDEIIEQISEFSKRVILADANLDKVLSAYNKHRDKPIREQAENIIHLFTLTNLGAPAAFKYFDTTIDRKRYTSTKEVLDATLIHQSITGLYETRIDLSQLGGDGGPAPGGGGGSGGLLGRDLLTKLKAQIQFSTEGPQVTWEDRPAMCLVLNLEEEYRLHEKPVPPSIDPSWLQLFPMVWAEKAGMGLANQVPPVVVELKSDASPVAVRQYPMSKEAREGIRPHIQRFLDLGILVPCQSPWNTPLLPVKKPGTNDYRPVQDLREVNKRVQDIHPTVPNPYNLLSSLPPSHTWYSVLDLKDAFFCLKLHPNSQPLFAFEWRDPEKGNTGQLTWTRLPQGFKNSPTLFNEALHRDLASFRALNPQVVMLQYVDDLLVAAPTYRDCKEGTRRLLQELSKLGYRVSAKKAQLCREEVTYLGYLLKGGKRWLTPARKATVMKIPTPTTPRQVREFLGKAGFCRLFIPGFASLAAPLYPLTRPKVPFTWTEAHQEAFGRIKEALLSAPALALPDLTKPFALYVDEKEGVARGVLTQTLGPWRRPVAYLSKKLDPVASGWPTCLKAIAAVALLLKDADKLTLGQNVLVIAPHNLESIVRQPPDRWMTNARMTHYQSLLLNERVSFAPPAILNPATLLPVESDDTPIHICSEILAEETGTRPDLRDQPLPGVPAWYTDGSSFIMDGRRQAGAAIVDNKRTVWASNLPEGTSAQKAELIALTQALRLAEGKSINIYTDSRYAFATAHVHGAIYKQRGWLTSAGKDIKNKEEILALLEAIHLPKRVAIIHCPGHQRGTDPVATGNRKADEAAKQAAQSTRILTETTKNAGKRTADGSEFEKRTADGSEFESPKKKAKVE

SEQ ID NO: 7032 - protein, 2094 aa, synthetic construct
MPAAKRVKLDGGDKKYSIGLDIGTNSVGWAVITDEYKVPSKKFKVLGNTDRHSIKKNLIGALLFDSGETAEATRLKRTARRRYTRRKNRICYLQEIFSNEMAKVDDSFFHRLEESFLVEEDKKHERHPIFGNIVDEVAYHEKYPTIYHLRKKLVDSTDKADLRLIYLALAHMIKFRGHFLIEGDLNPDNSDVDKLFIQLVQTYNQLFEENPINASGVDAKAILSARLSKSRRLENLIAQLPGEKKNGLFGNLIALSLGLTPNFKSNFDLAEDAKLQLSKDTYDDDLDNLLAQIGDQYADLFLAAKNLSDAILLSDILRVNTEITKAPLSASMIKRYDEHHQDLTLLKALVRQQLPEKYKEIFFDQSKNGYAGYIDGGASQEEFYKFIKPILEKMDGTEELLVKLNREDLLRKQRTFDNGSIPHQIHLGELHAILRRQEDFYPFLKDNREKIEKILTFRIPYYVGPLARGNSRFAWMTRKSEETITPWNFEEVVDKGASAQSFIERMTNFDKNLPNEKVLPKHSLLYEYFTVYNELTKVKYVTEGMRKPAFLSGEQKKAIVDLLFKTNRKVTVKQLKEDYFKKIECFDSVEISGVEDRFNASLGTYHDLLKIIKDKDFLDNEENEDILEDIVLTLTLFEDREMIEERLKTYAHLFDDKVMKQLKRRRYTGWGRLSRKLINGIRDKQSGKTILDFLKSDGFANRNFMQLIHDDSLTFKEDIQKAQVSGQGDSLHEHIANLAGSPAIKKGILQTVKVVDELVKVMGRHKPENIVIEMARENQTTQKGQKNSRERMKRIEEGIKELGSQILKEHPVENTQLQNEKLYLYYLQNGRDMYVDQELDINRLSDYDVDHIVPQSFLKDDSIDNKVLTRSDKARGKSDNVPSEEVVKKMKNYWRQLLNAKLITQRKFDNLTKAERGGLSELDKAGFIKRQLVETRQITKHVAQILDSRMNTKYDENDKLIREVKVITLKSKLVSDFRKDFQFYKVREINNYHHAHDAYLNAVVGTALIKKYPKLESEFVYGDYKVYDVRKMIAKSEQEIGKATAKYFFYSNIMNFFKTEITLANGEIRKRPLIETNGETGEIVWDKGRDFATVRKVLSMPQVNIVKKTEVQTGGFSKESILPKRNSDKLIARKKDWDPKKYGGFDSPTVAYSVLVVAKVEKGKSKKLKSVKELLGITIMERSSFEKNPIDFLEAKGYKEVKKDLIIKLPKYSLFELENGRKRMLASAGELQKGNELALPSKYVNFLYLASHYEKLKGSPEDNEQKQLFVEQHKHYLDEIIEQISEFSKRVILADANLDKVLSAYNKHRDKPIREQAENIIHLFTLTNLGAPAAFKYFDTTIDRKRYTSTKEVLDATLIHQSITGLYETRIDLSQLGGDGGPAPGGGGGSGGTLNLEDEYRLYETSAEPEVSPGSTWLSDFPQAWAETGGMGLAVRQAPLIIPLKATSTPVSIKQYPMSQEAKLGIKPHIQRLLDQGILVPCQSPWNTPLLPVKKPGTNDYRPVQDLREVNKRVEDIHPTVPNPYNLLSGLPPSHRWYTVLDLKDAFFCLRLHPTSQPLFAFEWRDPGMGISGQLTWTRLPQGFKNSPTLFNEALHRDLADFRIQHPDLILLQYVDDILLAATSELDCQQGTRALLLTLGNLGYRASAKKAQLCQKQVKYLGYLLKEGQRWLTEARKETVMGQPTPKTPRQLREFLGKAGFCRLFIPGFAEMAAPLYPLTKPGTLFNWGPDQQKAYQEIKQALLTAPALGLPDLTKPFELFVDEKQGYAKGVLTQKLGPWRRPVAYLSKKLDPVAAGWPPCLRMVAAIAVLRKDAGKLTMGQPLVILAPHAVEALVKQPPDRWLSNARMTHYQAMLLDTDRVQFGPVVALNPATLLPLPEEGAPHDCLEILAETHGTRPDLTDQPIPDADHTWYTDGSSFLQEGQRKAGAAVTTETEVIWARALPAGTSAQRAELIALTQALKMAEGKRLNVYTDSRYAFATAHIHGEIYRRRGWLTSEGREIKNKSEILALLKALFLPKRLSIIHCLGHQKGDSAEARGNRLADQAAREAAIKTPPDTSTLLAGKRTADGSEFEKRTADGSEFESPKKKAKVE

SEQ ID NO: 7033 - protein, 2094 aa, synthetic construct
MPAAKRVKLDGGDKKYSIGLDIGTNSVGWAVITDEYKVPSKKFKVLGNTDRHSIKKNLIGALLFDSGETAEATRLKRTARRRYTRRKNRICYLQEIFSNEMAKVDDSFFHRLEESFLVEEDKKHERHPIFGNIVDEVAYHEKYPTIYHLRKKLVDSTDKADLRLIYLALAHMIKFRGHFLIEGDLNPDNSDVDKLFIQLVQTYNQLFEENPINASGVDAKAILSARLSKSRRLENLIAQLPGEKKNGLFGNLIALSLGLTPNFKSNFDLAEDAKLQLSKDTYDDDLDNLLAQIGDQYADLFLAAKNLSDAILLSDILRVNTEITKAPLSASMIKRYDEHHQDLTLLKALVRQQLPEKYKEIFFDQSKNGYAGYIDGGASQEEFYKFIKPILEKMDGTEELLVKLNREDLLRKQRTFDNGSIPHQIHLGELHAILRRQEDFYPFLKDNREKIEKILTFRIPYYVGPLARGNSRFAWMTRKSEETITPWNFEEVVDKGASAQSFIERMTNFDKNLPNEKVLPKHSLLYEYFTVYNELTKVKYVTEGMRKPAFLSGEQKKAIVDLLFKTNRKVTVKQLKEDYFKKIECFDSVEISGVEDRFNASLGTYHDLLKIIKDKDFLDNEENEDILEDIVLTLTLFEDREMIEERLKTYAHLFDDKVMKQLKRRRYTGWGRLSRKLINGIRDKQSGKTILDFLKSDGFANRNFMQLIHDDSLTFKEDIQKAQVSGQGDSLHEHIANLAGSPAIKKGILQTVKVVDELVKVMGRHKPENIVIEMARENQTTQKGQKNSRERMKRIEEGIKELGSQILKEHPVENTQLQNEKLYLYYLQNGRDMYVDQELDINRLSDYDVDHIVPQSFLKDDSIDNKVLTRSDKARGKSDNVPSEEVVKKMKNYWRQLLNAKLITQRKFDNLTKAERGGLSELDKAGFIKRQLVETRQITKHVAQILDSRMNTKYDENDKLIREVKVITLKSKLVSDFRKDFQFYKVREINNYHHAHDAYLNAVVGTALIKKYPKLESEFVYGDYKVYDVRKMIAKSEQEIGKATAKYFFYSNIMNFFKTEITLANGEIRKRPLIETNGETGEIVWDKGRDFATVRKVLSMPQVNIVKKTEVQTGGFSKESILPKRNSDKLIARKKDWDPKKYGGFDSPTVAYSVLVVAKVEKGKSKKLKSVKELLGITIMERSSFEKNPIDFLEAKGYKEVKKDLIIKLPKYSLFELENGRKRMLASAGELQKGNELALPSKYVNFLYLASHYEKLKGSPEDNEQKQLFVEQHKHYLDEIIEQISEFSKRVILADANLDKVLSAYNKHRDKPIREQAENIIHLFTLTNLGAPAAFKYFDTTIDRKRYTSTKEVLDATLIHQSITGLYETRIDLSQLGGDGGPAPGGGGGSGGTLGIEDEYRLHETSTEPDVSLGSTWLSDFPQAWAETGGMGLAVRQAPLIIPLKATSTPVSIQQYPMSHEARLGIKPHIQRLLDQGILVPCQSPWNTPLLPVKKPGTNDYRPVQDLREVNKRVEDIHPTVPNPYNLLSGLPPSHQWYTVLDLKDAFFCLRLHPTSQPLFAFEWRDPGMGISGQLTWTRLPQGFKNSPTLFNEALHRDLADFRIQHPDLILLQYVDDILLAATSELDCQQGTRALLQTLGDLGYRASAKKAQICQKQVKYLGYLLREGQRWLTEARKETVMGQPVPKTPRQLREFLGTAGFCRLWIPGFAEMAAPLYPLTKPGTLFSWGPDQQKAYQEIKQALLTAPALGLPDLTKPFELFVDEKQGYAKGVLTQKLGPWRRPVAYLSKKLDPVAAGWPPCLRMVAAIAVLTKDAGKLTMGQPLVILAPHAVEALVKQPPDRWLSNARMTHYQAMLLDTDRVQFGPVVALNPATLLPLPEEGAPHDCLEILAETHGTRPDLTDQPIPDADHTWYTDGSSFLQEGQRKAGAAVTTETEVIWAGALPAGTSAQRAELIALTQALKMAEGKRLNVYTDSRYAFATAHIHGEIYRRRGWLTSEGREIKNKSEILALLKALFLPKRLSIIHCLGHQKGDSAEARGNRLADQAAREAAIKTPPDTSTLLAGKRTADGSEFEKRTADGSEFESPKKKAKVE

SEQ ID NO: 7034 - protein, 2094 aa, synthetic construct
MPAAKRVKLDGGDKKYSIGLDIGTNSVGWAVITDEYKVPSKKFKVLGNTDRHSIKKNLIGALLFDSGETAEATRLKRTARRRYTRRKNRICYLQEIFSNEMAKVDDSFFHRLEESFLVEEDKKHERHPIFGNIVDEVAYHEKYPTIYHLRKKLVDSTDKADLRLIYLALAHMIKFRGHFLIEGDLNPDNSDVDKLFIQLVQTYNQLFEENPINASGVDAKAILSARLSKSRRLENLIAQLPGEKKNGLFGNLIALSLGLTPNFKSNFDLAEDAKLQLSKDTYDDDLDNLLAQIGDQYADLFLAAKNLSDAILLSDILRVNTEITKAPLSASMIKRYDEHHQDLTLLKALVRQQLPEKYKEIFFDQSKNGYAGYIDGGASQEEFYKFIKPILEKMDGTEELLVKLNREDLLRKQRTFDNGSIPHQIHLGELHAILRRQEDFYPFLKDNREKIEKILTFRIPYYVGPLARGNSRFAWMTRKSEETITPWNFEEVVDKGASAQSFIERMTNFDKNLPNEKVLPKHSLLYEYFTVYNELTKVKYVTEGMRKPAFLSGEQKKAIVDLLFKTNRKVTVKQLKEDYFKKIECFDSVEISGVEDRFNASLGTYHDLLKIIKDKDFLDNEENEDILEDIVLTLTLFEDREMIEERLKTYAHLFDDKVMKQLKRRRYTGWGRLSRKLINGIRDKQSGKTILDFLKSDGFANRNFMQLIHDDSLTFKEDIQKAQVSGQGDSLHEHIANLAGSPAIKKGILQTVKVVDELVKVMGRHKPENIVIEMARENQTTQKGQKNSRERMKRIEEGIKELGSQILKEHPVENTQLQNEKLYLYYLQNGRDMYVDQELDINRLSDYDVDHIVPQSFLKDDSIDNKVLTRSDKARGKSDNVPSEEVVKKMKNYWRQLLNAKLITQRKFDNLTKAERGGLSELDKAGFIKRQLVETRQITKHVAQILDSRMNTKYDENDKLIREVKVITLKSKLVSDFRKDFQFYKVREINNYHHAHDAYLNAVVGTALIKKYPKLESEFVYGDYKVYDVRKMIAKSEQEIGKATAKYFFYSNIMNFFKTEITLANGEIRKRPLIETNGETGEIVWDKGRDFATVRKVLSMPQVNIVKKTEVQTGGFSKESILPKRNSDKLIARKKDWDPKKYGGFDSPTVAYSVLVVAKVEKGKSKKLKSVKELLGITIMERSSFEKNPIDFLEAKGYKEVKKDLIIKLPKYSLFELENGRKRMLASAGELQKGNELALPSKYVNFLYLASHYEKLKGSPEDNEQKQLFVEQHKHYLDEIIEQISEFSKRVILADANLDKVLSAYNKHRDKPIREQAENIIHLFTLTNLGAPAAFKYFDTTIDRKRYTSTKEVLDATLIHQSITGLYETRIDLSQLGGDGGPAPGGGGGSGGTLNIEDEYRLHETSKEPDVSLGSTWLSDFPQAWAETGGMGLAVRQAPLIIPLKATSTPVSIKQYPMSQEARLGIKPHIQRLLDQGILVPCQSPWNTPLLPVKKPGTNDYRPVQDLREVNKRVEDIHPTVPNPYNLLSGLPPSHQWYTVLDLKDAFFCLRLHPTSQPLFAFEWRDPEMGISGQLTWTRLPQGFKNSPTLFNEALHRDLAGFRIQHPDLILLQYVDDLLLAATSELDCQQGTRALLQTLGDLGYRASAKKAQICQKQVKYLGYLLKEGQRWLTEARKETVMGQPIPKTPRQLREFLGTAGFCRLWIPGFAEMAAPLYPLTKPGTLFNWGPDQQKAFQEIKQALLTAPALGLPDLTKPFELFVDEKQGYAKGVLTQKLGPWRRPVAYLSKKLDPVAAGWPPCLRMVAAIAVLTKDAGKLTMGQPLVILAPHAVEALVKQPPDRWLSNARMTHYQALLLDTDRVQFGPVVALNPATLLPLPEEGLQHDCLDILAEAHGTRSDLMDQPLPDADHTWYTDGSSFLQEGQRKAGAAVTTETEVIWARALPAGTSAQRAELIALTQALKMAEGKKLNVYTDSRYAFATAHIHGEIYRRRGWLTSEGKEIKNKDEILALLKALFLPKRLSIIHCPGHQKGNSAEARGNRMADQAAREVATRETPETSTLLAGKRTADGSEFEKRTADGSEFESPKKKAKVE

SEQ ID NO: 7035 - protein, 2094 aa, synthetic construct
MPAAKRVKLDGGDKKYSIGLDIGTNSVGWAVITDEYKVPSKKFKVLGNTDRHSIKKNLIGALLFDSGETAEATRLKRTARRRYTRRKNRICYLQEIFSNEMAKVDDSFFHRLEESFLVEEDKKHERHPIFGNIVDEVAYHEKYPTIYHLRKKLVDSTDKADLRLIYLALAHMIKFRGHFLIEGDLNPDNSDVDKLFIQLVQTYNQLFEENPINASGVDAKAILSARLSKSRRLENLIAQLPGEKKNGLFGNLIALSLGLTPNFKSNFDLAEDAKLQLSKDTYDDDLDNLLAQIGDQYADLFLAAKNLSDAILLSDILRVNTEITKAPLSASMIKRYDEHHQDLTLLKALVRQQLPEKYKEIFFDQSKNGYAGYIDGGASQEEFYKFIKPILEKMDGTEELLVKLNREDLLRKQRTFDNGSIPHQIHLGELHAILRRQEDFYPFLKDNREKIEKILTFRIPYYVGPLARGNSRFAWMTRKSEETITPWNFEEVVDKGASAQSFIERMTNFDKNLPNEKVLPKHSLLYEYFTVYNELTKVKYVTEGMRKPAFLSGEQKKAIVDLLFKTNRKVTVKQLKEDYFKKIECFDSVEISGVEDRFNASLGTYHDLLKIIKDKDFLDNEENEDILEDIVLTLTLFEDREMIEERLKTYAHLFDDKVMKQLKRRRYTGWGRLSRKLINGIRDKQSGKTILDFLKSDGFANRNFMQLIHDDSLTFKEDIQKAQVSGQGDSLHEHIANLAGSPAIKKGILQTVKVVDELVKVMGRHKPENIVIEMARENQTTQKGQKNSRERMKRIEEGIKELGSQILKEHPVENTQLQNEKLYLYYLQNGRDMYVDQELDINRLSDYDVDHIVPQSFLKDDSIDNKVLTRSDKARGKSDNVPSEEVVKKMKNYWRQLLNAKLITQRKFDNLTKAERGGLSELDKAGFIKRQLVETRQITKHVAQILDSRMNTKYDENDKLIREVKVITLKSKLVSDFRKDFQFYKVREINNYHHAHDAYLNAVVGTALIKKYPKLESEFVYGDYKVYDVRKMIAKSEQEIGKATAKYFFYSNIMNFFKTEITLANGEIRKRPLIETNGETGEIVWDKGRDFATVRKVLSMPQVNIVKKTEVQTGGFSKESILPKRNSDKLIARKKDWDPKKYGGFDSPTVAYSVLVVAKVEKGKSKKLKSVKELLGITIMERSSFEKNPIDFLEAKGYKEVKKDLIIKLPKYSLFELENGRKRMLASAGELQKGNELALPSKYVNFLYLASHYEKLKGSPEDNEQKQLFVEQHKHYLDEIIEQISEFSKRVILADANLDKVLSAYNKHRDKPIREQAENIIHLFTLTNLGAPAAFKYFDTTIDRKRYTSTKEVLDATLIHQSITGLYETRIDLSQLGGDGGPAPGGGGGSGGTLNIEDEYRLHETSKGPDVPLGSTWLSDFPQAWAETGGMGLAVRQAPLIIPLKATSTPVSIKQYPMSQEARLGIKPHIQRLLDQGILVPCQSPWNTPLLPVKKPGTNDYRPVQDLREVNKRVEDIHPTVPNPYNLLSGLPPSHQWYTVLDLKDAFFCLRLHPTSQSLFAFEWRDPEMGISGQLTWTRLPQGFKNSPTLFNEALHRDLADFRIQHPDLILLQYVDDLLLAATSELDCQQGTRALLQTLGDLGYRASAKKAQICQKQVKYLGYLLKEGQRWLTEARKETVMGQPTPKTPRQLREFLGKAGFCRLFIPGFAEMAAPLYPLTKPGTLFEWGPDQQKAYQEIKQALLTAPALGLPDLTKPFELFVDEKQGYAKGVLTQKLGPWRRPVAYLSKKLDPVAAGWPPCLRMVAAIAVLTKDAGKLTMGQPLVILAPHAVEALVKQPPDRWLSNARMTHYQALLLDTDRVQFGPIVALNPATLLPLPEEGLQHDCLDILAEAHGTRPDLTDQPLPDADHTWYTDGSSFLQEGQRKAGAAVTTETEVVWAKALPAGTSAQRAELIALTQALKMAEGKKLNVYTDSRYAFATAHIHGEIYRRRGWLTSEGKEIKNKDEILALLKALFLPKRLSIIHCPGHQKGNRAEARGNRMADQAAREVATRETPETSTLLAGKRTADGSEFEKRTADGSEFESPKKKAKVE

SEQ ID NO: 7036 - protein, 2094 aa, synthetic construct; identical to SEQ ID NO: 4521

SEQ ID NO: 7037 - protein, 2094 aa, synthetic construct
MPAAKRVKLDGGDKKYSIGLDIGTNSVGWAVITDEYKVPSKKFKVLGNTDRHSIKKNLIGALLFDSGETAEATRLKRTARRRYTRRKNRICYLQEIFSNEMAKVDDSFFHRLEESFLVEEDKKHERHPIFGNIVDEVAYHEKYPTIYHLRKKLVDSTDKADLRLIYLALAHMIKFRGHFLIEGDLNPDNSDVDKLFIQLVQTYNQLFEENPINASGVDAKAILSARLSKSRRLENLIAQLPGEKKNGLFGNLIALSLGLTPNFKSNFDLAEDAKLQLSKDTYDDDLDNLLAQIGDQYADLFLAAKNLSDAILLSDILRVNTEITKAPLSASMIKRYDEHHQDLTLLKALVRQQLPEKYKEIFFDQSKNGYAGYIDGGASQEEFYKFIKPILEKMDGTEELLVKLNREDLLRKQRTFDNGSIPHQIHLGELHAILRRQEDFYPFLKDNREKIEKILTFRIPYYVGPLARGNSRFAWMTRKSEETITPWNFEEVVDKGASAQSFIERMTNFDKNLPNEKVLPKHSLLYEYFTVYNELTKVKYVTEGMRKPAFLSGEQKKAIVDLLFKTNRKVTVKQLKEDYFKKIECFDSVEISGVEDRFNASLGTYHDLLKIIKDKDFLDNEENEDILEDIVLTLTLFEDREMIEERLKTYAHLFDDKVMKQLKRRRYTGWGRLSRKLINGIRDKQSGKTILDFLKSDGFANRNFMQLIHDDSLTFKEDIQKAQVSGQGDSLHEHIANLAGSPAIKKGILQTVKVVDELVKVMGRHKPENIVIEMARENQTTQKGQKNSRERMKRIEEGIKELGSQILKEHPVENTQLQNEKLYLYYLQNGRDMYVDQELDINRLSDYDVDHIVPQSFLKDDSIDNKVLTRSDKARGKSDNVPSEEVVKKMKNYWRQLLNAKLITQRKFDNLTKAERGGLSELDKAGFIKRQLVETRQITKHVAQILDSRMNTKYDENDKLIREVKVITLKSKLVSDFRKDFQFYKVREINNYHHAHDAYLNAVVGTALIKKYPKLESEFVYGDYKVYDVRKMIAKSEQEIGKATAKYFFYSNIMNFFKTEITLANGEIRKRPLIETNGETGEIVWDKGRDFATVRKVLSMPQVNIVKKTEVQTGGFSKESILPKRNSDKLIARKKDWDPKKYGGFDSPTVAYSVLVVAKVEKGKSKKLKSVKELLGITIMERSSFEKNPIDFLEAKGYKEVKKDLIIKLPKYSLFELENGRKRMLASAGELQKGNELALPSKYVNFLYLASHYEKLKGSPEDNEQKQLFVEQHKHYLDEIIEQISEFSKRVILADANLDKVLSAYNKHRDKPIREQAENIIHLFTLTNLGAPAAFKYFDTTIDRKRYTSTKEVLDATLIHQSITGLYETRIDLSQLGGDGGPAPGGGGGSGGTLNIEDEHRLHETSKEPDVSLGSTWLSDFPQAWAETGGMGLAVRQAPLIIPLKATSTPVSIKQYPMSQEARLGIKPHIQRLLDQGILVPCQSPWNTPLLPVKKPGTNDYRPVQDLREVNKRVEDIHPTVPNPYNLLSGLPPSHQWYTVLDLKDAFFCLRLHPTSQPLFAFEWRDPEMGISGQLTWTRLPQGFKNSPTLFDEALHRDLADFRIQHPDLILLQYVDDLLLAATSELDCQQGTRALLQTLGNLGYRASAKKAQICQKQVKYLGYLLKEGQRWLTEARKETVMGQPTPKTPRQLREFLGTAGFCRLWIPGFAEMAAPLYPLTKTGTLFNWGPDQQKAYQEIKQALLTAPALGLPDLTKPFELFVDEKQGYAKGVLTQKLGPWRRPVAYLSKKLDPVAAGWPPCLRMVAAIAVLTKDAGKLTMGQPLVILAPHAVEALVKQPPDRWLSNARMTHYQALLLDTDRVQFGPVVALNPATLLPLPEEGLQHNCLDILAEAHGTRPDLTDQPLPDADHTWYTDGSSLLQEGQRKAGAAVTTETEVIWAKALPAGTSAQRAELIALTQALKMAEGKKLNVYTDSRYAFATAHIHGEIYRRRGLLTSEGKEIKNKDEILALLKALFLPKRLSIIHCPGHQKGHSAEARGNRMADQAARKAAITETPDTSTLLAGKRTADGSEFEKRTADGSEFESPKKKAKVE

SEQ ID NO: 7038 - protein, 2094 aa, synthetic construct; identical to SEQ ID NO: 4521

SEQ ID NO: 7039 - protein, 2022 aa, synthetic construct
MPAAKRVKLDGGDKKYSIGLDIGTNSVGWAVITDEYKVPSKKFKVLGNTDRHSIKKNLIGALLFDSGETAEATRLKRTARRRYTRRKNRICYLQEIFSNEMAKVDDSFFHRLEESFLVEEDKKHERHPIFGNIVDEVAYHEKYPTIYHLRKKLVDSTDKADLRLIYLALAHMIKFRGHFLIEGDLNPDNSDVDKLFIQLVQTYNQLFEENPINASGVDAKAILSARLSKSRRLENLIAQLPGEKKNGLFGNLIALSLGLTPNFKSNFDLAEDAKLQLSKDTYDDDLDNLLAQIGDQYADLFLAAKNLSDAILLSDILRVNTEITKAPLSASMIKRYDEHHQDLTLLKALVRQQLPEKYKEIFFDQSKNGYAGYIDGGASQEEFYKFIKPILEKMDGTEELLVKLNREDLLRKQRTFDNGSIPHQIHLGELHAILRRQEDFYPFLKDNREKIEKILTFRIPYYVGPLARGNSRFAWMTRKSEETITPWNFEEVVDKGASAQSFIERMTNFDKNLPNEKVLPKHSLLYEYFTVYNELTKVKYVTEGMRKPAFLSGEQKKAIVDLLFKTNRKVTVKQLKEDYFKKIECFDSVEISGVEDRFNASLGTYHDLLKIIKDKDFLDNEENEDILEDIVLTLTLFEDREMIEERLKTYAHLFDDKVMKQLKRRRYTGWGRLSRKLINGIRDKQSGKTILDFLKSDGFANRNFMQLIHDDSLTFKEDIQKAQVSGQGDSLHEHIANLAGSPAIKKGILQTVKVVDELVKVMGRHKPENIVIEMARENQTTQKGQKNSRERMKRIEEGIKELGSQILKEHPVENTQLQNEKLYLYYLQNGRDMYVDQELDINRLSDYDVDHIVPQSFLKDDSIDNKVLTRSDKARGKSDNVPSEEVVKKMKNYWRQLLNAKLITQRKFDNLTKAERGGLSELDKAGFIKRQLVETRQITKHVAQILDSRMNTKYDENDKLIREVKVITLKSKLVSDFRKDFQFYKVREINNYHHAHDAYLNAVVGTALIKKYPKLESEFVYGDYKVYDVRKMIAKSEQEIGKATAKYFFYSNIMNFFKTEITLANGEIRKRPLIETNGETGEIVWDKGRDFATVRKVLSMPQVNIVKKTEVQTGGFSKESILPKRNSDKLIARKKDWDPKKYGGFDSPTVAYSVLVVAKVEKGKSKKLKSVKELLGITIMERSSFEKNPIDFLEAKGYKEVKKDLIIKLPKYSLFELENGRKRMLASAGELQKGNELALPSKYVNFLYLASHYEKLKGSPEDNEQKQLFVEQHKHYLDEIIEQISEFSKRVILADANLDKVLSAYNKHRDKPIREQAENIIHLFTLTNLGAPAAFKYFDTTIDRKRYTSTKEVLDATLIHQSITGLYETRIDLSQLGGDGGPAPGGGGGSGGGRDIMKDIKVRLMTDSPDDSQDLMIGAIESNLFADQISWKSDQPVWLNQWPLKQEKLQALQQLVTEQLQLGHLEESNSPWNTPVFVIKKKSGKWRLLQDLRAVNATMHDMGALQPGLPSPVAPPKGWEIIIIDLQDCFFNIKLHPEDCKRFAFSVPSPNFKRPYQRFQWKVLPQGMKNSPTLCQKFVDKAILTVRDKYQDSYIVHYMDDILLAHPSRSIVDEILTSMIQALNKHGLVVSTEKIQKYDNLKYLGTHIQGDSVSYQKLQIRTDKLRTLNDFQKLLGNINWIRPFLKLTTGELKPLFEILNPDSNPISTRKLTPEACKALQLMNERLSTARVKRLDLSQPWSLCILKTEYTPTACLWQDGVVEWIHLPHISPKVITPYDIFCTQLIIKGRHRSKELFSKDPDYIVVPYTKVQFDLLLQEKEDWPISLLGFLGEVHFHLPKDPLLTFTLQTAIIFPHMTSTTPLEKGIVIFTDGSANGRSVTYIQGREPIIKENTQNTAQQAEIVAVITAFEEVSQPFNLYTDSKYVTGLFPEIETATLSPRTKIYTELKHLQRLIHKRQEKFYIGHIRGHTGLPGPLAQGNAYADSLTRILTAGKRTADGSEFEKRTADGSEFESPKKKAKVE

SEQ ID NO: 7040 - protein, 2086 aa, synthetic construct
MPAAKRVKLDGGDKKYSIGLDIGTNSVGWAVITDEYKVPSKKFKVLGNTDRHSIKKNLIGALLFDSGETAEATRLKRTARRRYTRRKNRICYLQEIFSNEMAKVDDSFFHRLEESFLVEEDKKHERHPIFGNIVDEVAYHEKYPTIYHLRKKLVDSTDKADLRLIYLALAHMIKFRGHFLIEGDLNPDNSDVDKLFIQLVQTYNQLFEENPINASGVDAKAILSARLSKSRRLENLIAQLPGEKKNGLFGNLIALSLGLTPNFKSNFDLAEDAKLQLSKDTYDDDLDNLLAQIGDQYADLFLAAKNLSDAILLSDILRVNTEITKAPLSASMIKRYDEHHQDLTLLKALVRQQLPEKYKEIFFDQSKNGYAGYIDGGASQEEFYKFIKPILEKMDGTEELLVKLNREDLLRKQRTFDNGSIPHQIHLGELHAILRRQEDFYPFLKDNREKIEKILTFRIPYYVGPLARGNSRFAWMTRKSEETITPWNFEEVVDKGASAQSFIERMTNFDKNLPNEKVLPKHSLLYEYFTVYNELTKVKYVTEGMRKPAFLSGEQKKAIVDLLFKTNRKVTVKQLKEDYFKKIECFDSVEISGVEDRFNASLGTYHDLLKIIKDKDFLDNEENEDILEDIVLTLTLFEDREMIEERLKTYAHLFDDKVMKQLKRRRYTGWGRLSRKLINGIRDKQSGKTILDFLKSDGFANRNFMQLIHDDSLTFKEDIQKAQVSGQGDSLHEHIANLAGSPAIKKGILQTVKVVDELVKVMGRHKPENIVIEMARENQTTQKGQKNSRERMKRIEEGIKELGSQILKEHPVENTQLQNEKLYLYYLQNGRDMYVDQELDINRLSDYDVDHIVPQSFLKDDSIDNKVLTRSDKARGKSDNVPSEEVVKKMKNYWRQLLNAKLITQRKFDNLTKAERGGLSELDKAGFIKRQLVETRQITKHVAQILDSRMNTKYDENDKLIREVKVITLKSKLVSDFRKDFQFYKVREINNYHHAHDAYLNAVVGTALIKKYPKLESEFVYGDYKVYDVRKMIAKSEQEIGKATAKYFFYSNIMNFFKTEITLANGEIRKRPLIETNGETGEIVWDKGRDFATVRKVLSMPQVNIVKKTEVQTGGFSKESILPKRNSDKLIARKKDWDPKKYGGFDSPTVAYSVLVVAKVEKGKSKKLKSVKELLGITIMERSSFEKNPIDFLEAKGYKEVKKDLIIKLPKYSLFELENGRKRMLASAGELQKGNELALPSKYVNFLYLASHYEKLKGSPEDNEQKQLFVEQHKHYLDEIIEQISEFSKRVILADANLDKVLSAYNKHRDKPIREQAENIIHLFTLTNLGAPAAFKYFDTTIDRKRYTSTKEVLDATLIHQSITGLYETRIDLSQLGGDGGPAPGGGGGSGGLDDEYRLYSPLVKPDQNIQFWLEQFPQAWAETAGMGLAKQVPPQVIQLKASATPVSVRQYPLSKEAQEGIRPHVQRLIQQGILVPVQSPWNTPLLPVRKPGTNDYRPVQDLREVNKRVQDIHPTVPNPYNLLCALPPQRSWYTVLDLKDAFFCLRLHPTSQPLFAFEWRDPGTGRTGQLTWTRLPQGFKNSPTIFNEALHRDLANFRIQHPQVTLLQYVDDLLLAGATKQDCLEGTKALLLELSDLGYRASAKKAQICRREVTYLGYSLRDGQRWLTEARKKTVVQIPAPTTAKQVREFLGKAGFCRLFIPGFATLAAPLYPLTKPKGEFSWAPEHQKAFDAIKKALLSAPALALPDVTKPFTLYVDERKGVARGVLTQTLGPWRRPVAYLSKKLDPVASGWPVCLKAIAAVAILVKDADKLTLGQNITVIAPHALENIVRQPPDRWMTNARMTHYQSLLLTERVTFAPPAALNPATLLPEETDEPVTHDCHQLLIEETGVRKDLTDIPLTGEVLTWFTDGSSYVVEGKRMAGAAVVDGTRTIWASSLPEGTSAQKAELMALTQALRLAEGKSINIYTDSRYAFATAHVHGAIYKQRGWLTSAGREIKNKEEILSLLEALHLPKRLAIIHCPGHQKAKDPISRGNQMADRVAKQAAQGVNLLPAGKRTADGSEFEKRTADGSEFESPKKKAKVE

SEQ ID NO: 7041 - protein, 2174 aa, synthetic construct
MPAAKRVKLDGGDKKYSIGLDIGTNSVGWAVITDEYKVPSKKFKVLGNTDRHSIKKNLIGALLFDSGETAEATRLKRTARRRYTRRKNRICYLQEIFSNEMAKVDDSFFHRLEESFLVEEDKKHERHPIFGNIVDEVAYHEKYPTIYHLRKKLVDSTDKADLRLIYLALAHMIKFRGHFLIEGDLNPDNSDVDKLFIQLVQTYNQLFEENPINASGVDAKAILSARLSKSRRLENLIAQLPGEKKNGLFGNLIALSLGLTPNFKSNFDLAEDAKLQLSKDTYDDDLDNLLAQIGDQYADLFLAAKNLSDAILLSDILRVNTEITKAPLSASMIKRYDEHHQDLTLLKALVRQQLPEKYKEIFFDQSKNGYAGYIDGGASQEEFYKFIKPILEKMDGTEELLVKLNREDLLRKQRTFDNGSIPHQIHLGELHAILRRQEDFYPFLKDNREKIEKILTFRIPYYVGPLARGNSRFAWMTRKSEETITPWNFEEVVDKGASAQSFIERMTNFDKNLPNEKVLPKHSLLYEYFTVYNELTKVKYVTEGMRKPAFLSGEQKKAIVDLLFKTNRKVTVKQLKEDYFKKIECFDSVEISGVEDRFNASLGTYHDLLKIIKDKDFLDNEENEDILEDIVLTLTLFEDREMIEERLKTYAHLFDDKVMKQLKRRRYTGWGRLSRKLINGIRDKQSGKTILDFLKSDGFANRNFMQLIHDDSLTFKEDIQKAQVSGQGDSLHEHIANLAGSPAIKKGILQTVKVVDELVKVMGRHKPENIVIEMARENQTTQKGQKNSRERMKRIEEGIKELGSQILKEHPVENTQLQNEKLYLYYLQNGRDMYVDQELDINRLSDYDVDHIVPQSFLKDDSIDNKVLTRSDKARGKSDNVPSEEVVKKMKNYWRQLLNAKLITQRKFDNLTKAERGGLSELDKAGFIKRQLVETRQITKHVAQILDSRMNTKYDENDKLIREVKVITLKSKLVSDFRKDFQFYKVREINNYHHAHDAYLNAVVGTALIKKYPKLESEFVYGDYKVYDVRKMIAKSEQEIGKATAKYFFYSNIMNFFKTEITLANGEIRKRPLIETNGETGEIVWDKGRDFATVRKVLSMPQVNIVKKTEVQTGGFSKESILPKRNSDKLIARKKDWDPKKYGGFDSPTVAYSVLVVAKVEKGKSKKLKSVKELLGITIMERSSFEKNPIDFLEAKGYKEVKKDLIIKLPKYSLFELENGRKRMLASAGELQKGNELALPSKYVNFLYLASHYEKLKGSPEDNEQKQLFVEQHKHYLDEIIEQISEFSKRVILADANLDKVLSAYNKHRDKPIREQAENIIHLFTLTNLGAPAAFKYFDTTIDRKRYTSTKEVLDATLIHQSITGLYETRIDLSQLGGDGGPAPGGGGGSGGMDPLQLLQPLEAEIKGTKLKAHWNSGATITCVPEAFLEDERPIQTMLIKTIHGEKQQDVYYLTFKVQGRKVEAEVLASPYDYILLNPSDVPWLMKKPLQLTVLVPLHEYQERLLQQTALPKEQKELLQKLFLKYDALWQHWENQVGHRRIKPHNIATGTLAPRPQKQYPINPKAKPSIQIVIDDLLKQGVLIQQNSTMNTPVYPVPKPDGKWRMVLDYREVNKTIPLIAAQNQHSAGILSSIYRGKYKTTLDLTNGFWAHPITPESYWLTAFTWQGKQYCWTRLPQGFLNSPALFTADVVDLLKEIPNVQAYVDDIYISHDDPQEHLEQLEKIFSILLNAGYVVSLKKSEIAQREVEFLGFNITKEGRGLTDTFKQKLLNITPPKDLKQLQSILGLLNFARNFIPNYSELVKPLYTIVANANGKFISWTEDNSNQLQHIISVLNQADNLEERNPETRLIIKVNSSPSAGYIRYYNEGSKRPIMYVNYIFSKAEAKFTQTEKLLTTMHKGLIKAMDLAMGQEILVYSPIVSMTKIQRTPLPERKALPVRWITWMTYLEDPRIQFHYDKSLPELQQIPNVTEDVIAKTKHPSEFAMVFYTDGSAIKHPDVNKSHSAGMGIAQVQFIPEYKIVHQWSIPLGDHTAQLAEIAAVEFACKKALKISGPVLIVTDSFYVAESANKELPYWKSNGFLNNKKKPLRHVSKWKSIAECLQLKPDIIIMHEKGHQQPMTTLHTEGNNLADKLATQGSYVVHAGKRTADGSEFEKRTADGSEFESPKKKAKVE

SEQ ID NO: 7042 - protein, 2092 aa, synthetic construct
MPAAKRVKLDGGDKKYSIGLDIGTNSVGWAVITDEYKVPSKKFKVLGNTDRHSIKKNLIGALLFDSGETAEATRLKRTARRRYTRRKNRICYLQEIFSNEMAKVDDSFFHRLEESFLVEEDKKHERHPIFGNIVDEVAYHEKYPTIYHLRKKLVDSTDKADLRLIYLALAHMIKFRGHFLIEGDLNPDNSDVDKLFIQLVQTYNQLFEENPINASGVDAKAILSARLSKSRRLENLIAQLPGEKKNGLFGNLIALSLGLTPNFKSNFDLAEDAKLQLSKDTYDDDLDNLLAQIGDQYADLFLAAKNLSDAILLSDILRVNTEITKAPLSASMIKRYDEHHQDLTLLKALVRQQLPEKYKEIFFDQSKNGYAGYIDGGASQEEFYKFIKPILEKMDGTEELLVKLNREDLLRKQRTFDNGSIPHQIHLGELHAILRRQEDFYPFLKDNREKIEKILTFRIPYYVGPLARGNSRFAWMTRKSEETITPWNFEEVVDKGASAQSFIERMTNFDKNLPNEKVLPKHSLLYEYFTVYNELTKVKYVTEGMRKPAFLSGEQKKAIVDLLFKTNRKVTVKQLKEDYFKKIECFDSVEISGVEDRFNASLGTYHDLLKIIKDKDFLDNEENEDILEDIVLTLTLFEDREMIEERLKTYAHLFDDKVMKQLKRRRYTGWGRLSRKLINGIRDKQSGKTILDFLKSDGFANRNFMQLIHDDSLTFKEDIQKAQVSGQGDSLHEHIANLAGSPAIKKGILQTVKVVDELVKVMGRHKPENIVIEMARENQTTQKGQKNSRERMKRIEEGIKELGSQILKEHPVENTQLQNEKLYLYYLQNGRDMYVDQELDINRLSDYDVDHIVPQSFLKDDSIDNKVLTRSDKARGKSDNVPSEEVVKKMKNYWRQLLNAKLITQRKFDNLTKAERGGLSELDKAGFIKRQLVETRQITKHVAQILDSRMNTKYDENDKLIREVKVITLKSKLVSDFRKDFQFYKVREINNYHHAHDAYLNAVVGTALIKKYPKLESEFVYGDYKVYDVRKMIAKSEQEIGKATAKYFFYSNIMNFFKTEITLANGEIRKRPLIETNGETGEIVWDKGRDFATVRKVLSMPQVNIVKKTEVQTGGFSKESILPKRNSDKLIARKKDWDPKKYGGFDSPTVAYSVLVVAKVEKGKSKKLKSVKELLGITIMERSSFEKNPIDFLEAKGYKEVKKDLIIKLPKYSLFELENGRKRMLASAGELQKGNELALPSKYVNFLYLASHYEKLKGSPEDNEQKQLFVEQHKHYLDEIIEQISEFSKRVILADANLDKVLSAYNKHRDKPIREQAENIIHLFTLTNLGAPAAFKYFDTTIDRKRYTSTKEVLDATLIHQSITGLYETRIDLSQLGGDGGPAPGGGGGSGGVLNLEEEYRLHEKPVPSSIDPSWLQLFPTVWAERAGMGLANQVPPVVVELRSGASPVAVRQYPMSKEAREGIRPHIQRFLDLGVLVPCQSPWNTPLLPVKKPGTNDYRPVQDLREINKRVQDIHPTVPNPYNLLSSLPPSHTWYSVLDLKDAFFCLKLHPNSQPLFAFEWRDPEKGNTGQLTWTRLPQGFKNSPTLFDEALHRDLAPFRALNPQVVLLQYVDDLLVAAPTYRDCKEGTQKLLQELSKLGYRVSAKKAQLCQKEVTYLGYLLKEGKRWLTPARKATVMKIPPPTTPRQVREFLGTAGFCRLWIPGFASLAAPLYPLTKESIPFIWTEEHQKAFDRIKEALLSAPALALPDLTKPFTLYVDERAGVARGVLTQTLGPWRRPVAYLSKKLDPVASGWPTCLKAVAAVALLLKDADKLTLGQNVTVIASHSLESIVRQPPDRWMTNARMTHYQSLLLNERVSFAPPAVLNPATLLPVESEATPVHRCSEILAEETGTRRDLKDQPLPGVPAWYTDGSSFIAEGKRRAGAAIVDGKRTVWASSLPEGTSAQKAELVALTQALRLAEGKDINIYTDSRYAFATAHIHGAIYKQRGLLTSAGKDIKNKEEILALLEAIHLPKRVAIIHCPGHQKGNDPVATGNRRADEAAKQAALSTRVLAETTKPAGKRTADGSEFEKRTADGSEFESPKKKAKVE

SEQ ID NO: 7043 - protein, 2092 aa, synthetic construct
MPAAKRVKLDGGDKKYSIGLDIGTNSVGWAVITDEYKVPSKKFKVLGNTDRHSIKKNLIGALLFDSGETAEATRLKRTARRRYTRRKNRICYLQEIFSNEMAKVDDSFFHRLEESFLVEEDKKHERHPIFGNIVDEVAYHEKYPTIYHLRKKLVDSTDKADLRLIYLALAHMIKFRGHFLIEGDLNPDNSDVDKLFIQLVQTYNQLFEENPINASGVDAKAILSARLSKSRRLENLIAQLPGEKKNGLFGNLIALSLGLTPNFKSNFDLAEDAKLQLSKDTYDDDLDNLLAQIGDQYADLFLAAKNLSDAILLSDILRVNTEITKAPLSASMIKRYDEHHQDLTLLKALVRQQLPEKYKEIFFDQSKNGYAGYIDGGASQEEFYKFIKPILEKMDGTEELLVKLNREDLLRKQRTFDNGSIPHQIHLGELHAILRRQEDFYPFLKDNREKIEKILTFRIPYYVGPLARGNSRFAWMTRKSEETITPWNFEEVVDKGASAQSFIERMTNFDKNLPNEKVLPKHSLLYEYFTVYNELTKVKYVTEGMRKPAFLSGEQKKAIVDLLFKTNRKVTVKQLKEDYFKKIECFDSVEISGVEDRFNASLGTYHDLLKIIKDKDFLDNEENEDILEDIVLTLTLFEDREMIEERLKTYAHLFDDKVMKQLKRRRYTGWGRLSRKLINGIRDKQSGKTILDFLKSDGFANRNFMQLIHDDSLTFKEDIQKAQVSGQGDSLHEHIANLAGSPAIKKGILQTVKVVDELVKVMGRHKPENIVIEMARENQTTQKGQKNSRERMKRIEEGIKELGSQILKEHPVENTQLQNEKLYLYYLQNGRDMYVDQELDINRLSDYDVDHIVPQSFLKDDSIDNKVLTRSDKARGKSDNVPSEEVVKKMKNYWRQLLNAKLITQRKFDNLTKAERGGLSELDKAGFIKRQLVETRQITKHVAQILDSRMNTKYDENDKLIREVKVITLKSKLVSDFRKDFQFYKVREINNYHHAHDAYLNAVVGTALIKKYPKLESEFVYGDYKVYDVRKMIAKSEQEIGKATAKYFFYSNIMNFFKTEITLANGEIRKRPLIETNGETGEIVWDKGRDFATVRKVLSMPQVNIVKKTEVQTGGFSKESILPKRNSDKLIARKKDWDPKKYGGFDSPTVAYSVLVVAKVEKGKSKKLKSVKELLGITIMERSSFEKNPIDFLEAKGYKEVKKDLIIKLPKYSLFELENGRKRMLASAGELQKGNELALPSKYVNFLYLASHYEKLKGSPEDNEQKQLFVEQHKHYLDEIIEQISEFSKRVILADANLDKVLSAYNKHRDKPIREQAENIIHLFTLTNLGAPAAFKYFDTTIDRKRYTSTKEVLDATLIHQSITGLYETRIDLSQLGGDGGPAPGGGGGSGGVLNLEEEYRLHEKPVPSSIDPSWLQLFPTVWAERAGMGLANQVPPVVVELRSGASPVAVRQYPMSKEAREGIRPHIQRFLDLGVLVPCQSPWNTPLLPVKKPGTNDYRPVQDLREINKRVQDIHPTVPNPYNLLSSLPPSHTWYSVLDLKDAFFCLKLHPNSQPLFAFEWRDPEKGNTGQLTWTRLPQGFKNSPTLFNEALHRDLAPFRALNPQVVLLQYVDDLLVAAPTYRDCKEGTQKLLQELSKLGYRVSAKKAQLCQKEVTYLGYLLKEGKRWLTPARKATVMKIPPPTTPRQVREFLGKAGFCRLFIPGFASLAAPLYPLTKPSIPFIWTEEHQKAFDRIKEALLSAPALALPDLTKPFTLYVDERAGVARGVLTQTLGPWRRPVAYLSKKLDPVASGWPTCLKAVAAVALLLKDADKLTLGQNVTVIASHSLESIVRQPPDRWMTNARMTHYQSLLLNERVSFAPPAVLNPATLLPVESEATPVHRCSEILAEETGTRRDLKDQPLPGVPAWYTDGSSFIAEGKRRAGAAIVDGKRTVWASSLPEGTSAQKAELVALTQALRLAEGKDINIYTDSRYAFATAHIHGAIYKQRGWLTSAGKDIKNKEEILALLEAIHLPKRVAIIHCPGHQKGNDPVATGNRRADEAAKQAALSTRVLAETTKPAGKRTADGSEFEKRTADGSEFESPKKKAKVE

SEQ ID NO: 7044 - protein, 2094 aa, synthetic construct
MPAAKRVKLDGGDKKYSIGLDIGTNSVGWAVITDEYKVPSKKFKVLGNTDRHSIKKNLIGALLFDSGETAEATRLKRTARRRYTRRKNRICYLQEIFSNEMAKVDDSFFHRLEESFLVEEDKKHERHPIFGNIVDEVAYHEKYPTIYHLRKKLVDSTDKADLRLIYLALAHMIKFRGHFLIEGDLNPDNSDVDKLFIQLVQTYNQLFEENPINASGVDAKAILSARLSKSRRLENLIAQLPGEKKNGLFGNLIALSLGLTPNFKSNFDLAEDAKLQLSKDTYDDDLDNLLAQIGDQYADLFLAAKNLSDAILLSDILRVNTEITKAPLSASMIKRYDEHHQDLTLLKALVRQQLPEKYKEIFFDQSKNGYAGYIDGGASQEEFYKFIKPILEKMDGTEELLVKLNREDLLRKQRTFDNGSIPHQIHLGELHAILRRQEDFYPFLKDNREKIEKILTFRIPYYVGPLARGNSRFAWMTRKSEETITPWNFEEVVDKGASAQSFIERMTNFDKNLPNEKVLPKHSLLYEYFTVYNELTKVKYVTEGMRKPAFLSGEQKKAIVDLLFKTNRKVTVKQLKEDYFKKIECFDSVEISGVEDRFNASLGTYHDLLKIIKDKDFLDNEENEDILEDIVLTLTLFEDREMIEERLKTYAHLFDDKVMKQLKRRRYTGWGRLSRKLINGIRDKQSGKTILDFLKSDGFANRNFMQLIHDDSLTFKEDIQKAQVSGQGDSLHEHIANLAGSPAIKKGILQTVKVVDELVKVMGRHKPENIVIEMARENQTTQKGQKNSRERMKRIEEGIKELGSQILKEHPVENTQLQNEKLYLYYLQNGRDMYVDQELDINRLSDYDVDHIVPQSFLKDDSIDNKVLTRSDKARGKSDNVPSEEVVKKMKNYWRQLLNAKLITQRKFDNLTKAERGGLSELDKAGFIKRQLVETRQITKHVAQILDSRMNTKYDENDKLIREVKVITLKSKLVSDFRKDFQFYKVREINNYHHAHDAYLNAVVGTALIKKYPKLESEFVYGDYKVYDVRKMIAKSEQEIGKATAKYFFYSNIMNFFKTEITLANGEIRKRPLIETNGETGEIVWDKGRDFATVRKVLSMPQVNIVKKTEVQTGGFSKESILPKRNSDKLIARKKDWDPKKYGGFDSPTVAYSVLVVAKVEKGKSKKLKSVKELLGITIMERSSFEKNPIDFLEAKGYKEVKKDLIIKLPKYSLFELENGRKRMLASAGELQKGNELALPSKYVNFLYLASHYEKLKGSPEDNEQKQLFVEQHKHYLDEIIEQISEFSKRVILADANLDKVLSAYNKHRDKPIREQAENIIHLFTLTNLGAPAAFKYFDTTIDRKRYTSTKEVLDATLIHQSITGLYETRIDLSQLGGDGGPAPGGGGGSGGTLNIEDEYRLHETSKEPDVPLGSTWLSDFPQAWAETGGMGLAVRQAPLIIPLKATSTPVSIKQYPMSQEARLGIKPHIQRLLDQGILVPCQSPWNTPLLPVKKPGTNDYRPVQDLREVNKRVEDIHPTVPNPYNLLSGLPPSHQWYTVLDLKDAFFCLRLHPTSQPLFAFEWRDPEMGISGQLTWTRLPQGFKNSPTLFNEALHRDLADFRIQHPDLILLQYVDDLLLAATSEQDCQRGTRALLQTLGNLGYRASAKKAQICQKQVKYLGYLLKEGQRWLTEARKETVMGQPTPKTPRQLREFLGTAGFCRLWIPGFAEMAAPLYPLTKPGTLFNWGPDQQKAYQEIKQALLTAPALGLPDLTKPFELFVDEKQGYAKGVLTQKLGPWRRPVAYLSKKLDPVAAGWPPCLRMVAAIAVLTKDAGKLTMGQPLVILAPHAVEALVKQPPDRWLSNARMTHYQAMLLDTDRVQFGPVVALNPATLLPLPEKEAPHDCLEILAETHGTRPDLTDQPIPDADYTWYTDGSSFLQEGQRRAGAAVTTETEVIWARALPAGTSAQRAELIALTQALKMAEGKKLNVYTDSRYAFATAHVHGEIYRRRGWLTSEGREIKNKNEILALLKALFLPKRLSIIHCPGHQKGNSAEARGNRMADQAAREAAMKAVLETSTLLAGKRTADGSEFEKRTADGSEFESPKKKAKVE

SEQ ID NO: 7045 - protein, 2098 aa, synthetic construct
MPAAKRVKLDGGDKKYSIGLDIGTNSVGWAVITDEYKVPSKKFKVLGNTDRHSIKKNLIGALLFDSGETAEATRLKRTARRRYTRRKNRICYLQEIFSNEMAKVDDSFFHRLEESFLVEEDKKHERHPIFGNIVDEVAYHEKYPTIYHLRKKLVDSTDKADLRLIYLALAHMIKFRGHFLIEGDLNPDNSDVDKLFIQLVQTYNQLFEENPINASGVDAKAILSARLSKSRRLENLIAQLPGEKKNGLFGNLIALSLGLTPNFKSNFDLAEDAKLQLSKDTYDDDLDNLLAQIGDQYADLFLAAKNLSDAILLSDILRVNTEITKAPLSASMIKRYDEHHQDLTLLKALVRQQLPEKYKEIFFDQSKNGYAGYIDGGASQEEFYKFIKPILEKMDGTEELLVKLNREDLLRKQRTFDNGSIPHQIHLGELHAILRRQEDFYPFLKDNREKIEKILTFRIPYYVGPLARGNSRFAWMTRKSEETITPWNFEEVVDKGASAQSFIERMTNFDKNLPNEKVLPKHSLLYEYFTVYNELTKVKYVTEGMRKPAFLSGEQKKAIVDLLFKTNRKVTVKQLKEDYFKKIECFDSVEISGVEDRFNASLGTYHDLLKIIKDKDFLDNEENEDILEDIVLTLTLFEDREMIEERLKTYAHLFDDKVMKQLKRRRYTGWGRLSRKLINGIRDKQSGKTILDFLKSDGFANRNFMQLIHDDSLTFKEDIQKAQVSGQGDSLHEHIANLAGSPAIKKGILQTVKVVDELVKVMGRHKPENIVIEMARENQTTQKGQKNSRERMKRIEEGIKELGSQILKEHPVENTQLQNEKLYLYYLQNGRDMYVDQELDINRLSDYDVDHIVPQSFLKDDSIDNKVLTRSDKARGKSDNVPSEEVVKKMKNYWRQLLNAKLITQRKFDNLTKAERGGLSELDKAGFIKRQLVETRQITKHVAQILDSRMNTKYDENDKLIREVKVITLKSKLVSDFRKDFQFYKVREINNYHHAHDAYLNAVVGTALIKKYPKLESEFVYGDYKVYDVRKMIAKSEQEIGKATAKYFFYSNIMNFFKTEITLANGEIRKRPLIETNGETGEIVWDKGRDFATVRKVLSMPQVNIVKKTEVQTGGFSKESILPKRNSDKLIARKKDWDPKKYGGFDSPTVAYSVLVVAKVEKGKSKKLKSVKELLGITIMERSSFEKNPIDFLEAKGYKEVKKDLIIKLPKYSLFELENGRKRMLASAGELQKGNELALPSKYVNFLYLASHYEKLKGSPEDNEQKQLFVEQHKHYLDEIIEQISEFSKRVILADANLDKVLSAYNKHRDKPIREQAENIIHLFTLTNLGAPAAFKYFDTTIDRKRYTSTKEVLDATLIHQSITGLYETRIDLSQLGGDGGGGSGSSEAAAKGGTAPLEEEYRLFLEAPIQNVTLLEQWKREIPKVWAEINPPGLASTQAPIHVQLLSTALPVRVRQYPITLEAKRSLRETIRKFRAAGILRPVHSPWNTPLLPVRKSGTSEYRMVQDLREVNKRVETIHPTVPNPYTLLSLLPPDRIWYSVLDLKDAFFCIPLAPESQLIFAFEWADAEEGESGQLTWTRLPQGFKNSPTLFNEALNRDLQGFRLDHPSVSLLQYVDDLLIAADTQAACLSATRDLLMTLAELGYRVSGKKAQLCQEEVTYLGFKIHKGSRSLSNSRTQAILQIPVPKTKRQVREFLGTIGYCRLWIPGFAELAQPLYAATRPGNDPLVWGEKEEEAFQSLKLALTQPPALALPSLDKPFQLFVEETSGAAKGVLTQALGPWKRPVAYLSKRLDPVAAGWPRCLRAIAAAALLTREASKLTFGQDIEITSSHNLESLLRSPPDKWLTNARITQYQVLLLDPPRVRFKQTAALNPATLLPETDDTLPIHHCLDTLDSLTSTRPDLTDQPLAQAEATLFTDGSSYIRDGKRYAGAAVVTLDSVIWAEPLPIGTSAQKAELIALTKALEWSKDKSVNIYTDSRYAFATLHVHGMIYRERGWLTAGGKAIKNAPEILALLTAVWLPKRVAVMHCKGHQKDDAPTSTGNRRADEVAREVAIRPLSTQATISAGKRTADGSEFEKRTADGSEFESPKKKAKVE

SEQ ID NO: 7046 - protein, 2098 aa, synthetic construct
MPAAKRVKLDGGDKKYSIGLDIGTNSVGWAVITDEYKVPSKKFKVLGNTDRHSIKKNLIGALLFDSGETAEATRLKRTARRRYTRRKNRICYLQEIFSNEMAKVDDSFFHRLEESFLVEEDKKHERHPIFGNIVDEVAYHEKYPTIYHLRKKLVDSTDKADLRLIYLALAHMIKFRGHFLIEGDLNPDNSDVDKLFIQLVQTYNQLFEENPINASGVDAKAILSARLSKSRRLENLIAQLPGEKKNGLFGNLIALSLGLTPNFKSNFDLAEDAKLQLSKDTYDDDLDNLLAQIGDQYADLFLAAKNLSDAILLSDILRVNTEITKAPLSASMIKRYDEHHQDLTLLKALVRQQLPEKYKEIFFDQSKNGYAGYIDGGASQEEFYKFIKPILEKMDGTEELLVKLNREDLLRKQRTFDNGSIPHQIHLGELHAILRRQEDFYPFLKDNREKIEKILTFRIPYYVGPLARGNSRFAWMTRKSEETITPWNFEEVVDKGASAQSFIERMTNFDKNLPNEKVLPKHSLLYEYFTVYNELTKVKYVTEGMRKPAFLSGEQKKAIVDLLFKTNRKVTVKQLKEDYFKKIECFDSVEISGVEDRFNASLGTYHDLLKIIKDKDFLDNEENEDILEDIVLTLTLFEDREMIEERLKTYAHLFDDKVMKQLKRRRYTGWGRLSRKLINGIRDKQSGKTILDFLKSDGFANRNFMQLIHDDSLTFKEDIQKAQVSGQGDSLHEHIANLAGSPAIKKGILQTVKVVDELVKVMGRHKPENIVIEMARENQTTQKGQKNSRERMKRIEEGIKELGSQILKEHPVENTQLQNEKLYLYYLQNGRDMYVDQELDINRLSDYDVDHIVPQSFLKDDSIDNKVLTRSDKARGKSDNVPSEEVVKKMKNYWRQLLNAKLITQRKFDNLTKAERGGLSELDKAGFIKRQLVETRQITKHVAQILDSRMNTKYDENDKLIREVKVITLKSKLVSDFRKDFQFYKVREINNYHHAHDAYLNAVVGTALIKKYPKLESEFVYGDYKVYDVRKMIAKSEQEIGKATAKYFFYSNIMNFFKTEITLANGEIRKRPLIETNGETGEIVWDKGRDFATVRKVLSMPQVNIVKKTEVQTGGFSKESILPKRNSDKLIARKKDWDPKKYGGFDSPTVAYSVLVVAKVEKGKSKKLKSVKELLGITIMERSSFEKNPIDFLEAKGYKEVKKDLIIKLPKYSLFELENGRKRMLASAGELQKGNELALPSKYVNFLYLASHYEKLKGSPEDNEQKQLFVEQHKHYLDEIIEQISEFSKRVILADANLDKVLSAYNKHRDKPIREQAENIIHLFTLTNLGAPAAFKYFDTTIDRKRYTSTKEVLDATLIHQSITGLYETRIDLSQLGGDGGGGSGSSEAAAKGGTAPLEEEYRLFLEAPIQNVTLLEQWKREIPKVWAEINPPGLASTQAPIHVQLLSTALPVRVRQYPITLEAKRSLRETIRKFRAAGILRPVHSPWNTPLLPVRKSGTSEYRMVQDLREVNKRVETIHPTVPNPYTLLSLLPPDRIWYSVLDLKDAFFCIPLAPESQLIFAFEWADAEEGESGQLTWTRLPQGFKNSPTLFNEALNRDLQGFRLDHPSVSLLQYVDDLLIAADTQAACLSATRDLLMTLAELGYRVSGKKAQLCQEEVTYLGFKIHKGSRSLSNSRTQAILQIPVPKTKRQVREFLGKIGYCRLFIPGFAELAQPLYAATRPGNDPLVWGEKEEEAFQSLKLALTQPPALALPSLDKPFQLFVEETSGAAKGVLTQALGPWKRPVAYLSKRLDPVAAGWPRCLRAIAAAALLTREASKLTFGQDIEITSSHNLESLLRSPPDKWLTNARITQYQVLLLDPPRVRFKQTAALNPATLLPETDDTLPIHHCLDTLDSLTSTRPDLTDQPLAQAEATLFTDGSSYIRDGKRYAGAAVVTLDSVIWAEPLPIGTSAQKAELIALTKALEWSKDKSVNIYTDSRYAFATLHVHGMIYRERGWLTAGGKAIKNAPEILALLTAVWLPKRVAVMHCKGHQKDDAPTSTGNRRADEVAREVAIRPLSTQATISAGKRTADGSEFEKRTADGSEFESPKKKAKVE

SEQ ID NO: 7047 - protein, 2218 aa, synthetic construct
MPAAKRVKLDGGDKKYSIGLDIGTNSVGWAVITDEYKVPSKKFKVLGNTDRHSIKKNLIGALLFDSGETAEATRLKRTARRRYTRRKNRICYLQEIFSNEMAKVDDSFFHRLEESFLVEEDKKHERHPIFGNIVDEVAYHEKYPTIYHLRKKLVDSTDKADLRLIYLALAHMIKFRGHFLIEGDLNPDNSDVDKLFIQLVQTYNQLFEENPINASGVDAKAILSARLSKSRRLENLIAQLPGEKKNGLFGNLIALSLGLTPNFKSNFDLAEDAKLQLSKDTYDDDLDNLLAQIGDQYADLFLAAKNLSDAILLSDILRVNTEITKAPLSASMIKRYDEHHQDLTLLKALVRQQLPEKYKEIFFDQSKNGYAGYIDGGASQEEFYKFIKPILEKMDGTEELLVKLNREDLLRKQRTFDNGSIPHQIHLGELHAILRRQEDFYPFLKDNREKIEKILTFRIPYYVGPLARGNSRFAWMTRKSEETITPWNFEEVVDKGASAQSFIERMTNFDKNLPNEKVLPKHSLLYEYFTVYNELTKVKYVTEGMRKPAFLSGEQKKAIVDLLFKTNRKVTVKQLKEDYFKKIECFDSVEISGVEDRFNASLGTYHDLLKIIKDKDFLDNEENEDILEDIVLTLTLFEDREMIEERLKTYAHLFDDKVMKQLKRRRYTGWGRLSRKLINGIRDKQSGKTILDFLKSDGFANRNFMQLIHDDSLTFKEDIQKAQVSGQGDSLHEHIANLAGSPAIKKGILQTVKVVDELVKVMGRHKPENIVIEMARENQTTQKGQKNSRERMKRIEEGIKELGSQILKEHPVENTQLQNEKLYLYYLQNGRDMYVDQELDINRLSDYDVDHIVPQSFLKDDSIDNKVLTRSDKARGKSDNVPSEEVVKKMKNYWRQLLNAKLITQRKFDNLTKAERGGLSELDKAGFIKRQLVETRQITKHVAQILDSRMNTKYDENDKLIREVKVITLKSKLVSDFRKDFQFYKVREINNYHHAHDAYLNAVVGTALIKKYPKLESEFVYGDYKVYDVRKMIAKSEQEIGKATAKYFFYSNIMNFFKTEITLANGEIRKRPLIETNGETGEIVWDKGRDFATVRKVLSMPQVNIVKKTEVQTGGFSKESILPKRNSDKLIARKKDWDPKKYGGFDSPTVAYSVLVVAKVEKGKSKKLKSVKELLGITIMERSSFEKNPIDFLEAKGYKEVKKDLIIKLPKYSLFELENGRKRMLASAGELQKGNELALPSKYVNFLYLASHYEKLKGSPEDNEQKQLFVEQHKHYLDEIIEQISEFSKRVILADANLDKVLSAYNKHRDKPIREQAENIIHLFTLTNLGAPAAFKYFDTTIDRKRYTSTKEVLDATLIHQSITGLYETRIDLSQLGGDGGGGSGSSEAAAKGGTLGDQGSRGSDPLPEPRVTLTVEGIPTEFLVNTGAEHSVLTKPMGKMGSKRTVVAGATGSKVYPWTTKRLLKIGQKQVTHSFLVIPECPAPLLGRDLLTKLKAQIQFSTEGPQVTWEDRPAMCLVLNLEEEYRLHEKPVPPSIDPSWLQLFPMVWAEKAGMGLANQVPPVVVELKSDASPVAVRQYPMSKEAREGIRPHIQRFLDLGILVPCQSPWNTPLLPVKKPGTNDYRPVQDLREVNKRVQDIHPTVPNPYNLLSSLPPSHTWYSVLDLKDAFFCLKLHPNSQPLFAFEWRDPEKGNTGQLTWTRLPQGFKNSPTLFDEALHRDLASFRALNPQVVMLQYVDDLLVAAPTYRDCKEGTRRLLQELSKLGYRVSAKKAQLCREEVTYLGYLLKGGKRWLTPARKATVMKIPTPTTPRQVREFLGTAGFCRLWIPGFASLAAPLYPLTREKVPFTWTEAHQEAFGRIKEALLSAPALALPDLTKPFALYVDEKEGVARGVLTQTLGPWRRPVAYLSKKLDPVASGWPTCLKAIAAVALLLKDADKLTLGQNVLVIAPHNLESIVRQPPDRWMTNARMTHYQSLLLNERVSFAPPAILNPATLLPVESDDTPIHICSEILAEETGTRPDLRDQPLPGVPAWYTDGSSFIMDGRRQAGAAIVDNKRTVWASNLPEGTSAQKAELIALTQALRLAEGKSINIYTDSRYAFATAHVHGAIYKQRGLLTSAGKDIKNKEEILALLEAIHLPKRVAIIHCPGHQRGTDPVATGNRKADEAAKQAAQSTRILTETTKNAGKRTADGSEFEKRTADGSEFESPKKKAKVE

SEQ ID NO: 7048 - protein, 2096 aa, synthetic construct
MPAAKRVKLDGGDKKYSIGLDIGTNSVGWAVITDEYKVPSKKFKVLGNTDRHSIKKNLIGALLFDSGETAEATRLKRTARRRYTRRKNRICYLQEIFSNEMAKVDDSFFHRLEESFLVEEDKKHERHPIFGNIVDEVAYHEKYPTIYHLRKKLVDSTDKADLRLIYLALAHMIKFRGHFLIEGDLNPDNSDVDKLFIQLVQTYNQLFEENPINASGVDAKAILSARLSKSRRLENLIAQLPGEKKNGLFGNLIALSLGLTPNFKSNFDLAEDAKLQLSKDTYDDDLDNLLAQIGDQYADLFLAAKNLSDAILLSDILRVNTEITKAPLSASMIKRYDEHHQDLTLLKALVRQQLPEKYKEIFFDQSKNGYAGYIDGGASQEEFYKFIKPILEKMDGTEELLVKLNREDLLRKQRTFDNGSIPHQIHLGELHAILRRQEDFYPFLKDNREKIEKILTFRIPYYVGPLARGNSRFAWMTRKSEETITPWNFEEVVDKGASAQSFIERMTNFDKNLPNEKVLPKHSLLYEYFTVYNELTKVKYVTEGMRKPAFLSGEQKKAIVDLLFKTNRKVTVKQLKEDYFKKIECFDSVEISGVEDRFNASLGTYHDLLKIIKDKDFLDNEENEDILEDIVLTLTLFEDREMIEERLKTYAHLFDDKVMKQLKRRRYTGWGRLSRKLINGIRDKQSGKTILDFLKSDGFANRNFMQLIHDDSLTFKEDIQKAQVSGQGDSLHEHIANLAGSPAIKKGILQTVKVVDELVKVMGRHKPENIVIEMARENQTTQKGQKNSRERMKRIEEGIKELGSQILKEHPVENTQLQNEKLYLYYLQNGRDMYVDQELDINRLSDYDVDHIVPQSFLKDDSIDNKVLTRSDKARGKSDNVPSEEVVKKMKNYWRQLLNAKLITQRKFDNLTKAERGGLSELDKAGFIKRQLVETRQITKHVAQILDSRMNTKYDENDKLIREVKVITLKSKLVSDFRKDFQFYKVREINNYHHAHDAYLNAVVGTALIKKYPKLESEFVYGDYKVYDVRKMIAKSEQEIGKATAKYFFYSNIMNFFKTEITLANGEIRKRPLIETNGETGEIVWDKGRDFATVRKVLSMPQVNIVKKTEVQTGGFSKESILPKRNSDKLIARKKDWDPKKYGGFDSPTVAYSVLVVAKVEKGKSKKLKSVKELLGITIMERSSFEKNPIDFLEAKGYKEVKKDLIIKLPKYSLFELENGRKRMLASAGELQKGNELALPSKYVNFLYLASHYEKLKGSPEDNEQKQLFVEQHKHYLDEIIEQISEFSKRVILADANLDKVLSAYNKHRDKPIREQAENIIHLFTLTNLGAPAAFKYFDTTIDRKRYTSTKEVLDATLIHQSITGLYETRIDLSQLGGDGGGGSGSSEAAAKGGTLGIEDEYRLHETSTEPDVSLGSTWLSDFPQAWAETGGMGLAVRQAPLIIPLKATSTPVSIQQYPMSHEARLGIKPHIQRLLDQGILVPCQSPWNTPLLPVKKPGTNDYRPVQDLREVNKRVEDIHPTVPNPYNLLSGLPPSHQWYTVLDLKDAFFCLRLHPTSQPLFAFEWRDPGMGISGQLTWTRLPQGFKNSPTLFNEALHRDLADFRIQHPDLILLQYVDDILLAATSELDCQQGTRALLQTLGDLGYRASAKKAQICQKQVKYLGYLLREGQRWLTEARKETVMGQPVPKTPRQLREFLGTAGFCRLWIPGFAEMAAPLYPLTKPGTLFSWGPDQQKAYQEIKQALLTAPALGLPDLTKPFELFVDEKQGYAKGVLTQKLGPWRRPVAYLSKKLDPVAAGWPPCLRMVAAIAVLTKDAGKLTMGQPLVILAPHAVEALVKQPPDRWLSNARMTHYQAMLLDTDRVQFGPVVALNPATLLPLPEEGAPHDCLEILAETHGTRPDLTDQPIPDADHTWYTDGSSFLQEGQRKAGAAVTTETEVIWAGALPAGTSAQRAELIALTQALKMAEGKRLNVYTDSRYAFATAHIHGEIYRRRGWLTSEGREIKNKSEILALLKALFLPKRLSIIHCLGHQKGDSAEARGNRLADQAAREAAIKTPPDTSTLLAGKRTADGSEFEKRTADGSEFESPKKKAKVE

SEQ ID NO: 7049 - protein, 2096 aa, synthetic construct
MPAAKRVKLDGGDKKYSIGLDIGTNSVGWAVITDEYKVPSKKFKVLGNTDRHSIKKNLIGALLFDSGETAEATRLKRTARRRYTRRKNRICYLQEIFSNEMAKVDDSFFHRLEESFLVEEDKKHERHPIFGNIVDEVAYHEKYPTIYHLRKKLVDSTDKADLRLIYLALAHMIKFRGHFLIEGDLNPDNSDVDKLFIQLVQTYNQLFEENPINASGVDAKAILSARLSKSRRLENLIAQLPGEKKNGLFGNLIALSLGLTPNFKSNFDLAEDAKLQLSKDTYDDDLDNLLAQIGDQYADLFLAAKNLSDAILLSDILRVNTEITKAPLSASMIKRYDEHHQDLTLLKALVRQQLPEKYKEIFFDQSKNGYAGYIDGGASQEEFYKFIKPILEKMDGTEELLVKLNREDLLRKQRTFDNGSIPHQIHLGELHAILRRQEDFYPFLKDNREKIEKILTFRIPYYVGPLARGNSRFAWMTRKSEETITPWNFEEVVDKGASAQSFIERMTNFDKNLPNEKVLPKHSLLYEYFTVYNELTKVKYVTEGMRKPAFLSGEQKKAIVDLLFKTNRKVTVKQLKEDYFKKIECFDSVEISGVEDRFNASLGTYHDLLKIIKDKDFLDNEENEDILEDIVLTLTLFEDREMIEERLKTYAHLFDDKVMKQLKRRRYTGWGRLSRKLINGIRDKQSGKTILDFLKSDGFANRNFMQLIHDDSLTFKEDIQKAQVSGQGDSLHEHIANLAGSPAIKKGILQTVKVVDELVKVMGRHKPENIVIEMARENQTTQKGQKNSRERMKRIEEGIKELGSQILKEHPVENTQLQNEKLYLYYLQNGRDMYVDQELDINRLSDYDVDHIVPQSFLKDDSIDNKVLTRSDKARGKSDNVPSEEVVKKMKNYWRQLLNAKLITQRKFDNLTKAERGGLSELDKAGFIKRQLVETRQITKHVAQILDSRMNTKYDENDKLIREVKVITLKSKLVSDFRKDFQFYKVREINNYHHAHDAYLNAVVGTALIKKYPKLESEFVYGDYKVYDVRKMIAKSEQEIGKATAKYFFYSNIMNFFKTEITLANGEIRKRPLIETNGETGEIVWDKGRDFATVRKVLSMPQVNIVKKTEVQTGGFSKESILPKRNSDKLIARKKDWDPKKYGGFDSPTVAYSVLVVAKVEKGKSKKLKSVKELLGITIMERSSFEKNPIDFLEAKGYKEVKKDLIIKLPKYSLFELENGRKRMLASAGELQKGNELALPSKYVNFLYLASHYEKLKGSPEDNEQKQLFVEQHKHYLDEIIEQISEFSKRVILADANLDKVLSAYNKHRDKPIREQAENIIHLFTLTNLGAPAAFKYFDTTIDRKRYTSTKEVLDATLIHQSITGLYETRIDLSQLGGDGGGGSGSSEAAAKGGTLNIEDEYRLHEISTEPDVSPGSTWLSDFPQAWAETGGMGLAVRQAPLIIPLKATSTPVSIKQYPMSQEAKLGIKPHIQRLLDQGILVPCQSPWNTPLLPVKKPGTNDYRPVQGLREVNKRVEDIHPTVPNPYNLLSGLPTSHRWYTVLDLKDAFFCLRLHPTSQPLFASEWRDPGMGISGQLTWTRLPQGFKNSPTLFNEALHRGLADFRIQHPDLILLQYVDDLLLAATSELDCQQGTRALLKTLGNLGYRASAKKAQICQKQVKYLGYLLREGQRWLTEARKETVMGQPTPKTPRQLREFLGKAGFCRLFIPRFAEMAAPLYPLTKPGTLFNWGPDQQKAYHEIKQALLTAPALGLPDLTKPFELFVDEKQGYAKGVLTQKLGPWRRPVAYLSKKLDPVAAGWPPCLRMVAAIAVLTKDAGKLTMGQPLVILAPHAVEALVKQPPDRWLSNARMTHYQAMLLDTDRVQFGPVVALNPATLLPLPEEGAPHDCLEILAETHGTEPDLTDQPIPDADHTWYTDGSSFLQEGQRKAGAAVTTETEVIWARALPAGTSAQRAELIALTQALKMAEGKRLNVYTDSRYAFATAHIHGEIYKRRGWLTSEGREIKNKSEILALLKALFLPKRLSIIHCLGHQKGDSAEARGNRLADQAAREAAIKTPPDTSTLLAGKRTADGSEFEKRTADGSEFESPKKKAKVE

SEQ ID NO: 7050 - protein, 2090 aa, synthetic construct
MPAAKRVKLDGGDKKYSIGLDIGTNSVGWAVITDEYKVPSKKFKVLGNTDRHSIKKNLIGALLFDSGETAEATRLKRTARRRYTRRKNRICYLQEIFSNEMAKVDDSFFHRLEESFLVEEDKKHERHPIFGNIVDEVAYHEKYPTIYHLRKKLVDSTDKADLRLIYLALAHMIKFRGHFLIEGDLNPDNSDVDKLFIQLVQTYNQLFEENPINASGVDAKAILSARLSKSRRLENLIAQLPGEKKNGLFGNLIALSLGLTPNFKSNFDLAEDAKLQLSKDTYDDDLDNLLAQIGDQYADLFLAAKNLSDAILLSDILRVNTEITKAPLSASMIKRYDEHHQDLTLLKALVRQQLPEKYKEIFFDQSKNGYAGYIDGGASQEEFYKFIKPILEKMDGTEELLVKLNREDLLRKQRTFDNGSIPHQIHLGELHAILRRQEDFYPFLKDNREKIEKILTFRIPYYVGPLARGNSRFAWMTRKSEETITPWNFEEVVDKGASAQSFIERMTNFDKNLPNEKVLPKHSLLYEYFTVYNELTKVKYVTEGMRKPAFLSGEQKKAIVDLLFKTNRKVTVKQLKEDYFKKIECFDSVEISGVEDRFNASLGTYHDLLKIIKDKDFLDNEENEDILEDIVLTLTLFEDREMIEERLKTYAHLFDDKVMKQLKRRRYTGWGRLSRKLINGIRDKQSGKTILDFLKSDGFANRNFMQLIHDDSLTFKEDIQKAQVSGQGDSLHEHIANLAGSPAIKKGILQTVKVVDELVKVMGRHKPENIVIEMARENQTTQKGQKNSRERMKRIEEGIKELGSQILKEHPVENTQLQNEKLYLYYLQNGRDMYVDQELDINRLSDYDVDHIVPQSFLKDDSIDNKVLTRSDKARGKSDNVPSEEVVKKMKNYWRQLLNAKLITQRKFDNLTKAERGGLSELDKAGFIKRQLVETRQITKHVAQILDSRMNTKYDENDKLIREVKVITLKSKLVSDFRKDFQFYKVREINNYHHAHDAYLNAVVGTALIKKYPKLESEFVYGDYKVYDVRKMIAKSEQEIGKATAKYFFYSNIMNFFKTEITLANGEIRKRPLIETNGETGEIVWDKGRDFATVRKVLSMPQVNIVKKTEVQTGGFSKESILPKRNSDKLIARKKDWDPKKYGGFDSPTVAYSVLVVAKVEKGKSKKLKSVKELLGITIMERSSFEKNPIDFLEAKGYKEVKKDLIIKLPKYSLFELENGRKRMLASAGELQKGNELALPSKYVNFLYLASHYEKLKGSPEDNEQKQLFVEQHKHYLDEIIEQISEFSKRVILADANLDKVLSAYNKHRDKPIREQAENIIHLFTLTNLGAPAAFKYFDTTIDRKRYTSTKEVLDATLIHQSITGLYETRIDLSQLGGDGGGGSGSSEAAAKGGTLQLDDEYRLYSPLVKPDQNIQFWLEQFPQAWAETAGMGLAKQVPPQVIQLKASATPVSVRQYPLSKEAQEGIRPHVQRLIQQGILVPVQSPWNTPLLPVRKPGTNDYRPVQDLREVNKRVQDIHPTVPNPYNLLCALPPQRSWYTVLDLKDAFFCLRLHPTSQPLFAFEWRDPGTGRTGQLTWTRLPQGFKNSPTIFDEALHRDLANFRIQHPQVTLLQYVDDLLLAGATKQDCLEGTKALLLELSDLGYRASAKKAQICRREVTYLGYSLRDGQRWLTEARKKTVVQIPAPTTAKQVREFLGTAGFCRLWIPGFATLAAPLYPLTKEKGEFSWAPEHQKAFDAIKKALLSAPALALPDVTKPFTLYVDERKGVARGVLTQTLGPWRRPVAYLSKKLDPVASGWPVCLKAIAAVAILVKDADKLTLGQNITVIAPHALENIVRQPPDRWMTNARMTHYQSLLLTERVTFAPPAALNPATLLPEETDEPVTHDCHQLLIEETGVRKDLTDIPLTGEVLTWFTDGSSYVVEGKRMAGAAVVDGTRTIWASSLPEGTSAQKAELMALTQALRLAEGKSINIYTDSRYAFATAHVHGAIYKQRGLLTSAGREIKNKEEILSLLEALHLPKRLAIIHCPGHQKAKDPISRGNQMADRVAKQAAQGVNLLAGKRTADGSEFEKRTADGSEFESPKKKAKVE

SEQ ID NO: 7051 - protein, 2087 aa, synthetic construct
MPAAKRVKLDGGDKKYSIGLDIGTNSVGWAVITDEYKVPSKKFKVLGNTDRHSIKKNLIGALLFDSGETAEATRLKRTARRRYTRRKNRICYLQEIFSNEMAKVDDSFFHRLEESFLVEEDKKHERHPIFGNIVDEVAYHEKYPTIYHLRKKLVDSTDKADLRLIYLALAHMIKFRGHFLIEGDLNPDNSDVDKLFIQLVQTYNQLFEENPINASGVDAKAILSARLSKSRRLENLIAQLPGEKKNGLFGNLIALSLGLTPNFKSNFDLAEDAKLQLSKDTYDDDLDNLLAQIGDQYADLFLAAKNLSDAILLSDILRVNTEITKAPLSASMIKRYDEHHQDLTLLKALVRQQLPEKYKEIFFDQSKNGYAGYIDGGASQEEFYKFIKPILEKMDGTEELLVKLNREDLLRKQRTFDNGSIPHQIHLGELHAILRRQEDFYPFLKDNREKIEKILTFRIPYYVGPLARGNSRFAWMTRKSEETITPWNFEEVVDKGASAQSFIERMTNFDKNLPNEKVLPKHSLLYEYFTVYNELTKVKYVTEGMRKPAFLSGEQKKAIVDLLFKTNRKVTVKQLKEDYFKKIECFDSVEISGVEDRFNASLGTYHDLLKIIKDKDFLDNEENEDILEDIVLTLTLFEDREMIEERLKTYAHLFDDKVMKQLKRRRYTGWGRLSRKLINGIRDKQSGKTILDFLKSDGFANRNFMQLIHDDSLTFKEDIQKAQVSGQGDSLHEHIANLAGSPAIKKGILQTVKVVDELVKVMGRHKPENIVIEMARENQTTQKGQKNSRERMKRIEEGIKELGSQILKEHPVENTQLQNEKLYLYYLQNGRDMYVDQELDINRLSDYDVDHIVPQSFLKDDSIDNKVLTRSDKARGKSDNVPSEEVVKKMKNYWRQLLNAKLITQRKFDNLTKAERGGLSELDKAGFIKRQLVETRQITKHVAQILDSRMNTKYDENDKLIREVKVITLKSKLVSDFRKDFQFYKVREINNYHHAHDAYLNAVVGTALIKKYPKLESEFVYGDYKVYDVRKMIAKSEQEIGKATAKYFFYSNIMNFFKTEITLANGEIRKRPLIETNGETGEIVWDKGRDFATVRKVLSMPQVNIVKKTEVQTGGFSKESILPKRNSDKLIARKKDWDPKKYGGFDSPTVAYSVLVVAKVEKGKSKKLKSVKELLGITIMERSSFEKNPIDFLEAKGYKEVKKDLIIKLPKYSLFELENGRKRMLASAGELQKGNELALPSKYVNFLYLASHYEKLKGSPEDNEQKQLFVEQHKHYLDEIIEQISEFSKRVILADANLDKVLSAYNKHRDKPIREQAENIIHLFTLTNLGAPAAFKYFDTTIDRKRYTSTKEVLDATLIHQSITGLYETRIDLSQLGGDGGGGSGSSEAAAKGGIPWLMKKPLQLTTLVPLQEYEERLLKQTMLTGSYKEKLQSLFLKYDALWQHWENQVGHRRIKPHHIATGTVNPRPQKQYPINPKAKASIQTVINDLLKQGVLIQQNSIMNTPVYPVPKPDGKWRMVLDYREVNKTIPLIAAQNQHSAGILSSIFRGKYKTTLDLSNGFWAHSITPESYWLTAFTWLGQQYCWTRLPQGFLNSPALFNADVVDLLKEVPNVQVYVDDIYISHDDPREHLEQLEKVFSLLLNAGYVVSLKKSEIAQHEVEFLGFNITKEGRGLTETFKQKLLNITPPRDLKQLQSILGLLNFARNFIPNFSELVKPLYNIIATAPGKYITWTTDNSQQLQNIISMLNSAENLEERNPEVRLIMKVNTSPSAGYIRFYNEFAKRPIMYLNYVYTKAEVKFTNTEKLLTTIHKGLIKALDLGMGQEILVYSPIVSMTKIQKTPLPERKALPIRWITWMSYLEDPRIQFHYDKTLPELQQVPTVTDDIIAKIKHPSEFSMVFYTDGSAIKHPNVNKSHNAGMGIAQVQFKPEFTVINTWSIPLGDHTAQLAEVAAVEFACKKALKIDGPVLIVTDSFYVAESVNKELPYWQSNGFFNNKKKPLKHVSKWKSIADCIQLKPDIIIIHEKGHQPTASTFHTEGNNLADKLATQGSYVVNAGKRTADGSEFEKRTADGSEFESPKKKAKVE

SEQ ID NO: 7052 - protein, 2098 aa, synthetic construct
MPAAKRVKLDGGDKKYSIGLDIGTNSVGWAVITDEYKVPSKKFKVLGNTDRHSIKKNLIGALLFDSGETAEATRLKRTARRRYTRRKNRICYLQEIFSNEMAKVDDSFFHRLEESFLVEEDKKHERHPIFGNIVDEVAYHEKYPTIYHLRKKLVDSTDKADLRLIYLALAHMIKFRGHFLIEGDLNPDNSDVDKLFIQLVQTYNQLFEENPINASGVDAKAILSARLSKSRRLENLIAQLPGEKKNGLFGNLIALSLGLTPNFKSNFDLAEDAKLQLSKDTYDDDLDNLLAQIGDQYADLFLAAKNLSDAILLSDILRVNTEITKAPLSASMIKRYDEHHQDLTLLKALVRQQLPEKYKEIFFDQSKNGYAGYIDGGASQEEFYKFIKPILEKMDGTEELLVKLNREDLLRKQRTFDNGSIPHQIHLGELHAILRRQEDFYPFLKDNREKIEKILTFRIPYYVGPLARGNSRFAWMTRKSEETITPWNFEEVVDKGASAQSFIERMTNFDKNLPNEKVLPKHSLLYEYFTVYNELTKVKYVTEGMRKPAFLSGEQKKAIVDLLFKTNRKVTVKQLKEDYFKKIECFDSVEISGVEDRFNASLGTYHDLLKIIKDKDFLDNEENEDILEDIVLTLTLFEDREMIEERLKTYAHLFDDKVMKQLKRRRYTGWGRLSRKLINGIRDKQSGKTILDFLKSDGFANRNFMQLIHDDSLTFKEDIQKAQVSGQGDSLHEHIANLAGSPAIKKGILQTVKVVDELVKVMGRHKPENIVIEMARENQTTQKGQKNSRERMKRIEEGIKELGSQILKEHPVENTQLQNEKLYLYYLQNGRDMYVDQELDINRLSDYDVDHIVPQSFLKDDSIDNKVLTRSDKARGKSDNVPSEEVVKKMKNYWRQLLNAKLITQRKFDNLTKAERGGLSELDKAGFIKRQLVETRQITKHVAQILDSRMNTKYDENDKLIREVKVITLKSKLVSDFRKDFQFYKVREINNYHHAHDAYLNAVVGTALIKKYPKLESEFVYGDYKVYDVRKMIAKSEQEIGKATAKYFFYSNIMNFFKTEITLANGEIRKRPLIETNGETGEIVWDKGRDFATVRKVLSMPQVNIVKKTEVQTGGFSKESILPKRNSDKLIARKKDWDPKKYGGFDSPTVAYSVLVVAKVEKGKSKKLKSVKELLGITIMERSSFEKNPIDFLEAKGYKEVKKDLIIKLPKYSLFELENGRKRMLASAGELQKGNELALPSKYVNFLYLASHYEKLKGSPEDNEQKQLFVEQHKHYLDEIIEQISEFSKRVILADANLDKVLSAYNKHRDKPIREQAENIIHLFTLTNLGAPAAFKYFDTTIDRKRYTSTKEVLDATLIHQSITGLYETRIDLSQLGGDGGGGSEAAAKGSSGGTAPLEEEYRLFLEAPIQNVTLLEQWKREIPKVWAEINPPGLASTQAPIHVQLLSTALPVRVRQYPITLEAKRSLRETIRKFRAAGILRPVHSPWNTPLLPVRKSGTSEYRMVQDLREVNKRVETIHPTVPNPYTLLSLLPPDRIWYSVLDLKDAFFCIPLAPESQLIFAFEWADAEEGESGQLTWTRLPQGFKNSPTLFDEALNRDLQGFRLDHPSVSLLQYVDDLLIAADTQAACLSATRDLLMTLAELGYRVSGKKAQLCQEEVTYLGFKIHKGSRSLSNSRTQAILQIPVPKTKRQVREFLGTIGYCRLWIPGFAELAQPLYAATRGGNDPLVWGEKEEEAFQSLKLALTQPPALALPSLDKPFQLFVEETSGAAKGVLTQALGPWKRPVAYLSKRLDPVAAGWPRCLRAIAAAALLTREASKLTFGQDIEITSSHNLESLLRSPPDKWLTNARITQYQVLLLDPPRVRFKQTAALNPATLLPETDDTLPIHHCLDTLDSLTSTRPDLTDQPLAQAEATLFTDGSSYIRDGKRYAGAAVVTLDSVIWAEPLPIGTSAQKAELIALTKALEWSKDKSVNIYTDSRYAFATLHVHGMIYRERGLLTAGGKAIKNAPEILALLTAVWLPKRVAVMHCKGHQKDDAPTSTGNRRADEVAREVAIRPLSTQATISAGKRTADGSEFEKRTADGSEFESPKKKAKVE

SEQ ID NO: 7053 - protein, 2098 aa, synthetic construct
MPAAKRVKLDGGDKKYSIGLDIGTNSVGWAVITDEYKVPSKKFKVLGNTDRHSIKKNLIGALLFDSGETAEATRLKRTARRRYTRRKNRICYLQEIFSNEMAKVDDSFFHRLEESFLVEEDKKHERHPIFGNIVDEVAYHEKYPTIYHLRKKLVDSTDKADLRLIYLALAHMIKFRGHFLIEGDLNPDNSDVDKLFIQLVQTYNQLFEENPINASGVDAKAILSARLSKSRRLENLIAQLPGEKKNGLFGNLIALSLGLTPNFKSNFDLAEDAKLQLSKDTYDDDLDNLLAQIGDQYADLFLAAKNLSDAILLSDILRVNTEITKAPLSASMIKRYDEHHQDLTLLKALVRQQLPEKYKEIFFDQSKNGYAGYIDGGASQEEFYKFIKPILEKMDGTEELLVKLNREDLLRKQRTFDNGSIPHQIHLGELHAILRRQEDFYPFLKDNREKIEKILTFRIPYYVGPLARGNSRFAWMTRKSEETITPWNFEEVVDKGASAQSFIERMTNFDKNLPNEKVLPKHSLLYEYFTVYNELTKVKYVTEGMRKPAFLSGEQKKAIVDLLFKTNRKVTVKQLKEDYFKKIECFDSVEISGVEDRFNASLGTYHDLLKIIKDKDFLDNEENEDILEDIVLTLTLFEDREMIEERLKTYAHLFDDKVMKQLKRRRYTGWGRLSRKLINGIRDKQSGKTILDFLKSDGFANRNFMQLIHDDSLTFKEDIQKAQVSGQGDSLHEHIANLAGSPAIKKGILQTVKVVDELVKVMGRHKPENIVIEMARENQTTQKGQKNSRERMKRIEEGIKELGSQILKEHPVENTQLQNEKLYLYYLQNGRDMYVDQELDINRLSDYDVDHIVPQSFLKDDSIDNKVLTRSDKARGKSDNVPSEEVVKKMKNYWRQLLNAKLITQRKFDNLTKAERGGLSELDKAGFIKRQLVETRQITKHVAQILDSRMNTKYDENDKLIREVKVITLKSKLVSDFRKDFQFYKVREINNYHHAHDAYLNAVVGTALIKKYPKLESEFVYGDYKVYDVRKMIAKSEQEIGKATAKYFFYSNIMNFFKTEITLANGEIRKRPLIETNGETGEIVWDKGRDFATVRKVLSMPQVNIVKKTEVQTGGFSKESILPKRNSDKLIARKKDWDPKKYGGFDSPTVAYSVLVVAKVEKGKSKKLKSVKELLGITIMERSSFEKNPIDFLEAKGYKEVKKDLIIKLPKYSLFELENGRKRMLASAGELQKGNELALPSKYVNFLYLASHYEKLKGSPEDNEQKQLFVEQHKHYLDEIIEQISEFSKRVILADANLDKVLSAYNKHRDKPIREQAENIIHLFTLTNLGAPAAFKYFDTTIDRKRYTSTKEVLDATLIHQSITGLYETRIDLSQLGGDGGGGSEAAAKGSSGGTAPLEEEYRLFLEAPIQNVTLLEQWKREIPKVWAEINPPGLASTQAPIHVQLLSTALPVRVRQYPITLEAKRSLRETIRKFRAAGILRPVHSPWNTPLLPVRKSGTSEYRMVQDLREVNKRVETIHPTVPNPYTLLSLLPPDRIWYSVLDLKDAFFCIPLAPESQLIFAFEWADAEEGESGQLTWTRLPQGFKNSPTLFNEALNRDLQGFRLDHPSVSLLQYVDDLLIAADTQAACLSATRDLLMTLAELGYRVSGKKAQLCQEEVTYLGFKIHKGSRSLSNSRTQAILQIPVPKTKRQVREFLGTIGYCRLWIPGFAELAQPLYAATRPGNDPLVWGEKEEEAFQSLKLALTQPPALALPSLDKPFQLFVEETSGAAKGVLTQALGPWKRPVAYLSKRLDPVAAGWPRCLRAIAAAALLTREASKLTFGQDIEITSSHNLESLLRSPPDKWLTNARITQYQVLLLDPPRVRFKQTAALNPATLLPETDDTLPIHHCLDTLDSLTSTRPDLTDQPLAQAEATLFTDGSSYIRDGKRYAGAAVVTLDSVIWAEPLPIGTSAQKAELIALTKALEWSKDKSVNIYTDSRYAFATLHVHGMIYRERGWLTAGGKAIKNAPEILALLTAVWLPKRVAVMHCKGHQKDDAPTSTGNRRADEVAREVAIRPLSTQATISAGKRTADGSEFEKRTADGSEFESPKKKAKVE

SEQ ID NO: 7054 - protein, 2098 aa, synthetic construct
MPAAKRVKLDGGDKKYSIGLDIGTNSVGWAVITDEYKVPSKKFKVLGNTDRHSIKKNLIGALLFDSGETAEATRLKRTARRRYTRRKNRICYLQEIFSNEMAKVDDSFFHRLEESFLVEEDKKHERHPIFGNIVDEVAYHEKYPTIYHLRKKLVDSTDKADLRLIYLALAHMIKFRGHFLIEGDLNPDNSDVDKLFIQLVQTYNQLFEENPINASGVDAKAILSARLSKSRRLENLIAQLPGEKKNGLFGNLIALSLGLTPNFKSNFDLAEDAKLQLSKDTYDDDLDNLLAQIGDQYADLFLAAKNLSDAILLSDILRVNTEITKAPLSASMIKRYDEHHQDLTLLKALVRQQLPEKYKEIFFDQSKNGYAGYIDGGASQEEFYKFIKPILEKMDGTEELLVKLNREDLLRKQRTFDNGSIPHQIHLGELHAILRRQEDFYPFLKDNREKIEKILTFRIPYYVGPLARGNSRFAWMTRKSEETITPWNFEEVVDKGASAQSFIERMTNFDKNLPNEKVLPKHSLLYEYFTVYNELTKVKYVTEGMRKPAFLSGEQKKAIVDLLFKTNRKVTVKQLKEDYFKKIECFDSVEISGVEDRFNASLGTYHDLLKIIKDKDFLDNEENEDILEDIVLTLTLFEDREMIEERLKTYAHLFDDKVMKQLKRRRYTGWGRLSRKLINGIRDKQSGKTILDFLKSDGFANRNFMQLIHDDSLTFKEDIQKAQVSGQGDSLHEHIANLAGSPAIKKGILQTVKVVDELVKVMGRHKPENIVIEMARENQTTQKGQKNSRERMKRIEEGIKELGSQILKEHPVENTQLQNEKLYLYYLQNGRDMYVDQELDINRLSDYDVDHIVPQSFLKDDSIDNKVLTRSDKARGKSDNVPSEEVVKKMKNYWRQLLNAKLITQRKFDNLTKAERGGLSELDKAGFIKRQLVETRQITKHVAQILDSRMNTKYDENDKLIREVKVITLKSKLVSDFRKDFQFYKVREINNYHHAHDAYLNAVVGTALIKKYPKLESEFVYGDYKVYDVRKMIAKSEQEIGKATAKYFFYSNIMNFFKTEITLANGEIRKRPLIETNGETGEIVWDKGRDFATVRKVLSMPQVNIVKKTEVQTGGFSKESILPKRNSDKLIARKKDWDPKKYGGFDSPTVAYSVLVVAKVEKGKSKKLKSVKELLGITIMERSSFEKNPIDFLEAKGYKEVKKDLIIKLPKYSLFELENGRKRMLASAGELQKGNELALPSKYVNFLYLASHYEKLKGSPEDNEQKQLFVEQHKHYLDEIIEQISEFSKRVILADANLDKVLSAYNKHRDKPIREQAENIIHLFTLTNLGAPAAFKYFDTTIDRKRYTSTKEVLDATLIHQSITGLYETRIDLSQLGGDGGGGSEAAAKGSSGGTAPLEEEYRLFLEAPIQNVTLLEQWKREIPKVWAEINPPGLASTQAPIHVQLLSTALPVRVRQYPITLEAKRSLRETIRKFRAAGILRPVHSPWNTPLLPVRKSGTSEYRMVQDLREVNKRVETIHPTVPNPYTLLSLLPPDRIWYSVLDLKDAFFCIPLAPESQLIFAFEWADAEEGESGQLTWTRLPQGFKNSPTLFNEALNRDLQGFRLDHPSVSLLQYVDDLLIAADTQAACLSATRDLLMTLAELGYRVSGKKAQLCQEEVTYLGFKIHKGSRSLSNSRTQAILQIPVPKTKRQVREFLGKIGYCRLFIPGFAELAQPLYAATRPGNDPLVWGEKEEEAFQSLKLALTQPPALALPSLDKPFQLFVEETSGAAKGVLTQALGPWKRPVAYLSKRLDPVAAGWPRCLRAIAAAALLTREASKLTFGQDIEITSSHNLESLLRSPPDKWLTNARITQYQVLLLDPPRVRFKQTAALNPATLLPETDDTLPIHHCLDTLDSLTSTRPDLTDQPLAQAEATLFTDGSSYIRDGKRYAGAAVVTLDSVIWAEPLPIGTSAQKAELIALTKALEWSKDKSVNIYTDSRYAFATLHVHGMIYRERGWLTAGGKAIKNAPEILALLTAVWLPKRVAVMHCKGHQKDDAPTSTGNRRADEVAREVAIRPLSTQATISAGKRTADGSEFEKRTADGSEFESPKKKAKVE

SEQ ID NO: 7055 - protein, 2087 aa, synthetic construct
MPAAKRVKLDGGDKKYSIGLDIGTNSVGWAVITDEYKVPSKKFKVLGNTDRHSIKKNLIGALLFDSGETAEATRLKRTARRRYTRRKNRICYLQEIFSNEMAKVDDSFFHRLEESFLVEEDKKHERHPIFGNIVDEVAYHEKYPTIYHLRKKLVDSTDKADLRLIYLALAHMIKFRGHFLIEGDLNPDNSDVDKLFIQLVQTYNQLFEENPINASGVDAKAILSARLSKSRRLENLIAQLPGEKKNGLFGNLIALSLGLTPNFKSNFDLAEDAKLQLSKDTYDDDLDNLLAQIGDQYADLFLAAKNLSDAILLSDILRVNTEITKAPLSASMIKRYDEHHQDLTLLKALVRQQLPEKYKEIFFDQSKNGYAGYIDGGASQEEFYKFIKPILEKMDGTEELLVKLNREDLLRKQRTFDNGSIPHQIHLGELHAILRRQEDFYPFLKDNREKIEKILTFRIPYYVGPLARGNSRFAWMTRKSEETITPWNFEEVVDKGASAQSFIERMTNFDKNLPNEKVLPKHSLLYEYFTVYNELTKVKYVTEGMRKPAFLSGEQKKAIVDLLFKTNRKVTVKQLKEDYFKKIECFDSVEISGVEDRFNASLGTYHDLLKIIKDKDFLDNEENEDILEDIVLTLTLFEDREMIEERLKTYAHLFDDKVMKQLKRRRYTGWGRLSRKLINGIRDKQSGKTILDFLKSDGFANRNFMQLIHDDSLTFKEDIQKAQVSGQGDSLHEHIANLAGSPAIKKGILQTVKVVDELVKVMGRHKPENIVIEMARENQTTQKGQKNSRERMKRIEEGIKELGSQILKEHPVENTQLQNEKLYLYYLQNGRDMYVDQELDINRLSDYDVDHIVPQSFLKDDSIDNKVLTRSDKARGKSDNVPSEEVVKKMKNYWRQLLNAKLITQRKFDNLTKAERGGLSELDKAGFIKRQLVETRQITKHVAQILDSRMNTKYDENDKLIREVKVITLKSKLVSDFRKDFQFYKVREINNYHHAHDAYLNAVVGTALIKKYPKLESEFVYGDYKVYDVRKMIAKSEQEIGKATAKYFFYSNIMNFFKTEITLANGEIRKRPLIETNGETGEIVWDKGRDFATVRKVLSMPQVNIVKKTEVQTGGFSKESILPKRNSDKLIARKKDWDPKKYGGFDSPTVAYSVLVVAKVEKGKSKKLKSVKELLGITIMERSSFEKNPIDFLEAKGYKEVKKDLIIKLPKYSLFELENGRKRMLASAGELQKGNELALPSKYVNFLYLASHYEKLKGSPEDNEQKQLFVEQHKHYLDEIIEQISEFSKRVILADANLDKVLSAYNKHRDKPIREQAENIIHLFTLTNLGAPAAFKYFDTTIDRKRYTSTKEVLDATLIHQSITGLYETRIDLSQLGGDGGGGSEAAAKGSSGGVPWILKKPLELTIKLDLEEQQGTLLNNSILSKKGKEELKQLFEKYSALWQSWENQVGHRRIRPHKIATGTVKPTPQKQYHINPKAKPDIQIVINDLLKQGVLIQKESTMNTPVYPVPKPNGRWRMVLDYRAVNKVTPLIAVQNQHSYGILGSLFKGRYKTTIDLSNGFWAHPIVPEDYWITAFTWQGKQYCWTVLPQGFLNSPGLFTGDVVDLLQGIPNVEVYVDDVYISHDSEKEHLEYLDILFNRLKEAGYIISLKKSNIANSIVDFLGFQITNEGRGLTDTFKEKLENITAPTTLKQLQSILGLLNFARNFIPDFTELIAPLYALIPKSTKNYVPWQIEHSTTLETLITKLNGAEYLQGRKGDKTLIMKVNASYTTGYIRYYNEGEKKPISYVSIVFSKTELKFTELEKLLTTVHKGLLKALDLSMGQNIHVYSPIVSMQNIQKTPQTAKKALASRWLSWLSYLEDPRIRFFYDPQMPALKDLPAVDTGKDNKKHPSNFQHIFYTDGSAITSPTKEGHLNAGMGIVYFINKDGNLQKQQEWSISLGNHTAQFAEIAAFEFALKKCLPLGGNILVVTDSNYVAKAYNEELDVWASNGFVNNRKKPLKHISKWKSVADLKRLRPDVVVTHEPGHQKLDSSPHAYGNNLADQLATQASFKVHAGKRTADGSEFEKRTADGSEFESPKKKAKVE

SEQ ID NO: 7056 - protein, 2176 aa, synthetic construct
MPAAKRVKLDGGDKKYSIGLDIGTNSVGWAVITDEYKVPSKKFKVLGNTDRHSIKKNLIGALLFDSGETAEATRLKRTARRRYTRRKNRICYLQEIFSNEMAKVDDSFFHRLEESFLVEEDKKHERHPIFGNIVDEVAYHEKYPTIYHLRKKLVDSTDKADLRLIYLALAHMIKFRGHFLIEGDLNPDNSDVDKLFIQLVQTYNQLFEENPINASGVDAKAILSARLSKSRRLENLIAQLPGEKKNGLFGNLIALSLGLTPNFKSNFDLAEDAKLQLSKDTYDDDLDNLLAQIGDQYADLFLAAKNLSDAILLSDILRVNTEITKAPLSASMIKRYDEHHQDLTLLKALVRQQLPEKYKEIFFDQSKNGYAGYIDGGASQEEFYKFIKPILEKMDGTEELLVKLNREDLLRKQRTFDNGSIPHQIHLGELHAILRRQEDFYPFLKDNREKIEKILTFRIPYYVGPLARGNSRFAWMTRKSEETITPWNFEEVVDKGASAQSFIERMTNFDKNLPNEKVLPKHSLLYEYFTVYNELTKVKYVTEGMRKPAFLSGEQKKAIVDLLFKTNRKVTVKQLKEDYFKKIECFDSVEISGVEDRFNASLGTYHDLLKIIKDKDFLDNEENEDILEDIVLTLTLFEDREMIEERLKTYAHLFDDKVMKQLKRRRYTGWGRLSRKLINGIRDKQSGKTILDFLKSDGFANRNFMQLIHDDSLTFKEDIQKAQVSGQGDSLHEHIANLAGSPAIKKGILQTVKVVDELVKVMGRHKPENIVIEMARENQTTQKGQKNSRERMKRIEEGIKELGSQILKEHPVENTQLQNEKLYLYYLQNGRDMYVDQELDINRLSDYDVDHIVPQSFLKDDSIDNKVLTRSDKARGKSDNVPSEEVVKKMKNYWRQLLNAKLITQRKFDNLTKAERGGLSELDKAGFIKRQLVETRQITKHVAQILDSRMNTKYDENDKLIREVKVITLKSKLVSDFRKDFQFYKVREINNYHHAHDAYLNAVVGTALIKKYPKLESEFVYGDYKVYDVRKMIAKSEQEIGKATAKYFFYSNIMNFFKTEITLANGEIRKRPLIETNGETGEIVWDKGRDFATVRKVLSMPQVNIVKKTEVQTGGFSKESILPKRNSDKLIARKKDWDPKKYGGFDSPTVAYSVLVVAKVEKGKSKKLKSVKELLGITIMERSSFEKNPIDFLEAKGYKEVKKDLIIKLPKYSLFELENGRKRMLASAGELQKGNELALPSKYVNFLYLASHYEKLKGSPEDNEQKQLFVEQHKHYLDEIIEQISEFSKRVILADANLDKVLSAYNKHRDKPIREQAENIIHLFTLTNLGAPAAFKYFDTTIDRKRYTSTKEVLDATLIHQSITGLYETRIDLSQLGGDGGGGSEAAAKGSSGGMNPLQLLQPLPAEIKGTKLLAHWNSGATITCIPESFLEDEQPIKKTLIKTIHGEKQQNVYYVTFKVKGRKVEAEVIASPYEYILLSPTDVPWLTQQPLQLTILVPLQEYQEKILSKTALPEDQKQQLKTLFVKYDNLWQHWENQVGHRKIRPHNIATGDYPPRPQKQYPINPKAKPSIQIVIDDLLKQGVLTPQNSTMNTPVYPVPKPDGRWRMVLDYREVNKTIPLTAAQNQHSAGILATIVRQKYKTTLDLANGFWAHPITPESYWLTAFTWQGKQYCWTRLPQGFLNSPALFNADVVDLLKEIPNVQVYVDDIYLSHDDPKEHVQQLEKVFQILLQAGYVVSLKKSEIGQKTVEFLGFNITKEGRGLTDTFKTKLLNITPPKDLKQLQSILGKLNFARNFIPNFAELVQPLYNLIAPAKGKYIEWSEENTKQLNMVIEALNTASNLEERLPEQRLVIKVNTSPSAGYVRYYNETGKKPIMYLNYVFSKAELKFSMLEKLLTTMHKALIKAMDLAMGQEILVYSPIVSMTKIQKTPLPERKALPIRWITWMTYLEDPRIQFHYDKTLPELKHIPDVYTSSQSPVKHPSQYEGVFYTDGSAIKSPDPTKSNNAGMGIVHATYKPEYQVLNQWSIPLGNHTAQMAEIAAVEFACKKALKIPGPVLVITDSFYVAESANKELPYWKSNGFVNNKKKPLKHISKWKSIAECLSMKPDITIQHEKGISLQIPVFILKGNALADKLATQGSYVVNAGKRTADGSEFEKRTADGSEFESPKKKAKVE

SEQ ID NO: 7057 - protein, 2218 aa, synthetic construct
MPAAKRVKLDGGDKKYSIGLDIGTNSVGWAVITDEYKVPSKKFKVLGNTDRHSIKKNLIGALLFDSGETAEATRLKRTARRRYTRRKNRICYLQEIFSNEMAKVDDSFFHRLEESFLVEEDKKHERHPIFGNIVDEVAYHEKYPTIYHLRKKLVDSTDKADLRLIYLALAHMIKFRGHFLIEGDLNPDNSDVDKLFIQLVQTYNQLFEENPINASGVDAKAILSARLSKSRRLENLIAQLPGEKKNGLFGNLIALSLGLTPNFKSNFDLAEDAKLQLSKDTYDDDLDNLLAQIGDQYADLFLAAKNLSDAILLSDILRVNTEITKAPLSASMIKRYDEHHQDLTLLKALVRQQLPEKYKEIFFDQSKNGYAGYIDGGASQEEFYKFIKPILEKMDGTEELLVKLNREDLLRKQRTFDNGSIPHQIHLGELHAILRRQEDFYPFLKDNREKIEKILTFRIPYYVGPLARGNSRFAWMTRKSEETITPWNFEEVVDKGASAQSFIERMTNFDKNLPNEKVLPKHSLLYEYFTVYNELTKVKYVTEGMRKPAFLSGEQKKAIVDLLFKTNRKVTVKQLKEDYFKKIECFDSVEISGVEDRFNASLGTYHDLLKIIKDKDFLDNEENEDILEDIVLTLTLFEDREMIEERLKTYAHLFDDKVMKQLKRRRYTGWGRLSRKLINGIRDKQSGKTILDFLKSDGFANRNFMQLIHDDSLTFKEDIQKAQVSGQGDSLHEHIANLAGSPAIKKGILQTVKVVDELVKVMGRHKPENIVIEMARENQTTQKGQKNSRERMKRIEEGIKELGSQILKEHPVENTQLQNEKLYLYYLQNGRDMYVDQELDINRLSDYDVDHIVPQSFLKDDSIDNKVLTRSDKARGKSDNVPSEEVVKKMKNYWRQLLNAKLITQRKFDNLTKAERGGLSELDKAGFIKRQLVETRQITKHVAQILDSRMNTKYDENDKLIREVKVITLKSKLVSDFRKDFQFYKVREINNYHHAHDAYLNAVVGTALIKKYPKLESEFVYGDYKVYDVRKMIAKSEQEIGKATAKYFFYSNIMNFFKTEITLANGEIRKRPLIETNGETGEIVWDKGRDFATVRKVLSMPQVNIVKKTEVQTGGFSKESILPKRNSDKLIARKKDWDPKKYGGFDSPTVAYSVLVVAKVEKGKSKKLKSVKELLGITIMERSSFEKNPIDFLEAKGYKEVKKDLIIKLPKYSLFELENGRKRMLASAGELQKGNELALPSKYVNFLYLASHYEKLKGSPEDNEQKQLFVEQHKHYLDEIIEQISEFSKRVILADANLDKVLSAYNKHRDKPIREQAENIIHLFTLTNLGAPAAFKYFDTTIDRKRYTSTKEVLDATLIHQSITGLYETRIDLSQLGGDGGGGSEAAAKGSSGGTLGDQGSRGSDPLPEPRVTLTVEGIPTEFLVNTGAEHSVLTKPMGKMGSKRTVVAGATGSKVYPWTTKRLLKIGQKQVTHSFLVIPECPAPLLGRDLLTKLKAQIQFSTEGPQVTWEDRPAMCLVLNLEEEYRLHEKPVPPSIDPSWLQLFPMVWAEKAGMGLANQVPPVVVELKSDASPVAVRQYPMSKEAREGIRPHIQRFLDLGILVPCQSPWNTPLLPVKKPGTNDYRPVQDLREVNKRVQDIHPTVPNPYNLLSSLPPSHTWYSVLDLKDAFFCLKLHPNSQPLFAFEWRDPEKGNTGQLTWTRLPQGFKNSPTLFDEALHRDLASFRALNPQVVMLQYVDDLLVAAPTYRDCKEGTRRLLQELSKLGYRVSAKKAQLCREEVTYLGYLLKGGKRWLTPARKATVMKIPTPTTPRQVREFLGTAGFCRLWIPGFASLAAPLYPLTREKVPFTWTEAHQEAFGRIKEALLSAPALALPDLTKPFALYVDEKEGVARGVLTQTLGPWRRPVAYLSKKLDPVASGWPTCLKAIAAVALLLKDADKLTLGQNVLVIAPHNLESIVRQPPDRWMTNARMTHYQSLLLNERVSFAPPAILNPATLLPVESDDTPIHICSEILAEETGTRPDLRDQPLPGVPAWYTDGSSFIMDGRRQAGAAIVDNKRTVWASNLPEGTSAQKAELIALTQALRLAEGKSINIYTDSRYAFATAHVHGAIYKQRGLLTSAGKDIKNKEEILALLEAIHLPKRVAIIHCPGHQRGTDPVATGNRKADEAAKQAAQSTRILTETTKNAGKRTADGSEFEKRTADGSEFESPKKKAKVE

SEQ ID NO: 7058 - protein, 2127 aa, synthetic construct
MPAAKRVKLDGGDKKYSIGLDIGTNSVGWAVITDEYKVPSKKFKVLGNTDRHSIKKNLIGALLFDSGETAEATRLKRTARRRYTRRKNRICYLQEIFSNEMAKVDDSFFHRLEESFLVEEDKKHERHPIFGNIVDEVAYHEKYPTIYHLRKKLVDSTDKADLRLIYLALAHMIKFRGHFLIEGDLNPDNSDVDKLFIQLVQTYNQLFEENPINASGVDAKAILSARLSKSRRLENLIAQLPGEKKNGLFGNLIALSLGLTPNFKSNFDLAEDAKLQLSKDTYDDDLDNLLAQIGDQYADLFLAAKNLSDAILLSDILRVNTEITKAPLSASMIKRYDEHHQDLTLLKALVRQQLPEKYKEIFFDQSKNGYAGYIDGGASQEEFYKFIKPILEKMDGTEELLVKLNREDLLRKQRTFDNGSIPHQIHLGELHAILRRQEDFYPFLKDNREKIEKILTFRIPYYVGPLARGNSRFAWMTRKSEETITPWNFEEVVDKGASAQSFIERMTNFDKNLPNEKVLPKHSLLYEYFTVYNELTKVKYVTEGMRKPAFLSGEQKKAIVDLLFKTNRKVTVKQLKEDYFKKIECFDSVEISGVEDRFNASLGTYHDLLKIIKDKDFLDNEENEDILEDIVLTLTLFEDREMIEERLKTYAHLFDDKVMKQLKRRRYTGWGRLSRKLINGIRDKQSGKTILDFLKSDGFANRNFMQLIHDDSLTFKEDIQKAQVSGQGDSLHEHIANLAGSPAIKKGILQTVKVVDELVKVMGRHKPENIVIEMARENQTTQKGQKNSRERMKRIEEGIKELGSQILKEHPVENTQLQNEKLYLYYLQNGRDMYVDQELDINRLSDYDVDHIVPQSFLKDDSIDNKVLTRSDKARGKSDNVPSEEVVKKMKNYWRQLLNAKLITQRKFDNLTKAERGGLSELDKAGFIKRQLVETRQITKHVAQILDSRMNTKYDENDKLIREVKVITLKSKLVSDFRKDFQFYKVREINNYHHAHDAYLNAVVGTALIKKYPKLESEFVYGDYKVYDVRKMIAKSEQEIGKATAKYFFYSNIMNFFKTEITLANGEIRKRPLIETNGETGEIVWDKGRDFATVRKVLSMPQVNIVKKTEVQTGGFSKESILPKRNSDKLIARKKDWDPKKYGGFDSPTVAYSVLVVAKVEKGKSKKLKSVKELLGITIMERSSFEKNPIDFLEAKGYKEVKKDLIIKLPKYSLFELENGRKRMLASAGELQKGNELALPSKYVNFLYLASHYEKLKGSPEDNEQKQLFVEQHKHYLDEIIEQISEFSKRVILADANLDKVLSAYNKHRDKPIREQAENIIHLFTLTNLGAPAAFKYFDTTIDRKRYTSTKEVLDATLIHQSITGLYETRIDLSQLGGDGGGGSEAAAKGSSGGLLGRDLLTKLKAQIQFSTEGPQVTWEDRPAMCLVLNLEEEYRLHEKPVPPSIDPSWLQLFPMVWAEKAGMGLANQVPPVVVELKSDASPVAVRQYPMSKEAREGIRPHIQRFLDLGILVPCQSPWNTPLLPVKKPGTNDYRPVQDLREVNKRVQDIHPTVPNPYNLLSSLPPSHTWYSVLDLKDAFFCLKLHPNSQPLFAFEWRDPEKGNTGQLTWTRLPQGFKNSPTLFNEALHRDLASFRALNPQVVMLQYVDDLLVAAPTYRDCKEGTRRLLQELSKLGYRVSAKKAQLCREEVTYLGYLLKGGKRWLTPARKATVMKIPTPTTPRQVREFLGTAGFCRLWIPGFASLAAPLYPLTRPKVPFTWTEAHQEAFGRIKEALLSAPALALPDLTKPFALYVDEKEGVARGVLTQTLGPWRRPVAYLSKKLDPVASGWPTCLKAIAAVALLLKDADKLTLGQNVLVIAPHNLESIVRQPPDRWMTNARMTHYQSLLLNERVSFAPPAILNPATLLPVESDDTPIHICSEILAEETGTRPDLRDQPLPGVPAWYTDGSSFIMDGRRQAGAAIVDNKRTVWASNLPEGTSAQKAELIALTQALRLAEGKSINIYTDSRYAFATAHVHGAIYKQRGWLTSAGKDIKNKEEILALLEAIHLPKRVAIIHCPGHQRGTDPVATGNRKADEAAKQAAQSTRILTETTKNAGKRTADGSEFEKRTADGSEFESPKKKAKVE

SEQ ID NO: 7059 - protein, 2096 aa, synthetic construct
MPAAKRVKLDGGDKKYSIGLDIGTNSVGWAVITDEYKVPSKKFKVLGNTDRHSIKKNLIGALLFDSGETAEATRLKRTARRRYTRRKNRICYLQEIFSNEMAKVDDSFFHRLEESFLVEEDKKHERHPIFGNIVDEVAYHEKYPTIYHLRKKLVDSTDKADLRLIYLALAHMIKFRGHFLIEGDLNPDNSDVDKLFIQLVQTYNQLFEENPINASGVDAKAILSARLSKSRRLENLIAQLPGEKKNGLFGNLIALSLGLTPNFKSNFDLAEDAKLQLSKDTYDDDLDNLLAQIGDQYADLFLAAKNLSDAILLSDILRVNTEITKAPLSASMIKRYDEHHQDLTLLKALVRQQLPEKYKEIFFDQSKNGYAGYIDGGASQEEFYKFIKPILEKMDGTEELLVKLNREDLLRKQRTFDNGSIPHQIHLGELHAILRRQEDFYPFLKDNREKIEKILTFRIPYYVGPLARGNSRFAWMTRKSEETITPWNFEEVVDKGASAQSFIERMTNFDKNLPNEKVLPKHSLLYEYFTVYNELTKVKYVTEGMRKPAFLSGEQKKAIVDLLFKTNRKVTVKQLKEDYFKKIECFDSVEISGVEDRFNASLGTYHDLLKIIKDKDFLDNEENEDILEDIVLTLTLFEDREMIEERLKTYAHLFDDKVMKQLKRRRYTGWGRLSRKLINGIRDKQSGKTILDFLKSDGFANRNFMQLIHDDSLTFKEDIQKAQVSGQGDSLHEHIANLAGSPAIKKGILQTVKVVDELVKVMGRHKPENIVIEMARENQTTQKGQKNSRERMKRIEEGIKELGSQILKEHPVENTQLQNEKLYLYYLQNGRDMYVDQELDINRLSDYDVDHIVPQSFLKDDSIDNKVLTRSDKARGKSDNVPSEEVVKKMKNYWRQLLNAKLITQRKFDNLTKAERGGLSELDKAGFIKRQLVETRQITKHVAQILDSRMNTKYDENDKLIREVKVITLKSKLVSDFRKDFQFYKVREINNYHHAHDAYLNAVVGTALIKKYPKLESEFVYGDYKVYDVRKMIAKSEQEIGKATAKYFFYSNIMNFFKTEITLANGEIRKRPLIETNGETGEIVWDKGRDFATVRKVLSMPQVNIVKKTEVQTGGFSKESILPKRNSDKLIARKKDWDPKKYGGFDSPTVAYSVLVVAKVEKGKSKKLKSVKELLGITIMERSSFEKNPIDFLEAKGYKEVKKDLIIKLPKYSLFELENGRKRMLASAGELQKGNELALPSKYVNFLYLASHYEKLKGSPEDNEQKQLFVEQHKHYLDEIIEQISEFSKRVILADANLDKVLSAYNKHRDKPIREQAENIIHLFTLTNLGAPAAFKYFDTTIDRKRYTSTKEVLDATLIHQSITGLYETRIDLSQLGGDGGGGSEAAAKGSSGGTLGIEDEYRLHETSTEPDVSLGSTWLSDFPQAWAETGGMGLAVRQAPLIIPLKATSTPVSIQQYPMSHEARLGIKPHIQRLLDQGILVPCQSPWNTPLLPVKKPGTNDYRPVQDLREVNKRVEDIHPTVPNPYNLLSGLPPSHQWYTVLDLKDAFFCLRLHPTSQPLFAFEWRDPGMGISGQLTWTRLPQGFKNSPTLFDEALHRDLADFRIQHPDLILLQYVDDILLAATSELDCQQGTRALLQTLGDLGYRASAKKAQICQKQVKYLGYLLREGQRWLTEARKETVMGQPVPKTPRQLREFLGTAGFCRLWIPGFAEMAAPLYPLTKTGTLFSWGPDQQKAYQEIKQALLTAPALGLPDLTKPFELFVDEKQGYAKGVLTQKLGPWRRPVAYLSKKLDPVAAGWPPCLRMVAAIAVLTKDAGKLTMGQPLVILAPHAVEALVKQPPDRWLSNARMTHYQAMLLDTDRVQFGPVVALNPATLLPLPEEGAPHDCLEILAETHGTRPDLTDQPIPDADHTWYTDGSSFLQEGQRKAGAAVTTETEVIWAGALPAGTSAQRAELIALTQALKMAEGKRLNVYTDSRYAFATAHIHGEIYRRRGLLTSEGREIKNKSEILALLKALFLPKRLSIIHCLGHQKGDSAEARGNRLADQAAREAAIKTPPDTSTLLAGKRTADGSEFEKRTADGSEFESPKKKAKVE

SEQ ID NO: 7060 - protein, 2096 aa, synthetic construct
MPAAKRVKLDGGDKKYSIGLDIGTNSVGWAVITDEYKVPSKKFKVLGNTDRHSIKKNLIGALLFDSGETAEATRLKRTARRRYTRRKNRICYLQEIFSNEMAKVDDSFFHRLEESFLVEEDKKHERHPIFGNIVDEVAYHEKYPTIYHLRKKLVDSTDKADLRLIYLALAHMIKFRGHFLIEGDLNPDNSDVDKLFIQLVQTYNQLFEENPINASGVDAKAILSARLSKSRRLENLIAQLPGEKKNGLFGNLIALSLGLTPNFKSNFDLAEDAKLQLSKDTYDDDLDNLLAQIGDQYADLFLAAKNLSDAILLSDILRVNTEITKAPLSASMIKRYDEHHQDLTLLKALVRQQLPEKYKEIFFDQSKNGYAGYIDGGASQEEFYKFIKPILEKMDGTEELLVKLNREDLLRKQRTFDNGSIPHQIHLGELHAILRRQEDFYPFLKDNREKIEKILTFRIPYYVGPLARGNSRFAWMTRKSEETITPWNFEEVVDKGASAQSFIERMTNFDKNLPNEKVLPKHSLLYEYFTVYNELTKVKYVTEGMRKPAFLSGEQKKAIVDLLFKTNRKVTVKQLKEDYFKKIECFDSVEISGVEDRFNASLGTYHDLLKIIKDKDFLDNEENEDILEDIVLTLTLFEDREMIEERLKTYAHLFDDKVMKQLKRRRYTGWGRLSRKLINGIRDKQSGKTILDFLKSDGFANRNFMQLIHDDSLTFKEDIQKAQVSGQGDSLHEHIANLAGSPAIKKGILQTVKVVDELVKVMGRHKPENIVIEMARENQTTQKGQKNSRERMKRIEEGIKELGSQILKEHPVENTQLQNEKLYLYYLQNGRDMYVDQELDINRLSDYDVDHIVPQSFLKDDSIDNKVLTRSDKARGKSDNVPSEEVVKKMKNYWRQLLNAKLITQRKFDNLTKAERGGLSELDKAGFIKRQLVETRQITKHVAQILDSRMNTKYDENDKLIREVKVITLKSKLVSDFRKDFQFYKVREINNYHHAHDAYLNAVVGTALIKKYPKLESEFVYGDYKVYDVRKMIAKSEQEIGKATAKYFFYSNIMNFFKTEITLANGEIRKRPLIETNGETGEIVWDKGRDFATVRKVLSMPQVNIVKKTEVQTGGFSKESILPKRNSDKLIARKKDWDPKKYGGFDSPTVAYSVLVVAKVEKGKSKKLKSVKELLGITIMERSSFEKNPIDFLEAKGYKEVKKDLIIKLPKYSLFELENGRKRMLASAGELQKGNELALPSKYVNFLYLASHYEKLKGSPEDNEQKQLFVEQHKHYLDEIIEQISEFSKRVILADANLDKVLSAYNKHRDKPIREQAENIIHLFTLTNLGAPAAFKYFDTTIDRKRYTSTKEVLDATLIHQSITGLYETRIDLSQLGGDGGGGSEAAAKGSSGGTLNIEDEYRLHETSKGPDVPLGSTWLSDFPQAWAETGGMGLAVRQAPLIIPLKATSTPVSIKQYPMSQEARLGIKPHIQRLLDQGILVPCQSPWNTPLLPVKKPGTNDYRPVQDLREVNKRVEDIHPTVPNPYNLLSGLPPSHQWYTVLDLKDAFFCLRLHPTSQSLFAFEWRDPEMGISGQLTWTRLPQGFKNSPTLFNEALHRDLADFRIQHPDLILLQYVDDLLLAATSELDCQQGTRALLQTLGDLGYRASAKKAQICQKQVKYLGYLLKEGQRWLTEARKETVMGQPTPKTPRQLREFLGTAGFCRLWIPGFAEMAAPLYPLTKPGTLFEWGPDQQKAYQEIKQALLTAPALGLPDLTKPFELFVDEKQGYAKGVLTQKLGPWRRPVAYLSKKLDPVAAGWPPCLRMVAAIAVLTKDAGKLTMGQPLVILAPHAVEALVKQPPDRWLSNARMTHYQALLLDTDRVQFGPIVALNPATLLPLPEEGLQHDCLDILAEAHGTRPDLTDQPLPDADHTWYTDGSSFLQEGQRKAGAAVTTETEVVWAKALPAGTSAQRAELIALTQALKMAEGKKLNVYTDSRYAFATAHIHGEIYRRRGWLTSEGKEIKNKDEILALLKALFLPKRLSIIHCPGHQKGNRAEARGNRMADQAAREVATRETPETSTLLAGKRTADGSEFEKRTADGSEFESPKKKAKVE

SEQ ID NO: 7061 - protein, 2116 aa, synthetic construct
MPAAKRVKLDGGDKKYSIGLDIGTNSVGWAVITDEYKVPSKKFKVLGNTDRHSIKKNLIGALLFDSGETAEATRLKRTARRRYTRRKNRICYLQEIFSNEMAKVDDSFFHRLEESFLVEEDKKHERHPIFGNIVDEVAYHEKYPTIYHLRKKLVDSTDKADLRLIYLALAHMIKFRGHFLIEGDLNPDNSDVDKLFIQLVQTYNQLFEENPINASGVDAKAILSARLSKSRRLENLIAQLPGEKKNGLFGNLIALSLGLTPNFKSNFDLAEDAKLQLSKDTYDDDLDNLLAQIGDQYADLFLAAKNLSDAILLSDILRVNTEITKAPLSASMIKRYDEHHQDLTLLKALVRQQLPEKYKEIFFDQSKNGYAGYIDGGASQEEFYKFIKPILEKMDGTEELLVKLNREDLLRKQRTFDNGSIPHQIHLGELHAILRRQEDFYPFLKDNREKIEKILTFRIPYYVGPLARGNSRFAWMTRKSEETITPWNFEEVVDKGASAQSFIERMTNFDKNLPNEKVLPKHSLLYEYFTVYNELTKVKYVTEGMRKPAFLSGEQKKAIVDLLFKTNRKVTVKQLKEDYFKKIECFDSVEISGVEDRFNASLGTYHDLLKIIKDKDFLDNEENEDILEDIVLTLTLFEDREMIEERLKTYAHLFDDKVMKQLKRRRYTGWGRLSRKLINGIRDKQSGKTILDFLKSDGFANRNFMQLIHDDSLTFKEDIQKAQVSGQGDSLHEHIANLAGSPAIKKGILQTVKVVDELVKVMGRHKPENIVIEMARENQTTQKGQKNSRERMKRIEEGIKELGSQILKEHPVENTQLQNEKLYLYYLQNGRDMYVDQELDINRLSDYDVDHIVPQSFLKDDSIDNKVLTRSDKARGKSDNVPSEEVVKKMKNYWRQLLNAKLITQRKFDNLTKAERGGLSELDKAGFIKRQLVETRQITKHVAQILDSRMNTKYDENDKLIREVKVITLKSKLVSDFRKDFQFYKVREINNYHHAHDAYLNAVVGTALIKKYPKLESEFVYGDYKVYDVRKMIAKSEQEIGKATAKYFFYSNIMNFFKTEITLANGEIRKRPLIETNGETGEIVWDKGRDFATVRKVLSMPQVNIVKKTEVQTGGFSKESILPKRNSDKLIARKKDWDPKKYGGFDSPTVAYSVLVVAKVEKGKSKKLKSVKELLGITIMERSSFEKNPIDFLEAKGYKEVKKDLIIKLPKYSLFELENGRKRMLASAGELQKGNELALPSKYVNFLYLASHYEKLKGSPEDNEQKQLFVEQHKHYLDEIIEQISEFSKRVILADANLDKVLSAYNKHRDKPIREQAENIIHLFTLTNLGAPAAFKYFDTTIDRKRYTSTKEVLDATLIHQSITGLYETRIDLSQLGGDGGGGSEAAAKGSSGGWVQEISDSRPMLHIYLNGRRFLGLLNTGADKTCIAGRDWPANWPIHQTESSLQGLGMACGVARSSQPLRWQHEDKSGIIHPFVIPTLPFTLWGRDIMKDIKVRLMTDSPDDSQDLMIGAIESNLFADQISWKSDQPVWLNQWPLKQEKLQALQQLVTEQLQLGHLEESNSPWNTPVFVIKKKSGKWRLLQDLRAVNATMHDMGALQPGLPSPVAVPKGWEIIIIDLQDCFFNIKLHPEDCKRFAFSVPSPNFKRPYQRFQWKVLPQGMKNSPTLCQKFVDKAILTVRDKYQDSYIVHYMDDILLAHPSRSIVDEILTSMIQALNKHGLVVSTEKIQKYDNLKYLGTHIQGDSVSYQKLQIRTDKLRTLNDFQKLLGNINWIRPFLKLTTGELKPLFEILNGDSNPISTRKLTPEACKALQLMNERLSTARVKRLDLSQPWSLCILKTEYTPTACLWQDGVVEWIHLPHISPKVITPYDIFCTQLIIKGRHRSKELFSKDPDYIVVPYTKVQFDLLLQEKEDWPISLLGFLGEVHFHLPKDPLLTFTLQTAIIFPHMTSTTPLEKGIVIFTDGSANGRSVTYIQGREPIIKENTQNTAQQAEIVAVITAFEEVSQPFNLYTDSKYVTGLFPEIETATLSPRTKIYTELKHLQRLIHKRQEKFYIGHIRGHTGLPGPLAQGNAYADSLTRILTAGKRTADGSEFEKRTADGSEFESPKKKAKVE

SEQ ID NO: 7062 - protein, 2090 aa, synthetic construct
MPAAKRVKLDGGDKKYSIGLDIGTNSVGWAVITDEYKVPSKKFKVLGNTDRHSIKKNLIGALLFDSGETAEATRLKRTARRRYTRRKNRICYLQEIFSNEMAKVDDSFFHRLEESFLVEEDKKHERHPIFGNIVDEVAYHEKYPTIYHLRKKLVDSTDKADLRLIYLALAHMIKFRGHFLIEGDLNPDNSDVDKLFIQLVQTYNQLFEENPINASGVDAKAILSARLSKSRRLENLIAQLPGEKKNGLFGNLIALSLGLTPNFKSNFDLAEDAKLQLSKDTYDDDLDNLLAQIGDQYADLFLAAKNLSDAILLSDILRVNTEITKAPLSASMIKRYDEHHQDLTLLKALVRQQLPEKYKEIFFDQSKNGYAGYIDGGASQEEFYKFIKPILEKMDGTEELLVKLNREDLLRKQRTFDNGSIPHQIHLGELHAILRRQEDFYPFLKDNREKIEKILTFRIPYYVGPLARGNSRFAWMTRKSEETITPWNFEEVVDKGASAQSFIERMTNFDKNLPNEKVLPKHSLLYEYFTVYNELTKVKYVTEGMRKPAFLSGEQKKAIVDLLFKTNRKVTVKQLKEDYFKKIECFDSVEISGVEDRFNASLGTYHDLLKIIKDKDFLDNEENEDILEDIVLTLTLFEDREMIEERLKTYAHLFDDKVMKQLKRRRYTGWGRLSRKLINGIRDKQSGKTILDFLKSDGFANRNFMQLIHDDSLTFKEDIQKAQVSGQGDSLHEHIANLAGSPAIKKGILQTVKVVDELVKVMGRHKPENIVIEMARENQTTQKGQKNSRERMKRIEEGIKELGSQILKEHPVENTQLQNEKLYLYYLQNGRDMYVDQELDINRLSDYDVDHIVPQSFLKDDSIDNKVLTRSDKARGKSDNVPSEEVVKKMKNYWRQLLNAKLITQRKFDNLTKAERGGLSELDKAGFIKRQLVETRQITKHVAQILDSRMNTKYDENDKLIREVKVITLKSKLVSDFRKDFQFYKVREINNYHHAHDAYLNAVVGTALIKKYPKLESEFVYGDYKVYDVRKMIAKSEQEIGKATAKYFFYSNIMNFFKTEITLANGEIRKRPLIETNGETGEIVWDKGRDFATVRKVLSMPQVNIVKKTEVQTGGFSKESILPKRNSDKLIARKKDWDPKKYGGFDSPTVAYSVLVVAKVEKGKSKKLKSVKELLGITIMERSSFEKNPIDFLEAKGYKEVKKDLIIKLPKYSLFELENGRKRMLASAGELQKGNELALPSKYVNFLYLASHYEKLKGSPEDNEQKQLFVEQHKHYLDEIIEQISEFSKRVILADANLDKVLSAYNKHRDKPIREQAENIIHLFTLTNLGAPAAFKYFDTTIDRKRYTSTKEVLDATLIHQSITGLYETRIDLSQLGGDGGGGSEAAAKGSSGGTLQLDDEYRLYSPLVKPDQNIQFWLEQFPQAWAETAGMGLAKQVPPQVIQLKASATPVSVRQYPLSKEAQEGIRPHVQRLIQQGILVPVQSPWNTPLLPVRKPGTNDYRPVQDLREVNKRVQDIHPTVPNPYNLLCALPPQRSWYTVLDLKDAFFCLRLHPTSQPLFAFEWRDPGTGRTGQLTWTRLPQGFKNSPTIFDEALHRDLANFRIQHPQVTLLQYVDDLLLAGATKQDCLEGTKALLLELSDLGYRASAKKAQICRREVTYLGYSLRDGQRWLTEARKKTVVQIPAPTTAKQVREFLGTAGFCRLWIPGFATLAAPLYPLTKEKGEFSWAPEHQKAFDAIKKALLSAPALALPDVTKPFTLYVDERKGVARGVLTQTLGPWRRPVAYLSKKLDPVASGWPVCLKAIAAVAILVKDADKLTLGQNITVIAPHALENIVRQPPDRWMTNARMTHYQSLLLTERVTFAPPAALNPATLLPEETDEPVTHDCHQLLIEETGVRKDLTDIPLTGEVLTWFTDGSSYVVEGKRMAGAAVVDGTRTIWASSLPEGTSAQKAELMALTQALRLAEGKSINIYTDSRYAFATAHVHGAIYKQRGLLTSAGREIKNKEEILSLLEALHLPKRLAIIHCPGHQKAKDPISRGNQMADRVAKQAAQGVNLLAGKRTADGSEFEKRTADGSEFESPKKKAKVE

SEQ ID NO: 7063 - protein, 2090 aa, synthetic construct; identical to SEQ ID NO: 7062

SEQ ID NO: 7064 - protein, 2094 aa, synthetic construct
MPAAKRVKLDGGDKKYSIGLDIGTNSVGWAVITDEYKVPSKKFKVLGNTDRHSIKKNLIGALLFDSGETAEATRLKRTARRRYTRRKNRICYLQEIFSNEMAKVDDSFFHRLEESFLVEEDKKHERHPIFGNIVDEVAYHEKYPTIYHLRKKLVDSTDKADLRLIYLALAHMIKFRGHFLIEGDLNPDNSDVDKLFIQLVQTYNQLFEENPINASGVDAKAILSARLSKSRRLENLIAQLPGEKKNGLFGNLIALSLGLTPNFKSNFDLAEDAKLQLSKDTYDDDLDNLLAQIGDQYADLFLAAKNLSDAILLSDILRVNTEITKAPLSASMIKRYDEHHQDLTLLKALVRQQLPEKYKEIFFDQSKNGYAGYIDGGASQEEFYKFIKPILEKMDGTEELLVKLNREDLLRKQRTFDNGSIPHQIHLGELHAILRRQEDFYPFLKDNREKIEKILTFRIPYYVGPLARGNSRFAWMTRKSEETITPWNFEEVVDKGASAQSFIERMTNFDKNLPNEKVLPKHSLLYEYFTVYNELTKVKYVTEGMRKPAFLSGEQKKAIVDLLFKTNRKVTVKQLKEDYFKKIECFDSVEISGVEDRFNASLGTYHDLLKIIKDKDFLDNEENEDILEDIVLTLTLFEDREMIEERLKTYAHLFDDKVMKQLKRRRYTGWGRLSRKLINGIRDKQSGKTILDFLKSDGFANRNFMQLIHDDSLTFKEDIQKAQVSGQGDSLHEHIANLAGSPAIKKGILQTVKVVDELVKVMGRHKPENIVIEMARENQTTQKGQKNSRERMKRIEEGIKELGSQILKEHPVENTQLQNEKLYLYYLQNGRDMYVDQELDINRLSDYDVDHIVPQSFLKDDSIDNKVLTRSDKARGKSDNVPSEEVVKKMKNYWRQLLNAKLITQRKFDNLTKAERGGLSELDKAGFIKRQLVETRQITKHVAQILDSRMNTKYDENDKLIREVKVITLKSKLVSDFRKDFQFYKVREINNYHHAHDAYLNAVVGTALIKKYPKLESEFVYGDYKVYDVRKMIAKSEQEIGKATAKYFFYSNIMNFFKTEITLANGEIRKRPLIETNGETGEIVWDKGRDFATVRKVLSMPQVNIVKKTEVQTGGFSKESILPKRNSDKLIARKKDWDPKKYGGFDSPTVAYSVLVVAKVEKGKSKKLKSVKELLGITIMERSSFEKNPIDFLEAKGYKEVKKDLIIKLPKYSLFELENGRKRMLASAGELQKGNELALPSKYVNFLYLASHYEKLKGSPEDNEQKQLFVEQHKHYLDEIIEQISEFSKRVILADANLDKVLSAYNKHRDKPIREQAENIIHLFTLTNLGAPAAFKYFDTTIDRKRYTSTKEVLDATLIHQSITGLYETRIDLSQLGGDGGGGSEAAAKGSSGGVLNLEEEYRLHEKPVPSSIDPSWLQLFPTVWAERAGMGLANQVPPVVVELRSGASPVAVRQYPMSKEAREGIRPHIQRFLDLGVLVPCQSPWNTPLLPVKKPGTNDYRPVQDLREINKRVQDIHPTVPNPYNLLSSLPPSHTWYSVLDLKDAFFCLKLHPNSQPLFAFEWRDPEKGNTGQLTWTRLPQGFKNSPTLFNEALHRDLAPFRALNPQVVLLQYVDDLLVAAPTYRDCKEGTQKLLQELSKLGYRVSAKKAQLCQKEVTYLGYLLKEGKRWLTPARKATVMKIPPPTTPRQVREFLGTAGFCRLWIPGFASLAAPLYPLTKPSIPFIWTEEHQKAFDRIKEALLSAPALALPDLTKPFTLYVDERAGVARGVLTQTLGPWRRPVAYLSKKLDPVASGWPTCLKAVAAVALLLKDADKLTLGQNVTVIASHSLESIVRQPPDRWMTNARMTHYQSLLLNERVSFAPPAVLNPATLLPVESEATPVHRCSEILAEETGTRRDLKDQPLPGVPAWYTDGSSFIAEGKRRAGAAIVDGKRTVWASSLPEGTSAQKAELVALTQALRLAEGKDINIYTDSRYAFATAHIHGAIYKQRGWLTSAGKDIKNKEEILALLEAIHLPKRVAIIHCPGHQKGNDPVATGNRRADEAAKQAALSTRVLAETTKPAGKRTADGSEFEKRTADGSEFESPKKKAKVE

SEQ ID NO: 7065 - protein, 2094 aa, synthetic construct
MPAAKRVKLDGGDKKYSIGLDIGTNSVGWAVITDEYKVPSKKFKVLGNTDRHSIKKNLIGALLFDSGETAEATRLKRTARRRYTRRKNRICYLQEIFSNEMAKVDDSFFHRLEESFLVEEDKKHERHPIFGNIVDEVAYHEKYPTIYHLRKKLVDSTDKADLRLIYLALAHMIKFRGHFLIEGDLNPDNSDVDKLFIQLVQTYNQLFEENPINASGVDAKAILSARLSKSRRLENLIAQLPGEKKNGLFGNLIALSLGLTPNFKSNFDLAEDAKLQLSKDTYDDDLDNLLAQIGDQYADLFLAAKNLSDAILLSDILRVNTEITKAPLSASMIKRYDEHHQDLTLLKALVRQQLPEKYKEIFFDQSKNGYAGYIDGGASQEEFYKFIKPILEKMDGTEELLVKLNREDLLRKQRTFDNGSIPHQIHLGELHAILRRQEDFYPFLKDNREKIEKILTFRIPYYVGPLARGNSRFAWMTRKSEETITPWNFEEVVDKGASAQSFIERMTNFDKNLPNEKVLPKHSLLYEYFTVYNELTKVKYVTEGMRKPAFLSGEQKKAIVDLLFKTNRKVTVKQLKEDYFKKIECFDSVEISGVEDRFNASLGTYHDLLKIIKDKDFLDNEENEDILEDIVLTLTLFEDREMIEERLKTYAHLFDDKVMKQLKRRRYTGWGRLSRKLINGIRDKQSGKTILDFLKSDGFANRNFMQLIHDDSLTFKEDIQKAQVSGQGDSLHEHIANLAGSPAIKKGILQTVKVVDELVKVMGRHKPENIVIEMARENQTTQKGQKNSRERMKRIEEGIKELGSQILKEHPVENTQLQNEKLYLYYLQNGRDMYVDQELDINRLSDYDVDHIVPQSFLKDDSIDNKVLTRSDKARGKSDNVPSEEVVKKMKNYWRQLLNAKLITQRKFDNLTKAERGGLSELDKAGFIKRQLVETRQITKHVAQILDSRMNTKYDENDKLIREVKVITLKSKLVSDFRKDFQFYKVREINNYHHAHDAYLNAVVGTALIKKYPKLESEFVYGDYKVYDVRKMIAKSEQEIGKATAKYFFYSNIMNFFKTEITLANGEIRKRPLIETNGETGEIVWDKGRDFATVRKVLSMPQVNIVKKTEVQTGGFSKESILPKRNSDKLIARKKDWDPKKYGGFDSPTVAYSVLVVAKVEKGKSKKLKSVKELLGITIMERSSFEKNPIDFLEAKGYKEVKKDLIIKLPKYSLFELENGRKRMLASAGELQKGNELALPSKYVNFLYLASHYEKLKGSPEDNEQKQLFVEQHKHYLDEIIEQISEFSKRVILADANLDKVLSAYNKHRDKPIREQAENIIHLFTLTNLGAPAAFKYFDTTIDRKRYTSTKEVLDATLIHQSITGLYETRIDLSQLGGDGGGGSEAAAKGSSGGVLNLEEEYRLHEKPVPSSIDPSWLQLFPTVWAERAGMGLANQVPPVVVELRSGASPVAVRQYPMSKEAREGIRPHIQRFLDLGVLVPCQSPWNTPLLPVKKPGTNDYRPVQDLREINKRVQDIHPTVPNPYNLLSSLPPSHTWYSVLDLKDAFFCLKLHPNSQPLFAFEWRDPEKGNTGQLTWTRLPQGFKNSPTLFNEALHRDLAPFRALNPQVVLLQYVDDLLVAAPTYRDCKEGTQKLLQELSKLGYRVSAKKAQLCQKEVTYLGYLLKEGKRWLTPARKATVMKIPPPTTPRQVREFLGKAGFCRLFIPGFASLAAPLYPLTKPSIPFIWTEEHQKAFDRIKEALLSAPALALPDLTKPFTLYVDERAGVARGVLTQTLGPWRRPVAYLSKKLDPVASGWPTCLKAVAAVALLLKDADKLTLGQNVTVIASHSLESIVRQPPDRWMTNARMTHYQSLLLNERVSFAPPAVLNPATLLPVESEATPVHRCSEILAEETGTRRDLKDQPLPGVPAWYTDGSSFIAEGKRRAGAAIVDGKRTVWASSLPEGTSAQKAELVALTQALRLAEGKDINIYTDSRYAFATAHIHGAIYKQRGWLTSAGKDIKNKEEILALLEAIHLPKRVAIIHCPGHQKGNDPVATGNRRADEAAKQAALSTRVLAETTKPAGKRTADGSEFEKRTADGSEFESPKKKAKVE

SEQ ID NO: 7066 - protein, 2096 aa, synthetic construct
MPAAKRVKLDGGDKKYSIGLDIGTNSVGWAVITDEYKVPSKKFKVLGNTDRHSIKKNLIGALLFDSGETAEATRLKRTARRRYTRRKNRICYLQEIFSNEMAKVDDSFFHRLEESFLVEEDKKHERHPIFGNIVDEVAYHEKYPTIYHLRKKLVDSTDKADLRLIYLALAHMIKFRGHFLIEGDLNPDNSDVDKLFIQLVQTYNQLFEENPINASGVDAKAILSARLSKSRRLENLIAQLPGEKKNGLFGNLIALSLGLTPNFKSNFDLAEDAKLQLSKDTYDDDLDNLLAQIGDQYADLFLAAKNLSDAILLSDILRVNTEITKAPLSASMIKRYDEHHQDLTLLKALVRQQLPEKYKEIFFDQSKNGYAGYIDGGASQEEFYKFIKPILEKMDGTEELLVKLNREDLLRKQRTFDNGSIPHQIHLGELHAILRRQEDFYPFLKDNREKIEKILTFRIPYYVGPLARGNSRFAWMTRKSEETITPWNFEEVVDKGASAQSFIERMTNFDKNLPNEKVLPKHSLLYEYFTVYNELTKVKYVTEGMRKPAFLSGEQKKAIVDLLFKTNRKVTVKQLKEDYFKKIECFDSVEISGVEDRFNASLGTYHDLLKIIKDKDFLDNEENEDILEDIVLTLTLFEDREMIEERLKTYAHLFDDKVMKQLKRRRYTGWGRLSRKLINGIRDKQSGKTILDFLKSDGFANRNFMQLIHDDSLTFKEDIQKAQVSGQGDSLHEHIANLAGSPAIKKGILQTVKVVDELVKVMGRHKPENIVIEMARENQTTQKGQKNSRERMKRIEEGIKELGSQILKEHPVENTQLQNEKLYLYYLQNGRDMYVDQELDINRLSDYDVDHIVPQSFLKDDSIDNKVLTRSDKARGKSDNVPSEEVVKKMKNYWRQLLNAKLITQRKFDNLTKAERGGLSELDKAGFIKRQLVETRQITKHVAQILDSRMNTKYDENDKLIREVKVITLKSKLVSDFRKDFQFYKVREINNYHHAHDAYLNAVVGTALIKKYPKLESEFVYGDYKVYDVRKMIAKSEQEIGKATAKYFFYSNIMNFFKTEITLANGEIRKRPLIETNGETGEIVWDKGRDFATVRKVLSMPQVNIVKKTEVQTGGFSKESILPKRNSDKLIARKKDWDPKKYGGFDSPTVAYSVLVVAKVEKGKSKKLKSVKELLGITIMERSSFEKNPIDFLEAKGYKEVKKDLIIKLPKYSLFELENGRKRMLASAGELQKGNELALPSKYVNFLYLASHYEKLKGSPEDNEQKQLFVEQHKHYLDEIIEQISEFSKRVILADANLDKVLSAYNKHRDKPIREQAENIIHLFTLTNLGAPAAFKYFDTTIDRKRYTSTKEVLDATLIHQSITGLYETRIDLSQLGGDGGGGSEAAAKGSSGGTLNIEDEYRLHETSKEPDVPLGSTWLSDFPQAWAETGGMGLAVRQAPLIIPLKATSTPVSIKQYPMSQEARLGIKPHIQRLLDQGILVPCQSPWNTPLLPVKKPGTNDYRPVQDLREVNKRVEDIHPTVPNPYNLLSGLPPSHQWYTVLDLKDAFFCLRLHPTSQPLFAFEWRDPEMGISGQLTWTRLPQGFKNSPTLFNEALHRDLADFRIQHPDLILLQYVDDLLLAATSEQDCQRGTRALLQTLGNLGYRASAKKAQICQKQVKYLGYLLKEGQRWLTEARKETVMGQPTPKTPRQLREFLGTAGFCRLWIPGFAEMAAPLYPLTKPGTLFNWGPDQQKAYQEIKQALLTAPALGLPDLTKPFELFVDEKQGYAKGVLTQKLGPWRRPVAYLSKKLDPVAAGWPPCLRMVAAIAVLTKDAGKLTMGQPLVILAPHAVEALVKQPPDRWLSNARMTHYQAMLLDTDRVQFGPVVALNPATLLPLPEKEAPHDCLEILAETHGTRPDLTDQPIPDADYTWYTDGSSFLQEGQRRAGAAVTTETEVIWARALPAGTSAQRAELIALTQALKMAEGKKLNVYTDSRYAFATAHVHGEIYRRRGWLTSEGREIKNKNEILALLKALFLPKRLSIIHCPGHQKGNSAEARGNRMADQAAREAAMKAVLETSTLLAGKRTADGSEFEKRTADGSEFESPKKKAKVE

SEQ ID NO: 7067 - protein, 2096 aa, synthetic construct; identical to SEQ ID NO: 4522

SEQ ID NO: 7068 - protein, 2098 aa, synthetic construct
MPAAKRVKLDGGDKKYSIGLDIGTNSVGWAVITDEYKVPSKKFKVLGNTDRHSIKKNLIGALLFDSGETAEATRLKRTARRRYTRRKNRICYLQEIFSNEMAKVDDSFFHRLEESFLVEEDKKHERHPIFGNIVDEVAYHEKYPTIYHLRKKLVDSTDKADLRLIYLALAHMIKFRGHFLIEGDLNPDNSDVDKLFIQLVQTYNQLFEENPINASGVDAKAILSARLSKSRRLENLIAQLPGEKKNGLFGNLIALSLGLTPNFKSNFDLAEDAKLQLSKDTYDDDLDNLLAQIGDQYADLFLAAKNLSDAILLSDILRVNTEITKAPLSASMIKRYDEHHQDLTLLKALVRQQLPEKYKEIFFDQSKNGYAGYIDGGASQEEFYKFIKPILEKMDGTEELLVKLNREDLLRKQRTFDNGSIPHQIHLGELHAILRRQEDFYPFLKDNREKIEKILTFRIPYYVGPLARGNSRFAWMTRKSEETITPWNFEEVVDKGASAQSFIERMTNFDKNLPNEKVLPKHSLLYEYFTVYNELTKVKYVTEGMRKPAFLSGEQKKAIVDLLFKTNRKVTVKQLKEDYFKKIECFDSVEISGVEDRFNASLGTYHDLLKIIKDKDFLDNEENEDILEDIVLTLTLFEDREMIEERLKTYAHLFDDKVMKQLKRRRYTGWGRLSRKLINGIRDKQSGKTILDFLKSDGFANRNFMQLIHDDSLTFKEDIQKAQVSGQGDSLHEHIANLAGSPAIKKGILQTVKVVDELVKVMGRHKPENIVIEMARENQTTQKGQKNSRERMKRIEEGIKELGSQILKEHPVENTQLQNEKLYLYYLQNGRDMYVDQELDINRLSDYDVDHIVPQSFLKDDSIDNKVLTRSDKARGKSDNVPSEEVVKKMKNYWRQLLNAKLITQRKFDNLTKAERGGLSELDKAGFIKRQLVETRQITKHVAQILDSRMNTKYDENDKLIREVKVITLKSKLVSDFRKDFQFYKVREINNYHHAHDAYLNAVVGTALIKKYPKLESEFVYGDYKVYDVRKMIAKSEQEIGKATAKYFFYSNIMNFFKTEITLANGEIRKRPLIETNGETGEIVWDKGRDFATVRKVLSMPQVNIVKKTEVQTGGFSKESILPKRNSDKLIARKKDWDPKKYGGFDSPTVAYSVLVVAKVEKGKSKKLKSVKELLGITIMERSSFEKNPIDFLEAKGYKEVKKDLIIKLPKYSLFELENGRKRMLASAGELQKGNELALPSKYVNFLYLASHYEKLKGSPEDNEQKQLFVEQHKHYLDEIIEQISEFSKRVILADANLDKVLSAYNKHRDKPIREQAENIIHLFTLTNLGAPAAFKYFDTTIDRKRYTSTKEVLDATLIHQSITGLYETRIDLSQLGGDGGGSSGGSEAAAKGGTAPLEEEYRLFLEAPIQNVTLLEQWKREIPKVWAEINPPGLASTQAPIHVQLLSTALPVRVRQYPITLEAKRSLRETIRKFRAAGILRPVHSPWNTPLLPVRKSGTSEYRMVQDLREVNKRVETIHPTVPNPYTLLSLLPPDRIWYSVLDLKDAFFCIPLAPESQLIFAFEWADAEEGESGQLTWTRLPQGFKNSPTLFNEALNRDLQGFRLDHPSVSLLQYVDDLLIAADTQAACLSATRDLLMTLAELGYRVSGKKAQLCQEEVTYLGFKIHKGSRSLSNSRTQAILQIPVPKTKRQVREFLGTIGYCRLWIPGFAELAQPLYAATRPGNDPLVWGEKEEEAFQSLKLALTQPPALALPSLDKPFQLFVEETSGAAKGVLTQALGPWKRPVAYLSKRLDPVAAGWPRCLRAIAAAALLTREASKLTFGQDIEITSSHNLESLLRSPPDKWLTNARITQYQVLLLDPPRVRFKQTAALNPATLLPETDDTLPIHHCLDTLDSLTSTRPDLTDQPLAQAEATLFTDGSSYIRDGKRYAGAAVVTLDSVIWAEPLPIGTSAQKAELIALTKALEWSKDKSVNIYTDSRYAFATLHVHGMIYRERGWLTAGGKAIKNAPEILALLTAVWLPKRVAVMHCKGHQKDDAPTSTGNRRADEVAREVAIRPLSTQATISAGKRTADGSEFEKRTADGSEFESPKKKAKVE

SEQ ID NO: 7069 - protein, 2098 aa, synthetic construct
MPAAKRVKLDGGDKKYSIGLDIGTNSVGWAVITDEYKVPSKKFKVLGNTDRHSIKKNLIGALLFDSGETAEATRLKRTARRRYTRRKNRICYLQEIFSNEMAKVDDSFFHRLEESFLVEEDKKHERHPIFGNIVDEVAYHEKYPTIYHLRKKLVDSTDKADLRLIYLALAHMIKFRGHFLIEGDLNPDNSDVDKLFIQLVQTYNQLFEENPINASGVDAKAILSARLSKSRRLENLIAQLPGEKKNGLFGNLIALSLGLTPNFKSNFDLAEDAKLQLSKDTYDDDLDNLLAQIGDQYADLFLAAKNLSDAILLSDILRVNTEITKAPLSASMIKRYDEHHQDLTLLKALVRQQLPEKYKEIFFDQSKNGYAGYIDGGASQEEFYKFIKPILEKMDGTEELLVKLNREDLLRKQRTFDNGSIPHQIHLGELHAILRRQEDFYPFLKDNREKIEKILTFRIPYYVGPLARGNSRFAWMTRKSEETITPWNFEEVVDKGASAQSFIERMTNFDKNLPNEKVLPKHSLLYEYFTVYNELTKVKYVTEGMRKPAFLSGEQKKAIVDLLFKTNRKVTVKQLKEDYFKKIECFDSVEISGVEDRFNASLGTYHDLLKIIKDKDFLDNEENEDILEDIVLTLTLFEDREMIEERLKTYAHLFDDKVMKQLKRRRYTGWGRLSRKLINGIRDKQSGKTILDFLKSDGFANRNFMQLIHDDSLTFKEDIQKAQVSGQGDSLHEHIANLAGSPAIKKGILQTVKVVDELVKVMGRHKPENIVIEMARENQTTQKGQKNSRERMKRIEEGIKELGSQILKEHPVENTQLQNEKLYLYYLQNGRDMYVDQELDINRLSDYDVDHIVPQSFLKDDSIDNKVLTRSDKARGKSDNVPSEEVVKKMKNYWRQLLNAKLITQRKFDNLTKAERGGLSELDKAGFIKRQLVETRQITKHVAQILDSRMNTKYDENDKLIREVKVITLKSKLVSDFRKDFQFYKVREINNYHHAHDAYLNAVVGTALIKKYPKLESEFVYGDYKVYDVRKMIAKSEQEIGKATAKYFFYSNIMNFFKTEITLANGEIRKRPLIETNGETGEIVWDKGRDFATVRKVLSMPQVNIVKKTEVQTGGFSKESILPKRNSDKLIARKKDWDPKKYGGFDSPTVAYSVLVVAKVEKGKSKKLKSVKELLGITIMERSSFEKNPIDFLEAKGYKEVKKDLIIKLPKYSLFELENGRKRMLASAGELQKGNELALPSKYVNFLYLASHYEKLKGSPEDNEQKQLFVEQHKHYLDEIIEQISEFSKRVILADANLDKVLSAYNKHRDKPIREQAENIIHLFTLTNLGAPAAFKYFDTTIDRKRYTSTKEVLDATLIHQSITGLYETRIDLSQLGGDGGGSSGGSEAAAKGGTAPLEEEYRLFLEAPIQNVTLLEQWKREIPKVWAEINPPGLASTQAPIHVQLLSTALPVRVRQYPITLEAKRSLRETIRKFRAAGILRPVHSPWNTPLLPVRKSGTSEYRMVQDLREVNKRVETIHPTVPNPYTLLSLLPPDRIWYSVLDLKDAFFCIPLAPESQLIFAFEWADAEEGESGQLTWTRLPQGFKNSPTLFNEALNRDLQGFRLDHPSVSLLQYVDDLLIAADTQAACLSATRDLLMTLAELGYRVSGKKAQLCQEEVTYLGFKIHKGSRSLSNSRTQAILQIPVPKTKRQVREFLGKIGYCRLFIPGFAELAQPLYAATRPGNDPLVWGEKEEEAFQSLKLALTQPPALALPSLDKPFQLFVEETSGAAKGVLTQALGPWKRPVAYLSKRLDPVAAGWPRCLRAIAAAALLTREASKLTFGQDIEITSSHNLESLLRSPPDKWLTNARITQYQVLLLDPPRVRFKQTAALNPATLLPETDDTLPIHHCLDTLDSLTSTRPDLTDQPLAQAEATLFTDGSSYIRDGKRYAGAAVVTLDSVIWAEPLPIGTSAQKAELIALTKALEWSKDKSVNIYTDSRYAFATLHVHGMIYRERGWLTAGGKAIKNAPEILALLTAVWLPKRVAVMHCKGHQKDDAPTSTGNRRADEVAREVAIRPLSTQATISAGKRTADGSEFEKRTADGSEFESPKKKAKVE

SEQ ID NO: 7070 - protein, 2095 aa, synthetic construct
MPAAKRVKLDGGDKKYSIGLDIGTNSVGWAVITDEYKVPSKKFKVLGNTDRHSIKKNLIGALLFDSGETAEATRLKRTARRRYTRRKNRICYLQEIFSNEMAKVDDSFFHRLEESFLVEEDKKHERHPIFGNIVDEVAYHEKYPTIYHLRKKLVDSTDKADLRLIYLALAHMIKFRGHFLIEGDLNPDNSDVDKLFIQLVQTYNQLFEENPINASGVDAKAILSARLSKSRRLENLIAQLPGEKKNGLFGNLIALSLGLTPNFKSNFDLAEDAKLQLSKDTYDDDLDNLLAQIGDQYADLFLAAKNLSDAILLSDILRVNTEITKAPLSASMIKRYDEHHQDLTLLKALVRQQLPEKYKEIFFDQSKNGYAGYIDGGASQEEFYKFIKPILEKMDGTEELLVKLNREDLLRKQRTFDNGSIPHQIHLGELHAILRRQEDFYPFLKDNREKIEKILTFRIPYYVGPLARGNSRFAWMTRKSEETITPWNFEEVVDKGASAQSFIERMTNFDKNLPNEKVLPKHSLLYEYFTVYNELTKVKYVTEGMRKPAFLSGEQKKAIVDLLFKTNRKVTVKQLKEDYFKKIECFDSVEISGVEDRFNASLGTYHDLLKIIKDKDFLDNEENEDILEDIVLTLTLFEDREMIEERLKTYAHLFDDKVMKQLKRRRYTGWGRLSRKLINGIRDKQSGKTILDFLKSDGFANRNFMQLIHDDSLTFKEDIQKAQVSGQGDSLHEHIANLAGSPAIKKGILQTVKVVDELVKVMGRHKPENIVIEMARENQTTQKGQKNSRERMKRIEEGIKELGSQILKEHPVENTQLQNEKLYLYYLQNGRDMYVDQELDINRLSDYDVDHIVPQSFLKDDSIDNKVLTRSDKARGKSDNVPSEEVVKKMKNYWRQLLNAKLITQRKFDNLTKAERGGLSELDKAGFIKRQLVETRQITKHVAQILDSRMNTKYDENDKLIREVKVITLKSKLVSDFRKDFQFYKVREINNYHHAHDAYLNAVVGTALIKKYPKLESEFVYGDYKVYDVRKMIAKSEQEIGKATAKYFFYSNIMNFFKTEITLANGEIRKRPLIETNGETGEIVWDKGRDFATVRKVLSMPQVNIVKKTEVQTGGFSKESILPKRNSDKLIARKKDWDPKKYGGFDSPTVAYSVLVVAKVEKGKSKKLKSVKELLGITIMERSSFEKNPIDFLEAKGYKEVKKDLIIKLPKYSLFELENGRKRMLASAGELQKGNELALPSKYVNFLYLASHYEKLKGSPEDNEQKQLFVEQHKHYLDEIIEQISEFSKRVILADANLDKVLSAYNKHRDKPIREQAENIIHLFTLTNLGAPAAFKYFDTTIDRKRYTSTKEVLDATLIHQSITGLYETRIDLSQLGGDGGGSSGGSEAAAKGGTLQLEEEYRLFEPESTQKQEMDIWLKNFPQAWAETGGMGTAHCQAPVLIQLKATATPISIRQYPMPHEAYQGIKPHIRRMLDQGILKPCQSPWNTPLLPVKKPGTEDYRPVQDLREVNKRVEDIHPTVPNPYNLLSTLPPSHPWYTVLDLKDAFFCLRLHSESQLLFAFEWRDPEIGLSGQLTWTRLPQGFKNSPTLFNEALHSDLADFRVRYPALVLLQYVDDLLLAAATRTECLEGTKALLETLGNKGYRASAKKAQICLQEVTYLGYSLKDGQRWLTKARKEAILSIPVPKNSRQVREFLGTAGYCRLWIPGFAELAAPLYPLTRPGTLFQWGTEQQLAFEDIKKALLSSPALGLPDITKPFELFIDENSGFAKGVLVQKLGPWKRPVAYLSKKLDTVASGWPPCLRMVAAIAILVKDAGKLTLGQPLTILTSHPVEALVRQPPNKWLSNARMTHYQAMLLDAERVHFGPTVSLNPATLLPLPSGGNHHDCLQILAETHGTRPDLTDQPLPDADLTWYTDGSSFIRNGEREAGAAVTTESEVIWAAPLPPGTSAQRAELIALTQALKMAEGKKLTVYTDSRYAFATTHVHGEIYRRRGWLTSEGKEIKNKNEILALLEALFLPKRLSIIHCPGHQKGDSPQAKGNRLADDTAKKAATETHSSLTVLPAGKRTADGSEFEKRTADGSEFESPKKKAKVE

SEQ ID NO: 7071 - protein, 2094 aa, synthetic construct
MPAAKRVKLDGGDKKYSIGLDIGTNSVGWAVITDEYKVPSKKFKVLGNTDRHSIKKNLIGALLFDSGETAEATRLKRTARRRYTRRKNRICYLQEIFSNEMAKVDDSFFHRLEESFLVEEDKKHERHPIFGNIVDEVAYHEKYPTIYHLRKKLVDSTDKADLRLIYLALAHMIKFRGHFLIEGDLNPDNSDVDKLFIQLVQTYNQLFEENPINASGVDAKAILSARLSKSRRLENLIAQLPGEKKNGLFGNLIALSLGLTPNFKSNFDLAEDAKLQLSKDTYDDDLDNLLAQIGDQYADLFLAAKNLSDAILLSDILRVNTEITKAPLSASMIKRYDEHHQDLTLLKALVRQQLPEKYKEIFFDQSKNGYAGYIDGGASQEEFYKFIKPILEKMDGTEELLVKLNREDLLRKQRTFDNGSIPHQIHLGELHAILRRQEDFYPFLKDNREKIEKILTFRIPYYVGPLARGNSRFAWMTRKSEETITPWNFEEVVDKGASAQSFIERMTNFDKNLPNEKVLPKHSLLYEYFTVYNELTKVKYVTEGMRKPAFLSGEQKKAIVDLLFKTNRKVTVKQLKEDYFKKIECFDSVEISGVEDRFNASLGTYHDLLKIIKDKDFLDNEENEDILEDIVLTLTLFEDREMIEERLKTYAHLFDDKVMKQLKRRRYTGWGRLSRKLINGIRDKQSGKTILDFLKSDGFANRNFMQLIHDDSLTFKEDIQKAQVSGQGDSLHEHIANLAGSPAIKKGILQTVKVVDELVKVMGRHKPENIVIEMARENQTTQKGQKNSRERMKRIEEGIKELGSQILKEHPVENTQLQNEKLYLYYLQNGRDMYVDQELDINRLSDYDVDHIVPQSFLKDDSIDNKVLTRSDKARGKSDNVPSEEVVKKMKNYWRQLLNAKLITQRKFDNLTKAERGGLSELDKAGFIKRQLVETRQITKHVAQILDSRMNTKYDENDKLIREVKVITLKSKLVSDFRKDFQFYKVREINNYHHAHDAYLNAVVGTALIKKYPKLESEFVYGDYKVYDVRKMIAKSEQEIGKATAKYFFYSNIMNFFKTEITLANGEIRKRPLIETNGETGEIVWDKGRDFATVRKVLSMPQVNIVKKTEVQTGGFSKESILPKRNSDKLIARKKDWDPKKYGGFDSPTVAYSVLVVAKVEKGKSKKLKSVKELLGITIMERSSFEKNPIDFLEAKGYKEVKKDLIIKLPKYSLFELENGRKRMLASAGELQKGNELALPSKYVNFLYLASHYEKLKGSPEDNEQKQLFVEQHKHYLDEIIEQISEFSKRVILADANLDKVLSAYNKHRDKPIREQAENIIHLFTLTNLGAPAAFKYFDTTIDRKRYTSTKEVLDATLIHQSITGLYETRIDLSQLGGDGGGSSGGSEAAAKGGVLNLEEEYRLHEKPVPSSIDPSWLQLFPTVWAERAGMGLANQVPPVVVELRSGASPVAVRQYPMSKEAREGIRPHIQKFLDLGVLVPCRSPWNTPLLPVKKPGTNDYRPVQDLREINKRVQDIHPTVPNPYNLLSSLPPSYTWYSVLDLKDAFFCLRLHPNSQPLFAFEWKDPEKGNTGQLTWTRLPQGFKNSPTLFNEALHRDLAPFRALNPQVVLLQYVDDLLVAAPTYEDCKKGTQKLLQELSKLGYRVSAKKAQLCQREVTYLGYLLKEGKRWLTPARKATVMKIPVPTTPRQVREFLGKAGFCRLFIPGFASLAAPLYPLTKPSIPFIWTEEHQQAFDHIKKALLSAPALALPDLTKPFTLYIDERAGVARGVLTQTLGPWRRPVAYLSKKLDPVASGWPTCLKAVAAVALLLKDADKLTLGQNVTVIASHSLESIVRQPPDRWMTNARMTHYQSLLLNERVSFAPPAVLNPATLLPVESEATPVHRCSEILAEETGTRRDLEDQPLPGVPTWYTDGSSFITEGKRRAGAPIVDGKRTVWASSLPEGTSAQKAELVALTQALRLAEGKNINIYTDSRYAFATAHIHGAIYKQRGWLTSAGKDIKNKEEILALLEAIHLPRRVAIIHCPGHQRGSNPVATGNRRADEAAKQAALSTRVLAGTTKPAGKRTADGSEFEKRTADGSEFESPKKKAKVE

SEQ ID NO: 7072 - protein, 2127 aa, synthetic construct
MPAAKRVKLDGGDKKYSIGLDIGTNSVGWAVITDEYKVPSKKFKVLGNTDRHSIKKNLIGALLFDSGETAEATRLKRTARRRYTRRKNRICYLQEIFSNEMAKVDDSFFHRLEESFLVEEDKKHERHPIFGNIVDEVAYHEKYPTIYHLRKKLVDSTDKADLRLIYLALAHMIKFRGHFLIEGDLNPDNSDVDKLFIQLVQTYNQLFEENPINASGVDAKAILSARLSKSRRLENLIAQLPGEKKNGLFGNLIALSLGLTPNFKSNFDLAEDAKLQLSKDTYDDDLDNLLAQIGDQYADLFLAAKNLSDAILLSDILRVNTEITKAPLSASMIKRYDEHHQDLTLLKALVRQQLPEKYKEIFFDQSKNGYAGYIDGGASQEEFYKFIKPILEKMDGTEELLVKLNREDLLRKQRTFDNGSIPHQIHLGELHAILRRQEDFYPFLKDNREKIEKILTFRIPYYVGPLARGNSRFAWMTRKSEETITPWNFEEVVDKGASAQSFIERMTNFDKNLPNEKVLPKHSLLYEYFTVYNELTKVKYVTEGMRKPAFLSGEQKKAIVDLLFKTNRKVTVKQLKEDYFKKIECFDSVEISGVEDRFNASLGTYHDLLKIIKDKDFLDNEENEDILEDIVLTLTLFEDREMIEERLKTYAHLFDDKVMKQLKRRRYTGWGRLSRKLINGIRDKQSGKTILDFLKSDGFANRNFMQLIHDDSLTFKEDIQKAQVSGQGDSLHEHIANLAGSPAIKKGILQTVKVVDELVKVMGRHKPENIVIEMARENQTTQKGQKNSRERMKRIEEGIKELGSQILKEHPVENTQLQNEKLYLYYLQNGRDMYVDQELDINRLSDYDVDHIVPQSFLKDDSIDNKVLTRSDKARGKSDNVPSEEVVKKMKNYWRQLLNAKLITQRKFDNLTKAERGGLSELDKAGFIKRQLVETRQITKHVAQILDSRMNTKYDENDKLIREVKVITLKSKLVSDFRKDFQFYKVREINNYHHAHDAYLNAVVGTALIKKYPKLESEFVYGDYKVYDVRKMIAKSEQEIGKATAKYFFYSNIMNFFKTEITLANGEIRKRPLIETNGETGEIVWDKGRDFATVRKVLSMPQVNIVKKTEVQTGGFSKESILPKRNSDKLIARKKDWDPKKYGGFDSPTVAYSVLVVAKVEKGKSKKLKSVKELLGITIMERSSFEKNPIDFLEAKGYKEVKKDLIIKLPKYSLFELENGRKRMLASAGELQKGNELALPSKYVNFLYLASHYEKLKGSPEDNEQKQLFVEQHKHYLDEIIEQISEFSKRVILADANLDKVLSAYNKHRDKPIREQAENIIHLFTLTNLGAPAAFKYFDTTIDRKRYTSTKEVLDATLIHQSITGLYETRIDLSQLGGDGGGSSGGSEAAAKGGLLGRDLLTKLKAQIQFSTEGPQVTWEDRPAMCLVLNLEEEYRLHEKPVPPSIDPSWLQLFPMVWAEKAGMGLANQVPPVVVELKSDASPVAVRQYPMSKEAREGIRPHIQRFLDLGILVPCQSPWNTPLLPVKKPGTNDYRPVQDLREVNKRVQDIHPTVPNPYNLLSSLPPSHTWYSVLDLKDAFFCLKLHPNSQPLFAFEWRDPEKGNTGQLTWTRLPQGFKNSPTLFNEALHRDLASFRALNPQVVMLQYVDDLLVAAPTYRDCKEGTRRLLQELSKLGYRVSAKKAQLCREEVTYLGYLLKGGKRWLTPARKATVMKIPTPTTPRQVREFLGTAGFCRLWIPGFASLAAPLYPLTRPKVPFTWTEAHQEAFGRIKEALLSAPALALPDLTKPFALYVDEKEGVARGVLTQTLGPWRRPVAYLSKKLDPVASGWPTCLKAIAAVALLLKDADKLTLGQNVLVIAPHNLESIVRQPPDRWMTNARMTHYQSLLLNERVSFAPPAILNPATLLPVESDDTPIHICSEILAEETGTRPDLRDQPLPGVPAWYTDGSSFIMDGRRQAGAAIVDNKRTVWASNLPEGTSAQKAELIALTQALRLAEGKSINIYTDSRYAFATAHVHGAIYKQRGWLTSAGKDIKNKEEILALLEAIHLPKRVAIIHCPGHQRGTDPVATGNRKADEAAKQAAQSTRILTETTKNAGKRTADGSEFEKRTADGSEFESPKKKAKVE

SEQ ID NO: 7073 - protein, 2218 aa, synthetic construct
MPAAKRVKLDGGDKKYSIGLDIGTNSVGWAVITDEYKVPSKKFKVLGNTDRHSIKKNLIGALLFDSGETAEATRLKRTARRRYTRRKNRICYLQEIFSNEMAKVDDSFFHRLEESFLVEEDKKHERHPIFGNIVDEVAYHEKYPTIYHLRKKLVDSTDKADLRLIYLALAHMIKFRGHFLIEGDLNPDNSDVDKLFIQLVQTYNQLFEENPINASGVDAKAILSARLSKSRRLENLIAQLPGEKKNGLFGNLIALSLGLTPNFKSNFDLAEDAKLQLSKDTYDDDLDNLLAQIGDQYADLFLAAKNLSDAILLSDILRVNTEITKAPLSASMIKRYDEHHQDLTLLKALVRQQLPEKYKEIFFDQSKNGYAGYIDGGASQEEFYKFIKPILEKMDGTEELLVKLNREDLLRKQRTFDNGSIPHQIHLGELHAILRRQEDFYPFLKDNREKIEKILTFRIPYYVGPLARGNSRFAWMTRKSEETITPWNFEEVVDKGASAQSFIERMTNFDKNLPNEKVLPKHSLLYEYFTVYNELTKVKYVTEGMRKPAFLSGEQKKAIVDLLFKTNRKVTVKQLKEDYFKKIECFDSVEISGVEDRFNASLGTYHDLLKIIKDKDFLDNEENEDILEDIVLTLTLFEDREMIEERLKTYAHLFDDKVMKQLKRRRYTGWGRLSRKLINGIRDKQSGKTILDFLKSDGFANRNFMQLIHDDSLTFKEDIQKAQVSGQGDSLHEHIANLAGSPAIKKGILQTVKVVDELVKVMGRHKPENIVIEMARENQTTQKGQKNSRERMKRIEEGIKELGSQILKEHPVENTQLQNEKLYLYYLQNGRDMYVDQELDINRLSDYDVDHIVPQSFLKDDSIDNKVLTRSDKARGKSDNVPSEEVVKKMKNYWRQLLNAKLITQRKFDNLTKAERGGLSELDKAGFIKRQLVETRQITKHVAQILDSRMNTKYDENDKLIREVKVITLKSKLVSDFRKDFQFYKVREINNYHHAHDAYLNAVVGTALIKKYPKLESEFVYGDYKVYDVRKMIAKSEQEIGKATAKYFFYSNIMNFFKTEITLANGEIRKRPLIETNGETGEIVWDKGRDFATVRKVLSMPQVNIVKKTEVQTGGFSKESILPKRNSDKLIARKKDWDPKKYGGFDSPTVAYSVLVVAKVEKGKSKKLKSVKELLGITIMERSSFEKNPIDFLEAKGYKEVKKDLIIKLPKYSLFELENGRKRMLASAGELQKGNELALPSKYVNFLYLASHYEKLKGSPEDNEQKQLFVEQHKHYLDEIIEQISEFSKRVILADANLDKVLSAYNKHRDKPIREQAENIIHLFTLTNLGAPAAFKYFDTTIDRKRYTSTKEVLDATLIHQSITGLYETRIDLSQLGGDGGGSSGGSEAAAKGGTLGDQGSRGSDPLPEPRVTLTVEGIPTEFLVNTGAEHSVLTKPMGKMGSKRTVVAGATGSKVYPWTTKRLLKIGQKQVTHSFLVIPECPAPLLGRDLLTKLKAQIQFSTEGPQVTWEDRPAMCLVLNLEEEYRLHEKPVPPSIDPSWLQLFPMVWAEKAGMGLANQVPPVVVELKSDASPVAVRQYPMSKEAREGIRPHIQRFLDLGILVPCQSPWNTPLLPVKKPGTNDYRPVQDLREVNKRVQDIHPTVPNPYNLLSSLPPSHTWYSVLDLKDAFFCLKLHPNSQPLFAFEWRDPEKGNTGQLTWTRLPQGFKNSPTLFNEALHRDLASFRALNPQVVMLQYVDDLLVAAPTYRDCKEGTRRLLQELSKLGYRVSAKKAQLCREEVTYLGYLLKGGKRWLTPARKATVMKIPTPTTPRQVREFLGTAGFCRLWIPGFASLAAPLYPLTRPKVPFTWTEAHQEAFGRIKEALLSAPALALPDLTKPFALYVDEKEGVARGVLTQTLGPWRRPVAYLSKKLDPVASGWPTCLKAIAAVALLLKDADKLTLGQNVLVIAPHNLESIVRQPPDRWMTNARMTHYQSLLLNERVSFAPPAILNPATLLPVESDDTPIHICSEILAEETGTRPDLRDQPLPGVPAWYTDGSSFIMDGRRQAGAAIVDNKRTVWASNLPEGTSAQKAELIALTQALRLAEGKSINIYTDSRYAFATAHVHGAIYKQRGWLTSAGKDIKNKEEILALLEAIHLPKRVAIIHCPGHQRGTDPVATGNRKADEAAKQAAQSTRILTETTKNAGKRTADGSEFEKRTADGSEFESPKKKAKVE

SEQ ID NO: 7074 - protein, 2090 aa, synthetic construct
MPAAKRVKLDGGDKKYSIGLDIGTNSVGWAVITDEYKVPSKKFKVLGNTDRHSIKKNLIGALLFDSGETAEATRLKRTARRRYTRRKNRICYLQEIFSNEMAKVDDSFFHRLEESFLVEEDKKHERHPIFGNIVDEVAYHEKYPTIYHLRKKLVDSTDKADLRLIYLALAHMIKFRGHFLIEGDLNPDNSDVDKLFIQLVQTYNQLFEENPINASGVDAKAILSARLSKSRRLENLIAQLPGEKKNGLFGNLIALSLGLTPNFKSNFDLAEDAKLQLSKDTYDDDLDNLLAQIGDQYADLFLAAKNLSDAILLSDILRVNTEITKAPLSASMIKRYDEHHQDLTLLKALVRQQLPEKYKEIFFDQSKNGYAGYIDGGASQEEFYKFIKPILEKMDGTEELLVKLNREDLLRKQRTFDNGSIPHQIHLGELHAILRRQEDFYPFLKDNREKIEKILTFRIPYYVGPLARGNSRFAWMTRKSEETITPWNFEEVVDKGASAQSFIERMTNFDKNLPNEKVLPKHSLLYEYFTVYNELTKVKYVTEGMRKPAFLSGEQKKAIVDLLFKTNRKVTVKQLKEDYFKKIECFDSVEISGVEDRFNASLGTYHDLLKIIKDKDFLDNEENEDILEDIVLTLTLFEDREMIEERLKTYAHLFDDKVMKQLKRRRYTGWGRLSRKLINGIRDKQSGKTILDFLKSDGFANRNFMQLIHDDSLTFKEDIQKAQVSGQGDSLHEHIANLAGSPAIKKGILQTVKVVDELVKVMGRHKPENIVIEMARENQTTQKGQKNSRERMKRIEEGIKELGSQILKEHPVENTQLQNEKLYLYYLQNGRDMYVDQELDINRLSDYDVDHIVPQSFLKDDSIDNKVLTRSDKARGKSDNVPSEEVVKKMKNYWRQLLNAKLITQRKFDNLTKAERGGLSELDKAGFIKRQLVETRQITKHVAQILDSRMNTKYDENDKLIREVKVITLKSKLVSDFRKDFQFYKVREINNYHHAHDAYLNAVVGTALIKKYPKLESEFVYGDYKVYDVRKMIAKSEQEIGKATAKYFFYSNIMNFFKTEITLANGEIRKRPLIETNGETGEIVWDKGRDFATVRKVLSMPQVNIVKKTEVQTGGFSKESILPKRNSDKLIARKKDWDPKKYGGFDSPTVAYSVLVVAKVEKGKSKKLKSVKELLGITIMERSSFEKNPIDFLEAKGYKEVKKDLIIKLPKYSLFELENGRKRMLASAGELQKGNELALPSKYVNFLYLASHYEKLKGSPEDNEQKQLFVEQHKHYLDEIIEQISEFSKRVILADANLDKVLSAYNKHRDKPIREQAENIIHLFTLTNLGAPAAFKYFDTTIDRKRYTSTKEVLDATLIHQSITGLYETRIDLSQLGGDGGGSSGGSEAAAKGGTLQLDDEYRLYSPLVKPDQNIQFWLEQFPQAWAETAGMGLAKQVPPQVIQLKASATPVSVRQYPLSKEAQEGIRPHVQRLIQQGILVPVQSPWNTPLLPVRKPGTNDYRPVQDLREVNKRVQDIHPTVPNPYNLLCALPPQRSWYTVLDLKDAFFCLRLHPTSQPLFAFEWRDPGTGRTGQLTWTRLPQGFKNSPTIFDEALHRDLANFRIQHPQVTLLQYVDDLLLAGATKQDCLEGTKALLLELSDLGYRASAKKAQICRREVTYLGYSLRDGQRWLTEARKKTVVQIPAPTTAKQVREFLGTAGFCRLWIPGFATLAAPLYPLTKEKGEFSWAPEHQKAFDAIKKALLSAPALALPDVTKPFTLYVDERKGVARGVLTQTLGPWRRPVAYLSKKLDPVASGWPVCLKAIAAVAILVKDADKLTLGQNITVIAPHALENIVRQPPDRWMTNARMTHYQSLLLTERVTFAPPAALNPATLLPEETDEPVTHDCHQLLIEETGVRKDLTDIPLTGEVLTWFTDGSSYVVEGKRMAGAAVVDGTRTIWASSLPEGTSAQKAELMALTQALRLAEGKSINIYTDSRYAFATAHVHGAIYKQRGLLTSAGREIKNKEEILSLLEALHLPKRLAIIHCPGHQKAKDPISRGNQMADRVAKQAAQGVNLLAGKRTADGSEFEKRTADGSEFESPKKKAKVE

SEQ ID NO: 7075 - protein, 2090 aa, synthetic construct; identical to SEQ ID NO: 7074

SEQ ID NO: 7076 - protein, 2176 aa, synthetic construct
MPAAKRVKLDGGDKKYSIGLDIGTNSVGWAVITDEYKVPSKKFKVLGNTDRHSIKKNLIGALLFDSGETAEATRLKRTARRRYTRRKNRICYLQEIFSNEMAKVDDSFFHRLEESFLVEEDKKHERHPIFGNIVDEVAYHEKYPTIYHLRKKLVDSTDKADLRLIYLALAHMIKFRGHFLIEGDLNPDNSDVDKLFIQLVQTYNQLFEENPINASGVDAKAILSARLSKSRRLENLIAQLPGEKKNGLFGNLIALSLGLTPNFKSNFDLAEDAKLQLSKDTYDDDLDNLLAQIGDQYADLFLAAKNLSDAILLSDILRVNTEITKAPLSASMIKRYDEHHQDLTLLKALVRQQLPEKYKEIFFDQSKNGYAGYIDGGASQEEFYKFIKPILEKMDGTEELLVKLNREDLLRKQRTFDNGSIPHQIHLGELHAILRRQEDFYPFLKDNREKIEKILTFRIPYYVGPLARGNSRFAWMTRKSEETITPWNFEEVVDKGASAQSFIERMTNFDKNLPNEKVLPKHSLLYEYFTVYNELTKVKYVTEGMRKPAFLSGEQKKAIVDLLFKTNRKVTVKQLKEDYFKKIECFDSVEISGVEDRFNASLGTYHDLLKIIKDKDFLDNEENEDILEDIVLTLTLFEDREMIEERLKTYAHLFDDKVMKQLKRRRYTGWGRLSRKLINGIRDKQSGKTILDFLKSDGFANRNFMQLIHDDSLTFKEDIQKAQVSGQGDSLHEHIANLAGSPAIKKGILQTVKVVDELVKVMGRHKPENIVIEMARENQTTQKGQKNSRERMKRIEEGIKELGSQILKEHPVENTQLQNEKLYLYYLQNGRDMYVDQELDINRLSDYDVDHIVPQSFLKDDSIDNKVLTRSDKARGKSDNVPSEEVVKKMKNYWRQLLNAKLITQRKFDNLTKAERGGLSELDKAGFIKRQLVETRQITKHVAQILDSRMNTKYDENDKLIREVKVITLKSKLVSDFRKDFQFYKVREINNYHHAHDAYLNAVVGTALIKKYPKLESEFVYGDYKVYDVRKMIAKSEQEIGKATAKYFFYSNIMNFFKTEITLANGEIRKRPLIETNGETGEIVWDKGRDFATVRKVLSMPQVNIVKKTEVQTGGFSKESILPKRNSDKLIARKKDWDPKKYGGFDSPTVAYSVLVVAKVEKGKSKKLKSVKELLGITIMERSSFEKNPIDFLEAKGYKEVKKDLIIKLPKYSLFELENGRKRMLASAGELQKGNELALPSKYVNFLYLASHYEKLKGSPEDNEQKQLFVEQHKHYLDEIIEQISEFSKRVILADANLDKVLSAYNKHRDKPIREQAENIIHLFTLTNLGAPAAFKYFDTTIDRKRYTSTKEVLDATLIHQSITGLYETRIDLSQLGGDGGGSSGGSEAAAKGGMDPLQLLQPLEAEIKGTKLKAHWNSGATITCVPEAFLEDERPIQTMLIKTIHGEKQQDVYYLTFKVQGRKVEAEVLASPYDYILLNPSDVPWLMKKPLQLTVLVPLHEYQERLLQQTALPKEQKELLQKLFLKYDALWQHWENQVGHRRIKPHNIATGTLAPRPQKQYPINPKAKPSIQIVIDDLLKQGVLIQQNSTMNTPVYPVPKPDGKWRMVLDYREVNKTIPLIAAQNQHSAGILSSIYRGKYKTTLDLTNGFWAHPITPESYWLTAFTWQGKQYCWTRLPQGFLNSPALFNADVVDLLKEIPNVQAYVDDIYISHDDPQEHLEQLEKIFSILLNAGYVVSLKKSEIAQREVEFLGFNITKEGRGLTDTFKQKLLNITPPKDLKQLQSILGLLNFARNFIPNYSELVKPLYTIVAPANGKFISWTEDNSNQLQHIISVLNQADNLEERNPETRLIIKVNSSPSAGYIRYYNEGSKRPIMYVNYIFSKAEAKFTQTEKLLTTMHKGLIKAMDLAMGQEILVYSPIVSMTKIQRTPLPERKALPVRWITWMTYLEDPRIQFHYDKSLPELQQIPNVTEDVIAKTKHPSEFAMVFYTDGSAIKHPDVNKSHSAGMGIAQVQFIPEYKIVHQWSIPLGDHTAQLAEIAAVEFACKKALKISGPVLIVTDSFYVAESANKELPYWKSNGFLNNKKKPLRHVSKWKSIAECLQLKPDIIIMHEKGHQQPMTTLHTEGNNLADKLATQGSYVVHAGKRTADGSEFEKRTADGSEFESPKKKAKVE

SEQ ID NO: 7077 - protein, 2176 aa, synthetic construct
MPAAKRVKLDGGDKKYSIGLDIGTNSVGWAVITDEYKVPSKKFKVLGNTDRHSIKKNLIGALLFDSGETAEATRLKRTARRRYTRRKNRICYLQEIFSNEMAKVDDSFFHRLEESFLVEEDKKHERHPIFGNIVDEVAYHEKYPTIYHLRKKLVDSTDKADLRLIYLALAHMIKFRGHFLIEGDLNPDNSDVDKLFIQLVQTYNQLFEENPINASGVDAKAILSARLSKSRRLENLIAQLPGEKKNGLFGNLIALSLGLTPNFKSNFDLAEDAKLQLSKDTYDDDLDNLLAQIGDQYADLFLAAKNLSDAILLSDILRVNTEITKAPLSASMIKRYDEHHQDLTLLKALVRQQLPEKYKEIFFDQSKNGYAGYIDGGASQEEFYKFIKPILEKMDGTEELLVKLNREDLLRKQRTFDNGSIPHQIHLGELHAILRRQEDFYPFLKDNREKIEKILTFRIPYYVGPLARGNSRFAWMTRKSEETITPWNFEEVVDKGASAQSFIERMTNFDKNLPNEKVLPKHSLLYEYFTVYNELTKVKYVTEGMRKPAFLSGEQKKAIVDLLFKTNRKVTVKQLKEDYFKKIECFDSVEISGVEDRFNASLGTYHDLLKIIKDKDFLDNEENEDILEDIVLTLTLFEDREMIEERLKTYAHLFDDKVMKQLKRRRYTGWGRLSRKLINGIRDKQSGKTILDFLKSDGFANRNFMQLIHDDSLTFKEDIQKAQVSGQGDSLHEHIANLAGSPAIKKGILQTVKVVDELVKVMGRHKPENIVIEMARENQTTQKGQKNSRERMKRIEEGIKELGSQILKEHPVENTQLQNEKLYLYYLQNGRDMYVDQELDINRLSDYDVDHIVPQSFLKDDSIDNKVLTRSDKARGKSDNVPSEEVVKKMKNYWRQLLNAKLITQRKFDNLTKAERGGLSELDKAGFIKRQLVETRQITKHVAQILDSRMNTKYDENDKLIREVKVITLKSKLVSDFRKDFQFYKVREINNYHHAHDAYLNAVVGTALIKKYPKLESEFVYGDYKVYDVRKMIAKSEQEIGKATAKYFFYSNIMNFFKTEITLANGEIRKRPLIETNGETGEIVWDKGRDFATVRKVLSMPQVNIVKKTEVQTGGFSKESILPKRNSDKLIARKKDWDPKKYGGFDSPTVAYSVLVVAKVEKGKSKKLKSVKELLGITIMERSSFEKNPIDFLEAKGYKEVKKDLIIKLPKYSLFELENGRKRMLASAGELQKGNELALPSKYVNFLYLASHYEKLKGSPEDNEQKQLFVEQHKHYLDEIIEQISEFSKRVILADANLDKVLSAYNKHRDKPIREQAENIIHLFTLTNLGAPAAFKYFDTTIDRKRYTSTKEVLDATLIHQSITGLYETRIDLSQLGGDGGGSSGGSEAAAKGGMDPLQLLQPLEAEIKGTKLKAHWNSGATITCVPQAFLEEEVPIKNIWIKTIHGEKEQPVYYLTFKIQGRKVEAEVISSPYDYILVSPSDIPWLMKKPLQLTTLVPLQEYEERLLKQTMLTGSYKEKLQSLFLKYDALWQHWENQVGHRRIKPHHIATGTVNPRPQKQYPINPKAKASIQTVINDLLKQGVLIQQNSIMNTPVYPVPKPDGKWRMVLDYREVNKTIPLIAAQNQHSAGILSSIFRGKYKTTLDLSNGFWAHSITPESYWLTAFTWLGQQYCWTRLPQGFLNSPALFNADVVDLLKEVPNVQVYVDDIYISHDDPREHLEQLEKVFSLLLNAGYVVSLKKSEIAQHEVEFLGFNITKEGRGLTETFKQKLLNITPPRDLKQLQSILGLLNFARNFIPNFSELVKPLYNIIATAPGKYITWTTDNSQQLQNIISMLNSAENLEERNPEVRLIMKVNTSPSAGYIRFYNEFAKRPIMYLNYVYTKAEVKFTNTEKLLTTIHKGLIKALDLGMGQEILVYSPIVSMTKIQKTPLPERKALPIRWITWMSYLEDPRIQFHYDKTLPELQQVPTVTDDIIAKIKHPSEFSMVFYTDGSAIKHPNVNKSHNAGMGIAQVQFKPEFTVINTWSIPLGDHTAQLAEVAAVEFACKKALKIDGPVLIVTDSFYVAESVNKELPYWQSNGFFNNKKKPLKHVSKWKSIADCIQLKPDIIIIHEKGHQPTASTFHTEGNNLADKLATQGSYVVNAGKRTADGSEFEKRTADGSEFESPKKKAKVE

SEQ ID NO: 7078 - protein, 2098 aa, synthetic construct
MPAAKRVKLDGGDKKYSIGLDIGTNSVGWAVITDEYKVPSKKFKVLGNTDRHSIKKNLIGALLFDSGETAEATRLKRTARRRYTRRKNRICYLQEIFSNEMAKVDDSFFHRLEESFLVEEDKKHERHPIFGNIVDEVAYHEKYPTIYHLRKKLVDSTDKADLRLIYLALAHMIKFRGHFLIEGDLNPDNSDVDKLFIQLVQTYNQLFEENPINASGVDAKAILSARLSKSRRLENLIAQLPGEKKNGLFGNLIALSLGLTPNFKSNFDLAEDAKLQLSKDTYDDDLDNLLAQIGDQYADLFLAAKNLSDAILLSDILRVNTEITKAPLSASMIKRYDEHHQDLTLLKALVRQQLPEKYKEIFFDQSKNGYAGYIDGGASQEEFYKFIKPILEKMDGTEELLVKLNREDLLRKQRTFDNGSIPHQIHLGELHAILRRQEDFYPFLKDNREKIEKILTFRIPYYVGPLARGNSRFAWMTRKSEETITPWNFEEVVDKGASAQSFIERMTNFDKNLPNEKVLPKHSLLYEYFTVYNELTKVKYVTEGMRKPAFLSGEQKKAIVDLLFKTNRKVTVKQLKEDYFKKIECFDSVEISGVEDRFNASLGTYHDLLKIIKDKDFLDNEENEDILEDIVLTLTLFEDREMIEERLKTYAHLFDDKVMKQLKRRRYTGWGRLSRKLINGIRDKQSGKTILDFLKSDGFANRNFMQLIHDDSLTFKEDIQKAQVSGQGDSLHEHIANLAGSPAIKKGILQTVKVVDELVKVMGRHKPENIVIEMARENQTTQKGQKNSRERMKRIEEGIKELGSQILKEHPVENTQLQNEKLYLYYLQNGRDMYVDQELDINRLSDYDVDHIVPQSFLKDDSIDNKVLTRSDKARGKSDNVPSEEVVKKMKNYWRQLLNAKLITQRKFDNLTKAERGGLSELDKAGFIKRQLVETRQITKHVAQILDSRMNTKYDENDKLIREVKVITLKSKLVSDFRKDFQFYKVREINNYHHAHDAYLNAVVGTALIKKYPKLESEFVYGDYKVYDVRKMIAKSEQEIGKATAKYFFYSNIMNFFKTEITLANGEIRKRPLIETNGETGEIVWDKGRDFATVRKVLSMPQVNIVKKTEVQTGGFSKESILPKRNSDKLIARKKDWDPKKYGGFDSPTVAYSVLVVAKVEKGKSKKLKSVKELLGITIMERSSFEKNPIDFLEAKGYKEVKKDLIIKLPKYSLFELENGRKRMLASAGELQKGNELALPSKYVNFLYLASHYEKLKGSPEDNEQKQLFVEQHKHYLDEIIEQISEFSKRVILADANLDKVLSAYNKHRDKPIREQAENIIHLFTLTNLGAPAAFKYFDTTIDRKRYTSTKEVLDATLIHQSITGLYETRIDLSQLGGDGGGSSEAAAKGGSGGTAPLEEEYRLFLEAPIQNVTLLEQWKREIPKVWAEINPPGLASTQAPIHVQLLSTALPVRVRQYPITLEAKRSLRETIRKFRAAGILRPVHSPWNTPLLPVRKSGTSEYRMVQDLREVNKRVETIHPTVPNPYTLLSLLPPDRIWYSVLDLKDAFFCIPLAPESQLIFAFEWADAEEGESGQLTWTRLPQGFKNSPTLFDEALNRDLQGFRLDHPSVSLLQYVDDLLIAADTQAACLSATRDLLMTLAELGYRVSGKKAQLCQEEVTYLGFKIHKGSRSLSNSRTQAILQIPVPKTKRQVREFLGTIGYCRLWIPGFAELAQPLYAATRGGNDPLVWGEKEEEAFQSLKLALTQPPALALPSLDKPFQLFVEETSGAAKGVLTQALGPWKRPVAYLSKRLDPVAAGWPRCLRAIAAAALLTREASKLTFGQDIEITSSHNLESLLRSPPDKWLTNARITQYQVLLLDPPRVRFKQTAALNPATLLPETDDTLPIHHCLDTLDSLTSTRPDLTDQPLAQAEATLFTDGSSYIRDGKRYAGAAVVTLDSVIWAEPLPIGTSAQKAELIALTKALEWSKDKSVNIYTDSRYAFATLHVHGMIYRERGLLTAGGKAIKNAPEILALLTAVWLPKRVAVMHCKGHQKDDAPTSTGNRRADEVAREVAIRPLSTQATISAGKRTADGSEFEKRTADGSEFESPKKKAKVE

SEQ ID NO: 7079 - protein, 2098 aa, synthetic construct
MPAAKRVKLDGGDKKYSIGLDIGTNSVGWAVITDEYKVPSKKFKVLGNTDRHSIKKNLIGALLFDSGETAEATRLKRTARRRYTRRKNRICYLQEIFSNEMAKVDDSFFHRLEESFLVEEDKKHERHPIFGNIVDEVAYHEKYPTIYHLRKKLVDSTDKADLRLIYLALAHMIKFRGHFLIEGDLNPDNSDVDKLFIQLVQTYNQLFEENPINASGVDAKAILSARLSKSRRLENLIAQLPGEKKNGLFGNLIALSLGLTPNFKSNFDLAEDAKLQLSKDTYDDDLDNLLAQIGDQYADLFLAAKNLSDAILLSDILRVNTEITKAPLSASMIKRYDEHHQDLTLLKALVRQQLPEKYKEIFFDQSKNGYAGYIDGGASQEEFYKFIKPILEKMDGTEELLVKLNREDLLRKQRTFDNGSIPHQIHLGELHAILRRQEDFYPFLKDNREKIEKILTFRIPYYVGPLARGNSRFAWMTRKSEETITPWNFEEVVDKGASAQSFIERMTNFDKNLPNEKVLPKHSLLYEYFTVYNELTKVKYVTEGMRKPAFLSGEQKKAIVDLLFKTNRKVTVKQLKEDYFKKIECFDSVEISGVEDRFNASLGTYHDLLKIIKDKDFLDNEENEDILEDIVLTLTLFEDREMIEERLKTYAHLFDDKVMKQLKRRRYTGWGRLSRKLINGIRDKQSGKTILDFLKSDGFANRNFMQLIHDDSLTFKEDIQKAQVSGQGDSLHEHIANLAGSPAIKKGILQTVKVVDELVKVMGRHKPENIVIEMARENQTTQKGQKNSRERMKRIEEGIKELGSQILKEHPVENTQLQNEKLYLYYLQNGRDMYVDQELDINRLSDYDVDHIVPQSFLKDDSIDNKVLTRSDKARGKSDNVPSEEVVKKMKNYWRQLLNAKLITQRKFDNLTKAERGGLSELDKAGFIKRQLVETRQITKHVAQILDSRMNTKYDENDKLIREVKVITLKSKLVSDFRKDFQFYKVREINNYHHAHDAYLNAVVGTALIKKYPKLESEFVYGDYKVYDVRKMIAKSEQEIGKATAKYFFYSNIMNFFKTEITLANGEIRKRPLIETNGETGEIVWDKGRDFATVRKVLSMPQVNIVKKTEVQTGGFSKESILPKRNSDKLIARKKDWDPKKYGGFDSPTVAYSVLVVAKVEKGKSKKLKSVKELLGITIMERSSFEKNPIDFLEAKGYKEVKKDLIIKLPKYSLFELENGRKRMLASAGELQKGNELALPSKYVNFLYLASHYEKLKGSPEDNEQKQLFVEQHKHYLDEIIEQISEFSKRVILADANLDKVLSAYNKHRDKPIREQAENIIHLFTLTNLGAPAAFKYFDTTIDRKRYTSTKEVLDATLIHQSITGLYETRIDLSQLGGDGGGSSEAAAKGGSGGTAPLEEEYRLFLEAPIQNVTLLEQWKREIPKVWAEINPPGLASTQAPIHVQLLSTALPVRVRQYPITLEAKRSLRETIRKFRAAGILRPVHSPWNTPLLPVRKSGTSEYRMVQDLREVNKRVETIHPTVPNPYTLLSLLPPDRIWYSVLDLKDAFFCIPLAPESQLIFAFEWADAEEGESGQLTWTRLPQGFKNSPTLFNEALNRDLQGFRLDHPSVSLLQYVDDLLIAADTQAACLSATRDLLMTLAELGYRVSGKKAQLCQEEVTYLGFKIHKGSRSLSNSRTQAILQIPVPKTKRQVREFLGTIGYCRLWIPGFAELAQPLYAATRPGNDPLVWGEKEEEAFQSLKLALTQPPALALPSLDKPFQLFVEETSGAAKGVLTQALGPWKRPVAYLSKRLDPVAAGWPRCLRAIAAAALLTREASKLTFGQDIEITSSHNLESLLRSPPDKWLTNARITQYQVLLLDPPRVRFKQTAALNPATLLPETDDTLPIHHCLDTLDSLTSTRPDLTDQPLAQAEATLFTDGSSYIRDGKRYAGAAVVTLDSVIWAEPLPIGTSAQKAELIALTKALEWSKDKSVNIYTDSRYAFATLHVHGMIYRERGWLTAGGKAIKNAPEILALLTAVWLPKRVAVMHCKGHQKDDAPTSTGNRRADEVAREVAIRPLSTQATISAGKRTADGSEFEKRTADGSEFESPKKKAKVE

SEQ ID NO: 7080 - protein, 2098 aa, synthetic construct
MPAAKRVKLDGGDKKYSIGLDIGTNSVGWAVITDEYKVPSKKFKVLGNTDRHSIKKNLIGALLFDSGETAEATRLKRTARRRYTRRKNRICYLQEIFSNEMAKVDDSFFHRLEESFLVEEDKKHERHPIFGNIVDEVAYHEKYPTIYHLRKKLVDSTDKADLRLIYLALAHMIKFRGHFLIEGDLNPDNSDVDKLFIQLVQTYNQLFEENPINASGVDAKAILSARLSKSRRLENLIAQLPGEKKNGLFGNLIALSLGLTPNFKSNFDLAEDAKLQLSKDTYDDDLDNLLAQIGDQYADLFLAAKNLSDAILLSDILRVNTEITKAPLSASMIKRYDEHHQDLTLLKALVRQQLPEKYKEIFFDQSKNGYAGYIDGGASQEEFYKFIKPILEKMDGTEELLVKLNREDLLRKQRTFDNGSIPHQIHLGELHAILRRQEDFYPFLKDNREKIEKILTFRIPYYVGPLARGNSRFAWMTRKSEETITPWNFEEVVDKGASAQSFIERMTNFDKNLPNEKVLPKHSLLYEYFTVYNELTKVKYVTEGMRKPAFLSGEQKKAIVDLLFKTNRKVTVKQLKEDYFKKIECFDSVEISGVEDRFNASLGTYHDLLKIIKDKDFLDNEENEDILEDIVLTLTLFEDREMIEERLKTYAHLFDDKVMKQLKRRRYTGWGRLSRKLINGIRDKQSGKTILDFLKSDGFANRNFMQLIHDDSLTFKEDIQKAQVSGQGDSLHEHIANLAGSPAIKKGILQTVKVVDELVKVMGRHKPENIVIEMARENQTTQKGQKNSRERMKRIEEGIKELGSQILKEHPVENTQLQNEKLYLYYLQNGRDMYVDQELDINRLSDYDVDHIVPQSFLKDDSIDNKVLTRSDKARGKSDNVPSEEVVKKMKNYWRQLLNAKLITQRKFDNLTKAERGGLSELDKAGFIKRQLVETRQITKHVAQILDSRMNTKYDENDKLIREVKVITLKSKLVSDFRKDFQFYKVREINNYHHAHDAYLNAVVGTALIKKYPKLESEFVYGDYKVYDVRKMIAKSEQEIGKATAKYFFYSNIMNFFKTEITLANGEIRKRPLIETNGETGEIVWDKGRDFATVRKVLSMPQVNIVKKTEVQTGGFSKESILPKRNSDKLIARKKDWDPKKYGGFDSPTVAYSVLVVAKVEKGKSKKLKSVKELLGITIMERSSFEKNPIDFLEAKGYKEVKKDLIIKLPKYSLFELENGRKRMLASAGELQKGNELALPSKYVNFLYLASHYEKLKGSPEDNEQKQLFVEQHKHYLDEIIEQISEFSKRVILADANLDKVLSAYNKHRDKPIREQAENIIHLFTLTNLGAPAAFKYFDTTIDRKRYTSTKEVLDATLIHQSITGLYETRIDLSQLGGDGGGSSEAAAKGGSGGTAPLEEEYRLFLEAPIQNVTLLEQWKREIPKVWAEINPPGLASTQAPIHVQLLSTALPVRVRQYPITLEAKRSLRETIRKFRAAGILRPVHSPWNTPLLPVRKSGTSEYRMVQDLREVNKRVETIHPTVPNPYTLLSLLPPDRIWYSVLDLKDAFFCIPLAPESQLIFAFEWADAEEGESGQLTWTRLPQGFKNSPTLFNEALNRDLQGFRLDHPSVSLLQYVDDLLIAADTQAACLSATRDLLMTLAELGYRVSGKKAQLCQEEVTYLGFKIHKGSRSLSNSRTQAILQIPVPKTKRQVREFLGKIGYCRLFIPGFAELAQPLYAATRPGNDPLVWGEKEEEAFQSLKLALTQPPALALPSLDKPFQLFVEETSGAAKGVLTQALGPWKRPVAYLSKRLDPVAAGWPRCLRAIAAAALLTREASKLTFGQDIEITSSHNLESLLRSPPDKWLTNARITQYQVLLLDPPRVRFKQTAALNPATLLPETDDTLPIHHCLDTLDSLTSTRPDLTDQPLAQAEATLFTDGSSYIRDGKRYAGAAVVTLDSVIWAEPLPIGTSAQKAELIALTKALEWSKDKSVNIYTDSRYAFATLHVHGMIYRERGWLTAGGKAIKNAPEILALLTAVWLPKRVAVMHCKGHQKDDAPTSTGNRRADEVAREVAIRPLSTQATISAGKRTADGSEFEKRTADGSEFESPKKKAKVE

SEQ ID NO: 7081 - protein, 2102 aa, synthetic construct
MPAAKRVKLDGGDKKYSIGLDIGTNSVGWAVITDEYKVPSKKFKVLGNTDRHSIKKNLIGALLFDSGETAEATRLKRTARRRYTRRKNRICYLQEIFSNEMAKVDDSFFHRLEESFLVEEDKKHERHPIFGNIVDEVAYHEKYPTIYHLRKKLVDSTDKADLRLIYLALAHMIKFRGHFLIEGDLNPDNSDVDKLFIQLVQTYNQLFEENPINASGVDAKAILSARLSKSRRLENLIAQLPGEKKNGLFGNLIALSLGLTPNFKSNFDLAEDAKLQLSKDTYDDDLDNLLAQIGDQYADLFLAAKNLSDAILLSDILRVNTEITKAPLSASMIKRYDEHHQDLTLLKALVRQQLPEKYKEIFFDQSKNGYAGYIDGGASQEEFYKFIKPILEKMDGTEELLVKLNREDLLRKQRTFDNGSIPHQIHLGELHAILRRQEDFYPFLKDNREKIEKILTFRIPYYVGPLARGNSRFAWMTRKSEETITPWNFEEVVDKGASAQSFIERMTNFDKNLPNEKVLPKHSLLYEYFTVYNELTKVKYVTEGMRKPAFLSGEQKKAIVDLLFKTNRKVTVKQLKEDYFKKIECFDSVEISGVEDRFNASLGTYHDLLKIIKDKDFLDNEENEDILEDIVLTLTLFEDREMIEERLKTYAHLFDDKVMKQLKRRRYTGWGRLSRKLINGIRDKQSGKTILDFLKSDGFANRNFMQLIHDDSLTFKEDIQKAQVSGQGDSLHEHIANLAGSPAIKKGILQTVKVVDELVKVMGRHKPENIVIEMARENQTTQKGQKNSRERMKRIEEGIKELGSQILKEHPVENTQLQNEKLYLYYLQNGRDMYVDQELDINRLSDYDVDHIVPQSFLKDDSIDNKVLTRSDKARGKSDNVPSEEVVKKMKNYWRQLLNAKLITQRKFDNLTKAERGGLSELDKAGFIKRQLVETRQITKHVAQILDSRMNTKYDENDKLIREVKVITLKSKLVSDFRKDFQFYKVREINNYHHAHDAYLNAVVGTALIKKYPKLESEFVYGDYKVYDVRKMIAKSEQEIGKATAKYFFYSNIMNFFKTEITLANGEIRKRPLIETNGETGEIVWDKGRDFATVRKVLSMPQVNIVKKTEVQTGGFSKESILPKRNSDKLIARKKDWDPKKYGGFDSPTVAYSVLVVAKVEKGKSKKLKSVKELLGITIMERSSFEKNPIDFLEAKGYKEVKKDLIIKLPKYSLFELENGRKRMLASAGELQKGNELALPSKYVNFLYLASHYEKLKGSPEDNEQKQLFVEQHKHYLDEIIEQISEFSKRVILADANLDKVLSAYNKHRDKPIREQAENIIHLFTLTNLGAPAAFKYFDTTIDRKRYTSTKEVLDATLIHQSITGLYETRIDLSQLGGDGGGSSEAAAKGGSGGTVSLQDEHRLFDIPVTTSLPDVWLQDFPQAWAETGGLGRAKCQAPIIIDLKPTAVPVSIKQYPMSLEAHMGIRQHIIKFLELGVLRPCRSPWNTPLLPVKKPGTQDYRPVQDLREINKRTVDIHPTVPNPYNLLSTLKPDYSWYTVLDLKDAFFCLPLAPQSQELFAFEWKDPERGISGQLTWTRLPQGFKNSPTLFNEALHRDLTDFRTQHPEVTLLQYVDDLLLAAPTKKACTQGTRHLLQELGEKGYRASAKKAQICQTKVTYLGYILSEGKRWLTPGRIETVARIPPPRNPREVREFLGTAGFCRLWIPGFAELAAPLYALTKPSTPFTWQTEHQLAFEALKKALLSAPALGLPDTSKPFTLFLDERQGIAKGVLTQKLGPWKRPVAYLSKKLDPVAAGWPPCLRIMAATAMLVKDSAKLTLGQPLTVITPHTLEAIVRQPPDRWITNARLTHYQALLLDTDRVQFGPPVTLNPATLLPVPENQPSPHDCRQVLAETHGTREDLKDQELPDADHTWYTDGSSYLDSGTRRAGAAVVDGHNTIWAQSLPPGTSAQKAELIALTKALELSKGKKANIYTDSRYAFATAHTHGSIYERRGWLTSEGKEIKNKAEIIALLKALFLPQEVAIIHCPGHQKGQDPVAVGNRQADRVARQAAMAEVLTLATEPDNTSHITAGKRTADGSEFEKRTADGSEFESPKKKAKVE

SEQ ID NO: 7082 - protein, 2095 aa, synthetic construct
MPAAKRVKLDGGDKKYSIGLDIGTNSVGWAVITDEYKVPSKKFKVLGNTDRHSIKKNLIGALLFDSGETAEATRLKRTARRRYTRRKNRICYLQEIFSNEMAKVDDSFFHRLEESFLVEEDKKHERHPIFGNIVDEVAYHEKYPTIYHLRKKLVDSTDKADLRLIYLALAHMIKFRGHFLIEGDLNPDNSDVDKLFIQLVQTYNQLFEENPINASGVDAKAILSARLSKSRRLENLIAQLPGEKKNGLFGNLIALSLGLTPNFKSNFDLAEDAKLQLSKDTYDDDLDNLLAQIGDQYADLFLAAKNLSDAILLSDILRVNTEITKAPLSASMIKRYDEHHQDLTLLKALVRQQLPEKYKEIFFDQSKNGYAGYIDGGASQEEFYKFIKPILEKMDGTEELLVKLNREDLLRKQRTFDNGSIPHQIHLGELHAILRRQEDFYPFLKDNREKIEKILTFRIPYYVGPLARGNSRFAWMTRKSEETITPWNFEEVVDKGASAQSFIERMTNFDKNLPNEKVLPKHSLLYEYFTVYNELTKVKYVTEGMRKPAFLSGEQKKAIVDLLFKTNRKVTVKQLKEDYFKKIECFDSVEISGVEDRFNASLGTYHDLLKIIKDKDFLDNEENEDILEDIVLTLTLFEDREMIEERLKTYAHLFDDKVMKQLKRRRYTGWGRLSRKLINGIRDKQSGKTILDFLKSDGFANRNFMQLIHDDSLTFKEDIQKAQVSGQGDSLHEHIANLAGSPAIKKGILQTVKVVDELVKVMGRHKPENIVIEMARENQTTQKGQKNSRERMKRIEEGIKELGSQILKEHPVENTQLQNEKLYLYYLQNGRDMYVDQELDINRLSDYDVDHIVPQSFLKDDSIDNKVLTRSDKARGKSDNVPSEEVVKKMKNYWRQLLNAKLITQRKFDNLTKAERGGLSELDKAGFIKRQLVETRQITKHVAQILDSRMNTKYDENDKLIREVKVITLKSKLVSDFRKDFQFYKVREINNYHHAHDAYLNAVVGTALIKKYPKLESEFVYGDYKVYDVRKMIAKSEQEIGKATAKYFFYSNIMNFFKTEITLANGEIRKRPLIETNGETGEIVWDKGRDFATVRKVLSMPQVNIVKKTEVQTGGFSKESILPKRNSDKLIARKKDWDPKKYGGFDSPTVAYSVLVVAKVEKGKSKKLKSVKELLGITIMERSSFEKNPIDFLEAKGYKEVKKDLIIKLPKYSLFELENGRKRMLASAGELQKGNELALPSKYVNFLYLASHYEKLKGSPEDNEQKQLFVEQHKHYLDEIIEQISEFSKRVILADANLDKVLSAYNKHRDKPIREQAENIIHLFTLTNLGAPAAFKYFDTTIDRKRYTSTKEVLDATLIHQSITGLYETRIDLSQLGGDGGGSSEAAAKGGSGGTLQLEEEYRLFEPESTQKQEMDIWLKNFPQAWAETGGMGTAHCQAPVLIQLKATATPISIRQYPMPHEAYQGIKPHIRRMLDQGILKPCQSPWNTPLLPVKKPGTEDYRPVQDLREVNKRVEDIHPTVPNPYNLLSTLPPSHPWYTVLDLKDAFFCLRLHSESQLLFAFEWRDPEIGLSGQLTWTRLPQGFKNSPTLFNEALHSDLADFRVRYPALVLLQYVDDLLLAAATRTECLEGTKALLETLGNKGYRASAKKAQICLQEVTYLGYSLKDGQRWLTKARKEAILSIPVPKNSRQVREFLGTAGYCRLWIPGFAELAAPLYPLTRPGTLFQWGTEQQLAFEDIKKALLSSPALGLPDITKPFELFIDENSGFAKGVLVQKLGPWKRPVAYLSKKLDTVASGWPPCLRMVAAIAILVKDAGKLTLGQPLTILTSHPVEALVRQPPNKWLSNARMTHYQAMLLDAERVHFGPTVSLNPATLLPLPSGGNHHDCLQILAETHGTRPDLTDQPLPDADLTWYTDGSSFIRNGEREAGAAVTTESEVIWAAPLPPGTSAQRAELIALTQALKMAEGKKLTVYTDSRYAFATTHVHGEIYRRRGWLTSEGKEIKNKNEILALLEALFLPKRLSIIHCPGHQKGDSPQAKGNRLADDTAKKAATETHSSLTVLPAGKRTADGSEFEKRTADGSEFESPKKKAKVE

SEQ ID NO: 7083 - protein, 2176 aa, synthetic construct
MPAAKRVKLDGGDKKYSIGLDIGTNSVGWAVITDEYKVPSKKFKVLGNTDRHSIKKNLIGALLFDSGETAEATRLKRTARRRYTRRKNRICYLQEIFSNEMAKVDDSFFHRLEESFLVEEDKKHERHPIFGNIVDEVAYHEKYPTIYHLRKKLVDSTDKADLRLIYLALAHMIKFRGHFLIEGDLNPDNSDVDKLFIQLVQTYNQLFEENPINASGVDAKAILSARLSKSRRLENLIAQLPGEKKNGLFGNLIALSLGLTPNFKSNFDLAEDAKLQLSKDTYDDDLDNLLAQIGDQYADLFLAAKNLSDAILLSDILRVNTEITKAPLSASMIKRYDEHHQDLTLLKALVRQQLPEKYKEIFFDQSKNGYAGYIDGGASQEEFYKFIKPILEKMDGTEELLVKLNREDLLRKQRTFDNGSIPHQIHLGELHAILRRQEDFYPFLKDNREKIEKILTFRIPYYVGPLARGNSRFAWMTRKSEETITPWNFEEVVDKGASAQSFIERMTNFDKNLPNEKVLPKHSLLYEYFTVYNELTKVKYVTEGMRKPAFLSGEQKKAIVDLLFKTNRKVTVKQLKEDYFKKIECFDSVEISGVEDRFNASLGTYHDLLKIIKDKDFLDNEENEDILEDIVLTLTLFEDREMIEERLKTYAHLFDDKVMKQLKRRRYTGWGRLSRKLINGIRDKQSGKTILDFLKSDGFANRNFMQLIHDDSLTFKEDIQKAQVSGQGDSLHEHIANLAGSPAIKKGILQTVKVVDELVKVMGRHKPENIVIEMARENQTTQKGQKNSRERMKRIEEGIKELGSQILKEHPVENTQLQNEKLYLYYLQNGRDMYVDQELDINRLSDYDVDHIVPQSFLKDDSIDNKVLTRSDKARGKSDNVPSEEVVKKMKNYWRQLLNAKLITQRKFDNLTKAERGGLSELDKAGFIKRQLVETRQITKHVAQILDSRMNTKYDENDKLIREVKVITLKSKLVSDFRKDFQFYKVREINNYHHAHDAYLNAVVGTALIKKYPKLESEFVYGDYKVYDVRKMIAKSEQEIGKATAKYFFYSNIMNFFKTEITLANGEIRKRPLIETNGETGEIVWDKGRDFATVRKVLSMPQVNIVKKTEVQTGGFSKESILPKRNSDKLIARKKDWDPKKYGGFDSPTVAYSVLVVAKVEKGKSKKLKSVKELLGITIMERSSFEKNPIDFLEAKGYKEVKKDLIIKLPKYSLFELENGRKRMLASAGELQKGNELALPSKYVNFLYLASHYEKLKGSPEDNEQKQLFVEQHKHYLDEIIEQISEFSKRVILADANLDKVLSAYNKHRDKPIREQAENIIHLFTLTNLGAPAAFKYFDTTIDRKRYTSTKEVLDATLIHQSITGLYETRIDLSQLGGDGGGSSEAAAKGGSGGMNPLQLLQPLPAEIKGTKLLAHWNSGATITCIPESFLEDEQPIKKTLIKTIHGEKQQNVYYVTFKVKGRKVEAEVIASPYEYILLSPTDVPWLTQQPLQLTILVPLQEYQEKILSKTALPEDQKQQLKTLFVKYDNLWQHWENQVGHRKIRPHNIATGDYPPRPQKQYPINPKAKPSIQIVIDDLLKQGVLTPQNSTMNTPVYPVPKPDGRWRMVLDYREVNKTIPLTAAQNQHSAGILATIVRQKYKTTLDLANGFWAHPITPESYWLTAFTWQGKQYCWTRLPQGFLNSPALFTADVVDLLKEIPNVQVYVDDIYLSHDDPKEHVQQLEKVFQILLQAGYVVSLKKSEIGQKTVEFLGFNITKEGRGLTDTFKTKLLNITPPKDLKQLQSILGLLNFARNFIPNFAELVQPLYNLIASAKGKYIEWSEENTKQLNMVIEALNTASNLEERLPEQRLVIKVNTSPSAGYVRYYNETGKKPIMYLNYVFSKAELKFSMLEKLLTTMHKALIKAMDLAMGQEILVYSPIVSMTKIQKTPLPERKALPIRWITWMTYLEDPRIQFHYDKTLPELKHIPDVYTSSQSPVKHPSQYEGVFYTDGSAIKSPDPTKSNNAGMGIVHATYKPEYQVLNQWSIPLGNHTAQMAEIAAVEFACKKALKIPGPVLVITDSFYVAESANKELPYWKSNGFVNNKKKPLKHISKWKSIAECLSMKPDITIQHEKGISLQIPVFILKGNALADKLATQGSYVVNAGKRTADGSEFEKRTADGSEFESPKKKAKVE

SEQ ID NO: 7084 - protein, 2218 aa, synthetic construct
MPAAKRVKLDGGDKKYSIGLDIGTNSVGWAVITDEYKVPSKKFKVLGNTDRHSIKKNLIGALLFDSGETAEATRLKRTARRRYTRRKNRICYLQEIFSNEMAKVDDSFFHRLEESFLVEEDKKHERHPIFGNIVDEVAYHEKYPTIYHLRKKLVDSTDKADLRLIYLALAHMIKFRGHFLIEGDLNPDNSDVDKLFIQLVQTYNQLFEENPINASGVDAKAILSARLSKSRRLENLIAQLPGEKKNGLFGNLIALSLGLTPNFKSNFDLAEDAKLQLSKDTYDDDLDNLLAQIGDQYADLFLAAKNLSDAILLSDILRVNTEITKAPLSASMIKRYDEHHQDLTLLKALVRQQLPEKYKEIFFDQSKNGYAGYIDGGASQEEFYKFIKPILEKMDGTEELLVKLNREDLLRKQRTFDNGSIPHQIHLGELHAILRRQEDFYPFLKDNREKIEKILTFRIPYYVGPLARGNSRFAWMTRKSEETITPWNFEEVVDKGASAQSFIERMTNFDKNLPNEKVLPKHSLLYEYFTVYNELTKVKYVTEGMRKPAFLSGEQKKAIVDLLFKTNRKVTVKQLKEDYFKKIECFDSVEISGVEDRFNASLGTYHDLLKIIKDKDFLDNEENEDILEDIVLTLTLFEDREMIEERLKTYAHLFDDKVMKQLKRRRYTGWGRLSRKLINGIRDKQSGKTILDFLKSDGFANRNFMQLIHDDSLTFKEDIQKAQVSGQGDSLHEHIANLAGSPAIKKGILQTVKVVDELVKVMGRHKPENIVIEMARENQTTQKGQKNSRERMKRIEEGIKELGSQILKEHPVENTQLQNEKLYLYYLQNGRDMYVDQELDINRLSDYDVDHIVPQSFLKDDSIDNKVLTRSDKARGKSDNVPSEEVVKKMKNYWRQLLNAKLITQRKFDNLTKAERGGLSELDKAGFIKRQLVETRQITKHVAQILDSRMNTKYDENDKLIREVKVITLKSKLVSDFRKDFQFYKVREINNYHHAHDAYLNAVVGTALIKKYPKLESEFVYGDYKVYDVRKMIAKSEQEIGKATAKYFFYSNIMNFFKTEITLANGEIRKRPLIETNGETGEIVWDKGRDFATVRKVLSMPQVNIVKKTEVQTGGFSKESILPKRNSDKLIARKKDWDPKKYGGFDSPTVAYSVLVVAKVEKGKSKKLKSVKELLGITIMERSSFEKNPIDFLEAKGYKEVKKDLIIKLPKYSLFELENGRKRMLASAGELQKGNELALPSKYVNFLYLASHYEKLKGSPEDNEQKQLFVEQHKHYLDEIIEQISEFSKRVILADANLDKVLSAYNKHRDKPIREQAENIIHLFTLTNLGAPAAFKYFDTTIDRKRYTSTKEVLDATLIHQSITGLYETRIDLSQLGGDGGGSSEAAAKGGSGGTLGDQGSRGSDPLPEPRVTLTVEGIPTEFLVNTGAEHSVLTKPMGKMGSKRTVVAGATGSKVYPWTTKRLLKIGQKQVTHSFLVIPECPAPLLGRDLLTKLKAQIQFSTEGPQVTWEDRPAMCLVLNLEEEYRLHEKPVPPSIDPSWLQLFPMVWAEKAGMGLANQVPPVVVELKSDASPVAVRQYPMSKEAREGIRPHIQRFLDLGILVPCQSPWNTPLLPVKKPGTNDYRPVQDLREVNKRVQDIHPTVPNPYNLLSSLPPSHTWYSVLDLKDAFFCLKLHPNSQPLFAFEWRDPEKGNTGQLTWTRLPQGFKNSPTLFNEALHRDLASFRALNPQVVMLQYVDDLLVAAPTYRDCKEGTRRLLQELSKLGYRVSAKKAQLCREEVTYLGYLLKGGKRWLTPARKATVMKIPTPTTPRQVREFLGTAGFCRLWIPGFASLAAPLYPLTRPKVPFTWTEAHQEAFGRIKEALLSAPALALPDLTKPFALYVDEKEGVARGVLTQTLGPWRRPVAYLSKKLDPVASGWPTCLKAIAAVALLLKDADKLTLGQNVLVIAPHNLESIVRQPPDRWMTNARMTHYQSLLLNERVSFAPPAILNPATLLPVESDDTPIHICSEILAEETGTRPDLRDQPLPGVPAWYTDGSSFIMDGRRQAGAAIVDNKRTVWASNLPEGTSAQKAELIALTQALRLAEGKSINIYTDSRYAFATAHVHGAIYKQRGWLTSAGKDIKNKEEILALLEAIHLPKRVAIIHCPGHQRGTDPVATGNRKADEAAKQAAQSTRILTETTKNAGKRTADGSEFEKRTADGSEFESPKKKAKVE

SEQ ID NO: 7085 - protein, 2096 aa, synthetic construct
MPAAKRVKLDGGDKKYSIGLDIGTNSVGWAVITDEYKVPSKKFKVLGNTDRHSIKKNLIGALLFDSGETAEATRLKRTARRRYTRRKNRICYLQEIFSNEMAKVDDSFFHRLEESFLVEEDKKHERHPIFGNIVDEVAYHEKYPTIYHLRKKLVDSTDKADLRLIYLALAHMIKFRGHFLIEGDLNPDNSDVDKLFIQLVQTYNQLFEENPINASGVDAKAILSARLSKSRRLENLIAQLPGEKKNGLFGNLIALSLGLTPNFKSNFDLAEDAKLQLSKDTYDDDLDNLLAQIGDQYADLFLAAKNLSDAILLSDILRVNTEITKAPLSASMIKRYDEHHQDLTLLKALVRQQLPEKYKEIFFDQSKNGYAGYIDGGASQEEFYKFIKPILEKMDGTEELLVKLNREDLLRKQRTFDNGSIPHQIHLGELHAILRRQEDFYPFLKDNREKIEKILTFRIPYYVGPLARGNSRFAWMTRKSEETITPWNFEEVVDKGASAQSFIERMTNFDKNLPNEKVLPKHSLLYEYFTVYNELTKVKYVTEGMRKPAFLSGEQKKAIVDLLFKTNRKVTVKQLKEDYFKKIECFDSVEISGVEDRFNASLGTYHDLLKIIKDKDFLDNEENEDILEDIVLTLTLFEDREMIEERLKTYAHLFDDKVMKQLKRRRYTGWGRLSRKLINGIRDKQSGKTILDFLKSDGFANRNFMQLIHDDSLTFKEDIQKAQVSGQGDSLHEHIANLAGSPAIKKGILQTVKVVDELVKVMGRHKPENIVIEMARENQTTQKGQKNSRERMKRIEEGIKELGSQILKEHPVENTQLQNEKLYLYYLQNGRDMYVDQELDINRLSDYDVDHIVPQSFLKDDSIDNKVLTRSDKARGKSDNVPSEEVVKKMKNYWRQLLNAKLITQRKFDNLTKAERGGLSELDKAGFIKRQLVETRQITKHVAQILDSRMNTKYDENDKLIREVKVITLKSKLVSDFRKDFQFYKVREINNYHHAHDAYLNAVVGTALIKKYPKLESEFVYGDYKVYDVRKMIAKSEQEIGKATAKYFFYSNIMNFFKTEITLANGEIRKRPLIETNGETGEIVWDKGRDFATVRKVLSMPQVNIVKKTEVQTGGFSKESILPKRNSDKLIARKKDWDPKKYGGFDSPTVAYSVLVVAKVEKGKSKKLKSVKELLGITIMERSSFEKNPIDFLEAKGYKEVKKDLIIKLPKYSLFELENGRKRMLASAGELQKGNELALPSKYVNFLYLASHYEKLKGSPEDNEQKQLFVEQHKHYLDEIIEQISEFSKRVILADANLDKVLSAYNKHRDKPIREQAENIIHLFTLTNLGAPAAFKYFDTTIDRKRYTSTKEVLDATLIHQSITGLYETRIDLSQLGGDGGGSSEAAAKGGSGGTLNLEDEYRLYETSAEPEVSPGSTWLSDFPQAWAETGGMGLAVRQAPLIIPLKATSTPVSIKQYPMSQEAKLGIKPHIQRLLDQGILVPCQSPWNTPLLPVKKPGTNDYRPVQDLREVNKRVEDIHPTVPNPYNLLSGLPPSHRWYTVLDLKDAFFCLRLHPTSQPLFAFEWRDPGMGISGQLTWTRLPQGFKNSPTLFNEALHRDLADFRIQHPDLILLQYVDDILLAATSELDCQQGTRALLLTLGNLGYRASAKKAQLCQKQVKYLGYLLKEGQRWLTEARKETVMGQPTPKTPRQLREFLGTAGFCRLWIPGFAEMAAPLYPLTKPGTLFNWGPDQQKAYQEIKQALLTAPALGLPDLTKPFELFVDEKQGYAKGVLTQKLGPWRRPVAYLSKKLDPVAAGWPPCLRMVAAIAVLRKDAGKLTMGQPLVILAPHAVEALVKQPPDRWLSNARMTHYQAMLLDTDRVQFGPVVALNPATLLPLPEEGAPHDCLEILAETHGTRPDLTDQPIPDADHTWYTDGSSFLQEGQRKAGAAVTTETEVIWARALPAGTSAQRAELIALTQALKMAEGKRLNVYTDSRYAFATAHIHGEIYRRRGWLTSEGREIKNKSEILALLKALFLPKRLSIIHCLGHQKGDSAEARGNRLADQAAREAAIKTPPDTSTLLAGKRTADGSEFEKRTADGSEFESPKKKAKVE

SEQ ID NO: 7086 - protein, 2096 aa, synthetic construct
MPAAKRVKLDGGDKKYSIGLDIGTNSVGWAVITDEYKVPSKKFKVLGNTDRHSIKKNLIGALLFDSGETAEATRLKRTARRRYTRRKNRICYLQEIFSNEMAKVDDSFFHRLEESFLVEEDKKHERHPIFGNIVDEVAYHEKYPTIYHLRKKLVDSTDKADLRLIYLALAHMIKFRGHFLIEGDLNPDNSDVDKLFIQLVQTYNQLFEENPINASGVDAKAILSARLSKSRRLENLIAQLPGEKKNGLFGNLIALSLGLTPNFKSNFDLAEDAKLQLSKDTYDDDLDNLLAQIGDQYADLFLAAKNLSDAILLSDILRVNTEITKAPLSASMIKRYDEHHQDLTLLKALVRQQLPEKYKEIFFDQSKNGYAGYIDGGASQEEFYKFIKPILEKMDGTEELLVKLNREDLLRKQRTFDNGSIPHQIHLGELHAILRRQEDFYPFLKDNREKIEKILTFRIPYYVGPLARGNSRFAWMTRKSEETITPWNFEEVVDKGASAQSFIERMTNFDKNLPNEKVLPKHSLLYEYFTVYNELTKVKYVTEGMRKPAFLSGEQKKAIVDLLFKTNRKVTVKQLKEDYFKKIECFDSVEISGVEDRFNASLGTYHDLLKIIKDKDFLDNEENEDILEDIVLTLTLFEDREMIEERLKTYAHLFDDKVMKQLKRRRYTGWGRLSRKLINGIRDKQSGKTILDFLKSDGFANRNFMQLIHDDSLTFKEDIQKAQVSGQGDSLHEHIANLAGSPAIKKGILQTVKVVDELVKVMGRHKPENIVIEMARENQTTQKGQKNSRERMKRIEEGIKELGSQILKEHPVENTQLQNEKLYLYYLQNGRDMYVDQELDINRLSDYDVDHIVPQSFLKDDSIDNKVLTRSDKARGKSDNVPSEEVVKKMKNYWRQLLNAKLITQRKFDNLTKAERGGLSELDKAGFIKRQLVETRQITKHVAQILDSRMNTKYDENDKLIREVKVITLKSKLVSDFRKDFQFYKVREINNYHHAHDAYLNAVVGTALIKKYPKLESEFVYGDYKVYDVRKMIAKSEQEIGKATAKYFFYSNIMNFFKTEITLANGEIRKRPLIETNGETGEIVWDKGRDFATVRKVLSMPQVNIVKKTEVQTGGFSKESILPKRNSDKLIARKKDWDPKKYGGFDSPTVAYSVLVVAKVEKGKSKKLKSVKELLGITIMERSSFEKNPIDFLEAKGYKEVKKDLIIKLPKYSLFELENGRKRMLASAGELQKGNELALPSKYVNFLYLASHYEKLKGSPEDNEQKQLFVEQHKHYLDEIIEQISEFSKRVILADANLDKVLSAYNKHRDKPIREQAENIIHLFTLTNLGAPAAFKYFDTTIDRKRYTSTKEVLDATLIHQSITGLYETRIDLSQLGGDGGGSSEAAAKGGSGGTLGIEDEYRLHETSTEPDVSLGSTWLSDFPQAWAETGGMGLAVRQAPLIIPLKATSTPVSIQQYPMSHEARLGIKPHIQRLLDQGILVPCQSPWNTPLLPVKKPGTNDYRPVQDLREVNKRVEDIHPTVPNPYNLLSGLPPSHQWYTVLDLKDAFFCLRLHPTSQPLFAFEWRDPGMGISGQLTWTRLPQGFKNSPTLFNEALHRDLADFRIQHPDLILLQYVDDILLAATSELDCQQGTRALLQTLGDLGYRASAKKAQICQKQVKYLGYLLREGQRWLTEARKETVMGQPVPKTPRQLREFLGTAGFCRLWIPGFAEMAAPLYPLTKPGTLFSWGPDQQKAYQEIKQALLTAPALGLPDLTKPFELFVDEKQGYAKGVLTQKLGPWRRPVAYLSKKLDPVAAGWPPCLRMVAAIAVLTKDAGKLTMGQPLVILAPHAVEALVKQPPDRWLSNARMTHYQAMLLDTDRVQFGPVVALNPATLLPLPEEGAPHDCLEILAETHGTRPDLTDQPIPDADHTWYTDGSSFLQEGQRKAGAAVTTETEVIWAGALPAGTSAQRAELIALTQALKMAEGKRLNVYTDSRYAFATAHIHGEIYRRRGWLTSEGREIKNKSEILALLKALFLPKRLSIIHCLGHQKGDSAEARGNRLADQAAREAAIKTPPDTSTLLAGKRTADGSEFEKRTADGSEFESPKKKAKVE

SEQ ID NO: 7087 - protein, 2096 aa, synthetic construct
MPAAKRVKLDGGDKKYSIGLDIGTNSVGWAVITDEYKVPSKKFKVLGNTDRHSIKKNLIGALLFDSGETAEATRLKRTARRRYTRRKNRICYLQEIFSNEMAKVDDSFFHRLEESFLVEEDKKHERHPIFGNIVDEVAYHEKYPTIYHLRKKLVDSTDKADLRLIYLALAHMIKFRGHFLIEGDLNPDNSDVDKLFIQLVQTYNQLFEENPINASGVDAKAILSARLSKSRRLENLIAQLPGEKKNGLFGNLIALSLGLTPNFKSNFDLAEDAKLQLSKDTYDDDLDNLLAQIGDQYADLFLAAKNLSDAILLSDILRVNTEITKAPLSASMIKRYDEHHQDLTLLKALVRQQLPEKYKEIFFDQSKNGYAGYIDGGASQEEFYKFIKPILEKMDGTEELLVKLNREDLLRKQRTFDNGSIPHQIHLGELHAILRRQEDFYPFLKDNREKIEKILTFRIPYYVGPLARGNSRFAWMTRKSEETITPWNFEEVVDKGASAQSFIERMTNFDKNLPNEKVLPKHSLLYEYFTVYNELTKVKYVTEGMRKPAFLSGEQKKAIVDLLFKTNRKVTVKQLKEDYFKKIECFDSVEISGVEDRFNASLGTYHDLLKIIKDKDFLDNEENEDILEDIVLTLTLFEDREMIEERLKTYAHLFDDKVMKQLKRRRYTGWGRLSRKLINGIRDKQSGKTILDFLKSDGFANRNFMQLIHDDSLTFKEDIQKAQVSGQGDSLHEHIANLAGSPAIKKGILQTVKVVDELVKVMGRHKPENIVIEMARENQTTQKGQKNSRERMKRIEEGIKELGSQILKEHPVENTQLQNEKLYLYYLQNGRDMYVDQELDINRLSDYDVDHIVPQSFLKDDSIDNKVLTRSDKARGKSDNVPSEEVVKKMKNYWRQLLNAKLITQRKFDNLTKAERGGLSELDKAGFIKRQLVETRQITKHVAQILDSRMNTKYDENDKLIREVKVITLKSKLVSDFRKDFQFYKVREINNYHHAHDAYLNAVVGTALIKKYPKLESEFVYGDYKVYDVRKMIAKSEQEIGKATAKYFFYSNIMNFFKTEITLANGEIRKRPLIETNGETGEIVWDKGRDFATVRKVLSMPQVNIVKKTEVQTGGFSKESILPKRNSDKLIARKKDWDPKKYGGFDSPTVAYSVLVVAKVEKGKSKKLKSVKELLGITIMERSSFEKNPIDFLEAKGYKEVKKDLIIKLPKYSLFELENGRKRMLASAGELQKGNELALPSKYVNFLYLASHYEKLKGSPEDNEQKQLFVEQHKHYLDEIIEQISEFSKRVILADANLDKVLSAYNKHRDKPIREQAENIIHLFTLTNLGAPAAFKYFDTTIDRKRYTSTKEVLDATLIHQSITGLYETRIDLSQLGGDGGGSSEAAAKGGSGGTLNIEDEYRLHETSKGPDVPLGSTWLSDFPQAWAETGGMGLAVRQAPLIIPLKATSTPVSIKQYPMSQEARLGIKPHIQRLLDQGILVPCQSPWNTPLLPVKKPGTNDYRPVQDLREVNKRVEDIHPTVPNPYNLLSGLPPSHQWYTVLDLKDAFFCLRLHPTSQSLFAFEWRDPEMGISGQLTWTRLPQGFKNSPTLFNEALHRDLADFRIQHPDLILLQYVDDLLLAATSELDCQQGTRALLQTLGDLGYRASAKKAQICQKQVKYLGYLLKEGQRWLTEARKETVMGQPTPKTPRQLREFLGTAGFCRLWIPGFAEMAAPLYPLTKPGTLFEWGPDQQKAYQEIKQALLTAPALGLPDLTKPFELFVDEKQGYAKGVLTQKLGPWRRPVAYLSKKLDPVAAGWPPCLRMVAAIAVLTKDAGKLTMGQPLVILAPHAVEALVKQPPDRWLSNARMTHYQALLLDTDRVQFGPIVALNPATLLPLPEEGLQHDCLDILAEAHGTRPDLTDQPLPDADHTWYTDGSSFLQEGQRKAGAAVTTETEVVWAKALPAGTSAQRAELIALTQALKMAEGKKLNVYTDSRYAFATAHIHGEIYRRRGWLTSEGKEIKNKDEILALLKALFLPKRLSIIHCPGHQKGNRAEARGNRMADQAAREVATRETPETSTLLAGKRTADGSEFEKRTADGSEFESPKKKAKVE

SEQ ID NO: 7088 - protein, 2096 aa, synthetic construct
MPAAKRVKLDGGDKKYSIGLDIGTNSVGWAVITDEYKVPSKKFKVLGNTDRHSIKKNLIGALLFDSGETAEATRLKRTARRRYTRRKNRICYLQEIFSNEMAKVDDSFFHRLEESFLVEEDKKHERHPIFGNIVDEVAYHEKYPTIYHLRKKLVDSTDKADLRLIYLALAHMIKFRGHFLIEGDLNPDNSDVDKLFIQLVQTYNQLFEENPINASGVDAKAILSARLSKSRRLENLIAQLPGEKKNGLFGNLIALSLGLTPNFKSNFDLAEDAKLQLSKDTYDDDLDNLLAQIGDQYADLFLAAKNLSDAILLSDILRVNTEITKAPLSASMIKRYDEHHQDLTLLKALVRQQLPEKYKEIFFDQSKNGYAGYIDGGASQEEFYKFIKPILEKMDGTEELLVKLNREDLLRKQRTFDNGSIPHQIHLGELHAILRRQEDFYPFLKDNREKIEKILTFRIPYYVGPLARGNSRFAWMTRKSEETITPWNFEEVVDKGASAQSFIERMTNFDKNLPNEKVLPKHSLLYEYFTVYNELTKVKYVTEGMRKPAFLSGEQKKAIVDLLFKTNRKVTVKQLKEDYFKKIECFDSVEISGVEDRFNASLGTYHDLLKIIKDKDFLDNEENEDILEDIVLTLTLFEDREMIEERLKTYAHLFDDKVMKQLKRRRYTGWGRLSRKLINGIRDKQSGKTILDFLKSDGFANRNFMQLIHDDSLTFKEDIQKAQVSGQGDSLHEHIANLAGSPAIKKGILQTVKVVDELVKVMGRHKPENIVIEMARENQTTQKGQKNSRERMKRIEEGIKELGSQILKEHPVENTQLQNEKLYLYYLQNGRDMYVDQELDINRLSDYDVDHIVPQSFLKDDSIDNKVLTRSDKARGKSDNVPSEEVVKKMKNYWRQLLNAKLITQRKFDNLTKAERGGLSELDKAGFIKRQLVETRQITKHVAQILDSRMNTKYDENDKLIREVKVITLKSKLVSDFRKDFQFYKVREINNYHHAHDAYLNAVVGTALIKKYPKLESEFVYGDYKVYDVRKMIAKSEQEIGKATAKYFFYSNIMNFFKTEITLANGEIRKRPLIETNGETGEIVWDKGRDFATVRKVLSMPQVNIVKKTEVQTGGFSKESILPKRNSDKLIARKKDWDPKKYGGFDSPTVAYSVLVVAKVEKGKSKKLKSVKELLGITIMERSSFEKNPIDFLEAKGYKEVKKDLIIKLPKYSLFELENGRKRMLASAGELQKGNELALPSKYVNFLYLASHYEKLKGSPEDNEQKQLFVEQHKHYLDEIIEQISEFSKRVILADANLDKVLSAYNKHRDKPIREQAENIIHLFTLTNLGAPAAFKYFDTTIDRKRYTSTKEVLDATLIHQSITGLYETRIDLSQLGGDGGGSSEAAAKGGSGGTLNIEDEHRLHETSKEPDVSLGSTWLSDFPQAWAETGGMGLAVRQAPLIIPLKATSTPVSIKQYPMSQEARLGIKPHIQRLLDQGILVPCQSPWNTPLLPVKKPGTNDYRPVQDLREVNKRVEDIHPTVPNPYNLLSGLPPSHQWYTVLDLKDAFFCLRLHPTSQPLFAFEWRDPEMGISGQLTWTRLPQGFKNSPTLFDEALHRDLADFRIQHPDLILLQYVDDLLLAATSELDCQQGTRALLQTLGNLGYRASAKKAQICQKQVKYLGYLLKEGQRWLTEARKETVMGQPTPKTPRQLREFLGTAGFCRLWIPGFAEMAAPLYPLTKTGTLFNWGPDQQKAYQEIKQALLTAPALGLPDLTKPFELFVDEKQGYAKGVLTQKLGPWRRPVAYLSKKLDPVAAGWPPCLRMVAAIAVLTKDAGKLTMGQPLVILAPHAVEALVKQPPDRWLSNARMTHYQALLLDTDRVQFGPVVALNPATLLPLPEEGLQHNCLDILAEAHGTRPDLTDQPLPDADHTWYTDGSSLLQEGQRKAGAAVTTETEVIWAKALPAGTSAQRAELIALTQALKMAEGKKLNVYTDSRYAFATAHIHGEIYRRRGLLTSEGKEIKNKDEILALLKALFLPKRLSIIHCPGHQKGHSAEARGNRMADQAARKAAITETPDTSTLLAGKRTADGSEFEKRTADGSEFESPKKKAKVE

SEQ ID NO: 7089 - protein, 2096 aa, synthetic construct
MPAAKRVKLDGGDKKYSIGLDIGTNSVGWAVITDEYKVPSKKFKVLGNTDRHSIKKNLIGALLFDSGETAEATRLKRTARRRYTRRKNRICYLQEIFSNEMAKVDDSFFHRLEESFLVEEDKKHERHPIFGNIVDEVAYHEKYPTIYHLRKKLVDSTDKADLRLIYLALAHMIKFRGHFLIEGDLNPDNSDVDKLFIQLVQTYNQLFEENPINASGVDAKAILSARLSKSRRLENLIAQLPGEKKNGLFGNLIALSLGLTPNFKSNFDLAEDAKLQLSKDTYDDDLDNLLAQIGDQYADLFLAAKNLSDAILLSDILRVNTEITKAPLSASMIKRYDEHHQDLTLLKALVRQQLPEKYKEIFFDQSKNGYAGYIDGGASQEEFYKFIKPILEKMDGTEELLVKLNREDLLRKQRTFDNGSIPHQIHLGELHAILRRQEDFYPFLKDNREKIEKILTFRIPYYVGPLARGNSRFAWMTRKSEETITPWNFEEVVDKGASAQSFIERMTNFDKNLPNEKVLPKHSLLYEYFTVYNELTKVKYVTEGMRKPAFLSGEQKKAIVDLLFKTNRKVTVKQLKEDYFKKIECFDSVEISGVEDRFNASLGTYHDLLKIIKDKDFLDNEENEDILEDIVLTLTLFEDREMIEERLKTYAHLFDDKVMKQLKRRRYTGWGRLSRKLINGIRDKQSGKTILDFLKSDGFANRNFMQLIHDDSLTFKEDIQKAQVSGQGDSLHEHIANLAGSPAIKKGILQTVKVVDELVKVMGRHKPENIVIEMARENQTTQKGQKNSRERMKRIEEGIKELGSQILKEHPVENTQLQNEKLYLYYLQNGRDMYVDQELDINRLSDYDVDHIVPQSFLKDDSIDNKVLTRSDKARGKSDNVPSEEVVKKMKNYWRQLLNAKLITQRKFDNLTKAERGGLSELDKAGFIKRQLVETRQITKHVAQILDSRMNTKYDENDKLIREVKVITLKSKLVSDFRKDFQFYKVREINNYHHAHDAYLNAVVGTALIKKYPKLESEFVYGDYKVYDVRKMIAKSEQEIGKATAKYFFYSNIMNFFKTEITLANGEIRKRPLIETNGETGEIVWDKGRDFATVRKVLSMPQVNIVKKTEVQTGGFSKESILPKRNSDKLIARKKDWDPKKYGGFDSPTVAYSVLVVAKVEKGKSKKLKSVKELLGITIMERSSFEKNPIDFLEAKGYKEVKKDLIIKLPKYSLFELENGRKRMLASAGELQKGNELALPSKYVNFLYLASHYEKLKGSPEDNEQKQLFVEQHKHYLDEIIEQISEFSKRVILADANLDKVLSAYNKHRDKPIREQAENIIHLFTLTNLGAPAAFKYFDTTIDRKRYTSTKEVLDATLIHQSITGLYETRIDLSQLGGDGGGSSEAAAKGGSGGTLNIEDEHRLHETSKEPDVSLGSTWLSDFPQAWAETGGMGLAVRQAPLIIPLKATSTPVSIKQYPMSQEARLGIKPHIQRLLDQGILVPCQSPWNTPLLPVKKPGTNDYRPVQDLREVNKRVEDIHPTVPNPYNLLSGLPPSHQWYTVLDLKDAFFCLRLHPTSQPLFAFEWRDPEMGISGQLTWTRLPQGFKNSPTLFNEALHRDLADFRIQHPDLILLQYVDDLLLAATSELDCQQGTRALLQTLGNLGYRASAKKAQICQKQVKYLGYLLKEGQRWLTEARKETVMGQPTPKTPRQLREFLGTAGFCRLWIPGFAEMAAPLYPLTKPGTLFNWGPDQQKAYQEIKQALLTAPALGLPDLTKPFELFVDEKQGYAKGVLTQKLGPWRRPVAYLSKKLDPVAAGWPPCLRMVAAIAVLTKDAGKLTMGQPLVILAPHAVEALVKQPPDRWLSNARMTHYQALLLDTDRVQFGPVVALNPATLLPLPEEGLQHNCLDILAEAHGTRPDLTDQPLPDADHTWYTDGSSLLQEGQRKAGAAVTTETEVIWAKALPAGTSAQRAELIALTQALKMAEGKKLNVYTDSRYAFATAHIHGEIYRRRGWLTSEGKEIKNKDEILALLKALFLPKRLSIIHCPGHQKGHSAEARGNRMADQAARKAAITETPDTSTLLAGKRTADGSEFEKRTADGSEFESPKKKAKVE

SEQ ID NO: 7090 - protein, 2087 aa, synthetic construct
MPAAKRVKLDGGDKKYSIGLDIGTNSVGWAVITDEYKVPSKKFKVLGNTDRHSIKKNLIGALLFDSGETAEATRLKRTARRRYTRRKNRICYLQEIFSNEMAKVDDSFFHRLEESFLVEEDKKHERHPIFGNIVDEVAYHEKYPTIYHLRKKLVDSTDKADLRLIYLALAHMIKFRGHFLIEGDLNPDNSDVDKLFIQLVQTYNQLFEENPINASGVDAKAILSARLSKSRRLENLIAQLPGEKKNGLFGNLIALSLGLTPNFKSNFDLAEDAKLQLSKDTYDDDLDNLLAQIGDQYADLFLAAKNLSDAILLSDILRVNTEITKAPLSASMIKRYDEHHQDLTLLKALVRQQLPEKYKEIFFDQSKNGYAGYIDGGASQEEFYKFIKPILEKMDGTEELLVKLNREDLLRKQRTFDNGSIPHQIHLGELHAILRRQEDFYPFLKDNREKIEKILTFRIPYYVGPLARGNSRFAWMTRKSEETITPWNFEEVVDKGASAQSFIERMTNFDKNLPNEKVLPKHSLLYEYFTVYNELTKVKYVTEGMRKPAFLSGEQKKAIVDLLFKTNRKVTVKQLKEDYFKKIECFDSVEISGVEDRFNASLGTYHDLLKIIKDKDFLDNEENEDILEDIVLTLTLFEDREMIEERLKTYAHLFDDKVMKQLKRRRYTGWGRLSRKLINGIRDKQSGKTILDFLKSDGFANRNFMQLIHDDSLTFKEDIQKAQVSGQGDSLHEHIANLAGSPAIKKGILQTVKVVDELVKVMGRHKPENIVIEMARENQTTQKGQKNSRERMKRIEEGIKELGSQILKEHPVENTQLQNEKLYLYYLQNGRDMYVDQELDINRLSDYDVDHIVPQSFLKDDSIDNKVLTRSDKARGKSDNVPSEEVVKKMKNYWRQLLNAKLITQRKFDNLTKAERGGLSELDKAGFIKRQLVETRQITKHVAQILDSRMNTKYDENDKLIREVKVITLKSKLVSDFRKDFQFYKVREINNYHHAHDAYLNAVVGTALIKKYPKLESEFVYGDYKVYDVRKMIAKSEQEIGKATAKYFFYSNIMNFFKTEITLANGEIRKRPLIETNGETGEIVWDKGRDFATVRKVLSMPQVNIVKKTEVQTGGFSKESILPKRNSDKLIARKKDWDPKKYGGFDSPTVAYSVLVVAKVEKGKSKKLKSVKELLGITIMERSSFEKNPIDFLEAKGYKEVKKDLIIKLPKYSLFELENGRKRMLASAGELQKGNELALPSKYVNFLYLASHYEKLKGSPEDNEQKQLFVEQHKHYLDEIIEQISEFSKRVILADANLDKVLSAYNKHRDKPIREQAENIIHLFTLTNLGAPAAFKYFDTTIDRKRYTSTKEVLDATLIHQSITGLYETRIDLSQLGGDGGGSSEAAAKGGSGGVPWLMKKPLQLTVLVPLHEYQERLLQQTALPKEQKELLQKLFLKYDALWQHWENQVGHRRIKPHNIATGTLAPRPQKQYPINPKAKPSIQIVIDDLLKQGVLIQQNSTMNTPVYPVPKPDGKWRMVLDYREVNKTIPLIAAQNQHSAGILSSIYRGKYKTTLDLTNGFWAHPITPESYWLTAFTWQGKQYCWTRLPQGFLNSPALFTADVVDLLKEIPNVQAYVDDIYISHDDPQEHLEQLEKIFSILLNAGYVVSLKKSEIAQREVEFLGFNITKEGRGLTDTFKQKLLNITPPKDLKQLQSILGLLNFARNFIPNYSELVKPLYTIVANANGKFISWTEDNSNQLQHIISVLNQADNLEERNPETRLIIKVNSSPSAGYIRYYNEGSKRPIMYVNYIFSKAEAKFTQTEKLLTTMHKGLIKAMDLAMGQEILVYSPIVSMTKIQRTPLPERKALPVRWITWMTYLEDPRIQFHYDKSLPELQQIPNVTEDVIAKTKHPSEFAMVFYTDGSAIKHPDVNKSHSAGMGIAQVQFIPEYKIVHQWSIPLGDHTAQLAEIAAVEFACKKALKISGPVLIVTDSFYVAESANKELPYWKSNGFLNNKKKPLRHVSKWKSIAECLQLKPDIIIMHEKGHQQPMTTLHTEGNNLADKLATQGSYVVHAGKRTADGSEFEKRTADGSEFESPKKKAKVE

SEQ ID NO: 7091 - protein, 2087 aa, synthetic construct
MPAAKRVKLDGGDKKYSIGLDIGTNSVGWAVITDEYKVPSKKFKVLGNTDRHSIKKNLIGALLFDSGETAEATRLKRTARRRYTRRKNRICYLQEIFSNEMAKVDDSFFHRLEESFLVEEDKKHERHPIFGNIVDEVAYHEKYPTIYHLRKKLVDSTDKADLRLIYLALAHMIKFRGHFLIEGDLNPDNSDVDKLFIQLVQTYNQLFEENPINASGVDAKAILSARLSKSRRLENLIAQLPGEKKNGLFGNLIALSLGLTPNFKSNFDLAEDAKLQLSKDTYDDDLDNLLAQIGDQYADLFLAAKNLSDAILLSDILRVNTEITKAPLSASMIKRYDEHHQDLTLLKALVRQQLPEKYKEIFFDQSKNGYAGYIDGGASQEEFYKFIKPILEKMDGTEELLVKLNREDLLRKQRTFDNGSIPHQIHLGELHAILRRQEDFYPFLKDNREKIEKILTFRIPYYVGPLARGNSRFAWMTRKSEETITPWNFEEVVDKGASAQSFIERMTNFDKNLPNEKVLPKHSLLYEYFTVYNELTKVKYVTEGMRKPAFLSGEQKKAIVDLLFKTNRKVTVKQLKEDYFKKIECFDSVEISGVEDRFNASLGTYHDLLKIIKDKDFLDNEENEDILEDIVLTLTLFEDREMIEERLKTYAHLFDDKVMKQLKRRRYTGWGRLSRKLINGIRDKQSGKTILDFLKSDGFANRNFMQLIHDDSLTFKEDIQKAQVSGQGDSLHEHIANLAGSPAIKKGILQTVKVVDELVKVMGRHKPENIVIEMARENQTTQKGQKNSRERMKRIEEGIKELGSQILKEHPVENTQLQNEKLYLYYLQNGRDMYVDQELDINRLSDYDVDHIVPQSFLKDDSIDNKVLTRSDKARGKSDNVPSEEVVKKMKNYWRQLLNAKLITQRKFDNLTKAERGGLSELDKAGFIKRQLVETRQITKHVAQILDSRMNTKYDENDKLIREVKVITLKSKLVSDFRKDFQFYKVREINNYHHAHDAYLNAVVGTALIKKYPKLESEFVYGDYKVYDVRKMIAKSEQEIGKATAKYFFYSNIMNFFKTEITLANGEIRKRPLIETNGETGEIVWDKGRDFATVRKVLSMPQVNIVKKTEVQTGGFSKESILPKRNSDKLIARKKDWDPKKYGGFDSPTVAYSVLVVAKVEKGKSKKLKSVKELLGITIMERSSFEKNPIDFLEAKGYKEVKKDLIIKLPKYSLFELENGRKRMLASAGELQKGNELALPSKYVNFLYLASHYEKLKGSPEDNEQKQLFVEQHKHYLDEIIEQISEFSKRVILADANLDKVLSAYNKHRDKPIREQAENIIHLFTLTNLGAPAAFKYFDTTIDRKRYTSTKEVLDATLIHQSITGLYETRIDLSQLGGDGGGSSEAAAKGGSGGIPWLMKKPLQLTTLVPLQEYEERLLKQTMLTGSYKEKLQSLFLKYDALWQHWENQVGHRRIKPHHIATGTVNPRPQKQYPINPKAKASIQTVINDLLKQGVLIQQNSIMNTPVYPVPKPDGKWRMVLDYREVNKTIPLIAAQNQHSAGILSSIFRGKYKTTLDLSNGFWAHSITPESYWLTAFTWLGQQYCWTRLPQGFLNSPALFNADVVDLLKEVPNVQVYVDDIYISHDDPREHLEQLEKVFSLLLNAGYVVSLKKSEIAQHEVEFLGFNITKEGRGLTETFKQKLLNITPPRDLKQLQSILGLLNFARNFIPNFSELVKPLYNIIATAPGKYITWTTDNSQQLQNIISMLNSAENLEERNPEVRLIMKVNTSPSAGYIRFYNEFAKRPIMYLNYVYTKAEVKFTNTEKLLTTIHKGLIKALDLGMGQEILVYSPIVSMTKIQKTPLPERKALPIRWITWMSYLEDPRIQFHYDKTLPELQQVPTVTDDIIAKIKHPSEFSMVFYTDGSAIKHPNVNKSHNAGMGIAQVQFKPEFTVINTWSIPLGDHTAQLAEVAAVEFACKKALKIDGPVLIVTDSFYVAESVNKELPYWQSNGFFNNKKKPLKHVSKWKSIADCIQLKPDIIIIHEKGHQPTASTFHTEGNNLADKLATQGSYVVNAGKRTADGSEFEKRTADGSEFESPKKKAKVE

SEQ ID NO: 7092 - protein, 2087 aa, synthetic construct
MPAAKRVKLDGGDKKYSIGLDIGTNSVGWAVITDEYKVPSKKFKVLGNTDRHSIKKNLIGALLFDSGETAEATRLKRTARRRYTRRKNRICYLQEIFSNEMAKVDDSFFHRLEESFLVEEDKKHERHPIFGNIVDEVAYHEKYPTIYHLRKKLVDSTDKADLRLIYLALAHMIKFRGHFLIEGDLNPDNSDVDKLFIQLVQTYNQLFEENPINASGVDAKAILSARLSKSRRLENLIAQLPGEKKNGLFGNLIALSLGLTPNFKSNFDLAEDAKLQLSKDTYDDDLDNLLAQIGDQYADLFLAAKNLSDAILLSDILRVNTEITKAPLSASMIKRYDEHHQDLTLLKALVRQQLPEKYKEIFFDQSKNGYAGYIDGGASQEEFYKFIKPILEKMDGTEELLVKLNREDLLRKQRTFDNGSIPHQIHLGELHAILRRQEDFYPFLKDNREKIEKILTFRIPYYVGPLARGNSRFAWMTRKSEETITPWNFEEVVDKGASAQSFIERMTNFDKNLPNEKVLPKHSLLYEYFTVYNELTKVKYVTEGMRKPAFLSGEQKKAIVDLLFKTNRKVTVKQLKEDYFKKIECFDSVEISGVEDRFNASLGTYHDLLKIIKDKDFLDNEENEDILEDIVLTLTLFEDREMIEERLKTYAHLFDDKVMKQLKRRRYTGWGRLSRKLINGIRDKQSGKTILDFLKSDGFANRNFMQLIHDDSLTFKEDIQKAQVSGQGDSLHEHIANLAGSPAIKKGILQTVKVVDELVKVMGRHKPENIVIEMARENQTTQKGQKNSRERMKRIEEGIKELGSQILKEHPVENTQLQNEKLYLYYLQNGRDMYVDQELDINRLSDYDVDHIVPQSFLKDDSIDNKVLTRSDKARGKSDNVPSEEVVKKMKNYWRQLLNAKLITQRKFDNLTKAERGGLSELDKAGFIKRQLVETRQITKHVAQILDSRMNTKYDENDKLIREVKVITLKSKLVSDFRKDFQFYKVREINNYHHAHDAYLNAVVGTALIKKYPKLESEFVYGDYKVYDVRKMIAKSEQEIGKATAKYFFYSNIMNFFKTEITLANGEIRKRPLIETNGETGEIVWDKGRDFATVRKVLSMPQVNIVKKTEVQTGGFSKESILPKRNSDKLIARKKDWDPKKYGGFDSPTVAYSVLVVAKVEKGKSKKLKSVKELLGITIMERSSFEKNPIDFLEAKGYKEVKKDLIIKLPKYSLFELENGRKRMLASAGELQKGNELALPSKYVNFLYLASHYEKLKGSPEDNEQKQLFVEQHKHYLDEIIEQISEFSKRVILADANLDKVLSAYNKHRDKPIREQAENIIHLFTLTNLGAPAAFKYFDTTIDRKRYTSTKEVLDATLIHQSITGLYETRIDLSQLGGDGGGSSEAAAKGGSGGIPWLMKKPLQLTTLVPLQEYEERLLKQTMLTGSYKEKLQSLFLKYDALWQHWENQVGHRRIKPHHIATGTVNPRPQKQYPINPKAKASIQTVINDLLKQGVLIQQNSIMNTPVYPVPKPDGKWRMVLDYREVNKTIPLIAAQNQHSAGILSSIFRGKYKTTLDLSNGFWAHSITPESYWLTAFTWLGQQYCWTRLPQGFLNSPALFNADVVDLLKEVPNVQVYVDDIYISHDDPREHLEQLEKVFSLLLNAGYVVSLKKSEIAQHEVEFLGFNITKEGRGLTETFKQKLLNITPPRDLKQLQSILGKLNFARNFIPNFSELVKPLYNIIATAPGKYITWTTDNSQQLQNIISMLNSAENLEERNPEVRLIMKVNTSPSAGYIRFYNEFAKRPIMYLNYVYTKAEVKFTNTEKLLTTIHKGLIKALDLGMGQEILVYSPIVSMTKIQKTPLPERKALPIRWITWMSYLEDPRIQFHYDKTLPELQQVPTVTDDIIAKIKHPSEFSMVFYTDGSAIKHPNVNKSHNAGMGIAQVQFKPEFTVINTWSIPLGDHTAQLAEVAAVEFACKKALKIDGPVLIVTDSFYVAESVNKELPYWQSNGFFNNKKKPLKHVSKWKSIADCIQLKPDIIIIHEKGHQPTASTFHTEGNNLADKLATQGSYVVNAGKRTADGSEFEKRTADGSEFESPKKKAKVE

SEQ ID NO: 7093 - protein, 2094 aa, synthetic construct
MPAAKRVKLDGGDKKYSIGLDIGTNSVGWAVITDEYKVPSKKFKVLGNTDRHSIKKNLIGALLFDSGETAEATRLKRTARRRYTRRKNRICYLQEIFSNEMAKVDDSFFHRLEESFLVEEDKKHERHPIFGNIVDEVAYHEKYPTIYHLRKKLVDSTDKADLRLIYLALAHMIKFRGHFLIEGDLNPDNSDVDKLFIQLVQTYNQLFEENPINASGVDAKAILSARLSKSRRLENLIAQLPGEKKNGLFGNLIALSLGLTPNFKSNFDLAEDAKLQLSKDTYDDDLDNLLAQIGDQYADLFLAAKNLSDAILLSDILRVNTEITKAPLSASMIKRYDEHHQDLTLLKALVRQQLPEKYKEIFFDQSKNGYAGYIDGGASQEEFYKFIKPILEKMDGTEELLVKLNREDLLRKQRTFDNGSIPHQIHLGELHAILRRQEDFYPFLKDNREKIEKILTFRIPYYVGPLARGNSRFAWMTRKSEETITPWNFEEVVDKGASAQSFIERMTNFDKNLPNEKVLPKHSLLYEYFTVYNELTKVKYVTEGMRKPAFLSGEQKKAIVDLLFKTNRKVTVKQLKEDYFKKIECFDSVEISGVEDRFNASLGTYHDLLKIIKDKDFLDNEENEDILEDIVLTLTLFEDREMIEERLKTYAHLFDDKVMKQLKRRRYTGWGRLSRKLINGIRDKQSGKTILDFLKSDGFANRNFMQLIHDDSLTFKEDIQKAQVSGQGDSLHEHIANLAGSPAIKKGILQTVKVVDELVKVMGRHKPENIVIEMARENQTTQKGQKNSRERMKRIEEGIKELGSQILKEHPVENTQLQNEKLYLYYLQNGRDMYVDQELDINRLSDYDVDHIVPQSFLKDDSIDNKVLTRSDKARGKSDNVPSEEVVKKMKNYWRQLLNAKLITQRKFDNLTKAERGGLSELDKAGFIKRQLVETRQITKHVAQILDSRMNTKYDENDKLIREVKVITLKSKLVSDFRKDFQFYKVREINNYHHAHDAYLNAVVGTALIKKYPKLESEFVYGDYKVYDVRKMIAKSEQEIGKATAKYFFYSNIMNFFKTEITLANGEIRKRPLIETNGETGEIVWDKGRDFATVRKVLSMPQVNIVKKTEVQTGGFSKESILPKRNSDKLIARKKDWDPKKYGGFDSPTVAYSVLVVAKVEKGKSKKLKSVKELLGITIMERSSFEKNPIDFLEAKGYKEVKKDLIIKLPKYSLFELENGRKRMLASAGELQKGNELALPSKYVNFLYLASHYEKLKGSPEDNEQKQLFVEQHKHYLDEIIEQISEFSKRVILADANLDKVLSAYNKHRDKPIREQAENIIHLFTLTNLGAPAAFKYFDTTIDRKRYTSTKEVLDATLIHQSITGLYETRIDLSQLGGDGGGSSEAAAKGGSGGVLNLEEEYRLHEKPVPSSIDPSWLQLFPTVWAERAGMGLANQVPPVVVELRSGASPVAVRQYPMSKEAREGIRPHIQRFLDLGVLVPCQSPWNTPLLPVKKPGTNDYRPVQDLREINKRVQDIHPTVPNPYNLLSSLPPSHTWYSVLDLKDAFFCLKLHPNSQPLFAFEWRDPEKGNTGQLTWTRLPQGFKNSPTLFNEALHRDLAPFRALNPQVVLLQYVDDLLVAAPTYRDCKEGTQKLLQELSKLGYRVSAKKAQLCQKEVTYLGYLLKEGKRWLTPARKATVMKIPPPTTPRQVREFLGKAGFCRLFIPGFASLAAPLYPLTKPSIPFIWTEEHQKAFDRIKEALLSAPALALPDLTKPFTLYVDERAGVARGVLTQTLGPWRRPVAYLSKKLDPVASGWPTCLKAVAAVALLLKDADKLTLGQNVTVIASHSLESIVRQPPDRWMTNARMTHYQSLLLNERVSFAPPAVLNPATLLPVESEATPVHRCSEILAEETGTRRDLKDQPLPGVPAWYTDGSSFIAEGKRRAGAAIVDGKRTVWASSLPEGTSAQKAELVALTQALRLAEGKDINIYTDSRYAFATAHIHGAIYKQRGWLTSAGKDIKNKEEILALLEAIHLPKRVAIIHCPGHQKGNDPVATGNRRADEAAKQAALSTRVLAETTKPAGKRTADGSEFEKRTADGSEFESPKKKAKVE

SEQ ID NO: 7094 - protein, 2096 aa, synthetic construct
MPAAKRVKLDGGDKKYSIGLDIGTNSVGWAVITDEYKVPSKKFKVLGNTDRHSIKKNLIGALLFDSGETAEATRLKRTARRRYTRRKNRICYLQEIFSNEMAKVDDSFFHRLEESFLVEEDKKHERHPIFGNIVDEVAYHEKYPTIYHLRKKLVDSTDKADLRLIYLALAHMIKFRGHFLIEGDLNPDNSDVDKLFIQLVQTYNQLFEENPINASGVDAKAILSARLSKSRRLENLIAQLPGEKKNGLFGNLIALSLGLTPNFKSNFDLAEDAKLQLSKDTYDDDLDNLLAQIGDQYADLFLAAKNLSDAILLSDILRVNTEITKAPLSASMIKRYDEHHQDLTLLKALVRQQLPEKYKEIFFDQSKNGYAGYIDGGASQEEFYKFIKPILEKMDGTEELLVKLNREDLLRKQRTFDNGSIPHQIHLGELHAILRRQEDFYPFLKDNREKIEKILTFRIPYYVGPLARGNSRFAWMTRKSEETITPWNFEEVVDKGASAQSFIERMTNFDKNLPNEKVLPKHSLLYEYFTVYNELTKVKYVTEGMRKPAFLSGEQKKAIVDLLFKTNRKVTVKQLKEDYFKKIECFDSVEISGVEDRFNASLGTYHDLLKIIKDKDFLDNEENEDILEDIVLTLTLFEDREMIEERLKTYAHLFDDKVMKQLKRRRYTGWGRLSRKLINGIRDKQSGKTILDFLKSDGFANRNFMQLIHDDSLTFKEDIQKAQVSGQGDSLHEHIANLAGSPAIKKGILQTVKVVDELVKVMGRHKPENIVIEMARENQTTQKGQKNSRERMKRIEEGIKELGSQILKEHPVENTQLQNEKLYLYYLQNGRDMYVDQELDINRLSDYDVDHIVPQSFLKDDSIDNKVLTRSDKARGKSDNVPSEEVVKKMKNYWRQLLNAKLITQRKFDNLTKAERGGLSELDKAGFIKRQLVETRQITKHVAQILDSRMNTKYDENDKLIREVKVITLKSKLVSDFRKDFQFYKVREINNYHHAHDAYLNAVVGTALIKKYPKLESEFVYGDYKVYDVRKMIAKSEQEIGKATAKYFFYSNIMNFFKTEITLANGEIRKRPLIETNGETGEIVWDKGRDFATVRKVLSMPQVNIVKKTEVQTGGFSKESILPKRNSDKLIARKKDWDPKKYGGFDSPTVAYSVLVVAKVEKGKSKKLKSVKELLGITIMERSSFEKNPIDFLEAKGYKEVKKDLIIKLPKYSLFELENGRKRMLASAGELQKGNELALPSKYVNFLYLASHYEKLKGSPEDNEQKQLFVEQHKHYLDEIIEQISEFSKRVILADANLDKVLSAYNKHRDKPIREQAENIIHLFTLTNLGAPAAFKYFDTTIDRKRYTSTKEVLDATLIHQSITGLYETRIDLSQLGGDGGGSSEAAAKGGSGGTLNIEDEYRLHETSKEPDVPLGSTWLSDFPQAWAETGGMGLAVRQAPLIIPLKATSTPVSIKQYPMSQEARLGIKPHIQRLLDQGILVPCQSPWNTPLLPVKKPGTNDYRPVQDLREVNKRVEDIHPTVPNPYNLLSGLPPSHQWYTVLDLKDAFFCLRLHPTSQPLFAFEWRDPEMGISGQLTWTRLPQGFKNSPTLFDEALHRDLADFRIQHPDLILLQYVDDLLLAATSEQDCQRGTRALLQTLGNLGYRASAKKAQICQKQVKYLGYLLKEGQRWLTEARKETVMGQPTPKTPRQLREFLGTAGFCRLWIPGFAEMAAPLYPLTKTGTLFNWGPDQQKAYQEIKQALLTAPALGLPDLTKPFELFVDEKQGYAKGVLTQKLGPWRRPVAYLSKKLDPVAAGWPPCLRMVAAIAVLTKDAGKLTMGQPLVILAPHAVEALVKQPPDRWLSNARMTHYQAMLLDTDRVQFGPVVALNPATLLPLPEKEAPHDCLEILAETHGTRPDLTDQPIPDADYTWYTDGSSFLQEGQRRAGAAVTTETEVIWARALPAGTSAQRAELIALTQALKMAEGKKLNVYTDSRYAFATAHVHGEIYRRRGLLTSEGREIKNKNEILALLKALFLPKRLSIIHCPGHQKGNSAEARGNRMADQAAREAAMKAVLETSTLLAGKRTADGSEFEKRTADGSEFESPKKKAKVE

SEQ ID NO: 7095 - protein, 2096 aa, synthetic construct
MPAAKRVKLDGGDKKYSIGLDIGTNSVGWAVITDEYKVPSKKFKVLGNTDRHSIKKNLIGALLFDSGETAEATRLKRTARRRYTRRKNRICYLQEIFSNEMAKVDDSFFHRLEESFLVEEDKKHERHPIFGNIVDEVAYHEKYPTIYHLRKKLVDSTDKADLRLIYLALAHMIKFRGHFLIEGDLNPDNSDVDKLFIQLVQTYNQLFEENPINASGVDAKAILSARLSKSRRLENLIAQLPGEKKNGLFGNLIALSLGLTPNFKSNFDLAEDAKLQLSKDTYDDDLDNLLAQIGDQYADLFLAAKNLSDAILLSDILRVNTEITKAPLSASMIKRYDEHHQDLTLLKALVRQQLPEKYKEIFFDQSKNGYAGYIDGGASQEEFYKFIKPILEKMDGTEELLVKLNREDLLRKQRTFDNGSIPHQIHLGELHAILRRQEDFYPFLKDNREKIEKILTFRIPYYVGPLARGNSRFAWMTRKSEETITPWNFEEVVDKGASAQSFIERMTNFDKNLPNEKVLPKHSLLYEYFTVYNELTKVKYVTEGMRKPAFLSGEQKKAIVDLLFKTNRKVTVKQLKEDYFKKIECFDSVEISGVEDRFNASLGTYHDLLKIIKDKDFLDNEENEDILEDIVLTLTLFEDREMIEERLKTYAHLFDDKVMKQLKRRRYTGWGRLSRKLINGIRDKQSGKTILDFLKSDGFANRNFMQLIHDDSLTFKEDIQKAQVSGQGDSLHEHIANLAGSPAIKKGILQTVKVVDELVKVMGRHKPENIVIEMARENQTTQKGQKNSRERMKRIEEGIKELGSQILKEHPVENTQLQNEKLYLYYLQNGRDMYVDQELDINRLSDYDVDHIVPQSFLKDDSIDNKVLTRSDKARGKSDNVPSEEVVKKMKNYWRQLLNAKLITQRKFDNLTKAERGGLSELDKAGFIKRQLVETRQITKHVAQILDSRMNTKYDENDKLIREVKVITLKSKLVSDFRKDFQFYKVREINNYHHAHDAYLNAVVGTALIKKYPKLESEFVYGDYKVYDVRKMIAKSEQEIGKATAKYFFYSNIMNFFKTEITLANGEIRKRPLIETNGETGEIVWDKGRDFATVRKVLSMPQVNIVKKTEVQTGGFSKESILPKRNSDKLIARKKDWDPKKYGGFDSPTVAYSVLVVAKVEKGKSKKLKSVKELLGITIMERSSFEKNPIDFLEAKGYKEVKKDLIIKLPKYSLFELENGRKRMLASAGELQKGNELALPSKYVNFLYLASHYEKLKGSPEDNEQKQLFVEQHKHYLDEIIEQISEFSKRVILADANLDKVLSAYNKHRDKPIREQAENIIHLFTLTNLGAPAAFKYFDTTIDRKRYTSTKEVLDATLIHQSITGLYETRIDLSQLGGDGGGSSEAAAKGGSGGTLNIEDEYRLHETSKEPDVPLGSTWLSDFPQAWAETGGMGLAVRQAPLIIPLKATSTPVSIKQYPMSQEARLGIKPHIQRLLDQGILVPCQSPWNTPLLPVKKPGTNDYRPVQDLREVNKRVEDIHPTVPNPYNLLSGLPPSHQWYTVLDLKDAFFCLRLHPTSQPLFAFEWRDPEMGISGQLTWTRLPQGFKNSPTLFNEALHRDLADFRIQHPDLILLQYVDDLLLAATSEQDCQRGTRALLQTLGNLGYRASAKKAQICQKQVKYLGYLLKEGQRWLTEARKETVMGQPTPKTPRQLREFLGTAGFCRLWIPGFAEMAAPLYPLTKPGTLFNWGPDQQKAYQEIKQALLTAPALGLPDLTKPFELFVDEKQGYAKGVLTQKLGPWRRPVAYLSKKLDPVAAGWPPCLRMVAAIAVLTKDAGKLTMGQPLVILAPHAVEALVKQPPDRWLSNARMTHYQAMLLDTDRVQFGPVVALNPATLLPLPEKEAPHDCLEILAETHGTRPDLTDQPIPDADYTWYTDGSSFLQEGQRRAGAAVTTETEVIWARALPAGTSAQRAELIALTQALKMAEGKKLNVYTDSRYAFATAHVHGEIYRRRGWLTSEGREIKNKNEILALLKALFLPKRLSIIHCPGHQKGNSAEARGNRMADQAAREAAMKAVLETSTLLAGKRTADGSEFEKRTADGSEFESPKKKAKVE

SEQ ID NO: 7096 - protein, 2098 aa, synthetic construct
MPAAKRVKLDGGDKKYSIGLDIGTNSVGWAVITDEYKVPSKKFKVLGNTDRHSIKKNLIGALLFDSGETAEATRLKRTARRRYTRRKNRICYLQEIFSNEMAKVDDSFFHRLEESFLVEEDKKHERHPIFGNIVDEVAYHEKYPTIYHLRKKLVDSTDKADLRLIYLALAHMIKFRGHFLIEGDLNPDNSDVDKLFIQLVQTYNQLFEENPINASGVDAKAILSARLSKSRRLENLIAQLPGEKKNGLFGNLIALSLGLTPNFKSNFDLAEDAKLQLSKDTYDDDLDNLLAQIGDQYADLFLAAKNLSDAILLSDILRVNTEITKAPLSASMIKRYDEHHQDLTLLKALVRQQLPEKYKEIFFDQSKNGYAGYIDGGASQEEFYKFIKPILEKMDGTEELLVKLNREDLLRKQRTFDNGSIPHQIHLGELHAILRRQEDFYPFLKDNREKIEKILTFRIPYYVGPLARGNSRFAWMTRKSEETITPWNFEEVVDKGASAQSFIERMTNFDKNLPNEKVLPKHSLLYEYFTVYNELTKVKYVTEGMRKPAFLSGEQKKAIVDLLFKTNRKVTVKQLKEDYFKKIECFDSVEISGVEDRFNASLGTYHDLLKIIKDKDFLDNEENEDILEDIVLTLTLFEDREMIEERLKTYAHLFDDKVMKQLKRRRYTGWGRLSRKLINGIRDKQSGKTILDFLKSDGFANRNFMQLIHDDSLTFKEDIQKAQVSGQGDSLHEHIANLAGSPAIKKGILQTVKVVDELVKVMGRHKPENIVIEMARENQTTQKGQKNSRERMKRIEEGIKELGSQILKEHPVENTQLQNEKLYLYYLQNGRDMYVDQELDINRLSDYDVDHIVPQSFLKDDSIDNKVLTRSDKARGKSDNVPSEEVVKKMKNYWRQLLNAKLITQRKFDNLTKAERGGLSELDKAGFIKRQLVETRQITKHVAQILDSRMNTKYDENDKLIREVKVITLKSKLVSDFRKDFQFYKVREINNYHHAHDAYLNAVVGTALIKKYPKLESEFVYGDYKVYDVRKMIAKSEQEIGKATAKYFFYSNIMNFFKTEITLANGEIRKRPLIETNGETGEIVWDKGRDFATVRKVLSMPQVNIVKKTEVQTGGFSKESILPKRNSDKLIARKKDWDPKKYGGFDSPTVAYSVLVVAKVEKGKSKKLKSVKELLGITIMERSSFEKNPIDFLEAKGYKEVKKDLIIKLPKYSLFELENGRKRMLASAGELQKGNELALPSKYVNFLYLASHYEKLKGSPEDNEQKQLFVEQHKHYLDEIIEQISEFSKRVILADANLDKVLSAYNKHRDKPIREQAENIIHLFTLTNLGAPAAFKYFDTTIDRKRYTSTKEVLDATLIHQSITGLYETRIDLSQLGGDGGEAAAKGGSGSSGGTAPLEEEYRLFLEAPIQNVTLLEQWKREIPKVWAEINPPGLASTQAPIHVQLLSTALPVRVRQYPITLEAKRSLRETIRKFRAAGILRPVHSPWNTPLLPVRKSGTSEYRMVQDLREVNKRVETIHPTVPNPYTLLSLLPPDRIWYSVLDLKDAFFCIPLAPESQLIFAFEWADAEEGESGQLTWTRLPQGFKNSPTLFNEALNRDLQGFRLDHPSVSLLQYVDDLLIAADTQAACLSATRDLLMTLAELGYRVSGKKAQLCQEEVTYLGFKIHKGSRSLSNSRTQAILQIPVPKTKRQVREFLGTIGYCRLWIPGFAELAQPLYAATRPGNDPLVWGEKEEEAFQSLKLALTQPPALALPSLDKPFQLFVEETSGAAKGVLTQALGPWKRPVAYLSKRLDPVAAGWPRCLRAIAAAALLTREASKLTFGQDIEITSSHNLESLLRSPPDKWLTNARITQYQVLLLDPPRVRFKQTAALNPATLLPETDDTLPIHHCLDTLDSLTSTRPDLTDQPLAQAEATLFTDGSSYIRDGKRYAGAAVVTLDSVIWAEPLPIGTSAQKAELIALTKALEWSKDKSVNIYTDSRYAFATLHVHGMIYRERGWLTAGGKAIKNAPEILALLTAVWLPKRVAVMHCKGHQKDDAPTSTGNRRADEVAREVAIRPLSTQATISAGKRTADGSEFEKRTADGSEFESPKKKAKVE

SEQ ID NO: 7097 - protein, 2102 aa, synthetic construct
MPAAKRVKLDGGDKKYSIGLDIGTNSVGWAVITDEYKVPSKKFKVLGNTDRHSIKKNLIGALLFDSGETAEATRLKRTARRRYTRRKNRICYLQEIFSNEMAKVDDSFFHRLEESFLVEEDKKHERHPIFGNIVDEVAYHEKYPTIYHLRKKLVDSTDKADLRLIYLALAHMIKFRGHFLIEGDLNPDNSDVDKLFIQLVQTYNQLFEENPINASGVDAKAILSARLSKSRRLENLIAQLPGEKKNGLFGNLIALSLGLTPNFKSNFDLAEDAKLQLSKDTYDDDLDNLLAQIGDQYADLFLAAKNLSDAILLSDILRVNTEITKAPLSASMIKRYDEHHQDLTLLKALVRQQLPEKYKEIFFDQSKNGYAGYIDGGASQEEFYKFIKPILEKMDGTEELLVKLNREDLLRKQRTFDNGSIPHQIHLGELHAILRRQEDFYPFLKDNREKIEKILTFRIPYYVGPLARGNSRFAWMTRKSEETITPWNFEEVVDKGASAQSFIERMTNFDKNLPNEKVLPKHSLLYEYFTVYNELTKVKYVTEGMRKPAFLSGEQKKAIVDLLFKTNRKVTVKQLKEDYFKKIECFDSVEISGVEDRFNASLGTYHDLLKIIKDKDFLDNEENEDILEDIVLTLTLFEDREMIEERLKTYAHLFDDKVMKQLKRRRYTGWGRLSRKLINGIRDKQSGKTILDFLKSDGFANRNFMQLIHDDSLTFKEDIQKAQVSGQGDSLHEHIANLAGSPAIKKGILQTVKVVDELVKVMGRHKPENIVIEMARENQTTQKGQKNSRERMKRIEEGIKELGSQILKEHPVENTQLQNEKLYLYYLQNGRDMYVDQELDINRLSDYDVDHIVPQSFLKDDSIDNKVLTRSDKARGKSDNVPSEEVVKKMKNYWRQLLNAKLITQRKFDNLTKAERGGLSELDKAGFIKRQLVETRQITKHVAQILDSRMNTKYDENDKLIREVKVITLKSKLVSDFRKDFQFYKVREINNYHHAHDAYLNAVVGTALIKKYPKLESEFVYGDYKVYDVRKMIAKSEQEIGKATAKYFFYSNIMNFFKTEITLANGEIRKRPLIETNGETGEIVWDKGRDFATVRKVLSMPQVNIVKKTEVQTGGFSKESILPKRNSDKLIARKKDWDPKKYGGFDSPTVAYSVLVVAKVEKGKSKKLKSVKELLGITIMERSSFEKNPIDFLEAKGYKEVKKDLIIKLPKYSLFELENGRKRMLASAGELQKGNELALPSKYVNFLYLASHYEKLKGSPEDNEQKQLFVEQHKHYLDEIIEQISEFSKRVILADANLDKVLSAYNKHRDKPIREQAENIIHLFTLTNLGAPAAFKYFDTTIDRKRYTSTKEVLDATLIHQSITGLYETRIDLSQLGGDGGEAAAKGGSGSSGGTVSLQDEHRLFDIPVTTSLPDVWLQDFPQAWAETGGLGRAKCQAPIIIDLKPTAVPVSIKQYPMSLEAHMGIRQHIIKFLELGVLRPCRSPWNTPLLPVKKPGTQDYRPVQDLREINKRTVDIHPTVPNPYNLLSTLKPDYSWYTVLDLKDAFFCLPLAPQSQELFAFEWKDPERGISGQLTWTRLPQGFKNSPTLFNEALHRDLTDFRTQHPEVTLLQYVDDLLLAAPTKKACTQGTRHLLQELGEKGYRASAKKAQICQTKVTYLGYILSEGKRWLTPGRIETVARIPPPRNPREVREFLGTAGFCRLWIPGFAELAAPLYALTKPSTPFTWQTEHQLAFEALKKALLSAPALGLPDTSKPFTLFLDERQGIAKGVLTQKLGPWKRPVAYLSKKLDPVAAGWPPCLRIMAATAMLVKDSAKLTLGQPLTVITPHTLEAIVRQPPDRWITNARLTHYQALLLDTDRVQFGPPVTLNPATLLPVPENQPSPHDCRQVLAETHGTREDLKDQELPDADHTWYTDGSSYLDSGTRRAGAAVVDGHNTIWAQSLPPGTSAQKAELIALTKALELSKGKKANIYTDSRYAFATAHTHGSIYERRGWLTSEGKEIKNKAEIIALLKALFLPQEVAIIHCPGHQKGQDPVAVGNRQADRVARQAAMAEVLTLATEPDNTSHITAGKRTADGSEFEKRTADGSEFESPKKKAKVE

SEQ ID NO: 7098 - protein, 2218 aa, synthetic construct
MPAAKRVKLDGGDKKYSIGLDIGTNSVGWAVITDEYKVPSKKFKVLGNTDRHSIKKNLIGALLFDSGETAEATRLKRTARRRYTRRKNRICYLQEIFSNEMAKVDDSFFHRLEESFLVEEDKKHERHPIFGNIVDEVAYHEKYPTIYHLRKKLVDSTDKADLRLIYLALAHMIKFRGHFLIEGDLNPDNSDVDKLFIQLVQTYNQLFEENPINASGVDAKAILSARLSKSRRLENLIAQLPGEKKNGLFGNLIALSLGLTPNFKSNFDLAEDAKLQLSKDTYDDDLDNLLAQIGDQYADLFLAAKNLSDAILLSDILRVNTEITKAPLSASMIKRYDEHHQDLTLLKALVRQQLPEKYKEIFFDQSKNGYAGYIDGGASQEEFYKFIKPILEKMDGTEELLVKLNREDLLRKQRTFDNGSIPHQIHLGELHAILRRQEDFYPFLKDNREKIEKILTFRIPYYVGPLARGNSRFAWMTRKSEETITPWNFEEVVDKGASAQSFIERMTNFDKNLPNEKVLPKHSLLYEYFTVYNELTKVKYVTEGMRKPAFLSGEQKKAIVDLLFKTNRKVTVKQLKEDYFKKIECFDSVEISGVEDRFNASLGTYHDLLKIIKDKDFLDNEENEDILEDIVLTLTLFEDREMIEERLKTYAHLFDDKVMKQLKRRRYTGWGRLSRKLINGIRDKQSGKTILDFLKSDGFANRNFMQLIHDDSLTFKEDIQKAQVSGQGDSLHEHIANLAGSPAIKKGILQTVKVVDELVKVMGRHKPENIVIEMARENQTTQKGQKNSRERMKRIEEGIKELGSQILKEHPVENTQLQNEKLYLYYLQNGRDMYVDQELDINRLSDYDVDHIVPQSFLKDDSIDNKVLTRSDKARGKSDNVPSEEVVKKMKNYWRQLLNAKLITQRKFDNLTKAERGGLSELDKAGFIKRQLVETRQITKHVAQILDSRMNTKYDENDKLIREVKVITLKSKLVSDFRKDFQFYKVREINNYHHAHDAYLNAVVGTALIKKYPKLESEFVYGDYKVYDVRKMIAKSEQEIGKATAKYFFYSNIMNFFKTEITLANGEIRKRPLIETNGETGEIVWDKGRDFATVRKVLSMPQVNIVKKTEVQTGGFSKESILPKRNSDKLIARKKDWDPKKYGGFDSPTVAYSVLVVAKVEKGKSKKLKSVKELLGITIMERSSFEKNPIDFLEAKGYKEVKKDLIIKLPKYSLFELENGRKRMLASAGELQKGNELALPSKYVNFLYLASHYEKLKGSPEDNEQKQLFVEQHKHYLDEIIEQISEFSKRVILADANLDKVLSAYNKHRDKPIREQAENIIHLFTLTNLGAPAAFKYFDTTIDRKRYTSTKEVLDATLIHQSITGLYETRIDLSQLGGDGGEAAAKGGSGSSGGTLGDQGSRGSDPLPEPRVTLTVEGIPTEFLVNTGAEHSVLTKPMGKMGSKRTVVAGATGSKVYPWTTKRLLKIGQKQVTHSFLVIPECPAPLLGRDLLTKLKAQIQFSTEGPQVTWEDRPAMCLVLNLEEEYRLHEKPVPPSIDPSWLQLFPMVWAEKAGMGLANQVPPVVVELKSDASPVAVRQYPMSKEAREGIRPHIQRFLDLGILVPCQSPWNTPLLPVKKPGTNDYRPVQDLREVNKRVQDIHPTVPNPYNLLSSLPPSHTWYSVLDLKDAFFCLKLHPNSQPLFAFEWRDPEKGNTGQLTWTRLPQGFKNSPTLFNEALHRDLASFRALNPQVVMLQYVDDLLVAAPTYRDCKEGTRRLLQELSKLGYRVSAKKAQLCREEVTYLGYLLKGGKRWLTPARKATVMKIPTPTTPRQVREFLGTAGFCRLWIPGFASLAAPLYPLTRPKVPFTWTEAHQEAFGRIKEALLSAPALALPDLTKPFALYVDEKEGVARGVLTQTLGPWRRPVAYLSKKLDPVASGWPTCLKAIAAVALLLKDADKLTLGQNVLVIAPHNLESIVRQPPDRWMTNARMTHYQSLLLNERVSFAPPAILNPATLLPVESDDTPIHICSEILAEETGTRPDLRDQPLPGVPAWYTDGSSFIMDGRRQAGAAIVDNKRTVWASNLPEGTSAQKAELIALTQALRLAEGKSINIYTDSRYAFATAHVHGAIYKQRGWLTSAGKDIKNKEEILALLEAIHLPKRVAIIHCPGHQRGTDPVATGNRKADEAAKQAAQSTRILTETTKNAGKRTADGSEFEKRTADGSEFESPKKKAKVE

SEQ ID NO: 7099 - protein, 2218 aa, synthetic construct
MPAAKRVKLDGGDKKYSIGLDIGTNSVGWAVITDEYKVPSKKFKVLGNTDRHSIKKNLIGALLFDSGETAEATRLKRTARRRYTRRKNRICYLQEIFSNEMAKVDDSFFHRLEESFLVEEDKKHERHPIFGNIVDEVAYHEKYPTIYHLRKKLVDSTDKADLRLIYLALAHMIKFRGHFLIEGDLNPDNSDVDKLFIQLVQTYNQLFEENPINASGVDAKAILSARLSKSRRLENLIAQLPGEKKNGLFGNLIALSLGLTPNFKSNFDLAEDAKLQLSKDTYDDDLDNLLAQIGDQYADLFLAAKNLSDAILLSDILRVNTEITKAPLSASMIKRYDEHHQDLTLLKALVRQQLPEKYKEIFFDQSKNGYAGYIDGGASQEEFYKFIKPILEKMDGTEELLVKLNREDLLRKQRTFDNGSIPHQIHLGELHAILRRQEDFYPFLKDNREKIEKILTFRIPYYVGPLARGNSRFAWMTRKSEETITPWNFEEVVDKGASAQSFIERMTNFDKNLPNEKVLPKHSLLYEYFTVYNELTKVKYVTEGMRKPAFLSGEQKKAIVDLLFKTNRKVTVKQLKEDYFKKIECFDSVEISGVEDRFNASLGTYHDLLKIIKDKDFLDNEENEDILEDIVLTLTLFEDREMIEERLKTYAHLFDDKVMKQLKRRRYTGWGRLSRKLINGIRDKQSGKTILDFLKSDGFANRNFMQLIHDDSLTFKEDIQKAQVSGQGDSLHEHIANLAGSPAIKKGILQTVKVVDELVKVMGRHKPENIVIEMARENQTTQKGQKNSRERMKRIEEGIKELGSQILKEHPVENTQLQNEKLYLYYLQNGRDMYVDQELDINRLSDYDVDHIVPQSFLKDDSIDNKVLTRSDKARGKSDNVPSEEVVKKMKNYWRQLLNAKLITQRKFDNLTKAERGGLSELDKAGFIKRQLVETRQITKHVAQILDSRMNTKYDENDKLIREVKVITLKSKLVSDFRKDFQFYKVREINNYHHAHDAYLNAVVGTALIKKYPKLESEFVYGDYKVYDVRKMIAKSEQEIGKATAKYFFYSNIMNFFKTEITLANGEIRKRPLIETNGETGEIVWDKGRDFATVRKVLSMPQVNIVKKTEVQTGGFSKESILPKRNSDKLIARKKDWDPKKYGGFDSPTVAYSVLVVAKVEKGKSKKLKSVKELLGITIMERSSFEKNPIDFLEAKGYKEVKKDLIIKLPKYSLFELENGRKRMLASAGELQKGNELALPSKYVNFLYLASHYEKLKGSPEDNEQKQLFVEQHKHYLDEIIEQISEFSKRVILADANLDKVLSAYNKHRDKPIREQAENIIHLFTLTNLGAPAAFKYFDTTIDRKRYTSTKEVLDATLIHQSITGLYETRIDLSQLGGDGGEAAAKGGSGSSGGTLGDQGSRGSDPLPEPRVTLTVEGIPTEFLVNTGAEHSVLTKPMGKMGSKRTVVAGATGSKVYPWTTKRLLKIGQKQVTHSFLVIPECPAPLLGRDLLTKLKAQIQFSTEGPQVTWEDRPAMCLVLNLEEEYRLHEKPVPPSIDPSWLQLFPMVWAEKAGMGLANQVPPVVVELKSDASPVAVRQYPMSKEAREGIRPHIQRFLDLGILVPCQSPWNTPLLPVKKPGTNDYRPVQDLREVNKRVQDIHPTVPNPYNLLSSLPPSHTWYSVLDLKDAFFCLKLHPNSQPLFAFEWRDPEKGNTGQLTWTRLPQGFKNSPTLFNEALHRDLASFRALNPQVVMLQYVDDLLVAAPTYRDCKEGTRRLLQELSKLGYRVSAKKAQLCREEVTYLGYLLKGGKRWLTPARKATVMKIPTPTTPRQVREFLGKAGFCRLFIPGFASLAAPLYPLTRPKVPFTWTEAHQEAFGRIKEALLSAPALALPDLTKPFALYVDEKEGVARGVLTQTLGPWRRPVAYLSKKLDPVASGWPTCLKAIAAVALLLKDADKLTLGQNVLVIAPHNLESIVRQPPDRWMTNARMTHYQSLLLNERVSFAPPAILNPATLLPVESDDTPIHICSEILAEETGTRPDLRDQPLPGVPAWYTDGSSFIMDGRRQAGAAIVDNKRTVWASNLPEGTSAQKAELIALTQALRLAEGKSINIYTDSRYAFATAHVHGAIYKQRGWLTSAGKDIKNKEEILALLEAIHLPKRVAIIHCPGHQRGTDPVATGNRKADEAAKQAAQSTRILTETTKNAGKRTADGSEFEKRTADGSEFESPKKKAKVE

SEQ ID NO: 7100 - protein, 2096 aa, synthetic construct
MPAAKRVKLDGGDKKYSIGLDIGTNSVGWAVITDEYKVPSKKFKVLGNTDRHSIKKNLIGALLFDSGETAEATRLKRTARRRYTRRKNRICYLQEIFSNEMAKVDDSFFHRLEESFLVEEDKKHERHPIFGNIVDEVAYHEKYPTIYHLRKKLVDSTDKADLRLIYLALAHMIKFRGHFLIEGDLNPDNSDVDKLFIQLVQTYNQLFEENPINASGVDAKAILSARLSKSRRLENLIAQLPGEKKNGLFGNLIALSLGLTPNFKSNFDLAEDAKLQLSKDTYDDDLDNLLAQIGDQYADLFLAAKNLSDAILLSDILRVNTEITKAPLSASMIKRYDEHHQDLTLLKALVRQQLPEKYKEIFFDQSKNGYAGYIDGGASQEEFYKFIKPILEKMDGTEELLVKLNREDLLRKQRTFDNGSIPHQIHLGELHAILRRQEDFYPFLKDNREKIEKILTFRIPYYVGPLARGNSRFAWMTRKSEETITPWNFEEVVDKGASAQSFIERMTNFDKNLPNEKVLPKHSLLYEYFTVYNELTKVKYVTEGMRKPAFLSGEQKKAIVDLLFKTNRKVTVKQLKEDYFKKIECFDSVEISGVEDRFNASLGTYHDLLKIIKDKDFLDNEENEDILEDIVLTLTLFEDREMIEERLKTYAHLFDDKVMKQLKRRRYTGWGRLSRKLINGIRDKQSGKTILDFLKSDGFANRNFMQLIHDDSLTFKEDIQKAQVSGQGDSLHEHIANLAGSPAIKKGILQTVKVVDELVKVMGRHKPENIVIEMARENQTTQKGQKNSRERMKRIEEGIKELGSQILKEHPVENTQLQNEKLYLYYLQNGRDMYVDQELDINRLSDYDVDHIVPQSFLKDDSIDNKVLTRSDKARGKSDNVPSEEVVKKMKNYWRQLLNAKLITQRKFDNLTKAERGGLSELDKAGFIKRQLVETRQITKHVAQILDSRMNTKYDENDKLIREVKVITLKSKLVSDFRKDFQFYKVREINNYHHAHDAYLNAVVGTALIKKYPKLESEFVYGDYKVYDVRKMIAKSEQEIGKATAKYFFYSNIMNFFKTEITLANGEIRKRPLIETNGETGEIVWDKGRDFATVRKVLSMPQVNIVKKTEVQTGGFSKESILPKRNSDKLIARKKDWDPKKYGGFDSPTVAYSVLVVAKVEKGKSKKLKSVKELLGITIMERSSFEKNPIDFLEAKGYKEVKKDLIIKLPKYSLFELENGRKRMLASAGELQKGNELALPSKYVNFLYLASHYEKLKGSPEDNEQKQLFVEQHKHYLDEIIEQISEFSKRVILADANLDKVLSAYNKHRDKPIREQAENIIHLFTLTNLGAPAAFKYFDTTIDRKRYTSTKEVLDATLIHQSITGLYETRIDLSQLGGDGGEAAAKGGSGSSGGTLNLEDEYRLYETSAEPEVSPGSTWLSDFPQAWAETGGMGLAVRQAPLIIPLKATSTPVSIKQYPMSQEAKLGIKPHIQRLLDQGILVPCQSPWNTPLLPVKKPGTNDYRPVQDLREVNKRVEDIHPTVPNPYNLLSGLPPSHRWYTVLDLKDAFFCLRLHPTSQPLFAFEWRDPGMGISGQLTWTRLPQGFKNSPTLFNEALHRDLADFRIQHPDLILLQYVDDILLAATSELDCQQGTRALLLTLGNLGYRASAKKAQLCQKQVKYLGYLLKEGQRWLTEARKETVMGQPTPKTPRQLREFLGKAGFCRLFIPGFAEMAAPLYPLTKPGTLFNWGPDQQKAYQEIKQALLTAPALGLPDLTKPFELFVDEKQGYAKGVLTQKLGPWRRPVAYLSKKLDPVAAGWPPCLRMVAAIAVLRKDAGKLTMGQPLVILAPHAVEALVKQPPDRWLSNARMTHYQAMLLDTDRVQFGPVVALNPATLLPLPEEGAPHDCLEILAETHGTRPDLTDQPIPDADHTWYTDGSSFLQEGQRKAGAAVTTETEVIWARALPAGTSAQRAELIALTQALKMAEGKRLNVYTDSRYAFATAHIHGEIYRRRGWLTSEGREIKNKSEILALLKALFLPKRLSIIHCLGHQKGDSAEARGNRLADQAAREAAIKTPPDTSTLLAGKRTADGSEFEKRTADGSEFESPKKKAKVE

SEQ ID NO: 7101 - protein, 2096 aa, synthetic construct
MPAAKRVKLDGGDKKYSIGLDIGTNSVGWAVITDEYKVPSKKFKVLGNTDRHSIKKNLIGALLFDSGETAEATRLKRTARRRYTRRKNRICYLQEIFSNEMAKVDDSFFHRLEESFLVEEDKKHERHPIFGNIVDEVAYHEKYPTIYHLRKKLVDSTDKADLRLIYLALAHMIKFRGHFLIEGDLNPDNSDVDKLFIQLVQTYNQLFEENPINASGVDAKAILSARLSKSRRLENLIAQLPGEKKNGLFGNLIALSLGLTPNFKSNFDLAEDAKLQLSKDTYDDDLDNLLAQIGDQYADLFLAAKNLSDAILLSDILRVNTEITKAPLSASMIKRYDEHHQDLTLLKALVRQQLPEKYKEIFFDQSKNGYAGYIDGGASQEEFYKFIKPILEKMDGTEELLVKLNREDLLRKQRTFDNGSIPHQIHLGELHAILRRQEDFYPFLKDNREKIEKILTFRIPYYVGPLARGNSRFAWMTRKSEETITPWNFEEVVDKGASAQSFIERMTNFDKNLPNEKVLPKHSLLYEYFTVYNELTKVKYVTEGMRKPAFLSGEQKKAIVDLLFKTNRKVTVKQLKEDYFKKIECFDSVEISGVEDRFNASLGTYHDLLKIIKDKDFLDNEENEDILEDIVLTLTLFEDREMIEERLKTYAHLFDDKVMKQLKRRRYTGWGRLSRKLINGIRDKQSGKTILDFLKSDGFANRNFMQLIHDDSLTFKEDIQKAQVSGQGDSLHEHIANLAGSPAIKKGILQTVKVVDELVKVMGRHKPENIVIEMARENQTTQKGQKNSRERMKRIEEGIKELGSQILKEHPVENTQLQNEKLYLYYLQNGRDMYVDQELDINRLSDYDVDHIVPQSFLKDDSIDNKVLTRSDKARGKSDNVPSEEVVKKMKNYWRQLLNAKLITQRKFDNLTKAERGGLSELDKAGFIKRQLVETRQITKHVAQILDSRMNTKYDENDKLIREVKVITLKSKLVSDFRKDFQFYKVREINNYHHAHDAYLNAVVGTALIKKYPKLESEFVYGDYKVYDVRKMIAKSEQEIGKATAKYFFYSNIMNFFKTEITLANGEIRKRPLIETNGETGEIVWDKGRDFATVRKVLSMPQVNIVKKTEVQTGGFSKESILPKRNSDKLIARKKDWDPKKYGGFDSPTVAYSVLVVAKVEKGKSKKLKSVKELLGITIMERSSFEKNPIDFLEAKGYKEVKKDLIIKLPKYSLFELENGRKRMLASAGELQKGNELALPSKYVNFLYLASHYEKLKGSPEDNEQKQLFVEQHKHYLDEIIEQISEFSKRVILADANLDKVLSAYNKHRDKPIREQAENIIHLFTLTNLGAPAAFKYFDTTIDRKRYTSTKEVLDATLIHQSITGLYETRIDLSQLGGDGGEAAAKGGSGSSGGTLNIEDEYRLHETSKGPDVPLGSTWLSDFPQAWAETGGMGLAVRQAPLIIPLKATSTPVSIKQYPMSQEARLGIKPHIQRLLDQGILVPCQSPWNTPLLPVKKPGTNDYRPVQDLREVNKRVEDIHPTVPNPYNLLSGLPPSHQWYTVLDLKDAFFCLRLHPTSQSLFAFEWRDPEMGISGQLTWTRLPQGFKNSPTLFDEALHRDLADFRIQHPDLILLQYVDDLLLAATSELDCQQGTRALLQTLGDLGYRASAKKAQICQKQVKYLGYLLKEGQRWLTEARKETVMGQPTPKTPRQLREFLGTAGFCRLWIPGFAEMAAPLYPLTKTGTLFEWGPDQQKAYQEIKQALLTAPALGLPDLTKPFELFVDEKQGYAKGVLTQKLGPWRRPVAYLSKKLDPVAAGWPPCLRMVAAIAVLTKDAGKLTMGQPLVILAPHAVEALVKQPPDRWLSNARMTHYQALLLDTDRVQFGPIVALNPATLLPLPEEGLQHDCLDILAEAHGTRPDLTDQPLPDADHTWYTDGSSFLQEGQRKAGAAVTTETEVVWAKALPAGTSAQRAELIALTQALKMAEGKKLNVYTDSRYAFATAHIHGEIYRRRGLLTSEGKEIKNKDEILALLKALFLPKRLSIIHCPGHQKGNRAEARGNRMADQAAREVATRETPETSTLLAGKRTADGSEFEKRTADGSEFESPKKKAKVE

SEQ ID NO: 7102 - protein, 2087 aa, synthetic construct
MPAAKRVKLDGGDKKYSIGLDIGTNSVGWAVITDEYKVPSKKFKVLGNTDRHSIKKNLIGALLFDSGETAEATRLKRTARRRYTRRKNRICYLQEIFSNEMAKVDDSFFHRLEESFLVEEDKKHERHPIFGNIVDEVAYHEKYPTIYHLRKKLVDSTDKADLRLIYLALAHMIKFRGHFLIEGDLNPDNSDVDKLFIQLVQTYNQLFEENPINASGVDAKAILSARLSKSRRLENLIAQLPGEKKNGLFGNLIALSLGLTPNFKSNFDLAEDAKLQLSKDTYDDDLDNLLAQIGDQYADLFLAAKNLSDAILLSDILRVNTEITKAPLSASMIKRYDEHHQDLTLLKALVRQQLPEKYKEIFFDQSKNGYAGYIDGGASQEEFYKFIKPILEKMDGTEELLVKLNREDLLRKQRTFDNGSIPHQIHLGELHAILRRQEDFYPFLKDNREKIEKILTFRIPYYVGPLARGNSRFAWMTRKSEETITPWNFEEVVDKGASAQSFIERMTNFDKNLPNEKVLPKHSLLYEYFTVYNELTKVKYVTEGMRKPAFLSGEQKKAIVDLLFKTNRKVTVKQLKEDYFKKIECFDSVEISGVEDRFNASLGTYHDLLKIIKDKDFLDNEENEDILEDIVLTLTLFEDREMIEERLKTYAHLFDDKVMKQLKRRRYTGWGRLSRKLINGIRDKQSGKTILDFLKSDGFANRNFMQLIHDDSLTFKEDIQKAQVSGQGDSLHEHIANLAGSPAIKKGILQTVKVVDELVKVMGRHKPENIVIEMARENQTTQKGQKNSRERMKRIEEGIKELGSQILKEHPVENTQLQNEKLYLYYLQNGRDMYVDQELDINRLSDYDVDHIVPQSFLKDDSIDNKVLTRSDKARGKSDNVPSEEVVKKMKNYWRQLLNAKLITQRKFDNLTKAERGGLSELDKAGFIKRQLVETRQITKHVAQILDSRMNTKYDENDKLIREVKVITLKSKLVSDFRKDFQFYKVREINNYHHAHDAYLNAVVGTALIKKYPKLESEFVYGDYKVYDVRKMIAKSEQEIGKATAKYFFYSNIMNFFKTEITLANGEIRKRPLIETNGETGEIVWDKGRDFATVRKVLSMPQVNIVKKTEVQTGGFSKESILPKRNSDKLIARKKDWDPKKYGGFDSPTVAYSVLVVAKVEKGKSKKLKSVKELLGITIMERSSFEKNPIDFLEAKGYKEVKKDLIIKLPKYSLFELENGRKRMLASAGELQKGNELALPSKYVNFLYLASHYEKLKGSPEDNEQKQLFVEQHKHYLDEIIEQISEFSKRVILADANLDKVLSAYNKHRDKPIREQAENIIHLFTLTNLGAPAAFKYFDTTIDRKRYTSTKEVLDATLIHQSITGLYETRIDLSQLGGDGGEAAAKGGSGSSGGIPWLMKKPLQLTTLVPLQEYEERLLKQTMLTGSYKEKLQSLFLKYDALWQHWENQVGHRRIKPHHIATGTVNPRPQKQYPINPKAKASIQTVINDLLKQGVLIQQNSIMNTPVYPVPKPDGKWRMVLDYREVNKTIPLIAAQNQHSAGILSSIFRGKYKTTLDLSNGFWAHSITPESYWLTAFTWLGQQYCWTRLPQGFLNSPALFNADVVDLLKEVPNVQVYVDDIYISHDDPREHLEQLEKVFSLLLNAGYVVSLKKSEIAQHEVEFLGFNITKEGRGLTETFKQKLLNITPPRDLKQLQSILGLLNFARNFIPNFSELVKPLYNIIATAPGKYITWTTDNSQQLQNIISMLNSAENLEERNPEVRLIMKVNTSPSAGYIRFYNEFAKRPIMYLNYVYTKAEVKFTNTEKLLTTIHKGLIKALDLGMGQEILVYSPIVSMTKIQKTPLPERKALPIRWITWMSYLEDPRIQFHYDKTLPELQQVPTVTDDIIAKIKHPSEFSMVFYTDGSAIKHPNVNKSHNAGMGIAQVQFKPEFTVINTWSIPLGDHTAQLAEVAAVEFACKKALKIDGPVLIVTDSFYVAESVNKELPYWQSNGFFNNKKKPLKHVSKWKSIADCIQLKPDIIIIHEKGHQPTASTFHTEGNNLADKLATQGSYVVNAGKRTADGSEFEKRTADGSEFESPKKKAKVE

SEQ ID NO: 7103 - protein, 2096 aa, synthetic construct; identical to SEQ ID NO: 4523

SEQ ID NO: 7104 - protein, 2098 aa, synthetic construct
MPAAKRVKLDGGDKKYSIGLDIGTNSVGWAVITDEYKVPSKKFKVLGNTDRHSIKKNLIGALLFDSGETAEATRLKRTARRRYTRRKNRICYLQEIFSNEMAKVDDSFFHRLEESFLVEEDKKHERHPIFGNIVDEVAYHEKYPTIYHLRKKLVDSTDKADLRLIYLALAHMIKFRGHFLIEGDLNPDNSDVDKLFIQLVQTYNQLFEENPINASGVDAKAILSARLSKSRRLENLIAQLPGEKKNGLFGNLIALSLGLTPNFKSNFDLAEDAKLQLSKDTYDDDLDNLLAQIGDQYADLFLAAKNLSDAILLSDILRVNTEITKAPLSASMIKRYDEHHQDLTLLKALVRQQLPEKYKEIFFDQSKNGYAGYIDGGASQEEFYKFIKPILEKMDGTEELLVKLNREDLLRKQRTFDNGSIPHQIHLGELHAILRRQEDFYPFLKDNREKIEKILTFRIPYYVGPLARGNSRFAWMTRKSEETITPWNFEEVVDKGASAQSFIERMTNFDKNLPNEKVLPKHSLLYEYFTVYNELTKVKYVTEGMRKPAFLSGEQKKAIVDLLFKTNRKVTVKQLKEDYFKKIECFDSVEISGVEDRFNASLGTYHDLLKIIKDKDFLDNEENEDILEDIVLTLTLFEDREMIEERLKTYAHLFDDKVMKQLKRRRYTGWGRLSRKLINGIRDKQSGKTILDFLKSDGFANRNFMQLIHDDSLTFKEDIQKAQVSGQGDSLHEHIANLAGSPAIKKGILQTVKVVDELVKVMGRHKPENIVIEMARENQTTQKGQKNSRERMKRIEEGIKELGSQILKEHPVENTQLQNEKLYLYYLQNGRDMYVDQELDINRLSDYDVDHIVPQSFLKDDSIDNKVLTRSDKARGKSDNVPSEEVVKKMKNYWRQLLNAKLITQRKFDNLTKAERGGLSELDKAGFIKRQLVETRQITKHVAQILDSRMNTKYDENDKLIREVKVITLKSKLVSDFRKDFQFYKVREINNYHHAHDAYLNAVVGTALIKKYPKLESEFVYGDYKVYDVRKMIAKSEQEIGKATAKYFFYSNIMNFFKTEITLANGEIRKRPLIETNGETGEIVWDKGRDFATVRKVLSMPQVNIVKKTEVQTGGFSKESILPKRNSDKLIARKKDWDPKKYGGFDSPTVAYSVLVVAKVEKGKSKKLKSVKELLGITIMERSSFEKNPIDFLEAKGYKEVKKDLIIKLPKYSLFELENGRKRMLASAGELQKGNELALPSKYVNFLYLASHYEKLKGSPEDNEQKQLFVEQHKHYLDEIIEQISEFSKRVILADANLDKVLSAYNKHRDKPIREQAENIIHLFTLTNLGAPAAFKYFDTTIDRKRYTSTKEVLDATLIHQSITGLYETRIDLSQLGGDGGEAAAKGSSGGSGGTAPLEEEYRLFLEAPIQNVTLLEQWKREIPKVWAEINPPGLASTQAPIHVQLLSTALPVRVRQYPITLEAKRSLRETIRKFRAAGILRPVHSPWNTPLLPVRKSGTSEYRMVQDLREVNKRVETIHPTVPNPYTLLSLLPPDRIWYSVLDLKDAFFCIPLAPESQLIFAFEWADAEEGESGQLTWTRLPQGFKNSPTLFNEALNRDLQGFRLDHPSVSLLQYVDDLLIAADTQAACLSATRDLLMTLAELGYRVSGKKAQLCQEEVTYLGFKIHKGSRSLSNSRTQAILQIPVPKTKRQVREFLGTIGYCRLWIPGFAELAQPLYAATRPGNDPLVWGEKEEEAFQSLKLALTQPPALALPSLDKPFQLFVEETSGAAKGVLTQALGPWKRPVAYLSKRLDPVAAGWPRCLRAIAAAALLTREASKLTFGQDIEITSSHNLESLLRSPPDKWLTNARITQYQVLLLDPPRVRFKQTAALNPATLLPETDDTLPIHHCLDTLDSLTSTRPDLTDQPLAQAEATLFTDGSSYIRDGKRYAGAAVVTLDSVIWAEPLPIGTSAQKAELIALTKALEWSKDKSVNIYTDSRYAFATLHVHGMIYRERGWLTAGGKAIKNAPEILALLTAVWLPKRVAVMHCKGHQKDDAPTSTGNRRADEVAREVAIRPLSTQATISAGKRTADGSEFEKRTADGSEFESPKKKAKVE

SEQ ID NO: 7105 - protein, 2098 aa, synthetic construct
MPAAKRVKLDGGDKKYSIGLDIGTNSVGWAVITDEYKVPSKKFKVLGNTDRHSIKKNLIGALLFDSGETAEATRLKRTARRRYTRRKNRICYLQEIFSNEMAKVDDSFFHRLEESFLVEEDKKHERHPIFGNIVDEVAYHEKYPTIYHLRKKLVDSTDKADLRLIYLALAHMIKFRGHFLIEGDLNPDNSDVDKLFIQLVQTYNQLFEENPINASGVDAKAILSARLSKSRRLENLIAQLPGEKKNGLFGNLIALSLGLTPNFKSNFDLAEDAKLQLSKDTYDDDLDNLLAQIGDQYADLFLAAKNLSDAILLSDILRVNTEITKAPLSASMIKRYDEHHQDLTLLKALVRQQLPEKYKEIFFDQSKNGYAGYIDGGASQEEFYKFIKPILEKMDGTEELLVKLNREDLLRKQRTFDNGSIPHQIHLGELHAILRRQEDFYPFLKDNREKIEKILTFRIPYYVGPLARGNSRFAWMTRKSEETITPWNFEEVVDKGASAQSFIERMTNFDKNLPNEKVLPKHSLLYEYFTVYNELTKVKYVTEGMRKPAFLSGEQKKAIVDLLFKTNRKVTVKQLKEDYFKKIECFDSVEISGVEDRFNASLGTYHDLLKIIKDKDFLDNEENEDILEDIVLTLTLFEDREMIEERLKTYAHLFDDKVMKQLKRRRYTGWGRLSRKLINGIRDKQSGKTILDFLKSDGFANRNFMQLIHDDSLTFKEDIQKAQVSGQGDSLHEHIANLAGSPAIKKGILQTVKVVDELVKVMGRHKPENIVIEMARENQTTQKGQKNSRERMKRIEEGIKELGSQILKEHPVENTQLQNEKLYLYYLQNGRDMYVDQELDINRLSDYDVDHIVPQSFLKDDSIDNKVLTRSDKARGKSDNVPSEEVVKKMKNYWRQLLNAKLITQRKFDNLTKAERGGLSELDKAGFIKRQLVETRQITKHVAQILDSRMNTKYDENDKLIREVKVITLKSKLVSDFRKDFQFYKVREINNYHHAHDAYLNAVVGTALIKKYPKLESEFVYGDYKVYDVRKMIAKSEQEIGKATAKYFFYSNIMNFFKTEITLANGEIRKRPLIETNGETGEIVWDKGRDFATVRKVLSMPQVNIVKKTEVQTGGFSKESILPKRNSDKLIARKKDWDPKKYGGFDSPTVAYSVLVVAKVEKGKSKKLKSVKELLGITIMERSSFEKNPIDFLEAKGYKEVKKDLIIKLPKYSLFELENGRKRMLASAGELQKGNELALPSKYVNFLYLASHYEKLKGSPEDNEQKQLFVEQHKHYLDEIIEQISEFSKRVILADANLDKVLSAYNKHRDKPIREQAENIIHLFTLTNLGAPAAFKYFDTTIDRKRYTSTKEVLDATLIHQSITGLYETRIDLSQLGGDGGEAAAKGSSGGSGGTAPLEEEYRLFLEAPIQNVTLLEQWKREIPKVWAEINPPGLASTQAPIHVQLLSTALPVRVRQYPITLEAKRSLRETIRKFRAAGILRPVHSPWNTPLLPVRKSGTSEYRMVQDLREVNKRVETIHPTVPNPYTLLSLLPPDRIWYSVLDLKDAFFCIPLAPESQLIFAFEWADAEEGESGQLTWTRLPQGFKNSPTLFNEALNRDLQGFRLDHPSVSLLQYVDDLLIAADTQAACLSATRDLLMTLAELGYRVSGKKAQLCQEEVTYLGFKIHKGSRSLSNSRTQAILQIPVPKTKRQVREFLGKIGYCRLFIPGFAELAQPLYAATRPGNDPLVWGEKEEEAFQSLKLALTQPPALALPSLDKPFQLFVEETSGAAKGVLTQALGPWKRPVAYLSKRLDPVAAGWPRCLRAIAAAALLTREASKLTFGQDIEITSSHNLESLLRSPPDKWLTNARITQYQVLLLDPPRVRFKQTAALNPATLLPETDDTLPIHHCLDTLDSLTSTRPDLTDQPLAQAEATLFTDGSSYIRDGKRYAGAAVVTLDSVIWAEPLPIGTSAQKAELIALTKALEWSKDKSVNIYTDSRYAFATLHVHGMIYRERGWLTAGGKAIKNAPEILALLTAVWLPKRVAVMHCKGHQKDDAPTSTGNRRADEVAREVAIRPLSTQATISAGKRTADGSEFEKRTADGSEFESPKKKAKVE

SEQ ID NO: 7106 - protein, 2102 aa, synthetic construct
MPAAKRVKLDGGDKKYSIGLDIGTNSVGWAVITDEYKVPSKKFKVLGNTDRHSIKKNLIGALLFDSGETAEATRLKRTARRRYTRRKNRICYLQEIFSNEMAKVDDSFFHRLEESFLVEEDKKHERHPIFGNIVDEVAYHEKYPTIYHLRKKLVDSTDKADLRLIYLALAHMIKFRGHFLIEGDLNPDNSDVDKLFIQLVQTYNQLFEENPINASGVDAKAILSARLSKSRRLENLIAQLPGEKKNGLFGNLIALSLGLTPNFKSNFDLAEDAKLQLSKDTYDDDLDNLLAQIGDQYADLFLAAKNLSDAILLSDILRVNTEITKAPLSASMIKRYDEHHQDLTLLKALVRQQLPEKYKEIFFDQSKNGYAGYIDGGASQEEFYKFIKPILEKMDGTEELLVKLNREDLLRKQRTFDNGSIPHQIHLGELHAILRRQEDFYPFLKDNREKIEKILTFRIPYYVGPLARGNSRFAWMTRKSEETITPWNFEEVVDKGASAQSFIERMTNFDKNLPNEKVLPKHSLLYEYFTVYNELTKVKYVTEGMRKPAFLSGEQKKAIVDLLFKTNRKVTVKQLKEDYFKKIECFDSVEISGVEDRFNASLGTYHDLLKIIKDKDFLDNEENEDILEDIVLTLTLFEDREMIEERLKTYAHLFDDKVMKQLKRRRYTGWGRLSRKLINGIRDKQSGKTILDFLKSDGFANRNFMQLIHDDSLTFKEDIQKAQVSGQGDSLHEHIANLAGSPAIKKGILQTVKVVDELVKVMGRHKPENIVIEMARENQTTQKGQKNSRERMKRIEEGIKELGSQILKEHPVENTQLQNEKLYLYYLQNGRDMYVDQELDINRLSDYDVDHIVPQSFLKDDSIDNKVLTRSDKARGKSDNVPSEEVVKKMKNYWRQLLNAKLITQRKFDNLTKAERGGLSELDKAGFIKRQLVETRQITKHVAQILDSRMNTKYDENDKLIREVKVITLKSKLVSDFRKDFQFYKVREINNYHHAHDAYLNAVVGTALIKKYPKLESEFVYGDYKVYDVRKMIAKSEQEIGKATAKYFFYSNIMNFFKTEITLANGEIRKRPLIETNGETGEIVWDKGRDFATVRKVLSMPQVNIVKKTEVQTGGFSKESILPKRNSDKLIARKKDWDPKKYGGFDSPTVAYSVLVVAKVEKGKSKKLKSVKELLGITIMERSSFEKNPIDFLEAKGYKEVKKDLIIKLPKYSLFELENGRKRMLASAGELQKGNELALPSKYVNFLYLASHYEKLKGSPEDNEQKQLFVEQHKHYLDEIIEQISEFSKRVILADANLDKVLSAYNKHRDKPIREQAENIIHLFTLTNLGAPAAFKYFDTTIDRKRYTSTKEVLDATLIHQSITGLYETRIDLSQLGGDGGEAAAKGSSGGSGGTVSLQDEHRLFDIPVTTSLPDVWLQDFPQAWAETGGLGRAKCQAPIIIDLKPTAVPVSIKQYPMSLEAHMGIRQHIIKFLELGVLRPCRSPWNTPLLPVKKPGTQDYRPVQDLREINKRTVDIHPTVPNPYNLLSTLKPDYSWYTVLDLKDAFFCLPLAPQSQELFAFEWKDPERGISGQLTWTRLPQGFKNSPTLFNEALHRDLTDFRTQHPEVTLLQYVDDLLLAAPTKKACTQGTRHLLQELGEKGYRASAKKAQICQTKVTYLGYILSEGKRWLTPGRIETVARIPPPRNPREVREFLGKAGFCRLFIPGFAELAAPLYALTKPSTPFTWQTEHQLAFEALKKALLSAPALGLPDTSKPFTLFLDERQGIAKGVLTQKLGPWKRPVAYLSKKLDPVAAGWPPCLRIMAATAMLVKDSAKLTLGQPLTVITPHTLEAIVRQPPDRWITNARLTHYQALLLDTDRVQFGPPVTLNPATLLPVPENQPSPHDCRQVLAETHGTREDLKDQELPDADHTWYTDGSSYLDSGTRRAGAAVVDGHNTIWAQSLPPGTSAQKAELIALTKALELSKGKKANIYTDSRYAFATAHTHGSIYERRGWLTSEGKEIKNKAEIIALLKALFLPQEVAIIHCPGHQKGQDPVAVGNRQADRVARQAAMAEVLTLATEPDNTSHITAGKRTADGSEFEKRTADGSEFESPKKKAKVE

SEQ ID NO: 7107 - protein, 2087 aa, synthetic construct
MPAAKRVKLDGGDKKYSIGLDIGTNSVGWAVITDEYKVPSKKFKVLGNTDRHSIKKNLIGALLFDSGETAEATRLKRTARRRYTRRKNRICYLQEIFSNEMAKVDDSFFHRLEESFLVEEDKKHERHPIFGNIVDEVAYHEKYPTIYHLRKKLVDSTDKADLRLIYLALAHMIKFRGHFLIEGDLNPDNSDVDKLFIQLVQTYNQLFEENPINASGVDAKAILSARLSKSRRLENLIAQLPGEKKNGLFGNLIALSLGLTPNFKSNFDLAEDAKLQLSKDTYDDDLDNLLAQIGDQYADLFLAAKNLSDAILLSDILRVNTEITKAPLSASMIKRYDEHHQDLTLLKALVRQQLPEKYKEIFFDQSKNGYAGYIDGGASQEEFYKFIKPILEKMDGTEELLVKLNREDLLRKQRTFDNGSIPHQIHLGELHAILRRQEDFYPFLKDNREKIEKILTFRIPYYVGPLARGNSRFAWMTRKSEETITPWNFEEVVDKGASAQSFIERMTNFDKNLPNEKVLPKHSLLYEYFTVYNELTKVKYVTEGMRKPAFLSGEQKKAIVDLLFKTNRKVTVKQLKEDYFKKIECFDSVEISGVEDRFNASLGTYHDLLKIIKDKDFLDNEENEDILEDIVLTLTLFEDREMIEERLKTYAHLFDDKVMKQLKRRRYTGWGRLSRKLINGIRDKQSGKTILDFLKSDGFANRNFMQLIHDDSLTFKEDIQKAQVSGQGDSLHEHIANLAGSPAIKKGILQTVKVVDELVKVMGRHKPENIVIEMARENQTTQKGQKNSRERMKRIEEGIKELGSQILKEHPVENTQLQNEKLYLYYLQNGRDMYVDQELDINRLSDYDVDHIVPQSFLKDDSIDNKVLTRSDKARGKSDNVPSEEVVKKMKNYWRQLLNAKLITQRKFDNLTKAERGGLSELDKAGFIKRQLVETRQITKHVAQILDSRMNTKYDENDKLIREVKVITLKSKLVSDFRKDFQFYKVREINNYHHAHDAYLNAVVGTALIKKYPKLESEFVYGDYKVYDVRKMIAKSEQEIGKATAKYFFYSNIMNFFKTEITLANGEIRKRPLIETNGETGEIVWDKGRDFATVRKVLSMPQVNIVKKTEVQTGGFSKESILPKRNSDKLIARKKDWDPKKYGGFDSPTVAYSVLVVAKVEKGKSKKLKSVKELLGITIMERSSFEKNPIDFLEAKGYKEVKKDLIIKLPKYSLFELENGRKRMLASAGELQKGNELALPSKYVNFLYLASHYEKLKGSPEDNEQKQLFVEQHKHYLDEIIEQISEFSKRVILADANLDKVLSAYNKHRDKPIREQAENIIHLFTLTNLGAPAAFKYFDTTIDRKRYTSTKEVLDATLIHQSITGLYETRIDLSQLGGDGGEAAAKGSSGGSGGVPWILKKPLELTIKLDLEEQQGTLLNNSILSKKGKEELKQLFEKYSALWQSWENQVGHRRIRPHKIATGTVKPTPQKQYHINPKAKPDIQIVINDLLKQGVLIQKESTMNTPVYPVPKPNGRWRMVLDYRAVNKVTPLIAVQNQHSYGILGSLFKGRYKTTIDLSNGFWAHPIVPEDYWITAFTWQGKQYCWTVLPQGFLNSPGLFTGDVVDLLQGIPNVEVYVDDVYISHDSEKEHLEYLDILFNRLKEAGYIISLKKSNIANSIVDFLGFQITNEGRGLTDTFKEKLENITAPTTLKQLQSILGLLNFARNFIPDFTELIAPLYALIPKSTKNYVPWQIEHSTTLETLITKLNGAEYLQGRKGDKTLIMKVNASYTTGYIRYYNEGEKKPISYVSIVFSKTELKFTELEKLLTTVHKGLLKALDLSMGQNIHVYSPIVSMQNIQKTPQTAKKALASRWLSWLSYLEDPRIRFFYDPQMPALKDLPAVDTGKDNKKHPSNFQHIFYTDGSAITSPTKEGHLNAGMGIVYFINKDGNLQKQQEWSISLGNHTAQFAEIAAFEFALKKCLPLGGNILVVTDSNYVAKAYNEELDVWASNGFVNNRKKPLKHISKWKSVADLKRLRPDVVVTHEPGHQKLDSSPHAYGNNLADQLATQASFKVHAGKRTADGSEFEKRTADGSEFESPKKKAKVE

SEQ ID NO: 7108 - protein, 2087 aa, synthetic construct
MPAAKRVKLDGGDKKYSIGLDIGTNSVGWAVITDEYKVPSKKFKVLGNTDRHSIKKNLIGALLFDSGETAEATRLKRTARRRYTRRKNRICYLQEIFSNEMAKVDDSFFHRLEESFLVEEDKKHERHPIFGNIVDEVAYHEKYPTIYHLRKKLVDSTDKADLRLIYLALAHMIKFRGHFLIEGDLNPDNSDVDKLFIQLVQTYNQLFEENPINASGVDAKAILSARLSKSRRLENLIAQLPGEKKNGLFGNLIALSLGLTPNFKSNFDLAEDAKLQLSKDTYDDDLDNLLAQIGDQYADLFLAAKNLSDAILLSDILRVNTEITKAPLSASMIKRYDEHHQDLTLLKALVRQQLPEKYKEIFFDQSKNGYAGYIDGGASQEEFYKFIKPILEKMDGTEELLVKLNREDLLRKQRTFDNGSIPHQIHLGELHAILRRQEDFYPFLKDNREKIEKILTFRIPYYVGPLARGNSRFAWMTRKSEETITPWNFEEVVDKGASAQSFIERMTNFDKNLPNEKVLPKHSLLYEYFTVYNELTKVKYVTEGMRKPAFLSGEQKKAIVDLLFKTNRKVTVKQLKEDYFKKIECFDSVEISGVEDRFNASLGTYHDLLKIIKDKDFLDNEENEDILEDIVLTLTLFEDREMIEERLKTYAHLFDDKVMKQLKRRRYTGWGRLSRKLINGIRDKQSGKTILDFLKSDGFANRNFMQLIHDDSLTFKEDIQKAQVSGQGDSLHEHIANLAGSPAIKKGILQTVKVVDELVKVMGRHKPENIVIEMARENQTTQKGQKNSRERMKRIEEGIKELGSQILKEHPVENTQLQNEKLYLYYLQNGRDMYVDQELDINRLSDYDVDHIVPQSFLKDDSIDNKVLTRSDKARGKSDNVPSEEVVKKMKNYWRQLLNAKLITQRKFDNLTKAERGGLSELDKAGFIKRQLVETRQITKHVAQILDSRMNTKYDENDKLIREVKVITLKSKLVSDFRKDFQFYKVREINNYHHAHDAYLNAVVGTALIKKYPKLESEFVYGDYKVYDVRKMIAKSEQEIGKATAKYFFYSNIMNFFKTEITLANGEIRKRPLIETNGETGEIVWDKGRDFATVRKVLSMPQVNIVKKTEVQTGGFSKESILPKRNSDKLIARKKDWDPKKYGGFDSPTVAYSVLVVAKVEKGKSKKLKSVKELLGITIMERSSFEKNPIDFLEAKGYKEVKKDLIIKLPKYSLFELENGRKRMLASAGELQKGNELALPSKYVNFLYLASHYEKLKGSPEDNEQKQLFVEQHKHYLDEIIEQISEFSKRVILADANLDKVLSAYNKHRDKPIREQAENIIHLFTLTNLGAPAAFKYFDTTIDRKRYTSTKEVLDATLIHQSITGLYETRIDLSQLGGDGGEAAAKGSSGGSGGVPWILKKPLELTIKLDLEEQQGTLLNNSILSKKGKEELKQLFEKYSALWQSWENQVGHRRIRPHKIATGTVKPTPQKQYHINPKAKPDIQIVINDLLKQGVLIQKESTMNTPVYPVPKPNGRWRMVLDYRAVNKVTPLIAVQNQHSYGILGSLFKGRYKTTIDLSNGFWAHPIVPEDYWITAFTWQGKQYCWTVLPQGFLNSPGLFNGDVVDLLQGIPNVEVYVDDVYISHDSEKEHLEYLDILFNRLKEAGYIISLKKSNIANSIVDFLGFQITNEGRGLTDTFKEKLENITAPTTLKQLQSILGKLNFARNFIPDFTELIAPLYALIPKSPKNYVPWQIEHSTTLETLITKLNGAEYLQGRKGDKTLIMKVNASYTTGYIRYYNEGEKKPISYVSIVFSKTELKFTELEKLLTTVHKGLLKALDLSMGQNIHVYSPIVSMQNIQKTPQTAKKALASRWLSWLSYLEDPRIRFFYDPQMPALKDLPAVDTGKDNKKHPSNFQHIFYTDGSAITSPTKEGHLNAGMGIVYFINKDGNLQKQQEWSISLGNHTAQFAEIAAFEFALKKCLPLGGNILVVTDSNYVAKAYNEELDVWASNGFVNNRKKPLKHISKWKSVADLKRLRPDVVVTHEPGHQKLDSSPHAYGNNLADQLATQASFKVHAGKRTADGSEFEKRTADGSEFESPKKKAKVE

SEQ ID NO: 7109 - protein, 2094 aa, synthetic construct
MPAAKRVKLDGGDKKYSIGLDIGTNSVGWAVITDEYKVPSKKFKVLGNTDRHSIKKNLIGALLFDSGETAEATRLKRTARRRYTRRKNRICYLQEIFSNEMAKVDDSFFHRLEESFLVEEDKKHERHPIFGNIVDEVAYHEKYPTIYHLRKKLVDSTDKADLRLIYLALAHMIKFRGHFLIEGDLNPDNSDVDKLFIQLVQTYNQLFEENPINASGVDAKAILSARLSKSRRLENLIAQLPGEKKNGLFGNLIALSLGLTPNFKSNFDLAEDAKLQLSKDTYDDDLDNLLAQIGDQYADLFLAAKNLSDAILLSDILRVNTEITKAPLSASMIKRYDEHHQDLTLLKALVRQQLPEKYKEIFFDQSKNGYAGYIDGGASQEEFYKFIKPILEKMDGTEELLVKLNREDLLRKQRTFDNGSIPHQIHLGELHAILRRQEDFYPFLKDNREKIEKILTFRIPYYVGPLARGNSRFAWMTRKSEETITPWNFEEVVDKGASAQSFIERMTNFDKNLPNEKVLPKHSLLYEYFTVYNELTKVKYVTEGMRKPAFLSGEQKKAIVDLLFKTNRKVTVKQLKEDYFKKIECFDSVEISGVEDRFNASLGTYHDLLKIIKDKDFLDNEENEDILEDIVLTLTLFEDREMIEERLKTYAHLFDDKVMKQLKRRRYTGWGRLSRKLINGIRDKQSGKTILDFLKSDGFANRNFMQLIHDDSLTFKEDIQKAQVSGQGDSLHEHIANLAGSPAIKKGILQTVKVVDELVKVMGRHKPENIVIEMARENQTTQKGQKNSRERMKRIEEGIKELGSQILKEHPVENTQLQNEKLYLYYLQNGRDMYVDQELDINRLSDYDVDHIVPQSFLKDDSIDNKVLTRSDKARGKSDNVPSEEVVKKMKNYWRQLLNAKLITQRKFDNLTKAERGGLSELDKAGFIKRQLVETRQITKHVAQILDSRMNTKYDENDKLIREVKVITLKSKLVSDFRKDFQFYKVREINNYHHAHDAYLNAVVGTALIKKYPKLESEFVYGDYKVYDVRKMIAKSEQEIGKATAKYFFYSNIMNFFKTEITLANGEIRKRPLIETNGETGEIVWDKGRDFATVRKVLSMPQVNIVKKTEVQTGGFSKESILPKRNSDKLIARKKDWDPKKYGGFDSPTVAYSVLVVAKVEKGKSKKLKSVKELLGITIMERSSFEKNPIDFLEAKGYKEVKKDLIIKLPKYSLFELENGRKRMLASAGELQKGNELALPSKYVNFLYLASHYEKLKGSPEDNEQKQLFVEQHKHYLDEIIEQISEFSKRVILADANLDKVLSAYNKHRDKPIREQAENIIHLFTLTNLGAPAAFKYFDTTIDRKRYTSTKEVLDATLIHQSITGLYETRIDLSQLGGDGGEAAAKGSSGGSGGVLNLEEEYRLHEKPVPSSIDPSWLQLFPTVWAERAGMGLANQVPPVVVELRSGASPVAVRQYPMSKEAREGIRPHIQKFLDLGVLVPCRSPWNTPLLPVKKPGTNDYRPVQDLREINKRVQDIHPTVPNPYNLLSSLPPSYTWYSVLDLKDAFFCLRLHPNSQPLFAFEWKDPEKGNTGQLTWTRLPQGFKNSPTLFNEALHRDLAPFRALNPQVVLLQYVDDLLVAAPTYEDCKKGTQKLLQELSKLGYRVSAKKAQLCQREVTYLGYLLKEGKRWLTPARKATVMKIPVPTTPRQVREFLGTAGFCRLWIPGFASLAAPLYPLTKPSIPFIWTEEHQQAFDHIKKALLSAPALALPDLTKPFTLYIDERAGVARGVLTQTLGPWRRPVAYLSKKLDPVASGWPTCLKAVAAVALLLKDADKLTLGQNVTVIASHSLESIVRQPPDRWMTNARMTHYQSLLLNERVSFAPPAVLNPATLLPVESEATPVHRCSEILAEETGTRRDLEDQPLPGVPTWYTDGSSFITEGKRRAGAPIVDGKRTVWASSLPEGTSAQKAELVALTQALRLAEGKNINIYTDSRYAFATAHIHGAIYKQRGWLTSAGKDIKNKEEILALLEAIHLPRRVAIIHCPGHQRGSNPVATGNRRADEAAKQAALSTRVLAGTTKPAGKRTADGSEFEKRTADGSEFESPKKKAKVE

SEQ ID NO: 7110 - protein, 2127 aa, synthetic construct
MPAAKRVKLDGGDKKYSIGLDIGTNSVGWAVITDEYKVPSKKFKVLGNTDRHSIKKNLIGALLFDSGETAEATRLKRTARRRYTRRKNRICYLQEIFSNEMAKVDDSFFHRLEESFLVEEDKKHERHPIFGNIVDEVAYHEKYPTIYHLRKKLVDSTDKADLRLIYLALAHMIKFRGHFLIEGDLNPDNSDVDKLFIQLVQTYNQLFEENPINASGVDAKAILSARLSKSRRLENLIAQLPGEKKNGLFGNLIALSLGLTPNFKSNFDLAEDAKLQLSKDTYDDDLDNLLAQIGDQYADLFLAAKNLSDAILLSDILRVNTEITKAPLSASMIKRYDEHHQDLTLLKALVRQQLPEKYKEIFFDQSKNGYAGYIDGGASQEEFYKFIKPILEKMDGTEELLVKLNREDLLRKQRTFDNGSIPHQIHLGELHAILRRQEDFYPFLKDNREKIEKILTFRIPYYVGPLARGNSRFAWMTRKSEETITPWNFEEVVDKGASAQSFIERMTNFDKNLPNEKVLPKHSLLYEYFTVYNELTKVKYVTEGMRKPAFLSGEQKKAIVDLLFKTNRKVTVKQLKEDYFKKIECFDSVEISGVEDRFNASLGTYHDLLKIIKDKDFLDNEENEDILEDIVLTLTLFEDREMIEERLKTYAHLFDDKVMKQLKRRRYTGWGRLSRKLINGIRDKQSGKTILDFLKSDGFANRNFMQLIHDDSLTFKEDIQKAQVSGQGDSLHEHIANLAGSPAIKKGILQTVKVVDELVKVMGRHKPENIVIEMARENQTTQKGQKNSRERMKRIEEGIKELGSQILKEHPVENTQLQNEKLYLYYLQNGRDMYVDQELDINRLSDYDVDHIVPQSFLKDDSIDNKVLTRSDKARGKSDNVPSEEVVKKMKNYWRQLLNAKLITQRKFDNLTKAERGGLSELDKAGFIKRQLVETRQITKHVAQILDSRMNTKYDENDKLIREVKVITLKSKLVSDFRKDFQFYKVREINNYHHAHDAYLNAVVGTALIKKYPKLESEFVYGDYKVYDVRKMIAKSEQEIGKATAKYFFYSNIMNFFKTEITLANGEIRKRPLIETNGETGEIVWDKGRDFATVRKVLSMPQVNIVKKTEVQTGGFSKESILPKRNSDKLIARKKDWDPKKYGGFDSPTVAYSVLVVAKVEKGKSKKLKSVKELLGITIMERSSFEKNPIDFLEAKGYKEVKKDLIIKLPKYSLFELENGRKRMLASAGELQKGNELALPSKYVNFLYLASHYEKLKGSPEDNEQKQLFVEQHKHYLDEIIEQISEFSKRVILADANLDKVLSAYNKHRDKPIREQAENIIHLFTLTNLGAPAAFKYFDTTIDRKRYTSTKEVLDATLIHQSITGLYETRIDLSQLGGDGGEAAAKGSSGGSGGLLGRDLLTKLKAQIQFSTEGPQVTWEDRPAMCLVLNLEEEYRLHEKPVPPSIDPSWLQLFPMVWAEKAGMGLANQVPPVVVELKSDASPVAVRQYPMSKEAREGIRPHIQRFLDLGILVPCQSPWNTPLLPVKKPGTNDYRPVQDLREVNKRVQDIHPTVPNPYNLLSSLPPSHTWYSVLDLKDAFFCLKLHPNSQPLFAFEWRDPEKGNTGQLTWTRLPQGFKNSPTLFNEALHRDLASFRALNPQVVMLQYVDDLLVAAPTYRDCKEGTRRLLQELSKLGYRVSAKKAQLCREEVTYLGYLLKGGKRWLTPARKATVMKIPTPTTPRQVREFLGTAGFCRLWIPGFASLAAPLYPLTRPKVPFTWTEAHQEAFGRIKEALLSAPALALPDLTKPFALYVDEKEGVARGVLTQTLGPWRRPVAYLSKKLDPVASGWPTCLKAIAAVALLLKDADKLTLGQNVLVIAPHNLESIVRQPPDRWMTNARMTHYQSLLLNERVSFAPPAILNPATLLPVESDDTPIHICSEILAEETGTRPDLRDQPLPGVPAWYTDGSSFIMDGRRQAGAAIVDNKRTVWASNLPEGTSAQKAELIALTQALRLAEGKSINIYTDSRYAFATAHVHGAIYKQRGWLTSAGKDIKNKEEILALLEAIHLPKRVAIIHCPGHQRGTDPVATGNRKADEAAKQAAQSTRILTETTKNAGKRTADGSEFEKRTADGSEFESPKKKAKVE

SEQ ID NO: 7111 - protein, 2218 aa, synthetic construct
MPAAKRVKLDGGDKKYSIGLDIGTNSVGWAVITDEYKVPSKKFKVLGNTDRHSIKKNLIGALLFDSGETAEATRLKRTARRRYTRRKNRICYLQEIFSNEMAKVDDSFFHRLEESFLVEEDKKHERHPIFGNIVDEVAYHEKYPTIYHLRKKLVDSTDKADLRLIYLALAHMIKFRGHFLIEGDLNPDNSDVDKLFIQLVQTYNQLFEENPINASGVDAKAILSARLSKSRRLENLIAQLPGEKKNGLFGNLIALSLGLTPNFKSNFDLAEDAKLQLSKDTYDDDLDNLLAQIGDQYADLFLAAKNLSDAILLSDILRVNTEITKAPLSASMIKRYDEHHQDLTLLKALVRQQLPEKYKEIFFDQSKNGYAGYIDGGASQEEFYKFIKPILEKMDGTEELLVKLNREDLLRKQRTFDNGSIPHQIHLGELHAILRRQEDFYPFLKDNREKIEKILTFRIPYYVGPLARGNSRFAWMTRKSEETITPWNFEEVVDKGASAQSFIERMTNFDKNLPNEKVLPKHSLLYEYFTVYNELTKVKYVTEGMRKPAFLSGEQKKAIVDLLFKTNRKVTVKQLKEDYFKKIECFDSVEISGVEDRFNASLGTYHDLLKIIKDKDFLDNEENEDILEDIVLTLTLFEDREMIEERLKTYAHLFDDKVMKQLKRRRYTGWGRLSRKLINGIRDKQSGKTILDFLKSDGFANRNFMQLIHDDSLTFKEDIQKAQVSGQGDSLHEHIANLAGSPAIKKGILQTVKVVDELVKVMGRHKPENIVIEMARENQTTQKGQKNSRERMKRIEEGIKELGSQILKEHPVENTQLQNEKLYLYYLQNGRDMYVDQELDINRLSDYDVDHIVPQSFLKDDSIDNKVLTRSDKARGKSDNVPSEEVVKKMKNYWRQLLNAKLITQRKFDNLTKAERGGLSELDKAGFIKRQLVETRQITKHVAQILDSRMNTKYDENDKLIREVKVITLKSKLVSDFRKDFQFYKVREINNYHHAHDAYLNAVVGTALIKKYPKLESEFVYGDYKVYDVRKMIAKSEQEIGKATAKYFFYSNIMNFFKTEITLANGEIRKRPLIETNGETGEIVWDKGRDFATVRKVLSMPQVNIVKKTEVQTGGFSKESILPKRNSDKLIARKKDWDPKKYGGFDSPTVAYSVLVVAKVEKGKSKKLKSVKELLGITIMERSSFEKNPIDFLEAKGYKEVKKDLIIKLPKYSLFELENGRKRMLASAGELQKGNELALPSKYVNFLYLASHYEKLKGSPEDNEQKQLFVEQHKHYLDEIIEQISEFSKRVILADANLDKVLSAYNKHRDKPIREQAENIIHLFTLTNLGAPAAFKYFDTTIDRKRYTSTKEVLDATLIHQSITGLYETRIDLSQLGGDGGEAAAKGSSGGSGGTLGDQGSRGSDPLPEPRVTLTVEGIPTEFLVNTGAEHSVLTKPMGKMGSKRTVVAGATGSKVYPWTTKRLLKIGQKQVTHSFLVIPECPAPLLGRDLLTKLKAQIQFSTEGPQVTWEDRPAMCLVLNLEEEYRLHEKPVPPSIDPSWLQLFPMVWAEKAGMGLANQVPPVVVELKSDASPVAVRQYPMSKEAREGIRPHIQRFLDLGILVPCQSPWNTPLLPVKKPGTNDYRPVQDLREVNKRVQDIHPTVPNPYNLLSSLPPSHTWYSVLDLKDAFFCLKLHPNSQPLFAFEWRDPEKGNTGQLTWTRLPQGFKNSPTLFNEALHRDLASFRALNPQVVMLQYVDDLLVAAPTYRDCKEGTRRLLQELSKLGYRVSAKKAQLCREEVTYLGYLLKGGKRWLTPARKATVMKIPTPTTPRQVREFLGTAGFCRLWIPGFASLAAPLYPLTRPKVPFTWTEAHQEAFGRIKEALLSAPALALPDLTKPFALYVDEKEGVARGVLTQTLGPWRRPVAYLSKKLDPVASGWPTCLKAIAAVALLLKDADKLTLGQNVLVIAPHNLESIVRQPPDRWMTNARMTHYQSLLLNERVSFAPPAILNPATLLPVESDDTPIHICSEILAEETGTRPDLRDQPLPGVPAWYTDGSSFIMDGRRQAGAAIVDNKRTVWASNLPEGTSAQKAELIALTQALRLAEGKSINIYTDSRYAFATAHVHGAIYKQRGWLTSAGKDIKNKEEILALLEAIHLPKRVAIIHCPGHQRGTDPVATGNRKADEAAKQAAQSTRILTETTKNAGKRTADGSEFEKRTADGSEFESPKKKAKVE

SEQ ID NO: 7112 - protein, 2218 aa, synthetic construct
MPAAKRVKLDGGDKKYSIGLDIGTNSVGWAVITDEYKVPSKKFKVLGNTDRHSIKKNLIGALLFDSGETAEATRLKRTARRRYTRRKNRICYLQEIFSNEMAKVDDSFFHRLEESFLVEEDKKHERHPIFGNIVDEVAYHEKYPTIYHLRKKLVDSTDKADLRLIYLALAHMIKFRGHFLIEGDLNPDNSDVDKLFIQLVQTYNQLFEENPINASGVDAKAILSARLSKSRRLENLIAQLPGEKKNGLFGNLIALSLGLTPNFKSNFDLAEDAKLQLSKDTYDDDLDNLLAQIGDQYADLFLAAKNLSDAILLSDILRVNTEITKAPLSASMIKRYDEHHQDLTLLKALVRQQLPEKYKEIFFDQSKNGYAGYIDGGASQEEFYKFIKPILEKMDGTEELLVKLNREDLLRKQRTFDNGSIPHQIHLGELHAILRRQEDFYPFLKDNREKIEKILTFRIPYYVGPLARGNSRFAWMTRKSEETITPWNFEEVVDKGASAQSFIERMTNFDKNLPNEKVLPKHSLLYEYFTVYNELTKVKYVTEGMRKPAFLSGEQKKAIVDLLFKTNRKVTVKQLKEDYFKKIECFDSVEISGVEDRFNASLGTYHDLLKIIKDKDFLDNEENEDILEDIVLTLTLFEDREMIEERLKTYAHLFDDKVMKQLKRRRYTGWGRLSRKLINGIRDKQSGKTILDFLKSDGFANRNFMQLIHDDSLTFKEDIQKAQVSGQGDSLHEHIANLAGSPAIKKGILQTVKVVDELVKVMGRHKPENIVIEMARENQTTQKGQKNSRERMKRIEEGIKELGSQILKEHPVENTQLQNEKLYLYYLQNGRDMYVDQELDINRLSDYDVDHIVPQSFLKDDSIDNKVLTRSDKARGKSDNVPSEEVVKKMKNYWRQLLNAKLITQRKFDNLTKAERGGLSELDKAGFIKRQLVETRQITKHVAQILDSRMNTKYDENDKLIREVKVITLKSKLVSDFRKDFQFYKVREINNYHHAHDAYLNAVVGTALIKKYPKLESEFVYGDYKVYDVRKMIAKSEQEIGKATAKYFFYSNIMNFFKTEITLANGEIRKRPLIETNGETGEIVWDKGRDFATVRKVLSMPQVNIVKKTEVQTGGFSKESILPKRNSDKLIARKKDWDPKKYGGFDSPTVAYSVLVVAKVEKGKSKKLKSVKELLGITIMERSSFEKNPIDFLEAKGYKEVKKDLIIKLPKYSLFELENGRKRMLASAGELQKGNELALPSKYVNFLYLASHYEKLKGSPEDNEQKQLFVEQHKHYLDEIIEQISEFSKRVILADANLDKVLSAYNKHRDKPIREQAENIIHLFTLTNLGAPAAFKYFDTTIDRKRYTSTKEVLDATLIHQSITGLYETRIDLSQLGGDGGEAAAKGSSGGSGGTLGDQGSRGSDPLPEPRVTLTVEGIPTEFLVNTGAEHSVLTKPMGKMGSKRTVVAGATGSKVYPWTTKRLLKIGQKQVTHSFLVIPECPAPLLGRDLLTKLKAQIQFSTEGPQVTWEDRPAMCLVLNLEEEYRLHEKPVPPSIDPSWLQLFPMVWAEKAGMGLANQVPPVVVELKSDASPVAVRQYPMSKEAREGIRPHIQRFLDLGILVPCQSPWNTPLLPVKKPGTNDYRPVQDLREVNKRVQDIHPTVPNPYNLLSSLPPSHTWYSVLDLKDAFFCLKLHPNSQPLFAFEWRDPEKGNTGQLTWTRLPQGFKNSPTLFNEALHRDLASFRALNPQVVMLQYVDDLLVAAPTYRDCKEGTRRLLQELSKLGYRVSAKKAQLCREEVTYLGYLLKGGKRWLTPARKATVMKIPTPTTPRQVREFLGKAGFCRLFIPGFASLAAPLYPLTRPKVPFTWTEAHQEAFGRIKEALLSAPALALPDLTKPFALYVDEKEGVARGVLTQTLGPWRRPVAYLSKKLDPVASGWPTCLKAIAAVALLLKDADKLTLGQNVLVIAPHNLESIVRQPPDRWMTNARMTHYQSLLLNERVSFAPPAILNPATLLPVESDDTPIHICSEILAEETGTRPDLRDQPLPGVPAWYTDGSSFIMDGRRQAGAAIVDNKRTVWASNLPEGTSAQKAELIALTQALRLAEGKSINIYTDSRYAFATAHVHGAIYKQRGWLTSAGKDIKNKEEILALLEAIHLPKRVAIIHCPGHQRGTDPVATGNRKADEAAKQAAQSTRILTETTKNAGKRTADGSEFEKRTADGSEFESPKKKAKVE

SEQ ID NO: 7113 - protein, 2096 aa, synthetic construct
MPAAKRVKLDGGDKKYSIGLDIGTNSVGWAVITDEYKVPSKKFKVLGNTDRHSIKKNLIGALLFDSGETAEATRLKRTARRRYTRRKNRICYLQEIFSNEMAKVDDSFFHRLEESFLVEEDKKHERHPIFGNIVDEVAYHEKYPTIYHLRKKLVDSTDKADLRLIYLALAHMIKFRGHFLIEGDLNPDNSDVDKLFIQLVQTYNQLFEENPINASGVDAKAILSARLSKSRRLENLIAQLPGEKKNGLFGNLIALSLGLTPNFKSNFDLAEDAKLQLSKDTYDDDLDNLLAQIGDQYADLFLAAKNLSDAILLSDILRVNTEITKAPLSASMIKRYDEHHQDLTLLKALVRQQLPEKYKEIFFDQSKNGYAGYIDGGASQEEFYKFIKPILEKMDGTEELLVKLNREDLLRKQRTFDNGSIPHQIHLGELHAILRRQEDFYPFLKDNREKIEKILTFRIPYYVGPLARGNSRFAWMTRKSEETITPWNFEEVVDKGASAQSFIERMTNFDKNLPNEKVLPKHSLLYEYFTVYNELTKVKYVTEGMRKPAFLSGEQKKAIVDLLFKTNRKVTVKQLKEDYFKKIECFDSVEISGVEDRFNASLGTYHDLLKIIKDKDFLDNEENEDILEDIVLTLTLFEDREMIEERLKTYAHLFDDKVMKQLKRRRYTGWGRLSRKLINGIRDKQSGKTILDFLKSDGFANRNFMQLIHDDSLTFKEDIQKAQVSGQGDSLHEHIANLAGSPAIKKGILQTVKVVDELVKVMGRHKPENIVIEMARENQTTQKGQKNSRERMKRIEEGIKELGSQILKEHPVENTQLQNEKLYLYYLQNGRDMYVDQELDINRLSDYDVDHIVPQSFLKDDSIDNKVLTRSDKARGKSDNVPSEEVVKKMKNYWRQLLNAKLITQRKFDNLTKAERGGLSELDKAGFIKRQLVETRQITKHVAQILDSRMNTKYDENDKLIREVKVITLKSKLVSDFRKDFQFYKVREINNYHHAHDAYLNAVVGTALIKKYPKLESEFVYGDYKVYDVRKMIAKSEQEIGKATAKYFFYSNIMNFFKTEITLANGEIRKRPLIETNGETGEIVWDKGRDFATVRKVLSMPQVNIVKKTEVQTGGFSKESILPKRNSDKLIARKKDWDPKKYGGFDSPTVAYSVLVVAKVEKGKSKKLKSVKELLGITIMERSSFEKNPIDFLEAKGYKEVKKDLIIKLPKYSLFELENGRKRMLASAGELQKGNELALPSKYVNFLYLASHYEKLKGSPEDNEQKQLFVEQHKHYLDEIIEQISEFSKRVILADANLDKVLSAYNKHRDKPIREQAENIIHLFTLTNLGAPAAFKYFDTTIDRKRYTSTKEVLDATLIHQSITGLYETRIDLSQLGGDGGEAAAKGSSGGSGGTLNLEDEYRLYETSAEPEVSPGSTWLSDFPQAWAETGGMGLAVRQAPLIIPLKATSTPVSIKQYPMSQEAKLGIKPHIQRLLDQGILVPCQSPWNTPLLPVKKPGTNDYRPVQDLREVNKRVEDIHPTVPNPYNLLSGLPPSHRWYTVLDLKDAFFCLRLHPTSQPLFAFEWRDPGMGISGQLTWTRLPQGFKNSPTLFNEALHRDLADFRIQHPDLILLQYVDDILLAATSELDCQQGTRALLLTLGNLGYRASAKKAQLCQKQVKYLGYLLKEGQRWLTEARKETVMGQPTPKTPRQLREFLGTAGFCRLWIPGFAEMAAPLYPLTKPGTLFNWGPDQQKAYQEIKQALLTAPALGLPDLTKPFELFVDEKQGYAKGVLTQKLGPWRRPVAYLSKKLDPVAAGWPPCLRMVAAIAVLRKDAGKLTMGQPLVILAPHAVEALVKQPPDRWLSNARMTHYQAMLLDTDRVQFGPVVALNPATLLPLPEEGAPHDCLEILAETHGTRPDLTDQPIPDADHTWYTDGSSFLQEGQRKAGAAVTTETEVIWARALPAGTSAQRAELIALTQALKMAEGKRLNVYTDSRYAFATAHIHGEIYRRRGWLTSEGREIKNKSEILALLKALFLPKRLSIIHCLGHQKGDSAEARGNRLADQAAREAAIKTPPDTSTLLAGKRTADGSEFEKRTADGSEFESPKKKAKVE

SEQ ID NO: 7114 - protein, 2096 aa, synthetic construct
MPAAKRVKLDGGDKKYSIGLDIGTNSVGWAVITDEYKVPSKKFKVLGNTDRHSIKKNLIGALLFDSGETAEATRLKRTARRRYTRRKNRICYLQEIFSNEMAKVDDSFFHRLEESFLVEEDKKHERHPIFGNIVDEVAYHEKYPTIYHLRKKLVDSTDKADLRLIYLALAHMIKFRGHFLIEGDLNPDNSDVDKLFIQLVQTYNQLFEENPINASGVDAKAILSARLSKSRRLENLIAQLPGEKKNGLFGNLIALSLGLTPNFKSNFDLAEDAKLQLSKDTYDDDLDNLLAQIGDQYADLFLAAKNLSDAILLSDILRVNTEITKAPLSASMIKRYDEHHQDLTLLKALVRQQLPEKYKEIFFDQSKNGYAGYIDGGASQEEFYKFIKPILEKMDGTEELLVKLNREDLLRKQRTFDNGSIPHQIHLGELHAILRRQEDFYPFLKDNREKIEKILTFRIPYYVGPLARGNSRFAWMTRKSEETITPWNFEEVVDKGASAQSFIERMTNFDKNLPNEKVLPKHSLLYEYFTVYNELTKVKYVTEGMRKPAFLSGEQKKAIVDLLFKTNRKVTVKQLKEDYFKKIECFDSVEISGVEDRFNASLGTYHDLLKIIKDKDFLDNEENEDILEDIVLTLTLFEDREMIEERLKTYAHLFDDKVMKQLKRRRYTGWGRLSRKLINGIRDKQSGKTILDFLKSDGFANRNFMQLIHDDSLTFKEDIQKAQVSGQGDSLHEHIANLAGSPAIKKGILQTVKVVDELVKVMGRHKPENIVIEMARENQTTQKGQKNSRERMKRIEEGIKELGSQILKEHPVENTQLQNEKLYLYYLQNGRDMYVDQELDINRLSDYDVDHIVPQSFLKDDSIDNKVLTRSDKARGKSDNVPSEEVVKKMKNYWRQLLNAKLITQRKFDNLTKAERGGLSELDKAGFIKRQLVETRQITKHVAQILDSRMNTKYDENDKLIREVKVITLKSKLVSDFRKDFQFYKVREINNYHHAHDAYLNAVVGTALIKKYPKLESEFVYGDYKVYDVRKMIAKSEQEIGKATAKYFFYSNIMNFFKTEITLANGEIRKRPLIETNGETGEIVWDKGRDFATVRKVLSMPQVNIVKKTEVQTGGFSKESILPKRNSDKLIARKKDWDPKKYGGFDSPTVAYSVLVVAKVEKGKSKKLKSVKELLGITIMERSSFEKNPIDFLEAKGYKEVKKDLIIKLPKYSLFELENGRKRMLASAGELQKGNELALPSKYVNFLYLASHYEKLKGSPEDNEQKQLFVEQHKHYLDEIIEQISEFSKRVILADANLDKVLSAYNKHRDKPIREQAENIIHLFTLTNLGAPAAFKYFDTTIDRKRYTSTKEVLDATLIHQSITGLYETRIDLSQLGGDGGEAAAKGSSGGSGGTLNIEDEYRLHETSKGPDVPLGSTWLSDFPQAWAETGGMGLAVRQAPLIIPLKATSTPVSIKQYPMSQEARLGIKPHIQRLLDQGILVPCQSPWNTPLLPVKKPGTNDYRPVQDLREVNKRVEDIHPTVPNPYNLLSGLPPSHQWYTVLDLKDAFFCLRLHPTSQSLFAFEWRDPEMGISGQLTWTRLPQGFKNSPTLFDEALHRDLADFRIQHPDLILLQYVDDLLLAATSELDCQQGTRALLQTLGDLGYRASAKKAQICQKQVKYLGYLLKEGQRWLTEARKETVMGQPTPKTPRQLREFLGTAGFCRLWIPGFAEMAAPLYPLTKTGTLFEWGPDQQKAYQEIKQALLTAPALGLPDLTKPFELFVDEKQGYAKGVLTQKLGPWRRPVAYLSKKLDPVAAGWPPCLRMVAAIAVLTKDAGKLTMGQPLVILAPHAVEALVKQPPDRWLSNARMTHYQALLLDTDRVQFGPIVALNPATLLPLPEEGLQHDCLDILAEAHGTRPDLTDQPLPDADHTWYTDGSSFLQEGQRKAGAAVTTETEVVWAKALPAGTSAQRAELIALTQALKMAEGKKLNVYTDSRYAFATAHIHGEIYRRRGLLTSEGKEIKNKDEILALLKALFLPKRLSIIHCPGHQKGNRAEARGNRMADQAAREVATRETPETSTLLAGKRTADGSEFEKRTADGSEFESPKKKAKVE

SEQ ID NO: 7115 - protein, 2096 aa, synthetic construct
MPAAKRVKLDGGDKKYSIGLDIGTNSVGWAVITDEYKVPSKKFKVLGNTDRHSIKKNLIGALLFDSGETAEATRLKRTARRRYTRRKNRICYLQEIFSNEMAKVDDSFFHRLEESFLVEEDKKHERHPIFGNIVDEVAYHEKYPTIYHLRKKLVDSTDKADLRLIYLALAHMIKFRGHFLIEGDLNPDNSDVDKLFIQLVQTYNQLFEENPINASGVDAKAILSARLSKSRRLENLIAQLPGEKKNGLFGNLIALSLGLTPNFKSNFDLAEDAKLQLSKDTYDDDLDNLLAQIGDQYADLFLAAKNLSDAILLSDILRVNTEITKAPLSASMIKRYDEHHQDLTLLKALVRQQLPEKYKEIFFDQSKNGYAGYIDGGASQEEFYKFIKPILEKMDGTEELLVKLNREDLLRKQRTFDNGSIPHQIHLGELHAILRRQEDFYPFLKDNREKIEKILTFRIPYYVGPLARGNSRFAWMTRKSEETITPWNFEEVVDKGASAQSFIERMTNFDKNLPNEKVLPKHSLLYEYFTVYNELTKVKYVTEGMRKPAFLSGEQKKAIVDLLFKTNRKVTVKQLKEDYFKKIECFDSVEISGVEDRFNASLGTYHDLLKIIKDKDFLDNEENEDILEDIVLTLTLFEDREMIEERLKTYAHLFDDKVMKQLKRRRYTGWGRLSRKLINGIRDKQSGKTILDFLKSDGFANRNFMQLIHDDSLTFKEDIQKAQVSGQGDSLHEHIANLAGSPAIKKGILQTVKVVDELVKVMGRHKPENIVIEMARENQTTQKGQKNSRERMKRIEEGIKELGSQILKEHPVENTQLQNEKLYLYYLQNGRDMYVDQELDINRLSDYDVDHIVPQSFLKDDSIDNKVLTRSDKARGKSDNVPSEEVVKKMKNYWRQLLNAKLITQRKFDNLTKAERGGLSELDKAGFIKRQLVETRQITKHVAQILDSRMNTKYDENDKLIREVKVITLKSKLVSDFRKDFQFYKVREINNYHHAHDAYLNAVVGTALIKKYPKLESEFVYGDYKVYDVRKMIAKSEQEIGKATAKYFFYSNIMNFFKTEITLANGEIRKRPLIETNGETGEIVWDKGRDFATVRKVLSMPQVNIVKKTEVQTGGFSKESILPKRNSDKLIARKKDWDPKKYGGFDSPTVAYSVLVVAKVEKGKSKKLKSVKELLGITIMERSSFEKNPIDFLEAKGYKEVKKDLIIKLPKYSLFELENGRKRMLASAGELQKGNELALPSKYVNFLYLASHYEKLKGSPEDNEQKQLFVEQHKHYLDEIIEQISEFSKRVILADANLDKVLSAYNKHRDKPIREQAENIIHLFTLTNLGAPAAFKYFDTTIDRKRYTSTKEVLDATLIHQSITGLYETRIDLSQLGGDGGEAAAKGSSGGSGGTLNIEDEYRLHETSKGPDVPLGSTWLSDFPQAWAETGGMGLAVRQAPLIIPLKATSTPVSIKQYPMSQEARLGIKPHIQRLLDQGILVPCQSPWNTPLLPVKKPGTNDYRPVQDLREVNKRVEDIHPTVPNPYNLLSGLPPSHQWYTVLDLKDAFFCLRLHPTSQSLFAFEWRDPEMGISGQLTWTRLPQGFKNSPTLFNEALHRDLADFRIQHPDLILLQYVDDLLLAATSELDCQQGTRALLQTLGDLGYRASAKKAQICQKQVKYLGYLLKEGQRWLTEARKETVMGQPTPKTPRQLREFLGKAGFCRLFIPGFAEMAAPLYPLTKPGTLFEWGPDQQKAYQEIKQALLTAPALGLPDLTKPFELFVDEKQGYAKGVLTQKLGPWRRPVAYLSKKLDPVAAGWPPCLRMVAAIAVLTKDAGKLTMGQPLVILAPHAVEALVKQPPDRWLSNARMTHYQALLLDTDRVQFGPIVALNPATLLPLPEEGLQHDCLDILAEAHGTRPDLTDQPLPDADHTWYTDGSSFLQEGQRKAGAAVTTETEVVWAKALPAGTSAQRAELIALTQALKMAEGKKLNVYTDSRYAFATAHIHGEIYRRRGWLTSEGKEIKNKDEILALLKALFLPKRLSIIHCPGHQKGNRAEARGNRMADQAAREVATRETPETSTLLAGKRTADGSEFEKRTADGSEFESPKKKAKVE

SEQ ID NO: 7116 - protein, 2096 aa, synthetic construct
MPAAKRVKLDGGDKKYSIGLDIGTNSVGWAVITDEYKVPSKKFKVLGNTDRHSIKKNLIGALLFDSGETAEATRLKRTARRRYTRRKNRICYLQEIFSNEMAKVDDSFFHRLEESFLVEEDKKHERHPIFGNIVDEVAYHEKYPTIYHLRKKLVDSTDKADLRLIYLALAHMIKFRGHFLIEGDLNPDNSDVDKLFIQLVQTYNQLFEENPINASGVDAKAILSARLSKSRRLENLIAQLPGEKKNGLFGNLIALSLGLTPNFKSNFDLAEDAKLQLSKDTYDDDLDNLLAQIGDQYADLFLAAKNLSDAILLSDILRVNTEITKAPLSASMIKRYDEHHQDLTLLKALVRQQLPEKYKEIFFDQSKNGYAGYIDGGASQEEFYKFIKPILEKMDGTEELLVKLNREDLLRKQRTFDNGSIPHQIHLGELHAILRRQEDFYPFLKDNREKIEKILTFRIPYYVGPLARGNSRFAWMTRKSEETITPWNFEEVVDKGASAQSFIERMTNFDKNLPNEKVLPKHSLLYEYFTVYNELTKVKYVTEGMRKPAFLSGEQKKAIVDLLFKTNRKVTVKQLKEDYFKKIECFDSVEISGVEDRFNASLGTYHDLLKIIKDKDFLDNEENEDILEDIVLTLTLFEDREMIEERLKTYAHLFDDKVMKQLKRRRYTGWGRLSRKLINGIRDKQSGKTILDFLKSDGFANRNFMQLIHDDSLTFKEDIQKAQVSGQGDSLHEHIANLAGSPAIKKGILQTVKVVDELVKVMGRHKPENIVIEMARENQTTQKGQKNSRERMKRIEEGIKELGSQILKEHPVENTQLQNEKLYLYYLQNGRDMYVDQELDINRLSDYDVDHIVPQSFLKDDSIDNKVLTRSDKARGKSDNVPSEEVVKKMKNYWRQLLNAKLITQRKFDNLTKAERGGLSELDKAGFIKRQLVETRQITKHVAQILDSRMNTKYDENDKLIREVKVITLKSKLVSDFRKDFQFYKVREINNYHHAHDAYLNAVVGTALIKKYPKLESEFVYGDYKVYDVRKMIAKSEQEIGKATAKYFFYSNIMNFFKTEITLANGEIRKRPLIETNGETGEIVWDKGRDFATVRKVLSMPQVNIVKKTEVQTGGFSKESILPKRNSDKLIARKKDWDPKKYGGFDSPTVAYSVLVVAKVEKGKSKKLKSVKELLGITIMERSSFEKNPIDFLEAKGYKEVKKDLIIKLPKYSLFELENGRKRMLASAGELQKGNELALPSKYVNFLYLASHYEKLKGSPEDNEQKQLFVEQHKHYLDEIIEQISEFSKRVILADANLDKVLSAYNKHRDKPIREQAENIIHLFTLTNLGAPAAFKYFDTTIDRKRYTSTKEVLDATLIHQSITGLYETRIDLSQLGGDGGEAAAKGSSGGSGGTLNIEDEHRLHETSKEPDVSLGSTWLSDFPQAWAETGGMGLAVRQAPLIIPLKATSTPVSIKQYPMSQEARLGIKPHIQRLLDQGILVPCQSPWNTPLLPVKKPGTNDYRPVQDLREVNKRVEDIHPTVPNPYNLLSGLPPSHQWYTVLDLKDAFFCLRLHPTSQPLFAFEWRDPEMGISGQLTWTRLPQGFKNSPTLFDEALHRDLADFRIQHPDLILLQYVDDLLLAATSELDCQQGTRALLQTLGNLGYRASAKKAQICQKQVKYLGYLLKEGQRWLTEARKETVMGQPTPKTPRQLREFLGTAGFCRLWIPGFAEMAAPLYPLTKTGTLFNWGPDQQKAYQEIKQALLTAPALGLPDLTKPFELFVDEKQGYAKGVLTQKLGPWRRPVAYLSKKLDPVAAGWPPCLRMVAAIAVLTKDAGKLTMGQPLVILAPHAVEALVKQPPDRWLSNARMTHYQALLLDTDRVQFGPVVALNPATLLPLPEEGLQHNCLDILAEAHGTRPDLTDQPLPDADHTWYTDGSSLLQEGQRKAGAAVTTETEVIWAKALPAGTSAQRAELIALTQALKMAEGKKLNVYTDSRYAFATAHIHGEIYRRRGLLTSEGKEIKNKDEILALLKALFLPKRLSIIHCPGHQKGHSAEARGNRMADQAARKAAITETPDTSTLLAGKRTADGSEFEKRTADGSEFESPKKKAKVE

SEQ ID NO: 7117 - protein, 2090 aa, synthetic construct
MPAAKRVKLDGGDKKYSIGLDIGTNSVGWAVITDEYKVPSKKFKVLGNTDRHSIKKNLIGALLFDSGETAEATRLKRTARRRYTRRKNRICYLQEIFSNEMAKVDDSFFHRLEESFLVEEDKKHERHPIFGNIVDEVAYHEKYPTIYHLRKKLVDSTDKADLRLIYLALAHMIKFRGHFLIEGDLNPDNSDVDKLFIQLVQTYNQLFEENPINASGVDAKAILSARLSKSRRLENLIAQLPGEKKNGLFGNLIALSLGLTPNFKSNFDLAEDAKLQLSKDTYDDDLDNLLAQIGDQYADLFLAAKNLSDAILLSDILRVNTEITKAPLSASMIKRYDEHHQDLTLLKALVRQQLPEKYKEIFFDQSKNGYAGYIDGGASQEEFYKFIKPILEKMDGTEELLVKLNREDLLRKQRTFDNGSIPHQIHLGELHAILRRQEDFYPFLKDNREKIEKILTFRIPYYVGPLARGNSRFAWMTRKSEETITPWNFEEVVDKGASAQSFIERMTNFDKNLPNEKVLPKHSLLYEYFTVYNELTKVKYVTEGMRKPAFLSGEQKKAIVDLLFKTNRKVTVKQLKEDYFKKIECFDSVEISGVEDRFNASLGTYHDLLKIIKDKDFLDNEENEDILEDIVLTLTLFEDREMIEERLKTYAHLFDDKVMKQLKRRRYTGWGRLSRKLINGIRDKQSGKTILDFLKSDGFANRNFMQLIHDDSLTFKEDIQKAQVSGQGDSLHEHIANLAGSPAIKKGILQTVKVVDELVKVMGRHKPENIVIEMARENQTTQKGQKNSRERMKRIEEGIKELGSQILKEHPVENTQLQNEKLYLYYLQNGRDMYVDQELDINRLSDYDVDHIVPQSFLKDDSIDNKVLTRSDKARGKSDNVPSEEVVKKMKNYWRQLLNAKLITQRKFDNLTKAERGGLSELDKAGFIKRQLVETRQITKHVAQILDSRMNTKYDENDKLIREVKVITLKSKLVSDFRKDFQFYKVREINNYHHAHDAYLNAVVGTALIKKYPKLESEFVYGDYKVYDVRKMIAKSEQEIGKATAKYFFYSNIMNFFKTEITLANGEIRKRPLIETNGETGEIVWDKGRDFATVRKVLSMPQVNIVKKTEVQTGGFSKESILPKRNSDKLIARKKDWDPKKYGGFDSPTVAYSVLVVAKVEKGKSKKLKSVKELLGITIMERSSFEKNPIDFLEAKGYKEVKKDLIIKLPKYSLFELENGRKRMLASAGELQKGNELALPSKYVNFLYLASHYEKLKGSPEDNEQKQLFVEQHKHYLDEIIEQISEFSKRVILADANLDKVLSAYNKHRDKPIREQAENIIHLFTLTNLGAPAAFKYFDTTIDRKRYTSTKEVLDATLIHQSITGLYETRIDLSQLGGDGGEAAAKGSSGGSGGTLQLDDEYRLYSPLVKPDQNIQFWLEQFPQAWAETAGMGLAKQVPPQVIQLKASATPVSVRQYPLSKEAQEGIRPHVQRLIQQGILVPVQSPWNTPLLPVRKPGTNDYRPVQDLREVNKRVQDIHPTVPNPYNLLCALPPQRSWYTVLDLKDAFFCLRLHPTSQPLFAFEWRDPGTGRTGQLTWTRLPQGFKNSPTIFDEALHRDLANFRIQHPQVTLLQYVDDLLLAGATKQDCLEGTKALLLELSDLGYRASAKKAQICRREVTYLGYSLRDGQRWLTEARKKTVVQIPAPTTAKQVREFLGTAGFCRLWIPGFATLAAPLYPLTKEKGEFSWAPEHQKAFDAIKKALLSAPALALPDVTKPFTLYVDERKGVARGVLTQTLGPWRRPVAYLSKKLDPVASGWPVCLKAIAAVAILVKDADKLTLGQNITVIAPHALENIVRQPPDRWMTNARMTHYQSLLLTERVTFAPPAALNPATLLPEETDEPVTHDCHQLLIEETGVRKDLTDIPLTGEVLTWFTDGSSYVVEGKRMAGAAVVDGTRTIWASSLPEGTSAQKAELMALTQALRLAEGKSINIYTDSRYAFATAHVHGAIYKQRGLLTSAGREIKNKEEILSLLEALHLPKRLAIIHCPGHQKAKDPISRGNQMADRVAKQAAQGVNLLAGKRTADGSEFEKRTADGSEFESPKKKAKVE

SEQ ID NO: 7118 - protein, 2176 aa, synthetic construct
MPAAKRVKLDGGDKKYSIGLDIGTNSVGWAVITDEYKVPSKKFKVLGNTDRHSIKKNLIGALLFDSGETAEATRLKRTARRRYTRRKNRICYLQEIFSNEMAKVDDSFFHRLEESFLVEEDKKHERHPIFGNIVDEVAYHEKYPTIYHLRKKLVDSTDKADLRLIYLALAHMIKFRGHFLIEGDLNPDNSDVDKLFIQLVQTYNQLFEENPINASGVDAKAILSARLSKSRRLENLIAQLPGEKKNGLFGNLIALSLGLTPNFKSNFDLAEDAKLQLSKDTYDDDLDNLLAQIGDQYADLFLAAKNLSDAILLSDILRVNTEITKAPLSASMIKRYDEHHQDLTLLKALVRQQLPEKYKEIFFDQSKNGYAGYIDGGASQEEFYKFIKPILEKMDGTEELLVKLNREDLLRKQRTFDNGSIPHQIHLGELHAILRRQEDFYPFLKDNREKIEKILTFRIPYYVGPLARGNSRFAWMTRKSEETITPWNFEEVVDKGASAQSFIERMTNFDKNLPNEKVLPKHSLLYEYFTVYNELTKVKYVTEGMRKPAFLSGEQKKAIVDLLFKTNRKVTVKQLKEDYFKKIECFDSVEISGVEDRFNASLGTYHDLLKIIKDKDFLDNEENEDILEDIVLTLTLFEDREMIEERLKTYAHLFDDKVMKQLKRRRYTGWGRLSRKLINGIRDKQSGKTILDFLKSDGFANRNFMQLIHDDSLTFKEDIQKAQVSGQGDSLHEHIANLAGSPAIKKGILQTVKVVDELVKVMGRHKPENIVIEMARENQTTQKGQKNSRERMKRIEEGIKELGSQILKEHPVENTQLQNEKLYLYYLQNGRDMYVDQELDINRLSDYDVDHIVPQSFLKDDSIDNKVLTRSDKARGKSDNVPSEEVVKKMKNYWRQLLNAKLITQRKFDNLTKAERGGLSELDKAGFIKRQLVETRQITKHVAQILDSRMNTKYDENDKLIREVKVITLKSKLVSDFRKDFQFYKVREINNYHHAHDAYLNAVVGTALIKKYPKLESEFVYGDYKVYDVRKMIAKSEQEIGKATAKYFFYSNIMNFFKTEITLANGEIRKRPLIETNGETGEIVWDKGRDFATVRKVLSMPQVNIVKKTEVQTGGFSKESILPKRNSDKLIARKKDWDPKKYGGFDSPTVAYSVLVVAKVEKGKSKKLKSVKELLGITIMERSSFEKNPIDFLEAKGYKEVKKDLIIKLPKYSLFELENGRKRMLASAGELQKGNELALPSKYVNFLYLASHYEKLKGSPEDNEQKQLFVEQHKHYLDEIIEQISEFSKRVILADANLDKVLSAYNKHRDKPIREQAENIIHLFTLTNLGAPAAFKYFDTTIDRKRYTSTKEVLDATLIHQSITGLYETRIDLSQLGGDGGEAAAKGSSGGSGGMDPLQLLQPLEAEIKGTKLKAHWNSGATITCVPQAFLEEEVPIKNIWIKTIHGEKEQPVYYLTFKIQGRKVEAEVISSPYDYILVSPSDIPWLMKKPLQLTTLVPLQEYEERLLKQTMLTGSYKEKLQSLFLKYDALWQHWENQVGHRRIKPHHIATGTVNPRPQKQYPINPKAKASIQTVINDLLKQGVLIQQNSIMNTPVYPVPKPDGKWRMVLDYREVNKTIPLIAAQNQHSAGILSSIFRGKYKTTLDLSNGFWAHSITPESYWLTAFTWLGQQYCWTRLPQGFLNSPALFNADVVDLLKEVPNVQVYVDDIYISHDDPREHLEQLEKVFSLLLNAGYVVSLKKSEIAQHEVEFLGFNITKEGRGLTETFKQKLLNITPPRDLKQLQSILGLLNFARNFIPNFSELVKPLYNIIATAPGKYITWTTDNSQQLQNIISMLNSAENLEERNPEVRLIMKVNTSPSAGYIRFYNEFAKRPIMYLNYVYTKAEVKFTNTEKLLTTIHKGLIKALDLGMGQEILVYSPIVSMTKIQKTPLPERKALPIRWITWMSYLEDPRIQFHYDKTLPELQQVPTVTDDIIAKIKHPSEFSMVFYTDGSAIKHPNVNKSHNAGMGIAQVQFKPEFTVINTWSIPLGDHTAQLAEVAAVEFACKKALKIDGPVLIVTDSFYVAESVNKELPYWQSNGFFNNKKKPLKHVSKWKSIADCIQLKPDIIIIHEKGHQPTASTFHTEGNNLADKLATQGSYVVNAGKRTADGSEFEKRTADGSEFESPKKKAKVE

SEQ ID NO: 7119 - protein, 2094 aa, synthetic construct
MPAAKRVKLDGGDKKYSIGLDIGTNSVGWAVITDEYKVPSKKFKVLGNTDRHSIKKNLIGALLFDSGETAEATRLKRTARRRYTRRKNRICYLQEIFSNEMAKVDDSFFHRLEESFLVEEDKKHERHPIFGNIVDEVAYHEKYPTIYHLRKKLVDSTDKADLRLIYLALAHMIKFRGHFLIEGDLNPDNSDVDKLFIQLVQTYNQLFEENPINASGVDAKAILSARLSKSRRLENLIAQLPGEKKNGLFGNLIALSLGLTPNFKSNFDLAEDAKLQLSKDTYDDDLDNLLAQIGDQYADLFLAAKNLSDAILLSDILRVNTEITKAPLSASMIKRYDEHHQDLTLLKALVRQQLPEKYKEIFFDQSKNGYAGYIDGGASQEEFYKFIKPILEKMDGTEELLVKLNREDLLRKQRTFDNGSIPHQIHLGELHAILRRQEDFYPFLKDNREKIEKILTFRIPYYVGPLARGNSRFAWMTRKSEETITPWNFEEVVDKGASAQSFIERMTNFDKNLPNEKVLPKHSLLYEYFTVYNELTKVKYVTEGMRKPAFLSGEQKKAIVDLLFKTNRKVTVKQLKEDYFKKIECFDSVEISGVEDRFNASLGTYHDLLKIIKDKDFLDNEENEDILEDIVLTLTLFEDREMIEERLKTYAHLFDDKVMKQLKRRRYTGWGRLSRKLINGIRDKQSGKTILDFLKSDGFANRNFMQLIHDDSLTFKEDIQKAQVSGQGDSLHEHIANLAGSPAIKKGILQTVKVVDELVKVMGRHKPENIVIEMARENQTTQKGQKNSRERMKRIEEGIKELGSQILKEHPVENTQLQNEKLYLYYLQNGRDMYVDQELDINRLSDYDVDHIVPQSFLKDDSIDNKVLTRSDKARGKSDNVPSEEVVKKMKNYWRQLLNAKLITQRKFDNLTKAERGGLSELDKAGFIKRQLVETRQITKHVAQILDSRMNTKYDENDKLIREVKVITLKSKLVSDFRKDFQFYKVREINNYHHAHDAYLNAVVGTALIKKYPKLESEFVYGDYKVYDVRKMIAKSEQEIGKATAKYFFYSNIMNFFKTEITLANGEIRKRPLIETNGETGEIVWDKGRDFATVRKVLSMPQVNIVKKTEVQTGGFSKESILPKRNSDKLIARKKDWDPKKYGGFDSPTVAYSVLVVAKVEKGKSKKLKSVKELLGITIMERSSFEKNPIDFLEAKGYKEVKKDLIIKLPKYSLFELENGRKRMLASAGELQKGNELALPSKYVNFLYLASHYEKLKGSPEDNEQKQLFVEQHKHYLDEIIEQISEFSKRVILADANLDKVLSAYNKHRDKPIREQAENIIHLFTLTNLGAPAAFKYFDTTIDRKRYTSTKEVLDATLIHQSITGLYETRIDLSQLGGDGGEAAAKGSSGGSGGVLNLEEEYRLHEKPVPSSIDPSWLQLFPTVWAERAGMGLANQVPPVVVELRSGASPVAVRQYPMSKEAREGIRPHIQRFLDLGVLVPCQSPWNTPLLPVKKPGTNDYRPVQDLREINKRVQDIHPTVPNPYNLLSSLPPSHTWYSVLDLKDAFFCLKLHPNSQPLFAFEWRDPEKGNTGQLTWTRLPQGFKNSPTLFDEALHRDLAPFRALNPQVVLLQYVDDLLVAAPTYRDCKEGTQKLLQELSKLGYRVSAKKAQLCQKEVTYLGYLLKEGKRWLTPARKATVMKIPPPTTPRQVREFLGTAGFCRLWIPGFASLAAPLYPLTKESIPFIWTEEHQKAFDRIKEALLSAPALALPDLTKPFTLYVDERAGVARGVLTQTLGPWRRPVAYLSKKLDPVASGWPTCLKAVAAVALLLKDADKLTLGQNVTVIASHSLESIVRQPPDRWMTNARMTHYQSLLLNERVSFAPPAVLNPATLLPVESEATPVHRCSEILAEETGTRRDLKDQPLPGVPAWYTDGSSFIAEGKRRAGAAIVDGKRTVWASSLPEGTSAQKAELVALTQALRLAEGKDINIYTDSRYAFATAHIHGAIYKQRGLLTSAGKDIKNKEEILALLEAIHLPKRVAIIHCPGHQKGNDPVATGNRRADEAAKQAALSTRVLAETTKPAGKRTADGSEFEKRTADGSEFESPKKKAKVE

SEQ ID NO: 7120 - protein, 2094 aa, synthetic construct
MPAAKRVKLDGGDKKYSIGLDIGTNSVGWAVITDEYKVPSKKFKVLGNTDRHSIKKNLIGALLFDSGETAEATRLKRTARRRYTRRKNRICYLQEIFSNEMAKVDDSFFHRLEESFLVEEDKKHERHPIFGNIVDEVAYHEKYPTIYHLRKKLVDSTDKADLRLIYLALAHMIKFRGHFLIEGDLNPDNSDVDKLFIQLVQTYNQLFEENPINASGVDAKAILSARLSKSRRLENLIAQLPGEKKNGLFGNLIALSLGLTPNFKSNFDLAEDAKLQLSKDTYDDDLDNLLAQIGDQYADLFLAAKNLSDAILLSDILRVNTEITKAPLSASMIKRYDEHHQDLTLLKALVRQQLPEKYKEIFFDQSKNGYAGYIDGGASQEEFYKFIKPILEKMDGTEELLVKLNREDLLRKQRTFDNGSIPHQIHLGELHAILRRQEDFYPFLKDNREKIEKILTFRIPYYVGPLARGNSRFAWMTRKSEETITPWNFEEVVDKGASAQSFIERMTNFDKNLPNEKVLPKHSLLYEYFTVYNELTKVKYVTEGMRKPAFLSGEQKKAIVDLLFKTNRKVTVKQLKEDYFKKIECFDSVEISGVEDRFNASLGTYHDLLKIIKDKDFLDNEENEDILEDIVLTLTLFEDREMIEERLKTYAHLFDDKVMKQLKRRRYTGWGRLSRKLINGIRDKQSGKTILDFLKSDGFANRNFMQLIHDDSLTFKEDIQKAQVSGQGDSLHEHIANLAGSPAIKKGILQTVKVVDELVKVMGRHKPENIVIEMARENQTTQKGQKNSRERMKRIEEGIKELGSQILKEHPVENTQLQNEKLYLYYLQNGRDMYVDQELDINRLSDYDVDHIVPQSFLKDDSIDNKVLTRSDKARGKSDNVPSEEVVKKMKNYWRQLLNAKLITQRKFDNLTKAERGGLSELDKAGFIKRQLVETRQITKHVAQILDSRMNTKYDENDKLIREVKVITLKSKLVSDFRKDFQFYKVREINNYHHAHDAYLNAVVGTALIKKYPKLESEFVYGDYKVYDVRKMIAKSEQEIGKATAKYFFYSNIMNFFKTEITLANGEIRKRPLIETNGETGEIVWDKGRDFATVRKVLSMPQVNIVKKTEVQTGGFSKESILPKRNSDKLIARKKDWDPKKYGGFDSPTVAYSVLVVAKVEKGKSKKLKSVKELLGITIMERSSFEKNPIDFLEAKGYKEVKKDLIIKLPKYSLFELENGRKRMLASAGELQKGNELALPSKYVNFLYLASHYEKLKGSPEDNEQKQLFVEQHKHYLDEIIEQISEFSKRVILADANLDKVLSAYNKHRDKPIREQAENIIHLFTLTNLGAPAAFKYFDTTIDRKRYTSTKEVLDATLIHQSITGLYETRIDLSQLGGDGGEAAAKGSSGGSGGVLNLEEEYRLHEKPVPSSIDPSWLQLFPTVWAERAGMGLANQVPPVVVELRSGASPVAVRQYPMSKEAREGIRPHIQRFLDLGVLVPCQSPWNTPLLPVKKPGTNDYRPVQDLREINKRVQDIHPTVPNPYNLLSSLPPSHTWYSVLDLKDAFFCLKLHPNSQPLFAFEWRDPEKGNTGQLTWTRLPQGFKNSPTLFNEALHRDLAPFRALNPQVVLLQYVDDLLVAAPTYRDCKEGTQKLLQELSKLGYRVSAKKAQLCQKEVTYLGYLLKEGKRWLTPARKATVMKIPPPTTPRQVREFLGTAGFCRLWIPGFASLAAPLYPLTKPSIPFIWTEEHQKAFDRIKEALLSAPALALPDLTKPFTLYVDERAGVARGVLTQTLGPWRRPVAYLSKKLDPVASGWPTCLKAVAAVALLLKDADKLTLGQNVTVIASHSLESIVRQPPDRWMTNARMTHYQSLLLNERVSFAPPAVLNPATLLPVESEATPVHRCSEILAEETGTRRDLKDQPLPGVPAWYTDGSSFIAEGKRRAGAAIVDGKRTVWASSLPEGTSAQKAELVALTQALRLAEGKDINIYTDSRYAFATAHIHGAIYKQRGWLTSAGKDIKNKEEILALLEAIHLPKRVAIIHCPGHQKGNDPVATGNRRADEAAKQAALSTRVLAETTKPAGKRTADGSEFEKRTADGSEFESPKKKAKVE

SEQ ID NO: 7121 - protein, 2096 aa, synthetic construct; identical to SEQ ID NO: 4524

SEQ ID NO: 7122 - protein, 2096 aa, synthetic construct
MPAAKRVKLDGGDKKYSIGLDIGTNSVGWAVITDEYKVPSKKFKVLGNTDRHSIKKNLIGALLFDSGETAEATRLKRTARRRYTRRKNRICYLQEIFSNEMAKVDDSFFHRLEESFLVEEDKKHERHPIFGNIVDEVAYHEKYPTIYHLRKKLVDSTDKADLRLIYLALAHMIKFRGHFLIEGDLNPDNSDVDKLFIQLVQTYNQLFEENPINASGVDAKAILSARLSKSRRLENLIAQLPGEKKNGLFGNLIALSLGLTPNFKSNFDLAEDAKLQLSKDTYDDDLDNLLAQIGDQYADLFLAAKNLSDAILLSDILRVNTEITKAPLSASMIKRYDEHHQDLTLLKALVRQQLPEKYKEIFFDQSKNGYAGYIDGGASQEEFYKFIKPILEKMDGTEELLVKLNREDLLRKQRTFDNGSIPHQIHLGELHAILRRQEDFYPFLKDNREKIEKILTFRIPYYVGPLARGNSRFAWMTRKSEETITPWNFEEVVDKGASAQSFIERMTNFDKNLPNEKVLPKHSLLYEYFTVYNELTKVKYVTEGMRKPAFLSGEQKKAIVDLLFKTNRKVTVKQLKEDYFKKIECFDSVEISGVEDRFNASLGTYHDLLKIIKDKDFLDNEENEDILEDIVLTLTLFEDREMIEERLKTYAHLFDDKVMKQLKRRRYTGWGRLSRKLINGIRDKQSGKTILDFLKSDGFANRNFMQLIHDDSLTFKEDIQKAQVSGQGDSLHEHIANLAGSPAIKKGILQTVKVVDELVKVMGRHKPENIVIEMARENQTTQKGQKNSRERMKRIEEGIKELGSQILKEHPVENTQLQNEKLYLYYLQNGRDMYVDQELDINRLSDYDVDHIVPQSFLKDDSIDNKVLTRSDKARGKSDNVPSEEVVKKMKNYWRQLLNAKLITQRKFDNLTKAERGGLSELDKAGFIKRQLVETRQITKHVAQILDSRMNTKYDENDKLIREVKVITLKSKLVSDFRKDFQFYKVREINNYHHAHDAYLNAVVGTALIKKYPKLESEFVYGDYKVYDVRKMIAKSEQEIGKATAKYFFYSNIMNFFKTEITLANGEIRKRPLIETNGETGEIVWDKGRDFATVRKVLSMPQVNIVKKTEVQTGGFSKESILPKRNSDKLIARKKDWDPKKYGGFDSPTVAYSVLVVAKVEKGKSKKLKSVKELLGITIMERSSFEKNPIDFLEAKGYKEVKKDLIIKLPKYSLFELENGRKRMLASAGELQKGNELALPSKYVNFLYLASHYEKLKGSPEDNEQKQLFVEQHKHYLDEIIEQISEFSKRVILADANLDKVLSAYNKHRDKPIREQAENIIHLFTLTNLGAPAAFKYFDTTIDRKRYTSTKEVLDATLIHQSITGLYETRIDLSQLGGDGGGGSGSSPAPGGTAPLEEEYRLFLEAPIQNVTLLEQWKREIPKVWAEINPPGLASTQAPIHVQLLSTALPVRVRQYPITLEAKRSLRETIRKFRAAGILRPVHSPWNTPLLPVRKSGTSEYRMVQDLREVNKRVETIHPTVPNPYTLLSLLPPDRIWYSVLDLKDAFFCIPLAPESQLIFAFEWADAEEGESGQLTWTRLPQGFKNSPTLFNEALNRDLQGFRLDHPSVSLLQYVDDLLIAADTQAACLSATRDLLMTLAELGYRVSGKKAQLCQEEVTYLGFKIHKGSRSLSNSRTQAILQIPVPKTKRQVREFLGTIGYCRLWIPGFAELAQPLYAATRPGNDPLVWGEKEEEAFQSLKLALTQPPALALPSLDKPFQLFVEETSGAAKGVLTQALGPWKRPVAYLSKRLDPVAAGWPRCLRAIAAAALLTREASKLTFGQDIEITSSHNLESLLRSPPDKWLTNARITQYQVLLLDPPRVRFKQTAALNPATLLPETDDTLPIHHCLDTLDSLTSTRPDLTDQPLAQAEATLFTDGSSYIRDGKRYAGAAVVTLDSVIWAEPLPIGTSAQKAELIALTKALEWSKDKSVNIYTDSRYAFATLHVHGMIYRERGWLTAGGKAIKNAPEILALLTAVWLPKRVAVMHCKGHQKDDAPTSTGNRRADEVAREVAIRPLSTQATISAGKRTADGSEFEKRTADGSEFESPKKKAKVE

SEQ ID NO: 7123 - protein, 2096 aa, synthetic construct
MPAAKRVKLDGGDKKYSIGLDIGTNSVGWAVITDEYKVPSKKFKVLGNTDRHSIKKNLIGALLFDSGETAEATRLKRTARRRYTRRKNRICYLQEIFSNEMAKVDDSFFHRLEESFLVEEDKKHERHPIFGNIVDEVAYHEKYPTIYHLRKKLVDSTDKADLRLIYLALAHMIKFRGHFLIEGDLNPDNSDVDKLFIQLVQTYNQLFEENPINASGVDAKAILSARLSKSRRLENLIAQLPGEKKNGLFGNLIALSLGLTPNFKSNFDLAEDAKLQLSKDTYDDDLDNLLAQIGDQYADLFLAAKNLSDAILLSDILRVNTEITKAPLSASMIKRYDEHHQDLTLLKALVRQQLPEKYKEIFFDQSKNGYAGYIDGGASQEEFYKFIKPILEKMDGTEELLVKLNREDLLRKQRTFDNGSIPHQIHLGELHAILRRQEDFYPFLKDNREKIEKILTFRIPYYVGPLARGNSRFAWMTRKSEETITPWNFEEVVDKGASAQSFIERMTNFDKNLPNEKVLPKHSLLYEYFTVYNELTKVKYVTEGMRKPAFLSGEQKKAIVDLLFKTNRKVTVKQLKEDYFKKIECFDSVEISGVEDRFNASLGTYHDLLKIIKDKDFLDNEENEDILEDIVLTLTLFEDREMIEERLKTYAHLFDDKVMKQLKRRRYTGWGRLSRKLINGIRDKQSGKTILDFLKSDGFANRNFMQLIHDDSLTFKEDIQKAQVSGQGDSLHEHIANLAGSPAIKKGILQTVKVVDELVKVMGRHKPENIVIEMARENQTTQKGQKNSRERMKRIEEGIKELGSQILKEHPVENTQLQNEKLYLYYLQNGRDMYVDQELDINRLSDYDVDHIVPQSFLKDDSIDNKVLTRSDKARGKSDNVPSEEVVKKMKNYWRQLLNAKLITQRKFDNLTKAERGGLSELDKAGFIKRQLVETRQITKHVAQILDSRMNTKYDENDKLIREVKVITLKSKLVSDFRKDFQFYKVREINNYHHAHDAYLNAVVGTALIKKYPKLESEFVYGDYKVYDVRKMIAKSEQEIGKATAKYFFYSNIMNFFKTEITLANGEIRKRPLIETNGETGEIVWDKGRDFATVRKVLSMPQVNIVKKTEVQTGGFSKESILPKRNSDKLIARKKDWDPKKYGGFDSPTVAYSVLVVAKVEKGKSKKLKSVKELLGITIMERSSFEKNPIDFLEAKGYKEVKKDLIIKLPKYSLFELENGRKRMLASAGELQKGNELALPSKYVNFLYLASHYEKLKGSPEDNEQKQLFVEQHKHYLDEIIEQISEFSKRVILADANLDKVLSAYNKHRDKPIREQAENIIHLFTLTNLGAPAAFKYFDTTIDRKRYTSTKEVLDATLIHQSITGLYETRIDLSQLGGDGGGGSGSSPAPGGTAPLEEEYRLFLEAPIQNVTLLEQWKREIPKVWAEINPPGLASTQAPIHVQLLSTALPVRVRQYPITLEAKRSLRETIRKFRAAGILRPVHSPWNTPLLPVRKSGTSEYRMVQDLREVNKRVETIHPTVPNPYTLLSLLPPDRIWYSVLDLKDAFFCIPLAPESQLIFAFEWADAEEGESGQLTWTRLPQGFKNSPTLFNEALNRDLQGFRLDHPSVSLLQYVDDLLIAADTQAACLSATRDLLMTLAELGYRVSGKKAQLCQEEVTYLGFKIHKGSRSLSNSRTQAILQIPVPKTKRQVREFLGKIGYCRLFIPGFAELAQPLYAATRPGNDPLVWGEKEEEAFQSLKLALTQPPALALPSLDKPFQLFVEETSGAAKGVLTQALGPWKRPVAYLSKRLDPVAAGWPRCLRAIAAAALLTREASKLTFGQDIEITSSHNLESLLRSPPDKWLTNARITQYQVLLLDPPRVRFKQTAALNPATLLPETDDTLPIHHCLDTLDSLTSTRPDLTDQPLAQAEATLFTDGSSYIRDGKRYAGAAVVTLDSVIWAEPLPIGTSAQKAELIALTKALEWSKDKSVNIYTDSRYAFATLHVHGMIYRERGWLTAGGKAIKNAPEILALLTAVWLPKRVAVMHCKGHQKDDAPTSTGNRRADEVAREVAIRPLSTQATISAGKRTADGSEFEKRTADGSEFESPKKKAKVE

SEQ ID NO: 7124 - protein, 2093 aa, synthetic construct
MPAAKRVKLDGGDKKYSIGLDIGTNSVGWAVITDEYKVPSKKFKVLGNTDRHSIKKNLIGALLFDSGETAEATRLKRTARRRYTRRKNRICYLQEIFSNEMAKVDDSFFHRLEESFLVEEDKKHERHPIFGNIVDEVAYHEKYPTIYHLRKKLVDSTDKADLRLIYLALAHMIKFRGHFLIEGDLNPDNSDVDKLFIQLVQTYNQLFEENPINASGVDAKAILSARLSKSRRLENLIAQLPGEKKNGLFGNLIALSLGLTPNFKSNFDLAEDAKLQLSKDTYDDDLDNLLAQIGDQYADLFLAAKNLSDAILLSDILRVNTEITKAPLSASMIKRYDEHHQDLTLLKALVRQQLPEKYKEIFFDQSKNGYAGYIDGGASQEEFYKFIKPILEKMDGTEELLVKLNREDLLRKQRTFDNGSIPHQIHLGELHAILRRQEDFYPFLKDNREKIEKILTFRIPYYVGPLARGNSRFAWMTRKSEETITPWNFEEVVDKGASAQSFIERMTNFDKNLPNEKVLPKHSLLYEYFTVYNELTKVKYVTEGMRKPAFLSGEQKKAIVDLLFKTNRKVTVKQLKEDYFKKIECFDSVEISGVEDRFNASLGTYHDLLKIIKDKDFLDNEENEDILEDIVLTLTLFEDREMIEERLKTYAHLFDDKVMKQLKRRRYTGWGRLSRKLINGIRDKQSGKTILDFLKSDGFANRNFMQLIHDDSLTFKEDIQKAQVSGQGDSLHEHIANLAGSPAIKKGILQTVKVVDELVKVMGRHKPENIVIEMARENQTTQKGQKNSRERMKRIEEGIKELGSQILKEHPVENTQLQNEKLYLYYLQNGRDMYVDQELDINRLSDYDVDHIVPQSFLKDDSIDNKVLTRSDKARGKSDNVPSEEVVKKMKNYWRQLLNAKLITQRKFDNLTKAERGGLSELDKAGFIKRQLVETRQITKHVAQILDSRMNTKYDENDKLIREVKVITLKSKLVSDFRKDFQFYKVREINNYHHAHDAYLNAVVGTALIKKYPKLESEFVYGDYKVYDVRKMIAKSEQEIGKATAKYFFYSNIMNFFKTEITLANGEIRKRPLIETNGETGEIVWDKGRDFATVRKVLSMPQVNIVKKTEVQTGGFSKESILPKRNSDKLIARKKDWDPKKYGGFDSPTVAYSVLVVAKVEKGKSKKLKSVKELLGITIMERSSFEKNPIDFLEAKGYKEVKKDLIIKLPKYSLFELENGRKRMLASAGELQKGNELALPSKYVNFLYLASHYEKLKGSPEDNEQKQLFVEQHKHYLDEIIEQISEFSKRVILADANLDKVLSAYNKHRDKPIREQAENIIHLFTLTNLGAPAAFKYFDTTIDRKRYTSTKEVLDATLIHQSITGLYETRIDLSQLGGDGGGGSGSSPAPGGTLQLEEEYRLFEPESTQKQEMDIWLKNFPQAWAETGGMGTAHCQAPVLIQLKATATPISIRQYPMPHEAYQGIKPHIRRMLDQGILKPCQSPWNTPLLPVKKPGTEDYRPVQDLREVNKRVEDIHPTVPNPYNLLSTLPPSHPWYTVLDLKDAFFCLRLHSESQLLFAFEWRDPEIGLSGQLTWTRLPQGFKNSPTLFNEALHSDLADFRVRYPALVLLQYVDDLLLAAATRTECLEGTKALLETLGNKGYRASAKKAQICLQEVTYLGYSLKDGQRWLTKARKEAILSIPVPKNSRQVREFLGTAGYCRLWIPGFAELAAPLYPLTRPGTLFQWGTEQQLAFEDIKKALLSSPALGLPDITKPFELFIDENSGFAKGVLVQKLGPWKRPVAYLSKKLDTVASGWPPCLRMVAAIAILVKDAGKLTLGQPLTILTSHPVEALVRQPPNKWLSNARMTHYQAMLLDAERVHFGPTVSLNPATLLPLPSGGNHHDCLQILAETHGTRPDLTDQPLPDADLTWYTDGSSFIRNGEREAGAAVTTESEVIWAAPLPPGTSAQRAELIALTQALKMAEGKKLTVYTDSRYAFATTHVHGEIYRRRGWLTSEGKEIKNKNEILALLEALFLPKRLSIIHCPGHQKGDSPQAKGNRLADDTAKKAATETHSSLTVLPAGKRTADGSEFEKRTADGSEFESPKKKAKVE

SEQ ID NO: 7125 - protein, 2085 aa, synthetic construct
MPAAKRVKLDGGDKKYSIGLDIGTNSVGWAVITDEYKVPSKKFKVLGNTDRHSIKKNLIGALLFDSGETAEATRLKRTARRRYTRRKNRICYLQEIFSNEMAKVDDSFFHRLEESFLVEEDKKHERHPIFGNIVDEVAYHEKYPTIYHLRKKLVDSTDKADLRLIYLALAHMIKFRGHFLIEGDLNPDNSDVDKLFIQLVQTYNQLFEENPINASGVDAKAILSARLSKSRRLENLIAQLPGEKKNGLFGNLIALSLGLTPNFKSNFDLAEDAKLQLSKDTYDDDLDNLLAQIGDQYADLFLAAKNLSDAILLSDILRVNTEITKAPLSASMIKRYDEHHQDLTLLKALVRQQLPEKYKEIFFDQSKNGYAGYIDGGASQEEFYKFIKPILEKMDGTEELLVKLNREDLLRKQRTFDNGSIPHQIHLGELHAILRRQEDFYPFLKDNREKIEKILTFRIPYYVGPLARGNSRFAWMTRKSEETITPWNFEEVVDKGASAQSFIERMTNFDKNLPNEKVLPKHSLLYEYFTVYNELTKVKYVTEGMRKPAFLSGEQKKAIVDLLFKTNRKVTVKQLKEDYFKKIECFDSVEISGVEDRFNASLGTYHDLLKIIKDKDFLDNEENEDILEDIVLTLTLFEDREMIEERLKTYAHLFDDKVMKQLKRRRYTGWGRLSRKLINGIRDKQSGKTILDFLKSDGFANRNFMQLIHDDSLTFKEDIQKAQVSGQGDSLHEHIANLAGSPAIKKGILQTVKVVDELVKVMGRHKPENIVIEMARENQTTQKGQKNSRERMKRIEEGIKELGSQILKEHPVENTQLQNEKLYLYYLQNGRDMYVDQELDINRLSDYDVDHIVPQSFLKDDSIDNKVLTRSDKARGKSDNVPSEEVVKKMKNYWRQLLNAKLITQRKFDNLTKAERGGLSELDKAGFIKRQLVETRQITKHVAQILDSRMNTKYDENDKLIREVKVITLKSKLVSDFRKDFQFYKVREINNYHHAHDAYLNAVVGTALIKKYPKLESEFVYGDYKVYDVRKMIAKSEQEIGKATAKYFFYSNIMNFFKTEITLANGEIRKRPLIETNGETGEIVWDKGRDFATVRKVLSMPQVNIVKKTEVQTGGFSKESILPKRNSDKLIARKKDWDPKKYGGFDSPTVAYSVLVVAKVEKGKSKKLKSVKELLGITIMERSSFEKNPIDFLEAKGYKEVKKDLIIKLPKYSLFELENGRKRMLASAGELQKGNELALPSKYVNFLYLASHYEKLKGSPEDNEQKQLFVEQHKHYLDEIIEQISEFSKRVILADANLDKVLSAYNKHRDKPIREQAENIIHLFTLTNLGAPAAFKYFDTTIDRKRYTSTKEVLDATLIHQSITGLYETRIDLSQLGGDGGGGSGSSPAPGGVPWLTQQPLQLTILVPLQEYQEKILSKTALPEDQKQQLKTLFVKYDNLWQHWENQVGHRKIRPHNIATGDYPPRPQKQYPINPKAKPSIQIVIDDLLKQGVLTPQNSTMNTPVYPVPKPDGRWRMVLDYREVNKTIPLTAAQNQHSAGILATIVRQKYKTTLDLANGFWAHPITPESYWLTAFTWQGKQYCWTRLPQGFLNSPALFNADVVDLLKEIPNVQVYVDDIYLSHDDPKEHVQQLEKVFQILLQAGYVVSLKKSEIGQKTVEFLGFNITKEGRGLTDTFKTKLLNITPPKDLKQLQSILGLLNFARNFIPNFAELVQPLYNLIAPAKGKYIEWSEENTKQLNMVIEALNTASNLEERLPEQRLVIKVNTSPSAGYVRYYNETGKKPIMYLNYVFSKAELKFSMLEKLLTTMHKALIKAMDLAMGQEILVYSPIVSMTKIQKTPLPERKALPIRWITWMTYLEDPRIQFHYDKTLPELKHIPDVYTSSQSPVKHPSQYEGVFYTDGSAIKSPDPTKSNNAGMGIVHATYKPEYQVLNQWSIPLGNHTAQMAEIAAVEFACKKALKIPGPVLVITDSFYVAESANKELPYWKSNGFVNNKKKPLKHISKWKSIAECLSMKPDITIQHEKGISLQIPVFILKGNALADKLATQGSYVVNAGKRTADGSEFEKRTADGSEFESPKKKAKVE

SEQ ID NO: 7126 - protein, 2216 aa, synthetic construct
MPAAKRVKLDGGDKKYSIGLDIGTNSVGWAVITDEYKVPSKKFKVLGNTDRHSIKKNLIGALLFDSGETAEATRLKRTARRRYTRRKNRICYLQEIFSNEMAKVDDSFFHRLEESFLVEEDKKHERHPIFGNIVDEVAYHEKYPTIYHLRKKLVDSTDKADLRLIYLALAHMIKFRGHFLIEGDLNPDNSDVDKLFIQLVQTYNQLFEENPINASGVDAKAILSARLSKSRRLENLIAQLPGEKKNGLFGNLIALSLGLTPNFKSNFDLAEDAKLQLSKDTYDDDLDNLLAQIGDQYADLFLAAKNLSDAILLSDILRVNTEITKAPLSASMIKRYDEHHQDLTLLKALVRQQLPEKYKEIFFDQSKNGYAGYIDGGASQEEFYKFIKPILEKMDGTEELLVKLNREDLLRKQRTFDNGSIPHQIHLGELHAILRRQEDFYPFLKDNREKIEKILTFRIPYYVGPLARGNSRFAWMTRKSEETITPWNFEEVVDKGASAQSFIERMTNFDKNLPNEKVLPKHSLLYEYFTVYNELTKVKYVTEGMRKPAFLSGEQKKAIVDLLFKTNRKVTVKQLKEDYFKKIECFDSVEISGVEDRFNASLGTYHDLLKIIKDKDFLDNEENEDILEDIVLTLTLFEDREMIEERLKTYAHLFDDKVMKQLKRRRYTGWGRLSRKLINGIRDKQSGKTILDFLKSDGFANRNFMQLIHDDSLTFKEDIQKAQVSGQGDSLHEHIANLAGSPAIKKGILQTVKVVDELVKVMGRHKPENIVIEMARENQTTQKGQKNSRERMKRIEEGIKELGSQILKEHPVENTQLQNEKLYLYYLQNGRDMYVDQELDINRLSDYDVDHIVPQSFLKDDSIDNKVLTRSDKARGKSDNVPSEEVVKKMKNYWRQLLNAKLITQRKFDNLTKAERGGLSELDKAGFIKRQLVETRQITKHVAQILDSRMNTKYDENDKLIREVKVITLKSKLVSDFRKDFQFYKVREINNYHHAHDAYLNAVVGTALIKKYPKLESEFVYGDYKVYDVRKMIAKSEQEIGKATAKYFFYSNIMNFFKTEITLANGEIRKRPLIETNGETGEIVWDKGRDFATVRKVLSMPQVNIVKKTEVQTGGFSKESILPKRNSDKLIARKKDWDPKKYGGFDSPTVAYSVLVVAKVEKGKSKKLKSVKELLGITIMERSSFEKNPIDFLEAKGYKEVKKDLIIKLPKYSLFELENGRKRMLASAGELQKGNELALPSKYVNFLYLASHYEKLKGSPEDNEQKQLFVEQHKHYLDEIIEQISEFSKRVILADANLDKVLSAYNKHRDKPIREQAENIIHLFTLTNLGAPAAFKYFDTTIDRKRYTSTKEVLDATLIHQSITGLYETRIDLSQLGGDGGGGSGSSPAPGGTLGDQGSRGSDPLPEPRVTLTVEGIPTEFLVNTGAEHSVLTKPMGKMGSKRTVVAGATGSKVYPWTTKRLLKIGQKQVTHSFLVIPECPAPLLGRDLLTKLKAQIQFSTEGPQVTWEDRPAMCLVLNLEEEYRLHEKPVPPSIDPSWLQLFPMVWAEKAGMGLANQVPPVVVELKSDASPVAVRQYPMSKEAREGIRPHIQRFLDLGILVPCQSPWNTPLLPVKKPGTNDYRPVQDLREVNKRVQDIHPTVPNPYNLLSSLPPSHTWYSVLDLKDAFFCLKLHPNSQPLFAFEWRDPEKGNTGQLTWTRLPQGFKNSPTLFDEALHRDLASFRALNPQVVMLQYVDDLLVAAPTYRDCKEGTRRLLQELSKLGYRVSAKKAQLCREEVTYLGYLLKGGKRWLTPARKATVMKIPTPTTPRQVREFLGTAGFCRLWIPGFASLAAPLYPLTREKVPFTWTEAHQEAFGRIKEALLSAPALALPDLTKPFALYVDEKEGVARGVLTQTLGPWRRPVAYLSKKLDPVASGWPTCLKAIAAVALLLKDADKLTLGQNVLVIAPHNLESIVRQPPDRWMTNARMTHYQSLLLNERVSFAPPAILNPATLLPVESDDTPIHICSEILAEETGTRPDLRDQPLPGVPAWYTDGSSFIMDGRRQAGAAIVDNKRTVWASNLPEGTSAQKAELIALTQALRLAEGKSINIYTDSRYAFATAHVHGAIYKQRGLLTSAGKDIKNKEEILALLEAIHLPKRVAIIHCPGHQRGTDPVATGNRKADEAAKQAAQSTRILTETTKNAGKRTADGSEFEKRTADGSEFESPKKKAKVE

SEQ ID NO: 7127 - protein, 2125 aa, synthetic construct
MPAAKRVKLDGGDKKYSIGLDIGTNSVGWAVITDEYKVPSKKFKVLGNTDRHSIKKNLIGALLFDSGETAEATRLKRTARRRYTRRKNRICYLQEIFSNEMAKVDDSFFHRLEESFLVEEDKKHERHPIFGNIVDEVAYHEKYPTIYHLRKKLVDSTDKADLRLIYLALAHMIKFRGHFLIEGDLNPDNSDVDKLFIQLVQTYNQLFEENPINASGVDAKAILSARLSKSRRLENLIAQLPGEKKNGLFGNLIALSLGLTPNFKSNFDLAEDAKLQLSKDTYDDDLDNLLAQIGDQYADLFLAAKNLSDAILLSDILRVNTEITKAPLSASMIKRYDEHHQDLTLLKALVRQQLPEKYKEIFFDQSKNGYAGYIDGGASQEEFYKFIKPILEKMDGTEELLVKLNREDLLRKQRTFDNGSIPHQIHLGELHAILRRQEDFYPFLKDNREKIEKILTFRIPYYVGPLARGNSRFAWMTRKSEETITPWNFEEVVDKGASAQSFIERMTNFDKNLPNEKVLPKHSLLYEYFTVYNELTKVKYVTEGMRKPAFLSGEQKKAIVDLLFKTNRKVTVKQLKEDYFKKIECFDSVEISGVEDRFNASLGTYHDLLKIIKDKDFLDNEENEDILEDIVLTLTLFEDREMIEERLKTYAHLFDDKVMKQLKRRRYTGWGRLSRKLINGIRDKQSGKTILDFLKSDGFANRNFMQLIHDDSLTFKEDIQKAQVSGQGDSLHEHIANLAGSPAIKKGILQTVKVVDELVKVMGRHKPENIVIEMARENQTTQKGQKNSRERMKRIEEGIKELGSQILKEHPVENTQLQNEKLYLYYLQNGRDMYVDQELDINRLSDYDVDHIVPQSFLKDDSIDNKVLTRSDKARGKSDNVPSEEVVKKMKNYWRQLLNAKLITQRKFDNLTKAERGGLSELDKAGFIKRQLVETRQITKHVAQILDSRMNTKYDENDKLIREVKVITLKSKLVSDFRKDFQFYKVREINNYHHAHDAYLNAVVGTALIKKYPKLESEFVYGDYKVYDVRKMIAKSEQEIGKATAKYFFYSNIMNFFKTEITLANGEIRKRPLIETNGETGEIVWDKGRDFATVRKVLSMPQVNIVKKTEVQTGGFSKESILPKRNSDKLIARKKDWDPKKYGGFDSPTVAYSVLVVAKVEKGKSKKLKSVKELLGITIMERSSFEKNPIDFLEAKGYKEVKKDLIIKLPKYSLFELENGRKRMLASAGELQKGNELALPSKYVNFLYLASHYEKLKGSPEDNEQKQLFVEQHKHYLDEIIEQISEFSKRVILADANLDKVLSAYNKHRDKPIREQAENIIHLFTLTNLGAPAAFKYFDTTIDRKRYTSTKEVLDATLIHQSITGLYETRIDLSQLGGDGGGGSGSSPAPGGLLGRDLLTKLKAQIQFSTEGPQVTWEDRPAMCLVLNLEEEYRLHEKPVPPSIDPSWLQLFPMVWAEKAGMGLANQVPPVVVELKSDASPVAVRQYPMSKEAREGIRPHIQRFLDLGILVPCQSPWNTPLLPVKKPGTNDYRPVQDLREVNKRVQDIHPTVPNPYNLLSSLPPSHTWYSVLDLKDAFFCLKLHPNSQPLFAFEWRDPEKGNTGQLTWTRLPQGFKNSPTLFNEALHRDLASFRALNPQVVMLQYVDDLLVAAPTYRDCKEGTRRLLQELSKLGYRVSAKKAQLCREEVTYLGYLLKGGKRWLTPARKATVMKIPTPTTPRQVREFLGKAGFCRLFIPGFASLAAPLYPLTRPKVPFTWTEAHQEAFGRIKEALLSAPALALPDLTKPFALYVDEKEGVARGVLTQTLGPWRRPVAYLSKKLDPVASGWPTCLKAIAAVALLLKDADKLTLGQNVLVIAPHNLESIVRQPPDRWMTNARMTHYQSLLLNERVSFAPPAILNPATLLPVESDDTPIHICSEILAEETGTRPDLRDQPLPGVPAWYTDGSSFIMDGRRQAGAAIVDNKRTVWASNLPEGTSAQKAELIALTQALRLAEGKSINIYTDSRYAFATAHVHGAIYKQRGWLTSAGKDIKNKEEILALLEAIHLPKRVAIIHCPGHQRGTDPVATGNRKADEAAKQAAQSTRILTETTKNAGKRTADGSEFEKRTADGSEFESPKKKAKVE

SEQ ID NO: 7128 - protein, 2216 aa, synthetic construct
MPAAKRVKLDGGDKKYSIGLDIGTNSVGWAVITDEYKVPSKKFKVLGNTDRHSIKKNLIGALLFDSGETAEATRLKRTARRRYTRRKNRICYLQEIFSNEMAKVDDSFFHRLEESFLVEEDKKHERHPIFGNIVDEVAYHEKYPTIYHLRKKLVDSTDKADLRLIYLALAHMIKFRGHFLIEGDLNPDNSDVDKLFIQLVQTYNQLFEENPINASGVDAKAILSARLSKSRRLENLIAQLPGEKKNGLFGNLIALSLGLTPNFKSNFDLAEDAKLQLSKDTYDDDLDNLLAQIGDQYADLFLAAKNLSDAILLSDILRVNTEITKAPLSASMIKRYDEHHQDLTLLKALVRQQLPEKYKEIFFDQSKNGYAGYIDGGASQEEFYKFIKPILEKMDGTEELLVKLNREDLLRKQRTFDNGSIPHQIHLGELHAILRRQEDFYPFLKDNREKIEKILTFRIPYYVGPLARGNSRFAWMTRKSEETITPWNFEEVVDKGASAQSFIERMTNFDKNLPNEKVLPKHSLLYEYFTVYNELTKVKYVTEGMRKPAFLSGEQKKAIVDLLFKTNRKVTVKQLKEDYFKKIECFDSVEISGVEDRFNASLGTYHDLLKIIKDKDFLDNEENEDILEDIVLTLTLFEDREMIEERLKTYAHLFDDKVMKQLKRRRYTGWGRLSRKLINGIRDKQSGKTILDFLKSDGFANRNFMQLIHDDSLTFKEDIQKAQVSGQGDSLHEHIANLAGSPAIKKGILQTVKVVDELVKVMGRHKPENIVIEMARENQTTQKGQKNSRERMKRIEEGIKELGSQILKEHPVENTQLQNEKLYLYYLQNGRDMYVDQELDINRLSDYDVDHIVPQSFLKDDSIDNKVLTRSDKARGKSDNVPSEEVVKKMKNYWRQLLNAKLITQRKFDNLTKAERGGLSELDKAGFIKRQLVETRQITKHVAQILDSRMNTKYDENDKLIREVKVITLKSKLVSDFRKDFQFYKVREINNYHHAHDAYLNAVVGTALIKKYPKLESEFVYGDYKVYDVRKMIAKSEQEIGKATAKYFFYSNIMNFFKTEITLANGEIRKRPLIETNGETGEIVWDKGRDFATVRKVLSMPQVNIVKKTEVQTGGFSKESILPKRNSDKLIARKKDWDPKKYGGFDSPTVAYSVLVVAKVEKGKSKKLKSVKELLGITIMERSSFEKNPIDFLEAKGYKEVKKDLIIKLPKYSLFELENGRKRMLASAGELQKGNELALPSKYVNFLYLASHYEKLKGSPEDNEQKQLFVEQHKHYLDEIIEQISEFSKRVILADANLDKVLSAYNKHRDKPIREQAENIIHLFTLTNLGAPAAFKYFDTTIDRKRYTSTKEVLDATLIHQSITGLYETRIDLSQLGGDGGGGSGSSPAPGGTLGDQGSRGSDPLPEPRVTLTVEGIPTEFLVNTGAEHSVLTKPMGKMGSKRTVVAGATGSKVYPWTTKRLLKIGQKQVTHSFLVIPECPAPLLGRDLLTKLKAQIQFSTEGPQVTWEDRPAMCLVLNLEEEYRLHEKPVPPSIDPSWLQLFPMVWAEKAGMGLANQVPPVVVELKSDASPVAVRQYPMSKEAREGIRPHIQRFLDLGILVPCQSPWNTPLLPVKKPGTNDYRPVQDLREVNKRVQDIHPTVPNPYNLLSSLPPSHTWYSVLDLKDAFFCLKLHPNSQPLFAFEWRDPEKGNTGQLTWTRLPQGFKNSPTLFNEALHRDLASFRALNPQVVMLQYVDDLLVAAPTYRDCKEGTRRLLQELSKLGYRVSAKKAQLCREEVTYLGYLLKGGKRWLTPARKATVMKIPTPTTPRQVREFLGKAGFCRLFIPGFASLAAPLYPLTRPKVPFTWTEAHQEAFGRIKEALLSAPALALPDLTKPFALYVDEKEGVARGVLTQTLGPWRRPVAYLSKKLDPVASGWPTCLKAIAAVALLLKDADKLTLGQNVLVIAPHNLESIVRQPPDRWMTNARMTHYQSLLLNERVSFAPPAILNPATLLPVESDDTPIHICSEILAEETGTRPDLRDQPLPGVPAWYTDGSSFIMDGRRQAGAAIVDNKRTVWASNLPEGTSAQKAELIALTQALRLAEGKSINIYTDSRYAFATAHVHGAIYKQRGWLTSAGKDIKNKEEILALLEAIHLPKRVAIIHCPGHQRGTDPVATGNRKADEAAKQAAQSTRILTETTKNAGKRTADGSEFEKRTADGSEFESPKKKAKVE

SEQ ID NO: 7129 - protein, 2094 aa, synthetic construct
MPAAKRVKLDGGDKKYSIGLDIGTNSVGWAVITDEYKVPSKKFKVLGNTDRHSIKKNLIGALLFDSGETAEATRLKRTARRRYTRRKNRICYLQEIFSNEMAKVDDSFFHRLEESFLVEEDKKHERHPIFGNIVDEVAYHEKYPTIYHLRKKLVDSTDKADLRLIYLALAHMIKFRGHFLIEGDLNPDNSDVDKLFIQLVQTYNQLFEENPINASGVDAKAILSARLSKSRRLENLIAQLPGEKKNGLFGNLIALSLGLTPNFKSNFDLAEDAKLQLSKDTYDDDLDNLLAQIGDQYADLFLAAKNLSDAILLSDILRVNTEITKAPLSASMIKRYDEHHQDLTLLKALVRQQLPEKYKEIFFDQSKNGYAGYIDGGASQEEFYKFIKPILEKMDGTEELLVKLNREDLLRKQRTFDNGSIPHQIHLGELHAILRRQEDFYPFLKDNREKIEKILTFRIPYYVGPLARGNSRFAWMTRKSEETITPWNFEEVVDKGASAQSFIERMTNFDKNLPNEKVLPKHSLLYEYFTVYNELTKVKYVTEGMRKPAFLSGEQKKAIVDLLFKTNRKVTVKQLKEDYFKKIECFDSVEISGVEDRFNASLGTYHDLLKIIKDKDFLDNEENEDILEDIVLTLTLFEDREMIEERLKTYAHLFDDKVMKQLKRRRYTGWGRLSRKLINGIRDKQSGKTILDFLKSDGFANRNFMQLIHDDSLTFKEDIQKAQVSGQGDSLHEHIANLAGSPAIKKGILQTVKVVDELVKVMGRHKPENIVIEMARENQTTQKGQKNSRERMKRIEEGIKELGSQILKEHPVENTQLQNEKLYLYYLQNGRDMYVDQELDINRLSDYDVDHIVPQSFLKDDSIDNKVLTRSDKARGKSDNVPSEEVVKKMKNYWRQLLNAKLITQRKFDNLTKAERGGLSELDKAGFIKRQLVETRQITKHVAQILDSRMNTKYDENDKLIREVKVITLKSKLVSDFRKDFQFYKVREINNYHHAHDAYLNAVVGTALIKKYPKLESEFVYGDYKVYDVRKMIAKSEQEIGKATAKYFFYSNIMNFFKTEITLANGEIRKRPLIETNGETGEIVWDKGRDFATVRKVLSMPQVNIVKKTEVQTGGFSKESILPKRNSDKLIARKKDWDPKKYGGFDSPTVAYSVLVVAKVEKGKSKKLKSVKELLGITIMERSSFEKNPIDFLEAKGYKEVKKDLIIKLPKYSLFELENGRKRMLASAGELQKGNELALPSKYVNFLYLASHYEKLKGSPEDNEQKQLFVEQHKHYLDEIIEQISEFSKRVILADANLDKVLSAYNKHRDKPIREQAENIIHLFTLTNLGAPAAFKYFDTTIDRKRYTSTKEVLDATLIHQSITGLYETRIDLSQLGGDGGGGSGSSPAPGGTLNLEDEYRLYETSAEPEVSPGSTWLSDFPQAWAETGGMGLAVRQAPLIIPLKATSTPVSIKQYPMSQEAKLGIKPHIQRLLDQGILVPCQSPWNTPLLPVKKPGTNDYRPVQDLREVNKRVEDIHPTVPNPYNLLSGLPPSHRWYTVLDLKDAFFCLRLHPTSQPLFAFEWRDPGMGISGQLTWTRLPQGFKNSPTLFNEALHRDLADFRIQHPDLILLQYVDDILLAATSELDCQQGTRALLLTLGNLGYRASAKKAQLCQKQVKYLGYLLKEGQRWLTEARKETVMGQPTPKTPRQLREFLGKAGFCRLFIPGFAEMAAPLYPLTKPGTLFNWGPDQQKAYQEIKQALLTAPALGLPDLTKPFELFVDEKQGYAKGVLTQKLGPWRRPVAYLSKKLDPVAAGWPPCLRMVAAIAVLRKDAGKLTMGQPLVILAPHAVEALVKQPPDRWLSNARMTHYQAMLLDTDRVQFGPVVALNPATLLPLPEEGAPHDCLEILAETHGTRPDLTDQPIPDADHTWYTDGSSFLQEGQRKAGAAVTTETEVIWARALPAGTSAQRAELIALTQALKMAEGKRLNVYTDSRYAFATAHIHGEIYRRRGWLTSEGREIKNKSEILALLKALFLPKRLSIIHCLGHQKGDSAEARGNRLADQAAREAAIKTPPDTSTLLAGKRTADGSEFEKRTADGSEFESPKKKAKVE

SEQ ID NO: 7130 - protein, 2094 aa, synthetic construct
MPAAKRVKLDGGDKKYSIGLDIGTNSVGWAVITDEYKVPSKKFKVLGNTDRHSIKKNLIGALLFDSGETAEATRLKRTARRRYTRRKNRICYLQEIFSNEMAKVDDSFFHRLEESFLVEEDKKHERHPIFGNIVDEVAYHEKYPTIYHLRKKLVDSTDKADLRLIYLALAHMIKFRGHFLIEGDLNPDNSDVDKLFIQLVQTYNQLFEENPINASGVDAKAILSARLSKSRRLENLIAQLPGEKKNGLFGNLIALSLGLTPNFKSNFDLAEDAKLQLSKDTYDDDLDNLLAQIGDQYADLFLAAKNLSDAILLSDILRVNTEITKAPLSASMIKRYDEHHQDLTLLKALVRQQLPEKYKEIFFDQSKNGYAGYIDGGASQEEFYKFIKPILEKMDGTEELLVKLNREDLLRKQRTFDNGSIPHQIHLGELHAILRRQEDFYPFLKDNREKIEKILTFRIPYYVGPLARGNSRFAWMTRKSEETITPWNFEEVVDKGASAQSFIERMTNFDKNLPNEKVLPKHSLLYEYFTVYNELTKVKYVTEGMRKPAFLSGEQKKAIVDLLFKTNRKVTVKQLKEDYFKKIECFDSVEISGVEDRFNASLGTYHDLLKIIKDKDFLDNEENEDILEDIVLTLTLFEDREMIEERLKTYAHLFDDKVMKQLKRRRYTGWGRLSRKLINGIRDKQSGKTILDFLKSDGFANRNFMQLIHDDSLTFKEDIQKAQVSGQGDSLHEHIANLAGSPAIKKGILQTVKVVDELVKVMGRHKPENIVIEMARENQTTQKGQKNSRERMKRIEEGIKELGSQILKEHPVENTQLQNEKLYLYYLQNGRDMYVDQELDINRLSDYDVDHIVPQSFLKDDSIDNKVLTRSDKARGKSDNVPSEEVVKKMKNYWRQLLNAKLITQRKFDNLTKAERGGLSELDKAGFIKRQLVETRQITKHVAQILDSRMNTKYDENDKLIREVKVITLKSKLVSDFRKDFQFYKVREINNYHHAHDAYLNAVVGTALIKKYPKLESEFVYGDYKVYDVRKMIAKSEQEIGKATAKYFFYSNIMNFFKTEITLANGEIRKRPLIETNGETGEIVWDKGRDFATVRKVLSMPQVNIVKKTEVQTGGFSKESILPKRNSDKLIARKKDWDPKKYGGFDSPTVAYSVLVVAKVEKGKSKKLKSVKELLGITIMERSSFEKNPIDFLEAKGYKEVKKDLIIKLPKYSLFELENGRKRMLASAGELQKGNELALPSKYVNFLYLASHYEKLKGSPEDNEQKQLFVEQHKHYLDEIIEQISEFSKRVILADANLDKVLSAYNKHRDKPIREQAENIIHLFTLTNLGAPAAFKYFDTTIDRKRYTSTKEVLDATLIHQSITGLYETRIDLSQLGGDGGGGSGSSPAPGGLGIEDEYRLHETSTEPDVSLGSTWLSDFPQAWAETGGMGLAVRQAPLIIPLKATSTPVSIQQYPMSHEARLGIKPHIQRLLDQGILVPCQSPWNTPLLPVKKPGTNDYRPVQDLREVNKRVEDIHPTVPNPYNLLSGLPPSHQWYTVLDLKDAFFCLRLHPTSQPLFAFEWRDPGMGISGQLTWTRLPQGFKNSPTLFNEALHRDLADFRIQHPDLILLQYVDDILLAATSELDCQQGTRALLQTLGDLGYRASAKKAQICQKQVKYLGYLLREGQRWLTEARKETVMGQPVPKTPRQLREFLGKAGFCRLFIPGFAEMAAPLYPLTKPGTLFSWGPDQQKAYQEIKQALLTAPALGLPDLTKPFELFVDEKQGYAKGVLTQKLGPWRRPVAYLSKKLDPVAAGWPPCLRMVAAIAVLTKDAGKLTMGQPLVILAPHAVEALVKQPPDRWLSNARMTHYQAMLLDTDRVQFGPVVALNPATLLPLPEEGAPHDCLEILAETHGTRPDLTDQPIPDADHTWYTDGSSFLQEGQRKAGAAVTTETEVIWAGALPAGTSAQRAELIALTQALKMAEGKRLNVYTDSRYAFATAHIHGEIYRRRGWLTSEGREIKNKSEILALLKALFLPKRLSIIHCLGHQKGDSAEARGNRLADQAAREAAIKTPPDTSTLLIAGKRTADGSEFEKRTADGSEFESPKKKAKVE

SEQ ID NO: 7131 - protein, 2094 aa, synthetic construct; identical to SEQ ID NO: 7130

SEQ ID NO: 7132 - protein, 2094 aa, synthetic construct
MPAAKRVKLDGGDKKYSIGLDIGTNSVGWAVITDEYKVPSKKFKVLGNTDRHSIKKNLIGALLFDSGETAEATRLKRTARRRYTRRKNRICYLQEIFSNEMAKVDDSFFHRLEESFLVEEDKKHERHPIFGNIVDEVAYHEKYPTIYHLRKKLVDSTDKADLRLIYLALAHMIKFRGHFLIEGDLNPDNSDVDKLFIQLVQTYNQLFEENPINASGVDAKAILSARLSKSRRLENLIAQLPGEKKNGLFGNLIALSLGLTPNFKSNFDLAEDAKLQLSKDTYDDDLDNLLAQIGDQYADLFLAAKNLSDAILLSDILRVNTEITKAPLSASMIKRYDEHHQDLTLLKALVRQQLPEKYKEIFFDQSKNGYAGYIDGGASQEEFYKFIKPILEKMDGTEELLVKLNREDLLRKQRTFDNGSIPHQIHLGELHAILRRQEDFYPFLKDNREKIEKILTFRIPYYVGPLARGNSRFAWMTRKSEETITPWNFEEVVDKGASAQSFIERMTNFDKNLPNEKVLPKHSLLYEYFTVYNELTKVKYVTEGMRKPAFLSGEQKKAIVDLLFKTNRKVTVKQLKEDYFKKIECFDSVEISGVEDRFNASLGTYHDLLKIIKDKDFLDNEENEDILEDIVLTLTLFEDREMIEERLKTYAHLFDDKVMKQLKRRRYTGWGRLSRKLINGIRDKQSGKTILDFLKSDGFANRNFMQLIHDDSLTFKEDIQKAQVSGQGDSLHEHIANLAGSPAIKKGILQTVKVVDELVKVMGRHKPENIVIEMARENQTTQKGQKNSRERMKRIEEGIKELGSQILKEHPVENTQLQNEKLYLYYLQNGRDMYVDQELDINRLSDYDVDHIVPQSFLKDDSIDNKVLTRSDKARGKSDNVPSEEVVKKMKNYWRQLLNAKLITQRKFDNLTKAERGGLSELDKAGFIKRQLVETRQITKHVAQILDSRMNTKYDENDKLIREVKVITLKSKLVSDFRKDFQFYKVREINNYHHAHDAYLNAVVGTALIKKYPKLESEFVYGDYKVYDVRKMIAKSEQEIGKATAKYFFYSNIMNFFKTEITLANGEIRKRPLIETNGETGEIVWDKGRDFATVRKVLSMPQVNIVKKTEVQTGGFSKESILPKRNSDKLIARKKDWDPKKYGGFDSPTVAYSVLVVAKVEKGKSKKLKSVKELLGITIMERSSFEKNPIDFLEAKGYKEVKKDLIIKLPKYSLFELENGRKRMLASAGELQKGNELALPSKYVNFLYLASHYEKLKGSPEDNEQKQLFVEQHKHYLDEIIEQISEFSKRVILADANLDKVLSAYNKHRDKPIREQAENIIHLFTLTNLGAPAAFKYFDTTIDRKRYTSTKEVLDATLIHQSITGLYETRIDLSQLGGDGGGGSGSSPAPGGTLNIEDEYRLHETSKGPDVPLGSTWLSDFPQAWAETGGMGLAVRQAPLIIPLKATSTPVSIKQYPMSQEARLGIKPHIQRLLDQGILVPCQSPWNTPLLPVKKPGTNDYRPVQDLREVNKRVEDIHPTVPNPYNLLSGLPPSHQWYTVLDLKDAFFCLRLHPTSQSLFAFEWRDPEMGISGQLTWTRLPQGFKNSPTLFNEALHRDLADFRIQHPDLILLQYVDDLLLAATSELDCQQGTRALLQTLGDLGYRASAKKAQICQKQVKYLGYLLKEGQRWLTEARKETVMGQPTPKTPRQLREFLGTAGFCRLWIPGFAEMAAPLYPLTKPGTLFEWGPDQQKAYQEIKQALLTAPALGLPDLTKPFELFVDEKQGYAKGVLTQKLGPWRRPVAYLSKKLDPVAAGWPPCLRMVAAIAVLTKDAGKLTMGQPLVILAPHAVEALVKQPPDRWLSNARMTHYQALLLDTDRVQFGPIVALNPATLLPLPEEGLQHDCLDILAEAHGTRPDLTDQPLPDADHTWYTDGSSFLQEGQRKAGAAVTTETEVVWAKALPAGTSAQRAELIALTQALKMAEGKKLNVYTDSRYAFATAHIHGEIYRRRGWLTSEGKEIKNKDEILALLKALFLPKRLSIIHCPGHQKGNRAEARGNRMADQAAREVATRETPETSTLLAGKRTADGSEFEKRTADGSEFESPKKKAKVE

SEQ ID NO: 7133 - protein, 2094 aa, synthetic construct
MPAAKRVKLDGGDKKYSIGLDIGTNSVGWAVITDEYKVPSKKFKVLGNTDRHSIKKNLIGALLFDSGETAEATRLKRTARRRYTRRKNRICYLQEIFSNEMAKVDDSFFHRLEESFLVEEDKKHERHPIFGNIVDEVAYHEKYPTIYHLRKKLVDSTDKADLRLIYLALAHMIKFRGHFLIEGDLNPDNSDVDKLFIQLVQTYNQLFEENPINASGVDAKAILSARLSKSRRLENLIAQLPGEKKNGLFGNLIALSLGLTPNFKSNFDLAEDAKLQLSKDTYDDDLDNLLAQIGDQYADLFLAAKNLSDAILLSDILRVNTEITKAPLSASMIKRYDEHHQDLTLLKALVRQQLPEKYKEIFFDQSKNGYAGYIDGGASQEEFYKFIKPILEKMDGTEELLVKLNREDLLRKQRTFDNGSIPHQIHLGELHAILRRQEDFYPFLKDNREKIEKILTFRIPYYVGPLARGNSRFAWMTRKSEETITPWNFEEVVDKGASAQSFIERMTNFDKNLPNEKVLPKHSLLYEYFTVYNELTKVKYVTEGMRKPAFLSGEQKKAIVDLLFKTNRKVTVKQLKEDYFKKIECFDSVEISGVEDRFNASLGTYHDLLKIIKDKDFLDNEENEDILEDIVLTLTLFEDREMIEERLKTYAHLFDDKVMKQLKRRRYTGWGRLSRKLINGIRDKQSGKTILDFLKSDGFANRNFMQLIHDDSLTFKEDIQKAQVSGQGDSLHEHIANLAGSPAIKKGILQTVKVVDELVKVMGRHKPENIVIEMARENQTTQKGQKNSRERMKRIEEGIKELGSQILKEHPVENTQLQNEKLYLYYLQNGRDMYVDQELDINRLSDYDVDHIVPQSFLKDDSIDNKVLTRSDKARGKSDNVPSEEVVKKMKNYWRQLLNAKLITQRKFDNLTKAERGGLSELDKAGFIKRQLVETRQITKHVAQILDSRMNTKYDENDKLIREVKVITLKSKLVSDFRKDFQFYKVREINNYHHAHDAYLNAVVGTALIKKYPKLESEFVYGDYKVYDVRKMIAKSEQEIGKATAKYFFYSNIMNFFKTEITLANGEIRKRPLIETNGETGEIVWDKGRDFATVRKVLSMPQVNIVKKTEVQTGGFSKESILPKRNSDKLIARKKDWDPKKYGGFDSPTVAYSVLVVAKVEKGKSKKLKSVKELLGITIMERSSFEKNPIDFLEAKGYKEVKKDLIIKLPKYSLFELENGRKRMLASAGELQKGNELALPSKYVNFLYLASHYEKLKGSPEDNEQKQLFVEQHKHYLDEIIEQISEFSKRVILADANLDKVLSAYNKHRDKPIREQAENIIHLFTLTNLGAPAAFKYFDTTIDRKRYTSTKEVLDATLIHQSITGLYETRIDLSQLGGDGGGGSGSSPAPGGTLNIEDEYRLHEISTEPDVSPGSTWLSDFPQAWAETGGMGLAVRQAPLIIPLKATSTPVSIKQYPMSQEAKLGIKPHIQRLLDQGILVPCQSPWNTPLLPVKKPGTNDYRPVQGLREVNKRVEDIHPTVPNPYNLLSGLPTSHRWYTVLDLKDAFFCLRLHPTSQPLFASEWRDPGMGISGQLTWTRLPQGFKNSPTLFNEALHRGLADFRIQHPDLILLQYVDDLLLAATSELDCQQGTRALLKTLGNLGYRASAKKAQICQKQVKYLGYLLREGQRWLTEARKETVMGQPTPKTPRQLREFLGTAGFCRLWIPRFAEMAAPLYPLTKPGTLFNWGPDQQKAYHEIKQALLTAPALGLPDLTKPFELFVDEKQGYAKGVLTQKLGPWRRPVAYLSKKLDPVAAGWPPCLRMVAAIAVLTKDAGKLTMGQPLVILAPHAVEALVKQPPDRWLSNARMTHYQAMLLDTDRVQFGPVVALNPATLLPLPEEGAPHDCLEILAETHGTEPDLTDQPIPDADHTWYTDGSSFLQEGQRKAGAAVTTETEVIWARALPAGTSAQRAELIALTQALKMAEGKRLNVYTDSRYAFATAHIHGEIYKRRGWLTSEGREIKNKSEILALLKALFLPKRLSIIHCLGHQKGDSAEARGNRLADQAAREAAIKTPPDTSTLLAGKRTADGSEFEKRTADGSEFESPKKKAKVE

SEQ ID NO: 7134 - protein, 2088 aa, synthetic construct
MPAAKRVKLDGGDKKYSIGLDIGTNSVGWAVITDEYKVPSKKFKVLGNTDRHSIKKNLIGALLFDSGETAEATRLKRTARRRYTRRKNRICYLQEIFSNEMAKVDDSFFHRLEESFLVEEDKKHERHPIFGNIVDEVAYHEKYPTIYHLRKKLVDSTDKADLRLIYLALAHMIKFRGHFLIEGDLNPDNSDVDKLFIQLVQTYNQLFEENPINASGVDAKAILSARLSKSRRLENLIAQLPGEKKNGLFGNLIALSLGLTPNFKSNFDLAEDAKLQLSKDTYDDDLDNLLAQIGDQYADLFLAAKNLSDAILLSDILRVNTEITKAPLSASMIKRYDEHHQDLTLLKALVRQQLPEKYKEIFFDQSKNGYAGYIDGGASQEEFYKFIKPILEKMDGTEELLVKLNREDLLRKQRTFDNGSIPHQIHLGELHAILRRQEDFYPFLKDNREKIEKILTFRIPYYVGPLARGNSRFAWMTRKSEETITPWNFEEVVDKGASAQSFIERMTNFDKNLPNEKVLPKHSLLYEYFTVYNELTKVKYVTEGMRKPAFLSGEQKKAIVDLLFKTNRKVTVKQLKEDYFKKIECFDSVEISGVEDRFNASLGTYHDLLKIIKDKDFLDNEENEDILEDIVLTLTLFEDREMIEERLKTYAHLFDDKVMKQLKRRRYTGWGRLSRKLINGIRDKQSGKTILDFLKSDGFANRNFMQLIHDDSLTFKEDIQKAQVSGQGDSLHEHIANLAGSPAIKKGILQTVKVVDELVKVMGRHKPENIVIEMARENQTTQKGQKNSRERMKRIEEGIKELGSQILKEHPVENTQLQNEKLYLYYLQNGRDMYVDQELDINRLSDYDVDHIVPQSFLKDDSIDNKVLTRSDKARGKSDNVPSEEVVKKMKNYWRQLLNAKLITQRKFDNLTKAERGGLSELDKAGFIKRQLVETRQITKHVAQILDSRMNTKYDENDKLIREVKVITLKSKLVSDFRKDFQFYKVREINNYHHAHDAYLNAVVGTALIKKYPKLESEFVYGDYKVYDVRKMIAKSEQEIGKATAKYFFYSNIMNFFKTEITLANGEIRKRPLIETNGETGEIVWDKGRDFATVRKVLSMPQVNIVKKTEVQTGGFSKESILPKRNSDKLIARKKDWDPKKYGGFDSPTVAYSVLVVAKVEKGKSKKLKSVKELLGITIMERSSFEKNPIDFLEAKGYKEVKKDLIIKLPKYSLFELENGRKRMLASAGELQKGNELALPSKYVNFLYLASHYEKLKGSPEDNEQKQLFVEQHKHYLDEIIEQISEFSKRVILADANLDKVLSAYNKHRDKPIREQAENIIHLFTLTNLGAPAAFKYFDTTIDRKRYTSTKEVLDATLIHQSITGLYETRIDLSQLGGDGGGGSGSSPAPGGTLQLDDEYRLYSPLVKPDQNIQFWLEQFPQAWAETAGMGLAKQVPPQVIQLKASATPVSVRQYPLSKEAQEGIRPHVQRLIQQGILVPVQSPWNTPLLPVRKPGTNDYRPVQDLREVNKRVQDIHPTVPNPYNLLCALPPQRSWYTVLDLKDAFFCLRLHPTSQPLFAFEWRDPGTGRTGQLTWTRLPQGFKNSPTIFDEALHRDLANFRIQHPQVTLLQYVDDLLLAGATKQDCLEGTKALLLELSDLGYRASAKKAQICRREVTYLGYSLRDGQRWLTEARKKTVVQIPAPTTAKQVREFLGTAGFCRLWIPGFATLAAPLYPLTKEKGEFSWAPEHQKAFDAIKKALLSAPALALPDVTKPFTLYVDERKGVARGVLTQTLGPWRRPVAYLSKKLDPVASGWPVCLKAIAAVAILVKDADKLTLGQNITVIAPHALENIVRQPPDRWMTNARMTHYQSLLLTERVTFAPPAALNPATLLPEETDEPVTHDCHQLLIEETGVRKDLTDIPLTGEVLTWFTDGSSYVVEGKRMAGAAVVDGTRTIWASSLPEGTSAQKAELMALTQALRLAEGKSINIYTDSRYAFATAHVHGAIYKQRGLLTSAGREIKNKEEILSLLEALHLPKRLAIIHCPGHQKAKDPISRGNQMADRVAKQAAQGVNLLAGKRTADGSEFEKRTADGSEFESPKKKAKVE

SEQ ID NO: 7135 - protein, 2092 aa, synthetic construct
MPAAKRVKLDGGDKKYSIGLDIGTNSVGWAVITDEYKVPSKKFKVLGNTDRHSIKKNLIGALLFDSGETAEATRLKRTARRRYTRRKNRICYLQEIFSNEMAKVDDSFFHRLEESFLVEEDKKHERHPIFGNIVDEVAYHEKYPTIYHLRKKLVDSTDKADLRLIYLALAHMIKFRGHFLIEGDLNPDNSDVDKLFIQLVQTYNQLFEENPINASGVDAKAILSARLSKSRRLENLIAQLPGEKKNGLFGNLIALSLGLTPNFKSNFDLAEDAKLQLSKDTYDDDLDNLLAQIGDQYADLFLAAKNLSDAILLSDILRVNTEITKAPLSASMIKRYDEHHQDLTLLKALVRQQLPEKYKEIFFDQSKNGYAGYIDGGASQEEFYKFIKPILEKMDGTEELLVKLNREDLLRKQRTFDNGSIPHQIHLGELHAILRRQEDFYPFLKDNREKIEKILTFRIPYYVGPLARGNSRFAWMTRKSEETITPWNFEEVVDKGASAQSFIERMTNFDKNLPNEKVLPKHSLLYEYFTVYNELTKVKYVTEGMRKPAFLSGEQKKAIVDLLFKTNRKVTVKQLKEDYFKKIECFDSVEISGVEDRFNASLGTYHDLLKIIKDKDFLDNEENEDILEDIVLTLTLFEDREMIEERLKTYAHLFDDKVMKQLKRRRYTGWGRLSRKLINGIRDKQSGKTILDFLKSDGFANRNFMQLIHDDSLTFKEDIQKAQVSGQGDSLHEHIANLAGSPAIKKGILQTVKVVDELVKVMGRHKPENIVIEMARENQTTQKGQKNSRERMKRIEEGIKELGSQILKEHPVENTQLQNEKLYLYYLQNGRDMYVDQELDINRLSDYDVDHIVPQSFLKDDSIDNKVLTRSDKARGKSDNVPSEEVVKKMKNYWRQLLNAKLITQRKFDNLTKAERGGLSELDKAGFIKRQLVETRQITKHVAQILDSRMNTKYDENDKLIREVKVITLKSKLVSDFRKDFQFYKVREINNYHHAHDAYLNAVVGTALIKKYPKLESEFVYGDYKVYDVRKMIAKSEQEIGKATAKYFFYSNIMNFFKTEITLANGEIRKRPLIETNGETGEIVWDKGRDFATVRKVLSMPQVNIVKKTEVQTGGFSKESILPKRNSDKLIARKKDWDPKKYGGFDSPTVAYSVLVVAKVEKGKSKKLKSVKELLGITIMERSSFEKNPIDFLEAKGYKEVKKDLIIKLPKYSLFELENGRKRMLASAGELQKGNELALPSKYVNFLYLASHYEKLKGSPEDNEQKQLFVEQHKHYLDEIIEQISEFSKRVILADANLDKVLSAYNKHRDKPIREQAENIIHLFTLTNLGAPAAFKYFDTTIDRKRYTSTKEVLDATLIHQSITGLYETRIDLSQLGGDGGGGSGSSPAPGGVLNLEEEYRLHEKPVPSSIDPSWLQLFPTVWAERAGMGLANQVPPVVVELRSGASPVAVRQYPMSKEAREGIRPHIQRFLDLGVLVPCQSPWNTPLLPVKKPGTNDYRPVQDLREINKRVQDIHPTVPNPYNLLSSLPPSHTWYSVLDLKDAFFCLKLHPNSQPLFAFEWRDPEKGNTGQLTWTRLPQGFKNSPTLFNEALHRDLAPFRALNPQVVLLQYVDDLLVAAPTYRDCKEGTQKLLQELSKLGYRVSAKKAQLCQKEVTYLGYLLKEGKRWLTPARKATVMKIPPPTTPRQVREFLGTAGFCRLWIPGFASLAAPLYPLTKPSIPFIWTEEHQKAFDRIKEALLSAPALALPDLTKPFTLYVDERAGVARGVLTQTLGPWRRPVAYLSKKLDPVASGWPTCLKAVAAVALLLKDADKLTLGQNVTVIASHSLESIVRQPPDRWMTNARMTHYQSLLLNERVSFAPPAVLNPATLLPVESEATPVHRCSEILAEETGTRRDLKDQPLPGVPAWYTDGSSFIAEGKRRAGAAIVDGKRTVWASSLPEGTSAQKAELVALTQALRLAEGKDINIYTDSRYAFATAHIHGAIYKQRGWLTSAGKDIKNKEEILALLEAIHLPKRVAIIHCPGHQKGNDPVATGNRRADEAAKQAALSTRVLAETTKPAGKRTADGSEFEKRTADGSEFESPKKKAKVE

SEQ ID NO: 7136 - protein, 2094 aa, synthetic construct
MPAAKRVKLDGGDKKYSIGLDIGTNSVGWAVITDEYKVPSKKFKVLGNTDRHSIKKNLIGALLFDSGETAEATRLKRTARRRYTRRKNRICYLQEIFSNEMAKVDDSFFHRLEESFLVEEDKKHERHPIFGNIVDEVAYHEKYPTIYHLRKKLVDSTDKADLRLIYLALAHMIKFRGHFLIEGDLNPDNSDVDKLFIQLVQTYNQLFEENPINASGVDAKAILSARLSKSRRLENLIAQLPGEKKNGLFGNLIALSLGLTPNFKSNFDLAEDAKLQLSKDTYDDDLDNLLAQIGDQYADLFLAAKNLSDAILLSDILRVNTEITKAPLSASMIKRYDEHHQDLTLLKALVRQQLPEKYKEIFFDQSKNGYAGYIDGGASQEEFYKFIKPILEKMDGTEELLVKLNREDLLRKQRTFDNGSIPHQIHLGELHAILRRQEDFYPFLKDNREKIEKILTFRIPYYVGPLARGNSRFAWMTRKSEETITPWNFEEVVDKGASAQSFIERMTNFDKNLPNEKVLPKHSLLYEYFTVYNELTKVKYVTEGMRKPAFLSGEQKKAIVDLLFKTNRKVTVKQLKEDYFKKIECFDSVEISGVEDRFNASLGTYHDLLKIIKDKDFLDNEENEDILEDIVLTLTLFEDREMIEERLKTYAHLFDDKVMKQLKRRRYTGWGRLSRKLINGIRDKQSGKTILDFLKSDGFANRNFMQLIHDDSLTFKEDIQKAQVSGQGDSLHEHIANLAGSPAIKKGILQTVKVVDELVKVMGRHKPENIVIEMARENQTTQKGQKNSRERMKRIEEGIKELGSQILKEHPVENTQLQNEKLYLYYLQNGRDMYVDQELDINRLSDYDVDHIVPQSFLKDDSIDNKVLTRSDKARGKSDNVPSEEVVKKMKNYWRQLLNAKLITQRKFDNLTKAERGGLSELDKAGFIKRQLVETRQITKHVAQILDSRMNTKYDENDKLIREVKVITLKSKLVSDFRKDFQFYKVREINNYHHAHDAYLNAVVGTALIKKYPKLESEFVYGDYKVYDVRKMIAKSEQEIGKATAKYFFYSNIMNFFKTEITLANGEIRKRPLIETNGETGEIVWDKGRDFATVRKVLSMPQVNIVKKTEVQTGGFSKESILPKRNSDKLIARKKDWDPKKYGGFDSPTVAYSVLVVAKVEKGKSKKLKSVKELLGITIMERSSFEKNPIDFLEAKGYKEVKKDLIIKLPKYSLFELENGRKRMLASAGELQKGNELALPSKYVNFLYLASHYEKLKGSPEDNEQKQLFVEQHKHYLDEIIEQISEFSKRVILADANLDKVLSAYNKHRDKPIREQAENIIHLFTLTNLGAPAAFKYFDTTIDRKRYTSTKEVLDATLIHQSITGLYETRIDLSQLGGDGGGGSGSSPAPGGTLNIEDEYRLHETSKEPDVPLGSTWLSDFPQAWAETGGMGLAVRQAPLIIPLKATSTPVSIKQYPMSQEARLGIKPHIQRLLDQGILVPCQSPWNTPLLPVKKPGTNDYRPVQDLREVNKRVEDIHPTVPNPYNLLSGLPPSHQWYTVLDLKDAFFCLRLHPTSQPLFAFEWRDPEMGISGQLTWTRLPQGFKNSPTLFDEALHRDLADFRIQHPDLILLQYVDDLLLAATSEQDCQRGTRALLQTLGNLGYRASAKKAQICQKQVKYLGYLLKEGQRWLTEARKETVMGQPTPKTPRQLREFLGTAGFCRLWIPGFAEMAAPLYPLTKTGTLFNWGPDQQKAYQEIKQALLTAPALGLPDLTKPFELFVDEKQGYAKGVLTQKLGPWRRPVAYLSKKLDPVAAGWPPCLRMVAAIAVLTKDAGKLTMGQPLVILAPHAVEALVKQPPDRWLSNARMTHYQAMLLDTDRVQFGPVVALNPATLLPLPEKEAPHDCLEILAETHGTRPDLTDQPIPDADYTWYTDGSSFLQEGQRRAGAAVTTETEVIWARALPAGTSAQRAELIALTQALKMAEGKKLNVYTDSRYAFATAHVHGEIYRRRGLLTSEGREIKNKNEILALLKALFLPKRLSIIHCPGHQKGNSAEARGNRMADQAAREAAMKAVLETSTLLAGKRTADGSEFEKRTADGSEFESPKKKAKVE

SEQ ID NO: 7137 - protein, 2094 aa, synthetic construct
MPAAKRVKLDGGDKKYSIGLDIGTNSVGWAVITDEYKVPSKKFKVLGNTDRHSIKKNLIGALLFDSGETAEATRLKRTARRRYTRRKNRICYLQEIFSNEMAKVDDSFFHRLEESFLVEEDKKHERHPIFGNIVDEVAYHEKYPTIYHLRKKLVDSTDKADLRLIYLALAHMIKFRGHFLIEGDLNPDNSDVDKLFIQLVQTYNQLFEENPINASGVDAKAILSARLSKSRRLENLIAQLPGEKKNGLFGNLIALSLGLTPNFKSNFDLAEDAKLQLSKDTYDDDLDNLLAQIGDQYADLFLAAKNLSDAILLSDILRVNTEITKAPLSASMIKRYDEHHQDLTLLKALVRQQLPEKYKEIFFDQSKNGYAGYIDGGASQEEFYKFIKPILEKMDGTEELLVKLNREDLLRKQRTFDNGSIPHQIHLGELHAILRRQEDFYPFLKDNREKIEKILTFRIPYYVGPLARGNSRFAWMTRKSEETITPWNFEEVVDKGASAQSFIERMTNFDKNLPNEKVLPKHSLLYEYFTVYNELTKVKYVTEGMRKPAFLSGEQKKAIVDLLFKTNRKVTVKQLKEDYFKKIECFDSVEISGVEDRFNASLGTYHDLLKIIKDKDFLDNEENEDILEDIVLTLTLFEDREMIEERLKTYAHLFDDKVMKQLKRRRYTGWGRLSRKLINGIRDKQSGKTILDFLKSDGFANRNFMQLIHDDSLTFKEDIQKAQVSGQGDSLHEHIANLAGSPAIKKGILQTVKVVDELVKVMGRHKPENIVIEMARENQTTQKGQKNSRERMKRIEEGIKELGSQILKEHPVENTQLQNEKLYLYYLQNGRDMYVDQELDINRLSDYDVDHIVPQSFLKDDSIDNKVLTRSDKARGKSDNVPSEEVVKKMKNYWRQLLNAKLITQRKFDNLTKAERGGLSELDKAGFIKRQLVETRQITKHVAQILDSRMNTKYDENDKLIREVKVITLKSKLVSDFRKDFQFYKVREINNYHHAHDAYLNAVVGTALIKKYPKLESEFVYGDYKVYDVRKMIAKSEQEIGKATAKYFFYSNIMNFFKTEITLANGEIRKRPLIETNGETGEIVWDKGRDFATVRKVLSMPQVNIVKKTEVQTGGFSKESILPKRNSDKLIARKKDWDPKKYGGFDSPTVAYSVLVVAKVEKGKSKKLKSVKELLGITIMERSSFEKNPIDFLEAKGYKEVKKDLIIKLPKYSLFELENGRKRMLASAGELQKGNELALPSKYVNFLYLASHYEKLKGSPEDNEQKQLFVEQHKHYLDEIIEQISEFSKRVILADANLDKVLSAYNKHRDKPIREQAENIIHLFTLTNLGAPAAFKYFDTTIDRKRYTSTKEVLDATLIHQSITGLYETRIDLSQLGGDGGGGSGSSPAPGGTLNIEDEYRLHETSKEPDVPLGSTWLSDFPQAWAETGGMGLAVRQAPLIIPLKATSTPVSIKQYPMSQEARLGIKPHIQRLLDQGILVPCQSPWNTPLLPVKKPGTNDYRPVQDLREVNKRVEDIHPTVPNPYNLLSGLPPSHQWYTVLDLKDAFFCLRLHPTSQPLFAFEWRDPEMGISGQLTWTRLPQGFKNSPTLFNEALHRDLADFRIQHPDLILLQYVDDLLLAATSEQDCQRGTRALLQTLGNLGYRASAKKAQICQKQVKYLGYLLKEGQRWLTEARKETVMGQPTPKTPRQLREFLGTAGFCRLWIPGFAEMAAPLYPLTKPGTLFNWGPDQQKAYQEIKQALLTAPALGLPDLTKPFELFVDEKQGYAKGVLTQKLGPWRRPVAYLSKKLDPVAAGWPPCLRMVAAIAVLTKDAGKLTMGQPLVILAPHAVEALVKQPPDRWLSNARMTHYQAMLLDTDRVQFGPVVALNPATLLPLPEKEAPHDCLEILAETHGTRPDLTDQPIPDADYTWYTDGSSFLQEGQRRAGAAVTTETEVIWARALPAGTSAQRAELIALTQALKMAEGKKLNVYTDSRYAFATAHVHGEIYRRRGWLTSEGREIKNKNEILALLKALFLPKRLSIIHCPGHQKGNSAEARGNRMADQAAREAAMKAVLETSTLLAGKRTADGSEFEKRTADGSEFESPKKKAKVE

SEQ ID NO: 7138 - protein, 2093 aa, synthetic construct
MPAAKRVKLDGGDKKYSIGLDIGTNSVGWAVITDEYKVPSKKFKVLGNTDRHSIKKNLIGALLFDSGETAEATRLKRTARRRYTRRKNRICYLQEIFSNEMAKVDDSFFHRLEESFLVEEDKKHERHPIFGNIVDEVAYHEKYPTIYHLRKKLVDSTDKADLRLIYLALAHMIKFRGHFLIEGDLNPDNSDVDKLFIQLVQTYNQLFEENPINASGVDAKAILSARLSKSRRLENLIAQLPGEKKNGLFGNLIALSLGLTPNFKSNFDLAEDAKLQLSKDTYDDDLDNLLAQIGDQYADLFLAAKNLSDAILLSDILRVNTEITKAPLSASMIKRYDEHHQDLTLLKALVRQQLPEKYKEIFFDQSKNGYAGYIDGGASQEEFYKFIKPILEKMDGTEELLVKLNREDLLRKQRTFDNGSIPHQIHLGELHAILRRQEDFYPFLKDNREKIEKILTFRIPYYVGPLARGNSRFAWMTRKSEETITPWNFEEVVDKGASAQSFIERMTNFDKNLPNEKVLPKHSLLYEYFTVYNELTKVKYVTEGMRKPAFLSGEQKKAIVDLLFKTNRKVTVKQLKEDYFKKIECFDSVEISGVEDRFNASLGTYHDLLKIIKDKDFLDNEENEDILEDIVLTLTLFEDREMIEERLKTYAHLFDDKVMKQLKRRRYTGWGRLSRKLINGIRDKQSGKTILDFLKSDGFANRNFMQLIHDDSLTFKEDIQKAQVSGQGDSLHEHIANLAGSPAIKKGILQTVKVVDELVKVMGRHKPENIVIEMARENQTTQKGQKNSRERMKRIEEGIKELGSQILKEHPVENTQLQNEKLYLYYLQNGRDMYVDQELDINRLSDYDVDHIVPQSFLKDDSIDNKVLTRSDKARGKSDNVPSEEVVKKMKNYWRQLLNAKLITQRKFDNLTKAERGGLSELDKAGFIKRQLVETRQITKHVAQILDSRMNTKYDENDKLIREVKVITLKSKLVSDFRKDFQFYKVREINNYHHAHDAYLNAVVGTALIKKYPKLESEFVYGDYKVYDVRKMIAKSEQEIGKATAKYFFYSNIMNFFKTEITLANGEIRKRPLIETNGETGEIVWDKGRDFATVRKVLSMPQVNIVKKTEVQTGGFSKESILPKRNSDKLIARKKDWDPKKYGGFDSPTVAYSVLVVAKVEKGKSKKLKSVKELLGITIMERSSFEKNPIDFLEAKGYKEVKKDLIIKLPKYSLFELENGRKRMLASAGELQKGNELALPSKYVNFLYLASHYEKLKGSPEDNEQKQLFVEQHKHYLDEIIEQISEFSKRVILADANLDKVLSAYNKHRDKPIREQAENIIHLFTLTNLGAPAAFKYFDTTIDRKRYTSTKEVLDATLIHQSITGLYETRIDLSQLGGDGGGGSPAPGSSGGTLQLEEEYRLFEPESTQKQEMDIWLKNFPQAWAETGGMGTAHCQAPVLIQLKATATPISIRQYPMPHEAYQGIKPHIRRMLDQGILKPCQSPWNTPLLPVKKPGTEDYRPVQDLREVNKRVEDIHPTVPNPYNLLSTLPPSHPWYTVLDLKDAFFCLRLHSESQLLFAFEWRDPEIGLSGQLTWTRLPQGFKNSPTLFNEALHSDLADFRVRYPALVLLQYVDDLLLAAATRTECLEGTKALLETLGNKGYRASAKKAQICLQEVTYLGYSLKDGQRWLTKARKEAILSIPVPKNSRQVREFLGTAGYCRLWIPGFAELAAPLYPLTRPGTLFQWGTEQQLAFEDIKKALLSSPALGLPDITKPFELFIDENSGFAKGVLVQKLGPWKRPVAYLSKKLDTVASGWPPCLRMVAAIAILVKDAGKLTLGQPLTILTSHPVEALVRQPPNKWLSNARMTHYQAMLLDAERVHFGPTVSLNPATLLPLPSGGNHHDCLQILAETHGTRPDLTDQPLPDADLTWYTDGSSFIRNGEREAGAAVTTESEVIWAAPLPPGTSAQRAELIALTQALKMAEGKKLTVYTDSRYAFATTHVHGEIYRRRGWLTSEGKEIKNKNEILALLEALFLPKRLSIIHCPGHQKGDSPQAKGNRLADDTAKKAATETHSSLTVLPAGKRTADGSEFEKRTADGSEFESPKKKAKVE

SEQ ID NO: 7139 - protein, 2094 aa, synthetic construct
MPAAKRVKLDGGDKKYSIGLDIGTNSVGWAVITDEYKVPSKKFKVLGNTDRHSIKKNLIGALLFDSGETAEATRLKRTARRRYTRRKNRICYLQEIFSNEMAKVDDSFFHRLEESFLVEEDKKHERHPIFGNIVDEVAYHEKYPTIYHLRKKLVDSTDKADLRLIYLALAHMIKFRGHFLIEGDLNPDNSDVDKLFIQLVQTYNQLFEENPINASGVDAKAILSARLSKSRRLENLIAQLPGEKKNGLFGNLIALSLGLTPNFKSNFDLAEDAKLQLSKDTYDDDLDNLLAQIGDQYADLFLAAKNLSDAILLSDILRVNTEITKAPLSASMIKRYDEHHQDLTLLKALVRQQLPEKYKEIFFDQSKNGYAGYIDGGASQEEFYKFIKPILEKMDGTEELLVKLNREDLLRKQRTFDNGSIPHQIHLGELHAILRRQEDFYPFLKDNREKIEKILTFRIPYYVGPLARGNSRFAWMTRKSEETITPWNFEEVVDKGASAQSFIERMTNFDKNLPNEKVLPKHSLLYEYFTVYNELTKVKYVTEGMRKPAFLSGEQKKAIVDLLFKTNRKVTVKQLKEDYFKKIECFDSVEISGVEDRFNASLGTYHDLLKIIKDKDFLDNEENEDILEDIVLTLTLFEDREMIEERLKTYAHLFDDKVMKQLKRRRYTGWGRLSRKLINGIRDKQSGKTILDFLKSDGFANRNFMQLIHDDSLTFKEDIQKAQVSGQGDSLHEHIANLAGSPAIKKGILQTVKVVDELVKVMGRHKPENIVIEMARENQTTQKGQKNSRERMKRIEEGIKELGSQILKEHPVENTQLQNEKLYLYYLQNGRDMYVDQELDINRLSDYDVDHIVPQSFLKDDSIDNKVLTRSDKARGKSDNVPSEEVVKKMKNYWRQLLNAKLITQRKFDNLTKAERGGLSELDKAGFIKRQLVETRQITKHVAQILDSRMNTKYDENDKLIREVKVITLKSKLVSDFRKDFQFYKVREINNYHHAHDAYLNAVVGTALIKKYPKLESEFVYGDYKVYDVRKMIAKSEQEIGKATAKYFFYSNIMNFFKTEITLANGEIRKRPLIETNGETGEIVWDKGRDFATVRKVLSMPQVNIVKKTEVQTGGFSKESILPKRNSDKLIARKKDWDPKKYGGFDSPTVAYSVLVVAKVEKGKSKKLKSVKELLGITIMERSSFEKNPIDFLEAKGYKEVKKDLIIKLPKYSLFELENGRKRMLASAGELQKGNELALPSKYVNFLYLASHYEKLKGSPEDNEQKQLFVEQHKHYLDEIIEQISEFSKRVILADANLDKVLSAYNKHRDKPIREQAENIIHLFTLTNLGAPAAFKYFDTTIDRKRYTSTKEVLDATLIHQSITGLYETRIDLSQLGGDGGGGSPAPGSSGGTLNLEDEYRLYETSAEPEVSPGSTWLSDFPQAWAETGGMGLAVRQAPLIIPLKATSTPVSIKQYPMSQEAKLGIKPHIQRLLDQGILVPCQSPWNTPLLPVKKPGTNDYRPVQDLREVNKRVEDIHPTVPNPYNLLSGLPPSHRWYTVLDLKDAFFCLRLHPTSQPLFAFEWRDPGMGISGQLTWTRLPQGFKNSPTLFNEALHRDLADFRIQHPDLILLQYVDDILLAATSELDCQQGTRALLLTLGNLGYRASAKKAQLCQKQVKYLGYLLKEGQRWLTEARKETVMGQPTPKTPRQLREFLGTAGFCRLWIPGFAEMAAPLYPLTKPGTLFNWGPDQQKAYQEIKQALLTAPALGLPDLTKPFELFVDEKQGYAKGVLTQKLGPWRRPVAYLSKKLDPVAAGWPPCLRMVAAIAVLRKDAGKLTMGQPLVILAPHAVEALVKQPPDRWLSNARMTHYQAMLLDTDRVQFGPVVALNPATLLPLPEEGAPHDCLEILAETHGTRPDLTDQPIPDADHTWYTDGSSFLQEGQRKAGAAVTTETEVIWARALPAGTSAQRAELIALTQALKMAEGKRLNVYTDSRYAFATAHIHGEIYRRRGWLTSEGREIKNKSEILALLKALFLPKRLSIIHCLGHQKGDSAEARGNRLADQAAREAAIKTPPDTSTLLAGKRTADGSEFEKRTADGSEFESPKKKAKVE

SEQ ID NO: 7140 - protein, 2094 aa, synthetic construct
MPAAKRVKLDGGDKKYSIGLDIGTNSVGWAVITDEYKVPSKKFKVLGNTDRHSIKKNLIGALLFDSGETAEATRLKRTARRRYTRRKNRICYLQEIFSNEMAKVDDSFFHRLEESFLVEEDKKHERHPIFGNIVDEVAYHEKYPTIYHLRKKLVDSTDKADLRLIYLALAHMIKFRGHFLIEGDLNPDNSDVDKLFIQLVQTYNQLFEENPINASGVDAKAILSARLSKSRRLENLIAQLPGEKKNGLFGNLIALSLGLTPNFKSNFDLAEDAKLQLSKDTYDDDLDNLLAQIGDQYADLFLAAKNLSDAILLSDILRVNTEITKAPLSASMIKRYDEHHQDLTLLKALVRQQLPEKYKEIFFDQSKNGYAGYIDGGASQEEFYKFIKPILEKMDGTEELLVKLNREDLLRKQRTFDNGSIPHQIHLGELHAILRRQEDFYPFLKDNREKIEKILTFRIPYYVGPLARGNSRFAWMTRKSEETITPWNFEEVVDKGASAQSFIERMTNFDKNLPNEKVLPKHSLLYEYFTVYNELTKVKYVTEGMRKPAFLSGEQKKAIVDLLFKTNRKVTVKQLKEDYFKKIECFDSVEISGVEDRFNASLGTYHDLLKIIKDKDFLDNEENEDILEDIVLTLTLFEDREMIEERLKTYAHLFDDKVMKQLKRRRYTGWGRLSRKLINGIRDKQSGKTILDFLKSDGFANRNFMQLIHDDSLTFKEDIQKAQVSGQGDSLHEHIANLAGSPAIKKGILQTVKVVDELVKVMGRHKPENIVIEMARENQTTQKGQKNSRERMKRIEEGIKELGSQILKEHPVENTQLQNEKLYLYYLQNGRDMYVDQELDINRLSDYDVDHIVPQSFLKDDSIDNKVLTRSDKARGKSDNVPSEEVVKKMKNYWRQLLNAKLITQRKFDNLTKAERGGLSELDKAGFIKRQLVETRQITKHVAQILDSRMNTKYDENDKLIREVKVITLKSKLVSDFRKDFQFYKVREINNYHHAHDAYLNAVVGTALIKKYPKLESEFVYGDYKVYDVRKMIAKSEQEIGKATAKYFFYSNIMNFFKTEITLANGEIRKRPLIETNGETGEIVWDKGRDFATVRKVLSMPQVNIVKKTEVQTGGFSKESILPKRNSDKLIARKKDWDPKKYGGFDSPTVAYSVLVVAKVEKGKSKKLKSVKELLGITIMERSSFEKNPIDFLEAKGYKEVKKDLIIKLPKYSLFELENGRKRMLASAGELQKGNELALPSKYVNFLYLASHYEKLKGSPEDNEQKQLFVEQHKHYLDEIIEQISEFSKRVILADANLDKVLSAYNKHRDKPIREQAENIIHLFTLTNLGAPAAFKYFDTTIDRKRYTSTKEVLDATLIHQSITGLYETRIDLSQLGGDGGGGSPAPGSSGGTLNIEDEYRLHETSKGPDVPLGSTWLSDFPQAWAETGGMGLAVRQAPLIIPLKATSTPVSIKQYPMSQEARLGIKPHIQRLLDQGILVPCQSPWNTPLLPVKKPGTNDYRPVQDLREVNKRVEDIHPTVPNPYNLLSGLPPSHQWYTVLDLKDAFFCLRLHPTSQSLFAFEWRDPEMGISGQLTWTRLPQGFKNSPTLFNEALHRDLADFRIQHPDLILLQYVDDLLLAATSELDCQQGTRALLQTLGDLGYRASAKKAQICQKQVKYLGYLLKEGQRWLTEARKETVMGQPTPKTPRQLREFLGTAGFCRLWIPGFAEMAAPLYPLTKPGTLFEWGPDQQKAYQEIKQALLTAPALGLPDLTKPFELFVDEKQGYAKGVLTQKLGPWRRPVAYLSKKLDPVAAGWPPCLRMVAAIAVLTKDAGKLTMGQPLVILAPHAVEALVKQPPDRWLSNARMTHYQALLLDTDRVQFGPIVALNPATLLPLPEEGLQHDCLDILAEAHGTRPDLTDQPLPDADHTWYTDGSSFLQEGQRKAGAAVTTETEVVWAKALPAGTSAQRAELIALTQALKMAEGKKLNVYTDSRYAFATAHIHGEIYRRRGWLTSEGKEIKNKDEILALLKALFLPKRLSIIHCPGHQKGNRAEARGNRMADQAAREVATRETPETSTLLAGKRTADGSEFEKRTADGSEFESPKKKAKVE

SEQ ID NO: 7141 - protein, 2092 aa, synthetic construct
MPAAKRVKLDGGDKKYSIGLDIGTNSVGWAVITDEYKVPSKKFKVLGNTDRHSIKKNLIGALLFDSGETAEATRLKRTARRRYTRRKNRICYLQEIFSNEMAKVDDSFFHRLEESFLVEEDKKHERHPIFGNIVDEVAYHEKYPTIYHLRKKLVDSTDKADLRLIYLALAHMIKFRGHFLIEGDLNPDNSDVDKLFIQLVQTYNQLFEENPINASGVDAKAILSARLSKSRRLENLIAQLPGEKKNGLFGNLIALSLGLTPNFKSNFDLAEDAKLQLSKDTYDDDLDNLLAQIGDQYADLFLAAKNLSDAILLSDILRVNTEITKAPLSASMIKRYDEHHQDLTLLKALVRQQLPEKYKEIFFDQSKNGYAGYIDGGASQEEFYKFIKPILEKMDGTEELLVKLNREDLLRKQRTFDNGSIPHQIHLGELHAILRRQEDFYPFLKDNREKIEKILTFRIPYYVGPLARGNSRFAWMTRKSEETITPWNFEEVVDKGASAQSFIERMTNFDKNLPNEKVLPKHSLLYEYFTVYNELTKVKYVTEGMRKPAFLSGEQKKAIVDLLFKTNRKVTVKQLKEDYFKKIECFDSVEISGVEDRFNASLGTYHDLLKIIKDKDFLDNEENEDILEDIVLTLTLFEDREMIEERLKTYAHLFDDKVMKQLKRRRYTGWGRLSRKLINGIRDKQSGKTILDFLKSDGFANRNFMQLIHDDSLTFKEDIQKAQVSGQGDSLHEHIANLAGSPAIKKGILQTVKVVDELVKVMGRHKPENIVIEMARENQTTQKGQKNSRERMKRIEEGIKELGSQILKEHPVENTQLQNEKLYLYYLQNGRDMYVDQELDINRLSDYDVDHIVPQSFLKDDSIDNKVLTRSDKARGKSDNVPSEEVVKKMKNYWRQLLNAKLITQRKFDNLTKAERGGLSELDKAGFIKRQLVETRQITKHVAQILDSRMNTKYDENDKLIREVKVITLKSKLVSDFRKDFQFYKVREINNYHHAHDAYLNAVVGTALIKKYPKLESEFVYGDYKVYDVRKMIAKSEQEIGKATAKYFFYSNIMNFFKTEITLANGEIRKRPLIETNGETGEIVWDKGRDFATVRKVLSMPQVNIVKKTEVQTGGFSKESILPKRNSDKLIARKKDWDPKKYGGFDSPTVAYSVLVVAKVEKGKSKKLKSVKELLGITIMERSSFEKNPIDFLEAKGYKEVKKDLIIKLPKYSLFELENGRKRMLASAGELQKGNELALPSKYVNFLYLASHYEKLKGSPEDNEQKQLFVEQHKHYLDEIIEQISEFSKRVILADANLDKVLSAYNKHRDKPIREQAENIIHLFTLTNLGAPAAFKYFDTTIDRKRYTSTKEVLDATLIHQSITGLYETRIDLSQLGGDGGGGSPAPGSSGGVLNLEEEYRLHEKPVPSSIDPSWLQLFPTVWAERAGMGLANQVPPVVVELRSGASPVAVRQYPMSKEAREGIRPHIQRFLDLGVLVPCQSPWNTPLLPVKKPGTNDYRPVQDLREINKRVQDIHPTVPNPYNLLSSLPPSHTWYSVLDLKDAFFCLKLHPNSQPLFAFEWRDPEKGNTGQLTWTRLPQGFKNSPTLFNEALHRDLAPFRALNPQVVLLQYVDDLLVAAPTYRDCKEGTQKLLQELSKLGYRVSAKKAQLCQKEVTYLGYLLKEGKRWLTPARKATVMKIPPPTTPRQVREFLGTAGFCRLWIPGFASLAAPLYPLTKPSIPFIWTEEHQKAFDRIKEALLSAPALALPDLTKPFTLYVDERAGVARGVLTQTLGPWRRPVAYLSKKLDPVASGWPTCLKAVAAVALLLKDADKLTLGQNVTVIASHSLESIVRQPPDRWMTNARMTHYQSLLLNERVSFAPPAVLNPATLLPVESEATPVHRCSEILAEETGTRRDLKDQPLPGVPAWYTDGSSFIAEGKRRAGAAIVDGKRTVWASSLPEGTSAQKAELVALTQALRLAEGKDINIYTDSRYAFATAHIHGAIYKQRGWLTSAGKDIKNKEEILALLEAIHLPKRVAIIHCPGHQKGNDPVATGNRRADEAAKQAALSTRVLAETTKPAGKRTADGSEFEKRTADGSEFESPKKKAKVE

SEQ ID NO: 7142 - protein, 2094 aa, synthetic construct; identical to SEQ ID NO: 4525

SEQ ID NO: 7143 - protein, 2096 aa, synthetic construct
MPAAKRVKLDGGDKKYSIGLDIGTNSVGWAVITDEYKVPSKKFKVLGNTDRHSIKKNLIGALLFDSGETAEATRLKRTARRRYTRRKNRICYLQEIFSNEMAKVDDSFFHRLEESFLVEEDKKHERHPIFGNIVDEVAYHEKYPTIYHLRKKLVDSTDKADLRLIYLALAHMIKFRGHFLIEGDLNPDNSDVDKLFIQLVQTYNQLFEENPINASGVDAKAILSARLSKSRRLENLIAQLPGEKKNGLFGNLIALSLGLTPNFKSNFDLAEDAKLQLSKDTYDDDLDNLLAQIGDQYADLFLAAKNLSDAILLSDILRVNTEITKAPLSASMIKRYDEHHQDLTLLKALVRQQLPEKYKEIFFDQSKNGYAGYIDGGASQEEFYKFIKPILEKMDGTEELLVKLNREDLLRKQRTFDNGSIPHQIHLGELHAILRRQEDFYPFLKDNREKIEKILTFRIPYYVGPLARGNSRFAWMTRKSEETITPWNFEEVVDKGASAQSFIERMTNFDKNLPNEKVLPKHSLLYEYFTVYNELTKVKYVTEGMRKPAFLSGEQKKAIVDLLFKTNRKVTVKQLKEDYFKKIECFDSVEISGVEDRFNASLGTYHDLLKIIKDKDFLDNEENEDILEDIVLTLTLFEDREMIEERLKTYAHLFDDKVMKQLKRRRYTGWGRLSRKLINGIRDKQSGKTILDFLKSDGFANRNFMQLIHDDSLTFKEDIQKAQVSGQGDSLHEHIANLAGSPAIKKGILQTVKVVDELVKVMGRHKPENIVIEMARENQTTQKGQKNSRERMKRIEEGIKELGSQILKEHPVENTQLQNEKLYLYYLQNGRDMYVDQELDINRLSDYDVDHIVPQSFLKDDSIDNKVLTRSDKARGKSDNVPSEEVVKKMKNYWRQLLNAKLITQRKFDNLTKAERGGLSELDKAGFIKRQLVETRQITKHVAQILDSRMNTKYDENDKLIREVKVITLKSKLVSDFRKDFQFYKVREINNYHHAHDAYLNAVVGTALIKKYPKLESEFVYGDYKVYDVRKMIAKSEQEIGKATAKYFFYSNIMNFFKTEITLANGEIRKRPLIETNGETGEIVWDKGRDFATVRKVLSMPQVNIVKKTEVQTGGFSKESILPKRNSDKLIARKKDWDPKKYGGFDSPTVAYSVLVVAKVEKGKSKKLKSVKELLGITIMERSSFEKNPIDFLEAKGYKEVKKDLIIKLPKYSLFELENGRKRMLASAGELQKGNELALPSKYVNFLYLASHYEKLKGSPEDNEQKQLFVEQHKHYLDEIIEQISEFSKRVILADANLDKVLSAYNKHRDKPIREQAENIIHLFTLTNLGAPAAFKYFDTTIDRKRYTSTKEVLDATLIHQSITGLYETRIDLSQLGGDGGGSSGGSPAPGGTAPLEEEYRLFLEAPIQNVTLLEQWKREIPKVWAEINPPGLASTQAPIHVQLLSTALPVRVRQYPITLEAKRSLRETIRKFRAAGILRPVHSPWNTPLLPVRKSGTSEYRMVQDLREVNKRVETIHPTVPNPYTLLSLLPPDRIWYSVLDLKDAFFCIPLAPESQLIFAFEWADAEEGESGQLTWTRLPQGFKNSPTLFNEALNRDLQGFRLDHPSVSLLQYVDDLLIAADTQAACLSATRDLLMTLAELGYRVSGKKAQLCQEEVTYLGFKIHKGSRSLSNSRTQAILQIPVPKTKRQVREFLGKIGYCRLFIPGFAELAQPLYAATRPGNDPLVWGEKEEEAFQSLKLALTQPPALALPSLDKPFQLFVEETSGAAKGVLTQALGPWKRPVAYLSKRLDPVAAGWPRCLRAIAAAALLTREASKLTFGQDIEITSSHNLESLLRSPPDKWLTNARITQYQVLLLDPPRVRFKQTAALNPATLLPETDDTLPIHHCLDTLDSLTSTRPDLTDQPLAQAEATLFTDGSSYIRDGKRYAGAAVVTLDSVIWAEPLPIGTSAQKAELIALTKALEWSKDKSVNIYTDSRYAFATLHVHGMIYRERGWLTAGGKAIKNAPEILALLTAVWLPKRVAVMHCKGHQKDDAPTSTGNRRADEVAREVAIRPLSTQATISAGKRTADGSEFEKRTADGSEFESPKKKAKVE

SEQ ID NO: 7144 - protein, 2093 aa, synthetic construct
MPAAKRVKLDGGDKKYSIGLDIGTNSVGWAVITDEYKVPSKKFKVLGNTDRHSIKKNLIGALLFDSGETAEATRLKRTARRRYTRRKNRICYLQEIFSNEMAKVDDSFFHRLEESFLVEEDKKHERHPIFGNIVDEVAYHEKYPTIYHLRKKLVDSTDKADLRLIYLALAHMIKFRGHFLIEGDLNPDNSDVDKLFIQLVQTYNQLFEENPINASGVDAKAILSARLSKSRRLENLIAQLPGEKKNGLFGNLIALSLGLTPNFKSNFDLAEDAKLQLSKDTYDDDLDNLLAQIGDQYADLFLAAKNLSDAILLSDILRVNTEITKAPLSASMIKRYDEHHQDLTLLKALVRQQLPEKYKEIFFDQSKNGYAGYIDGGASQEEFYKFIKPILEKMDGTEELLVKLNREDLLRKQRTFDNGSIPHQIHLGELHAILRRQEDFYPFLKDNREKIEKILTFRIPYYVGPLARGNSRFAWMTRKSEETITPWNFEEVVDKGASAQSFIERMTNFDKNLPNEKVLPKHSLLYEYFTVYNELTKVKYVTEGMRKPAFLSGEQKKAIVDLLFKTNRKVTVKQLKEDYFKKIECFDSVEISGVEDRFNASLGTYHDLLKIIKDKDFLDNEENEDILEDIVLTLTLFEDREMIEERLKTYAHLFDDKVMKQLKRRRYTGWGRLSRKLINGIRDKQSGKTILDFLKSDGFANRNFMQLIHDDSLTFKEDIQKAQVSGQGDSLHEHIANLAGSPAIKKGILQTVKVVDELVKVMGRHKPENIVIEMARENQTTQKGQKNSRERMKRIEEGIKELGSQILKEHPVENTQLQNEKLYLYYLQNGRDMYVDQELDINRLSDYDVDHIVPQSFLKDDSIDNKVLTRSDKARGKSDNVPSEEVVKKMKNYWRQLLNAKLITQRKFDNLTKAERGGLSELDKAGFIKRQLVETRQITKHVAQILDSRMNTKYDENDKLIREVKVITLKSKLVSDFRKDFQFYKVREINNYHHAHDAYLNAVVGTALIKKYPKLESEFVYGDYKVYDVRKMIAKSEQEIGKATAKYFFYSNIMNFFKTEITLANGEIRKRPLIETNGETGEIVWDKGRDFATVRKVLSMPQVNIVKKTEVQTGGFSKESILPKRNSDKLIARKKDWDPKKYGGFDSPTVAYSVLVVAKVEKGKSKKLKSVKELLGITIMERSSFEKNPIDFLEAKGYKEVKKDLIIKLPKYSLFELENGRKRMLASAGELQKGNELALPSKYVNFLYLASHYEKLKGSPEDNEQKQLFVEQHKHYLDEIIEQISEFSKRVILADANLDKVLSAYNKHRDKPIREQAENIIHLFTLTNLGAPAAFKYFDTTIDRKRYTSTKEVLDATLIHQSITGLYETRIDLSQLGGDGGGSSGGSPAPGGTLQLEEEYRLFEPESTQKQEMDIWLKNFPQAWAETGGMGTAHCQAPVLIQLKATATPISIRQYPMPHEAYQGIKPHIRRMLDQGILKPCQSPWNTPLLPVKKPGTEDYRPVQDLREVNKRVEDIHPTVPNPYNLLSTLPPSHPWYTVLDLKDAFFCLRLHSESQLLFAFEWRDPEIGLSGQLTWTRLPQGFKNSPTLFNEALHSDLADFRVRYPALVLLQYVDDLLLAAATRTECLEGTKALLETLGNKGYRASAKKAQICLQEVTYLGYSLKDGQRWLTKARKEAILSIPVPKNSRQVREFLGKAGYCRLFIPGFAELAAPLYPLTRPGTLFQWGTEQQLAFEDIKKALLSSPALGLPDITKPFELFIDENSGFAKGVLVQKLGPWKRPVAYLSKKLDTVASGWPPCLRMVAAIAILVKDAGKLTLGQPLTILTSHPVEALVRQPPNKWLSNARMTHYQAMLLDAERVHFGPTVSLNPATLLPLPSGGNHHDCLQILAETHGTRPDLTDQPLPDADLTWYTDGSSFIRNGEREAGAAVTTESEVIWAAPLPPGTSAQRAELIALTQALKMAEGKKLTVYTDSRYAFATTHVHGEIYRRRGWLTSEGKEIKNKNEILALLEALFLPKRLSIIHCPGHQKGDSPQAKGNRLADDTAKKAATETHSSLTVLPAGKRTADGSEFEKRTADGSEFESPKKKAKVE

SEQ ID NO: 7145 - protein, 2174 aa, synthetic construct
MPAAKRVKLDGGDKKYSIGLDIGTNSVGWAVITDEYKVPSKKFKVLGNTDRHSIKKNLIGALLFDSGETAEATRLKRTARRRYTRRKNRICYLQEIFSNEMAKVDDSFFHRLEESFLVEEDKKHERHPIFGNIVDEVAYHEKYPTIYHLRKKLVDSTDKADLRLIYLALAHMIKFRGHFLIEGDLNPDNSDVDKLFIQLVQTYNQLFEENPINASGVDAKAILSARLSKSRRLENLIAQLPGEKKNGLFGNLIALSLGLTPNFKSNFDLAEDAKLQLSKDTYDDDLDNLLAQIGDQYADLFLAAKNLSDAILLSDILRVNTEITKAPLSASMIKRYDEHHQDLTLLKALVRQQLPEKYKEIFFDQSKNGYAGYIDGGASQEEFYKFIKPILEKMDGTEELLVKLNREDLLRKQRTFDNGSIPHQIHLGELHAILRRQEDFYPFLKDNREKIEKILTFRIPYYVGPLARGNSRFAWMTRKSEETITPWNFEEVVDKGASAQSFIERMTNFDKNLPNEKVLPKHSLLYEYFTVYNELTKVKYVTEGMRKPAFLSGEQKKAIVDLLFKTNRKVTVKQLKEDYFKKIECFDSVEISGVEDRFNASLGTYHDLLKIIKDKDFLDNEENEDILEDIVLTLTLFEDREMIEERLKTYAHLFDDKVMKQLKRRRYTGWGRLSRKLINGIRDKQSGKTILDFLKSDGFANRNFMQLIHDDSLTFKEDIQKAQVSGQGDSLHEHIANLAGSPAIKKGILQTVKVVDELVKVMGRHKPENIVIEMARENQTTQKGQKNSRERMKRIEEGIKELGSQILKEHPVENTQLQNEKLYLYYLQNGRDMYVDQELDINRLSDYDVDHIVPQSFLKDDSIDNKVLTRSDKARGKSDNVPSEEVVKKMKNYWRQLLNAKLITQRKFDNLTKAERGGLSELDKAGFIKRQLVETRQITKHVAQILDSRMNTKYDENDKLIREVKVITLKSKLVSDFRKDFQFYKVREINNYHHAHDAYLNAVVGTALIKKYPKLESEFVYGDYKVYDVRKMIAKSEQEIGKATAKYFFYSNIMNFFKTEITLANGEIRKRPLIETNGETGEIVWDKGRDFATVRKVLSMPQVNIVKKTEVQTGGFSKESILPKRNSDKLIARKKDWDPKKYGGFDSPTVAYSVLVVAKVEKGKSKKLKSVKELLGITIMERSSFEKNPIDFLEAKGYKEVKKDLIIKLPKYSLFELENGRKRMLASAGELQKGNELALPSKYVNFLYLASHYEKLKGSPEDNEQKQLFVEQHKHYLDEIIEQISEFSKRVILADANLDKVLSAYNKHRDKPIREQAENIIHLFTLTNLGAPAAFKYFDTTIDRKRYTSTKEVLDATLIHQSITGLYETRIDLSQLGGDGGGSSGGSPAPGGMNPLQLLQPLPAEIKGTKLLAHWNSGATITCIPESFLEDEQPIKKTLIKTIHGEKQQNVYYVTFKVKGRKVEAEVIASPYEYILLSPTDVPWLTQQPLQLTILVPLQEYQEKILSKTALPEDQKQQLKTLFVKYDNLWQHWENQVGHRKIRPHNIATGDYPPRPQKQYPINPKAKPSIQIVIDDLLKQGVLTPQNSTMNTPVYPVPKPDGRWRMVLDYREVNKTIPLTAAQNQHSAGILATIVRQKYKTTLDLANGFWAHPITPESYWLTAFTWQGKQYCWTRLPQGFLNSPALFNADVVDLLKEIPNVQVYVDDIYLSHDDPKEHVQQLEKVFQILLQAGYVVSLKKSEIGQKTVEFLGFNITKEGRGLTDTFKTKLLNITPPKDLKQLQSILGKLNFARNFIPNFAELVQPLYNLIAPAKGKYIEWSEENTKQLNMVIEALNTASNLEERLPEQRLVIKVNTSPSAGYVRYYNETGKKPIMYLNYVFSKAELKFSMLEKLLTTMHKALIKAMDLAMGQEILVYSPIVSMTKIQKTPLPERKALPIRWITWMTYLEDPRIQFHYDKTLPELKHIPDVYTSSQSPVKHPSQYEGVFYTDGSAIKSPDPTKSNNAGMGIVHATYKPEYQVLNQWSIPLGNHTAQMAEIAAVEFACKKALKIPGPVLVITDSFYVAESANKELPYWKSNGFVNNKKKPLKHISKWKSIAECLSMKPDITIQHEKGISLQIPVFILKGNALADKLATQGSYVVNAGKRTADGSEFEKRTADGSEFESPKKKAKVE

SEQ ID NO: 7146 - protein, 2092 aa, synthetic construct
MPAAKRVKLDGGDKKYSIGLDIGTNSVGWAVITDEYKVPSKKFKVLGNTDRHSIKKNLIGALLFDSGETAEATRLKRTARRRYTRRKNRICYLQEIFSNEMAKVDDSFFHRLEESFLVEEDKKHERHPIFGNIVDEVAYHEKYPTIYHLRKKLVDSTDKADLRLIYLALAHMIKFRGHFLIEGDLNPDNSDVDKLFIQLVQTYNQLFEENPINASGVDAKAILSARLSKSRRLENLIAQLPGEKKNGLFGNLIALSLGLTPNFKSNFDLAEDAKLQLSKDTYDDDLDNLLAQIGDQYADLFLAAKNLSDAILLSDILRVNTEITKAPLSASMIKRYDEHHQDLTLLKALVRQQLPEKYKEIFFDQSKNGYAGYIDGGASQEEFYKFIKPILEKMDGTEELLVKLNREDLLRKQRTFDNGSIPHQIHLGELHAILRRQEDFYPFLKDNREKIEKILTFRIPYYVGPLARGNSRFAWMTRKSEETITPWNFEEVVDKGASAQSFIERMTNFDKNLPNEKVLPKHSLLYEYFTVYNELTKVKYVTEGMRKPAFLSGEQKKAIVDLLFKTNRKVTVKQLKEDYFKKIECFDSVEISGVEDRFNASLGTYHDLLKIIKDKDFLDNEENEDILEDIVLTLTLFEDREMIEERLKTYAHLFDDKVMKQLKRRRYTGWGRLSRKLINGIRDKQSGKTILDFLKSDGFANRNFMQLIHDDSLTFKEDIQKAQVSGQGDSLHEHIANLAGSPAIKKGILQTVKVVDELVKVMGRHKPENIVIEMARENQTTQKGQKNSRERMKRIEEGIKELGSQILKEHPVENTQLQNEKLYLYYLQNGRDMYVDQELDINRLSDYDVDHIVPQSFLKDDSIDNKVLTRSDKARGKSDNVPSEEVVKKMKNYWRQLLNAKLITQRKFDNLTKAERGGLSELDKAGFIKRQLVETRQITKHVAQILDSRMNTKYDENDKLIREVKVITLKSKLVSDFRKDFQFYKVREINNYHHAHDAYLNAVVGTALIKKYPKLESEFVYGDYKVYDVRKMIAKSEQEIGKATAKYFFYSNIMNFFKTEITLANGEIRKRPLIETNGETGEIVWDKGRDFATVRKVLSMPQVNIVKKTEVQTGGFSKESILPKRNSDKLIARKKDWDPKKYGGFDSPTVAYSVLVVAKVEKGKSKKLKSVKELLGITIMERSSFEKNPIDFLEAKGYKEVKKDLIIKLPKYSLFELENGRKRMLASAGELQKGNELALPSKYVNFLYLASHYEKLKGSPEDNEQKQLFVEQHKHYLDEIIEQISEFSKRVILADANLDKVLSAYNKHRDKPIREQAENIIHLFTLTNLGAPAAFKYFDTTIDRKRYTSTKEVLDATLIHQSITGLYETRIDLSQLGGDGGGSSGGSPAPGGVLNLEEEYRLHEKPVPSSIDPSWLQLFPTVWAERAGMGLANQVPPVVVELRSGASPVAVRQYPMSKEAREGIRPHIQKFLDLGVLVPCRSPWNTPLLPVKKPGTNDYRPVQDLREINKRVQDIHPTVPNPYNLLSSLPPSYTWYSVLDLKDAFFCLRLHPNSQPLFAFEWKDPEKGNTGQLTWTRLPQGFKNSPTLFNEALHRDLAPFRALNPQVVLLQYVDDLLVAAPTYEDCKKGTQKLLQELSKLGYRVSAKKAQLCQREVTYLGYLLKEGKRWLTPARKATVMKIPVPTTPRQVREFLGKAGFCRLFIPGFASLAAPLYPLTKPSIPFIWTEEHQQAFDHIKKALLSAPALALPDLTKPFTLYIDERAGVARGVLTQTLGPWRRPVAYLSKKLDPVASGWPTCLKAVAAVALLLKDADKLTLGQNVTVIASHSLESIVRQPPDRWMTNARMTHYQSLLLNERVSFAPPAVLNPATLLPVESEATPVHRCSEILAEETGTRRDLEDQPLPGVPTWYTDGSSFITEGKRRAGAPIVDGKRTVWASSLPEGTSAQKAELVALTQALRLAEGKNINIYTDSRYAFATAHIHGAIYKQRGWLTSAGKDIKNKEEILALLEAIHLPRRVAIIHCPGHQRGSNPVATGNRRADEAAKQAALSTRVLAGTTKPAGKRTADGSEFEKRTADGSEFESPKKKAKVE

SEQ ID NO: 7147 - protein, 2094 aa, synthetic construct
MPAAKRVKLDGGDKKYSIGLDIGTNSVGWAVITDEYKVPSKKFKVLGNTDRHSIKKNLIGALLFDSGETAEATRLKRTARRRYTRRKNRICYLQEIFSNEMAKVDDSFFHRLEESFLVEEDKKHERHPIFGNIVDEVAYHEKYPTIYHLRKKLVDSTDKADLRLIYLALAHMIKFRGHFLIEGDLNPDNSDVDKLFIQLVQTYNQLFEENPINASGVDAKAILSARLSKSRRLENLIAQLPGEKKNGLFGNLIALSLGLTPNFKSNFDLAEDAKLQLSKDTYDDDLDNLLAQIGDQYADLFLAAKNLSDAILLSDILRVNTEITKAPLSASMIKRYDEHHQDLTLLKALVRQQLPEKYKEIFFDQSKNGYAGYIDGGASQEEFYKFIKPILEKMDGTEELLVKLNREDLLRKQRTFDNGSIPHQIHLGELHAILRRQEDFYPFLKDNREKIEKILTFRIPYYVGPLARGNSRFAWMTRKSEETITPWNFEEVVDKGASAQSFIERMTNFDKNLPNEKVLPKHSLLYEYFTVYNELTKVKYVTEGMRKPAFLSGEQKKAIVDLLFKTNRKVTVKQLKEDYFKKIECFDSVEISGVEDRFNASLGTYHDLLKIIKDKDFLDNEENEDILEDIVLTLTLFEDREMIEERLKTYAHLFDDKVMKQLKRRRYTGWGRLSRKLINGIRDKQSGKTILDFLKSDGFANRNFMQLIHDDSLTFKEDIQKAQVSGQGDSLHEHIANLAGSPAIKKGILQTVKVVDELVKVMGRHKPENIVIEMARENQTTQKGQKNSRERMKRIEEGIKELGSQILKEHPVENTQLQNEKLYLYYLQNGRDMYVDQELDINRLSDYDVDHIVPQSFLKDDSIDNKVLTRSDKARGKSDNVPSEEVVKKMKNYWRQLLNAKLITQRKFDNLTKAERGGLSELDKAGFIKRQLVETRQITKHVAQILDSRMNTKYDENDKLIREVKVITLKSKLVSDFRKDFQFYKVREINNYHHAHDAYLNAVVGTALIKKYPKLESEFVYGDYKVYDVRKMIAKSEQEIGKATAKYFFYSNIMNFFKTEITLANGEIRKRPLIETNGETGEIVWDKGRDFATVRKVLSMPQVNIVKKTEVQTGGFSKESILPKRNSDKLIARKKDWDPKKYGGFDSPTVAYSVLVVAKVEKGKSKKLKSVKELLGITIMERSSFEKNPIDFLEAKGYKEVKKDLIIKLPKYSLFELENGRKRMLASAGELQKGNELALPSKYVNFLYLASHYEKLKGSPEDNEQKQLFVEQHKHYLDEIIEQISEFSKRVILADANLDKVLSAYNKHRDKPIREQAENIIHLFTLTNLGAPAAFKYFDTTIDRKRYTSTKEVLDATLIHQSITGLYETRIDLSQLGGDGGGSSGGSPAPGGTLNIEDEYRLHETSKEPDVSLGSTWLSDFPQAWAETGGMGLAVRQAPLIIPLKATSTPVSIKQYPMSQEARLGIKPHIQRLLDQGILVPCQSPWNTPLLPVKKPGTNDYRPVQDLREVNKRVEDIHPTVPNPYNLLSGLPPSHQWYTVLDLKDAFFCLRLHPTSQPLFAFEWRDPEMGISGQLTWTRLPQGFKNSPTLFNEALHRDLAGFRIQHPDLILLQYVDDLLLAATSELDCQQGTRALLQTLGDLGYRASAKKAQICQKQVKYLGYLLKEGQRWLTEARKETVMGQPIPKTPRQLREFLGTAGFCRLWIPGFAEMAAPLYPLTKPGTLFNWGPDQQKAFQEIKQALLTAPALGLPDLTKPFELFVDEKQGYAKGVLTQKLGPWRRPVAYLSKKLDPVAAGWPPCLRMVAAIAVLTKDAGKLTMGQPLVILAPHAVEALVKQPPDRWLSNARMTHYQALLLDTDRVQFGPVVALNPATLLPLPEEGLQHDCLDILAEAHGTRSDLMDQPLPDADHTWYTDGSSFLQEGQRKAGAAVTTETEVIWARALPAGTSAQRAELIALTQALKMAEGKKLNVYTDSRYAFATAHIHGEIYRRRGWLTSEGKEIKNKDEILALLKALFLPKRLSIIHCPGHQKGNSAEARGNRMADQAAREVATRETPETSTLLAGKRTADGSEFEKRTADGSEFESPKKKAKVE

SEQ ID NO: 7148 - protein, 2092 aa, synthetic construct
MPAAKRVKLDGGDKKYSIGLDIGTNSVGWAVITDEYKVPSKKFKVLGNTDRHSIKKNLIGALLFDSGETAEATRLKRTARRRYTRRKNRICYLQEIFSNEMAKVDDSFFHRLEESFLVEEDKKHERHPIFGNIVDEVAYHEKYPTIYHLRKKLVDSTDKADLRLIYLALAHMIKFRGHFLIEGDLNPDNSDVDKLFIQLVQTYNQLFEENPINASGVDAKAILSARLSKSRRLENLIAQLPGEKKNGLFGNLIALSLGLTPNFKSNFDLAEDAKLQLSKDTYDDDLDNLLAQIGDQYADLFLAAKNLSDAILLSDILRVNTEITKAPLSASMIKRYDEHHQDLTLLKALVRQQLPEKYKEIFFDQSKNGYAGYIDGGASQEEFYKFIKPILEKMDGTEELLVKLNREDLLRKQRTFDNGSIPHQIHLGELHAILRRQEDFYPFLKDNREKIEKILTFRIPYYVGPLARGNSRFAWMTRKSEETITPWNFEEVVDKGASAQSFIERMTNFDKNLPNEKVLPKHSLLYEYFTVYNELTKVKYVTEGMRKPAFLSGEQKKAIVDLLFKTNRKVTVKQLKEDYFKKIECFDSVEISGVEDRFNASLGTYHDLLKIIKDKDFLDNEENEDILEDIVLTLTLFEDREMIEERLKTYAHLFDDKVMKQLKRRRYTGWGRLSRKLINGIRDKQSGKTILDFLKSDGFANRNFMQLIHDDSLTFKEDIQKAQVSGQGDSLHEHIANLAGSPAIKKGILQTVKVVDELVKVMGRHKPENIVIEMARENQTTQKGQKNSRERMKRIEEGIKELGSQILKEHPVENTQLQNEKLYLYYLQNGRDMYVDQELDINRLSDYDVDHIVPQSFLKDDSIDNKVLTRSDKARGKSDNVPSEEVVKKMKNYWRQLLNAKLITQRKFDNLTKAERGGLSELDKAGFIKRQLVETRQITKHVAQILDSRMNTKYDENDKLIREVKVITLKSKLVSDFRKDFQFYKVREINNYHHAHDAYLNAVVGTALIKKYPKLESEFVYGDYKVYDVRKMIAKSEQEIGKATAKYFFYSNIMNFFKTEITLANGEIRKRPLIETNGETGEIVWDKGRDFATVRKVLSMPQVNIVKKTEVQTGGFSKESILPKRNSDKLIARKKDWDPKKYGGFDSPTVAYSVLVVAKVEKGKSKKLKSVKELLGITIMERSSFEKNPIDFLEAKGYKEVKKDLIIKLPKYSLFELENGRKRMLASAGELQKGNELALPSKYVNFLYLASHYEKLKGSPEDNEQKQLFVEQHKHYLDEIIEQISEFSKRVILADANLDKVLSAYNKHRDKPIREQAENIIHLFTLTNLGAPAAFKYFDTTIDRKRYTSTKEVLDATLIHQSITGLYETRIDLSQLGGDGGGSSGGSPAPGGVLNLEEEYRLHEKPVPSSIDPSWLQLFPTVWAERAGMGLANQVPPVVVELRSGASPVAVRQYPMSKEAREGIRPHIQRFLDLGVLVPCQSPWNTPLLPVKKPGTNDYRPVQDLREINKRVQDIHPTVPNPYNLLSSLPPSHTWYSVLDLKDAFFCLKLHPNSQPLFAFEWRDPEKGNTGQLTWTRLPQGFKNSPTLFNEALHRDLAPFRALNPQVVLLQYVDDLLVAAPTYRDCKEGTQKLLQELSKLGYRVSAKKAQLCQKEVTYLGYLLKEGKRWLTPARKATVMKIPPPTTPRQVREFLGTAGFCRLWIPGFASLAAPLYPLTKPSIPFIWTEEHQKAFDRIKEALLSAPALALPDLTKPFTLYVDERAGVARGVLTQTLGPWRRPVAYLSKKLDPVASGWPTCLKAVAAVALLLKDADKLTLGQNVTVIASHSLESIVRQPPDRWMTNARMTHYQSLLLNERVSFAPPAVLNPATLLPVESEATPVHRCSEILAEETGTRRDLKDQPLPGVPAWYTDGSSFIAEGKRRAGAAIVDGKRTVWASSLPEGTSAQKAELVALTQALRLAEGKDINIYTDSRYAFATAHIHGAIYKQRGWLTSAGKDIKNKEEILALLEAIHLPKRVAIIHCPGHQKGNDPVATGNRRADEAAKQAALSTRVLAETTKPAGKRTADGSEFEKRTADGSEFESPKKKAKVE

SEQ ID NO: 7149 - protein, 2092 aa, synthetic construct
MPAAKRVKLDGGDKKYSIGLDIGTNSVGWAVITDEYKVPSKKFKVLGNTDRHSIKKNLIGALLFDSGETAEATRLKRTARRRYTRRKNRICYLQEIFSNEMAKVDDSFFHRLEESFLVEEDKKHERHPIFGNIVDEVAYHEKYPTIYHLRKKLVDSTDKADLRLIYLALAHMIKFRGHFLIEGDLNPDNSDVDKLFIQLVQTYNQLFEENPINASGVDAKAILSARLSKSRRLENLIAQLPGEKKNGLFGNLIALSLGLTPNFKSNFDLAEDAKLQLSKDTYDDDLDNLLAQIGDQYADLFLAAKNLSDAILLSDILRVNTEITKAPLSASMIKRYDEHHQDLTLLKALVRQQLPEKYKEIFFDQSKNGYAGYIDGGASQEEFYKFIKPILEKMDGTEELLVKLNREDLLRKQRTFDNGSIPHQIHLGELHAILRRQEDFYPFLKDNREKIEKILTFRIPYYVGPLARGNSRFAWMTRKSEETITPWNFEEVVDKGASAQSFIERMTNFDKNLPNEKVLPKHSLLYEYFTVYNELTKVKYVTEGMRKPAFLSGEQKKAIVDLLFKTNRKVTVKQLKEDYFKKIECFDSVEISGVEDRFNASLGTYHDLLKIIKDKDFLDNEENEDILEDIVLTLTLFEDREMIEERLKTYAHLFDDKVMKQLKRRRYTGWGRLSRKLINGIRDKQSGKTILDFLKSDGFANRNFMQLIHDDSLTFKEDIQKAQVSGQGDSLHEHIANLAGSPAIKKGILQTVKVVDELVKVMGRHKPENIVIEMARENQTTQKGQKNSRERMKRIEEGIKELGSQILKEHPVENTQLQNEKLYLYYLQNGRDMYVDQELDINRLSDYDVDHIVPQSFLKDDSIDNKVLTRSDKARGKSDNVPSEEVVKKMKNYWRQLLNAKLITQRKFDNLTKAERGGLSELDKAGFIKRQLVETRQITKHVAQILDSRMNTKYDENDKLIREVKVITLKSKLVSDFRKDFQFYKVREINNYHHAHDAYLNAVVGTALIKKYPKLESEFVYGDYKVYDVRKMIAKSEQEIGKATAKYFFYSNIMNFFKTEITLANGEIRKRPLIETNGETGEIVWDKGRDFATVRKVLSMPQVNIVKKTEVQTGGFSKESILPKRNSDKLIARKKDWDPKKYGGFDSPTVAYSVLVVAKVEKGKSKKLKSVKELLGITIMERSSFEKNPIDFLEAKGYKEVKKDLIIKLPKYSLFELENGRKRMLASAGELQKGNELALPSKYVNFLYLASHYEKLKGSPEDNEQKQLFVEQHKHYLDEIIEQISEFSKRVILADANLDKVLSAYNKHRDKPIREQAENIIHLFTLTNLGAPAAFKYFDTTIDRKRYTSTKEVLDATLIHQSITGLYETRIDLSQLGGDGGGSSGGSPAPGGVLNLEEEYRLHEKPVPSSIDPSWLQLFPTVWAERAGMGLANQVPPVVVELRSGASPVAVRQYPMSKEAREGIRPHIQRFLDLGVLVPCQSPWNTPLLPVKKPGTNDYRPVQDLREINKRVQDIHPTVPNPYNLLSSLPPSHTWYSVLDLKDAFFCLKLHPNSQPLFAFEWRDPEKGNTGQLTWTRLPQGFKNSPTLFNEALHRDLAPFRALNPQVVLLQYVDDLLVAAPTYRDCKEGTQKLLQELSKLGYRVSAKKAQLCQKEVTYLGYLLKEGKRWLTPARKATVMKIPPPTTPRQVREFLGKAGFCRLFIPGFASLAAPLYPLTKPSIPFIWTEEHQKAFDRIKEALLSAPALALPDLTKPFTLYVDERAGVARGVLTQTLGPWRRPVAYLSKKLDPVASGWPTCLKAVAAVALLLKDADKLTLGQNVTVIASHSLESIVRQPPDRWMTNARMTHYQSLLLNERVSFAPPAVLNPATLLPVESEATPVHRCSEILAEETGTRRDLKDQPLPGVPAWYTDGSSFIAEGKRRAGAAIVDGKRTVWASSLPEGTSAQKAELVALTQALRLAEGKDINIYTDSRYAFATAHIHGAIYKQRGWLTSAGKDIKNKEEILALLEAIHLPKRVAIIHCPGHQKGNDPVATGNRRADEAAKQAALSTRVLAETTKPAGKRTADGSEFEKRTADGSEFESPKKKAKVE

SEQ ID NO: 7150 - protein, 2094 aa, synthetic construct
MPAAKRVKLDGGDKKYSIGLDIGTNSVGWAVITDEYKVPSKKFKVLGNTDRHSIKKNLIGALLFDSGETAEATRLKRTARRRYTRRKNRICYLQEIFSNEMAKVDDSFFHRLEESFLVEEDKKHERHPIFGNIVDEVAYHEKYPTIYHLRKKLVDSTDKADLRLIYLALAHMIKFRGHFLIEGDLNPDNSDVDKLFIQLVQTYNQLFEENPINASGVDAKAILSARLSKSRRLENLIAQLPGEKKNGLFGNLIALSLGLTPNFKSNFDLAEDAKLQLSKDTYDDDLDNLLAQIGDQYADLFLAAKNLSDAILLSDILRVNTEITKAPLSASMIKRYDEHHQDLTLLKALVRQQLPEKYKEIFFDQSKNGYAGYIDGGASQEEFYKFIKPILEKMDGTEELLVKLNREDLLRKQRTFDNGSIPHQIHLGELHAILRRQEDFYPFLKDNREKIEKILTFRIPYYVGPLARGNSRFAWMTRKSEETITPWNFEEVVDKGASAQSFIERMTNFDKNLPNEKVLPKHSLLYEYFTVYNELTKVKYVTEGMRKPAFLSGEQKKAIVDLLFKTNRKVTVKQLKEDYFKKIECFDSVEISGVEDRFNASLGTYHDLLKIIKDKDFLDNEENEDILEDIVLTLTLFEDREMIEERLKTYAHLFDDKVMKQLKRRRYTGWGRLSRKLINGIRDKQSGKTILDFLKSDGFANRNFMQLIHDDSLTFKEDIQKAQVSGQGDSLHEHIANLAGSPAIKKGILQTVKVVDELVKVMGRHKPENIVIEMARENQTTQKGQKNSRERMKRIEEGIKELGSQILKEHPVENTQLQNEKLYLYYLQNGRDMYVDQELDINRLSDYDVDHIVPQSFLKDDSIDNKVLTRSDKARGKSDNVPSEEVVKKMKNYWRQLLNAKLITQRKFDNLTKAERGGLSELDKAGFIKRQLVETRQITKHVAQILDSRMNTKYDENDKLIREVKVITLKSKLVSDFRKDFQFYKVREINNYHHAHDAYLNAVVGTALIKKYPKLESEFVYGDYKVYDVRKMIAKSEQEIGKATAKYFFYSNIMNFFKTEITLANGEIRKRPLIETNGETGEIVWDKGRDFATVRKVLSMPQVNIVKKTEVQTGGFSKESILPKRNSDKLIARKKDWDPKKYGGFDSPTVAYSVLVVAKVEKGKSKKLKSVKELLGITIMERSSFEKNPIDFLEAKGYKEVKKDLIIKLPKYSLFELENGRKRMLASAGELQKGNELALPSKYVNFLYLASHYEKLKGSPEDNEQKQLFVEQHKHYLDEIIEQISEFSKRVILADANLDKVLSAYNKHRDKPIREQAENIIHLFTLTNLGAPAAFKYFDTTIDRKRYTSTKEVLDATLIHQSITGLYETRIDLSQLGGDGGGSSGGSPAPGGTLNIEDEYRLHETSKEPDVPLGSTWLSDFPQAWAETGGMGLAVRQAPLIIPLKATSTPVSIKQYPMSQEARLGIKPHIQRLLDQGILVPCQSPWNTPLLPVKKPGTNDYRPVQDLREVNKRVEDIHPTVPNPYNLLSGLPPSHQWYTVLDLKDAFFCLRLHPTSQPLFAFEWRDPEMGISGQLTWTRLPQGFKNSPTLFNEALHRDLADFRIQHPDLILLQYVDDLLLAATSEQDCQRGTRALLQTLGNLGYRASAKKAQICQKQVKYLGYLLKEGQRWLTEARKETVMGQPTPKTPRQLREFLGTAGFCRLWIPGFAEMAAPLYPLTKPGTLFNWGPDQQKAYQEIKQALLTAPALGLPDLTKPFELFVDEKQGYAKGVLTQKLGPWRRPVAYLSKKLDPVAAGWPPCLRMVAAIAVLTKDAGKLTMGQPLVILAPHAVEALVKQPPDRWLSNARMTHYQAMLLDTDRVQFGPVVALNPATLLPLPEKEAPHDCLEILAETHGTRPDLTDQPIPDADYTWYTDGSSFLQEGQRRAGAAVTTETEVIWARALPAGTSAQRAELIALTQALKMAEGKKLNVYTDSRYAFATAHVHGEIYRRRGWLTSEGREIKNKNEILALLKALFLPKRLSIIHCPGHQKGNSAEARGNRMADQAAREAAMKAVLETSTLLAGKRTADGSEFEKRTADGSEFESPKKKAKVE

SEQ ID NO: 7151 - protein, 2096 aa, synthetic construct
MPAAKRVKLDGGDKKYSIGLDIGTNSVGWAVITDEYKVPSKKFKVLGNTDRHSIKKNLIGALLFDSGETAEATRLKRTARRRYTRRKNRICYLQEIFSNEMAKVDDSFFHRLEESFLVEEDKKHERHPIFGNIVDEVAYHEKYPTIYHLRKKLVDSTDKADLRLIYLALAHMIKFRGHFLIEGDLNPDNSDVDKLFIQLVQTYNQLFEENPINASGVDAKAILSARLSKSRRLENLIAQLPGEKKNGLFGNLIALSLGLTPNFKSNFDLAEDAKLQLSKDTYDDDLDNLLAQIGDQYADLFLAAKNLSDAILLSDILRVNTEITKAPLSASMIKRYDEHHQDLTLLKALVRQQLPEKYKEIFFDQSKNGYAGYIDGGASQEEFYKFIKPILEKMDGTEELLVKLNREDLLRKQRTFDNGSIPHQIHLGELHAILRRQEDFYPFLKDNREKIEKILTFRIPYYVGPLARGNSRFAWMTRKSEETITPWNFEEVVDKGASAQSFIERMTNFDKNLPNEKVLPKHSLLYEYFTVYNELTKVKYVTEGMRKPAFLSGEQKKAIVDLLFKTNRKVTVKQLKEDYFKKIECFDSVEISGVEDRFNASLGTYHDLLKIIKDKDFLDNEENEDILEDIVLTLTLFEDREMIEERLKTYAHLFDDKVMKQLKRRRYTGWGRLSRKLINGIRDKQSGKTILDFLKSDGFANRNFMQLIHDDSLTFKEDIQKAQVSGQGDSLHEHIANLAGSPAIKKGILQTVKVVDELVKVMGRHKPENIVIEMARENQTTQKGQKNSRERMKRIEEGIKELGSQILKEHPVENTQLQNEKLYLYYLQNGRDMYVDQELDINRLSDYDVDHIVPQSFLKDDSIDNKVLTRSDKARGKSDNVPSEEVVKKMKNYWRQLLNAKLITQRKFDNLTKAERGGLSELDKAGFIKRQLVETRQITKHVAQILDSRMNTKYDENDKLIREVKVITLKSKLVSDFRKDFQFYKVREINNYHHAHDAYLNAVVGTALIKKYPKLESEFVYGDYKVYDVRKMIAKSEQEIGKATAKYFFYSNIMNFFKTEITLANGEIRKRPLIETNGETGEIVWDKGRDFATVRKVLSMPQVNIVKKTEVQTGGFSKESILPKRNSDKLIARKKDWDPKKYGGFDSPTVAYSVLVVAKVEKGKSKKLKSVKELLGITIMERSSFEKNPIDFLEAKGYKEVKKDLIIKLPKYSLFELENGRKRMLASAGELQKGNELALPSKYVNFLYLASHYEKLKGSPEDNEQKQLFVEQHKHYLDEIIEQISEFSKRVILADANLDKVLSAYNKHRDKPIREQAENIIHLFTLTNLGAPAAFKYFDTTIDRKRYTSTKEVLDATLIHQSITGLYETRIDLSQLGGDGGGSSPAPGGSGGTAPLEEEYRLFLEAPIQNVTLLEQWKREIPKVWAEINPPGLASTQAPIHVQLLSTALPVRVRQYPITLEAKRSLRETIRKFRAAGILRPVHSPWNTPLLPVRKSGTSEYRMVQDLREVNKRVETIHPTVPNPYTLLSLLPPDRIWYSVLDLKDAFFCIPLAPESQLIFAFEWADAEEGESGQLTWTRLPQGFKNSPTLFNEALNRDLQGFRLDHPSVSLLQYVDDLLIAADTQAACLSATRDLLMTLAELGYRVSGKKAQLCQEEVTYLGFKIHKGSRSLSNSRTQAILQIPVPKTKRQVREFLGTIGYCRLWIPGFAELAQPLYAATRPGNDPLVWGEKEEEAFQSLKLALTQPPALALPSLDKPFQLFVEETSGAAKGVLTQALGPWKRPVAYLSKRLDPVAAGWPRCLRAIAAAALLTREASKLTFGQDIEITSSHNLESLLRSPPDKWLTNARITQYQVLLLDPPRVRFKQTAALNPATLLPETDDTLPIHHCLDTLDSLTSTRPDLTDQPLAQAEATLFTDGSSYIRDGKRYAGAAVVTLDSVIWAEPLPIGTSAQKAELIALTKALEWSKDKSVNIYTDSRYAFATLHVHGMIYRERGWLTAGGKAIKNAPEILALLTAVWLPKRVAVMHCKGHQKDDAPTSTGNRRADEVAREVAIRPLSTQATISAGKRTADGSEFEKRTADGSEFESPKKKAKVE

SEQ ID NO: 7152 - protein, 2096 aa, synthetic construct
MPAAKRVKLDGGDKKYSIGLDIGTNSVGWAVITDEYKVPSKKFKVLGNTDRHSIKKNLIGALLFDSGETAEATRLKRTARRRYTRRKNRICYLQEIFSNEMAKVDDSFFHRLEESFLVEEDKKHERHPIFGNIVDEVAYHEKYPTIYHLRKKLVDSTDKADLRLIYLALAHMIKFRGHFLIEGDLNPDNSDVDKLFIQLVQTYNQLFEENPINASGVDAKAILSARLSKSRRLENLIAQLPGEKKNGLFGNLIALSLGLTPNFKSNFDLAEDAKLQLSKDTYDDDLDNLLAQIGDQYADLFLAAKNLSDAILLSDILRVNTEITKAPLSASMIKRYDEHHQDLTLLKALVRQQLPEKYKEIFFDQSKNGYAGYIDGGASQEEFYKFIKPILEKMDGTEELLVKLNREDLLRKQRTFDNGSIPHQIHLGELHAILRRQEDFYPFLKDNREKIEKILTFRIPYYVGPLARGNSRFAWMTRKSEETITPWNFEEVVDKGASAQSFIERMTNFDKNLPNEKVLPKHSLLYEYFTVYNELTKVKYVTEGMRKPAFLSGEQKKAIVDLLFKTNRKVTVKQLKEDYFKKIECFDSVEISGVEDRFNASLGTYHDLLKIIKDKDFLDNEENEDILEDIVLTLTLFEDREMIEERLKTYAHLFDDKVMKQLKRRRYTGWGRLSRKLINGIRDKQSGKTILDFLKSDGFANRNFMQLIHDDSLTFKEDIQKAQVSGQGDSLHEHIANLAGSPAIKKGILQTVKVVDELVKVMGRHKPENIVIEMARENQTTQKGQKNSRERMKRIEEGIKELGSQILKEHPVENTQLQNEKLYLYYLQNGRDMYVDQELDINRLSDYDVDHIVPQSFLKDDSIDNKVLTRSDKARGKSDNVPSEEVVKKMKNYWRQLLNAKLITQRKFDNLTKAERGGLSELDKAGFIKRQLVETRQITKHVAQILDSRMNTKYDENDKLIREVKVITLKSKLVSDFRKDFQFYKVREINNYHHAHDAYLNAVVGTALIKKYPKLESEFVYGDYKVYDVRKMIAKSEQEIGKATAKYFFYSNIMNFFKTEITLANGEIRKRPLIETNGETGEIVWDKGRDFATVRKVLSMPQVNIVKKTEVQTGGFSKESILPKRNSDKLIARKKDWDPKKYGGFDSPTVAYSVLVVAKVEKGKSKKLKSVKELLGITIMERSSFEKNPIDFLEAKGYKEVKKDLIIKLPKYSLFELENGRKRMLASAGELQKGNELALPSKYVNFLYLASHYEKLKGSPEDNEQKQLFVEQHKHYLDEIIEQISEFSKRVILADANLDKVLSAYNKHRDKPIREQAENIIHLFTLTNLGAPAAFKYFDTTIDRKRYTSTKEVLDATLIHQSITGLYETRIDLSQLGGDGGGSSPAPGGSGGTAPLEEEYRLFLEAPIQNVTLLEQWKREIPKVWAEINPPGLASTQAPIHVQLLSTALPVRVRQYPITLEAKRSLRETIRKFRAAGILRPVHSPWNTPLLPVRKSGTSEYRMVQDLREVNKRVETIHPTVPNPYTLLSLLPPDRIWYSVLDLKDAFFCIPLAPESQLIFAFEWADAEEGESGQLTWTRLPQGFKNSPTLFNEALNRDLQGFRLDHPSVSLLQYVDDLLIAADTQAACLSATRDLLMTLAELGYRVSGKKAQLCQEEVTYLGFKIHKGSRSLSNSRTQAILQIPVPKTKRQVREFLGKIGYCRLFIPGFAELAQPLYAATRPGNDPLVWGEKEEEAFQSLKLALTQPPALALPSLDKPFQLFVEETSGAAKGVLTQALGPWKRPVAYLSKRLDPVAAGWPRCLRAIAAAALLTREASKLTFGQDIEITSSHNLESLLRSPPDKWLTNARITQYQVLLLDPPRVRFKQTAALNPATLLPETDDTLPIHHCLDTLDSLTSTRPDLTDQPLAQAEATLFTDGSSYIRDGKRYAGAAVVTLDSVIWAEPLPIGTSAQKAELIALTKALEWSKDKSVNIYTDSRYAFATLHVHGMIYRERGWLTAGGKAIKNAPEILALLTAVWLPKRVAVMHCKGHQKDDAPTSTGNRRADEVAREVAIRPLSTQATISAGKRTADGSEFEKRTADGSEFESPKKKAKVE

SEQ ID NO: 7153 - protein, 2093 aa, synthetic construct
MPAAKRVKLDGGDKKYSIGLDIGTNSVGWAVITDEYKVPSKKFKVLGNTDRHSIKKNLIGALLFDSGETAEATRLKRTARRRYTRRKNRICYLQEIFSNEMAKVDDSFFHRLEESFLVEEDKKHERHPIFGNIVDEVAYHEKYPTIYHLRKKLVDSTDKADLRLIYLALAHMIKFRGHFLIEGDLNPDNSDVDKLFIQLVQTYNQLFEENPINASGVDAKAILSARLSKSRRLENLIAQLPGEKKNGLFGNLIALSLGLTPNFKSNFDLAEDAKLQLSKDTYDDDLDNLLAQIGDQYADLFLAAKNLSDAILLSDILRVNTEITKAPLSASMIKRYDEHHQDLTLLKALVRQQLPEKYKEIFFDQSKNGYAGYIDGGASQEEFYKFIKPILEKMDGTEELLVKLNREDLLRKQRTFDNGSIPHQIHLGELHAILRRQEDFYPFLKDNREKIEKILTFRIPYYVGPLARGNSRFAWMTRKSEETITPWNFEEVVDKGASAQSFIERMTNFDKNLPNEKVLPKHSLLYEYFTVYNELTKVKYVTEGMRKPAFLSGEQKKAIVDLLFKTNRKVTVKQLKEDYFKKIECFDSVEISGVEDRFNASLGTYHDLLKIIKDKDFLDNEENEDILEDIVLTLTLFEDREMIEERLKTYAHLFDDKVMKQLKRRRYTGWGRLSRKLINGIRDKQSGKTILDFLKSDGFANRNFMQLIHDDSLTFKEDIQKAQVSGQGDSLHEHIANLAGSPAIKKGILQTVKVVDELVKVMGRHKPENIVIEMARENQTTQKGQKNSRERMKRIEEGIKELGSQILKEHPVENTQLQNEKLYLYYLQNGRDMYVDQELDINRLSDYDVDHIVPQSFLKDDSIDNKVLTRSDKARGKSDNVPSEEVVKKMKNYWRQLLNAKLITQRKFDNLTKAERGGLSELDKAGFIKRQLVETRQITKHVAQILDSRMNTKYDENDKLIREVKVITLKSKLVSDFRKDFQFYKVREINNYHHAHDAYLNAVVGTALIKKYPKLESEFVYGDYKVYDVRKMIAKSEQEIGKATAKYFFYSNIMNFFKTEITLANGEIRKRPLIETNGETGEIVWDKGRDFATVRKVLSMPQVNIVKKTEVQTGGFSKESILPKRNSDKLIARKKDWDPKKYGGFDSPTVAYSVLVVAKVEKGKSKKLKSVKELLGITIMERSSFEKNPIDFLEAKGYKEVKKDLIIKLPKYSLFELENGRKRMLASAGELQKGNELALPSKYVNFLYLASHYEKLKGSPEDNEQKQLFVEQHKHYLDEIIEQISEFSKRVILADANLDKVLSAYNKHRDKPIREQAENIIHLFTLTNLGAPAAFKYFDTTIDRKRYTSTKEVLDATLIHQSITGLYETRIDLSQLGGDGGGSSPAPGGSGGTLQLEEEYRLFEPESTQKQEMDIWLKNFPQAWAETGGMGTAHCQAPVLIQLKATATPISIRQYPMPHEAYQGIKPHIRRMLDQGILKPCQSPWNTPLLPVKKPGTEDYRPVQDLREVNKRVEDIHPTVPNPYNLLSTLPPSHPWYTVLDLKDAFFCLRLHSESQLLFAFEWRDPEIGLSGQLTWTRLPQGFKNSPTLFNEALHSDLADFRVRYPALVLLQYVDDLLLAAATRTECLEGTKALLETLGNKGYRASAKKAQICLQEVTYLGYSLKDGQRWLTKARKEAILSIPVPKNSRQVREFLGKAGYCRLFIPGFAELAAPLYPLTRPGTLFQWGTEQQLAFEDIKKALLSSPALGLPDITKPFELFIDENSGFAKGVLVQKLGPWKRPVAYLSKKLDTVASGWPPCLRMVAAIAILVKDAGKLTLGQPLTILTSHPVEALVRQPPNKWLSNARMTHYQAMLLDAERVHFGPTVSLNPATLLPLPSGGNHHDCLQILAETHGTRPDLTDQPLPDADLTWYTDGSSFIRNGEREAGAAVTTESEVIWAAPLPPGTSAQRAELIALTQALKMAEGKKLTVYTDSRYAFATTHVHGEIYRRRGWLTSEGKEIKNKNEILALLEALFLPKRLSIIHCPGHQKGDSPQAKGNRLADDTAKKAATETHSSLTVLPAGKRTADGSEFEKRTADGSEFESPKKKAKVE

SEQ ID NO: 7154 - protein, 2125 aa, synthetic construct; identical to SEQ ID NO: 4526

SEQ ID NO: 7155 - protein, 2216 aa, synthetic construct
MPAAKRVKLDGGDKKYSIGLDIGTNSVGWAVITDEYKVPSKKFKVLGNTDRHSIKKNLIGALLFDSGETAEATRLKRTARRRYTRRKNRICYLQEIFSNEMAKVDDSFFHRLEESFLVEEDKKHERHPIFGNIVDEVAYHEKYPTIYHLRKKLVDSTDKADLRLIYLALAHMIKFRGHFLIEGDLNPDNSDVDKLFIQLVQTYNQLFEENPINASGVDAKAILSARLSKSRRLENLIAQLPGEKKNGLFGNLIALSLGLTPNFKSNFDLAEDAKLQLSKDTYDDDLDNLLAQIGDQYADLFLAAKNLSDAILLSDILRVNTEITKAPLSASMIKRYDEHHQDLTLLKALVRQQLPEKYKEIFFDQSKNGYAGYIDGGASQEEFYKFIKPILEKMDGTEELLVKLNREDLLRKQRTFDNGSIPHQIHLGELHAILRRQEDFYPFLKDNREKIEKILTFRIPYYVGPLARGNSRFAWMTRKSEETITPWNFEEVVDKGASAQSFIERMTNFDKNLPNEKVLPKHSLLYEYFTVYNELTKVKYVTEGMRKPAFLSGEQKKAIVDLLFKTNRKVTVKQLKEDYFKKIECFDSVEISGVEDRFNASLGTYHDLLKIIKDKDFLDNEENEDILEDIVLTLTLFEDREMIEERLKTYAHLFDDKVMKQLKRRRYTGWGRLSRKLINGIRDKQSGKTILDFLKSDGFANRNFMQLIHDDSLTFKEDIQKAQVSGQGDSLHEHIANLAGSPAIKKGILQTVKVVDELVKVMGRHKPENIVIEMARENQTTQKGQKNSRERMKRIEEGIKELGSQILKEHPVENTQLQNEKLYLYYLQNGRDMYVDQELDINRLSDYDVDHIVPQSFLKDDSIDNKVLTRSDKARGKSDNVPSEEVVKKMKNYWRQLLNAKLITQRKFDNLTKAERGGLSELDKAGFIKRQLVETRQITKHVAQILDSRMNTKYDENDKLIREVKVITLKSKLVSDFRKDFQFYKVREINNYHHAHDAYLNAVVGTALIKKYPKLESEFVYGDYKVYDVRKMIAKSEQEIGKATAKYFFYSNIMNFFKTEITLANGEIRKRPLIETNGETGEIVWDKGRDFATVRKVLSMPQVNIVKKTEVQTGGFSKESILPKRNSDKLIARKKDWDPKKYGGFDSPTVAYSVLVVAKVEKGKSKKLKSVKELLGITIMERSSFEKNPIDFLEAKGYKEVKKDLIIKLPKYSLFELENGRKRMLASAGELQKGNELALPSKYVNFLYLASHYEKLKGSPEDNEQKQLFVEQHKHYLDEIIEQISEFSKRVILADANLDKVLSAYNKHRDKPIREQAENIIHLFTLTNLGAPAAFKYFDTTIDRKRYTSTKEVLDATLIHQSITGLYETRIDLSQLGGDGGGSSPAPGGSGGTLGDQGSRGSDPLPEPRVTLTVEGIPTEFLVNTGAEHSVLTKPMGKMGSKRTVVAGATGSKVYPWTTKRLLKIGQKQVTHSFLVIPECPAPLLGRDLLTKLKAQIQFSTEGPQVTWEDRPAMCLVLNLEEEYRLHEKPVPPSIDPSWLQLFPMVWAEKAGMGLANQVPPVVVELKSDASPVAVRQYPMSKEAREGIRPHIQRFLDLGILVPCQSPWNTPLLPVKKPGTNDYRPVQDLREVNKRVQDIHPTVPNPYNLLSSLPPSHTWYSVLDLKDAFFCLKLHPNSQPLFAFEWRDPEKGNTGQLTWTRLPQGFKNSPTLFNEALHRDLASFRALNPQVVMLQYVDDLLVAAPTYRDCKEGTRRLLQELSKLGYRVSAKKAQLCREEVTYLGYLLKGGKRWLTPARKATVMKIPTPTTPRQVREFLGTAGFCRLWIPGFASLAAPLYPLTRPKVPFTWTEAHQEAFGRIKEALLSAPALALPDLTKPFALYVDEKEGVARGVLTQTLGPWRRPVAYLSKKLDPVASGWPTCLKAIAAVALLLKDADKLTLGQNVLVIAPHNLESIVRQPPDRWMTNARMTHYQSLLLNERVSFAPPAILNPATLLPVESDDTPIHICSEILAEETGTRPDLRDQPLPGVPAWYTDGSSFIMDGRRQAGAAIVDNKRTVWASNLPEGTSAQKAELIALTQALRLAEGKSINIYTDSRYAFATAHVHGAIYKQRGWLTSAGKDIKNKEEILALLEAIHLPKRVAIIHCPGHQRGTDPVATGNRKADEAAKQAAQSTRILTETTKNAGKRTADGSEFEKRTADGSEFESPKKKAKVE

SEQ ID NO: 7156 - protein, 2094 aa, synthetic construct
MPAAKRVKLDGGDKKYSIGLDIGTNSVGWAVITDEYKVPSKKFKVLGNTDRHSIKKNLIGALLFDSGETAEATRLKRTARRRYTRRKNRICYLQEIFSNEMAKVDDSFFHRLEESFLVEEDKKHERHPIFGNIVDEVAYHEKYPTIYHLRKKLVDSTDKADLRLIYLALAHMIKFRGHFLIEGDLNPDNSDVDKLFIQLVQTYNQLFEENPINASGVDAKAILSARLSKSRRLENLIAQLPGEKKNGLFGNLIALSLGLTPNFKSNFDLAEDAKLQLSKDTYDDDLDNLLAQIGDQYADLFLAAKNLSDAILLSDILRVNTEITKAPLSASMIKRYDEHHQDLTLLKALVRQQLPEKYKEIFFDQSKNGYAGYIDGGASQEEFYKFIKPILEKMDGTEELLVKLNREDLLRKQRTFDNGSIPHQIHLGELHAILRRQEDFYPFLKDNREKIEKILTFRIPYYVGPLARGNSRFAWMTRKSEETITPWNFEEVVDKGASAQSFIERMTNFDKNLPNEKVLPKHSLLYEYFTVYNELTKVKYVTEGMRKPAFLSGEQKKAIVDLLFKTNRKVTVKQLKEDYFKKIECFDSVEISGVEDRFNASLGTYHDLLKIIKDKDFLDNEENEDILEDIVLTLTLFEDREMIEERLKTYAHLFDDKVMKQLKRRRYTGWGRLSRKLINGIRDKQSGKTILDFLKSDGFANRNFMQLIHDDSLTFKEDIQKAQVSGQGDSLHEHIANLAGSPAIKKGILQTVKVVDELVKVMGRHKPENIVIEMARENQTTQKGQKNSRERMKRIEEGIKELGSQILKEHPVENTQLQNEKLYLYYLQNGRDMYVDQELDINRLSDYDVDHIVPQSFLKDDSIDNKVLTRSDKARGKSDNVPSEEVVKKMKNYWRQLLNAKLITQRKFDNLTKAERGGLSELDKAGFIKRQLVETRQITKHVAQILDSRMNTKYDENDKLIREVKVITLKSKLVSDFRKDFQFYKVREINNYHHAHDAYLNAVVGTALIKKYPKLESEFVYGDYKVYDVRKMIAKSEQEIGKATAKYFFYSNIMNFFKTEITLANGEIRKRPLIETNGETGEIVWDKGRDFATVRKVLSMPQVNIVKKTEVQTGGFSKESILPKRNSDKLIARKKDWDPKKYGGFDSPTVAYSVLVVAKVEKGKSKKLKSVKELLGITIMERSSFEKNPIDFLEAKGYKEVKKDLIIKLPKYSLFELENGRKRMLASAGELQKGNELALPSKYVNFLYLASHYEKLKGSPEDNEQKQLFVEQHKHYLDEIIEQISEFSKRVILADANLDKVLSAYNKHRDKPIREQAENIIHLFTLTNLGAPAAFKYFDTTIDRKRYTSTKEVLDATLIHQSITGLYETRIDLSQLGGDGGGSSPAPGGSGGTLNLEDEYRLYETSAEPEVSPGSTWLSDFPQAWAETGGMGLAVRQAPLIIPLKATSTPVSIKQYPMSQEAKLGIKPHIQRLLDQGILVPCQSPWNTPLLPVKKPGTNDYRPVQDLREVNKRVEDIHPTVPNPYNLLSGLPPSHRWYTVLDLKDAFFCLRLHPTSQPLFAFEWRDPGMGISGQLTWTRLPQGFKNSPTLFNEALHRDLADFRIQHPDLILLQYVDDILLAATSELDCQQGTRALLLTLGNLGYRASAKKAQLCQKQVKYLGYLLKEGQRWLTEARKETVMGQPTPKTPRQLREFLGKAGFCRLFIPGFAEMAAPLYPLTKPGTLFNWGPDQQKAYQEIKQALLTAPALGLPDLTKPFELFVDEKQGYAKGVLTQKLGPWRRPVAYLSKKLDPVAAGWPPCLRMVAAIAVLRKDAGKLTMGQPLVILAPHAVEALVKQPPDRWLSNARMTHYQAMLLDTDRVQFGPVVALNPATLLPLPEEGAPHDCLEILAETHGTRPDLTDQPIPDADHTWYTDGSSFLQEGQRKAGAAVTTETEVIWARALPAGTSAQRAELIALTQALKMAEGKRLNVYTDSRYAFATAHIHGEIYRRRGWLTSEGREIKNKSEILALLKALFLPKRLSIIHCLGHQKGDSAEARGNRLADQAAREAAIKTPPDTSTLLAGKRTADGSEFEKRTADGSEFESPKKKAKVE

SEQ ID NO: 7157 - protein, 2094 aa, synthetic construct
MPAAKRVKLDGGDKKYSIGLDIGTNSVGWAVITDEYKVPSKKFKVLGNTDRHSIKKNLIGALLFDSGETAEATRLKRTARRRYTRRKNRICYLQEIFSNEMAKVDDSFFHRLEESFLVEEDKKHERHPIFGNIVDEVAYHEKYPTIYHLRKKLVDSTDKADLRLIYLALAHMIKFRGHFLIEGDLNPDNSDVDKLFIQLVQTYNQLFEENPINASGVDAKAILSARLSKSRRLENLIAQLPGEKKNGLFGNLIALSLGLTPNFKSNFDLAEDAKLQLSKDTYDDDLDNLLAQIGDQYADLFLAAKNLSDAILLSDILRVNTEITKAPLSASMIKRYDEHHQDLTLLKALVRQQLPEKYKEIFFDQSKNGYAGYIDGGASQEEFYKFIKPILEKMDGTEELLVKLNREDLLRKQRTFDNGSIPHQIHLGELHAILRRQEDFYPFLKDNREKIEKILTFRIPYYVGPLARGNSRFAWMTRKSEETITPWNFEEVVDKGASAQSFIERMTNFDKNLPNEKVLPKHSLLYEYFTVYNELTKVKYVTEGMRKPAFLSGEQKKAIVDLLFKTNRKVTVKQLKEDYFKKIECFDSVEISGVEDRFNASLGTYHDLLKIIKDKDFLDNEENEDILEDIVLTLTLFEDREMIEERLKTYAHLFDDKVMKQLKRRRYTGWGRLSRKLINGIRDKQSGKTILDFLKSDGFANRNFMQLIHDDSLTFKEDIQKAQVSGQGDSLHEHIANLAGSPAIKKGILQTVKVVDELVKVMGRHKPENIVIEMARENQTTQKGQKNSRERMKRIEEGIKELGSQILKEHPVENTQLQNEKLYLYYLQNGRDMYVDQELDINRLSDYDVDHIVPQSFLKDDSIDNKVLTRSDKARGKSDNVPSEEVVKKMKNYWRQLLNAKLITQRKFDNLTKAERGGLSELDKAGFIKRQLVETRQITKHVAQILDSRMNTKYDENDKLIREVKVITLKSKLVSDFRKDFQFYKVREINNYHHAHDAYLNAVVGTALIKKYPKLESEFVYGDYKVYDVRKMIAKSEQEIGKATAKYFFYSNIMNFFKTEITLANGEIRKRPLIETNGETGEIVWDKGRDFATVRKVLSMPQVNIVKKTEVQTGGFSKESILPKRNSDKLIARKKDWDPKKYGGFDSPTVAYSVLVVAKVEKGKSKKLKSVKELLGITIMERSSFEKNPIDFLEAKGYKEVKKDLIIKLPKYSLFELENGRKRMLASAGELQKGNELALPSKYVNFLYLASHYEKLKGSPEDNEQKQLFVEQHKHYLDEIIEQISEFSKRVILADANLDKVLSAYNKHRDKPIREQAENIIHLFTLTNLGAPAAFKYFDTTIDRKRYTSTKEVLDATLIHQSITGLYETRIDLSQLGGDGGGSSPAPGGSGGTLNIEDEHRLHETSKEPDVSLGSTWLSDFPQAWAETGGMGLAVRQAPLIIPLKATSTPVSIKQYPMSQEARLGIKPHIQRLLDQGILVPCQSPWNTPLLPVKKPGTNDYRPVQDLREVNKRVEDIHPTVPNPYNLLSGLPPSHQWYTVLDLKDAFFCLRLHPTSQPLFAFEWRDPEMGISGQLTWTRLPQGFKNSPTLFNEALHRDLADFRIQHPDLILLQYVDDLLLAATSELDCQQGTRALLQTLGNLGYRASAKKAQICQKQVKYLGYLLKEGQRWLTEARKETVMGQPTPKTPRQLREFLGTAGFCRLWIPGFAEMAAPLYPLTKPGTLFNWGPDQQKAYQEIKQALLTAPALGLPDLTKPFELFVDEKQGYAKGVLTQKLGPWRRPVAYLSKKLDPVAAGWPPCLRMVAAIAVLTKDAGKLTMGQPLVILAPHAVEALVKQPPDRWLSNARMTHYQALLLDTDRVQFGPVVALNPATLLPLPEEGLQHNCLDILAEAHGTRPDLTDQPLPDADHTWYTDGSSLLQEGQRKAGAAVTTETEVIWAKALPAGTSAQRAELIALTQALKMAEGKKLNVYTDSRYAFATAHIHGEIYRRRGWLTSEGKEIKNKDEILALLKALFLPKRLSIIHCPGHQKGHSAEARGNRMADQAARKAAITETPDTSTLLAGKRTADGSEFEKRTADGSEFESPKKKAKVE

SEQ ID NO: 7158 - protein, 2094 aa, synthetic construct
MPAAKRVKLDGGDKKYSIGLDIGTNSVGWAVITDEYKVPSKKFKVLGNTDRHSIKKNLIGALLFDSGETAEATRLKRTARRRYTRRKNRICYLQEIFSNEMAKVDDSFFHRLEESFLVEEDKKHERHPIFGNIVDEVAYHEKYPTIYHLRKKLVDSTDKADLRLIYLALAHMIKFRGHFLIEGDLNPDNSDVDKLFIQLVQTYNQLFEENPINASGVDAKAILSARLSKSRRLENLIAQLPGEKKNGLFGNLIALSLGLTPNFKSNFDLAEDAKLQLSKDTYDDDLDNLLAQIGDQYADLFLAAKNLSDAILLSDILRVNTEITKAPLSASMIKRYDEHHQDLTLLKALVRQQLPEKYKEIFFDQSKNGYAGYIDGGASQEEFYKFIKPILEKMDGTEELLVKLNREDLLRKQRTFDNGSIPHQIHLGELHAILRRQEDFYPFLKDNREKIEKILTFRIPYYVGPLARGNSRFAWMTRKSEETITPWNFEEVVDKGASAQSFIERMTNFDKNLPNEKVLPKHSLLYEYFTVYNELTKVKYVTEGMRKPAFLSGEQKKAIVDLLFKTNRKVTVKQLKEDYFKKIECFDSVEISGVEDRFNASLGTYHDLLKIIKDKDFLDNEENEDILEDIVLTLTLFEDREMIEERLKTYAHLFDDKVMKQLKRRRYTGWGRLSRKLINGIRDKQSGKTILDFLKSDGFANRNFMQLIHDDSLTFKEDIQKAQVSGQGDSLHEHIANLAGSPAIKKGILQTVKVVDELVKVMGRHKPENIVIEMARENQTTQKGQKNSRERMKRIEEGIKELGSQILKEHPVENTQLQNEKLYLYYLQNGRDMYVDQELDINRLSDYDVDHIVPQSFLKDDSIDNKVLTRSDKARGKSDNVPSEEVVKKMKNYWRQLLNAKLITQRKFDNLTKAERGGLSELDKAGFIKRQLVETRQITKHVAQILDSRMNTKYDENDKLIREVKVITLKSKLVSDFRKDFQFYKVREINNYHHAHDAYLNAVVGTALIKKYPKLESEFVYGDYKVYDVRKMIAKSEQEIGKATAKYFFYSNIMNFFKTEITLANGEIRKRPLIETNGETGEIVWDKGRDFATVRKVLSMPQVNIVKKTEVQTGGFSKESILPKRNSDKLIARKKDWDPKKYGGFDSPTVAYSVLVVAKVEKGKSKKLKSVKELLGITIMERSSFEKNPIDFLEAKGYKEVKKDLIIKLPKYSLFELENGRKRMLASAGELQKGNELALPSKYVNFLYLASHYEKLKGSPEDNEQKQLFVEQHKHYLDEIIEQISEFSKRVILADANLDKVLSAYNKHRDKPIREQAENIIHLFTLTNLGAPAAFKYFDTTIDRKRYTSTKEVLDATLIHQSITGLYETRIDLSQLGGDGGGSSPAPGGSGGTLNIEDEHRLHETSKEPDVSLGSTWLSDFPQAWAETGGMGLAVRQAPLIIPLKATSTPVSIKQYPMSQEARLGIKPHIQRLLDQGILVPCQSPWNTPLLPVKKPGTNDYRPVQDLREVNKRVEDIHPTVPNPYNLLSGLPPSHQWYTVLDLKDAFFCLRLHPTSQPLFAFEWRDPEMGISGQLTWTRLPQGFKNSPTLFNEALHRDLADFRIQHPDLILLQYVDDLLLAATSELDCQQGTRALLQTLGNLGYRASAKKAQICQKQVKYLGYLLKEGQRWLTEARKETVMGQPTPKTPRQLREFLGKAGFCRLFIPGFAEMAAPLYPLTKPGTLFNWGPDQQKAYQEIKQALLTAPALGLPDLTKPFELFVDEKQGYAKGVLTQKLGPWRRPVAYLSKKLDPVAAGWPPCLRMVAAIAVLTKDAGKLTMGQPLVILAPHAVEALVKQPPDRWLSNARMTHYQALLLDTDRVQFGPVVALNPATLLPLPEEGLQHNCLDILAEAHGTRPDLTDQPLPDADHTWYTDGSSLLQEGQRKAGAAVTTETEVIWAKALPAGTSAQRAELIALTQALKMAEGKKLNVYTDSRYAFATAHIHGEIYRRRGWLTSEGKEIKNKDEILALLKALFLPKRLSIIHCPGHQKGHSAEARGNRMADQAARKAAITETPDTSTLLAGKRTADGSEFEKRTADGSEFESPKKKAKVE

SEQ ID NO: 7159 - protein, 2094 aa, synthetic construct; identical to SEQ ID NO: 7157

SEQ ID NO: 7160 - protein, 2094 aa, synthetic construct; identical to SEQ ID NO: 7158

SEQ ID NO: 7161 - protein, 2085 aa, synthetic construct
MPAAKRVKLDGGDKKYSIGLDIGTNSVGWAVITDEYKVPSKKFKVLGNTDRHSIKKNLIGALLFDSGETAEATRLKRTARRRYTRRKNRICYLQEIFSNEMAKVDDSFFHRLEESFLVEEDKKHERHPIFGNIVDEVAYHEKYPTIYHLRKKLVDSTDKADLRLIYLALAHMIKFRGHFLIEGDLNPDNSDVDKLFIQLVQTYNQLFEENPINASGVDAKAILSARLSKSRRLENLIAQLPGEKKNGLFGNLIALSLGLTPNFKSNFDLAEDAKLQLSKDTYDDDLDNLLAQIGDQYADLFLAAKNLSDAILLSDILRVNTEITKAPLSASMIKRYDEHHQDLTLLKALVRQQLPEKYKEIFFDQSKNGYAGYIDGGASQEEFYKFIKPILEKMDGTEELLVKLNREDLLRKQRTFDNGSIPHQIHLGELHAILRRQEDFYPFLKDNREKIEKILTFRIPYYVGPLARGNSRFAWMTRKSEETITPWNFEEVVDKGASAQSFIERMTNFDKNLPNEKVLPKHSLLYEYFTVYNELTKVKYVTEGMRKPAFLSGEQKKAIVDLLFKTNRKVTVKQLKEDYFKKIECFDSVEISGVEDRFNASLGTYHDLLKIIKDKDFLDNEENEDILEDIVLTLTLFEDREMIEERLKTYAHLFDDKVMKQLKRRRYTGWGRLSRKLINGIRDKQSGKTILDFLKSDGFANRNFMQLIHDDSLTFKEDIQKAQVSGQGDSLHEHIANLAGSPAIKKGILQTVKVVDELVKVMGRHKPENIVIEMARENQTTQKGQKNSRERMKRIEEGIKELGSQILKEHPVENTQLQNEKLYLYYLQNGRDMYVDQELDINRLSDYDVDHIVPQSFLKDDSIDNKVLTRSDKARGKSDNVPSEEVVKKMKNYWRQLLNAKLITQRKFDNLTKAERGGLSELDKAGFIKRQLVETRQITKHVAQILDSRMNTKYDENDKLIREVKVITLKSKLVSDFRKDFQFYKVREINNYHHAHDAYLNAVVGTALIKKYPKLESEFVYGDYKVYDVRKMIAKSEQEIGKATAKYFFYSNIMNFFKTEITLANGEIRKRPLIETNGETGEIVWDKGRDFATVRKVLSMPQVNIVKKTEVQTGGFSKESILPKRNSDKLIARKKDWDPKKYGGFDSPTVAYSVLVVAKVEKGKSKKLKSVKELLGITIMERSSFEKNPIDFLEAKGYKEVKKDLIIKLPKYSLFELENGRKRMLASAGELQKGNELALPSKYVNFLYLASHYEKLKGSPEDNEQKQLFVEQHKHYLDEIIEQISEFSKRVILADANLDKVLSAYNKHRDKPIREQAENIIHLFTLTNLGAPAAFKYFDTTIDRKRYTSTKEVLDATLIHQSITGLYETRIDLSQLGGDGGGSSPAPGGSGGIPWLMKKPLQLTTLVPLQEYEERLLKQTMLTGSYKEKLQSLFLKYDALWQHWENQVGHRRIKPHHIATGTVNPRPQKQYPINPKAKASIQTVINDLLKQGVLIQQNSIMNTPVYPVPKPDGKWRMVLDYREVNKTIPLIAAQNQHSAGILSSIFRGKYKTTLDLSNGFWAHSITPESYWLTAFTWLGQQYCWTRLPQGFLNSPALFNADVVDLLKEVPNVQVYVDDIYISHDDPREHLEQLEKVFSLLLNAGYVVSLKKSEIAQHEVEFLGFNITKEGRGLTETFKQKLLNITPPRDLKQLQSILGKLNFARNFIPNFSELVKPLYNIIATAPGKYITWTTDNSQQLQNIISMLNSAENLEERNPEVRLIMKVNTSPSAGYIRFYNEFAKRPIMYLNYVYTKAEVKFTNTEKLLTTIHKGLIKALDLGMGQEILVYSPIVSMTKIQKTPLPERKALPIRWITWMSYLEDPRIQFHYDKTLPELQQVPTVTDDIIAKIKHPSEFSMVFYTDGSAIKHPNVNKSHNAGMGIAQVQFKPEFTVINTWSIPLGDHTAQLAEVAAVEFACKKALKIDGPVLIVTDSFYVAESVNKELPYWQSNGFFNNKKKPLKHVSKWKSIADCIQLKPDIIIIHEKGHQPTASTFHTEGNNLADKLATQGSYVVNAGKRTADGSEFEKRTADGSEFESPKKKAKVE

SEQ ID NO: 7162 - protein, 2092 aa, synthetic construct
MPAAKRVKLDGGDKKYSIGLDIGTNSVGWAVITDEYKVPSKKFKVLGNTDRHSIKKNLIGALLFDSGETAEATRLKRTARRRYTRRKNRICYLQEIFSNEMAKVDDSFFHRLEESFLVEEDKKHERHPIFGNIVDEVAYHEKYPTIYHLRKKLVDSTDKADLRLIYLALAHMIKFRGHFLIEGDLNPDNSDVDKLFIQLVQTYNQLFEENPINASGVDAKAILSARLSKSRRLENLIAQLPGEKKNGLFGNLIALSLGLTPNFKSNFDLAEDAKLQLSKDTYDDDLDNLLAQIGDQYADLFLAAKNLSDAILLSDILRVNTEITKAPLSASMIKRYDEHHQDLTLLKALVRQQLPEKYKEIFFDQSKNGYAGYIDGGASQEEFYKFIKPILEKMDGTEELLVKLNREDLLRKQRTFDNGSIPHQIHLGELHAILRRQEDFYPFLKDNREKIEKILTFRIPYYVGPLARGNSRFAWMTRKSEETITPWNFEEVVDKGASAQSFIERMTNFDKNLPNEKVLPKHSLLYEYFTVYNELTKVKYVTEGMRKPAFLSGEQKKAIVDLLFKTNRKVTVKQLKEDYFKKIECFDSVEISGVEDRFNASLGTYHDLLKIIKDKDFLDNEENEDILEDIVLTLTLFEDREMIEERLKTYAHLFDDKVMKQLKRRRYTGWGRLSRKLINGIRDKQSGKTILDFLKSDGFANRNFMQLIHDDSLTFKEDIQKAQVSGQGDSLHEHIANLAGSPAIKKGILQTVKVVDELVKVMGRHKPENIVIEMARENQTTQKGQKNSRERMKRIEEGIKELGSQILKEHPVENTQLQNEKLYLYYLQNGRDMYVDQELDINRLSDYDVDHIVPQSFLKDDSIDNKVLTRSDKARGKSDNVPSEEVVKKMKNYWRQLLNAKLITQRKFDNLTKAERGGLSELDKAGFIKRQLVETRQITKHVAQILDSRMNTKYDENDKLIREVKVITLKSKLVSDFRKDFQFYKVREINNYHHAHDAYLNAVVGTALIKKYPKLESEFVYGDYKVYDVRKMIAKSEQEIGKATAKYFFYSNIMNFFKTEITLANGEIRKRPLIETNGETGEIVWDKGRDFATVRKVLSMPQVNIVKKTEVQTGGFSKESILPKRNSDKLIARKKDWDPKKYGGFDSPTVAYSVLVVAKVEKGKSKKLKSVKELLGITIMERSSFEKNPIDFLEAKGYKEVKKDLIIKLPKYSLFELENGRKRMLASAGELQKGNELALPSKYVNFLYLASHYEKLKGSPEDNEQKQLFVEQHKHYLDEIIEQISEFSKRVILADANLDKVLSAYNKHRDKPIREQAENIIHLFTLTNLGAPAAFKYFDTTIDRKRYTSTKEVLDATLIHQSITGLYETRIDLSQLGGDGGGSSPAPGGSGGVLNLEEEYRLHEKPVPSSIDPSWLQLFPTVWAERAGMGLANQVPPVVVELRSGASPVAVRQYPMSKEAREGIRPHIQRFLDLGVLVPCQSPWNTPLLPVKKPGTNDYRPVQDLREINKRVQDIHPTVPNPYNLLSSLPPSHTWYSVLDLKDAFFCLKLHPNSQPLFAFEWRDPEKGNTGQLTWTRLPQGFKNSPTLFNEALHRDLAPFRALNPQVVLLQYVDDLLVAAPTYRDCKEGTQKLLQELSKLGYRVSAKKAQLCQKEVTYLGYLLKEGKRWLTPARKATVMKIPPPTTPRQVREFLGKAGFCRLFIPGFASLAAPLYPLTKPSIPFIWTEEHQKAFDRIKEALLSAPALALPDLTKPFTLYVDERAGVARGVLTQTLGPWRRPVAYLSKKLDPVASGWPTCLKAVAAVALLLKDADKLTLGQNVTVIASHSLESIVRQPPDRWMTNARMTHYQSLLLNERVSFAPPAVLNPATLLPVESEATPVHRCSEILAEETGTRRDLKDQPLPGVPAWYTDGSSFIAEGKRRAGAAIVDGKRTVWASSLPEGTSAQKAELVALTQALRLAEGKDINIYTDSRYAFATAHIHGAIYKQRGWLTSAGKDIKNKEEILALLEAIHLPKRVAIIHCPGHQKGNDPVATGNRRADEAAKQAALSTRVLAETTKPAGKRTADGSEFEKRTADGSEFESPKKKAKVE

SEQ ID NO: 7163 - protein, 2096 aa, synthetic construct
MPAAKRVKLDGGDKKYSIGLDIGTNSVGWAVITDEYKVPSKKFKVLGNTDRHSIKKNLIGALLFDSGETAEATRLKRTARRRYTRRKNRICYLQEIFSNEMAKVDDSFFHRLEESFLVEEDKKHERHPIFGNIVDEVAYHEKYPTIYHLRKKLVDSTDKADLRLIYLALAHMIKFRGHFLIEGDLNPDNSDVDKLFIQLVQTYNQLFEENPINASGVDAKAILSARLSKSRRLENLIAQLPGEKKNGLFGNLIALSLGLTPNFKSNFDLAEDAKLQLSKDTYDDDLDNLLAQIGDQYADLFLAAKNLSDAILLSDILRVNTEITKAPLSASMIKRYDEHHQDLTLLKALVRQQLPEKYKEIFFDQSKNGYAGYIDGGASQEEFYKFIKPILEKMDGTEELLVKLNREDLLRKQRTFDNGSIPHQIHLGELHAILRRQEDFYPFLKDNREKIEKILTFRIPYYVGPLARGNSRFAWMTRKSEETITPWNFEEVVDKGASAQSFIERMTNFDKNLPNEKVLPKHSLLYEYFTVYNELTKVKYVTEGMRKPAFLSGEQKKAIVDLLFKTNRKVTVKQLKEDYFKKIECFDSVEISGVEDRFNASLGTYHDLLKIIKDKDFLDNEENEDILEDIVLTLTLFEDREMIEERLKTYAHLFDDKVMKQLKRRRYTGWGRLSRKLINGIRDKQSGKTILDFLKSDGFANRNFMQLIHDDSLTFKEDIQKAQVSGQGDSLHEHIANLAGSPAIKKGILQTVKVVDELVKVMGRHKPENIVIEMARENQTTQKGQKNSRERMKRIEEGIKELGSQILKEHPVENTQLQNEKLYLYYLQNGRDMYVDQELDINRLSDYDVDHIVPQSFLKDDSIDNKVLTRSDKARGKSDNVPSEEVVKKMKNYWRQLLNAKLITQRKFDNLTKAERGGLSELDKAGFIKRQLVETRQITKHVAQILDSRMNTKYDENDKLIREVKVITLKSKLVSDFRKDFQFYKVREINNYHHAHDAYLNAVVGTALIKKYPKLESEFVYGDYKVYDVRKMIAKSEQEIGKATAKYFFYSNIMNFFKTEITLANGEIRKRPLIETNGETGEIVWDKGRDFATVRKVLSMPQVNIVKKTEVQTGGFSKESILPKRNSDKLIARKKDWDPKKYGGFDSPTVAYSVLVVAKVEKGKSKKLKSVKELLGITIMERSSFEKNPIDFLEAKGYKEVKKDLIIKLPKYSLFELENGRKRMLASAGELQKGNELALPSKYVNFLYLASHYEKLKGSPEDNEQKQLFVEQHKHYLDEIIEQISEFSKRVILADANLDKVLSAYNKHRDKPIREQAENIIHLFTLTNLGAPAAFKYFDTTIDRKRYTSTKEVLDATLIHQSITGLYETRIDLSQLGGDGGPAPGGSGSSGGTAPLEEEYRLFLEAPIQNVTLLEQWKREIPKVWAEINPPGLASTQAPIHVQLLSTALPVRVRQYPITLEAKRSLRETIRKFRAAGILRPVHSPWNTPLLPVRKSGTSEYRMVQDLREVNKRVETIHPTVPNPYTLLSLLPPDRIWYSVLDLKDAFFCIPLAPESQLIFAFEWADAEEGESGQLTWTRLPQGFKNSPTLFNEALNRDLQGFRLDHPSVSLLQYVDDLLIAADTQAACLSATRDLLMTLAELGYRVSGKKAQLCQEEVTYLGFKIHKGSRSLSNSRTQAILQIPVPKTKRQVREFLGTIGYCRLWIPGFAELAQPLYAATRPGNDPLVWGEKEEEAFQSLKLALTQPPALALPSLDKPFQLFVEETSGAAKGVLTQALGPWKRPVAYLSKRLDPVAAGWPRCLRAIAAAALLTREASKLTFGQDIEITSSHNLESLLRSPPDKWLTNARITQYQVLLLDPPRVRFKQTAALNPATLLPETDDTLPIHHCLDTLDSLTSTRPDLTDQPLAQAEATLFTDGSSYIRDGKRYAGAAVVTLDSVIWAEPLPIGTSAQKAELIALTKALEWSKDKSVNIYTDSRYAFATLHVHGMIYRERGWLTAGGKAIKNAPEILALLTAVWLPKRVAVMHCKGHQKDDAPTSTGNRRADEVAREVAIRPLSTQATISAGKRTADGSEFEKRTADGSEFESPKKKAKVE

SEQ ID NO: 7164 - protein, 2093 aa, synthetic construct
MPAAKRVKLDGGDKKYSIGLDIGTNSVGWAVITDEYKVPSKKFKVLGNTDRHSIKKNLIGALLFDSGETAEATRLKRTARRRYTRRKNRICYLQEIFSNEMAKVDDSFFHRLEESFLVEEDKKHERHPIFGNIVDEVAYHEKYPTIYHLRKKLVDSTDKADLRLIYLALAHMIKFRGHFLIEGDLNPDNSDVDKLFIQLVQTYNQLFEENPINASGVDAKAILSARLSKSRRLENLIAQLPGEKKNGLFGNLIALSLGLTPNFKSNFDLAEDAKLQLSKDTYDDDLDNLLAQIGDQYADLFLAAKNLSDAILLSDILRVNTEITKAPLSASMIKRYDEHHQDLTLLKALVRQQLPEKYKEIFFDQSKNGYAGYIDGGASQEEFYKFIKPILEKMDGTEELLVKLNREDLLRKQRTFDNGSIPHQIHLGELHAILRRQEDFYPFLKDNREKIEKILTFRIPYYVGPLARGNSRFAWMTRKSEETITPWNFEEVVDKGASAQSFIERMTNFDKNLPNEKVLPKHSLLYEYFTVYNELTKVKYVTEGMRKPAFLSGEQKKAIVDLLFKTNRKVTVKQLKEDYFKKIECFDSVEISGVEDRFNASLGTYHDLLKIIKDKDFLDNEENEDILEDIVLTLTLFEDREMIEERLKTYAHLFDDKVMKQLKRRRYTGWGRLSRKLINGIRDKQSGKTILDFLKSDGFANRNFMQLIHDDSLTFKEDIQKAQVSGQGDSLHEHIANLAGSPAIKKGILQTVKVVDELVKVMGRHKPENIVIEMARENQTTQKGQKNSRERMKRIEEGIKELGSQILKEHPVENTQLQNEKLYLYYLQNGRDMYVDQELDINRLSDYDVDHIVPQSFLKDDSIDNKVLTRSDKARGKSDNVPSEEVVKKMKNYWRQLLNAKLITQRKFDNLTKAERGGLSELDKAGFIKRQLVETRQITKHVAQILDSRMNTKYDENDKLIREVKVITLKSKLVSDFRKDFQFYKVREINNYHHAHDAYLNAVVGTALIKKYPKLESEFVYGDYKVYDVRKMIAKSEQEIGKATAKYFFYSNIMNFFKTEITLANGEIRKRPLIETNGETGEIVWDKGRDFATVRKVLSMPQVNIVKKTEVQTGGFSKESILPKRNSDKLIARKKDWDPKKYGGFDSPTVAYSVLVVAKVEKGKSKKLKSVKELLGITIMERSSFEKNPIDFLEAKGYKEVKKDLIIKLPKYSLFELENGRKRMLASAGELQKGNELALPSKYVNFLYLASHYEKLKGSPEDNEQKQLFVEQHKHYLDEIIEQISEFSKRVILADANLDKVLSAYNKHRDKPIREQAENIIHLFTLTNLGAPAAFKYFDTTIDRKRYTSTKEVLDATLIHQSITGLYETRIDLSQLGGDGGPAPGGSGSSGGTLQLEEEYRLFEPESTQKQEMDIWLKNFPQAWAETGGMGTAHCQAPVLIQLKATATPISIRQYPMPHEAYQGIKPHIRRMLDQGILKPCQSPWNTPLLPVKKPGTEDYRPVQDLREVNKRVEDIHPTVPNPYNLLSTLPPSHPWYTVLDLKDAFFCLRLHSESQLLFAFEWRDPEIGLSGQLTWTRLPQGFKNSPTLFNEALHSDLADFRVRYPALVLLQYVDDLLLAAATRTECLEGTKALLETLGNKGYRASAKKAQICLQEVTYLGYSLKDGQRWLTKARKEAILSIPVPKNSRQVREFLGKAGYCRLFIPGFAELAAPLYPLTRPGTLFQWGTEQQLAFEDIKKALLSSPALGLPDITKPFELFIDENSGFAKGVLVQKLGPWKRPVAYLSKKLDTVASGWPPCLRMVAAIAILVKDAGKLTLGQPLTILTSHPVEALVRQPPNKWLSNARMTHYQAMLLDAERVHFGPTVSLNPATLLPLPSGGNHHDCLQILAETHGTRPDLTDQPLPDADLTWYTDGSSFIRNGEREAGAAVTTESEVIWAAPLPPGTSAQRAELIALTQALKMAEGKKLTVYTDSRYAFATTHVHGEIYRRRGWLTSEGKEIKNKNEILALLEALFLPKRLSIIHCPGHQKGDSPQAKGNRLADDTAKKAATETHSSLTVLPAGKRTADGSEFEKRTADGSEFESPKKKAKVE

SEQ ID NO: 7165 - protein, 2174 aa, synthetic construct
MPAAKRVKLDGGDKKYSIGLDIGTNSVGWAVITDEYKVPSKKFKVLGNTDRHSIKKNLIGALLFDSGETAEATRLKRTARRRYTRRKNRICYLQEIFSNEMAKVDDSFFHRLEESFLVEEDKKHERHPIFGNIVDEVAYHEKYPTIYHLRKKLVDSTDKADLRLIYLALAHMIKFRGHFLIEGDLNPDNSDVDKLFIQLVQTYNQLFEENPINASGVDAKAILSARLSKSRRLENLIAQLPGEKKNGLFGNLIALSLGLTPNFKSNFDLAEDAKLQLSKDTYDDDLDNLLAQIGDQYADLFLAAKNLSDAILLSDILRVNTEITKAPLSASMIKRYDEHHQDLTLLKALVRQQLPEKYKEIFFDQSKNGYAGYIDGGASQEEFYKFIKPILEKMDGTEELLVKLNREDLLRKQRTFDNGSIPHQIHLGELHAILRRQEDFYPFLKDNREKIEKILTFRIPYYVGPLARGNSRFAWMTRKSEETITPWNFEEVVDKGASAQSFIERMTNFDKNLPNEKVLPKHSLLYEYFTVYNELTKVKYVTEGMRKPAFLSGEQKKAIVDLLFKTNRKVTVKQLKEDYFKKIECFDSVEISGVEDRFNASLGTYHDLLKIIKDKDFLDNEENEDILEDIVLTLTLFEDREMIEERLKTYAHLFDDKVMKQLKRRRYTGWGRLSRKLINGIRDKQSGKTILDFLKSDGFANRNFMQLIHDDSLTFKEDIQKAQVSGQGDSLHEHIANLAGSPAIKKGILQTVKVVDELVKVMGRHKPENIVIEMARENQTTQKGQKNSRERMKRIEEGIKELGSQILKEHPVENTQLQNEKLYLYYLQNGRDMYVDQELDINRLSDYDVDHIVPQSFLKDDSIDNKVLTRSDKARGKSDNVPSEEVVKKMKNYWRQLLNAKLITQRKFDNLTKAERGGLSELDKAGFIKRQLVETRQITKHVAQILDSRMNTKYDENDKLIREVKVITLKSKLVSDFRKDFQFYKVREINNYHHAHDAYLNAVVGTALIKKYPKLESEFVYGDYKVYDVRKMIAKSEQEIGKATAKYFFYSNIMNFFKTEITLANGEIRKRPLIETNGETGEIVWDKGRDFATVRKVLSMPQVNIVKKTEVQTGGFSKESILPKRNSDKLIARKKDWDPKKYGGFDSPTVAYSVLVVAKVEKGKSKKLKSVKELLGITIMERSSFEKNPIDFLEAKGYKEVKKDLIIKLPKYSLFELENGRKRMLASAGELQKGNELALPSKYVNFLYLASHYEKLKGSPEDNEQKQLFVEQHKHYLDEIIEQISEFSKRVILADANLDKVLSAYNKHRDKPIREQAENIIHLFTLTNLGAPAAFKYFDTTIDRKRYTSTKEVLDATLIHQSITGLYETRIDLSQLGGDGGPAPGGSGSSGGMNPLQLLQPLPAEIKGTKLLAHWNSGATITCIPESFLEDEQPIKKTLIKTIHGEKQQNVYYVTFKVKGRKVEAEVIASPYEYILLSPTDVPWLTQQPLQLTILVPLQEYQEKILSKTALPEDQKQQLKTLFVKYDNLWQHWENQVGHRKIRPHNIATGDYPPRPQKQYPINPKAKPSIQIVIDDLLKQGVLTPQNSTMNTPVYPVPKPDGRWRMVLDYREVNKTIPLTAAQNQHSAGILATIVRQKYKTTLDLANGFWAHPITPESYWLTAFTWQGKQYCWTRLPQGFLNSPALFTADVVDLLKEIPNVQVYVDDIYLSHDDPKEHVQQLEKVFQILLQAGYVVSLKKSEIGQKTVEFLGFNITKEGRGLTDTFKTKLLNITPPKDLKQLQSILGLLNFARNFIPNFAELVQPLYNLIASAKGKYIEWSEENTKQLNMVIEALNTASNLEERLPEQRLVIKVNTSPSAGYVRYYNETGKKPIMYLNYVFSKAELKFSMLEKLLTTMHKALIKAMDLAMGQEILVYSPIVSMTKIQKTPLPERKALPIRWITWMTYLEDPRIQFHYDKTLPELKHIPDVYTSSQSPVKHPSQYEGVFYTDGSAIKSPDPTKSNNAGMGIVHATYKPEYQVLNQWSIPLGNHTAQMAEIAAVEFACKKALKIPGPVLVITDSFYVAESANKELPYWKSNGFVNNKKKPLKHISKWKSIAECLSMKPDITIQHEKGISLQIPVFILKGNALADKLATQGSYVVNAGKRTADGSEFEKRTADGSEFESPKKKAKVE

SEQ ID NO: 7166 - protein, 2085 aa, synthetic construct
MPAAKRVKLDGGDKKYSIGLDIGTNSVGWAVITDEYKVPSKKFKVLGNTDRHSIKKNLIGALLFDSGETAEATRLKRTARRRYTRRKNRICYLQEIFSNEMAKVDDSFFHRLEESFLVEEDKKHERHPIFGNIVDEVAYHEKYPTIYHLRKKLVDSTDKADLRLIYLALAHMIKFRGHFLIEGDLNPDNSDVDKLFIQLVQTYNQLFEENPINASGVDAKAILSARLSKSRRLENLIAQLPGEKKNGLFGNLIALSLGLTPNFKSNFDLAEDAKLQLSKDTYDDDLDNLLAQIGDQYADLFLAAKNLSDAILLSDILRVNTEITKAPLSASMIKRYDEHHQDLTLLKALVRQQLPEKYKEIFFDQSKNGYAGYIDGGASQEEFYKFIKPILEKMDGTEELLVKLNREDLLRKQRTFDNGSIPHQIHLGELHAILRRQEDFYPFLKDNREKIEKILTFRIPYYVGPLARGNSRFAWMTRKSEETITPWNFEEVVDKGASAQSFIERMTNFDKNLPNEKVLPKHSLLYEYFTVYNELTKVKYVTEGMRKPAFLSGEQKKAIVDLLFKTNRKVTVKQLKEDYFKKIECFDSVEISGVEDRFNASLGTYHDLLKIIKDKDFLDNEENEDILEDIVLTLTLFEDREMIEERLKTYAHLFDDKVMKQLKRRRYTGWGRLSRKLINGIRDKQSGKTILDFLKSDGFANRNFMQLIHDDSLTFKEDIQKAQVSGQGDSLHEHIANLAGSPAIKKGILQTVKVVDELVKVMGRHKPENIVIEMARENQTTQKGQKNSRERMKRIEEGIKELGSQILKEHPVENTQLQNEKLYLYYLQNGRDMYVDQELDINRLSDYDVDHIVPQSFLKDDSIDNKVLTRSDKARGKSDNVPSEEVVKKMKNYWRQLLNAKLITQRKFDNLTKAERGGLSELDKAGFIKRQLVETRQITKHVAQILDSRMNTKYDENDKLIREVKVITLKSKLVSDFRKDFQFYKVREINNYHHAHDAYLNAVVGTALIKKYPKLESEFVYGDYKVYDVRKMIAKSEQEIGKATAKYFFYSNIMNFFKTEITLANGEIRKRPLIETNGETGEIVWDKGRDFATVRKVLSMPQVNIVKKTEVQTGGFSKESILPKRNSDKLIARKKDWDPKKYGGFDSPTVAYSVLVVAKVEKGKSKKLKSVKELLGITIMERSSFEKNPIDFLEAKGYKEVKKDLIIKLPKYSLFELENGRKRMLASAGELQKGNELALPSKYVNFLYLASHYEKLKGSPEDNEQKQLFVEQHKHYLDEIIEQISEFSKRVILADANLDKVLSAYNKHRDKPIREQAENIIHLFTLTNLGAPAAFKYFDTTIDRKRYTSTKEVLDATLIHQSITGLYETRIDLSQLGGDGGPAPGGSGSSGGVPWLTQQPLQLTILVPLQEYQEKILSKTALPEDQKQQLKTLFVKYDNLWQHWENQVGHRKIRPHNIATGDYPPRPQKQYPINPKAKPSIQIVIDDLLKQGVLTPQNSTMNTPVYPVPKPDGRWRMVLDYREVNKTIPLTAAQNQHSAGILATIVRQKYKTTLDLANGFWAHPITPESYWLTAFTWQGKQYCWTRLPQGFLNSPALFNADVVDLLKEIPNVQVYVDDIYLSHDDPKEHVQQLEKVFQILLQAGYVVSLKKSEIGQKTVEFLGFNITKEGRGLTDTFKTKLLNITPPKDLKQLQSILGLLNFARNFIPNFAELVQPLYNLIAPAKGKYIEWSEENTKQLNMVIEALNTASNLEERLPEQRLVIKVNTSPSAGYVRYYNETGKKPIMYLNYVFSKAELKFSMLEKLLTTMHKALIKAMDLAMGQEILVYSPIVSMTKIQKTPLPERKALPIRWITWMTYLEDPRIQFHYDKTLPELKHIPDVYTSSQSPVKHPSQYEGVFYTDGSAIKSPDPTKSNNAGMGIVHATYKPEYQVLNQWSIPLGNHTAQMAEIAAVEFACKKALKIPGPVLVITDSFYVAESANKELPYWKSNGFVNNKKKPLKHISKWKSIAECLSMKPDITIQHEKGISLQIPVFILKGNALADKLATQGSYVVNAGKRTADGSEFEKRTADGSEFESPKKKAKVE

SEQ ID NO: 7167 - protein, 2092 aa, synthetic construct
MPAAKRVKLDGGDKKYSIGLDIGTNSVGWAVITDEYKVPSKKFKVLGNTDRHSIKKNLIGALLFDSGETAEATRLKRTARRRYTRRKNRICYLQEIFSNEMAKVDDSFFHRLEESFLVEEDKKHERHPIFGNIVDEVAYHEKYPTIYHLRKKLVDSTDKADLRLIYLALAHMIKFRGHFLIEGDLNPDNSDVDKLFIQLVQTYNQLFEENPINASGVDAKAILSARLSKSRRLENLIAQLPGEKKNGLFGNLIALSLGLTPNFKSNFDLAEDAKLQLSKDTYDDDLDNLLAQIGDQYADLFLAAKNLSDAILLSDILRVNTEITKAPLSASMIKRYDEHHQDLTLLKALVRQQLPEKYKEIFFDQSKNGYAGYIDGGASQEEFYKFIKPILEKMDGTEELLVKLNREDLLRKQRTFDNGSIPHQIHLGELHAILRRQEDFYPFLKDNREKIEKILTFRIPYYVGPLARGNSRFAWMTRKSEETITPWNFEEVVDKGASAQSFIERMTNFDKNLPNEKVLPKHSLLYEYFTVYNELTKVKYVTEGMRKPAFLSGEQKKAIVDLLFKTNRKVTVKQLKEDYFKKIECFDSVEISGVEDRFNASLGTYHDLLKIIKDKDFLDNEENEDILEDIVLTLTLFEDREMIEERLKTYAHLFDDKVMKQLKRRRYTGWGRLSRKLINGIRDKQSGKTILDFLKSDGFANRNFMQLIHDDSLTFKEDIQKAQVSGQGDSLHEHIANLAGSPAIKKGILQTVKVVDELVKVMGRHKPENIVIEMARENQTTQKGQKNSRERMKRIEEGIKELGSQILKEHPVENTQLQNEKLYLYYLQNGRDMYVDQELDINRLSDYDVDHIVPQSFLKDDSIDNKVLTRSDKARGKSDNVPSEEVVKKMKNYWRQLLNAKLITQRKFDNLTKAERGGLSELDKAGFIKRQLVETRQITKHVAQILDSRMNTKYDENDKLIREVKVITLKSKLVSDFRKDFQFYKVREINNYHHAHDAYLNAVVGTALIKKYPKLESEFVYGDYKVYDVRKMIAKSEQEIGKATAKYFFYSNIMNFFKTEITLANGEIRKRPLIETNGETGEIVWDKGRDFATVRKVLSMPQVNIVKKTEVQTGGFSKESILPKRNSDKLIARKKDWDPKKYGGFDSPTVAYSVLVVAKVEKGKSKKLKSVKELLGITIMERSSFEKNPIDFLEAKGYKEVKKDLIIKLPKYSLFELENGRKRMLASAGELQKGNELALPSKYVNFLYLASHYEKLKGSPEDNEQKQLFVEQHKHYLDEIIEQISEFSKRVILADANLDKVLSAYNKHRDKPIREQAENIIHLFTLTNLGAPAAFKYFDTTIDRKRYTSTKEVLDATLIHQSITGLYETRIDLSQLGGDGGPAPGGSGSSGGVLNLEEEYRLHEKPVPSSIDPSWLQLFPTVWAERAGMGLANQVPPVVVELRSGASPVAVRQYPMSKEAREGIRPHIQKFLDLGVLVPCRSPWNTPLLPVKKPGTNDYRPVQDLREINKRVQDIHPTVPNPYNLLSSLPPSYTWYSVLDLKDAFFCLRLHPNSQPLFAFEWKDPEKGNTGQLTWTRLPQGFKNSPTLFNEALHRDLAPFRALNPQVVLLQYVDDLLVAAPTYEDCKKGTQKLLQELSKLGYRVSAKKAQLCQREVTYLGYLLKEGKRWLTPARKATVMKIPVPTTPRQVREFLGTAGFCRLWIPGFASLAAPLYPLTKPSIPFIWTEEHQQAFDHIKKALLSAPALALPDLTKPFTLYIDERAGVARGVLTQTLGPWRRPVAYLSKKLDPVASGWPTCLKAVAAVALLLKDADKLTLGQNVTVIASHSLESIVRQPPDRWMTNARMTHYQSLLLNERVSFAPPAVLNPATLLPVESEATPVHRCSEILAEETGTRRDLEDQPLPGVPTWYTDGSSFITEGKRRAGAPIVDGKRTVWASSLPEGTSAQKAELVALTQALRLAEGKNINIYTDSRYAFATAHIHGAIYKQRGWLTSAGKDIKNKEEILALLEAIHLPRRVAIIHCPGHQRGSNPVATGNRRADEAAKQAALSTRVLAGTTKPAGKRTADGSEFEKRTADGSEFESPKKKAKVE

SEQ ID NO: 7168 - protein, 2216 aa, synthetic construct
MPAAKRVKLDGGDKKYSIGLDIGTNSVGWAVITDEYKVPSKKFKVLGNTDRHSIKKNLIGALLFDSGETAEATRLKRTARRRYTRRKNRICYLQEIFSNEMAKVDDSFFHRLEESFLVEEDKKHERHPIFGNIVDEVAYHEKYPTIYHLRKKLVDSTDKADLRLIYLALAHMIKFRGHFLIEGDLNPDNSDVDKLFIQLVQTYNQLFEENPINASGVDAKAILSARLSKSRRLENLIAQLPGEKKNGLFGNLIALSLGLTPNFKSNFDLAEDAKLQLSKDTYDDDLDNLLAQIGDQYADLFLAAKNLSDAILLSDILRVNTEITKAPLSASMIKRYDEHHQDLTLLKALVRQQLPEKYKEIFFDQSKNGYAGYIDGGASQEEFYKFIKPILEKMDGTEELLVKLNREDLLRKQRTFDNGSIPHQIHLGELHAILRRQEDFYPFLKDNREKIEKILTFRIPYYVGPLARGNSRFAWMTRKSEETITPWNFEEVVDKGASAQSFIERMTNFDKNLPNEKVLPKHSLLYEYFTVYNELTKVKYVTEGMRKPAFLSGEQKKAIVDLLFKTNRKVTVKQLKEDYFKKIECFDSVEISGVEDRFNASLGTYHDLLKIIKDKDFLDNEENEDILEDIVLTLTLFEDREMIEERLKTYAHLFDDKVMKQLKRRRYTGWGRLSRKLINGIRDKQSGKTILDFLKSDGFANRNFMQLIHDDSLTFKEDIQKAQVSGQGDSLHEHIANLAGSPAIKKGILQTVKVVDELVKVMGRHKPENIVIEMARENQTTQKGQKNSRERMKRIEEGIKELGSQILKEHPVENTQLQNEKLYLYYLQNGRDMYVDQELDINRLSDYDVDHIVPQSFLKDDSIDNKVLTRSDKARGKSDNVPSEEVVKKMKNYWRQLLNAKLITQRKFDNLTKAERGGLSELDKAGFIKRQLVETRQITKHVAQILDSRMNTKYDENDKLIREVKVITLKSKLVSDFRKDFQFYKVREINNYHHAHDAYLNAVVGTALIKKYPKLESEFVYGDYKVYDVRKMIAKSEQEIGKATAKYFFYSNIMNFFKTEITLANGEIRKRPLIETNGETGEIVWDKGRDFATVRKVLSMPQVNIVKKTEVQTGGFSKESILPKRNSDKLIARKKDWDPKKYGGFDSPTVAYSVLVVAKVEKGKSKKLKSVKELLGITIMERSSFEKNPIDFLEAKGYKEVKKDLIIKLPKYSLFELENGRKRMLASAGELQKGNELALPSKYVNFLYLASHYEKLKGSPEDNEQKQLFVEQHKHYLDEIIEQISEFSKRVILADANLDKVLSAYNKHRDKPIREQAENIIHLFTLTNLGAPAAFKYFDTTIDRKRYTSTKEVLDATLIHQSITGLYETRIDLSQLGGDGGPAPGGSGSSGGTLGDQGSRGSDPLPEPRVTLTVEGIPTEFLVNTGAEHSVLTKPMGKMGSKRTVVAGATGSKVYPWTTKRLLKIGQKQVTHSFLVIPECPAPLLGRDLLTKLKAQIQFSTEGPQVTWEDRPAMCLVLNLEEEYRLHEKPVPPSIDPSWLQLFPMVWAEKAGMGLANQVPPVVVELKSDASPVAVRQYPMSKEAREGIRPHIQRFLDLGILVPCQSPWNTPLLPVKKPGTNDYRPVQDLREVNKRVQDIHPTVPNPYNLLSSLPPSHTWYSVLDLKDAFFCLKLHPNSQPLFAFEWRDPEKGNTGQLTWTRLPQGFKNSPTLFDEALHRDLASFRALNPQVVMLQYVDDLLVAAPTYRDCKEGTRRLLQELSKLGYRVSAKKAQLCREEVTYLGYLLKGGKRWLTPARKATVMKIPTPTTPRQVREFLGTAGFCRLWIPGFASLAAPLYPLTREKVPFTWTEAHQEAFGRIKEALLSAPALALPDLTKPFALYVDEKEGVARGVLTQTLGPWRRPVAYLSKKLDPVASGWPTCLKAIAAVALLLKDADKLTLGQNVLVIAPHNLESIVRQPPDRWMTNARMTHYQSLLLNERVSFAPPAILNPATLLPVESDDTPIHICSEILAEETGTRPDLRDQPLPGVPAWYTDGSSFIMDGRRQAGAAIVDNKRTVWASNLPEGTSAQKAELIALTQALRLAEGKSINIYTDSRYAFATAHVHGAIYKQRGLLTSAGKDIKNKEEILALLEAIHLPKRVAIIHCPGHQRGTDPVATGNRKADEAAKQAAQSTRILTETTKNAGKRTADGSEFEKRTADGSEFESPKKKAKVE

SEQ ID NO: 7169 - protein, 2094 aa, synthetic construct
MPAAKRVKLDGGDKKYSIGLDIGTNSVGWAVITDEYKVPSKKFKVLGNTDRHSIKKNLIGALLFDSGETAEATRLKRTARRRYTRRKNRICYLQEIFSNEMAKVDDSFFHRLEESFLVEEDKKHERHPIFGNIVDEVAYHEKYPTIYHLRKKLVDSTDKADLRLIYLALAHMIKFRGHFLIEGDLNPDNSDVDKLFIQLVQTYNQLFEENPINASGVDAKAILSARLSKSRRLENLIAQLPGEKKNGLFGNLIALSLGLTPNFKSNFDLAEDAKLQLSKDTYDDDLDNLLAQIGDQYADLFLAAKNLSDAILLSDILRVNTEITKAPLSASMIKRYDEHHQDLTLLKALVRQQLPEKYKEIFFDQSKNGYAGYIDGGASQEEFYKFIKPILEKMDGTEELLVKLNREDLLRKQRTFDNGSIPHQIHLGELHAILRRQEDFYPFLKDNREKIEKILTFRIPYYVGPLARGNSRFAWMTRKSEETITPWNFEEVVDKGASAQSFIERMTNFDKNLPNEKVLPKHSLLYEYFTVYNELTKVKYVTEGMRKPAFLSGEQKKAIVDLLFKTNRKVTVKQLKEDYFKKIECFDSVEISGVEDRFNASLGTYHDLLKIIKDKDFLDNEENEDILEDIVLTLTLFEDREMIEERLKTYAHLFDDKVMKQLKRRRYTGWGRLSRKLINGIRDKQSGKTILDFLKSDGFANRNFMQLIHDDSLTFKEDIQKAQVSGQGDSLHEHIANLAGSPAIKKGILQTVKVVDELVKVMGRHKPENIVIEMARENQTTQKGQKNSRERMKRIEEGIKELGSQILKEHPVENTQLQNEKLYLYYLQNGRDMYVDQELDINRLSDYDVDHIVPQSFLKDDSIDNKVLTRSDKARGKSDNVPSEEVVKKMKNYWRQLLNAKLITQRKFDNLTKAERGGLSELDKAGFIKRQLVETRQITKHVAQILDSRMNTKYDENDKLIREVKVITLKSKLVSDFRKDFQFYKVREINNYHHAHDAYLNAVVGTALIKKYPKLESEFVYGDYKVYDVRKMIAKSEQEIGKATAKYFFYSNIMNFFKTEITLANGEIRKRPLIETNGETGEIVWDKGRDFATVRKVLSMPQVNIVKKTEVQTGGFSKESILPKRNSDKLIARKKDWDPKKYGGFDSPTVAYSVLVVAKVEKGKSKKLKSVKELLGITIMERSSFEKNPIDFLEAKGYKEVKKDLIIKLPKYSLFELENGRKRMLASAGELQKGNELALPSKYVNFLYLASHYEKLKGSPEDNEQKQLFVEQHKHYLDEIIEQISEFSKRVILADANLDKVLSAYNKHRDKPIREQAENIIHLFTLTNLGAPAAFKYFDTTIDRKRYTSTKEVLDATLIHQSITGLYETRIDLSQLGGDGGPAPGGSGSSGGLGIEDEYRLHETSTEPDVSLGSTWLSDFPQAWAETGGMGLAVRQAPLIIPLKATSTPVSIQQYPMSHEARLGIKPHIQRLLDQGILVPCQSPWNTPLLPVKKPGTNDYRPVQDLREVNKRVEDIHPTVPNPYNLLSGLPPSHQWYTVLDLKDAFFCLRLHPTSQPLFAFEWRDPGMGISGQLTWTRLPQGFKNSPTLFNEALHRDLADFRIQHPDLILLQYVDDILLAATSELDCQQGTRALLQTLGDLGYRASAKKAQICQKQVKYLGYLLREGQRWLTEARKETVMGQPVPKTPRQLREFLGKAGFCRLFIPGFAEMAAPLYPLTKPGTLFSWGPDQQKAYQEIKQALLTAPALGLPDLTKPFELFVDEKQGYAKGVLTQKLGPWRRPVAYLSKKLDPVAAGWPPCLRMVAAIAVLTKDAGKLTMGQPLVILAPHAVEALVKQPPDRWLSNARMTHYQAMLLDTDRVQFGPVVALNPATLLPLPEEGAPHDCLEILAETHGTRPDLTDQPIPDADHTWYTDGSSFLQEGQRKAGAAVTTETEVIWAGALPAGTSAQRAELIALTQALKMAEGKRLNVYTDSRYAFATAHIHGEIYRRRGWLTSEGREIKNKSEILALLKALFLPKRLSIIHCLGHQKGDSAEARGNRLADQAAREAAIKTPPDTSTLLIAGKRTADGSEFEKRTADGSEFESPKKKAKVE

SEQ ID NO: 7170 - protein, 2094 aa, synthetic construct
MPAAKRVKLDGGDKKYSIGLDIGTNSVGWAVITDEYKVPSKKFKVLGNTDRHSIKKNLIGALLFDSGETAEATRLKRTARRRYTRRKNRICYLQEIFSNEMAKVDDSFFHRLEESFLVEEDKKHERHPIFGNIVDEVAYHEKYPTIYHLRKKLVDSTDKADLRLIYLALAHMIKFRGHFLIEGDLNPDNSDVDKLFIQLVQTYNQLFEENPINASGVDAKAILSARLSKSRRLENLIAQLPGEKKNGLFGNLIALSLGLTPNFKSNFDLAEDAKLQLSKDTYDDDLDNLLAQIGDQYADLFLAAKNLSDAILLSDILRVNTEITKAPLSASMIKRYDEHHQDLTLLKALVRQQLPEKYKEIFFDQSKNGYAGYIDGGASQEEFYKFIKPILEKMDGTEELLVKLNREDLLRKQRTFDNGSIPHQIHLGELHAILRRQEDFYPFLKDNREKIEKILTFRIPYYVGPLARGNSRFAWMTRKSEETITPWNFEEVVDKGASAQSFIERMTNFDKNLPNEKVLPKHSLLYEYFTVYNELTKVKYVTEGMRKPAFLSGEQKKAIVDLLFKTNRKVTVKQLKEDYFKKIECFDSVEISGVEDRFNASLGTYHDLLKIIKDKDFLDNEENEDILEDIVLTLTLFEDREMIEERLKTYAHLFDDKVMKQLKRRRYTGWGRLSRKLINGIRDKQSGKTILDFLKSDGFANRNFMQLIHDDSLTFKEDIQKAQVSGQGDSLHEHIANLAGSPAIKKGILQTVKVVDELVKVMGRHKPENIVIEMARENQTTQKGQKNSRERMKRIEEGIKELGSQILKEHPVENTQLQNEKLYLYYLQNGRDMYVDQELDINRLSDYDVDHIVPQSFLKDDSIDNKVLTRSDKARGKSDNVPSEEVVKKMKNYWRQLLNAKLITQRKFDNLTKAERGGLSELDKAGFIKRQLVETRQITKHVAQILDSRMNTKYDENDKLIREVKVITLKSKLVSDFRKDFQFYKVREINNYHHAHDAYLNAVVGTALIKKYPKLESEFVYGDYKVYDVRKMIAKSEQEIGKATAKYFFYSNIMNFFKTEITLANGEIRKRPLIETNGETGEIVWDKGRDFATVRKVLSMPQVNIVKKTEVQTGGFSKESILPKRNSDKLIARKKDWDPKKYGGFDSPTVAYSVLVVAKVEKGKSKKLKSVKELLGITIMERSSFEKNPIDFLEAKGYKEVKKDLIIKLPKYSLFELENGRKRMLASAGELQKGNELALPSKYVNFLYLASHYEKLKGSPEDNEQKQLFVEQHKHYLDEIIEQISEFSKRVILADANLDKVLSAYNKHRDKPIREQAENIIHLFTLTNLGAPAAFKYFDTTIDRKRYTSTKEVLDATLIHQSITGLYETRIDLSQLGGDGGPAPGGSGSSGGTLGIEDEYRLHETSTEPDVSLGSTWLSDFPQAWAETGGMGLAVRQAPLIIPLKATSTPVSIQQYPMSHEARLGIKPHIQRLLDQGILVPCQSPWNTPLLPVKKPGTNDYRPVQDLREVNKRVEDIHPTVPNPYNLLSGLPPSHQWYTVLDLKDAFFCLRLHPTSQPLFAFEWRDPGMGISGQLTWTRLPQGFKNSPTLFNEALHRDLADFRIQHPDLILLQYVDDILLAATSELDCQQGTRALLQTLGDLGYRASAKKAQICQKQVKYLGYLLREGQRWLTEARKETVMGQPVPKTPRQLREFLGTAGFCRLWIPGFAEMAAPLYPLTKPGTLFSWGPDQQKAYQEIKQALLTAPALGLPDLTKPFELFVDEKQGYAKGVLTQKLGPWRRPVAYLSKKLDPVAAGWPPCLRMVAAIAVLTKDAGKLTMGQPLVILAPHAVEALVKQPPDRWLSNARMTHYQAMLLDTDRVQFGPVVALNPATLLPLPEEGAPHDCLEILAETHGTRPDLTDQPIPDADHTWYTDGSSFLQEGQRKAGAAVTTETEVIWAGALPAGTSAQRAELIALTQALKMAEGKRLNVYTDSRYAFATAHIHGEIYRRRGWLTSEGREIKNKSEILALLKALFLPKRLSIIHCLGHQKGDSAEARGNRLADQAAREAAIKTPPDTSTLLAGKRTADGSEFEKRTADGSEFESPKKKAKVE

SEQ ID NO: 7171 - protein, 2094 aa, synthetic construct
MPAAKRVKLDGGDKKYSIGLDIGTNSVGWAVITDEYKVPSKKFKVLGNTDRHSIKKNLIGALLFDSGETAEATRLKRTARRRYTRRKNRICYLQEIFSNEMAKVDDSFFHRLEESFLVEEDKKHERHPIFGNIVDEVAYHEKYPTIYHLRKKLVDSTDKADLRLIYLALAHMIKFRGHFLIEGDLNPDNSDVDKLFIQLVQTYNQLFEENPINASGVDAKAILSARLSKSRRLENLIAQLPGEKKNGLFGNLIALSLGLTPNFKSNFDLAEDAKLQLSKDTYDDDLDNLLAQIGDQYADLFLAAKNLSDAILLSDILRVNTEITKAPLSASMIKRYDEHHQDLTLLKALVRQQLPEKYKEIFFDQSKNGYAGYIDGGASQEEFYKFIKPILEKMDGTEELLVKLNREDLLRKQRTFDNGSIPHQIHLGELHAILRRQEDFYPFLKDNREKIEKILTFRIPYYVGPLARGNSRFAWMTRKSEETITPWNFEEVVDKGASAQSFIERMTNFDKNLPNEKVLPKHSLLYEYFTVYNELTKVKYVTEGMRKPAFLSGEQKKAIVDLLFKTNRKVTVKQLKEDYFKKIECFDSVEISGVEDRFNASLGTYHDLLKIIKDKDFLDNEENEDILEDIVLTLTLFEDREMIEERLKTYAHLFDDKVMKQLKRRRYTGWGRLSRKLINGIRDKQSGKTILDFLKSDGFANRNFMQLIHDDSLTFKEDIQKAQVSGQGDSLHEHIANLAGSPAIKKGILQTVKVVDELVKVMGRHKPENIVIEMARENQTTQKGQKNSRERMKRIEEGIKELGSQILKEHPVENTQLQNEKLYLYYLQNGRDMYVDQELDINRLSDYDVDHIVPQSFLKDDSIDNKVLTRSDKARGKSDNVPSEEVVKKMKNYWRQLLNAKLITQRKFDNLTKAERGGLSELDKAGFIKRQLVETRQITKHVAQILDSRMNTKYDENDKLIREVKVITLKSKLVSDFRKDFQFYKVREINNYHHAHDAYLNAVVGTALIKKYPKLESEFVYGDYKVYDVRKMIAKSEQEIGKATAKYFFYSNIMNFFKTEITLANGEIRKRPLIETNGETGEIVWDKGRDFATVRKVLSMPQVNIVKKTEVQTGGFSKESILPKRNSDKLIARKKDWDPKKYGGFDSPTVAYSVLVVAKVEKGKSKKLKSVKELLGITIMERSSFEKNPIDFLEAKGYKEVKKDLIIKLPKYSLFELENGRKRMLASAGELQKGNELALPSKYVNFLYLASHYEKLKGSPEDNEQKQLFVEQHKHYLDEIIEQISEFSKRVILADANLDKVLSAYNKHRDKPIREQAENIIHLFTLTNLGAPAAFKYFDTTIDRKRYTSTKEVLDATLIHQSITGLYETRIDLSQLGGDGGPAPGGSGSSGGTLNIEDEYRLHETSKEPDVSLGSTWLSDFPQAWAETGGMGLAVRQAPLIIPLKATSTPVSIKQYPMSQEARLGIKPHIQRLLDQGILVPCQSPWNTPLLPVKKPGTNDYRPVQDLREVNKRVEDIHPTVPNPYNLLSGLPPSHQWYTVLDLKDAFFCLRLHPTSQPLFAFEWRDPEMGISGQLTWTRLPQGFKNSPTLFNEALHRDLAGFRIQHPDLILLQYVDDLLLAATSELDCQQGTRALLQTLGDLGYRASAKKAQICQKQVKYLGYLLKEGQRWLTEARKETVMGQPIPKTPRQLREFLGTAGFCRLWIPGFAEMAAPLYPLTKPGTLFNWGPDQQKAFQEIKQALLTAPALGLPDLTKPFELFVDEKQGYAKGVLTQKLGPWRRPVAYLSKKLDPVAAGWPPCLRMVAAIAVLTKDAGKLTMGQPLVILAPHAVEALVKQPPDRWLSNARMTHYQALLLDTDRVQFGPVVALNPATLLPLPEEGLQHDCLDILAEAHGTRSDLMDQPLPDADHTWYTDGSSFLQEGQRKAGAAVTTETEVIWARALPAGTSAQRAELIALTQALKMAEGKKLNVYTDSRYAFATAHIHGEIYRRRGWLTSEGKEIKNKDEILALLKALFLPKRLSIIHCPGHQKGNSAEARGNRMADQAAREVATRETPETSTLLAGKRTADGSEFEKRTADGSEFESPKKKAKVE

SEQ ID NO: 7172 - protein, 2114 aa, synthetic construct
MPAAKRVKLDGGDKKYSIGLDIGTNSVGWAVITDEYKVPSKKFKVLGNTDRHSIKKNLIGALLFDSGETAEATRLKRTARRRYTRRKNRICYLQEIFSNEMAKVDDSFFHRLEESFLVEEDKKHERHPIFGNIVDEVAYHEKYPTIYHLRKKLVDSTDKADLRLIYLALAHMIKFRGHFLIEGDLNPDNSDVDKLFIQLVQTYNQLFEENPINASGVDAKAILSARLSKSRRLENLIAQLPGEKKNGLFGNLIALSLGLTPNFKSNFDLAEDAKLQLSKDTYDDDLDNLLAQIGDQYADLFLAAKNLSDAILLSDILRVNTEITKAPLSASMIKRYDEHHQDLTLLKALVRQQLPEKYKEIFFDQSKNGYAGYIDGGASQEEFYKFIKPILEKMDGTEELLVKLNREDLLRKQRTFDNGSIPHQIHLGELHAILRRQEDFYPFLKDNREKIEKILTFRIPYYVGPLARGNSRFAWMTRKSEETITPWNFEEVVDKGASAQSFIERMTNFDKNLPNEKVLPKHSLLYEYFTVYNELTKVKYVTEGMRKPAFLSGEQKKAIVDLLFKTNRKVTVKQLKEDYFKKIECFDSVEISGVEDRFNASLGTYHDLLKIIKDKDFLDNEENEDILEDIVLTLTLFEDREMIEERLKTYAHLFDDKVMKQLKRRRYTGWGRLSRKLINGIRDKQSGKTILDFLKSDGFANRNFMQLIHDDSLTFKEDIQKAQVSGQGDSLHEHIANLAGSPAIKKGILQTVKVVDELVKVMGRHKPENIVIEMARENQTTQKGQKNSRERMKRIEEGIKELGSQILKEHPVENTQLQNEKLYLYYLQNGRDMYVDQELDINRLSDYDVDHIVPQSFLKDDSIDNKVLTRSDKARGKSDNVPSEEVVKKMKNYWRQLLNAKLITQRKFDNLTKAERGGLSELDKAGFIKRQLVETRQITKHVAQILDSRMNTKYDENDKLIREVKVITLKSKLVSDFRKDFQFYKVREINNYHHAHDAYLNAVVGTALIKKYPKLESEFVYGDYKVYDVRKMIAKSEQEIGKATAKYFFYSNIMNFFKTEITLANGEIRKRPLIETNGETGEIVWDKGRDFATVRKVLSMPQVNIVKKTEVQTGGFSKESILPKRNSDKLIARKKDWDPKKYGGFDSPTVAYSVLVVAKVEKGKSKKLKSVKELLGITIMERSSFEKNPIDFLEAKGYKEVKKDLIIKLPKYSLFELENGRKRMLASAGELQKGNELALPSKYVNFLYLASHYEKLKGSPEDNEQKQLFVEQHKHYLDEIIEQISEFSKRVILADANLDKVLSAYNKHRDKPIREQAENIIHLFTLTNLGAPAAFKYFDTTIDRKRYTSTKEVLDATLIHQSITGLYETRIDLSQLGGDGGPAPGGSGSSGGTLNIEDEYRLHETSKEPDVSLGSTWLSDFPQAWAETGGMGLAVRQAPLIIPLKATSTPVSIKQYPMSQEARLGIKPHIQRLLDQGILVPCQSPWNTPLLPVKKPGTNDYRPVQDLREVNKRVEDIHPTVPNPYNLLSGLPPSHQWYTVLDLKDAFFCLRLHPTSQPLFAFEWRDPEMGISGQLTWTRLPQGFKNSPTLFNEALHRDLADFRIQHPDLILLQYVDDLLLAATSELDCQQGTRALLQTLGNLGYRASAKKAQICQKQVKYLGYLLKEGQRWLTEARKETVMGQPTPKTPRQLREFLGKAGFCRLFIPGFAEMAAPLYPLTKPGTLFNWGPDQQKAYQEIKQALLTAPALGLPDLTKPFELFVDEKQGYAKGVLTQKLGPWRRPVAYLSKKLDPVAAGWPPCLRMVAAIAVLTKDAGKLTMGQPLVILAPHAVEALVKQPPDRWLSNARMTHYQALLLDTDRVQFGPVVALNPATLLPLPEEGLQHNCLDILAEAHGTRPDLTDQPLPDADHTWYTDGSSLLQEGQRKAGAAVTTETEVIWAKALPAGTSAQRAELIALTQALKMAEGKKLNVYTDSRYAFATAHIHGEIYRRRGWLTSEGKEIKNKDEILALLKALFLPKRLSIIHCPGHQKGHSAEARGNRMADQAARKAAITETPDTSTLLIENSSPSGGSKRTADGSEFEAGKRTADGSEFEKRTADGSEFESPKKKAKVE

SEQ ID NO: 7173 - protein, 2094 aa, synthetic construct
MPAAKRVKLDGGDKKYSIGLDIGTNSVGWAVITDEYKVPSKKFKVLGNTDRHSIKKNLIGALLFDSGETAEATRLKRTARRRYTRRKNRICYLQEIFSNEMAKVDDSFFHRLEESFLVEEDKKHERHPIFGNIVDEVAYHEKYPTIYHLRKKLVDSTDKADLRLIYLALAHMIKFRGHFLIEGDLNPDNSDVDKLFIQLVQTYNQLFEENPINASGVDAKAILSARLSKSRRLENLIAQLPGEKKNGLFGNLIALSLGLTPNFKSNFDLAEDAKLQLSKDTYDDDLDNLLAQIGDQYADLFLAAKNLSDAILLSDILRVNTEITKAPLSASMIKRYDEHHQDLTLLKALVRQQLPEKYKEIFFDQSKNGYAGYIDGGASQEEFYKFIKPILEKMDGTEELLVKLNREDLLRKQRTFDNGSIPHQIHLGELHAILRRQEDFYPFLKDNREKIEKILTFRIPYYVGPLARGNSRFAWMTRKSEETITPWNFEEVVDKGASAQSFIERMTNFDKNLPNEKVLPKHSLLYEYFTVYNELTKVKYVTEGMRKPAFLSGEQKKAIVDLLFKTNRKVTVKQLKEDYFKKIECFDSVEISGVEDRFNASLGTYHDLLKIIKDKDFLDNEENEDILEDIVLTLTLFEDREMIEERLKTYAHLFDDKVMKQLKRRRYTGWGRLSRKLINGIRDKQSGKTILDFLKSDGFANRNFMQLIHDDSLTFKEDIQKAQVSGQGDSLHEHIANLAGSPAIKKGILQTVKVVDELVKVMGRHKPENIVIEMARENQTTQKGQKNSRERMKRIEEGIKELGSQILKEHPVENTQLQNEKLYLYYLQNGRDMYVDQELDINRLSDYDVDHIVPQSFLKDDSIDNKVLTRSDKARGKSDNVPSEEVVKKMKNYWRQLLNAKLITQRKFDNLTKAERGGLSELDKAGFIKRQLVETRQITKHVAQILDSRMNTKYDENDKLIREVKVITLKSKLVSDFRKDFQFYKVREINNYHHAHDAYLNAVVGTALIKKYPKLESEFVYGDYKVYDVRKMIAKSEQEIGKATAKYFFYSNIMNFFKTEITLANGEIRKRPLIETNGETGEIVWDKGRDFATVRKVLSMPQVNIVKKTEVQTGGFSKESILPKRNSDKLIARKKDWDPKKYGGFDSPTVAYSVLVVAKVEKGKSKKLKSVKELLGITIMERSSFEKNPIDFLEAKGYKEVKKDLIIKLPKYSLFELENGRKRMLASAGELQKGNELALPSKYVNFLYLASHYEKLKGSPEDNEQKQLFVEQHKHYLDEIIEQISEFSKRVILADANLDKVLSAYNKHRDKPIREQAENIIHLFTLTNLGAPAAFKYFDTTIDRKRYTSTKEVLDATLIHQSITGLYETRIDLSQLGGDGGPAPGGSGSSGGTLNIEDEHRLHETSKEPDVSLGSTWLSDFPQAWAETGGMGLAVRQAPLIIPLKATSTPVSIKQYPMSQEARLGIKPHIQRLLDQGILVPCQSPWNTPLLPVKKPGTNDYRPVQDLREVNKRVEDIHPTVPNPYNLLSGLPPSHQWYTVLDLKDAFFCLRLHPTSQPLFAFEWRDPEMGISGQLTWTRLPQGFKNSPTLFNEALHRDLADFRIQHPDLILLQYVDDLLLAATSELDCQQGTRALLQTLGNLGYRASAKKAQICQKQVKYLGYLLKEGQRWLTEARKETVMGQPTPKTPRQLREFLGTAGFCRLWIPGFAEMAAPLYPLTKPGTLFNWGPDQQKAYQEIKQALLTAPALGLPDLTKPFELFVDEKQGYAKGVLTQKLGPWRRPVAYLSKKLDPVAAGWPPCLRMVAAIAVLTKDAGKLTMGQPLVILAPHAVEALVKQPPDRWLSNARMTHYQALLLDTDRVQFGPVVALNPATLLPLPEEGLQHNCLDILAEAHGTRPDLTDQPLPDADHTWYTDGSSLLQEGQRKAGAAVTTETEVIWAKALPAGTSAQRAELIALTQALKMAEGKKLNVYTDSRYAFATAHIHGEIYRRRGWLTSEGKEIKNKDEILALLKALFLPKRLSIIHCPGHQKGHSAEARGNRMADQAARKAAITETPDTSTLLAGKRTADGSEFEKRTADGSEFESPKKKAKVE

SEQ ID NO: 7174 - protein, 2114 aa, synthetic construct; identical to SEQ ID NO: 7172

SEQ ID NO: 7175 - protein, 2094 aa, synthetic construct
MPAAKRVKLDGGDKKYSIGLDIGTNSVGWAVITDEYKVPSKKFKVLGNTDRHSIKKNLIGALLFDSGETAEATRLKRTARRRYTRRKNRICYLQEIFSNEMAKVDDSFFHRLEESFLVEEDKKHERHPIFGNIVDEVAYHEKYPTIYHLRKKLVDSTDKADLRLIYLALAHMIKFRGHFLIEGDLNPDNSDVDKLFIQLVQTYNQLFEENPINASGVDAKAILSARLSKSRRLENLIAQLPGEKKNGLFGNLIALSLGLTPNFKSNFDLAEDAKLQLSKDTYDDDLDNLLAQIGDQYADLFLAAKNLSDAILLSDILRVNTEITKAPLSASMIKRYDEHHQDLTLLKALVRQQLPEKYKEIFFDQSKNGYAGYIDGGASQEEFYKFIKPILEKMDGTEELLVKLNREDLLRKQRTFDNGSIPHQIHLGELHAILRRQEDFYPFLKDNREKIEKILTFRIPYYVGPLARGNSRFAWMTRKSEETITPWNFEEVVDKGASAQSFIERMTNFDKNLPNEKVLPKHSLLYEYFTVYNELTKVKYVTEGMRKPAFLSGEQKKAIVDLLFKTNRKVTVKQLKEDYFKKIECFDSVEISGVEDRFNASLGTYHDLLKIIKDKDFLDNEENEDILEDIVLTLTLFEDREMIEERLKTYAHLFDDKVMKQLKRRRYTGWGRLSRKLINGIRDKQSGKTILDFLKSDGFANRNFMQLIHDDSLTFKEDIQKAQVSGQGDSLHEHIANLAGSPAIKKGILQTVKVVDELVKVMGRHKPENIVIEMARENQTTQKGQKNSRERMKRIEEGIKELGSQILKEHPVENTQLQNEKLYLYYLQNGRDMYVDQELDINRLSDYDVDHIVPQSFLKDDSIDNKVLTRSDKARGKSDNVPSEEVVKKMKNYWRQLLNAKLITQRKFDNLTKAERGGLSELDKAGFIKRQLVETRQITKHVAQILDSRMNTKYDENDKLIREVKVITLKSKLVSDFRKDFQFYKVREINNYHHAHDAYLNAVVGTALIKKYPKLESEFVYGDYKVYDVRKMIAKSEQEIGKATAKYFFYSNIMNFFKTEITLANGEIRKRPLIETNGETGEIVWDKGRDFATVRKVLSMPQVNIVKKTEVQTGGFSKESILPKRNSDKLIARKKDWDPKKYGGFDSPTVAYSVLVVAKVEKGKSKKLKSVKELLGITIMERSSFEKNPIDFLEAKGYKEVKKDLIIKLPKYSLFELENGRKRMLASAGELQKGNELALPSKYVNFLYLASHYEKLKGSPEDNEQKQLFVEQHKHYLDEIIEQISEFSKRVILADANLDKVLSAYNKHRDKPIREQAENIIHLFTLTNLGAPAAFKYFDTTIDRKRYTSTKEVLDATLIHQSITGLYETRIDLSQLGGDGGPAPGGSGSSGGTLNIEDEHRLHETSKEPDVSLGSTWLSDFPQAWAETGGMGLAVRQAPLIIPLKATSTPVSIKQYPMSQEARLGIKPHIQRLLDQGILVPCQSPWNTPLLPVKKPGTNDYRPVQDLREVNKRVEDIHPTVPNPYNLLSGLPPSHQWYTVLDLKDAFFCLRLHPTSQPLFAFEWRDPEMGISGQLTWTRLPQGFKNSPTLFDEALHRDLADFRIQHPDLILLQYVDDLLLAATSELDCQQGTRALLQTLGNLGYRASAKKAQICQKQVKYLGYLLKEGQRWLTEARKETVMGQPTPKTPRQLREFLGTAGFCRLWIPGFAEMAAPLYPLTKTGTLFNWGPDQQKAYQEIKQALLTAPALGLPDLTKPFELFVDEKQGYAKGVLTQKLGPWRRPVAYLSKKLDPVAAGWPPCLRMVAAIAVLTKDAGKLTMGQPLVILAPHAVEALVKQPPDRWLSNARMTHYQALLLDTDRVQFGPVVALNPATLLPLPEEGLQHNCLDILAEAHGTRPDLTDQPLPDADHTWYTDGSSLLQEGQRKAGAAVTTETEVIWAKALPAGTSAQRAELIALTQALKMAEGKKLNVYTDSRYAFATAHIHGEIYRRRGLLTSEGKEIKNKDEILALLKALFLPKRLSIIHCPGHQKGHSAEARGNRMADQAARKAAITETPDTSTLLAGKRTADGSEFEKRTADGSEFESPKKKAKVE

SEQ ID NO: 7176 - protein, 2094 aa, synthetic construct; identical to SEQ ID NO: 7173

SEQ ID NO: 7177 - protein, 2085 aa, synthetic construct
MPAAKRVKLDGGDKKYSIGLDIGTNSVGWAVITDEYKVPSKKFKVLGNTDRHSIKKNLIGALLFDSGETAEATRLKRTARRRYTRRKNRICYLQEIFSNEMAKVDDSFFHRLEESFLVEEDKKHERHPIFGNIVDEVAYHEKYPTIYHLRKKLVDSTDKADLRLIYLALAHMIKFRGHFLIEGDLNPDNSDVDKLFIQLVQTYNQLFEENPINASGVDAKAILSARLSKSRRLENLIAQLPGEKKNGLFGNLIALSLGLTPNFKSNFDLAEDAKLQLSKDTYDDDLDNLLAQIGDQYADLFLAAKNLSDAILLSDILRVNTEITKAPLSASMIKRYDEHHQDLTLLKALVRQQLPEKYKEIFFDQSKNGYAGYIDGGASQEEFYKFIKPILEKMDGTEELLVKLNREDLLRKQRTFDNGSIPHQIHLGELHAILRRQEDFYPFLKDNREKIEKILTFRIPYYVGPLARGNSRFAWMTRKSEETITPWNFEEVVDKGASAQSFIERMTNFDKNLPNEKVLPKHSLLYEYFTVYNELTKVKYVTEGMRKPAFLSGEQKKAIVDLLFKTNRKVTVKQLKEDYFKKIECFDSVEISGVEDRFNASLGTYHDLLKIIKDKDFLDNEENEDILEDIVLTLTLFEDREMIEERLKTYAHLFDDKVMKQLKRRRYTGWGRLSRKLINGIRDKQSGKTILDFLKSDGFANRNFMQLIHDDSLTFKEDIQKAQVSGQGDSLHEHIANLAGSPAIKKGILQTVKVVDELVKVMGRHKPENIVIEMARENQTTQKGQKNSRERMKRIEEGIKELGSQILKEHPVENTQLQNEKLYLYYLQNGRDMYVDQELDINRLSDYDVDHIVPQSFLKDDSIDNKVLTRSDKARGKSDNVPSEEVVKKMKNYWRQLLNAKLITQRKFDNLTKAERGGLSELDKAGFIKRQLVETRQITKHVAQILDSRMNTKYDENDKLIREVKVITLKSKLVSDFRKDFQFYKVREINNYHHAHDAYLNAVVGTALIKKYPKLESEFVYGDYKVYDVRKMIAKSEQEIGKATAKYFFYSNIMNFFKTEITLANGEIRKRPLIETNGETGEIVWDKGRDFATVRKVLSMPQVNIVKKTEVQTGGFSKESILPKRNSDKLIARKKDWDPKKYGGFDSPTVAYSVLVVAKVEKGKSKKLKSVKELLGITIMERSSFEKNPIDFLEAKGYKEVKKDLIIKLPKYSLFELENGRKRMLASAGELQKGNELALPSKYVNFLYLASHYEKLKGSPEDNEQKQLFVEQHKHYLDEIIEQISEFSKRVILADANLDKVLSAYNKHRDKPIREQAENIIHLFTLTNLGAPAAFKYFDTTIDRKRYTSTKEVLDATLIHQSITGLYETRIDLSQLGGDGGPAPGGSGSSGGIPWLMKKPLQLTTLVPLQEYEERLLKQTMLTGSYKEKLQSLFLKYDALWQHWENQVGHRRIKPHHIATGTVNPRPQKQYPINPKAKASIQTVINDLLKQGVLIQQNSIMNTPVYPVPKPDGKWRMVLDYREVNKTIPLIAAQNQHSAGILSSIFRGKYKTTLDLSNGFWAHSITPESYWLTAFTWLGQQYCWTRLPQGFLNSPALFNADVVDLLKEVPNVQVYVDDIYISHDDPREHLEQLEKVFSLLLNAGYVVSLKKSEIAQHEVEFLGFNITKEGRGLTETFKQKLLNITPPRDLKQLQSILGKLNFARNFIPNFSELVKPLYNIIATAPGKYITWTTDNSQQLQNIISMLNSAENLEERNPEVRLIMKVNTSPSAGYIRFYNEFAKRPIMYLNYVYTKAEVKFTNTEKLLTTIHKGLIKALDLGMGQEILVYSPIVSMTKIQKTPLPERKALPIRWITWMSYLEDPRIQFHYDKTLPELQQVPTVTDDIIAKIKHPSEFSMVFYTDGSAIKHPNVNKSHNAGMGIAQVQFKPEFTVINTWSIPLGDHTAQLAEVAAVEFACKKALKIDGPVLIVTDSFYVAESVNKELPYWQSNGFFNNKKKPLKHVSKWKSIADCIQLKPDIIIIHEKGHQPTASTFHTEGNNLADKLATQGSYVVNAGKRTADGSEFEKRTADGSEFESPKKKAKVE

SEQ ID NO: 7178 - protein, 2092 aa, synthetic construct
MPAAKRVKLDGGDKKYSIGLDIGTNSVGWAVITDEYKVPSKKFKVLGNTDRHSIKKNLIGALLFDSGETAEATRLKRTARRRYTRRKNRICYLQEIFSNEMAKVDDSFFHRLEESFLVEEDKKHERHPIFGNIVDEVAYHEKYPTIYHLRKKLVDSTDKADLRLIYLALAHMIKFRGHFLIEGDLNPDNSDVDKLFIQLVQTYNQLFEENPINASGVDAKAILSARLSKSRRLENLIAQLPGEKKNGLFGNLIALSLGLTPNFKSNFDLAEDAKLQLSKDTYDDDLDNLLAQIGDQYADLFLAAKNLSDAILLSDILRVNTEITKAPLSASMIKRYDEHHQDLTLLKALVRQQLPEKYKEIFFDQSKNGYAGYIDGGASQEEFYKFIKPILEKMDGTEELLVKLNREDLLRKQRTFDNGSIPHQIHLGELHAILRRQEDFYPFLKDNREKIEKILTFRIPYYVGPLARGNSRFAWMTRKSEETITPWNFEEVVDKGASAQSFIERMTNFDKNLPNEKVLPKHSLLYEYFTVYNELTKVKYVTEGMRKPAFLSGEQKKAIVDLLFKTNRKVTVKQLKEDYFKKIECFDSVEISGVEDRFNASLGTYHDLLKIIKDKDFLDNEENEDILEDIVLTLTLFEDREMIEERLKTYAHLFDDKVMKQLKRRRYTGWGRLSRKLINGIRDKQSGKTILDFLKSDGFANRNFMQLIHDDSLTFKEDIQKAQVSGQGDSLHEHIANLAGSPAIKKGILQTVKVVDELVKVMGRHKPENIVIEMARENQTTQKGQKNSRERMKRIEEGIKELGSQILKEHPVENTQLQNEKLYLYYLQNGRDMYVDQELDINRLSDYDVDHIVPQSFLKDDSIDNKVLTRSDKARGKSDNVPSEEVVKKMKNYWRQLLNAKLITQRKFDNLTKAERGGLSELDKAGFIKRQLVETRQITKHVAQILDSRMNTKYDENDKLIREVKVITLKSKLVSDFRKDFQFYKVREINNYHHAHDAYLNAVVGTALIKKYPKLESEFVYGDYKVYDVRKMIAKSEQEIGKATAKYFFYSNIMNFFKTEITLANGEIRKRPLIETNGETGEIVWDKGRDFATVRKVLSMPQVNIVKKTEVQTGGFSKESILPKRNSDKLIARKKDWDPKKYGGFDSPTVAYSVLVVAKVEKGKSKKLKSVKELLGITIMERSSFEKNPIDFLEAKGYKEVKKDLIIKLPKYSLFELENGRKRMLASAGELQKGNELALPSKYVNFLYLASHYEKLKGSPEDNEQKQLFVEQHKHYLDEIIEQISEFSKRVILADANLDKVLSAYNKHRDKPIREQAENIIHLFTLTNLGAPAAFKYFDTTIDRKRYTSTKEVLDATLIHQSITGLYETRIDLSQLGGDGGPAPGGSGSSGGVLNLEEEYRLHEKPVPSSIDPSWLQLFPTVWAERAGMGLANQVPPVVVELRSGASPVAVRQYPMSKEAREGIRPHIQRFLDLGVLVPCQSPWNTPLLPVKKPGTNDYRPVQDLREINKRVQDIHPTVPNPYNLLSSLPPSHTWYSVLDLKDAFFCLKLHPNSQPLFAFEWRDPEKGNTGQLTWTRLPQGFKNSPTLFNEALHRDLAPFRALNPQVVLLQYVDDLLVAAPTYRDCKEGTQKLLQELSKLGYRVSAKKAQLCQKEVTYLGYLLKEGKRWLTPARKATVMKIPPPTTPRQVREFLGTAGFCRLWIPGFASLAAPLYPLTKPSIPFIWTEEHQKAFDRIKEALLSAPALALPDLTKPFTLYVDERAGVARGVLTQTLGPWRRPVAYLSKKLDPVASGWPTCLKAVAAVALLLKDADKLTLGQNVTVIASHSLESIVRQPPDRWMTNARMTHYQSLLLNERVSFAPPAVLNPATLLPVESEATPVHRCSEILAEETGTRRDLKDQPLPGVPAWYTDGSSFIAEGKRRAGAAIVDGKRTVWASSLPEGTSAQKAELVALTQALRLAEGKDINIYTDSRYAFATAHIHGAIYKQRGWLTSAGKDIKNKEEILALLEAIHLPKRVAIIHCPGHQKGNDPVATGNRRADEAAKQAALSTRVLAETTKPAGKRTADGSEFEKRTADGSEFESPKKKAKVE

SEQ ID NO: 7179 - protein, 2094 aa, synthetic construct
MPAAKRVKLDGGDKKYSIGLDIGTNSVGWAVITDEYKVPSKKFKVLGNTDRHSIKKNLIGALLFDSGETAEATRLKRTARRRYTRRKNRICYLQEIFSNEMAKVDDSFFHRLEESFLVEEDKKHERHPIFGNIVDEVAYHEKYPTIYHLRKKLVDSTDKADLRLIYLALAHMIKFRGHFLIEGDLNPDNSDVDKLFIQLVQTYNQLFEENPINASGVDAKAILSARLSKSRRLENLIAQLPGEKKNGLFGNLIALSLGLTPNFKSNFDLAEDAKLQLSKDTYDDDLDNLLAQIGDQYADLFLAAKNLSDAILLSDILRVNTEITKAPLSASMIKRYDEHHQDLTLLKALVRQQLPEKYKEIFFDQSKNGYAGYIDGGASQEEFYKFIKPILEKMDGTEELLVKLNREDLLRKQRTFDNGSIPHQIHLGELHAILRRQEDFYPFLKDNREKIEKILTFRIPYYVGPLARGNSRFAWMTRKSEETITPWNFEEVVDKGASAQSFIERMTNFDKNLPNEKVLPKHSLLYEYFTVYNELTKVKYVTEGMRKPAFLSGEQKKAIVDLLFKTNRKVTVKQLKEDYFKKIECFDSVEISGVEDRFNASLGTYHDLLKIIKDKDFLDNEENEDILEDIVLTLTLFEDREMIEERLKTYAHLFDDKVMKQLKRRRYTGWGRLSRKLINGIRDKQSGKTILDFLKSDGFANRNFMQLIHDDSLTFKEDIQKAQVSGQGDSLHEHIANLAGSPAIKKGILQTVKVVDELVKVMGRHKPENIVIEMARENQTTQKGQKNSRERMKRIEEGIKELGSQILKEHPVENTQLQNEKLYLYYLQNGRDMYVDQELDINRLSDYDVDHIVPQSFLKDDSIDNKVLTRSDKARGKSDNVPSEEVVKKMKNYWRQLLNAKLITQRKFDNLTKAERGGLSELDKAGFIKRQLVETRQITKHVAQILDSRMNTKYDENDKLIREVKVITLKSKLVSDFRKDFQFYKVREINNYHHAHDAYLNAVVGTALIKKYPKLESEFVYGDYKVYDVRKMIAKSEQEIGKATAKYFFYSNIMNFFKTEITLANGEIRKRPLIETNGETGEIVWDKGRDFATVRKVLSMPQVNIVKKTEVQTGGFSKESILPKRNSDKLIARKKDWDPKKYGGFDSPTVAYSVLVVAKVEKGKSKKLKSVKELLGITIMERSSFEKNPIDFLEAKGYKEVKKDLIIKLPKYSLFELENGRKRMLASAGELQKGNELALPSKYVNFLYLASHYEKLKGSPEDNEQKQLFVEQHKHYLDEIIEQISEFSKRVILADANLDKVLSAYNKHRDKPIREQAENIIHLFTLTNLGAPAAFKYFDTTIDRKRYTSTKEVLDATLIHQSITGLYETRIDLSQLGGDGGPAPGGSGSSGGTLNIEDEYRLHETSKEPDVPLGSTWLSDFPQAWAETGGMGLAVRQAPLIIPLKATSTPVSIKQYPMSQEARLGIKPHIQRLLDQGILVPCQSPWNTPLLPVKKPGTNDYRPVQDLREVNKRVEDIHPTVPNPYNLLSGLPPSHQWYTVLDLKDAFFCLRLHPTSQPLFAFEWRDPEMGISGQLTWTRLPQGFKNSPTLFNEALHRDLADFRIQHPDLILLQYVDDLLLAATSEQDCQRGTRALLQTLGNLGYRASAKKAQICQKQVKYLGYLLKEGQRWLTEARKETVMGQPTPKTPRQLREFLGTAGFCRLWIPGFAEMAAPLYPLTKPGTLFNWGPDQQKAYQEIKQALLTAPALGLPDLTKPFELFVDEKQGYAKGVLTQKLGPWRRPVAYLSKKLDPVAAGWPPCLRMVAAIAVLTKDAGKLTMGQPLVILAPHAVEALVKQPPDRWLSNARMTHYQAMLLDTDRVQFGPVVALNPATLLPLPEKEAPHDCLEILAETHGTRPDLTDQPIPDADYTWYTDGSSFLQEGQRRAGAAVTTETEVIWARALPAGTSAQRAELIALTQALKMAEGKKLNVYTDSRYAFATAHVHGEIYRRRGWLTSEGREIKNKNEILALLKALFLPKRLSIIHCPGHQKGNSAEARGNRMADQAAREAAMKAVLETSTLLAGKRTADGSEFEKRTADGSEFESPKKKAKVE

SEQ ID NO: 7180 - protein, 2094 aa, synthetic construct
MPAAKRVKLDGGDKKYSIGLDIGTNSVGWAVITDEYKVPSKKFKVLGNTDRHSIKKNLIGALLFDSGETAEATRLKRTARRRYTRRKNRICYLQEIFSNEMAKVDDSFFHRLEESFLVEEDKKHERHPIFGNIVDEVAYHEKYPTIYHLRKKLVDSTDKADLRLIYLALAHMIKFRGHFLIEGDLNPDNSDVDKLFIQLVQTYNQLFEENPINASGVDAKAILSARLSKSRRLENLIAQLPGEKKNGLFGNLIALSLGLTPNFKSNFDLAEDAKLQLSKDTYDDDLDNLLAQIGDQYADLFLAAKNLSDAILLSDILRVNTEITKAPLSASMIKRYDEHHQDLTLLKALVRQQLPEKYKEIFFDQSKNGYAGYIDGGASQEEFYKFIKPILEKMDGTEELLVKLNREDLLRKQRTFDNGSIPHQIHLGELHAILRRQEDFYPFLKDNREKIEKILTFRIPYYVGPLARGNSRFAWMTRKSEETITPWNFEEVVDKGASAQSFIERMTNFDKNLPNEKVLPKHSLLYEYFTVYNELTKVKYVTEGMRKPAFLSGEQKKAIVDLLFKTNRKVTVKQLKEDYFKKIECFDSVEISGVEDRFNASLGTYHDLLKIIKDKDFLDNEENEDILEDIVLTLTLFEDREMIEERLKTYAHLFDDKVMKQLKRRRYTGWGRLSRKLINGIRDKQSGKTILDFLKSDGFANRNFMQLIHDDSLTFKEDIQKAQVSGQGDSLHEHIANLAGSPAIKKGILQTVKVVDELVKVMGRHKPENIVIEMARENQTTQKGQKNSRERMKRIEEGIKELGSQILKEHPVENTQLQNEKLYLYYLQNGRDMYVDQELDINRLSDYDVDHIVPQSFLKDDSIDNKVLTRSDKARGKSDNVPSEEVVKKMKNYWRQLLNAKLITQRKFDNLTKAERGGLSELDKAGFIKRQLVETRQITKHVAQILDSRMNTKYDENDKLIREVKVITLKSKLVSDFRKDFQFYKVREINNYHHAHDAYLNAVVGTALIKKYPKLESEFVYGDYKVYDVRKMIAKSEQEIGKATAKYFFYSNIMNFFKTEITLANGEIRKRPLIETNGETGEIVWDKGRDFATVRKVLSMPQVNIVKKTEVQTGGFSKESILPKRNSDKLIARKKDWDPKKYGGFDSPTVAYSVLVVAKVEKGKSKKLKSVKELLGITIMERSSFEKNPIDFLEAKGYKEVKKDLIIKLPKYSLFELENGRKRMLASAGELQKGNELALPSKYVNFLYLASHYEKLKGSPEDNEQKQLFVEQHKHYLDEIIEQISEFSKRVILADANLDKVLSAYNKHRDKPIREQAENIIHLFTLTNLGAPAAFKYFDTTIDRKRYTSTKEVLDATLIHQSITGLYETRIDLSQLGGDGGPAPGGSGSSGGTLNIEDEYRLHETSKEPDVPLGSTWLSDFPQAWAETGGMGLAVRQAPLIIPLKATSTPVSIKQYPMSQEARLGIKPHIQRLLDQGILVPCQSPWNTPLLPVKKPGTNDYRPVQDLREVNKRVEDIHPTVPNPYNLLSGLPPSHQWYTVLDLKDAFFCLRLHPTSQPLFAFEWRDPEMGISGQLTWTRLPQGFKNSPTLFNEALHRDLADFRIQHPDLILLQYVDDLLLAATSEQDCQRGTRALLQTLGNLGYRASAKKAQICQKQVKYLGYLLKEGQRWLTEARKETVMGQPTPKTPRQLREFLGKAGFCRLFIPGFAEMAAPLYPLTKPGTLFNWGPDQQKAYQEIKQALLTAPALGLPDLTKPFELFVDEKQGYAKGVLTQKLGPWRRPVAYLSKKLDPVAAGWPPCLRMVAAIAVLTKDAGKLTMGQPLVILAPHAVEALVKQPPDRWLSNARMTHYQAMLLDTDRVQFGPVVALNPATLLPLPEKEAPHDCLEILAETHGTRPDLTDQPIPDADYTWYTDGSSFLQEGQRRAGAAVTTETEVIWARALPAGTSAQRAELIALTQALKMAEGKKLNVYTDSRYAFATAHVHGEIYRRRGWLTSEGREIKNKNEILALLKALFLPKRLSIIHCPGHQKGNSAEARGNRMADQAAREAAMKAVLETSTLLAGKRTADGSEFEKRTADGSEFESPKKKAKVE

SEQ ID NO: 7181 - protein, 2096 aa, synthetic construct
MPAAKRVKLDGGDKKYSIGLDIGTNSVGWAVITDEYKVPSKKFKVLGNTDRHSIKKNLIGALLFDSGETAEATRLKRTARRRYTRRKNRICYLQEIFSNEMAKVDDSFFHRLEESFLVEEDKKHERHPIFGNIVDEVAYHEKYPTIYHLRKKLVDSTDKADLRLIYLALAHMIKFRGHFLIEGDLNPDNSDVDKLFIQLVQTYNQLFEENPINASGVDAKAILSARLSKSRRLENLIAQLPGEKKNGLFGNLIALSLGLTPNFKSNFDLAEDAKLQLSKDTYDDDLDNLLAQIGDQYADLFLAAKNLSDAILLSDILRVNTEITKAPLSASMIKRYDEHHQDLTLLKALVRQQLPEKYKEIFFDQSKNGYAGYIDGGASQEEFYKFIKPILEKMDGTEELLVKLNREDLLRKQRTFDNGSIPHQIHLGELHAILRRQEDFYPFLKDNREKIEKILTFRIPYYVGPLARGNSRFAWMTRKSEETITPWNFEEVVDKGASAQSFIERMTNFDKNLPNEKVLPKHSLLYEYFTVYNELTKVKYVTEGMRKPAFLSGEQKKAIVDLLFKTNRKVTVKQLKEDYFKKIECFDSVEISGVEDRFNASLGTYHDLLKIIKDKDFLDNEENEDILEDIVLTLTLFEDREMIEERLKTYAHLFDDKVMKQLKRRRYTGWGRLSRKLINGIRDKQSGKTILDFLKSDGFANRNFMQLIHDDSLTFKEDIQKAQVSGQGDSLHEHIANLAGSPAIKKGILQTVKVVDELVKVMGRHKPENIVIEMARENQTTQKGQKNSRERMKRIEEGIKELGSQILKEHPVENTQLQNEKLYLYYLQNGRDMYVDQELDINRLSDYDVDHIVPQSFLKDDSIDNKVLTRSDKARGKSDNVPSEEVVKKMKNYWRQLLNAKLITQRKFDNLTKAERGGLSELDKAGFIKRQLVETRQITKHVAQILDSRMNTKYDENDKLIREVKVITLKSKLVSDFRKDFQFYKVREINNYHHAHDAYLNAVVGTALIKKYPKLESEFVYGDYKVYDVRKMIAKSEQEIGKATAKYFFYSNIMNFFKTEITLANGEIRKRPLIETNGETGEIVWDKGRDFATVRKVLSMPQVNIVKKTEVQTGGFSKESILPKRNSDKLIARKKDWDPKKYGGFDSPTVAYSVLVVAKVEKGKSKKLKSVKELLGITIMERSSFEKNPIDFLEAKGYKEVKKDLIIKLPKYSLFELENGRKRMLASAGELQKGNELALPSKYVNFLYLASHYEKLKGSPEDNEQKQLFVEQHKHYLDEIIEQISEFSKRVILADANLDKVLSAYNKHRDKPIREQAENIIHLFTLTNLGAPAAFKYFDTTIDRKRYTSTKEVLDATLIHQSITGLYETRIDLSQLGGDGGPAPGSSGGSGGTAPLEEEYRLFLEAPIQNVTLLEQWKREIPKVWAEINPPGLASTQAPIHVQLLSTALPVRVRQYPITLEAKRSLRETIRKFRAAGILRPVHSPWNTPLLPVRKSGTSEYRMVQDLREVNKRVETIHPTVPNPYTLLSLLPPDRIWYSVLDLKDAFFCIPLAPESQLIFAFEWADAEEGESGQLTWTRLPQGFKNSPTLFNEALNRDLQGFRLDHPSVSLLQYVDDLLIAADTQAACLSATRDLLMTLAELGYRVSGKKAQLCQEEVTYLGFKIHKGSRSLSNSRTQAILQIPVPKTKRQVREFLGTIGYCRLWIPGFAELAQPLYAATRPGNDPLVWGEKEEEAFQSLKLALTQPPALALPSLDKPFQLFVEETSGAAKGVLTQALGPWKRPVAYLSKRLDPVAAGWPRCLRAIAAAALLTREASKLTFGQDIEITSSHNLESLLRSPPDKWLTNARITQYQVLLLDPPRVRFKQTAALNPATLLPETDDTLPIHHCLDTLDSLTSTRPDLTDQPLAQAEATLFTDGSSYIRDGKRYAGAAVVTLDSVIWAEPLPIGTSAQKAELIALTKALEWSKDKSVNIYTDSRYAFATLHVHGMIYRERGWLTAGGKAIKNAPEILALLTAVWLPKRVAVMHCKGHQKDDAPTSTGNRRADEVAREVAIRPLSTQATISAGKRTADGSEFEKRTADGSEFESPKKKAKVE

SEQ ID NO: 7182 - protein, 2093 aa, synthetic construct
MPAAKRVKLDGGDKKYSIGLDIGTNSVGWAVITDEYKVPSKKFKVLGNTDRHSIKKNLIGALLFDSGETAEATRLKRTARRRYTRRKNRICYLQEIFSNEMAKVDDSFFHRLEESFLVEEDKKHERHPIFGNIVDEVAYHEKYPTIYHLRKKLVDSTDKADLRLIYLALAHMIKFRGHFLIEGDLNPDNSDVDKLFIQLVQTYNQLFEENPINASGVDAKAILSARLSKSRRLENLIAQLPGEKKNGLFGNLIALSLGLTPNFKSNFDLAEDAKLQLSKDTYDDDLDNLLAQIGDQYADLFLAAKNLSDAILLSDILRVNTEITKAPLSASMIKRYDEHHQDLTLLKALVRQQLPEKYKEIFFDQSKNGYAGYIDGGASQEEFYKFIKPILEKMDGTEELLVKLNREDLLRKQRTFDNGSIPHQIHLGELHAILRRQEDFYPFLKDNREKIEKILTFRIPYYVGPLARGNSRFAWMTRKSEETITPWNFEEVVDKGASAQSFIERMTNFDKNLPNEKVLPKHSLLYEYFTVYNELTKVKYVTEGMRKPAFLSGEQKKAIVDLLFKTNRKVTVKQLKEDYFKKIECFDSVEISGVEDRFNASLGTYHDLLKIIKDKDFLDNEENEDILEDIVLTLTLFEDREMIEERLKTYAHLFDDKVMKQLKRRRYTGWGRLSRKLINGIRDKQSGKTILDFLKSDGFANRNFMQLIHDDSLTFKEDIQKAQVSGQGDSLHEHIANLAGSPAIKKGILQTVKVVDELVKVMGRHKPENIVIEMARENQTTQKGQKNSRERMKRIEEGIKELGSQILKEHPVENTQLQNEKLYLYYLQNGRDMYVDQELDINRLSDYDVDHIVPQSFLKDDSIDNKVLTRSDKARGKSDNVPSEEVVKKMKNYWRQLLNAKLITQRKFDNLTKAERGGLSELDKAGFIKRQLVETRQITKHVAQILDSRMNTKYDENDKLIREVKVITLKSKLVSDFRKDFQFYKVREINNYHHAHDAYLNAVVGTALIKKYPKLESEFVYGDYKVYDVRKMIAKSEQEIGKATAKYFFYSNIMNFFKTEITLANGEIRKRPLIETNGETGEIVWDKGRDFATVRKVLSMPQVNIVKKTEVQTGGFSKESILPKRNSDKLIARKKDWDPKKYGGFDSPTVAYSVLVVAKVEKGKSKKLKSVKELLGITIMERSSFEKNPIDFLEAKGYKEVKKDLIIKLPKYSLFELENGRKRMLASAGELQKGNELALPSKYVNFLYLASHYEKLKGSPEDNEQKQLFVEQHKHYLDEIIEQISEFSKRVILADANLDKVLSAYNKHRDKPIREQAENIIHLFTLTNLGAPAAFKYFDTTIDRKRYTSTKEVLDATLIHQSITGLYETRIDLSQLGGDGGPAPGSSGGSGGTLQLEEEYRLFEPESTQKQEMDIWLKNFPQAWAETGGMGTAHCQAPVLIQLKATATPISIRQYPMPHEAYQGIKPHIRRMLDQGILKPCQSPWNTPLLPVKKPGTEDYRPVQDLREVNKRVEDIHPTVPNPYNLLSTLPPSHPWYTVLDLKDAFFCLRLHSESQLLFAFEWRDPEIGLSGQLTWTRLPQGFKNSPTLFNEALHSDLADFRVRYPALVLLQYVDDLLLAAATRTECLEGTKALLETLGNKGYRASAKKAQICLQEVTYLGYSLKDGQRWLTKARKEAILSIPVPKNSRQVREFLGTAGYCRLWIPGFAELAAPLYPLTRPGTLFQWGTEQQLAFEDIKKALLSSPALGLPDITKPFELFIDENSGFAKGVLVQKLGPWKRPVAYLSKKLDTVASGWPPCLRMVAAIAILVKDAGKLTLGQPLTILTSHPVEALVRQPPNKWLSNARMTHYQAMLLDAERVHFGPTVSLNPATLLPLPSGGNHHDCLQILAETHGTRPDLTDQPLPDADLTWYTDGSSFIRNGEREAGAAVTTESEVIWAAPLPPGTSAQRAELIALTQALKMAEGKKLTVYTDSRYAFATTHVHGEIYRRRGWLTSEGKEIKNKNEILALLEALFLPKRLSIIHCPGHQKGDSPQAKGNRLADDTAKKAATETHSSLTVLPAGKRTADGSEFEKRTADGSEFESPKKKAKVE

SEQ ID NO: 7183 - protein, 2216 aa, synthetic construct
MPAAKRVKLDGGDKKYSIGLDIGTNSVGWAVITDEYKVPSKKFKVLGNTDRHSIKKNLIGALLFDSGETAEATRLKRTARRRYTRRKNRICYLQEIFSNEMAKVDDSFFHRLEESFLVEEDKKHERHPIFGNIVDEVAYHEKYPTIYHLRKKLVDSTDKADLRLIYLALAHMIKFRGHFLIEGDLNPDNSDVDKLFIQLVQTYNQLFEENPINASGVDAKAILSARLSKSRRLENLIAQLPGEKKNGLFGNLIALSLGLTPNFKSNFDLAEDAKLQLSKDTYDDDLDNLLAQIGDQYADLFLAAKNLSDAILLSDILRVNTEITKAPLSASMIKRYDEHHQDLTLLKALVRQQLPEKYKEIFFDQSKNGYAGYIDGGASQEEFYKFIKPILEKMDGTEELLVKLNREDLLRKQRTFDNGSIPHQIHLGELHAILRRQEDFYPFLKDNREKIEKILTFRIPYYVGPLARGNSRFAWMTRKSEETITPWNFEEVVDKGASAQSFIERMTNFDKNLPNEKVLPKHSLLYEYFTVYNELTKVKYVTEGMRKPAFLSGEQKKAIVDLLFKTNRKVTVKQLKEDYFKKIECFDSVEISGVEDRFNASLGTYHDLLKIIKDKDFLDNEENEDILEDIVLTLTLFEDREMIEERLKTYAHLFDDKVMKQLKRRRYTGWGRLSRKLINGIRDKQSGKTILDFLKSDGFANRNFMQLIHDDSLTFKEDIQKAQVSGQGDSLHEHIANLAGSPAIKKGILQTVKVVDELVKVMGRHKPENIVIEMARENQTTQKGQKNSRERMKRIEEGIKELGSQILKEHPVENTQLQNEKLYLYYLQNGRDMYVDQELDINRLSDYDVDHIVPQSFLKDDSIDNKVLTRSDKARGKSDNVPSEEVVKKMKNYWRQLLNAKLITQRKFDNLTKAERGGLSELDKAGFIKRQLVETRQITKHVAQILDSRMNTKYDENDKLIREVKVITLKSKLVSDFRKDFQFYKVREINNYHHAHDAYLNAVVGTALIKKYPKLESEFVYGDYKVYDVRKMIAKSEQEIGKATAKYFFYSNIMNFFKTEITLANGEIRKRPLIETNGETGEIVWDKGRDFATVRKVLSMPQVNIVKKTEVQTGGFSKESILPKRNSDKLIARKKDWDPKKYGGFDSPTVAYSVLVVAKVEKGKSKKLKSVKELLGITIMERSSFEKNPIDFLEAKGYKEVKKDLIIKLPKYSLFELENGRKRMLASAGELQKGNELALPSKYVNFLYLASHYEKLKGSPEDNEQKQLFVEQHKHYLDEIIEQISEFSKRVILADANLDKVLSAYNKHRDKPIREQAENIIHLFTLTNLGAPAAFKYFDTTIDRKRYTSTKEVLDATLIHQSITGLYETRIDLSQLGGDGGPAPGSSGGSGGTLGDQGSRGSDPLPEPRVTLTVEGIPTEFLVNTGAEHSVLTKPMGKMGSKRTVVAGATGSKVYPWTTKRLLKIGQKQVTHSFLVIPECPAPLLGRDLLTKLKAQIQFSTEGPQVTWEDRPAMCLVLNLEEEYRLHEKPVPPSIDPSWLQLFPMVWAEKAGMGLANQVPPVVVELKSDASPVAVRQYPMSKEAREGIRPHIQRFLDLGILVPCQSPWNTPLLPVKKPGTNDYRPVQDLREVNKRVQDIHPTVPNPYNLLSSLPPSHTWYSVLDLKDAFFCLKLHPNSQPLFAFEWRDPEKGNTGQLTWTRLPQGFKNSPTLFDEALHRDLASFRALNPQVVMLQYVDDLLVAAPTYRDCKEGTRRLLQELSKLGYRVSAKKAQLCREEVTYLGYLLKGGKRWLTPARKATVMKIPTPTTPRQVREFLGTAGFCRLWIPGFASLAAPLYPLTREKVPFTWTEAHQEAFGRIKEALLSAPALALPDLTKPFALYVDEKEGVARGVLTQTLGPWRRPVAYLSKKLDPVASGWPTCLKAIAAVALLLKDADKLTLGQNVLVIAPHNLESIVRQPPDRWMTNARMTHYQSLLLNERVSFAPPAILNPATLLPVESDDTPIHICSEILAEETGTRPDLRDQPLPGVPAWYTDGSSFIMDGRRQAGAAIVDNKRTVWASNLPEGTSAQKAELIALTQALRLAEGKSINIYTDSRYAFATAHVHGAIYKQRGLLTSAGKDIKNKEEILALLEAIHLPKRVAIIHCPGHQRGTDPVATGNRKADEAAKQAAQSTRILTETTKNAGKRTADGSEFEKRTADGSEFESPKKKAKVE

SEQ ID NO: 7184 - protein, 2216 aa, synthetic construct
MPAAKRVKLDGGDKKYSIGLDIGTNSVGWAVITDEYKVPSKKFKVLGNTDRHSIKKNLIGALLFDSGETAEATRLKRTARRRYTRRKNRICYLQEIFSNEMAKVDDSFFHRLEESFLVEEDKKHERHPIFGNIVDEVAYHEKYPTIYHLRKKLVDSTDKADLRLIYLALAHMIKFRGHFLIEGDLNPDNSDVDKLFIQLVQTYNQLFEENPINASGVDAKAILSARLSKSRRLENLIAQLPGEKKNGLFGNLIALSLGLTPNFKSNFDLAEDAKLQLSKDTYDDDLDNLLAQIGDQYADLFLAAKNLSDAILLSDILRVNTEITKAPLSASMIKRYDEHHQDLTLLKALVRQQLPEKYKEIFFDQSKNGYAGYIDGGASQEEFYKFIKPILEKMDGTEELLVKLNREDLLRKQRTFDNGSIPHQIHLGELHAILRRQEDFYPFLKDNREKIEKILTFRIPYYVGPLARGNSRFAWMTRKSEETITPWNFEEVVDKGASAQSFIERMTNFDKNLPNEKVLPKHSLLYEYFTVYNELTKVKYVTEGMRKPAFLSGEQKKAIVDLLFKTNRKVTVKQLKEDYFKKIECFDSVEISGVEDRFNASLGTYHDLLKIIKDKDFLDNEENEDILEDIVLTLTLFEDREMIEERLKTYAHLFDDKVMKQLKRRRYTGWGRLSRKLINGIRDKQSGKTILDFLKSDGFANRNFMQLIHDDSLTFKEDIQKAQVSGQGDSLHEHIANLAGSPAIKKGILQTVKVVDELVKVMGRHKPENIVIEMARENQTTQKGQKNSRERMKRIEEGIKELGSQILKEHPVENTQLQNEKLYLYYLQNGRDMYVDQELDINRLSDYDVDHIVPQSFLKDDSIDNKVLTRSDKARGKSDNVPSEEVVKKMKNYWRQLLNAKLITQRKFDNLTKAERGGLSELDKAGFIKRQLVETRQITKHVAQILDSRMNTKYDENDKLIREVKVITLKSKLVSDFRKDFQFYKVREINNYHHAHDAYLNAVVGTALIKKYPKLESEFVYGDYKVYDVRKMIAKSEQEIGKATAKYFFYSNIMNFFKTEITLANGEIRKRPLIETNGETGEIVWDKGRDFATVRKVLSMPQVNIVKKTEVQTGGFSKESILPKRNSDKLIARKKDWDPKKYGGFDSPTVAYSVLVVAKVEKGKSKKLKSVKELLGITIMERSSFEKNPIDFLEAKGYKEVKKDLIIKLPKYSLFELENGRKRMLASAGELQKGNELALPSKYVNFLYLASHYEKLKGSPEDNEQKQLFVEQHKHYLDEIIEQISEFSKRVILADANLDKVLSAYNKHRDKPIREQAENIIHLFTLTNLGAPAAFKYFDTTIDRKRYTSTKEVLDATLIHQSITGLYETRIDLSQLGGDGGPAPGSSGGSGGTLGDQGSRGSDPLPEPRVTLTVEGIPTEFLVNTGAEHSVLTKPMGKMGSKRTVVAGATGSKVYPWTTKRLLKIGQKQVTHSFLVIPECPAPLLGRDLLTKLKAQIQFSTEGPQVTWEDRPAMCLVLNLEEEYRLHEKPVPPSIDPSWLQLFPMVWAEKAGMGLANQVPPVVVELKSDASPVAVRQYPMSKEAREGIRPHIQRFLDLGILVPCQSPWNTPLLPVKKPGTNDYRPVQDLREVNKRVQDIHPTVPNPYNLLSSLPPSHTWYSVLDLKDAFFCLKLHPNSQPLFAFEWRDPEKGNTGQLTWTRLPQGFKNSPTLFNEALHRDLASFRALNPQVVMLQYVDDLLVAAPTYRDCKEGTRRLLQELSKLGYRVSAKKAQLCREEVTYLGYLLKGGKRWLTPARKATVMKIPTPTTPRQVREFLGKAGFCRLFIPGFASLAAPLYPLTRPKVPFTWTEAHQEAFGRIKEALLSAPALALPDLTKPFALYVDEKEGVARGVLTQTLGPWRRPVAYLSKKLDPVASGWPTCLKAIAAVALLLKDADKLTLGQNVLVIAPHNLESIVRQPPDRWMTNARMTHYQSLLLNERVSFAPPAILNPATLLPVESDDTPIHICSEILAEETGTRPDLRDQPLPGVPAWYTDGSSFIMDGRRQAGAAIVDNKRTVWASNLPEGTSAQKAELIALTQALRLAEGKSINIYTDSRYAFATAHVHGAIYKQRGWLTSAGKDIKNKEEILALLEAIHLPKRVAIIHCPGHQRGTDPVATGNRKADEAAKQAAQSTRILTETTKNAGKRTADGSEFEKRTADGSEFESPKKKAKVE

SEQ ID NO: 7185 - protein, 2094 aa, synthetic construct
MPAAKRVKLDGGDKKYSIGLDIGTNSVGWAVITDEYKVPSKKFKVLGNTDRHSIKKNLIGALLFDSGETAEATRLKRTARRRYTRRKNRICYLQEIFSNEMAKVDDSFFHRLEESFLVEEDKKHERHPIFGNIVDEVAYHEKYPTIYHLRKKLVDSTDKADLRLIYLALAHMIKFRGHFLIEGDLNPDNSDVDKLFIQLVQTYNQLFEENPINASGVDAKAILSARLSKSRRLENLIAQLPGEKKNGLFGNLIALSLGLTPNFKSNFDLAEDAKLQLSKDTYDDDLDNLLAQIGDQYADLFLAAKNLSDAILLSDILRVNTEITKAPLSASMIKRYDEHHQDLTLLKALVRQQLPEKYKEIFFDQSKNGYAGYIDGGASQEEFYKFIKPILEKMDGTEELLVKLNREDLLRKQRTFDNGSIPHQIHLGELHAILRRQEDFYPFLKDNREKIEKILTFRIPYYVGPLARGNSRFAWMTRKSEETITPWNFEEVVDKGASAQSFIERMTNFDKNLPNEKVLPKHSLLYEYFTVYNELTKVKYVTEGMRKPAFLSGEQKKAIVDLLFKTNRKVTVKQLKEDYFKKIECFDSVEISGVEDRFNASLGTYHDLLKIIKDKDFLDNEENEDILEDIVLTLTLFEDREMIEERLKTYAHLFDDKVMKQLKRRRYTGWGRLSRKLINGIRDKQSGKTILDFLKSDGFANRNFMQLIHDDSLTFKEDIQKAQVSGQGDSLHEHIANLAGSPAIKKGILQTVKVVDELVKVMGRHKPENIVIEMARENQTTQKGQKNSRERMKRIEEGIKELGSQILKEHPVENTQLQNEKLYLYYLQNGRDMYVDQELDINRLSDYDVDHIVPQSFLKDDSIDNKVLTRSDKARGKSDNVPSEEVVKKMKNYWRQLLNAKLITQRKFDNLTKAERGGLSELDKAGFIKRQLVETRQITKHVAQILDSRMNTKYDENDKLIREVKVITLKSKLVSDFRKDFQFYKVREINNYHHAHDAYLNAVVGTALIKKYPKLESEFVYGDYKVYDVRKMIAKSEQEIGKATAKYFFYSNIMNFFKTEITLANGEIRKRPLIETNGETGEIVWDKGRDFATVRKVLSMPQVNIVKKTEVQTGGFSKESILPKRNSDKLIARKKDWDPKKYGGFDSPTVAYSVLVVAKVEKGKSKKLKSVKELLGITIMERSSFEKNPIDFLEAKGYKEVKKDLIIKLPKYSLFELENGRKRMLASAGELQKGNELALPSKYVNFLYLASHYEKLKGSPEDNEQKQLFVEQHKHYLDEIIEQISEFSKRVILADANLDKVLSAYNKHRDKPIREQAENIIHLFTLTNLGAPAAFKYFDTTIDRKRYTSTKEVLDATLIHQSITGLYETRIDLSQLGGDGGPAPGSSGGSGGLGIEDEYRLHETSTEPDVSLGSTWLSDFPQAWAETGGMGLAVRQAPLIIPLKATSTPVSIQQYPMSHEARLGIKPHIQRLLDQGILVPCQSPWNTPLLPVKKPGTNDYRPVQDLREVNKRVEDIHPTVPNPYNLLSGLPPSHQWYTVLDLKDAFFCLRLHPTSQPLFAFEWRDPGMGISGQLTWTRLPQGFKNSPTLFNEALHRDLADFRIQHPDLILLQYVDDILLAATSELDCQQGTRALLQTLGDLGYRASAKKAQICQKQVKYLGYLLREGQRWLTEARKETVMGQPVPKTPRQLREFLGKAGFCRLFIPGFAEMAAPLYPLTKPGTLFSWGPDQQKAYQEIKQALLTAPALGLPDLTKPFELFVDEKQGYAKGVLTQKLGPWRRPVAYLSKKLDPVAAGWPPCLRMVAAIAVLTKDAGKLTMGQPLVILAPHAVEALVKQPPDRWLSNARMTHYQAMLLDTDRVQFGPVVALNPATLLPLPEEGAPHDCLEILAETHGTRPDLTDQPIPDADHTWYTDGSSFLQEGQRKAGAAVTTETEVIWAGALPAGTSAQRAELIALTQALKMAEGKRLNVYTDSRYAFATAHIHGEIYRRRGWLTSEGREIKNKSEILALLKALFLPKRLSIIHCLGHQKGDSAEARGNRLADQAAREAAIKTPPDTSTLLIAGKRTADGSEFEKRTADGSEFESPKKKAKVE

SEQ ID NO: 7186 - protein, 2094 aa, synthetic construct; identical to SEQ ID NO: 7185

SEQ ID NO: 7187 - protein, 2088 aa, synthetic construct
MPAAKRVKLDGGDKKYSIGLDIGTNSVGWAVITDEYKVPSKKFKVLGNTDRHSIKKNLIGALLFDSGETAEATRLKRTARRRYTRRKNRICYLQEIFSNEMAKVDDSFFHRLEESFLVEEDKKHERHPIFGNIVDEVAYHEKYPTIYHLRKKLVDSTDKADLRLIYLALAHMIKFRGHFLIEGDLNPDNSDVDKLFIQLVQTYNQLFEENPINASGVDAKAILSARLSKSRRLENLIAQLPGEKKNGLFGNLIALSLGLTPNFKSNFDLAEDAKLQLSKDTYDDDLDNLLAQIGDQYADLFLAAKNLSDAILLSDILRVNTEITKAPLSASMIKRYDEHHQDLTLLKALVRQQLPEKYKEIFFDQSKNGYAGYIDGGASQEEFYKFIKPILEKMDGTEELLVKLNREDLLRKQRTFDNGSIPHQIHLGELHAILRRQEDFYPFLKDNREKIEKILTFRIPYYVGPLARGNSRFAWMTRKSEETITPWNFEEVVDKGASAQSFIERMTNFDKNLPNEKVLPKHSLLYEYFTVYNELTKVKYVTEGMRKPAFLSGEQKKAIVDLLFKTNRKVTVKQLKEDYFKKIECFDSVEISGVEDRFNASLGTYHDLLKIIKDKDFLDNEENEDILEDIVLTLTLFEDREMIEERLKTYAHLFDDKVMKQLKRRRYTGWGRLSRKLINGIRDKQSGKTILDFLKSDGFANRNFMQLIHDDSLTFKEDIQKAQVSGQGDSLHEHIANLAGSPAIKKGILQTVKVVDELVKVMGRHKPENIVIEMARENQTTQKGQKNSRERMKRIEEGIKELGSQILKEHPVENTQLQNEKLYLYYLQNGRDMYVDQELDINRLSDYDVDHIVPQSFLKDDSIDNKVLTRSDKARGKSDNVPSEEVVKKMKNYWRQLLNAKLITQRKFDNLTKAERGGLSELDKAGFIKRQLVETRQITKHVAQILDSRMNTKYDENDKLIREVKVITLKSKLVSDFRKDFQFYKVREINNYHHAHDAYLNAVVGTALIKKYPKLESEFVYGDYKVYDVRKMIAKSEQEIGKATAKYFFYSNIMNFFKTEITLANGEIRKRPLIETNGETGEIVWDKGRDFATVRKVLSMPQVNIVKKTEVQTGGFSKESILPKRNSDKLIARKKDWDPKKYGGFDSPTVAYSVLVVAKVEKGKSKKLKSVKELLGITIMERSSFEKNPIDFLEAKGYKEVKKDLIIKLPKYSLFELENGRKRMLASAGELQKGNELALPSKYVNFLYLASHYEKLKGSPEDNEQKQLFVEQHKHYLDEIIEQISEFSKRVILADANLDKVLSAYNKHRDKPIREQAENIIHLFTLTNLGAPAAFKYFDTTIDRKRYTSTKEVLDATLIHQSITGLYETRIDLSQLGGDGGPAPGSSGGSGGTLQLDDEYRLYSPLVKPDQNIQFWLEQFPQAWAETAGMGLAKQVPPQVIQLKASATPVSVRQYPLSKEAQEGIRPHVQRLIQQGILVPVQSPWNTPLLPVRKPGTNDYRPVQDLREVNKRVQDIHPTVPNPYNLLCALPPQRSWYTVLDLKDAFFCLRLHPTSQPLFAFEWRDPGTGRTGQLTWTRLPQGFKNSPTIFDEALHRDLANFRIQHPQVTLLQYVDDLLLAGATKQDCLEGTKALLLELSDLGYRASAKKAQICRREVTYLGYSLRDGQRWLTEARKKTVVQIPAPTTAKQVREFLGTAGFCRLWIPGFATLAAPLYPLTKEKGEFSWAPEHQKAFDAIKKALLSAPALALPDVTKPFTLYVDERKGVARGVLTQTLGPWRRPVAYLSKKLDPVASGWPVCLKAIAAVAILVKDADKLTLGQNITVIAPHALENIVRQPPDRWMTNARMTHYQSLLLTERVTFAPPAALNPATLLPEETDEPVTHDCHQLLIEETGVRKDLTDIPLTGEVLTWFTDGSSYVVEGKRMAGAAVVDGTRTIWASSLPEGTSAQKAELMALTQALRLAEGKSINIYTDSRYAFATAHVHGAIYKQRGLLTSAGREIKNKEEILSLLEALHLPKRLAIIHCPGHQKAKDPISRGNQMADRVAKQAAQGVNLLAGKRTADGSEFEKRTADGSEFESPKKKAKVE

SEQ ID NO: 7188 - protein, 2085 aa, synthetic construct
MPAAKRVKLDGGDKKYSIGLDIGTNSVGWAVITDEYKVPSKKFKVLGNTDRHSIKKNLIGALLFDSGETAEATRLKRTARRRYTRRKNRICYLQEIFSNEMAKVDDSFFHRLEESFLVEEDKKHERHPIFGNIVDEVAYHEKYPTIYHLRKKLVDSTDKADLRLIYLALAHMIKFRGHFLIEGDLNPDNSDVDKLFIQLVQTYNQLFEENPINASGVDAKAILSARLSKSRRLENLIAQLPGEKKNGLFGNLIALSLGLTPNFKSNFDLAEDAKLQLSKDTYDDDLDNLLAQIGDQYADLFLAAKNLSDAILLSDILRVNTEITKAPLSASMIKRYDEHHQDLTLLKALVRQQLPEKYKEIFFDQSKNGYAGYIDGGASQEEFYKFIKPILEKMDGTEELLVKLNREDLLRKQRTFDNGSIPHQIHLGELHAILRRQEDFYPFLKDNREKIEKILTFRIPYYVGPLARGNSRFAWMTRKSEETITPWNFEEVVDKGASAQSFIERMTNFDKNLPNEKVLPKHSLLYEYFTVYNELTKVKYVTEGMRKPAFLSGEQKKAIVDLLFKTNRKVTVKQLKEDYFKKIECFDSVEISGVEDRFNASLGTYHDLLKIIKDKDFLDNEENEDILEDIVLTLTLFEDREMIEERLKTYAHLFDDKVMKQLKRRRYTGWGRLSRKLINGIRDKQSGKTILDFLKSDGFANRNFMQLIHDDSLTFKEDIQKAQVSGQGDSLHEHIANLAGSPAIKKGILQTVKVVDELVKVMGRHKPENIVIEMARENQTTQKGQKNSRERMKRIEEGIKELGSQILKEHPVENTQLQNEKLYLYYLQNGRDMYVDQELDINRLSDYDVDHIVPQSFLKDDSIDNKVLTRSDKARGKSDNVPSEEVVKKMKNYWRQLLNAKLITQRKFDNLTKAERGGLSELDKAGFIKRQLVETRQITKHVAQILDSRMNTKYDENDKLIREVKVITLKSKLVSDFRKDFQFYKVREINNYHHAHDAYLNAVVGTALIKKYPKLESEFVYGDYKVYDVRKMIAKSEQEIGKATAKYFFYSNIMNFFKTEITLANGEIRKRPLIETNGETGEIVWDKGRDFATVRKVLSMPQVNIVKKTEVQTGGFSKESILPKRNSDKLIARKKDWDPKKYGGFDSPTVAYSVLVVAKVEKGKSKKLKSVKELLGITIMERSSFEKNPIDFLEAKGYKEVKKDLIIKLPKYSLFELENGRKRMLASAGELQKGNELALPSKYVNFLYLASHYEKLKGSPEDNEQKQLFVEQHKHYLDEIIEQISEFSKRVILADANLDKVLSAYNKHRDKPIREQAENIIHLFTLTNLGAPAAFKYFDTTIDRKRYTSTKEVLDATLIHQSITGLYETRIDLSQLGGDGGPAPGSSGGSGGIPWLMKKPLQLTTLVPLQEYEERLLKQTMLTGSYKEKLQSLFLKYDALWQHWENQVGHRRIKPHHIATGTVNPRPQKQYPINPKAKASIQTVINDLLKQGVLIQQNSIMNTPVYPVPKPDGKWRMVLDYREVNKTIPLIAAQNQHSAGILSSIFRGKYKTTLDLSNGFWAHSITPESYWLTAFTWLGQQYCWTRLPQGFLNSPALFNADVVDLLKEVPNVQVYVDDIYISHDDPREHLEQLEKVFSLLLNAGYVVSLKKSEIAQHEVEFLGFNITKEGRGLTETFKQKLLNITPPRDLKQLQSILGKLNFARNFIPNFSELVKPLYNIIATAPGKYITWTTDNSQQLQNIISMLNSAENLEERNPEVRLIMKVNTSPSAGYIRFYNEFAKRPIMYLNYVYTKAEVKFTNTEKLLTTIHKGLIKALDLGMGQEILVYSPIVSMTKIQKTPLPERKALPIRWITWMSYLEDPRIQFHYDKTLPELQQVPTVTDDIIAKIKHPSEFSMVFYTDGSAIKHPNVNKSHNAGMGIAQVQFKPEFTVINTWSIPLGDHTAQLAEVAAVEFACKKALKIDGPVLIVTDSFYVAESVNKELPYWQSNGFFNNKKKPLKHVSKWKSIADCIQLKPDIIIIHEKGHQPTASTFHTEGNNLADKLATQGSYVVNAGKRTADGSEFEKRTADGSEFESPKKKAKVE

SEQ ID NO: 7189 - protein, 2174 aa, synthetic construct
MPAAKRVKLDGGDKKYSIGLDIGTNSVGWAVITDEYKVPSKKFKVLGNTDRHSIKKNLIGALLFDSGETAEATRLKRTARRRYTRRKNRICYLQEIFSNEMAKVDDSFFHRLEESFLVEEDKKHERHPIFGNIVDEVAYHEKYPTIYHLRKKLVDSTDKADLRLIYLALAHMIKFRGHFLIEGDLNPDNSDVDKLFIQLVQTYNQLFEENPINASGVDAKAILSARLSKSRRLENLIAQLPGEKKNGLFGNLIALSLGLTPNFKSNFDLAEDAKLQLSKDTYDDDLDNLLAQIGDQYADLFLAAKNLSDAILLSDILRVNTEITKAPLSASMIKRYDEHHQDLTLLKALVRQQLPEKYKEIFFDQSKNGYAGYIDGGASQEEFYKFIKPILEKMDGTEELLVKLNREDLLRKQRTFDNGSIPHQIHLGELHAILRRQEDFYPFLKDNREKIEKILTFRIPYYVGPLARGNSRFAWMTRKSEETITPWNFEEVVDKGASAQSFIERMTNFDKNLPNEKVLPKHSLLYEYFTVYNELTKVKYVTEGMRKPAFLSGEQKKAIVDLLFKTNRKVTVKQLKEDYFKKIECFDSVEISGVEDRFNASLGTYHDLLKIIKDKDFLDNEENEDILEDIVLTLTLFEDREMIEERLKTYAHLFDDKVMKQLKRRRYTGWGRLSRKLINGIRDKQSGKTILDFLKSDGFANRNFMQLIHDDSLTFKEDIQKAQVSGQGDSLHEHIANLAGSPAIKKGILQTVKVVDELVKVMGRHKPENIVIEMARENQTTQKGQKNSRERMKRIEEGIKELGSQILKEHPVENTQLQNEKLYLYYLQNGRDMYVDQELDINRLSDYDVDHIVPQSFLKDDSIDNKVLTRSDKARGKSDNVPSEEVVKKMKNYWRQLLNAKLITQRKFDNLTKAERGGLSELDKAGFIKRQLVETRQITKHVAQILDSRMNTKYDENDKLIREVKVITLKSKLVSDFRKDFQFYKVREINNYHHAHDAYLNAVVGTALIKKYPKLESEFVYGDYKVYDVRKMIAKSEQEIGKATAKYFFYSNIMNFFKTEITLANGEIRKRPLIETNGETGEIVWDKGRDFATVRKVLSMPQVNIVKKTEVQTGGFSKESILPKRNSDKLIARKKDWDPKKYGGFDSPTVAYSVLVVAKVEKGKSKKLKSVKELLGITIMERSSFEKNPIDFLEAKGYKEVKKDLIIKLPKYSLFELENGRKRMLASAGELQKGNELALPSKYVNFLYLASHYEKLKGSPEDNEQKQLFVEQHKHYLDEIIEQISEFSKRVILADANLDKVLSAYNKHRDKPIREQAENIIHLFTLTNLGAPAAFKYFDTTIDRKRYTSTKEVLDATLIHQSITGLYETRIDLSQLGGDGGPAPGSSGGSGGMDPLQLLQPLEAEIKGTKLKAHWNSGATITCVPQAFLEEEVPIKNIWIKTIHGEKEQPVYYLTFKIQGRKVEAEVISSPYDYILVSPSDIPWLMKKPLQLTTLVPLQEYEERLLKQTMLTGSYKEKLQSLFLKYDALWQHWENQVGHRRIKPHHIATGTVNPRPQKQYPINPKAKASIQTVINDLLKQGVLIQQNSIMNTPVYPVPKPDGKWRMVLDYREVNKTIPLIAAQNQHSAGILSSIFRGKYKTTLDLSNGFWAHSITPESYWLTAFTWLGQQYCWTRLPQGFLNSPALFNADVVDLLKEVPNVQVYVDDIYISHDDPREHLEQLEKVFSLLLNAGYVVSLKKSEIAQHEVEFLGFNITKEGRGLTETFKQKLLNITPPRDLKQLQSILGLLNFARNFIPNFSELVKPLYNIIATAPGKYITWTTDNSQQLQNIISMLNSAENLEERNPEVRLIMKVNTSPSAGYIRFYNEFAKRPIMYLNYVYTKAEVKFTNTEKLLTTIHKGLIKALDLGMGQEILVYSPIVSMTKIQKTPLPERKALPIRWITWMSYLEDPRIQFHYDKTLPELQQVPTVTDDIIAKIKHPSEFSMVFYTDGSAIKHPNVNKSHNAGMGIAQVQFKPEFTVINTWSIPLGDHTAQLAEVAAVEFACKKALKIDGPVLIVTDSFYVAESVNKELPYWQSNGFFNNKKKPLKHVSKWKSIADCIQLKPDIIIIHEKGHQPTASTFHTEGNNLADKLATQGSYVVNAGKRTADGSEFEKRTADGSEFESPKKKAKVE

SEQ ID NO: 7190 - protein, 2174 aa, synthetic construct
MPAAKRVKLDGGDKKYSIGLDIGTNSVGWAVITDEYKVPSKKFKVLGNTDRHSIKKNLIGALLFDSGETAEATRLKRTARRRYTRRKNRICYLQEIFSNEMAKVDDSFFHRLEESFLVEEDKKHERHPIFGNIVDEVAYHEKYPTIYHLRKKLVDSTDKADLRLIYLALAHMIKFRGHFLIEGDLNPDNSDVDKLFIQLVQTYNQLFEENPINASGVDAKAILSARLSKSRRLENLIAQLPGEKKNGLFGNLIALSLGLTPNFKSNFDLAEDAKLQLSKDTYDDDLDNLLAQIGDQYADLFLAAKNLSDAILLSDILRVNTEITKAPLSASMIKRYDEHHQDLTLLKALVRQQLPEKYKEIFFDQSKNGYAGYIDGGASQEEFYKFIKPILEKMDGTEELLVKLNREDLLRKQRTFDNGSIPHQIHLGELHAILRRQEDFYPFLKDNREKIEKILTFRIPYYVGPLARGNSRFAWMTRKSEETITPWNFEEVVDKGASAQSFIERMTNFDKNLPNEKVLPKHSLLYEYFTVYNELTKVKYVTEGMRKPAFLSGEQKKAIVDLLFKTNRKVTVKQLKEDYFKKIECFDSVEISGVEDRFNASLGTYHDLLKIIKDKDFLDNEENEDILEDIVLTLTLFEDREMIEERLKTYAHLFDDKVMKQLKRRRYTGWGRLSRKLINGIRDKQSGKTILDFLKSDGFANRNFMQLIHDDSLTFKEDIQKAQVSGQGDSLHEHIANLAGSPAIKKGILQTVKVVDELVKVMGRHKPENIVIEMARENQTTQKGQKNSRERMKRIEEGIKELGSQILKEHPVENTQLQNEKLYLYYLQNGRDMYVDQELDINRLSDYDVDHIVPQSFLKDDSIDNKVLTRSDKARGKSDNVPSEEVVKKMKNYWRQLLNAKLITQRKFDNLTKAERGGLSELDKAGFIKRQLVETRQITKHVAQILDSRMNTKYDENDKLIREVKVITLKSKLVSDFRKDFQFYKVREINNYHHAHDAYLNAVVGTALIKKYPKLESEFVYGDYKVYDVRKMIAKSEQEIGKATAKYFFYSNIMNFFKTEITLANGEIRKRPLIETNGETGEIVWDKGRDFATVRKVLSMPQVNIVKKTEVQTGGFSKESILPKRNSDKLIARKKDWDPKKYGGFDSPTVAYSVLVVAKVEKGKSKKLKSVKELLGITIMERSSFEKNPIDFLEAKGYKEVKKDLIIKLPKYSLFELENGRKRMLASAGELQKGNELALPSKYVNFLYLASHYEKLKGSPEDNEQKQLFVEQHKHYLDEIIEQISEFSKRVILADANLDKVLSAYNKHRDKPIREQAENIIHLFTLTNLGAPAAFKYFDTTIDRKRYTSTKEVLDATLIHQSITGLYETRIDLSQLGGDGGPAPGSSGGSGGMNPLQLLQPLPAEVKGTKLLAHWNSGATITCIPESFLEDEQPIKQTLIKTIHGEKQQNVYYLTFKVKGRKVEAEVIASPYEYILLSPTDVPWLTQQPLQLTILVPLQEYQDRILNKTALPEEQKQQLKALFTKYDNLWQHWENQVGHRKIRPHNIATGDYPPRPQKQYPINPKAKPSIQIVIDDLLKQGVLTPQNSTMNTPVYPVPKPDGRWRMVLDYREVNKTIPLTAAQNQHSAGILATIVRQKYKTTLDLANGFWAHPITPDSYWLTAFTWQGKQYCWTRLPQGFLNSPALFTADAVDLLKEVPNVQVYVDDIYLSHDNPHEHIQQLEKVFQILLQAGYVVSLKKSEIGQRTVEFLGFNITKEGRGLTDTFKTKLLNVTPPKDLKQLQSILGLLNFARNFIPNFAELVQTLYNLIASSKGKYIEWTEDNTKQLNKVIEALNTASNLEERLPDQRLVIKVNTSPSAGYVRYYNESGKKPIMYLNYVFSKAELKFSMLEKLLTTMHKALIKAMDLAMGQEILVYSPIVSMTKIQKTPLPERKALPIRWITWMTYLEDPRIQFHYDKTLPELKHIPDVYTSSIPPLKHPSQYEGVFCTDGSAIKSPDPTKSNNAGMGIVHAIYNPEYKILNQWSIPLGHHTAQMAEIAAVEFACKKALKVPGPVLVITDSFYVAESANKELPYWKSNGFVNNKKEPLKHISKWKSIAECLSIKPDITIQHEKGHQPINTSIHTEGNALADKLATQGSYVVNAGKRTADGSEFEKRTADGSEFESPKKKAKVE

SEQ ID NO: 7191 - protein, 2092 aa, synthetic construct
MPAAKRVKLDGGDKKYSIGLDIGTNSVGWAVITDEYKVPSKKFKVLGNTDRHSIKKNLIGALLFDSGETAEATRLKRTARRRYTRRKNRICYLQEIFSNEMAKVDDSFFHRLEESFLVEEDKKHERHPIFGNIVDEVAYHEKYPTIYHLRKKLVDSTDKADLRLIYLALAHMIKFRGHFLIEGDLNPDNSDVDKLFIQLVQTYNQLFEENPINASGVDAKAILSARLSKSRRLENLIAQLPGEKKNGLFGNLIALSLGLTPNFKSNFDLAEDAKLQLSKDTYDDDLDNLLAQIGDQYADLFLAAKNLSDAILLSDILRVNTEITKAPLSASMIKRYDEHHQDLTLLKALVRQQLPEKYKEIFFDQSKNGYAGYIDGGASQEEFYKFIKPILEKMDGTEELLVKLNREDLLRKQRTFDNGSIPHQIHLGELHAILRRQEDFYPFLKDNREKIEKILTFRIPYYVGPLARGNSRFAWMTRKSEETITPWNFEEVVDKGASAQSFIERMTNFDKNLPNEKVLPKHSLLYEYFTVYNELTKVKYVTEGMRKPAFLSGEQKKAIVDLLFKTNRKVTVKQLKEDYFKKIECFDSVEISGVEDRFNASLGTYHDLLKIIKDKDFLDNEENEDILEDIVLTLTLFEDREMIEERLKTYAHLFDDKVMKQLKRRRYTGWGRLSRKLINGIRDKQSGKTILDFLKSDGFANRNFMQLIHDDSLTFKEDIQKAQVSGQGDSLHEHIANLAGSPAIKKGILQTVKVVDELVKVMGRHKPENIVIEMARENQTTQKGQKNSRERMKRIEEGIKELGSQILKEHPVENTQLQNEKLYLYYLQNGRDMYVDQELDINRLSDYDVDHIVPQSFLKDDSIDNKVLTRSDKARGKSDNVPSEEVVKKMKNYWRQLLNAKLITQRKFDNLTKAERGGLSELDKAGFIKRQLVETRQITKHVAQILDSRMNTKYDENDKLIREVKVITLKSKLVSDFRKDFQFYKVREINNYHHAHDAYLNAVVGTALIKKYPKLESEFVYGDYKVYDVRKMIAKSEQEIGKATAKYFFYSNIMNFFKTEITLANGEIRKRPLIETNGETGEIVWDKGRDFATVRKVLSMPQVNIVKKTEVQTGGFSKESILPKRNSDKLIARKKDWDPKKYGGFDSPTVAYSVLVVAKVEKGKSKKLKSVKELLGITIMERSSFEKNPIDFLEAKGYKEVKKDLIIKLPKYSLFELENGRKRMLASAGELQKGNELALPSKYVNFLYLASHYEKLKGSPEDNEQKQLFVEQHKHYLDEIIEQISEFSKRVILADANLDKVLSAYNKHRDKPIREQAENIIHLFTLTNLGAPAAFKYFDTTIDRKRYTSTKEVLDATLIHQSITGLYETRIDLSQLGGDGGPAPGSSGGSGGVLNLEEEYRLHEKPVPSSIDPSWLQLFPTVWAERAGMGLANQVPPVVVELRSGASPVAVRQYPMSKEAREGIRPHIQRFLDLGVLVPCQSPWNTPLLPVKKPGTNDYRPVQDLREINKRVQDIHPTVPNPYNLLSSLPPSHTWYSVLDLKDAFFCLKLHPNSQPLFAFEWRDPEKGNTGQLTWTRLPQGFKNSPTLFNEALHRDLAPFRALNPQVVLLQYVDDLLVAAPTYRDCKEGTQKLLQELSKLGYRVSAKKAQLCQKEVTYLGYLLKEGKRWLTPARKATVMKIPPPTTPRQVREFLGTAGFCRLWIPGFASLAAPLYPLTKPSIPFIWTEEHQKAFDRIKEALLSAPALALPDLTKPFTLYVDERAGVARGVLTQTLGPWRRPVAYLSKKLDPVASGWPTCLKAVAAVALLLKDADKLTLGQNVTVIASHSLESIVRQPPDRWMTNARMTHYQSLLLNERVSFAPPAVLNPATLLPVESEATPVHRCSEILAEETGTRRDLKDQPLPGVPAWYTDGSSFIAEGKRRAGAAIVDGKRTVWASSLPEGTSAQKAELVALTQALRLAEGKDINIYTDSRYAFATAHIHGAIYKQRGWLTSAGKDIKNKEEILALLEAIHLPKRVAIIHCPGHQKGNDPVATGNRRADEAAKQAALSTRVLAETTKPAGKRTADGSEFEKRTADGSEFESPKKKAKVE

SEQ ID NO: 7192 - protein, 2092 aa, synthetic construct
MPAAKRVKLDGGDKKYSIGLDIGTNSVGWAVITDEYKVPSKKFKVLGNTDRHSIKKNLIGALLFDSGETAEATRLKRTARRRYTRRKNRICYLQEIFSNEMAKVDDSFFHRLEESFLVEEDKKHERHPIFGNIVDEVAYHEKYPTIYHLRKKLVDSTDKADLRLIYLALAHMIKFRGHFLIEGDLNPDNSDVDKLFIQLVQTYNQLFEENPINASGVDAKAILSARLSKSRRLENLIAQLPGEKKNGLFGNLIALSLGLTPNFKSNFDLAEDAKLQLSKDTYDDDLDNLLAQIGDQYADLFLAAKNLSDAILLSDILRVNTEITKAPLSASMIKRYDEHHQDLTLLKALVRQQLPEKYKEIFFDQSKNGYAGYIDGGASQEEFYKFIKPILEKMDGTEELLVKLNREDLLRKQRTFDNGSIPHQIHLGELHAILRRQEDFYPFLKDNREKIEKILTFRIPYYVGPLARGNSRFAWMTRKSEETITPWNFEEVVDKGASAQSFIERMTNFDKNLPNEKVLPKHSLLYEYFTVYNELTKVKYVTEGMRKPAFLSGEQKKAIVDLLFKTNRKVTVKQLKEDYFKKIECFDSVEISGVEDRFNASLGTYHDLLKIIKDKDFLDNEENEDILEDIVLTLTLFEDREMIEERLKTYAHLFDDKVMKQLKRRRYTGWGRLSRKLINGIRDKQSGKTILDFLKSDGFANRNFMQLIHDDSLTFKEDIQKAQVSGQGDSLHEHIANLAGSPAIKKGILQTVKVVDELVKVMGRHKPENIVIEMARENQTTQKGQKNSRERMKRIEEGIKELGSQILKEHPVENTQLQNEKLYLYYLQNGRDMYVDQELDINRLSDYDVDHIVPQSFLKDDSIDNKVLTRSDKARGKSDNVPSEEVVKKMKNYWRQLLNAKLITQRKFDNLTKAERGGLSELDKAGFIKRQLVETRQITKHVAQILDSRMNTKYDENDKLIREVKVITLKSKLVSDFRKDFQFYKVREINNYHHAHDAYLNAVVGTALIKKYPKLESEFVYGDYKVYDVRKMIAKSEQEIGKATAKYFFYSNIMNFFKTEITLANGEIRKRPLIETNGETGEIVWDKGRDFATVRKVLSMPQVNIVKKTEVQTGGFSKESILPKRNSDKLIARKKDWDPKKYGGFDSPTVAYSVLVVAKVEKGKSKKLKSVKELLGITIMERSSFEKNPIDFLEAKGYKEVKKDLIIKLPKYSLFELENGRKRMLASAGELQKGNELALPSKYVNFLYLASHYEKLKGSPEDNEQKQLFVEQHKHYLDEIIEQISEFSKRVILADANLDKVLSAYNKHRDKPIREQAENIIHLFTLTNLGAPAAFKYFDTTIDRKRYTSTKEVLDATLIHQSITGLYETRIDLSQLGGDGGPAPGSSGGSGGVLNLEEEYRLHEKPVPSSIDPSWLQLFPTVWAERAGMGLANQVPPVVVELRSGASPVAVRQYPMSKEAREGIRPHIQRFLDLGVLVPCQSPWNTPLLPVKKPGTNDYRPVQDLREINKRVQDIHPTVPNPYNLLSSLPPSHTWYSVLDLKDAFFCLKLHPNSQPLFAFEWRDPEKGNTGQLTWTRLPQGFKNSPTLFNEALHRDLAPFRALNPQVVLLQYVDDLLVAAPTYRDCKEGTQKLLQELSKLGYRVSAKKAQLCQKEVTYLGYLLKEGKRWLTPARKATVMKIPPPTTPRQVREFLGKAGFCRLFIPGFASLAAPLYPLTKPSIPFIWTEEHQKAFDRIKEALLSAPALALPDLTKPFTLYVDERAGVARGVLTQTLGPWRRPVAYLSKKLDPVASGWPTCLKAVAAVALLLKDADKLTLGQNVTVIASHSLESIVRQPPDRWMTNARMTHYQSLLLNERVSFAPPAVLNPATLLPVESEATPVHRCSEILAEETGTRRDLKDQPLPGVPAWYTDGSSFIAEGKRRAGAAIVDGKRTVWASSLPEGTSAQKAELVALTQALRLAEGKDINIYTDSRYAFATAHIHGAIYKQRGWLTSAGKDIKNKEEILALLEAIHLPKRVAIIHCPGHQKGNDPVATGNRRADEAAKQAALSTRVLAETTKPAGKRTADGSEFEKRTADGSEFESPKKKAKVE

SEQ ID NO: 7193 - protein, 2095 aa, synthetic construct
MPAAKRVKLDGGDKKYSIGLDIGTNSVGWAVITDEYKVPSKKFKVLGNTDRHSIKKNLIGALLFDSGETAEATRLKRTARRRYTRRKNRICYLQEIFSNEMAKVDDSFFHRLEESFLVEEDKKHERHPIFGNIVDEVAYHEKYPTIYHLRKKLVDSTDKADLRLIYLALAHMIKFRGHFLIEGDLNPDNSDVDKLFIQLVQTYNQLFEENPINASGVDAKAILSARLSKSRRLENLIAQLPGEKKNGLFGNLIALSLGLTPNFKSNFDLAEDAKLQLSKDTYDDDLDNLLAQIGDQYADLFLAAKNLSDAILLSDILRVNTEITKAPLSASMIKRYDEHHQDLTLLKALVRQQLPEKYKEIFFDQSKNGYAGYIDGGASQEEFYKFIKPILEKMDGTEELLVKLNREDLLRKQRTFDNGSIPHQIHLGELHAILRRQEDFYPFLKDNREKIEKILTFRIPYYVGPLARGNSRFAWMTRKSEETITPWNFEEVVDKGASAQSFIERMTNFDKNLPNEKVLPKHSLLYEYFTVYNELTKVKYVTEGMRKPAFLSGEQKKAIVDLLFKTNRKVTVKQLKEDYFKKIECFDSVEISGVEDRFNASLGTYHDLLKIIKDKDFLDNEENEDILEDIVLTLTLFEDREMIEERLKTYAHLFDDKVMKQLKRRRYTGWGRLSRKLINGIRDKQSGKTILDFLKSDGFANRNFMQLIHDDSLTFKEDIQKAQVSGQGDSLHEHIANLAGSPAIKKGILQTVKVVDELVKVMGRHKPENIVIEMARENQTTQKGQKNSRERMKRIEEGIKELGSQILKEHPVENTQLQNEKLYLYYLQNGRDMYVDQELDINRLSDYDVDHIVPQSFLKDDSIDNKVLTRSDKARGKSDNVPSEEVVKKMKNYWRQLLNAKLITQRKFDNLTKAERGGLSELDKAGFIKRQLVETRQITKHVAQILDSRMNTKYDENDKLIREVKVITLKSKLVSDFRKDFQFYKVREINNYHHAHDAYLNAVVGTALIKKYPKLESEFVYGDYKVYDVRKMIAKSEQEIGKATAKYFFYSNIMNFFKTEITLANGEIRKRPLIETNGETGEIVWDKGRDFATVRKVLSMPQVNIVKKTEVQTGGFSKESILPKRNSDKLIARKKDWDPKKYGGFDSPTVAYSVLVVAKVEKGKSKKLKSVKELLGITIMERSSFEKNPIDFLEAKGYKEVKKDLIIKLPKYSLFELENGRKRMLASAGELQKGNELALPSKYVNFLYLASHYEKLKGSPEDNEQKQLFVEQHKHYLDEIIEQISEFSKRVILADANLDKVLSAYNKHRDKPIREQAENIIHLFTLTNLGAPAAFKYFDTTIDRKRYTSTKEVLDATLIHQSITGLYETRIDLSQLGGDGGGGSEAAAKPAPGGTLQLEEEYRLFEPESTQKQEMDIWLKNFPQAWAETGGMGTAHCQAPVLIQLKATATPISIRQYPMPHEAYQGIKPHIRRMLDQGILKPCQSPWNTPLLPVKKPGTEDYRPVQDLREVNKRVEDIHPTVPNPYNLLSTLPPSHPWYTVLDLKDAFFCLRLHSESQLLFAFEWRDPEIGLSGQLTWTRLPQGFKNSPTLFNEALHSDLADFRVRYPALVLLQYVDDLLLAAATRTECLEGTKALLETLGNKGYRASAKKAQICLQEVTYLGYSLKDGQRWLTKARKEAILSIPVPKNSRQVREFLGTAGYCRLWIPGFAELAAPLYPLTRPGTLFQWGTEQQLAFEDIKKALLSSPALGLPDITKPFELFIDENSGFAKGVLVQKLGPWKRPVAYLSKKLDTVASGWPPCLRMVAAIAILVKDAGKLTLGQPLTILTSHPVEALVRQPPNKWLSNARMTHYQAMLLDAERVHFGPTVSLNPATLLPLPSGGNHHDCLQILAETHGTRPDLTDQPLPDADLTWYTDGSSFIRNGEREAGAAVTTESEVIWAAPLPPGTSAQRAELIALTQALKMAEGKKLTVYTDSRYAFATTHVHGEIYRRRGWLTSEGKEIKNKNEILALLEALFLPKRLSIIHCPGHQKGDSPQAKGNRLADDTAKKAATETHSSLTVLPAGKRTADGSEFEKRTADGSEFESPKKKAKVE

SEQ ID NO: 7194 - protein, 2095 aa, synthetic construct
MPAAKRVKLDGGDKKYSIGLDIGTNSVGWAVITDEYKVPSKKFKVLGNTDRHSIKKNLIGALLFDSGETAEATRLKRTARRRYTRRKNRICYLQEIFSNEMAKVDDSFFHRLEESFLVEEDKKHERHPIFGNIVDEVAYHEKYPTIYHLRKKLVDSTDKADLRLIYLALAHMIKFRGHFLIEGDLNPDNSDVDKLFIQLVQTYNQLFEENPINASGVDAKAILSARLSKSRRLENLIAQLPGEKKNGLFGNLIALSLGLTPNFKSNFDLAEDAKLQLSKDTYDDDLDNLLAQIGDQYADLFLAAKNLSDAILLSDILRVNTEITKAPLSASMIKRYDEHHQDLTLLKALVRQQLPEKYKEIFFDQSKNGYAGYIDGGASQEEFYKFIKPILEKMDGTEELLVKLNREDLLRKQRTFDNGSIPHQIHLGELHAILRRQEDFYPFLKDNREKIEKILTFRIPYYVGPLARGNSRFAWMTRKSEETITPWNFEEVVDKGASAQSFIERMTNFDKNLPNEKVLPKHSLLYEYFTVYNELTKVKYVTEGMRKPAFLSGEQKKAIVDLLFKTNRKVTVKQLKEDYFKKIECFDSVEISGVEDRFNASLGTYHDLLKIIKDKDFLDNEENEDILEDIVLTLTLFEDREMIEERLKTYAHLFDDKVMKQLKRRRYTGWGRLSRKLINGIRDKQSGKTILDFLKSDGFANRNFMQLIHDDSLTFKEDIQKAQVSGQGDSLHEHIANLAGSPAIKKGILQTVKVVDELVKVMGRHKPENIVIEMARENQTTQKGQKNSRERMKRIEEGIKELGSQILKEHPVENTQLQNEKLYLYYLQNGRDMYVDQELDINRLSDYDVDHIVPQSFLKDDSIDNKVLTRSDKARGKSDNVPSEEVVKKMKNYWRQLLNAKLITQRKFDNLTKAERGGLSELDKAGFIKRQLVETRQITKHVAQILDSRMNTKYDENDKLIREVKVITLKSKLVSDFRKDFQFYKVREINNYHHAHDAYLNAVVGTALIKKYPKLESEFVYGDYKVYDVRKMIAKSEQEIGKATAKYFFYSNIMNFFKTEITLANGEIRKRPLIETNGETGEIVWDKGRDFATVRKVLSMPQVNIVKKTEVQTGGFSKESILPKRNSDKLIARKKDWDPKKYGGFDSPTVAYSVLVVAKVEKGKSKKLKSVKELLGITIMERSSFEKNPIDFLEAKGYKEVKKDLIIKLPKYSLFELENGRKRMLASAGELQKGNELALPSKYVNFLYLASHYEKLKGSPEDNEQKQLFVEQHKHYLDEIIEQISEFSKRVILADANLDKVLSAYNKHRDKPIREQAENIIHLFTLTNLGAPAAFKYFDTTIDRKRYTSTKEVLDATLIHQSITGLYETRIDLSQLGGDGGGGSEAAAKPAPGGTLQLEEEYRLFEPESTQKQEMDIWLKNFPQAWAETGGMGTAHCQAPVLIQLKATATPISIRQYPMPHEAYQGIKPHIRRMLDQGILKPCQSPWNTPLLPVKKPGTEDYRPVQDLREVNKRVEDIHPTVPNPYNLLSTLPPSHPWYTVLDLKDAFFCLRLHSESQLLFAFEWRDPEIGLSGQLTWTRLPQGFKNSPTLFNEALHSDLADFRVRYPALVLLQYVDDLLLAAATRTECLEGTKALLETLGNKGYRASAKKAQICLQEVTYLGYSLKDGQRWLTKARKEAILSIPVPKNSRQVREFLGKAGYCRLFIPGFAELAAPLYPLTRPGTLFQWGTEQQLAFEDIKKALLSSPALGLPDITKPFELFIDENSGFAKGVLVQKLGPWKRPVAYLSKKLDTVASGWPPCLRMVAAIAILVKDAGKLTLGQPLTILTSHPVEALVRQPPNKWLSNARMTHYQAMLLDAERVHFGPTVSLNPATLLPLPSGGNHHDCLQILAETHGTRPDLTDQPLPDADLTWYTDGSSFIRNGEREAGAAVTTESEVIWAAPLPPGTSAQRAELIALTQALKMAEGKKLTVYTDSRYAFATTHVHGEIYRRRGWLTSEGKEIKNKNEILALLEALFLPKRLSIIHCPGHQKGDSPQAKGNRLADDTAKKAATETHSSLTVLPAGKRTADGSEFEKRTADGSEFESPKKKAKVE

SEQ ID NO: 7195 - protein, 2176 aa, synthetic construct
MPAAKRVKLDGGDKKYSIGLDIGTNSVGWAVITDEYKVPSKKFKVLGNTDRHSIKKNLIGALLFDSGETAEATRLKRTARRRYTRRKNRICYLQEIFSNEMAKVDDSFFHRLEESFLVEEDKKHERHPIFGNIVDEVAYHEKYPTIYHLRKKLVDSTDKADLRLIYLALAHMIKFRGHFLIEGDLNPDNSDVDKLFIQLVQTYNQLFEENPINASGVDAKAILSARLSKSRRLENLIAQLPGEKKNGLFGNLIALSLGLTPNFKSNFDLAEDAKLQLSKDTYDDDLDNLLAQIGDQYADLFLAAKNLSDAILLSDILRVNTEITKAPLSASMIKRYDEHHQDLTLLKALVRQQLPEKYKEIFFDQSKNGYAGYIDGGASQEEFYKFIKPILEKMDGTEELLVKLNREDLLRKQRTFDNGSIPHQIHLGELHAILRRQEDFYPFLKDNREKIEKILTFRIPYYVGPLARGNSRFAWMTRKSEETITPWNFEEVVDKGASAQSFIERMTNFDKNLPNEKVLPKHSLLYEYFTVYNELTKVKYVTEGMRKPAFLSGEQKKAIVDLLFKTNRKVTVKQLKEDYFKKIECFDSVEISGVEDRFNASLGTYHDLLKIIKDKDFLDNEENEDILEDIVLTLTLFEDREMIEERLKTYAHLFDDKVMKQLKRRRYTGWGRLSRKLINGIRDKQSGKTILDFLKSDGFANRNFMQLIHDDSLTFKEDIQKAQVSGQGDSLHEHIANLAGSPAIKKGILQTVKVVDELVKVMGRHKPENIVIEMARENQTTQKGQKNSRERMKRIEEGIKELGSQILKEHPVENTQLQNEKLYLYYLQNGRDMYVDQELDINRLSDYDVDHIVPQSFLKDDSIDNKVLTRSDKARGKSDNVPSEEVVKKMKNYWRQLLNAKLITQRKFDNLTKAERGGLSELDKAGFIKRQLVETRQITKHVAQILDSRMNTKYDENDKLIREVKVITLKSKLVSDFRKDFQFYKVREINNYHHAHDAYLNAVVGTALIKKYPKLESEFVYGDYKVYDVRKMIAKSEQEIGKATAKYFFYSNIMNFFKTEITLANGEIRKRPLIETNGETGEIVWDKGRDFATVRKVLSMPQVNIVKKTEVQTGGFSKESILPKRNSDKLIARKKDWDPKKYGGFDSPTVAYSVLVVAKVEKGKSKKLKSVKELLGITIMERSSFEKNPIDFLEAKGYKEVKKDLIIKLPKYSLFELENGRKRMLASAGELQKGNELALPSKYVNFLYLASHYEKLKGSPEDNEQKQLFVEQHKHYLDEIIEQISEFSKRVILADANLDKVLSAYNKHRDKPIREQAENIIHLFTLTNLGAPAAFKYFDTTIDRKRYTSTKEVLDATLIHQSITGLYETRIDLSQLGGDGGGGSEAAAKPAPGGMNPLQLLQPLPAEIKGTKLLAHWNSGATITCIPESFLEDEQPIKKTLIKTIHGEKQQNVYYVTFKVKGRKVEAEVIASPYEYILLSPTDVPWLTQQPLQLTILVPLQEYQEKILSKTALPEDQKQQLKTLFVKYDNLWQHWENQVGHRKIRPHNIATGDYPPRPQKQYPINPKAKPSIQIVIDDLLKQGVLTPQNSTMNTPVYPVPKPDGRWRMVLDYREVNKTIPLTAAQNQHSAGILATIVRQKYKTTLDLANGFWAHPITPESYWLTAFTWQGKQYCWTRLPQGFLNSPALFNADVVDLLKEIPNVQVYVDDIYLSHDDPKEHVQQLEKVFQILLQAGYVVSLKKSEIGQKTVEFLGFNITKEGRGLTDTFKTKLLNITPPKDLKQLQSILGKLNFARNFIPNFAELVQPLYNLIAPAKGKYIEWSEENTKQLNMVIEALNTASNLEERLPEQRLVIKVNTSPSAGYVRYYNETGKKPIMYLNYVFSKAELKFSMLEKLLTTMHKALIKAMDLAMGQEILVYSPIVSMTKIQKTPLPERKALPIRWITWMTYLEDPRIQFHYDKTLPELKHIPDVYTSSQSPVKHPSQYEGVFYTDGSAIKSPDPTKSNNAGMGIVHATYKPEYQVLNQWSIPLGNHTAQMAEIAAVEFACKKALKIPGPVLVITDSFYVAESANKELPYWKSNGFVNNKKKPLKHISKWKSIAECLSMKPDITIQHEKGISLQIPVFILKGNALADKLATQGSYVVNAGKRTADGSEFEKRTADGSEFESPKKKAKVE

SEQ ID NO: 7196 - protein, 2218 aa, synthetic construct
MPAAKRVKLDGGDKKYSIGLDIGTNSVGWAVITDEYKVPSKKFKVLGNTDRHSIKKNLIGALLFDSGETAEATRLKRTARRRYTRRKNRICYLQEIFSNEMAKVDDSFFHRLEESFLVEEDKKHERHPIFGNIVDEVAYHEKYPTIYHLRKKLVDSTDKADLRLIYLALAHMIKFRGHFLIEGDLNPDNSDVDKLFIQLVQTYNQLFEENPINASGVDAKAILSARLSKSRRLENLIAQLPGEKKNGLFGNLIALSLGLTPNFKSNFDLAEDAKLQLSKDTYDDDLDNLLAQIGDQYADLFLAAKNLSDAILLSDILRVNTEITKAPLSASMIKRYDEHHQDLTLLKALVRQQLPEKYKEIFFDQSKNGYAGYIDGGASQEEFYKFIKPILEKMDGTEELLVKLNREDLLRKQRTFDNGSIPHQIHLGELHAILRRQEDFYPFLKDNREKIEKILTFRIPYYVGPLARGNSRFAWMTRKSEETITPWNFEEVVDKGASAQSFIERMTNFDKNLPNEKVLPKHSLLYEYFTVYNELTKVKYVTEGMRKPAFLSGEQKKAIVDLLFKTNRKVTVKQLKEDYFKKIECFDSVEISGVEDRFNASLGTYHDLLKIIKDKDFLDNEENEDILEDIVLTLTLFEDREMIEERLKTYAHLFDDKVMKQLKRRRYTGWGRLSRKLINGIRDKQSGKTILDFLKSDGFANRNFMQLIHDDSLTFKEDIQKAQVSGQGDSLHEHIANLAGSPAIKKGILQTVKVVDELVKVMGRHKPENIVIEMARENQTTQKGQKNSRERMKRIEEGIKELGSQILKEHPVENTQLQNEKLYLYYLQNGRDMYVDQELDINRLSDYDVDHIVPQSFLKDDSIDNKVLTRSDKARGKSDNVPSEEVVKKMKNYWRQLLNAKLITQRKFDNLTKAERGGLSELDKAGFIKRQLVETRQITKHVAQILDSRMNTKYDENDKLIREVKVITLKSKLVSDFRKDFQFYKVREINNYHHAHDAYLNAVVGTALIKKYPKLESEFVYGDYKVYDVRKMIAKSEQEIGKATAKYFFYSNIMNFFKTEITLANGEIRKRPLIETNGETGEIVWDKGRDFATVRKVLSMPQVNIVKKTEVQTGGFSKESILPKRNSDKLIARKKDWDPKKYGGFDSPTVAYSVLVVAKVEKGKSKKLKSVKELLGITIMERSSFEKNPIDFLEAKGYKEVKKDLIIKLPKYSLFELENGRKRMLASAGELQKGNELALPSKYVNFLYLASHYEKLKGSPEDNEQKQLFVEQHKHYLDEIIEQISEFSKRVILADANLDKVLSAYNKHRDKPIREQAENIIHLFTLTNLGAPAAFKYFDTTIDRKRYTSTKEVLDATLIHQSITGLYETRIDLSQLGGDGGGGSEAAAKPAPGGTLGDQGSRGSDPLPEPRVTLTVEGIPTEFLVNTGAEHSVLTKPMGKMGSKRTVVAGATGSKVYPWTTKRLLKIGQKQVTHSFLVIPECPAPLLGRDLLTKLKAQIQFSTEGPQVTWEDRPAMCLVLNLEEEYRLHEKPVPPSIDPSWLQLFPMVWAEKAGMGLANQVPPVVVELKSDASPVAVRQYPMSKEAREGIRPHIQRFLDLGILVPCQSPWNTPLLPVKKPGTNDYRPVQDLREVNKRVQDIHPTVPNPYNLLSSLPPSHTWYSVLDLKDAFFCLKLHPNSQPLFAFEWRDPEKGNTGQLTWTRLPQGFKNSPTLFNEALHRDLASFRALNPQVVMLQYVDDLLVAAPTYRDCKEGTRRLLQELSKLGYRVSAKKAQLCREEVTYLGYLLKGGKRWLTPARKATVMKIPTPTTPRQVREFLGTAGFCRLWIPGFASLAAPLYPLTRPKVPFTWTEAHQEAFGRIKEALLSAPALALPDLTKPFALYVDEKEGVARGVLTQTLGPWRRPVAYLSKKLDPVASGWPTCLKAIAAVALLLKDADKLTLGQNVLVIAPHNLESIVRQPPDRWMTNARMTHYQSLLLNERVSFAPPAILNPATLLPVESDDTPIHICSEILAEETGTRPDLRDQPLPGVPAWYTDGSSFIMDGRRQAGAAIVDNKRTVWASNLPEGTSAQKAELIALTQALRLAEGKSINIYTDSRYAFATAHVHGAIYKQRGWLTSAGKDIKNKEEILALLEAIHLPKRVAIIHCPGHQRGTDPVATGNRKADEAAKQAAQSTRILTETTKNAGKRTADGSEFEKRTADGSEFESPKKKAKVE

SEQ ID NO: 7197 - protein, 2218 aa, synthetic construct
MPAAKRVKLDGGDKKYSIGLDIGTNSVGWAVITDEYKVPSKKFKVLGNTDRHSIKKNLIGALLFDSGETAEATRLKRTARRRYTRRKNRICYLQEIFSNEMAKVDDSFFHRLEESFLVEEDKKHERHPIFGNIVDEVAYHEKYPTIYHLRKKLVDSTDKADLRLIYLALAHMIKFRGHFLIEGDLNPDNSDVDKLFIQLVQTYNQLFEENPINASGVDAKAILSARLSKSRRLENLIAQLPGEKKNGLFGNLIALSLGLTPNFKSNFDLAEDAKLQLSKDTYDDDLDNLLAQIGDQYADLFLAAKNLSDAILLSDILRVNTEITKAPLSASMIKRYDEHHQDLTLLKALVRQQLPEKYKEIFFDQSKNGYAGYIDGGASQEEFYKFIKPILEKMDGTEELLVKLNREDLLRKQRTFDNGSIPHQIHLGELHAILRRQEDFYPFLKDNREKIEKILTFRIPYYVGPLARGNSRFAWMTRKSEETITPWNFEEVVDKGASAQSFIERMTNFDKNLPNEKVLPKHSLLYEYFTVYNELTKVKYVTEGMRKPAFLSGEQKKAIVDLLFKTNRKVTVKQLKEDYFKKIECFDSVEISGVEDRFNASLGTYHDLLKIIKDKDFLDNEENEDILEDIVLTLTLFEDREMIEERLKTYAHLFDDKVMKQLKRRRYTGWGRLSRKLINGIRDKQSGKTILDFLKSDGFANRNFMQLIHDDSLTFKEDIQKAQVSGQGDSLHEHIANLAGSPAIKKGILQTVKVVDELVKVMGRHKPENIVIEMARENQTTQKGQKNSRERMKRIEEGIKELGSQILKEHPVENTQLQNEKLYLYYLQNGRDMYVDQELDINRLSDYDVDHIVPQSFLKDDSIDNKVLTRSDKARGKSDNVPSEEVVKKMKNYWRQLLNAKLITQRKFDNLTKAERGGLSELDKAGFIKRQLVETRQITKHVAQILDSRMNTKYDENDKLIREVKVITLKSKLVSDFRKDFQFYKVREINNYHHAHDAYLNAVVGTALIKKYPKLESEFVYGDYKVYDVRKMIAKSEQEIGKATAKYFFYSNIMNFFKTEITLANGEIRKRPLIETNGETGEIVWDKGRDFATVRKVLSMPQVNIVKKTEVQTGGFSKESILPKRNSDKLIARKKDWDPKKYGGFDSPTVAYSVLVVAKVEKGKSKKLKSVKELLGITIMERSSFEKNPIDFLEAKGYKEVKKDLIIKLPKYSLFELENGRKRMLASAGELQKGNELALPSKYVNFLYLASHYEKLKGSPEDNEQKQLFVEQHKHYLDEIIEQISEFSKRVILADANLDKVLSAYNKHRDKPIREQAENIIHLFTLTNLGAPAAFKYFDTTIDRKRYTSTKEVLDATLIHQSITGLYETRIDLSQLGGDGGGGSEAAAKPAPGGTLGDQGSRGSDPLPEPRVTLTVEGIPTEFLVNTGAEHSVLTKPMGKMGSKRTVVAGATGSKVYPWTTKRLLKIGQKQVTHSFLVIPECPAPLLGRDLLTKLKAQIQFSTEGPQVTWEDRPAMCLVLNLEEEYRLHEKPVPPSIDPSWLQLFPMVWAEKAGMGLANQVPPVVVELKSDASPVAVRQYPMSKEAREGIRPHIQRFLDLGILVPCQSPWNTPLLPVKKPGTNDYRPVQDLREVNKRVQDIHPTVPNPYNLLSSLPPSHTWYSVLDLKDAFFCLKLHPNSQPLFAFEWRDPEKGNTGQLTWTRLPQGFKNSPTLFNEALHRDLASFRALNPQVVMLQYVDDLLVAAPTYRDCKEGTRRLLQELSKLGYRVSAKKAQLCREEVTYLGYLLKGGKRWLTPARKATVMKIPTPTTPRQVREFLGKAGFCRLFIPGFASLAAPLYPLTRPKVPFTWTEAHQEAFGRIKEALLSAPALALPDLTKPFALYVDEKEGVARGVLTQTLGPWRRPVAYLSKKLDPVASGWPTCLKAIAAVALLLKDADKLTLGQNVLVIAPHNLESIVRQPPDRWMTNARMTHYQSLLLNERVSFAPPAILNPATLLPVESDDTPIHICSEILAEETGTRPDLRDQPLPGVPAWYTDGSSFIMDGRRQAGAAIVDNKRTVWASNLPEGTSAQKAELIALTQALRLAEGKSINIYTDSRYAFATAHVHGAIYKQRGWLTSAGKDIKNKEEILALLEAIHLPKRVAIIHCPGHQRGTDPVATGNRKADEAAKQAAQSTRILTETTKNAGKRTADGSEFEKRTADGSEFESPKKKAKVE

SEQ ID NO: 7198 - protein, 2096 aa, synthetic construct
MPAAKRVKLDGGDKKYSIGLDIGTNSVGWAVITDEYKVPSKKFKVLGNTDRHSIKKNLIGALLFDSGETAEATRLKRTARRRYTRRKNRICYLQEIFSNEMAKVDDSFFHRLEESFLVEEDKKHERHPIFGNIVDEVAYHEKYPTIYHLRKKLVDSTDKADLRLIYLALAHMIKFRGHFLIEGDLNPDNSDVDKLFIQLVQTYNQLFEENPINASGVDAKAILSARLSKSRRLENLIAQLPGEKKNGLFGNLIALSLGLTPNFKSNFDLAEDAKLQLSKDTYDDDLDNLLAQIGDQYADLFLAAKNLSDAILLSDILRVNTEITKAPLSASMIKRYDEHHQDLTLLKALVRQQLPEKYKEIFFDQSKNGYAGYIDGGASQEEFYKFIKPILEKMDGTEELLVKLNREDLLRKQRTFDNGSIPHQIHLGELHAILRRQEDFYPFLKDNREKIEKILTFRIPYYVGPLARGNSRFAWMTRKSEETITPWNFEEVVDKGASAQSFIERMTNFDKNLPNEKVLPKHSLLYEYFTVYNELTKVKYVTEGMRKPAFLSGEQKKAIVDLLFKTNRKVTVKQLKEDYFKKIECFDSVEISGVEDRFNASLGTYHDLLKIIKDKDFLDNEENEDILEDIVLTLTLFEDREMIEERLKTYAHLFDDKVMKQLKRRRYTGWGRLSRKLINGIRDKQSGKTILDFLKSDGFANRNFMQLIHDDSLTFKEDIQKAQVSGQGDSLHEHIANLAGSPAIKKGILQTVKVVDELVKVMGRHKPENIVIEMARENQTTQKGQKNSRERMKRIEEGIKELGSQILKEHPVENTQLQNEKLYLYYLQNGRDMYVDQELDINRLSDYDVDHIVPQSFLKDDSIDNKVLTRSDKARGKSDNVPSEEVVKKMKNYWRQLLNAKLITQRKFDNLTKAERGGLSELDKAGFIKRQLVETRQITKHVAQILDSRMNTKYDENDKLIREVKVITLKSKLVSDFRKDFQFYKVREINNYHHAHDAYLNAVVGTALIKKYPKLESEFVYGDYKVYDVRKMIAKSEQEIGKATAKYFFYSNIMNFFKTEITLANGEIRKRPLIETNGETGEIVWDKGRDFATVRKVLSMPQVNIVKKTEVQTGGFSKESILPKRNSDKLIARKKDWDPKKYGGFDSPTVAYSVLVVAKVEKGKSKKLKSVKELLGITIMERSSFEKNPIDFLEAKGYKEVKKDLIIKLPKYSLFELENGRKRMLASAGELQKGNELALPSKYVNFLYLASHYEKLKGSPEDNEQKQLFVEQHKHYLDEIIEQISEFSKRVILADANLDKVLSAYNKHRDKPIREQAENIIHLFTLTNLGAPAAFKYFDTTIDRKRYTSTKEVLDATLIHQSITGLYETRIDLSQLGGDGGGGSEAAAKPAPGGTLNLEDEYRLYETSAEPEVSPGSTWLSDFPQAWAETGGMGLAVRQAPLIIPLKATSTPVSIKQYPMSQEAKLGIKPHIQRLLDQGILVPCQSPWNTPLLPVKKPGTNDYRPVQDLREVNKRVEDIHPTVPNPYNLLSGLPPSHRWYTVLDLKDAFFCLRLHPTSQPLFAFEWRDPGMGISGQLTWTRLPQGFKNSPTLFNEALHRDLADFRIQHPDLILLQYVDDILLAATSELDCQQGTRALLLTLGNLGYRASAKKAQLCQKQVKYLGYLLKEGQRWLTEARKETVMGQPTPKTPRQLREFLGKAGFCRLFIPGFAEMAAPLYPLTKPGTLFNWGPDQQKAYQEIKQALLTAPALGLPDLTKPFELFVDEKQGYAKGVLTQKLGPWRRPVAYLSKKLDPVAAGWPPCLRMVAAIAVLRKDAGKLTMGQPLVILAPHAVEALVKQPPDRWLSNARMTHYQAMLLDTDRVQFGPVVALNPATLLPLPEEGAPHDCLEILAETHGTRPDLTDQPIPDADHTWYTDGSSFLQEGQRKAGAAVTTETEVIWARALPAGTSAQRAELIALTQALKMAEGKRLNVYTDSRYAFATAHIHGEIYRRRGWLTSEGREIKNKSEILALLKALFLPKRLSIIHCLGHQKGDSAEARGNRLADQAAREAAIKTPPDTSTLLAGKRTADGSEFEKRTADGSEFESPKKKAKVE

SEQ ID NO: 7199 - protein, 2096 aa, synthetic construct
MPAAKRVKLDGGDKKYSIGLDIGTNSVGWAVITDEYKVPSKKFKVLGNTDRHSIKKNLIGALLFDSGETAEATRLKRTARRRYTRRKNRICYLQEIFSNEMAKVDDSFFHRLEESFLVEEDKKHERHPIFGNIVDEVAYHEKYPTIYHLRKKLVDSTDKADLRLIYLALAHMIKFRGHFLIEGDLNPDNSDVDKLFIQLVQTYNQLFEENPINASGVDAKAILSARLSKSRRLENLIAQLPGEKKNGLFGNLIALSLGLTPNFKSNFDLAEDAKLQLSKDTYDDDLDNLLAQIGDQYADLFLAAKNLSDAILLSDILRVNTEITKAPLSASMIKRYDEHHQDLTLLKALVRQQLPEKYKEIFFDQSKNGYAGYIDGGASQEEFYKFIKPILEKMDGTEELLVKLNREDLLRKQRTFDNGSIPHQIHLGELHAILRRQEDFYPFLKDNREKIEKILTFRIPYYVGPLARGNSRFAWMTRKSEETITPWNFEEVVDKGASAQSFIERMTNFDKNLPNEKVLPKHSLLYEYFTVYNELTKVKYVTEGMRKPAFLSGEQKKAIVDLLFKTNRKVTVKQLKEDYFKKIECFDSVEISGVEDRFNASLGTYHDLLKIIKDKDFLDNEENEDILEDIVLTLTLFEDREMIEERLKTYAHLFDDKVMKQLKRRRYTGWGRLSRKLINGIRDKQSGKTILDFLKSDGFANRNFMQLIHDDSLTFKEDIQKAQVSGQGDSLHEHIANLAGSPAIKKGILQTVKVVDELVKVMGRHKPENIVIEMARENQTTQKGQKNSRERMKRIEEGIKELGSQILKEHPVENTQLQNEKLYLYYLQNGRDMYVDQELDINRLSDYDVDHIVPQSFLKDDSIDNKVLTRSDKARGKSDNVPSEEVVKKMKNYWRQLLNAKLITQRKFDNLTKAERGGLSELDKAGFIKRQLVETRQITKHVAQILDSRMNTKYDENDKLIREVKVITLKSKLVSDFRKDFQFYKVREINNYHHAHDAYLNAVVGTALIKKYPKLESEFVYGDYKVYDVRKMIAKSEQEIGKATAKYFFYSNIMNFFKTEITLANGEIRKRPLIETNGETGEIVWDKGRDFATVRKVLSMPQVNIVKKTEVQTGGFSKESILPKRNSDKLIARKKDWDPKKYGGFDSPTVAYSVLVVAKVEKGKSKKLKSVKELLGITIMERSSFEKNPIDFLEAKGYKEVKKDLIIKLPKYSLFELENGRKRMLASAGELQKGNELALPSKYVNFLYLASHYEKLKGSPEDNEQKQLFVEQHKHYLDEIIEQISEFSKRVILADANLDKVLSAYNKHRDKPIREQAENIIHLFTLTNLGAPAAFKYFDTTIDRKRYTSTKEVLDATLIHQSITGLYETRIDLSQLGGDGGGGSEAAAKPAPGGTLNIEDEYRLHETSKGPDVPLGSTWLSDFPQAWAETGGMGLAFRQAPLIISLKATSTPVSIKQYPMSQEARLGIKPHIQRLLDQGILVPCQSPWNTPLLPVKKPGTNDYRPVQDLREVNKRVEDIHPTVPNPYNLLSGLPPSHQWYTVLDLKDAFFCLRLHPTSQSLFAFEWKDPEMGISGQLTWTRLPQGFKNSPTLFNEALHRDLADFRIQHPDLILLQYVDDLLLAATSELDCQQGTRALLQTLGDLGYRASAKKAQICQKQVKYLGYLLKEGQRWLTEARKETVMGQPTPKTPRQLREFLGKAGLCRLFIPGFAEMAAPLYPLTKPGTLFKWGPDQQKAYQEIKQALLTAPALGLPDLTKPFELFVDEKQGYAKGVLTQKLGPWRRPVAYLSKKLDPVAAGWPPCLRMVAAIAVLTKDVGKLTMGQPLVILAPHAVEALVKQPPDRWLSNARMTHYQALLLDTDRVQFGPIVALNPATLLPLPEEGLQHDCLDILAEAHGTRPDLTDQPLPDADHTWYTDGSSFLQEGQRRAGAAVTTETEVIWAKALPAGTSAQRAELIALTQALKMAAGKKLNVYTDSRYAFATAHIHGEIYRRRGWLTSEGKEIKNKDEILALLKALFLPKRLSIIHCPGHQKGNHAEARGNRMADQAAREVATRETPETSTLLAGKRTADGSEFEKRTADGSEFESPKKKAKVE

SEQ ID NO: 7200 - protein, 2096 aa, synthetic construct
MPAAKRVKLDGGDKKYSIGLDIGTNSVGWAVITDEYKVPSKKFKVLGNTDRHSIKKNLIGALLFDSGETAEATRLKRTARRRYTRRKNRICYLQEIFSNEMAKVDDSFFHRLEESFLVEEDKKHERHPIFGNIVDEVAYHEKYPTIYHLRKKLVDSTDKADLRLIYLALAHMIKFRGHFLIEGDLNPDNSDVDKLFIQLVQTYNQLFEENPINASGVDAKAILSARLSKSRRLENLIAQLPGEKKNGLFGNLIALSLGLTPNFKSNFDLAEDAKLQLSKDTYDDDLDNLLAQIGDQYADLFLAAKNLSDAILLSDILRVNTEITKAPLSASMIKRYDEHHQDLTLLKALVRQQLPEKYKEIFFDQSKNGYAGYIDGGASQEEFYKFIKPILEKMDGTEELLVKLNREDLLRKQRTFDNGSIPHQIHLGELHAILRRQEDFYPFLKDNREKIEKILTFRIPYYVGPLARGNSRFAWMTRKSEETITPWNFEEVVDKGASAQSFIERMTNFDKNLPNEKVLPKHSLLYEYFTVYNELTKVKYVTEGMRKPAFLSGEQKKAIVDLLFKTNRKVTVKQLKEDYFKKIECFDSVEISGVEDRFNASLGTYHDLLKIIKDKDFLDNEENEDILEDIVLTLTLFEDREMIEERLKTYAHLFDDKVMKQLKRRRYTGWGRLSRKLINGIRDKQSGKTILDFLKSDGFANRNFMQLIHDDSLTFKEDIQKAQVSGQGDSLHEHIANLAGSPAIKKGILQTVKVVDELVKVMGRHKPENIVIEMARENQTTQKGQKNSRERMKRIEEGIKELGSQILKEHPVENTQLQNEKLYLYYLQNGRDMYVDQELDINRLSDYDVDHIVPQSFLKDDSIDNKVLTRSDKARGKSDNVPSEEVVKKMKNYWRQLLNAKLITQRKFDNLTKAERGGLSELDKAGFIKRQLVETRQITKHVAQILDSRMNTKYDENDKLIREVKVITLKSKLVSDFRKDFQFYKVREINNYHHAHDAYLNAVVGTALIKKYPKLESEFVYGDYKVYDVRKMIAKSEQEIGKATAKYFFYSNIMNFFKTEITLANGEIRKRPLIETNGETGEIVWDKGRDFATVRKVLSMPQVNIVKKTEVQTGGFSKESILPKRNSDKLIARKKDWDPKKYGGFDSPTVAYSVLVVAKVEKGKSKKLKSVKELLGITIMERSSFEKNPIDFLEAKGYKEVKKDLIIKLPKYSLFELENGRKRMLASAGELQKGNELALPSKYVNFLYLASHYEKLKGSPEDNEQKQLFVEQHKHYLDEIIEQISEFSKRVILADANLDKVLSAYNKHRDKPIREQAENIIHLFTLTNLGAPAAFKYFDTTIDRKRYTSTKEVLDATLIHQSITGLYETRIDLSQLGGDGGGGSEAAAKPAPGGTLNIEDEHRLHETSKEPDVSLGSTWLSDFPQAWAETGGMGLAVRQAPLIIPLKATSTPVSIKQYPMSQEARLGIKPHIQRLLDQGILVPCQSPWNTPLLPVKKPGTNDYRPVQDLREVNKRVEDIHPTVPNPYNLLSGLPPSHQWYTVLDLKDAFFCLRLHPTSQPLFAFEWRDPEMGISGQLTWTRLPQGFKNSPTLFDEALHRDLADFRIQHPDLILLQYVDDLLLAATSELDCQQGTRALLQTLGNLGYRASAKKAQICQKQVKYLGYLLKEGQRWLTEARKETVMGQPTPKTPRQLREFLGTAGFCRLWIPGFAEMAAPLYPLTKTGTLFNWGPDQQKAYQEIKQALLTAPALGLPDLTKPFELFVDEKQGYAKGVLTQKLGPWRRPVAYLSKKLDPVAAGWPPCLRMVAAIAVLTKDAGKLTMGQPLVILAPHAVEALVKQPPDRWLSNARMTHYQALLLDTDRVQFGPVVALNPATLLPLPEEGLQHNCLDILAEAHGTRPDLTDQPLPDADHTWYTDGSSLLQEGQRKAGAAVTTETEVIWAKALPAGTSAQRAELIALTQALKMAEGKKLNVYTDSRYAFATAHIHGEIYRRRGLLTSEGKEIKNKDEILALLKALFLPKRLSIIHCPGHQKGHSAEARGNRMADQAARKAAITETPDTSTLLAGKRTADGSEFEKRTADGSEFESPKKKAKVE

SEQ ID NO: 7201 - protein, 2090 aa, synthetic construct
MPAAKRVKLDGGDKKYSIGLDIGTNSVGWAVITDEYKVPSKKFKVLGNTDRHSIKKNLIGALLFDSGETAEATRLKRTARRRYTRRKNRICYLQEIFSNEMAKVDDSFFHRLEESFLVEEDKKHERHPIFGNIVDEVAYHEKYPTIYHLRKKLVDSTDKADLRLIYLALAHMIKFRGHFLIEGDLNPDNSDVDKLFIQLVQTYNQLFEENPINASGVDAKAILSARLSKSRRLENLIAQLPGEKKNGLFGNLIALSLGLTPNFKSNFDLAEDAKLQLSKDTYDDDLDNLLAQIGDQYADLFLAAKNLSDAILLSDILRVNTEITKAPLSASMIKRYDEHHQDLTLLKALVRQQLPEKYKEIFFDQSKNGYAGYIDGGASQEEFYKFIKPILEKMDGTEELLVKLNREDLLRKQRTFDNGSIPHQIHLGELHAILRRQEDFYPFLKDNREKIEKILTFRIPYYVGPLARGNSRFAWMTRKSEETITPWNFEEVVDKGASAQSFIERMTNFDKNLPNEKVLPKHSLLYEYFTVYNELTKVKYVTEGMRKPAFLSGEQKKAIVDLLFKTNRKVTVKQLKEDYFKKIECFDSVEISGVEDRFNASLGTYHDLLKIIKDKDFLDNEENEDILEDIVLTLTLFEDREMIEERLKTYAHLFDDKVMKQLKRRRYTGWGRLSRKLINGIRDKQSGKTILDFLKSDGFANRNFMQLIHDDSLTFKEDIQKAQVSGQGDSLHEHIANLAGSPAIKKGILQTVKVVDELVKVMGRHKPENIVIEMARENQTTQKGQKNSRERMKRIEEGIKELGSQILKEHPVENTQLQNEKLYLYYLQNGRDMYVDQELDINRLSDYDVDHIVPQSFLKDDSIDNKVLTRSDKARGKSDNVPSEEVVKKMKNYWRQLLNAKLITQRKFDNLTKAERGGLSELDKAGFIKRQLVETRQITKHVAQILDSRMNTKYDENDKLIREVKVITLKSKLVSDFRKDFQFYKVREINNYHHAHDAYLNAVVGTALIKKYPKLESEFVYGDYKVYDVRKMIAKSEQEIGKATAKYFFYSNIMNFFKTEITLANGEIRKRPLIETNGETGEIVWDKGRDFATVRKVLSMPQVNIVKKTEVQTGGFSKESILPKRNSDKLIARKKDWDPKKYGGFDSPTVAYSVLVVAKVEKGKSKKLKSVKELLGITIMERSSFEKNPIDFLEAKGYKEVKKDLIIKLPKYSLFELENGRKRMLASAGELQKGNELALPSKYVNFLYLASHYEKLKGSPEDNEQKQLFVEQHKHYLDEIIEQISEFSKRVILADANLDKVLSAYNKHRDKPIREQAENIIHLFTLTNLGAPAAFKYFDTTIDRKRYTSTKEVLDATLIHQSITGLYETRIDLSQLGGDGGGGSEAAAKPAPGGTLQLDDEYRLYSPLVKPDQNIQFWLEQFPQAWAETAGMGLAKQVPPQVIQLKASATPVSVRQYPLSKEAQEGIRPHVQRLIQQGILVPVQSPWNTPLLPVRKPGTNDYRPVQDLREVNKRVQDIHPTVPNPYNLLCALPPQRSWYTVLDLKDAFFCLRLHPTSQPLFAFEWRDPGTGRTGQLTWTRLPQGFKNSPTIFDEALHRDLANFRIQHPQVTLLQYVDDLLLAGATKQDCLEGTKALLLELSDLGYRASAKKAQICRREVTYLGYSLRDGQRWLTEARKKTVVQIPAPTTAKQVREFLGTAGFCRLWIPGFATLAAPLYPLTKEKGEFSWAPEHQKAFDAIKKALLSAPALALPDVTKPFTLYVDERKGVARGVLTQTLGPWRRPVAYLSKKLDPVASGWPVCLKAIAAVAILVKDADKLTLGQNITVIAPHALENIVRQPPDRWMTNARMTHYQSLLLTERVTFAPPAALNPATLLPEETDEPVTHDCHQLLIEETGVRKDLTDIPLTGEVLTWFTDGSSYVVEGKRMAGAAVVDGTRTIWASSLPEGTSAQKAELMALTQALRLAEGKSINIYTDSRYAFATAHVHGAIYKQRGLLTSAGREIKNKEEILSLLEALHLPKRLAIIHCPGHQKAKDPISRGNQMADRVAKQAAQGVNLLAGKRTADGSEFEKRTADGSEFESPKKKAKVE

SEQ ID NO: 7202 - protein, 2096 aa, synthetic construct
MPAAKRVKLDGGDKKYSIGLDIGTNSVGWAVITDEYKVPSKKFKVLGNTDRHSIKKNLIGALLFDSGETAEATRLKRTARRRYTRRKNRICYLQEIFSNEMAKVDDSFFHRLEESFLVEEDKKHERHPIFGNIVDEVAYHEKYPTIYHLRKKLVDSTDKADLRLIYLALAHMIKFRGHFLIEGDLNPDNSDVDKLFIQLVQTYNQLFEENPINASGVDAKAILSARLSKSRRLENLIAQLPGEKKNGLFGNLIALSLGLTPNFKSNFDLAEDAKLQLSKDTYDDDLDNLLAQIGDQYADLFLAAKNLSDAILLSDILRVNTEITKAPLSASMIKRYDEHHQDLTLLKALVRQQLPEKYKEIFFDQSKNGYAGYIDGGASQEEFYKFIKPILEKMDGTEELLVKLNREDLLRKQRTFDNGSIPHQIHLGELHAILRRQEDFYPFLKDNREKIEKILTFRIPYYVGPLARGNSRFAWMTRKSEETITPWNFEEVVDKGASAQSFIERMTNFDKNLPNEKVLPKHSLLYEYFTVYNELTKVKYVTEGMRKPAFLSGEQKKAIVDLLFKTNRKVTVKQLKEDYFKKIECFDSVEISGVEDRFNASLGTYHDLLKIIKDKDFLDNEENEDILEDIVLTLTLFEDREMIEERLKTYAHLFDDKVMKQLKRRRYTGWGRLSRKLINGIRDKQSGKTILDFLKSDGFANRNFMQLIHDDSLTFKEDIQKAQVSGQGDSLHEHIANLAGSPAIKKGILQTVKVVDELVKVMGRHKPENIVIEMARENQTTQKGQKNSRERMKRIEEGIKELGSQILKEHPVENTQLQNEKLYLYYLQNGRDMYVDQELDINRLSDYDVDHIVPQSFLKDDSIDNKVLTRSDKARGKSDNVPSEEVVKKMKNYWRQLLNAKLITQRKFDNLTKAERGGLSELDKAGFIKRQLVETRQITKHVAQILDSRMNTKYDENDKLIREVKVITLKSKLVSDFRKDFQFYKVREINNYHHAHDAYLNAVVGTALIKKYPKLESEFVYGDYKVYDVRKMIAKSEQEIGKATAKYFFYSNIMNFFKTEITLANGEIRKRPLIETNGETGEIVWDKGRDFATVRKVLSMPQVNIVKKTEVQTGGFSKESILPKRNSDKLIARKKDWDPKKYGGFDSPTVAYSVLVVAKVEKGKSKKLKSVKELLGITIMERSSFEKNPIDFLEAKGYKEVKKDLIIKLPKYSLFELENGRKRMLASAGELQKGNELALPSKYVNFLYLASHYEKLKGSPEDNEQKQLFVEQHKHYLDEIIEQISEFSKRVILADANLDKVLSAYNKHRDKPIREQAENIIHLFTLTNLGAPAAFKYFDTTIDRKRYTSTKEVLDATLIHQSITGLYETRIDLSQLGGDGGGGSEAAAKPAPGGTLNIEDEYRLHETSKEPDVPLGSTWLSDFPQAWAETGGMGLAVRQAPLIIPLKATSTPVSIKQYPMSQEARLGIKPHIQRLLDQGILVPCQSPWNTPLLPVKKPGTNDYRPVQDLREVNKRVEDIHPTVPNPYNLLSGLPPSHQWYTVLDLKDAFFCLRLHPTSQPLFAFEWRDPEMGISGQLTWTRLPQGFKNSPTLFDEALHRDLADFRIQHPDLILLQYVDDLLLAATSEQDCQRGTRALLQTLGNLGYRASAKKAQICQKQVKYLGYLLKEGQRWLTEARKETVMGQPTPKTPRQLREFLGTAGFCRLWIPGFAEMAAPLYPLTKTGTLFNWGPDQQKAYQEIKQALLTAPALGLPDLTKPFELFVDEKQGYAKGVLTQKLGPWRRPVAYLSKKLDPVAAGWPPCLRMVAAIAVLTKDAGKLTMGQPLVILAPHAVEALVKQPPDRWLSNARMTHYQAMLLDTDRVQFGPVVALNPATLLPLPEKEAPHDCLEILAETHGTRPDLTDQPIPDADYTWYTDGSSFLQEGQRRAGAAVTTETEVIWARALPAGTSAQRAELIALTQALKMAEGKKLNVYTDSRYAFATAHVHGEIYRRRGLLTSEGREIKNKNEILALLKALFLPKRLSIIHCPGHQKGNSAEARGNRMADQAAREAAMKAVLETSTLLAGKRTADGSEFEKRTADGSEFESPKKKAKVE

SEQ ID NO: 7203 - protein, 2096 aa, synthetic construct
MPAAKRVKLDGGDKKYSIGLDIGTNSVGWAVITDEYKVPSKKFKVLGNTDRHSIKKNLIGALLFDSGETAEATRLKRTARRRYTRRKNRICYLQEIFSNEMAKVDDSFFHRLEESFLVEEDKKHERHPIFGNIVDEVAYHEKYPTIYHLRKKLVDSTDKADLRLIYLALAHMIKFRGHFLIEGDLNPDNSDVDKLFIQLVQTYNQLFEENPINASGVDAKAILSARLSKSRRLENLIAQLPGEKKNGLFGNLIALSLGLTPNFKSNFDLAEDAKLQLSKDTYDDDLDNLLAQIGDQYADLFLAAKNLSDAILLSDILRVNTEITKAPLSASMIKRYDEHHQDLTLLKALVRQQLPEKYKEIFFDQSKNGYAGYIDGGASQEEFYKFIKPILEKMDGTEELLVKLNREDLLRKQRTFDNGSIPHQIHLGELHAILRRQEDFYPFLKDNREKIEKILTFRIPYYVGPLARGNSRFAWMTRKSEETITPWNFEEVVDKGASAQSFIERMTNFDKNLPNEKVLPKHSLLYEYFTVYNELTKVKYVTEGMRKPAFLSGEQKKAIVDLLFKTNRKVTVKQLKEDYFKKIECFDSVEISGVEDRFNASLGTYHDLLKIIKDKDFLDNEENEDILEDIVLTLTLFEDREMIEERLKTYAHLFDDKVMKQLKRRRYTGWGRLSRKLINGIRDKQSGKTILDFLKSDGFANRNFMQLIHDDSLTFKEDIQKAQVSGQGDSLHEHIANLAGSPAIKKGILQTVKVVDELVKVMGRHKPENIVIEMARENQTTQKGQKNSRERMKRIEEGIKELGSQILKEHPVENTQLQNEKLYLYYLQNGRDMYVDQELDINRLSDYDVDHIVPQSFLKDDSIDNKVLTRSDKARGKSDNVPSEEVVKKMKNYWRQLLNAKLITQRKFDNLTKAERGGLSELDKAGFIKRQLVETRQITKHVAQILDSRMNTKYDENDKLIREVKVITLKSKLVSDFRKDFQFYKVREINNYHHAHDAYLNAVVGTALIKKYPKLESEFVYGDYKVYDVRKMIAKSEQEIGKATAKYFFYSNIMNFFKTEITLANGEIRKRPLIETNGETGEIVWDKGRDFATVRKVLSMPQVNIVKKTEVQTGGFSKESILPKRNSDKLIARKKDWDPKKYGGFDSPTVAYSVLVVAKVEKGKSKKLKSVKELLGITIMERSSFEKNPIDFLEAKGYKEVKKDLIIKLPKYSLFELENGRKRMLASAGELQKGNELALPSKYVNFLYLASHYEKLKGSPEDNEQKQLFVEQHKHYLDEIIEQISEFSKRVILADANLDKVLSAYNKHRDKPIREQAENIIHLFTLTNLGAPAAFKYFDTTIDRKRYTSTKEVLDATLIHQSITGLYETRIDLSQLGGDGGGGSEAAAKPAPGGTLNIEDEYRLHETSKEPDVPLGSTWLSDFPQAWAETGGMGLAVRQAPLIIPLKATSTPVSIKQYPMSQEARLGIKPHIQRLLDQGILVPCQSPWNTPLLPVKKPGTNDYRPVQDLREVNKRVEDIHPTVPNPYNLLSGLPPSHQWYTVLDLKDAFFCLRLHPTSQPLFAFEWRDPEMGISGQLTWTRLPQGFKNSPTLFNEALHRDLADFRIQHPDLILLQYVDDLLLAATSEQDCQRGTRALLQTLGNLGYRASAKKAQICQKQVKYLGYLLKEGQRWLTEARKETVMGQPTPKTPRQLREFLGTAGFCRLWIPGFAEMAAPLYPLTKPGTLFNWGPDQQKAYQEIKQALLTAPALGLPDLTKPFELFVDEKQGYAKGVLTQKLGPWRRPVAYLSKKLDPVAAGWPPCLRMVAAIAVLTKDAGKLTMGQPLVILAPHAVEALVKQPPDRWLSNARMTHYQAMLLDTDRVQFGPVVALNPATLLPLPEKEAPHDCLEILAETHGTRPDLTDQPIPDADYTWYTDGSSFLQEGQRRAGAAVTTETEVIWARALPAGTSAQRAELIALTQALKMAEGKKLNVYTDSRYAFATAHVHGEIYRRRGWLTSEGREIKNKNEILALLKALFLPKRLSIIHCPGHQKGNSAEARGNRMADQAAREAAMKAVLETSTLLAGKRTADGSEFEKRTADGSEFESPKKKAKVE

SEQ ID NO: 7204 - protein, 2098 aa, synthetic construct
MPAAKRVKLDGGDKKYSIGLDIGTNSVGWAVITDEYKVPSKKFKVLGNTDRHSIKKNLIGALLFDSGETAEATRLKRTARRRYTRRKNRICYLQEIFSNEMAKVDDSFFHRLEESFLVEEDKKHERHPIFGNIVDEVAYHEKYPTIYHLRKKLVDSTDKADLRLIYLALAHMIKFRGHFLIEGDLNPDNSDVDKLFIQLVQTYNQLFEENPINASGVDAKAILSARLSKSRRLENLIAQLPGEKKNGLFGNLIALSLGLTPNFKSNFDLAEDAKLQLSKDTYDDDLDNLLAQIGDQYADLFLAAKNLSDAILLSDILRVNTEITKAPLSASMIKRYDEHHQDLTLLKALVRQQLPEKYKEIFFDQSKNGYAGYIDGGASQEEFYKFIKPILEKMDGTEELLVKLNREDLLRKQRTFDNGSIPHQIHLGELHAILRRQEDFYPFLKDNREKIEKILTFRIPYYVGPLARGNSRFAWMTRKSEETITPWNFEEVVDKGASAQSFIERMTNFDKNLPNEKVLPKHSLLYEYFTVYNELTKVKYVTEGMRKPAFLSGEQKKAIVDLLFKTNRKVTVKQLKEDYFKKIECFDSVEISGVEDRFNASLGTYHDLLKIIKDKDFLDNEENEDILEDIVLTLTLFEDREMIEERLKTYAHLFDDKVMKQLKRRRYTGWGRLSRKLINGIRDKQSGKTILDFLKSDGFANRNFMQLIHDDSLTFKEDIQKAQVSGQGDSLHEHIANLAGSPAIKKGILQTVKVVDELVKVMGRHKPENIVIEMARENQTTQKGQKNSRERMKRIEEGIKELGSQILKEHPVENTQLQNEKLYLYYLQNGRDMYVDQELDINRLSDYDVDHIVPQSFLKDDSIDNKVLTRSDKARGKSDNVPSEEVVKKMKNYWRQLLNAKLITQRKFDNLTKAERGGLSELDKAGFIKRQLVETRQITKHVAQILDSRMNTKYDENDKLIREVKVITLKSKLVSDFRKDFQFYKVREINNYHHAHDAYLNAVVGTALIKKYPKLESEFVYGDYKVYDVRKMIAKSEQEIGKATAKYFFYSNIMNFFKTEITLANGEIRKRPLIETNGETGEIVWDKGRDFATVRKVLSMPQVNIVKKTEVQTGGFSKESILPKRNSDKLIARKKDWDPKKYGGFDSPTVAYSVLVVAKVEKGKSKKLKSVKELLGITIMERSSFEKNPIDFLEAKGYKEVKKDLIIKLPKYSLFELENGRKRMLASAGELQKGNELALPSKYVNFLYLASHYEKLKGSPEDNEQKQLFVEQHKHYLDEIIEQISEFSKRVILADANLDKVLSAYNKHRDKPIREQAENIIHLFTLTNLGAPAAFKYFDTTIDRKRYTSTKEVLDATLIHQSITGLYETRIDLSQLGGDGGGGSPAPEAAAKGGTAPLEEEYRLFLEAPIQNVTLLEQWKREIPKVWAEINPPGLASTQAPIHVQLLSTALPVRVRQYPITLEAKRSLRETIRKFRAAGILRPVHSPWNTPLLPVRKSGTSEYRMVQDLREVNKRVETIHPTVPNPYTLLSLLPPDRIWYSVLDLKDAFFCIPLAPESQLIFAFEWADAEEGESGQLTWTRLPQGFKNSPTLFNEALNRDLQGFRLDHPSVSLLQYVDDLLIAADTQAACLSATRDLLMTLAELGYRVSGKKAQLCQEEVTYLGFKIHKGSRSLSNSRTQAILQIPVPKTKRQVREFLGKIGYCRLFIPGFAELAQPLYAATRPGNDPLVWGEKEEEAFQSLKLALTQPPALALPSLDKPFQLFVEETSGAAKGVLTQALGPWKRPVAYLSKRLDPVAAGWPRCLRAIAAAALLTREASKLTFGQDIEITSSHNLESLLRSPPDKWLTNARITQYQVLLLDPPRVRFKQTAALNPATLLPETDDTLPIHHCLDTLDSLTSTRPDLTDQPLAQAEATLFTDGSSYIRDGKRYAGAAVVTLDSVIWAEPLPIGTSAQKAELIALTKALEWSKDKSVNIYTDSRYAFATLHVHGMIYRERGWLTAGGKAIKNAPEILALLTAVWLPKRVAVMHCKGHQKDDAPTSTGNRRADEVAREVAIRPLSTQATISAGKRTADGSEFEKRTADGSEFESPKKKAKVE

SEQ ID NO: 7205 - protein, 2218 aa, synthetic construct
MPAAKRVKLDGGDKKYSIGLDIGTNSVGWAVITDEYKVPSKKFKVLGNTDRHSIKKNLIGALLFDSGETAEATRLKRTARRRYTRRKNRICYLQEIFSNEMAKVDDSFFHRLEESFLVEEDKKHERHPIFGNIVDEVAYHEKYPTIYHLRKKLVDSTDKADLRLIYLALAHMIKFRGHFLIEGDLNPDNSDVDKLFIQLVQTYNQLFEENPINASGVDAKAILSARLSKSRRLENLIAQLPGEKKNGLFGNLIALSLGLTPNFKSNFDLAEDAKLQLSKDTYDDDLDNLLAQIGDQYADLFLAAKNLSDAILLSDILRVNTEITKAPLSASMIKRYDEHHQDLTLLKALVRQQLPEKYKEIFFDQSKNGYAGYIDGGASQEEFYKFIKPILEKMDGTEELLVKLNREDLLRKQRTFDNGSIPHQIHLGELHAILRRQEDFYPFLKDNREKIEKILTFRIPYYVGPLARGNSRFAWMTRKSEETITPWNFEEVVDKGASAQSFIERMTNFDKNLPNEKVLPKHSLLYEYFTVYNELTKVKYVTEGMRKPAFLSGEQKKAIVDLLFKTNRKVTVKQLKEDYFKKIECFDSVEISGVEDRFNASLGTYHDLLKIIKDKDFLDNEENEDILEDIVLTLTLFEDREMIEERLKTYAHLFDDKVMKQLKRRRYTGWGRLSRKLINGIRDKQSGKTILDFLKSDGFANRNFMQLIHDDSLTFKEDIQKAQVSGQGDSLHEHIANLAGSPAIKKGILQTVKVVDELVKVMGRHKPENIVIEMARENQTTQKGQKNSRERMKRIEEGIKELGSQILKEHPVENTQLQNEKLYLYYLQNGRDMYVDQELDINRLSDYDVDHIVPQSFLKDDSIDNKVLTRSDKARGKSDNVPSEEVVKKMKNYWRQLLNAKLITQRKFDNLTKAERGGLSELDKAGFIKRQLVETRQITKHVAQILDSRMNTKYDENDKLIREVKVITLKSKLVSDFRKDFQFYKVREINNYHHAHDAYLNAVVGTALIKKYPKLESEFVYGDYKVYDVRKMIAKSEQEIGKATAKYFFYSNIMNFFKTEITLANGEIRKRPLIETNGETGEIVWDKGRDFATVRKVLSMPQVNIVKKTEVQTGGFSKESILPKRNSDKLIARKKDWDPKKYGGFDSPTVAYSVLVVAKVEKGKSKKLKSVKELLGITIMERSSFEKNPIDFLEAKGYKEVKKDLIIKLPKYSLFELENGRKRMLASAGELQKGNELALPSKYVNFLYLASHYEKLKGSPEDNEQKQLFVEQHKHYLDEIIEQISEFSKRVILADANLDKVLSAYNKHRDKPIREQAENIIHLFTLTNLGAPAAFKYFDTTIDRKRYTSTKEVLDATLIHQSITGLYETRIDLSQLGGDGGGGSPAPEAAAKGGTLGDQGSRGSDPLPEPRVTLTVEGIPTEFLVNTGAEHSVLTKPMGKMGSKRTVVAGATGSKVYPWTTKRLLKIGQKQVTHSFLVIPECPAPLLGRDLLTKLKAQIQFSTEGPQVTWEDRPAMCLVLNLEEEYRLHEKPVPPSIDPSWLQLFPMVWAEKAGMGLANQVPPVVVELKSDASPVAVRQYPMSKEAREGIRPHIQRFLDLGILVPCQSPWNTPLLPVKKPGTNDYRPVQDLREVNKRVQDIHPTVPNPYNLLSSLPPSHTWYSVLDLKDAFFCLKLHPNSQPLFAFEWRDPEKGNTGQLTWTRLPQGFKNSPTLFNEALHRDLASFRALNPQVVMLQYVDDLLVAAPTYRDCKEGTRRLLQELSKLGYRVSAKKAQLCREEVTYLGYLLKGGKRWLTPARKATVMKIPTPTTPRQVREFLGTAGFCRLWIPGFASLAAPLYPLTRPKVPFTWTEAHQEAFGRIKEALLSAPALALPDLTKPFALYVDEKEGVARGVLTQTLGPWRRPVAYLSKKLDPVASGWPTCLKAIAAVALLLKDADKLTLGQNVLVIAPHNLESIVRQPPDRWMTNARMTHYQSLLLNERVSFAPPAILNPATLLPVESDDTPIHICSEILAEETGTRPDLRDQPLPGVPAWYTDGSSFIMDGRRQAGAAIVDNKRTVWASNLPEGTSAQKAELIALTQALRLAEGKSINIYTDSRYAFATAHVHGAIYKQRGWLTSAGKDIKNKEEILALLEAIHLPKRVAIIHCPGHQRGTDPVATGNRKADEAAKQAAQSTRILTETTKNAGKRTADGSEFEKRTADGSEFESPKKKAKVE

SEQ ID NO: 7206 - protein, 2096 aa, synthetic construct
MPAAKRVKLDGGDKKYSIGLDIGTNSVGWAVITDEYKVPSKKFKVLGNTDRHSIKKNLIGALLFDSGETAEATRLKRTARRRYTRRKNRICYLQEIFSNEMAKVDDSFFHRLEESFLVEEDKKHERHPIFGNIVDEVAYHEKYPTIYHLRKKLVDSTDKADLRLIYLALAHMIKFRGHFLIEGDLNPDNSDVDKLFIQLVQTYNQLFEENPINASGVDAKAILSARLSKSRRLENLIAQLPGEKKNGLFGNLIALSLGLTPNFKSNFDLAEDAKLQLSKDTYDDDLDNLLAQIGDQYADLFLAAKNLSDAILLSDILRVNTEITKAPLSASMIKRYDEHHQDLTLLKALVRQQLPEKYKEIFFDQSKNGYAGYIDGGASQEEFYKFIKPILEKMDGTEELLVKLNREDLLRKQRTFDNGSIPHQIHLGELHAILRRQEDFYPFLKDNREKIEKILTFRIPYYVGPLARGNSRFAWMTRKSEETITPWNFEEVVDKGASAQSFIERMTNFDKNLPNEKVLPKHSLLYEYFTVYNELTKVKYVTEGMRKPAFLSGEQKKAIVDLLFKTNRKVTVKQLKEDYFKKIECFDSVEISGVEDRFNASLGTYHDLLKIIKDKDFLDNEENEDILEDIVLTLTLFEDREMIEERLKTYAHLFDDKVMKQLKRRRYTGWGRLSRKLINGIRDKQSGKTILDFLKSDGFANRNFMQLIHDDSLTFKEDIQKAQVSGQGDSLHEHIANLAGSPAIKKGILQTVKVVDELVKVMGRHKPENIVIEMARENQTTQKGQKNSRERMKRIEEGIKELGSQILKEHPVENTQLQNEKLYLYYLQNGRDMYVDQELDINRLSDYDVDHIVPQSFLKDDSIDNKVLTRSDKARGKSDNVPSEEVVKKMKNYWRQLLNAKLITQRKFDNLTKAERGGLSELDKAGFIKRQLVETRQITKHVAQILDSRMNTKYDENDKLIREVKVITLKSKLVSDFRKDFQFYKVREINNYHHAHDAYLNAVVGTALIKKYPKLESEFVYGDYKVYDVRKMIAKSEQEIGKATAKYFFYSNIMNFFKTEITLANGEIRKRPLIETNGETGEIVWDKGRDFATVRKVLSMPQVNIVKKTEVQTGGFSKESILPKRNSDKLIARKKDWDPKKYGGFDSPTVAYSVLVVAKVEKGKSKKLKSVKELLGITIMERSSFEKNPIDFLEAKGYKEVKKDLIIKLPKYSLFELENGRKRMLASAGELQKGNELALPSKYVNFLYLASHYEKLKGSPEDNEQKQLFVEQHKHYLDEIIEQISEFSKRVILADANLDKVLSAYNKHRDKPIREQAENIIHLFTLTNLGAPAAFKYFDTTIDRKRYTSTKEVLDATLIHQSITGLYETRIDLSQLGGDGGGGSPAPEAAAKGGTLNIEDEHRLHETSKEPDVSLGSTWLSDFPQAWAETGGMGLAVRQAPLIIPLKATSTPVSIKQYPMSQEARLGIKPHIQRLLDQGILVPCQSPWNTPLLPVKKPGTNDYRPVQDLREVNKRVEDIHPTVPNPYNLLSGLPPSHQWYTVLDLKDAFFCLRLHPTSQPLFAFEWRDPEMGISGQLTWTRLPQGFKNSPTLFDEALHRDLADFRIQHPDLILLQYVDDLLLAATSELDCQQGTRALLQTLGNLGYRASAKKAQICQKQVKYLGYLLKEGQRWLTEARKETVMGQPTPKTPRQLREFLGTAGFCRLWIPGFAEMAAPLYPLTKTGTLFNWGPDQQKAYQEIKQALLTAPALGLPDLTKPFELFVDEKQGYAKGVLTQKLGPWRRPVAYLSKKLDPVAAGWPPCLRMVAAIAVLTKDAGKLTMGQPLVILAPHAVEALVKQPPDRWLSNARMTHYQALLLDTDRVQFGPVVALNPATLLPLPEEGLQHNCLDILAEAHGTRPDLTDQPLPDADHTWYTDGSSLLQEGQRKAGAAVTTETEVIWAKALPAGTSAQRAELIALTQALKMAEGKKLNVYTDSRYAFATAHIHGEIYRRRGLLTSEGKEIKNKDEILALLKALFLPKRLSIIHCPGHQKGHSAEARGNRMADQAARKAAITETPDTSTLLAGKRTADGSEFEKRTADGSEFESPKKKAKVE

SEQ ID NO: 7207 - protein, 2090 aa, synthetic construct
MPAAKRVKLDGGDKKYSIGLDIGTNSVGWAVITDEYKVPSKKFKVLGNTDRHSIKKNLIGALLFDSGETAEATRLKRTARRRYTRRKNRICYLQEIFSNEMAKVDDSFFHRLEESFLVEEDKKHERHPIFGNIVDEVAYHEKYPTIYHLRKKLVDSTDKADLRLIYLALAHMIKFRGHFLIEGDLNPDNSDVDKLFIQLVQTYNQLFEENPINASGVDAKAILSARLSKSRRLENLIAQLPGEKKNGLFGNLIALSLGLTPNFKSNFDLAEDAKLQLSKDTYDDDLDNLLAQIGDQYADLFLAAKNLSDAILLSDILRVNTEITKAPLSASMIKRYDEHHQDLTLLKALVRQQLPEKYKEIFFDQSKNGYAGYIDGGASQEEFYKFIKPILEKMDGTEELLVKLNREDLLRKQRTFDNGSIPHQIHLGELHAILRRQEDFYPFLKDNREKIEKILTFRIPYYVGPLARGNSRFAWMTRKSEETITPWNFEEVVDKGASAQSFIERMTNFDKNLPNEKVLPKHSLLYEYFTVYNELTKVKYVTEGMRKPAFLSGEQKKAIVDLLFKTNRKVTVKQLKEDYFKKIECFDSVEISGVEDRFNASLGTYHDLLKIIKDKDFLDNEENEDILEDIVLTLTLFEDREMIEERLKTYAHLFDDKVMKQLKRRRYTGWGRLSRKLINGIRDKQSGKTILDFLKSDGFANRNFMQLIHDDSLTFKEDIQKAQVSGQGDSLHEHIANLAGSPAIKKGILQTVKVVDELVKVMGRHKPENIVIEMARENQTTQKGQKNSRERMKRIEEGIKELGSQILKEHPVENTQLQNEKLYLYYLQNGRDMYVDQELDINRLSDYDVDHIVPQSFLKDDSIDNKVLTRSDKARGKSDNVPSEEVVKKMKNYWRQLLNAKLITQRKFDNLTKAERGGLSELDKAGFIKRQLVETRQITKHVAQILDSRMNTKYDENDKLIREVKVITLKSKLVSDFRKDFQFYKVREINNYHHAHDAYLNAVVGTALIKKYPKLESEFVYGDYKVYDVRKMIAKSEQEIGKATAKYFFYSNIMNFFKTEITLANGEIRKRPLIETNGETGEIVWDKGRDFATVRKVLSMPQVNIVKKTEVQTGGFSKESILPKRNSDKLIARKKDWDPKKYGGFDSPTVAYSVLVVAKVEKGKSKKLKSVKELLGITIMERSSFEKNPIDFLEAKGYKEVKKDLIIKLPKYSLFELENGRKRMLASAGELQKGNELALPSKYVNFLYLASHYEKLKGSPEDNEQKQLFVEQHKHYLDEIIEQISEFSKRVILADANLDKVLSAYNKHRDKPIREQAENIIHLFTLTNLGAPAAFKYFDTTIDRKRYTSTKEVLDATLIHQSITGLYETRIDLSQLGGDGGGGSPAPEAAAKGGTLQLDDEYRLYSPLVKPDQNIQFWLEQFPQAWAETAGMGLAKQVPPQVIQLKASATPVSVRQYPLSKEAQEGIRPHVQRLIQQGILVPVQSPWNTPLLPVRKPGTNDYRPVQDLREVNKRVQDIHPTVPNPYNLLCALPPQRSWYTVLDLKDAFFCLRLHPTSQPLFAFEWRDPGTGRTGQLTWTRLPQGFKNSPTIFDEALHRDLANFRIQHPQVTLLQYVDDLLLAGATKQDCLEGTKALLLELSDLGYRASAKKAQICRREVTYLGYSLRDGQRWLTEARKKTVVQIPAPTTAKQVREFLGTAGFCRLWIPGFATLAAPLYPLTKEKGEFSWAPEHQKAFDAIKKALLSAPALALPDVTKPFTLYVDERKGVARGVLTQTLGPWRRPVAYLSKKLDPVASGWPVCLKAIAAVAILVKDADKLTLGQNITVIAPHALENIVRQPPDRWMTNARMTHYQSLLLTERVTFAPPAALNPATLLPEETDEPVTHDCHQLLIEETGVRKDLTDIPLTGEVLTWFTDGSSYVVEGKRMAGAAVVDGTRTIWASSLPEGTSAQKAELMALTQALRLAEGKSINIYTDSRYAFATAHVHGAIYKQRGLLTSAGREIKNKEEILSLLEALHLPKRLAIIHCPGHQKAKDPISRGNQMADRVAKQAAQGVNLLAGKRTADGSEFEKRTADGSEFESPKKKAKVE

SEQ ID NO: 7208 - protein, 2087 aa, synthetic construct
MPAAKRVKLDGGDKKYSIGLDIGTNSVGWAVITDEYKVPSKKFKVLGNTDRHSIKKNLIGALLFDSGETAEATRLKRTARRRYTRRKNRICYLQEIFSNEMAKVDDSFFHRLEESFLVEEDKKHERHPIFGNIVDEVAYHEKYPTIYHLRKKLVDSTDKADLRLIYLALAHMIKFRGHFLIEGDLNPDNSDVDKLFIQLVQTYNQLFEENPINASGVDAKAILSARLSKSRRLENLIAQLPGEKKNGLFGNLIALSLGLTPNFKSNFDLAEDAKLQLSKDTYDDDLDNLLAQIGDQYADLFLAAKNLSDAILLSDILRVNTEITKAPLSASMIKRYDEHHQDLTLLKALVRQQLPEKYKEIFFDQSKNGYAGYIDGGASQEEFYKFIKPILEKMDGTEELLVKLNREDLLRKQRTFDNGSIPHQIHLGELHAILRRQEDFYPFLKDNREKIEKILTFRIPYYVGPLARGNSRFAWMTRKSEETITPWNFEEVVDKGASAQSFIERMTNFDKNLPNEKVLPKHSLLYEYFTVYNELTKVKYVTEGMRKPAFLSGEQKKAIVDLLFKTNRKVTVKQLKEDYFKKIECFDSVEISGVEDRFNASLGTYHDLLKIIKDKDFLDNEENEDILEDIVLTLTLFEDREMIEERLKTYAHLFDDKVMKQLKRRRYTGWGRLSRKLINGIRDKQSGKTILDFLKSDGFANRNFMQLIHDDSLTFKEDIQKAQVSGQGDSLHEHIANLAGSPAIKKGILQTVKVVDELVKVMGRHKPENIVIEMARENQTTQKGQKNSRERMKRIEEGIKELGSQILKEHPVENTQLQNEKLYLYYLQNGRDMYVDQELDINRLSDYDVDHIVPQSFLKDDSIDNKVLTRSDKARGKSDNVPSEEVVKKMKNYWRQLLNAKLITQRKFDNLTKAERGGLSELDKAGFIKRQLVETRQITKHVAQILDSRMNTKYDENDKLIREVKVITLKSKLVSDFRKDFQFYKVREINNYHHAHDAYLNAVVGTALIKKYPKLESEFVYGDYKVYDVRKMIAKSEQEIGKATAKYFFYSNIMNFFKTEITLANGEIRKRPLIETNGETGEIVWDKGRDFATVRKVLSMPQVNIVKKTEVQTGGFSKESILPKRNSDKLIARKKDWDPKKYGGFDSPTVAYSVLVVAKVEKGKSKKLKSVKELLGITIMERSSFEKNPIDFLEAKGYKEVKKDLIIKLPKYSLFELENGRKRMLASAGELQKGNELALPSKYVNFLYLASHYEKLKGSPEDNEQKQLFVEQHKHYLDEIIEQISEFSKRVILADANLDKVLSAYNKHRDKPIREQAENIIHLFTLTNLGAPAAFKYFDTTIDRKRYTSTKEVLDATLIHQSITGLYETRIDLSQLGGDGGGGSPAPEAAAKGGIPWLMKKPLQLTTLVPLQEYEERLLKQTMLTGSYKEKLQSLFLKYDALWQHWENQVGHRRIKPHHIATGTVNPRPQKQYPINPKAKASIQTVINDLLKQGVLIQQNSIMNTPVYPVPKPDGKWRMVLDYREVNKTIPLIAAQNQHSAGILSSIFRGKYKTTLDLSNGFWAHSITPESYWLTAFTWLGQQYCWTRLPQGFLNSPALFNADVVDLLKEVPNVQVYVDDIYISHDDPREHLEQLEKVFSLLLNAGYVVSLKKSEIAQHEVEFLGFNITKEGRGLTETFKQKLLNITPPRDLKQLQSILGLLNFARNFIPNFSELVKPLYNIIATAPGKYITWTTDNSQQLQNIISMLNSAENLEERNPEVRLIMKVNTSPSAGYIRFYNEFAKRPIMYLNYVYTKAEVKFTNTEKLLTTIHKGLIKALDLGMGQEILVYSPIVSMTKIQKTPLPERKALPIRWITWMSYLEDPRIQFHYDKTLPELQQVPTVTDDIIAKIKHPSEFSMVFYTDGSAIKHPNVNKSHNAGMGIAQVQFKPEFTVINTWSIPLGDHTAQLAEVAAVEFACKKALKIDGPVLIVTDSFYVAESVNKELPYWQSNGFFNNKKKPLKHVSKWKSIADCIQLKPDIIIIHEKGHQPTASTFHTEGNNLADKLATQGSYVVNAGKRTADGSEFEKRTADGSEFESPKKKAKVE

SEQ ID NO: 7209 - protein, 2094 aa, synthetic construct
MPAAKRVKLDGGDKKYSIGLDIGTNSVGWAVITDEYKVPSKKFKVLGNTDRHSIKKNLIGALLFDSGETAEATRLKRTARRRYTRRKNRICYLQEIFSNEMAKVDDSFFHRLEESFLVEEDKKHERHPIFGNIVDEVAYHEKYPTIYHLRKKLVDSTDKADLRLIYLALAHMIKFRGHFLIEGDLNPDNSDVDKLFIQLVQTYNQLFEENPINASGVDAKAILSARLSKSRRLENLIAQLPGEKKNGLFGNLIALSLGLTPNFKSNFDLAEDAKLQLSKDTYDDDLDNLLAQIGDQYADLFLAAKNLSDAILLSDILRVNTEITKAPLSASMIKRYDEHHQDLTLLKALVRQQLPEKYKEIFFDQSKNGYAGYIDGGASQEEFYKFIKPILEKMDGTEELLVKLNREDLLRKQRTFDNGSIPHQIHLGELHAILRRQEDFYPFLKDNREKIEKILTFRIPYYVGPLARGNSRFAWMTRKSEETITPWNFEEVVDKGASAQSFIERMTNFDKNLPNEKVLPKHSLLYEYFTVYNELTKVKYVTEGMRKPAFLSGEQKKAIVDLLFKTNRKVTVKQLKEDYFKKIECFDSVEISGVEDRFNASLGTYHDLLKIIKDKDFLDNEENEDILEDIVLTLTLFEDREMIEERLKTYAHLFDDKVMKQLKRRRYTGWGRLSRKLINGIRDKQSGKTILDFLKSDGFANRNFMQLIHDDSLTFKEDIQKAQVSGQGDSLHEHIANLAGSPAIKKGILQTVKVVDELVKVMGRHKPENIVIEMARENQTTQKGQKNSRERMKRIEEGIKELGSQILKEHPVENTQLQNEKLYLYYLQNGRDMYVDQELDINRLSDYDVDHIVPQSFLKDDSIDNKVLTRSDKARGKSDNVPSEEVVKKMKNYWRQLLNAKLITQRKFDNLTKAERGGLSELDKAGFIKRQLVETRQITKHVAQILDSRMNTKYDENDKLIREVKVITLKSKLVSDFRKDFQFYKVREINNYHHAHDAYLNAVVGTALIKKYPKLESEFVYGDYKVYDVRKMIAKSEQEIGKATAKYFFYSNIMNFFKTEITLANGEIRKRPLIETNGETGEIVWDKGRDFATVRKVLSMPQVNIVKKTEVQTGGFSKESILPKRNSDKLIARKKDWDPKKYGGFDSPTVAYSVLVVAKVEKGKSKKLKSVKELLGITIMERSSFEKNPIDFLEAKGYKEVKKDLIIKLPKYSLFELENGRKRMLASAGELQKGNELALPSKYVNFLYLASHYEKLKGSPEDNEQKQLFVEQHKHYLDEIIEQISEFSKRVILADANLDKVLSAYNKHRDKPIREQAENIIHLFTLTNLGAPAAFKYFDTTIDRKRYTSTKEVLDATLIHQSITGLYETRIDLSQLGGDGGGGSPAPEAAAKGGVLNLEEEYRLHEKPVPSSIDPSWLQLFPTVWAERAGMGLANQVPPVVVELRSGASPVAVRQYPMSKEAREGIRPHIQRFLDLGVLVPCQSPWNTPLLPVKKPGTNDYRPVQDLREINKRVQDIHPTVPNPYNLLSSLPPSHTWYSVLDLKDAFFCLKLHPNSQPLFAFEWRDPEKGNTGQLTWTRLPQGFKNSPTLFNEALHRDLAPFRALNPQVVLLQYVDDLLVAAPTYRDCKEGTQKLLQELSKLGYRVSAKKAQLCQKEVTYLGYLLKEGKRWLTPARKATVMKIPPPTTPRQVREFLGTAGFCRLWIPGFASLAAPLYPLTKPSIPFIWTEEHQKAFDRIKEALLSAPALALPDLTKPFTLYVDERAGVARGVLTQTLGPWRRPVAYLSKKLDPVASGWPTCLKAVAAVALLLKDADKLTLGQNVTVIASHSLESIVRQPPDRWMTNARMTHYQSLLLNERVSFAPPAVLNPATLLPVESEATPVHRCSEILAEETGTRRDLKDQPLPGVPAWYTDGSSFIAEGKRRAGAAIVDGKRTVWASSLPEGTSAQKAELVALTQALRLAEGKDINIYTDSRYAFATAHIHGAIYKQRGWLTSAGKDIKNKEEILALLEAIHLPKRVAIIHCPGHQKGNDPVATGNRRADEAAKQAALSTRVLAETTKPAGKRTADGSEFEKRTADGSEFESPKKKAKVE

SEQ ID NO: 7210 - protein, 2102 aa, synthetic construct
MPAAKRVKLDGGDKKYSIGLDIGTNSVGWAVITDEYKVPSKKFKVLGNTDRHSIKKNLIGALLFDSGETAEATRLKRTARRRYTRRKNRICYLQEIFSNEMAKVDDSFFHRLEESFLVEEDKKHERHPIFGNIVDEVAYHEKYPTIYHLRKKLVDSTDKADLRLIYLALAHMIKFRGHFLIEGDLNPDNSDVDKLFIQLVQTYNQLFEENPINASGVDAKAILSARLSKSRRLENLIAQLPGEKKNGLFGNLIALSLGLTPNFKSNFDLAEDAKLQLSKDTYDDDLDNLLAQIGDQYADLFLAAKNLSDAILLSDILRVNTEITKAPLSASMIKRYDEHHQDLTLLKALVRQQLPEKYKEIFFDQSKNGYAGYIDGGASQEEFYKFIKPILEKMDGTEELLVKLNREDLLRKQRTFDNGSIPHQIHLGELHAILRRQEDFYPFLKDNREKIEKILTFRIPYYVGPLARGNSRFAWMTRKSEETITPWNFEEVVDKGASAQSFIERMTNFDKNLPNEKVLPKHSLLYEYFTVYNELTKVKYVTEGMRKPAFLSGEQKKAIVDLLFKTNRKVTVKQLKEDYFKKIECFDSVEISGVEDRFNASLGTYHDLLKIIKDKDFLDNEENEDILEDIVLTLTLFEDREMIEERLKTYAHLFDDKVMKQLKRRRYTGWGRLSRKLINGIRDKQSGKTILDFLKSDGFANRNFMQLIHDDSLTFKEDIQKAQVSGQGDSLHEHIANLAGSPAIKKGILQTVKVVDELVKVMGRHKPENIVIEMARENQTTQKGQKNSRERMKRIEEGIKELGSQILKEHPVENTQLQNEKLYLYYLQNGRDMYVDQELDINRLSDYDVDHIVPQSFLKDDSIDNKVLTRSDKARGKSDNVPSEEVVKKMKNYWRQLLNAKLITQRKFDNLTKAERGGLSELDKAGFIKRQLVETRQITKHVAQILDSRMNTKYDENDKLIREVKVITLKSKLVSDFRKDFQFYKVREINNYHHAHDAYLNAVVGTALIKKYPKLESEFVYGDYKVYDVRKMIAKSEQEIGKATAKYFFYSNIMNFFKTEITLANGEIRKRPLIETNGETGEIVWDKGRDFATVRKVLSMPQVNIVKKTEVQTGGFSKESILPKRNSDKLIARKKDWDPKKYGGFDSPTVAYSVLVVAKVEKGKSKKLKSVKELLGITIMERSSFEKNPIDFLEAKGYKEVKKDLIIKLPKYSLFELENGRKRMLASAGELQKGNELALPSKYVNFLYLASHYEKLKGSPEDNEQKQLFVEQHKHYLDEIIEQISEFSKRVILADANLDKVLSAYNKHRDKPIREQAENIIHLFTLTNLGAPAAFKYFDTTIDRKRYTSTKEVLDATLIHQSITGLYETRIDLSQLGGDGGEAAAKGGSPAPGGTVSLQDEHRLFDIPVTTSLPDVWLQDFPQAWAETGGLGRAKCQAPIIIDLKPTAVPVSIKQYPMSLEAHMGIRQHIIKFLELGVLRPCRSPWNTPLLPVKKPGTQDYRPVQDLREINKRTVDIHPTVPNPYNLLSTLKPDYSWYTVLDLKDAFFCLPLAPQSQELFAFEWKDPERGISGQLTWTRLPQGFKNSPTLFNEALHRDLTDFRTQHPEVTLLQYVDDLLLAAPTKKACTQGTRHLLQELGEKGYRASAKKAQICQTKVTYLGYILSEGKRWLTPGRIETVARIPPPRNPREVREFLGTAGFCRLWIPGFAELAAPLYALTKPSTPFTWQTEHQLAFEALKKALLSAPALGLPDTSKPFTLFLDERQGIAKGVLTQKLGPWKRPVAYLSKKLDPVAAGWPPCLRIMAATAMLVKDSAKLTLGQPLTVITPHTLEAIVRQPPDRWITNARLTHYQALLLDTDRVQFGPPVTLNPATLLPVPENQPSPHDCRQVLAETHGTREDLKDQELPDADHTWYTDGSSYLDSGTRRAGAAVVDGHNTIWAQSLPPGTSAQKAELIALTKALELSKGKKANIYTDSRYAFATAHTHGSIYERRGWLTSEGKEIKNKAEIIALLKALFLPQEVAIIHCPGHQKGQDPVAVGNRQADRVARQAAMAEVLTLATEPDNTSHITAGKRTADGSEFEKRTADGSEFESPKKKAKVE

SEQ ID NO: 7211 - protein, 2087 aa, synthetic construct
MPAAKRVKLDGGDKKYSIGLDIGTNSVGWAVITDEYKVPSKKFKVLGNTDRHSIKKNLIGALLFDSGETAEATRLKRTARRRYTRRKNRICYLQEIFSNEMAKVDDSFFHRLEESFLVEEDKKHERHPIFGNIVDEVAYHEKYPTIYHLRKKLVDSTDKADLRLIYLALAHMIKFRGHFLIEGDLNPDNSDVDKLFIQLVQTYNQLFEENPINASGVDAKAILSARLSKSRRLENLIAQLPGEKKNGLFGNLIALSLGLTPNFKSNFDLAEDAKLQLSKDTYDDDLDNLLAQIGDQYADLFLAAKNLSDAILLSDILRVNTEITKAPLSASMIKRYDEHHQDLTLLKALVRQQLPEKYKEIFFDQSKNGYAGYIDGGASQEEFYKFIKPILEKMDGTEELLVKLNREDLLRKQRTFDNGSIPHQIHLGELHAILRRQEDFYPFLKDNREKIEKILTFRIPYYVGPLARGNSRFAWMTRKSEETITPWNFEEVVDKGASAQSFIERMTNFDKNLPNEKVLPKHSLLYEYFTVYNELTKVKYVTEGMRKPAFLSGEQKKAIVDLLFKTNRKVTVKQLKEDYFKKIECFDSVEISGVEDRFNASLGTYHDLLKIIKDKDFLDNEENEDILEDIVLTLTLFEDREMIEERLKTYAHLFDDKVMKQLKRRRYTGWGRLSRKLINGIRDKQSGKTILDFLKSDGFANRNFMQLIHDDSLTFKEDIQKAQVSGQGDSLHEHIANLAGSPAIKKGILQTVKVVDELVKVMGRHKPENIVIEMARENQTTQKGQKNSRERMKRIEEGIKELGSQILKEHPVENTQLQNEKLYLYYLQNGRDMYVDQELDINRLSDYDVDHIVPQSFLKDDSIDNKVLTRSDKARGKSDNVPSEEVVKKMKNYWRQLLNAKLITQRKFDNLTKAERGGLSELDKAGFIKRQLVETRQITKHVAQILDSRMNTKYDENDKLIREVKVITLKSKLVSDFRKDFQFYKVREINNYHHAHDAYLNAVVGTALIKKYPKLESEFVYGDYKVYDVRKMIAKSEQEIGKATAKYFFYSNIMNFFKTEITLANGEIRKRPLIETNGETGEIVWDKGRDFATVRKVLSMPQVNIVKKTEVQTGGFSKESILPKRNSDKLIARKKDWDPKKYGGFDSPTVAYSVLVVAKVEKGKSKKLKSVKELLGITIMERSSFEKNPIDFLEAKGYKEVKKDLIIKLPKYSLFELENGRKRMLASAGELQKGNELALPSKYVNFLYLASHYEKLKGSPEDNEQKQLFVEQHKHYLDEIIEQISEFSKRVILADANLDKVLSAYNKHRDKPIREQAENIIHLFTLTNLGAPAAFKYFDTTIDRKRYTSTKEVLDATLIHQSITGLYETRIDLSQLGGDGGEAAAKGGSPAPGGVPWILKKPLELTIKLDLEEQQGTLLNNSILSKKGKEELKQLFEKYSALWQSWENQVGHRRIRPHKIATGTVKPTPQKQYHINPKAKPDIQIVINDLLKQGVLIQKESTMNTPVYPVPKPNGRWRMVLDYRAVNKVTPLIAVQNQHSYGILGSLFKGRYKTTIDLSNGFWAHPIVPEDYWITAFTWQGKQYCWTVLPQGFLNSPGLFNGDVVDLLQGIPNVEVYVDDVYISHDSEKEHLEYLDILFNRLKEAGYIISLKKSNIANSIVDFLGFQITNEGRGLTDTFKEKLENITAPTTLKQLQSILGLLNFARNFIPDFTELIAPLYALIPKSPKNYVPWQIEHSTTLETLITKLNGAEYLQGRKGDKTLIMKVNASYTTGYIRYYNEGEKKPISYVSIVFSKTELKFTELEKLLTTVHKGLLKALDLSMGQNIHVYSPIVSMQNIQKTPQTAKKALASRWLSWLSYLEDPRIRFFYDPQMPALKDLPAVDTGKDNKKHPSNFQHIFYTDGSAITSPTKEGHLNAGMGIVYFINKDGNLQKQQEWSISLGNHTAQFAEIAAFEFALKKCLPLGGNILVVTDSNYVAKAYNEELDVWASNGFVNNRKKPLKHISKWKSVADLKRLRPDVVVTHEPGHQKLDSSPHAYGNNLADQLATQASFKVHAGKRTADGSEFEKRTADGSEFESPKKKAKVE

SEQ ID NO: 7212 - protein, 2095 aa, synthetic construct
MPAAKRVKLDGGDKKYSIGLDIGTNSVGWAVITDEYKVPSKKFKVLGNTDRHSIKKNLIGALLFDSGETAEATRLKRTARRRYTRRKNRICYLQEIFSNEMAKVDDSFFHRLEESFLVEEDKKHERHPIFGNIVDEVAYHEKYPTIYHLRKKLVDSTDKADLRLIYLALAHMIKFRGHFLIEGDLNPDNSDVDKLFIQLVQTYNQLFEENPINASGVDAKAILSARLSKSRRLENLIAQLPGEKKNGLFGNLIALSLGLTPNFKSNFDLAEDAKLQLSKDTYDDDLDNLLAQIGDQYADLFLAAKNLSDAILLSDILRVNTEITKAPLSASMIKRYDEHHQDLTLLKALVRQQLPEKYKEIFFDQSKNGYAGYIDGGASQEEFYKFIKPILEKMDGTEELLVKLNREDLLRKQRTFDNGSIPHQIHLGELHAILRRQEDFYPFLKDNREKIEKILTFRIPYYVGPLARGNSRFAWMTRKSEETITPWNFEEVVDKGASAQSFIERMTNFDKNLPNEKVLPKHSLLYEYFTVYNELTKVKYVTEGMRKPAFLSGEQKKAIVDLLFKTNRKVTVKQLKEDYFKKIECFDSVEISGVEDRFNASLGTYHDLLKIIKDKDFLDNEENEDILEDIVLTLTLFEDREMIEERLKTYAHLFDDKVMKQLKRRRYTGWGRLSRKLINGIRDKQSGKTILDFLKSDGFANRNFMQLIHDDSLTFKEDIQKAQVSGQGDSLHEHIANLAGSPAIKKGILQTVKVVDELVKVMGRHKPENIVIEMARENQTTQKGQKNSRERMKRIEEGIKELGSQILKEHPVENTQLQNEKLYLYYLQNGRDMYVDQELDINRLSDYDVDHIVPQSFLKDDSIDNKVLTRSDKARGKSDNVPSEEVVKKMKNYWRQLLNAKLITQRKFDNLTKAERGGLSELDKAGFIKRQLVETRQITKHVAQILDSRMNTKYDENDKLIREVKVITLKSKLVSDFRKDFQFYKVREINNYHHAHDAYLNAVVGTALIKKYPKLESEFVYGDYKVYDVRKMIAKSEQEIGKATAKYFFYSNIMNFFKTEITLANGEIRKRPLIETNGETGEIVWDKGRDFATVRKVLSMPQVNIVKKTEVQTGGFSKESILPKRNSDKLIARKKDWDPKKYGGFDSPTVAYSVLVVAKVEKGKSKKLKSVKELLGITIMERSSFEKNPIDFLEAKGYKEVKKDLIIKLPKYSLFELENGRKRMLASAGELQKGNELALPSKYVNFLYLASHYEKLKGSPEDNEQKQLFVEQHKHYLDEIIEQISEFSKRVILADANLDKVLSAYNKHRDKPIREQAENIIHLFTLTNLGAPAAFKYFDTTIDRKRYTSTKEVLDATLIHQSITGLYETRIDLSQLGGDGGEAAAKGGSPAPGGTLQLEEEYRLFEPESTQKQEMDIWLKNFPQAWAETGGMGTAHCQAPVLIQLKATATPISIRQYPMPHEAYQGIKPHIRRMLDQGILKPCQSPWNTPLLPVKKPGTEDYRPVQDLREVNKRVEDIHPTVPNPYNLLSTLPPSHPWYTVLDLKDAFFCLRLHSESQLLFAFEWRDPEIGLSGQLTWTRLPQGFKNSPTLFNEALHSDLADFRVRYPALVLLQYVDDLLLAAATRTECLEGTKALLETLGNKGYRASAKKAQICLQEVTYLGYSLKDGQRWLTKARKEAILSIPVPKNSRQVREFLGKAGYCRLFIPGFAELAAPLYPLTRPGTLFQWGTEQQLAFEDIKKALLSSPALGLPDITKPFELFIDENSGFAKGVLVQKLGPWKRPVAYLSKKLDTVASGWPPCLRMVAAIAILVKDAGKLTLGQPLTILTSHPVEALVRQPPNKWLSNARMTHYQAMLLDAERVHFGPTVSLNPATLLPLPSGGNHHDCLQILAETHGTRPDLTDQPLPDADLTWYTDGSSFIRNGEREAGAAVTTESEVIWAAPLPPGTSAQRAELIALTQALKMAEGKKLTVYTDSRYAFATTHVHGEIYRRRGWLTSEGKEIKNKNEILALLEALFLPKRLSIIHCPGHQKGDSPQAKGNRLADDTAKKAATETHSSLTVLPAGKRTADGSEFEKRTADGSEFESPKKKAKVE

SEQ ID NO: 7213 - protein, 2176 aa, synthetic construct
MPAAKRVKLDGGDKKYSIGLDIGTNSVGWAVITDEYKVPSKKFKVLGNTDRHSIKKNLIGALLFDSGETAEATRLKRTARRRYTRRKNRICYLQEIFSNEMAKVDDSFFHRLEESFLVEEDKKHERHPIFGNIVDEVAYHEKYPTIYHLRKKLVDSTDKADLRLIYLALAHMIKFRGHFLIEGDLNPDNSDVDKLFIQLVQTYNQLFEENPINASGVDAKAILSARLSKSRRLENLIAQLPGEKKNGLFGNLIALSLGLTPNFKSNFDLAEDAKLQLSKDTYDDDLDNLLAQIGDQYADLFLAAKNLSDAILLSDILRVNTEITKAPLSASMIKRYDEHHQDLTLLKALVRQQLPEKYKEIFFDQSKNGYAGYIDGGASQEEFYKFIKPILEKMDGTEELLVKLNREDLLRKQRTFDNGSIPHQIHLGELHAILRRQEDFYPFLKDNREKIEKILTFRIPYYVGPLARGNSRFAWMTRKSEETITPWNFEEVVDKGASAQSFIERMTNFDKNLPNEKVLPKHSLLYEYFTVYNELTKVKYVTEGMRKPAFLSGEQKKAIVDLLFKTNRKVTVKQLKEDYFKKIECFDSVEISGVEDRFNASLGTYHDLLKIIKDKDFLDNEENEDILEDIVLTLTLFEDREMIEERLKTYAHLFDDKVMKQLKRRRYTGWGRLSRKLINGIRDKQSGKTILDFLKSDGFANRNFMQLIHDDSLTFKEDIQKAQVSGQGDSLHEHIANLAGSPAIKKGILQTVKVVDELVKVMGRHKPENIVIEMARENQTTQKGQKNSRERMKRIEEGIKELGSQILKEHPVENTQLQNEKLYLYYLQNGRDMYVDQELDINRLSDYDVDHIVPQSFLKDDSIDNKVLTRSDKARGKSDNVPSEEVVKKMKNYWRQLLNAKLITQRKFDNLTKAERGGLSELDKAGFIKRQLVETRQITKHVAQILDSRMNTKYDENDKLIREVKVITLKSKLVSDFRKDFQFYKVREINNYHHAHDAYLNAVVGTALIKKYPKLESEFVYGDYKVYDVRKMIAKSEQEIGKATAKYFFYSNIMNFFKTEITLANGEIRKRPLIETNGETGEIVWDKGRDFATVRKVLSMPQVNIVKKTEVQTGGFSKESILPKRNSDKLIARKKDWDPKKYGGFDSPTVAYSVLVVAKVEKGKSKKLKSVKELLGITIMERSSFEKNPIDFLEAKGYKEVKKDLIIKLPKYSLFELENGRKRMLASAGELQKGNELALPSKYVNFLYLASHYEKLKGSPEDNEQKQLFVEQHKHYLDEIIEQISEFSKRVILADANLDKVLSAYNKHRDKPIREQAENIIHLFTLTNLGAPAAFKYFDTTIDRKRYTSTKEVLDATLIHQSITGLYETRIDLSQLGGDGGEAAAKGGSPAPGGMNPLQLLQPLPAEIKGTKLLAHWNSGATITCIPESFLEDEQPIKKTLIKTIHGEKQQNVYYVTFKVKGRKVEAEVIASPYEYILLSPTDVPWLTQQPLQLTILVPLQEYQEKILSKTALPEDQKQQLKTLFVKYDNLWQHWENQVGHRKIRPHNIATGDYPPRPQKQYPINPKAKPSIQIVIDDLLKQGVLTPQNSTMNTPVYPVPKPDGRWRMVLDYREVNKTIPLTAAQNQHSAGILATIVRQKYKTTLDLANGFWAHPITPESYWLTAFTWQGKQYCWTRLPQGFLNSPALFNADVVDLLKEIPNVQVYVDDIYLSHDDPKEHVQQLEKVFQILLQAGYVVSLKKSEIGQKTVEFLGFNITKEGRGLTDTFKTKLLNITPPKDLKQLQSILGKLNFARNFIPNFAELVQPLYNLIAPAKGKYIEWSEENTKQLNMVIEALNTASNLEERLPEQRLVIKVNTSPSAGYVRYYNETGKKPIMYLNYVFSKAELKFSMLEKLLTTMHKALIKAMDLAMGQEILVYSPIVSMTKIQKTPLPERKALPIRWITWMTYLEDPRIQFHYDKTLPELKHIPDVYTSSQSPVKHPSQYEGVFYTDGSAIKSPDPTKSNNAGMGIVHATYKPEYQVLNQWSIPLGNHTAQMAEIAAVEFACKKALKIPGPVLVITDSFYVAESANKELPYWKSNGFVNNKKKPLKHISKWKSIAECLSMKPDITIQHEKGISLQIPVFILKGNALADKLATQGSYVVNAGKRTADGSEFEKRTADGSEFESPKKKAKVE

SEQ ID NO: 7214 - protein, 2094 aa, synthetic construct
MPAAKRVKLDGGDKKYSIGLDIGTNSVGWAVITDEYKVPSKKFKVLGNTDRHSIKKNLIGALLFDSGETAEATRLKRTARRRYTRRKNRICYLQEIFSNEMAKVDDSFFHRLEESFLVEEDKKHERHPIFGNIVDEVAYHEKYPTIYHLRKKLVDSTDKADLRLIYLALAHMIKFRGHFLIEGDLNPDNSDVDKLFIQLVQTYNQLFEENPINASGVDAKAILSARLSKSRRLENLIAQLPGEKKNGLFGNLIALSLGLTPNFKSNFDLAEDAKLQLSKDTYDDDLDNLLAQIGDQYADLFLAAKNLSDAILLSDILRVNTEITKAPLSASMIKRYDEHHQDLTLLKALVRQQLPEKYKEIFFDQSKNGYAGYIDGGASQEEFYKFIKPILEKMDGTEELLVKLNREDLLRKQRTFDNGSIPHQIHLGELHAILRRQEDFYPFLKDNREKIEKILTFRIPYYVGPLARGNSRFAWMTRKSEETITPWNFEEVVDKGASAQSFIERMTNFDKNLPNEKVLPKHSLLYEYFTVYNELTKVKYVTEGMRKPAFLSGEQKKAIVDLLFKTNRKVTVKQLKEDYFKKIECFDSVEISGVEDRFNASLGTYHDLLKIIKDKDFLDNEENEDILEDIVLTLTLFEDREMIEERLKTYAHLFDDKVMKQLKRRRYTGWGRLSRKLINGIRDKQSGKTILDFLKSDGFANRNFMQLIHDDSLTFKEDIQKAQVSGQGDSLHEHIANLAGSPAIKKGILQTVKVVDELVKVMGRHKPENIVIEMARENQTTQKGQKNSRERMKRIEEGIKELGSQILKEHPVENTQLQNEKLYLYYLQNGRDMYVDQELDINRLSDYDVDHIVPQSFLKDDSIDNKVLTRSDKARGKSDNVPSEEVVKKMKNYWRQLLNAKLITQRKFDNLTKAERGGLSELDKAGFIKRQLVETRQITKHVAQILDSRMNTKYDENDKLIREVKVITLKSKLVSDFRKDFQFYKVREINNYHHAHDAYLNAVVGTALIKKYPKLESEFVYGDYKVYDVRKMIAKSEQEIGKATAKYFFYSNIMNFFKTEITLANGEIRKRPLIETNGETGEIVWDKGRDFATVRKVLSMPQVNIVKKTEVQTGGFSKESILPKRNSDKLIARKKDWDPKKYGGFDSPTVAYSVLVVAKVEKGKSKKLKSVKELLGITIMERSSFEKNPIDFLEAKGYKEVKKDLIIKLPKYSLFELENGRKRMLASAGELQKGNELALPSKYVNFLYLASHYEKLKGSPEDNEQKQLFVEQHKHYLDEIIEQISEFSKRVILADANLDKVLSAYNKHRDKPIREQAENIIHLFTLTNLGAPAAFKYFDTTIDRKRYTSTKEVLDATLIHQSITGLYETRIDLSQLGGDGGEAAAKGGSPAPGGVLNLEEEYRLHEKPVPSSIDPSWLQLFPTVWAERAGMGLANQVPPVVVELRSGASPVAVRQYPMSKEAREGIRPHIQKFLDLGVLVPCRSPWNTPLLPVKKPGTNDYRPVQDLREINKRVQDIHPTVPNPYNLLSSLPPSYTWYSVLDLKDAFFCLRLHPNSQPLFAFEWKDPEKGNTGQLTWTRLPQGFKNSPTLFNEALHRDLAPFRALNPQVVLLQYVDDLLVAAPTYEDCKKGTQKLLQELSKLGYRVSAKKAQLCQREVTYLGYLLKEGKRWLTPARKATVMKIPVPTTPRQVREFLGTAGFCRLWIPGFASLAAPLYPLTKPSIPFIWTEEHQQAFDHIKKALLSAPALALPDLTKPFTLYIDERAGVARGVLTQTLGPWRRPVAYLSKKLDPVASGWPTCLKAVAAVALLLKDADKLTLGQNVTVIASHSLESIVRQPPDRWMTNARMTHYQSLLLNERVSFAPPAVLNPATLLPVESEATPVHRCSEILAEETGTRRDLEDQPLPGVPTWYTDGSSFITEGKRRAGAPIVDGKRTVWASSLPEGTSAQKAELVALTQALRLAEGKNINIYTDSRYAFATAHIHGAIYKQRGWLTSAGKDIKNKEEILALLEAIHLPRRVAIIHCPGHQRGSNPVATGNRRADEAAKQAALSTRVLAGTTKPAGKRTADGSEFEKRTADGSEFESPKKKAKVE

SEQ ID NO: 7215 - protein, 2127 aa, synthetic construct
MPAAKRVKLDGGDKKYSIGLDIGTNSVGWAVITDEYKVPSKKFKVLGNTDRHSIKKNLIGALLFDSGETAEATRLKRTARRRYTRRKNRICYLQEIFSNEMAKVDDSFFHRLEESFLVEEDKKHERHPIFGNIVDEVAYHEKYPTIYHLRKKLVDSTDKADLRLIYLALAHMIKFRGHFLIEGDLNPDNSDVDKLFIQLVQTYNQLFEENPINASGVDAKAILSARLSKSRRLENLIAQLPGEKKNGLFGNLIALSLGLTPNFKSNFDLAEDAKLQLSKDTYDDDLDNLLAQIGDQYADLFLAAKNLSDAILLSDILRVNTEITKAPLSASMIKRYDEHHQDLTLLKALVRQQLPEKYKEIFFDQSKNGYAGYIDGGASQEEFYKFIKPILEKMDGTEELLVKLNREDLLRKQRTFDNGSIPHQIHLGELHAILRRQEDFYPFLKDNREKIEKILTFRIPYYVGPLARGNSRFAWMTRKSEETITPWNFEEVVDKGASAQSFIERMTNFDKNLPNEKVLPKHSLLYEYFTVYNELTKVKYVTEGMRKPAFLSGEQKKAIVDLLFKTNRKVTVKQLKEDYFKKIECFDSVEISGVEDRFNASLGTYHDLLKIIKDKDFLDNEENEDILEDIVLTLTLFEDREMIEERLKTYAHLFDDKVMKQLKRRRYTGWGRLSRKLINGIRDKQSGKTILDFLKSDGFANRNFMQLIHDDSLTFKEDIQKAQVSGQGDSLHEHIANLAGSPAIKKGILQTVKVVDELVKVMGRHKPENIVIEMARENQTTQKGQKNSRERMKRIEEGIKELGSQILKEHPVENTQLQNEKLYLYYLQNGRDMYVDQELDINRLSDYDVDHIVPQSFLKDDSIDNKVLTRSDKARGKSDNVPSEEVVKKMKNYWRQLLNAKLITQRKFDNLTKAERGGLSELDKAGFIKRQLVETRQITKHVAQILDSRMNTKYDENDKLIREVKVITLKSKLVSDFRKDFQFYKVREINNYHHAHDAYLNAVVGTALIKKYPKLESEFVYGDYKVYDVRKMIAKSEQEIGKATAKYFFYSNIMNFFKTEITLANGEIRKRPLIETNGETGEIVWDKGRDFATVRKVLSMPQVNIVKKTEVQTGGFSKESILPKRNSDKLIARKKDWDPKKYGGFDSPTVAYSVLVVAKVEKGKSKKLKSVKELLGITIMERSSFEKNPIDFLEAKGYKEVKKDLIIKLPKYSLFELENGRKRMLASAGELQKGNELALPSKYVNFLYLASHYEKLKGSPEDNEQKQLFVEQHKHYLDEIIEQISEFSKRVILADANLDKVLSAYNKHRDKPIREQAENIIHLFTLTNLGAPAAFKYFDTTIDRKRYTSTKEVLDATLIHQSITGLYETRIDLSQLGGDGGEAAAKGGSPAPGGLLGRDLLTKLKAQIQFSTEGPQVTWEDRPAMCLVLNLEEEYRLHEKPVPPSIDPSWLQLFPMVWAEKAGMGLANQVPPVVVELKSDASPVAVRQYPMSKEAREGIRPHIQRFLDLGILVPCQSPWNTPLLPVKKPGTNDYRPVQDLREVNKRVQDIHPTVPNPYNLLSSLPPSHTWYSVLDLKDAFFCLKLHPNSQPLFAFEWRDPEKGNTGQLTWTRLPQGFKNSPTLFNEALHRDLASFRALNPQVVMLQYVDDLLVAAPTYRDCKEGTRRLLQELSKLGYRVSAKKAQLCREEVTYLGYLLKGGKRWLTPARKATVMKIPTPTTPRQVREFLGTAGFCRLWIPGFASLAAPLYPLTRPKVPFTWTEAHQEAFGRIKEALLSAPALALPDLTKPFALYVDEKEGVARGVLTQTLGPWRRPVAYLSKKLDPVASGWPTCLKAIAAVALLLKDADKLTLGQNVLVIAPHNLESIVRQPPDRWMTNARMTHYQSLLLNERVSFAPPAILNPATLLPVESDDTPIHICSEILAEETGTRPDLRDQPLPGVPAWYTDGSSFIMDGRRQAGAAIVDNKRTVWASNLPEGTSAQKAELIALTQALRLAEGKSINIYTDSRYAFATAHVHGAIYKQRGWLTSAGKDIKNKEEILALLEAIHLPKRVAIIHCPGHQRGTDPVATGNRKADEAAKQAAQSTRILTETTKNAGKRTADGSEFEKRTADGSEFESPKKKAKVE

SEQ ID NO: 7216 - protein, 2127 aa, synthetic construct
MPAAKRVKLDGGDKKYSIGLDIGTNSVGWAVITDEYKVPSKKFKVLGNTDRHSIKKNLIGALLFDSGETAEATRLKRTARRRYTRRKNRICYLQEIFSNEMAKVDDSFFHRLEESFLVEEDKKHERHPIFGNIVDEVAYHEKYPTIYHLRKKLVDSTDKADLRLIYLALAHMIKFRGHFLIEGDLNPDNSDVDKLFIQLVQTYNQLFEENPINASGVDAKAILSARLSKSRRLENLIAQLPGEKKNGLFGNLIALSLGLTPNFKSNFDLAEDAKLQLSKDTYDDDLDNLLAQIGDQYADLFLAAKNLSDAILLSDILRVNTEITKAPLSASMIKRYDEHHQDLTLLKALVRQQLPEKYKEIFFDQSKNGYAGYIDGGASQEEFYKFIKPILEKMDGTEELLVKLNREDLLRKQRTFDNGSIPHQIHLGELHAILRRQEDFYPFLKDNREKIEKILTFRIPYYVGPLARGNSRFAWMTRKSEETITPWNFEEVVDKGASAQSFIERMTNFDKNLPNEKVLPKHSLLYEYFTVYNELTKVKYVTEGMRKPAFLSGEQKKAIVDLLFKTNRKVTVKQLKEDYFKKIECFDSVEISGVEDRFNASLGTYHDLLKIIKDKDFLDNEENEDILEDIVLTLTLFEDREMIEERLKTYAHLFDDKVMKQLKRRRYTGWGRLSRKLINGIRDKQSGKTILDFLKSDGFANRNFMQLIHDDSLTFKEDIQKAQVSGQGDSLHEHIANLAGSPAIKKGILQTVKVVDELVKVMGRHKPENIVIEMARENQTTQKGQKNSRERMKRIEEGIKELGSQILKEHPVENTQLQNEKLYLYYLQNGRDMYVDQELDINRLSDYDVDHIVPQSFLKDDSIDNKVLTRSDKARGKSDNVPSEEVVKKMKNYWRQLLNAKLITQRKFDNLTKAERGGLSELDKAGFIKRQLVETRQITKHVAQILDSRMNTKYDENDKLIREVKVITLKSKLVSDFRKDFQFYKVREINNYHHAHDAYLNAVVGTALIKKYPKLESEFVYGDYKVYDVRKMIAKSEQEIGKATAKYFFYSNIMNFFKTEITLANGEIRKRPLIETNGETGEIVWDKGRDFATVRKVLSMPQVNIVKKTEVQTGGFSKESILPKRNSDKLIARKKDWDPKKYGGFDSPTVAYSVLVVAKVEKGKSKKLKSVKELLGITIMERSSFEKNPIDFLEAKGYKEVKKDLIIKLPKYSLFELENGRKRMLASAGELQKGNELALPSKYVNFLYLASHYEKLKGSPEDNEQKQLFVEQHKHYLDEIIEQISEFSKRVILADANLDKVLSAYNKHRDKPIREQAENIIHLFTLTNLGAPAAFKYFDTTIDRKRYTSTKEVLDATLIHQSITGLYETRIDLSQLGGDGGEAAAKGGSPAPGGLLGRDLLTKLKAQIQFSTEGPQVTWEDRPAMCLVLNLEEEYRLHEKPVPPSIDPSWLQLFPMVWAEKAGMGLANQVPPVVVELKSDASPVAVRQYPMSKEAREGIRPHIQRFLDLGILVPCQSPWNTPLLPVKKPGTNDYRPVQDLREVNKRVQDIHPTVPNPYNLLSSLPPSHTWYSVLDLKDAFFCLKLHPNSQPLFAFEWRDPEKGNTGQLTWTRLPQGFKNSPTLFNEALHRDLASFRALNPQVVMLQYVDDLLVAAPTYRDCKEGTRRLLQELSKLGYRVSAKKAQLCREEVTYLGYLLKGGKRWLTPARKATVMKIPTPTTPRQVREFLGKAGFCRLFIPGFASLAAPLYPLTRPKVPFTWTEAHQEAFGRIKEALLSAPALALPDLTKPFALYVDEKEGVARGVLTQTLGPWRRPVAYLSKKLDPVASGWPTCLKAIAAVALLLKDADKLTLGQNVLVIAPHNLESIVRQPPDRWMTNARMTHYQSLLLNERVSFAPPAILNPATLLPVESDDTPIHICSEILAEETGTRPDLRDQPLPGVPAWYTDGSSFIMDGRRQAGAAIVDNKRTVWASNLPEGTSAQKAELIALTQALRLAEGKSINIYTDSRYAFATAHVHGAIYKQRGWLTSAGKDIKNKEEILALLEAIHLPKRVAIIHCPGHQRGTDPVATGNRKADEAAKQAAQSTRILTETTKNAGKRTADGSEFEKRTADGSEFESPKKKAKVE

SEQ ID NO: 7217 - protein, 2218 aa, synthetic construct
MPAAKRVKLDGGDKKYSIGLDIGTNSVGWAVITDEYKVPSKKFKVLGNTDRHSIKKNLIGALLFDSGETAEATRLKRTARRRYTRRKNRICYLQEIFSNEMAKVDDSFFHRLEESFLVEEDKKHERHPIFGNIVDEVAYHEKYPTIYHLRKKLVDSTDKADLRLIYLALAHMIKFRGHFLIEGDLNPDNSDVDKLFIQLVQTYNQLFEENPINASGVDAKAILSARLSKSRRLENLIAQLPGEKKNGLFGNLIALSLGLTPNFKSNFDLAEDAKLQLSKDTYDDDLDNLLAQIGDQYADLFLAAKNLSDAILLSDILRVNTEITKAPLSASMIKRYDEHHQDLTLLKALVRQQLPEKYKEIFFDQSKNGYAGYIDGGASQEEFYKFIKPILEKMDGTEELLVKLNREDLLRKQRTFDNGSIPHQIHLGELHAILRRQEDFYPFLKDNREKIEKILTFRIPYYVGPLARGNSRFAWMTRKSEETITPWNFEEVVDKGASAQSFIERMTNFDKNLPNEKVLPKHSLLYEYFTVYNELTKVKYVTEGMRKPAFLSGEQKKAIVDLLFKTNRKVTVKQLKEDYFKKIECFDSVEISGVEDRFNASLGTYHDLLKIIKDKDFLDNEENEDILEDIVLTLTLFEDREMIEERLKTYAHLFDDKVMKQLKRRRYTGWGRLSRKLINGIRDKQSGKTILDFLKSDGFANRNFMQLIHDDSLTFKEDIQKAQVSGQGDSLHEHIANLAGSPAIKKGILQTVKVVDELVKVMGRHKPENIVIEMARENQTTQKGQKNSRERMKRIEEGIKELGSQILKEHPVENTQLQNEKLYLYYLQNGRDMYVDQELDINRLSDYDVDHIVPQSFLKDDSIDNKVLTRSDKARGKSDNVPSEEVVKKMKNYWRQLLNAKLITQRKFDNLTKAERGGLSELDKAGFIKRQLVETRQITKHVAQILDSRMNTKYDENDKLIREVKVITLKSKLVSDFRKDFQFYKVREINNYHHAHDAYLNAVVGTALIKKYPKLESEFVYGDYKVYDVRKMIAKSEQEIGKATAKYFFYSNIMNFFKTEITLANGEIRKRPLIETNGETGEIVWDKGRDFATVRKVLSMPQVNIVKKTEVQTGGFSKESILPKRNSDKLIARKKDWDPKKYGGFDSPTVAYSVLVVAKVEKGKSKKLKSVKELLGITIMERSSFEKNPIDFLEAKGYKEVKKDLIIKLPKYSLFELENGRKRMLASAGELQKGNELALPSKYVNFLYLASHYEKLKGSPEDNEQKQLFVEQHKHYLDEIIEQISEFSKRVILADANLDKVLSAYNKHRDKPIREQAENIIHLFTLTNLGAPAAFKYFDTTIDRKRYTSTKEVLDATLIHQSITGLYETRIDLSQLGGDGGEAAAKGGSPAPGGTLGDQGSRGSDPLPEPRVTLTVEGIPTEFLVNTGAEHSVLTKPMGKMGSKRTVVAGATGSKVYPWTTKRLLKIGQKQVTHSFLVIPECPAPLLGRDLLTKLKAQIQFSTEGPQVTWEDRPAMCLVLNLEEEYRLHEKPVPPSIDPSWLQLFPMVWAEKAGMGLANQVPPVVVELKSDASPVAVRQYPMSKEAREGIRPHIQRFLDLGILVPCQSPWNTPLLPVKKPGTNDYRPVQDLREVNKRVQDIHPTVPNPYNLLSSLPPSHTWYSVLDLKDAFFCLKLHPNSQPLFAFEWRDPEKGNTGQLTWTRLPQGFKNSPTLFNEALHRDLASFRALNPQVVMLQYVDDLLVAAPTYRDCKEGTRRLLQELSKLGYRVSAKKAQLCREEVTYLGYLLKGGKRWLTPARKATVMKIPTPTTPRQVREFLGTAGFCRLWIPGFASLAAPLYPLTRPKVPFTWTEAHQEAFGRIKEALLSAPALALPDLTKPFALYVDEKEGVARGVLTQTLGPWRRPVAYLSKKLDPVASGWPTCLKAIAAVALLLKDADKLTLGQNVLVIAPHNLESIVRQPPDRWMTNARMTHYQSLLLNERVSFAPPAILNPATLLPVESDDTPIHICSEILAEETGTRPDLRDQPLPGVPAWYTDGSSFIMDGRRQAGAAIVDNKRTVWASNLPEGTSAQKAELIALTQALRLAEGKSINIYTDSRYAFATAHVHGAIYKQRGWLTSAGKDIKNKEEILALLEAIHLPKRVAIIHCPGHQRGTDPVATGNRKADEAAKQAAQSTRILTETTKNAGKRTADGSEFEKRTADGSEFESPKKKAKVE

SEQ ID NO: 7218 - protein, 2096 aa, synthetic construct
MPAAKRVKLDGGDKKYSIGLDIGTNSVGWAVITDEYKVPSKKFKVLGNTDRHSIKKNLIGALLFDSGETAEATRLKRTARRRYTRRKNRICYLQEIFSNEMAKVDDSFFHRLEESFLVEEDKKHERHPIFGNIVDEVAYHEKYPTIYHLRKKLVDSTDKADLRLIYLALAHMIKFRGHFLIEGDLNPDNSDVDKLFIQLVQTYNQLFEENPINASGVDAKAILSARLSKSRRLENLIAQLPGEKKNGLFGNLIALSLGLTPNFKSNFDLAEDAKLQLSKDTYDDDLDNLLAQIGDQYADLFLAAKNLSDAILLSDILRVNTEITKAPLSASMIKRYDEHHQDLTLLKALVRQQLPEKYKEIFFDQSKNGYAGYIDGGASQEEFYKFIKPILEKMDGTEELLVKLNREDLLRKQRTFDNGSIPHQIHLGELHAILRRQEDFYPFLKDNREKIEKILTFRIPYYVGPLARGNSRFAWMTRKSEETITPWNFEEVVDKGASAQSFIERMTNFDKNLPNEKVLPKHSLLYEYFTVYNELTKVKYVTEGMRKPAFLSGEQKKAIVDLLFKTNRKVTVKQLKEDYFKKIECFDSVEISGVEDRFNASLGTYHDLLKIIKDKDFLDNEENEDILEDIVLTLTLFEDREMIEERLKTYAHLFDDKVMKQLKRRRYTGWGRLSRKLINGIRDKQSGKTILDFLKSDGFANRNFMQLIHDDSLTFKEDIQKAQVSGQGDSLHEHIANLAGSPAIKKGILQTVKVVDELVKVMGRHKPENIVIEMARENQTTQKGQKNSRERMKRIEEGIKELGSQILKEHPVENTQLQNEKLYLYYLQNGRDMYVDQELDINRLSDYDVDHIVPQSFLKDDSIDNKVLTRSDKARGKSDNVPSEEVVKKMKNYWRQLLNAKLITQRKFDNLTKAERGGLSELDKAGFIKRQLVETRQITKHVAQILDSRMNTKYDENDKLIREVKVITLKSKLVSDFRKDFQFYKVREINNYHHAHDAYLNAVVGTALIKKYPKLESEFVYGDYKVYDVRKMIAKSEQEIGKATAKYFFYSNIMNFFKTEITLANGEIRKRPLIETNGETGEIVWDKGRDFATVRKVLSMPQVNIVKKTEVQTGGFSKESILPKRNSDKLIARKKDWDPKKYGGFDSPTVAYSVLVVAKVEKGKSKKLKSVKELLGITIMERSSFEKNPIDFLEAKGYKEVKKDLIIKLPKYSLFELENGRKRMLASAGELQKGNELALPSKYVNFLYLASHYEKLKGSPEDNEQKQLFVEQHKHYLDEIIEQISEFSKRVILADANLDKVLSAYNKHRDKPIREQAENIIHLFTLTNLGAPAAFKYFDTTIDRKRYTSTKEVLDATLIHQSITGLYETRIDLSQLGGDGGEAAAKGGSPAPGGTLNLEDEYRLYETSAEPEVSPGSTWLSDFPQAWAETGGMGLAVRQAPLIIPLKATSTPVSIKQYPMSQEAKLGIKPHIQRLLDQGILVPCQSPWNTPLLPVKKPGTNDYRPVQDLREVNKRVEDIHPTVPNPYNLLSGLPPSHRWYTVLDLKDAFFCLRLHPTSQPLFAFEWRDPGMGISGQLTWTRLPQGFKNSPTLFNEALHRDLADFRIQHPDLILLQYVDDILLAATSELDCQQGTRALLLTLGNLGYRASAKKAQLCQKQVKYLGYLLKEGQRWLTEARKETVMGQPTPKTPRQLREFLGTAGFCRLWIPGFAEMAAPLYPLTKPGTLFNWGPDQQKAYQEIKQALLTAPALGLPDLTKPFELFVDEKQGYAKGVLTQKLGPWRRPVAYLSKKLDPVAAGWPPCLRMVAAIAVLRKDAGKLTMGQPLVILAPHAVEALVKQPPDRWLSNARMTHYQAMLLDTDRVQFGPVVALNPATLLPLPEEGAPHDCLEILAETHGTRPDLTDQPIPDADHTWYTDGSSFLQEGQRKAGAAVTTETEVIWARALPAGTSAQRAELIALTQALKMAEGKRLNVYTDSRYAFATAHIHGEIYRRRGWLTSEGREIKNKSEILALLKALFLPKRLSIIHCLGHQKGDSAEARGNRLADQAAREAAIKTPPDTSTLLAGKRTADGSEFEKRTADGSEFESPKKKAKVE

SEQ ID NO: 7219 - protein, 2096 aa, synthetic construct
MPAAKRVKLDGGDKKYSIGLDIGTNSVGWAVITDEYKVPSKKFKVLGNTDRHSIKKNLIGALLFDSGETAEATRLKRTARRRYTRRKNRICYLQEIFSNEMAKVDDSFFHRLEESFLVEEDKKHERHPIFGNIVDEVAYHEKYPTIYHLRKKLVDSTDKADLRLIYLALAHMIKFRGHFLIEGDLNPDNSDVDKLFIQLVQTYNQLFEENPINASGVDAKAILSARLSKSRRLENLIAQLPGEKKNGLFGNLIALSLGLTPNFKSNFDLAEDAKLQLSKDTYDDDLDNLLAQIGDQYADLFLAAKNLSDAILLSDILRVNTEITKAPLSASMIKRYDEHHQDLTLLKALVRQQLPEKYKEIFFDQSKNGYAGYIDGGASQEEFYKFIKPILEKMDGTEELLVKLNREDLLRKQRTFDNGSIPHQIHLGELHAILRRQEDFYPFLKDNREKIEKILTFRIPYYVGPLARGNSRFAWMTRKSEETITPWNFEEVVDKGASAQSFIERMTNFDKNLPNEKVLPKHSLLYEYFTVYNELTKVKYVTEGMRKPAFLSGEQKKAIVDLLFKTNRKVTVKQLKEDYFKKIECFDSVEISGVEDRFNASLGTYHDLLKIIKDKDFLDNEENEDILEDIVLTLTLFEDREMIEERLKTYAHLFDDKVMKQLKRRRYTGWGRLSRKLINGIRDKQSGKTILDFLKSDGFANRNFMQLIHDDSLTFKEDIQKAQVSGQGDSLHEHIANLAGSPAIKKGILQTVKVVDELVKVMGRHKPENIVIEMARENQTTQKGQKNSRERMKRIEEGIKELGSQILKEHPVENTQLQNEKLYLYYLQNGRDMYVDQELDINRLSDYDVDHIVPQSFLKDDSIDNKVLTRSDKARGKSDNVPSEEVVKKMKNYWRQLLNAKLITQRKFDNLTKAERGGLSELDKAGFIKRQLVETRQITKHVAQILDSRMNTKYDENDKLIREVKVITLKSKLVSDFRKDFQFYKVREINNYHHAHDAYLNAVVGTALIKKYPKLESEFVYGDYKVYDVRKMIAKSEQEIGKATAKYFFYSNIMNFFKTEITLANGEIRKRPLIETNGETGEIVWDKGRDFATVRKVLSMPQVNIVKKTEVQTGGFSKESILPKRNSDKLIARKKDWDPKKYGGFDSPTVAYSVLVVAKVEKGKSKKLKSVKELLGITIMERSSFEKNPIDFLEAKGYKEVKKDLIIKLPKYSLFELENGRKRMLASAGELQKGNELALPSKYVNFLYLASHYEKLKGSPEDNEQKQLFVEQHKHYLDEIIEQISEFSKRVILADANLDKVLSAYNKHRDKPIREQAENIIHLFTLTNLGAPAAFKYFDTTIDRKRYTSTKEVLDATLIHQSITGLYETRIDLSQLGGDGGEAAAKGGSPAPGGTLNLEDEYRLYETSAEPEVSPGSTWLSDFPQAWAETGGMGLAVRQAPLIIPLKATSTPVSIKQYPMSQEAKLGIKPHIQRLLDQGILVPCQSPWNTPLLPVKKPGTNDYRPVQDLREVNKRVEDIHPTVPNPYNLLSGLPPSHRWYTVLDLKDAFFCLRLHPTSQPLFAFEWRDPGMGISGQLTWTRLPQGFKNSPTLFNEALHRDLADFRIQHPDLILLQYVDDILLAATSELDCQQGTRALLLTLGNLGYRASAKKAQLCQKQVKYLGYLLKEGQRWLTEARKETVMGQPTPKTPRQLREFLGKAGFCRLFIPGFAEMAAPLYPLTKPGTLFNWGPDQQKAYQEIKQALLTAPALGLPDLTKPFELFVDEKQGYAKGVLTQKLGPWRRPVAYLSKKLDPVAAGWPPCLRMVAAIAVLRKDAGKLTMGQPLVILAPHAVEALVKQPPDRWLSNARMTHYQAMLLDTDRVQFGPVVALNPATLLPLPEEGAPHDCLEILAETHGTRPDLTDQPIPDADHTWYTDGSSFLQEGQRKAGAAVTTETEVIWARALPAGTSAQRAELIALTQALKMAEGKRLNVYTDSRYAFATAHIHGEIYRRRGWLTSEGREIKNKSEILALLKALFLPKRLSIIHCLGHQKGDSAEARGNRLADQAAREAAIKTPPDTSTLLAGKRTADGSEFEKRTADGSEFESPKKKAKVE

SEQ ID NO: 7220 - protein, 2096 aa, synthetic construct
MPAAKRVKLDGGDKKYSIGLDIGTNSVGWAVITDEYKVPSKKFKVLGNTDRHSIKKNLIGALLFDSGETAEATRLKRTARRRYTRRKNRICYLQEIFSNEMAKVDDSFFHRLEESFLVEEDKKHERHPIFGNIVDEVAYHEKYPTIYHLRKKLVDSTDKADLRLIYLALAHMIKFRGHFLIEGDLNPDNSDVDKLFIQLVQTYNQLFEENPINASGVDAKAILSARLSKSRRLENLIAQLPGEKKNGLFGNLIALSLGLTPNFKSNFDLAEDAKLQLSKDTYDDDLDNLLAQIGDQYADLFLAAKNLSDAILLSDILRVNTEITKAPLSASMIKRYDEHHQDLTLLKALVRQQLPEKYKEIFFDQSKNGYAGYIDGGASQEEFYKFIKPILEKMDGTEELLVKLNREDLLRKQRTFDNGSIPHQIHLGELHAILRRQEDFYPFLKDNREKIEKILTFRIPYYVGPLARGNSRFAWMTRKSEETITPWNFEEVVDKGASAQSFIERMTNFDKNLPNEKVLPKHSLLYEYFTVYNELTKVKYVTEGMRKPAFLSGEQKKAIVDLLFKTNRKVTVKQLKEDYFKKIECFDSVEISGVEDRFNASLGTYHDLLKIIKDKDFLDNEENEDILEDIVLTLTLFEDREMIEERLKTYAHLFDDKVMKQLKRRRYTGWGRLSRKLINGIRDKQSGKTILDFLKSDGFANRNFMQLIHDDSLTFKEDIQKAQVSGQGDSLHEHIANLAGSPAIKKGILQTVKVVDELVKVMGRHKPENIVIEMARENQTTQKGQKNSRERMKRIEEGIKELGSQILKEHPVENTQLQNEKLYLYYLQNGRDMYVDQELDINRLSDYDVDHIVPQSFLKDDSIDNKVLTRSDKARGKSDNVPSEEVVKKMKNYWRQLLNAKLITQRKFDNLTKAERGGLSELDKAGFIKRQLVETRQITKHVAQILDSRMNTKYDENDKLIREVKVITLKSKLVSDFRKDFQFYKVREINNYHHAHDAYLNAVVGTALIKKYPKLESEFVYGDYKVYDVRKMIAKSEQEIGKATAKYFFYSNIMNFFKTEITLANGEIRKRPLIETNGETGEIVWDKGRDFATVRKVLSMPQVNIVKKTEVQTGGFSKESILPKRNSDKLIARKKDWDPKKYGGFDSPTVAYSVLVVAKVEKGKSKKLKSVKELLGITIMERSSFEKNPIDFLEAKGYKEVKKDLIIKLPKYSLFELENGRKRMLASAGELQKGNELALPSKYVNFLYLASHYEKLKGSPEDNEQKQLFVEQHKHYLDEIIEQISEFSKRVILADANLDKVLSAYNKHRDKPIREQAENIIHLFTLTNLGAPAAFKYFDTTIDRKRYTSTKEVLDATLIHQSITGLYETRIDLSQLGGDGGEAAAKGGSPAPGGTLGIEDEYRLHETSTEPDVSLGSTWLSDFPQAWAETGGMGLAVRQAPLIIPLKATSTPVSIQQYPMSHEARLGIKPHIQRLLDQGILVPCQSPWNTPLLPVKKPGTNDYRPVQDLREVNKRVEDIHPTVPNPYNLLSGLPPSHQWYTVLDLKDAFFCLRLHPTSQPLFAFEWRDPGMGISGQLTWTRLPQGFKNSPTLFNEALHRDLADFRIQHPDLILLQYVDDILLAATSELDCQQGTRALLQTLGDLGYRASAKKAQICQKQVKYLGYLLREGQRWLTEARKETVMGQPVPKTPRQLREFLGTAGFCRLWIPGFAEMAAPLYPLTKPGTLFSWGPDQQKAYQEIKQALLTAPALGLPDLTKPFELFVDEKQGYAKGVLTQKLGPWRRPVAYLSKKLDPVAAGWPPCLRMVAAIAVLTKDAGKLTMGQPLVILAPHAVEALVKQPPDRWLSNARMTHYQAMLLDTDRVQFGPVVALNPATLLPLPEEGAPHDCLEILAETHGTRPDLTDQPIPDADHTWYTDGSSFLQEGQRKAGAAVTTETEVIWAGALPAGTSAQRAELIALTQALKMAEGKRLNVYTDSRYAFATAHIHGEIYRRRGWLTSEGREIKNKSEILALLKALFLPKRLSIIHCLGHQKGDSAEARGNRLADQAAREAAIKTPPDTSTLLAGKRTADGSEFEKRTADGSEFESPKKKAKVE

SEQ ID NO: 7221 - protein, 2096 aa, synthetic construct
MPAAKRVKLDGGDKKYSIGLDIGTNSVGWAVITDEYKVPSKKFKVLGNTDRHSIKKNLIGALLFDSGETAEATRLKRTARRRYTRRKNRICYLQEIFSNEMAKVDDSFFHRLEESFLVEEDKKHERHPIFGNIVDEVAYHEKYPTIYHLRKKLVDSTDKADLRLIYLALAHMIKFRGHFLIEGDLNPDNSDVDKLFIQLVQTYNQLFEENPINASGVDAKAILSARLSKSRRLENLIAQLPGEKKNGLFGNLIALSLGLTPNFKSNFDLAEDAKLQLSKDTYDDDLDNLLAQIGDQYADLFLAAKNLSDAILLSDILRVNTEITKAPLSASMIKRYDEHHQDLTLLKALVRQQLPEKYKEIFFDQSKNGYAGYIDGGASQEEFYKFIKPILEKMDGTEELLVKLNREDLLRKQRTFDNGSIPHQIHLGELHAILRRQEDFYPFLKDNREKIEKILTFRIPYYVGPLARGNSRFAWMTRKSEETITPWNFEEVVDKGASAQSFIERMTNFDKNLPNEKVLPKHSLLYEYFTVYNELTKVKYVTEGMRKPAFLSGEQKKAIVDLLFKTNRKVTVKQLKEDYFKKIECFDSVEISGVEDRFNASLGTYHDLLKIIKDKDFLDNEENEDILEDIVLTLTLFEDREMIEERLKTYAHLFDDKVMKQLKRRRYTGWGRLSRKLINGIRDKQSGKTILDFLKSDGFANRNFMQLIHDDSLTFKEDIQKAQVSGQGDSLHEHIANLAGSPAIKKGILQTVKVVDELVKVMGRHKPENIVIEMARENQTTQKGQKNSRERMKRIEEGIKELGSQILKEHPVENTQLQNEKLYLYYLQNGRDMYVDQELDINRLSDYDVDHIVPQSFLKDDSIDNKVLTRSDKARGKSDNVPSEEVVKKMKNYWRQLLNAKLITQRKFDNLTKAERGGLSELDKAGFIKRQLVETRQITKHVAQILDSRMNTKYDENDKLIREVKVITLKSKLVSDFRKDFQFYKVREINNYHHAHDAYLNAVVGTALIKKYPKLESEFVYGDYKVYDVRKMIAKSEQEIGKATAKYFFYSNIMNFFKTEITLANGEIRKRPLIETNGETGEIVWDKGRDFATVRKVLSMPQVNIVKKTEVQTGGFSKESILPKRNSDKLIARKKDWDPKKYGGFDSPTVAYSVLVVAKVEKGKSKKLKSVKELLGITIMERSSFEKNPIDFLEAKGYKEVKKDLIIKLPKYSLFELENGRKRMLASAGELQKGNELALPSKYVNFLYLASHYEKLKGSPEDNEQKQLFVEQHKHYLDEIIEQISEFSKRVILADANLDKVLSAYNKHRDKPIREQAENIIHLFTLTNLGAPAAFKYFDTTIDRKRYTSTKEVLDATLIHQSITGLYETRIDLSQLGGDGGEAAAKGGSPAPGGTLNIEDEYRLHETSKGPDVPLGSTWLSDFPQAWAETGGMGLAVRQAPLIIPLKATSTPVSIKQYPMSQEARLGIKPHIQRLLDQGILVPCQSPWNTPLLPVKKPGTNDYRPVQDLREVNKRVEDIHPTVPNPYNLLSGLPPSHQWYTVLDLKDAFFCLRLHPTSQSLFAFEWRDPEMGISGQLTWTRLPQGFKNSPTLFDEALHRDLADFRIQHPDLILLQYVDDLLLAATSELDCQQGTRALLQTLGDLGYRASAKKAQICQKQVKYLGYLLKEGQRWLTEARKETVMGQPTPKTPRQLREFLGTAGFCRLWIPGFAEMAAPLYPLTKTGTLFEWGPDQQKAYQEIKQALLTAPALGLPDLTKPFELFVDEKQGYAKGVLTQKLGPWRRPVAYLSKKLDPVAAGWPPCLRMVAAIAVLTKDAGKLTMGQPLVILAPHAVEALVKQPPDRWLSNARMTHYQALLLDTDRVQFGPIVALNPATLLPLPEEGLQHDCLDILAEAHGTRPDLTDQPLPDADHTWYTDGSSFLQEGQRKAGAAVTTETEVVWAKALPAGTSAQRAELIALTQALKMAEGKKLNVYTDSRYAFATAHIHGEIYRRRGLLTSEGKEIKNKDEILALLKALFLPKRLSIIHCPGHQKGNRAEARGNRMADQAAREVATRETPETSTLLAGKRTADGSEFEKRTADGSEFESPKKKAKVE

SEQ ID NO: 7222 - protein, 2096 aa, synthetic construct
MPAAKRVKLDGGDKKYSIGLDIGTNSVGWAVITDEYKVPSKKFKVLGNTDRHSIKKNLIGALLFDSGETAEATRLKRTARRRYTRRKNRICYLQEIFSNEMAKVDDSFFHRLEESFLVEEDKKHERHPIFGNIVDEVAYHEKYPTIYHLRKKLVDSTDKADLRLIYLALAHMIKFRGHFLIEGDLNPDNSDVDKLFIQLVQTYNQLFEENPINASGVDAKAILSARLSKSRRLENLIAQLPGEKKNGLFGNLIALSLGLTPNFKSNFDLAEDAKLQLSKDTYDDDLDNLLAQIGDQYADLFLAAKNLSDAILLSDILRVNTEITKAPLSASMIKRYDEHHQDLTLLKALVRQQLPEKYKEIFFDQSKNGYAGYIDGGASQEEFYKFIKPILEKMDGTEELLVKLNREDLLRKQRTFDNGSIPHQIHLGELHAILRRQEDFYPFLKDNREKIEKILTFRIPYYVGPLARGNSRFAWMTRKSEETITPWNFEEVVDKGASAQSFIERMTNFDKNLPNEKVLPKHSLLYEYFTVYNELTKVKYVTEGMRKPAFLSGEQKKAIVDLLFKTNRKVTVKQLKEDYFKKIECFDSVEISGVEDRFNASLGTYHDLLKIIKDKDFLDNEENEDILEDIVLTLTLFEDREMIEERLKTYAHLFDDKVMKQLKRRRYTGWGRLSRKLINGIRDKQSGKTILDFLKSDGFANRNFMQLIHDDSLTFKEDIQKAQVSGQGDSLHEHIANLAGSPAIKKGILQTVKVVDELVKVMGRHKPENIVIEMARENQTTQKGQKNSRERMKRIEEGIKELGSQILKEHPVENTQLQNEKLYLYYLQNGRDMYVDQELDINRLSDYDVDHIVPQSFLKDDSIDNKVLTRSDKARGKSDNVPSEEVVKKMKNYWRQLLNAKLITQRKFDNLTKAERGGLSELDKAGFIKRQLVETRQITKHVAQILDSRMNTKYDENDKLIREVKVITLKSKLVSDFRKDFQFYKVREINNYHHAHDAYLNAVVGTALIKKYPKLESEFVYGDYKVYDVRKMIAKSEQEIGKATAKYFFYSNIMNFFKTEITLANGEIRKRPLIETNGETGEIVWDKGRDFATVRKVLSMPQVNIVKKTEVQTGGFSKESILPKRNSDKLIARKKDWDPKKYGGFDSPTVAYSVLVVAKVEKGKSKKLKSVKELLGITIMERSSFEKNPIDFLEAKGYKEVKKDLIIKLPKYSLFELENGRKRMLASAGELQKGNELALPSKYVNFLYLASHYEKLKGSPEDNEQKQLFVEQHKHYLDEIIEQISEFSKRVILADANLDKVLSAYNKHRDKPIREQAENIIHLFTLTNLGAPAAFKYFDTTIDRKRYTSTKEVLDATLIHQSITGLYETRIDLSQLGGDGGEAAAKGGSPAPGGTLNIEDEYRLHETSKGPDVPLGSTWLSDFPQAWAETGGMGLAVRQAPLIIPLKATSTPVSIKQYPMSQEARLGIKPHIQRLLDQGILVPCQSPWNTPLLPVKKPGTNDYRPVQDLREVNKRVEDIHPTVPNPYNLLSGLPPSHQWYTVLDLKDAFFCLRLHPTSQSLFAFEWRDPEMGISGQLTWTRLPQGFKNSPTLFNEALHRDLADFRIQHPDLILLQYVDDLLLAATSELDCQQGTRALLQTLGDLGYRASAKKAQICQKQVKYLGYLLKEGQRWLTEARKETVMGQPTPKTPRQLREFLGKAGFCRLFIPGFAEMAAPLYPLTKPGTLFEWGPDQQKAYQEIKQALLTAPALGLPDLTKPFELFVDEKQGYAKGVLTQKLGPWRRPVAYLSKKLDPVAAGWPPCLRMVAAIAVLTKDAGKLTMGQPLVILAPHAVEALVKQPPDRWLSNARMTHYQALLLDTDRVQFGPIVALNPATLLPLPEEGLQHDCLDILAEAHGTRPDLTDQPLPDADHTWYTDGSSFLQEGQRKAGAAVTTETEVVWAKALPAGTSAQRAELIALTQALKMAEGKKLNVYTDSRYAFATAHIHGEIYRRRGWLTSEGKEIKNKDEILALLKALFLPKRLSIIHCPGHQKGNRAEARGNRMADQAAREVATRETPETSTLLAGKRTADGSEFEKRTADGSEFESPKKKAKVE

SEQ ID NO: 7223 - protein, 2087 aa, synthetic construct
MPAAKRVKLDGGDKKYSIGLDIGTNSVGWAVITDEYKVPSKKFKVLGNTDRHSIKKNLIGALLFDSGETAEATRLKRTARRRYTRRKNRICYLQEIFSNEMAKVDDSFFHRLEESFLVEEDKKHERHPIFGNIVDEVAYHEKYPTIYHLRKKLVDSTDKADLRLIYLALAHMIKFRGHFLIEGDLNPDNSDVDKLFIQLVQTYNQLFEENPINASGVDAKAILSARLSKSRRLENLIAQLPGEKKNGLFGNLIALSLGLTPNFKSNFDLAEDAKLQLSKDTYDDDLDNLLAQIGDQYADLFLAAKNLSDAILLSDILRVNTEITKAPLSASMIKRYDEHHQDLTLLKALVRQQLPEKYKEIFFDQSKNGYAGYIDGGASQEEFYKFIKPILEKMDGTEELLVKLNREDLLRKQRTFDNGSIPHQIHLGELHAILRRQEDFYPFLKDNREKIEKILTFRIPYYVGPLARGNSRFAWMTRKSEETITPWNFEEVVDKGASAQSFIERMTNFDKNLPNEKVLPKHSLLYEYFTVYNELTKVKYVTEGMRKPAFLSGEQKKAIVDLLFKTNRKVTVKQLKEDYFKKIECFDSVEISGVEDRFNASLGTYHDLLKIIKDKDFLDNEENEDILEDIVLTLTLFEDREMIEERLKTYAHLFDDKVMKQLKRRRYTGWGRLSRKLINGIRDKQSGKTILDFLKSDGFANRNFMQLIHDDSLTFKEDIQKAQVSGQGDSLHEHIANLAGSPAIKKGILQTVKVVDELVKVMGRHKPENIVIEMARENQTTQKGQKNSRERMKRIEEGIKELGSQILKEHPVENTQLQNEKLYLYYLQNGRDMYVDQELDINRLSDYDVDHIVPQSFLKDDSIDNKVLTRSDKARGKSDNVPSEEVVKKMKNYWRQLLNAKLITQRKFDNLTKAERGGLSELDKAGFIKRQLVETRQITKHVAQILDSRMNTKYDENDKLIREVKVITLKSKLVSDFRKDFQFYKVREINNYHHAHDAYLNAVVGTALIKKYPKLESEFVYGDYKVYDVRKMIAKSEQEIGKATAKYFFYSNIMNFFKTEITLANGEIRKRPLIETNGETGEIVWDKGRDFATVRKVLSMPQVNIVKKTEVQTGGFSKESILPKRNSDKLIARKKDWDPKKYGGFDSPTVAYSVLVVAKVEKGKSKKLKSVKELLGITIMERSSFEKNPIDFLEAKGYKEVKKDLIIKLPKYSLFELENGRKRMLASAGELQKGNELALPSKYVNFLYLASHYEKLKGSPEDNEQKQLFVEQHKHYLDEIIEQISEFSKRVILADANLDKVLSAYNKHRDKPIREQAENIIHLFTLTNLGAPAAFKYFDTTIDRKRYTSTKEVLDATLIHQSITGLYETRIDLSQLGGDGGEAAAKGGSPAPGGIPWLMKKPLQLTTLVPLQEYEERLLKQTMLTGSYKEKLQSLFLKYDALWQHWENQVGHRRIKPHHIATGTVNPRPQKQYPINPKAKASIQTVINDLLKQGVLIQQNSIMNTPVYPVPKPDGKWRMVLDYREVNKTIPLIAAQNQHSAGILSSIFRGKYKTTLDLSNGFWAHSITPESYWLTAFTWLGQQYCWTRLPQGFLNSPALFTADVVDLLKEVPNVQVYVDDIYISHDDPREHLEQLEKVFSLLLNAGYVVSLKKSEIAQHEVEFLGFNITKEGRGLTETFKQKLLNITPPRDLKQLQSILGLLNFARNFIPNFSELVKPLYNIIATANGKYITWTTDNSQQLQNIISMLNSAENLEERNPEVRLIMKVNTSPSAGYIRFYNEFAKRPIMYLNYVYTKAEVKFTNTEKLLTTIHKGLIKALDLGMGQEILVYSPIVSMTKIQKTPLPERKALPIRWITWMSYLEDPRIQFHYDKTLPELQQVPTVTDDIIAKIKHPSEFSMVFYTDGSAIKHPNVNKSHNAGMGIAQVQFKPEFTVINTWSIPLGDHTAQLAEVAAVEFACKKALKIDGPVLIVTDSFYVAESVNKELPYWQSNGFFNNKKKPLKHVSKWKSIADCIQLKPDIIIIHEKGHQPTASTFHTEGNNLADKLATQGSYVVNAGKRTADGSEFEKRTADGSEFESPKKKAKVE

SEQ ID NO: 7224 - protein, 2087 aa, synthetic construct
MPAAKRVKLDGGDKKYSIGLDIGTNSVGWAVITDEYKVPSKKFKVLGNTDRHSIKKNLIGALLFDSGETAEATRLKRTARRRYTRRKNRICYLQEIFSNEMAKVDDSFFHRLEESFLVEEDKKHERHPIFGNIVDEVAYHEKYPTIYHLRKKLVDSTDKADLRLIYLALAHMIKFRGHFLIEGDLNPDNSDVDKLFIQLVQTYNQLFEENPINASGVDAKAILSARLSKSRRLENLIAQLPGEKKNGLFGNLIALSLGLTPNFKSNFDLAEDAKLQLSKDTYDDDLDNLLAQIGDQYADLFLAAKNLSDAILLSDILRVNTEITKAPLSASMIKRYDEHHQDLTLLKALVRQQLPEKYKEIFFDQSKNGYAGYIDGGASQEEFYKFIKPILEKMDGTEELLVKLNREDLLRKQRTFDNGSIPHQIHLGELHAILRRQEDFYPFLKDNREKIEKILTFRIPYYVGPLARGNSRFAWMTRKSEETITPWNFEEVVDKGASAQSFIERMTNFDKNLPNEKVLPKHSLLYEYFTVYNELTKVKYVTEGMRKPAFLSGEQKKAIVDLLFKTNRKVTVKQLKEDYFKKIECFDSVEISGVEDRFNASLGTYHDLLKIIKDKDFLDNEENEDILEDIVLTLTLFEDREMIEERLKTYAHLFDDKVMKQLKRRRYTGWGRLSRKLINGIRDKQSGKTILDFLKSDGFANRNFMQLIHDDSLTFKEDIQKAQVSGQGDSLHEHIANLAGSPAIKKGILQTVKVVDELVKVMGRHKPENIVIEMARENQTTQKGQKNSRERMKRIEEGIKELGSQILKEHPVENTQLQNEKLYLYYLQNGRDMYVDQELDINRLSDYDVDHIVPQSFLKDDSIDNKVLTRSDKARGKSDNVPSEEVVKKMKNYWRQLLNAKLITQRKFDNLTKAERGGLSELDKAGFIKRQLVETRQITKHVAQILDSRMNTKYDENDKLIREVKVITLKSKLVSDFRKDFQFYKVREINNYHHAHDAYLNAVVGTALIKKYPKLESEFVYGDYKVYDVRKMIAKSEQEIGKATAKYFFYSNIMNFFKTEITLANGEIRKRPLIETNGETGEIVWDKGRDFATVRKVLSMPQVNIVKKTEVQTGGFSKESILPKRNSDKLIARKKDWDPKKYGGFDSPTVAYSVLVVAKVEKGKSKKLKSVKELLGITIMERSSFEKNPIDFLEAKGYKEVKKDLIIKLPKYSLFELENGRKRMLASAGELQKGNELALPSKYVNFLYLASHYEKLKGSPEDNEQKQLFVEQHKHYLDEIIEQISEFSKRVILADANLDKVLSAYNKHRDKPIREQAENIIHLFTLTNLGAPAAFKYFDTTIDRKRYTSTKEVLDATLIHQSITGLYETRIDLSQLGGDGGEAAAKGGSPAPGGIPWLMKKPLQLTTLVPLQEYEERLLKQTMLTGSYKEKLQSLFLKYDALWQHWENQVGHRRIKPHHIATGTVNPRPQKQYPINPKAKASIQTVINDLLKQGVLIQQNSIMNTPVYPVPKPDGKWRMVLDYREVNKTIPLIAAQNQHSAGILSSIFRGKYKTTLDLSNGFWAHSITPESYWLTAFTWLGQQYCWTRLPQGFLNSPALFNADVVDLLKEVPNVQVYVDDIYISHDDPREHLEQLEKVFSLLLNAGYVVSLKKSEIAQHEVEFLGFNITKEGRGLTETFKQKLLNITPPRDLKQLQSILGLLNFARNFIPNFSELVKPLYNIIATAPGKYITWTTDNSQQLQNIISMLNSAENLEERNPEVRLIMKVNTSPSAGYIRFYNEFAKRPIMYLNYVYTKAEVKFTNTEKLLTTIHKGLIKALDLGMGQEILVYSPIVSMTKIQKTPLPERKALPIRWITWMSYLEDPRIQFHYDKTLPELQQVPTVTDDIIAKIKHPSEFSMVFYTDGSAIKHPNVNKSHNAGMGIAQVQFKPEFTVINTWSIPLGDHTAQLAEVAAVEFACKKALKIDGPVLIVTDSFYVAESVNKELPYWQSNGFFNNKKKPLKHVSKWKSIADCIQLKPDIIIIHEKGHQPTASTFHTEGNNLADKLATQGSYVVNAGKRTADGSEFEKRTADGSEFESPKKKAKVE

SEQ ID NO: 7225 - protein, 2094 aa, synthetic construct
MPAAKRVKLDGGDKKYSIGLDIGTNSVGWAVITDEYKVPSKKFKVLGNTDRHSIKKNLIGALLFDSGETAEATRLKRTARRRYTRRKNRICYLQEIFSNEMAKVDDSFFHRLEESFLVEEDKKHERHPIFGNIVDEVAYHEKYPTIYHLRKKLVDSTDKADLRLIYLALAHMIKFRGHFLIEGDLNPDNSDVDKLFIQLVQTYNQLFEENPINASGVDAKAILSARLSKSRRLENLIAQLPGEKKNGLFGNLIALSLGLTPNFKSNFDLAEDAKLQLSKDTYDDDLDNLLAQIGDQYADLFLAAKNLSDAILLSDILRVNTEITKAPLSASMIKRYDEHHQDLTLLKALVRQQLPEKYKEIFFDQSKNGYAGYIDGGASQEEFYKFIKPILEKMDGTEELLVKLNREDLLRKQRTFDNGSIPHQIHLGELHAILRRQEDFYPFLKDNREKIEKILTFRIPYYVGPLARGNSRFAWMTRKSEETITPWNFEEVVDKGASAQSFIERMTNFDKNLPNEKVLPKHSLLYEYFTVYNELTKVKYVTEGMRKPAFLSGEQKKAIVDLLFKTNRKVTVKQLKEDYFKKIECFDSVEISGVEDRFNASLGTYHDLLKIIKDKDFLDNEENEDILEDIVLTLTLFEDREMIEERLKTYAHLFDDKVMKQLKRRRYTGWGRLSRKLINGIRDKQSGKTILDFLKSDGFANRNFMQLIHDDSLTFKEDIQKAQVSGQGDSLHEHIANLAGSPAIKKGILQTVKVVDELVKVMGRHKPENIVIEMARENQTTQKGQKNSRERMKRIEEGIKELGSQILKEHPVENTQLQNEKLYLYYLQNGRDMYVDQELDINRLSDYDVDHIVPQSFLKDDSIDNKVLTRSDKARGKSDNVPSEEVVKKMKNYWRQLLNAKLITQRKFDNLTKAERGGLSELDKAGFIKRQLVETRQITKHVAQILDSRMNTKYDENDKLIREVKVITLKSKLVSDFRKDFQFYKVREINNYHHAHDAYLNAVVGTALIKKYPKLESEFVYGDYKVYDVRKMIAKSEQEIGKATAKYFFYSNIMNFFKTEITLANGEIRKRPLIETNGETGEIVWDKGRDFATVRKVLSMPQVNIVKKTEVQTGGFSKESILPKRNSDKLIARKKDWDPKKYGGFDSPTVAYSVLVVAKVEKGKSKKLKSVKELLGITIMERSSFEKNPIDFLEAKGYKEVKKDLIIKLPKYSLFELENGRKRMLASAGELQKGNELALPSKYVNFLYLASHYEKLKGSPEDNEQKQLFVEQHKHYLDEIIEQISEFSKRVILADANLDKVLSAYNKHRDKPIREQAENIIHLFTLTNLGAPAAFKYFDTTIDRKRYTSTKEVLDATLIHQSITGLYETRIDLSQLGGDGGEAAAKGGSPAPGGVLNLEEEYRLHEKPVPSSIDPSWLQLFPTVWAERAGMGLANQVPPVVVELRSGASPVAVRQYPMSKEAREGIRPHIQRFLDLGVLVPCQSPWNTPLLPVKKPGTNDYRPVQDLREINKRVQDIHPTVPNPYNLLSSLPPSHTWYSVLDLKDAFFCLKLHPNSQPLFAFEWRDPEKGNTGQLTWTRLPQGFKNSPTLFDEALHRDLAPFRALNPQVVLLQYVDDLLVAAPTYRDCKEGTQKLLQELSKLGYRVSAKKAQLCQKEVTYLGYLLKEGKRWLTPARKATVMKIPPPTTPRQVREFLGTAGFCRLWIPGFASLAAPLYPLTKESIPFIWTEEHQKAFDRIKEALLSAPALALPDLTKPFTLYVDERAGVARGVLTQTLGPWRRPVAYLSKKLDPVASGWPTCLKAVAAVALLLKDADKLTLGQNVTVIASHSLESIVRQPPDRWMTNARMTHYQSLLLNERVSFAPPAVLNPATLLPVESEATPVHRCSEILAEETGTRRDLKDQPLPGVPAWYTDGSSFIAEGKRRAGAAIVDGKRTVWASSLPEGTSAQKAELVALTQALRLAEGKDINIYTDSRYAFATAHIHGAIYKQRGLLTSAGKDIKNKEEILALLEAIHLPKRVAIIHCPGHQKGNDPVATGNRRADEAAKQAALSTRVLAETTKPAGKRTADGSEFEKRTADGSEFESPKKKAKVE

SEQ ID NO: 7226 - protein, 2094 aa, synthetic construct
MPAAKRVKLDGGDKKYSIGLDIGTNSVGWAVITDEYKVPSKKFKVLGNTDRHSIKKNLIGALLFDSGETAEATRLKRTARRRYTRRKNRICYLQEIFSNEMAKVDDSFFHRLEESFLVEEDKKHERHPIFGNIVDEVAYHEKYPTIYHLRKKLVDSTDKADLRLIYLALAHMIKFRGHFLIEGDLNPDNSDVDKLFIQLVQTYNQLFEENPINASGVDAKAILSARLSKSRRLENLIAQLPGEKKNGLFGNLIALSLGLTPNFKSNFDLAEDAKLQLSKDTYDDDLDNLLAQIGDQYADLFLAAKNLSDAILLSDILRVNTEITKAPLSASMIKRYDEHHQDLTLLKALVRQQLPEKYKEIFFDQSKNGYAGYIDGGASQEEFYKFIKPILEKMDGTEELLVKLNREDLLRKQRTFDNGSIPHQIHLGELHAILRRQEDFYPFLKDNREKIEKILTFRIPYYVGPLARGNSRFAWMTRKSEETITPWNFEEVVDKGASAQSFIERMTNFDKNLPNEKVLPKHSLLYEYFTVYNELTKVKYVTEGMRKPAFLSGEQKKAIVDLLFKTNRKVTVKQLKEDYFKKIECFDSVEISGVEDRFNASLGTYHDLLKIIKDKDFLDNEENEDILEDIVLTLTLFEDREMIEERLKTYAHLFDDKVMKQLKRRRYTGWGRLSRKLINGIRDKQSGKTILDFLKSDGFANRNFMQLIHDDSLTFKEDIQKAQVSGQGDSLHEHIANLAGSPAIKKGILQTVKVVDELVKVMGRHKPENIVIEMARENQTTQKGQKNSRERMKRIEEGIKELGSQILKEHPVENTQLQNEKLYLYYLQNGRDMYVDQELDINRLSDYDVDHIVPQSFLKDDSIDNKVLTRSDKARGKSDNVPSEEVVKKMKNYWRQLLNAKLITQRKFDNLTKAERGGLSELDKAGFIKRQLVETRQITKHVAQILDSRMNTKYDENDKLIREVKVITLKSKLVSDFRKDFQFYKVREINNYHHAHDAYLNAVVGTALIKKYPKLESEFVYGDYKVYDVRKMIAKSEQEIGKATAKYFFYSNIMNFFKTEITLANGEIRKRPLIETNGETGEIVWDKGRDFATVRKVLSMPQVNIVKKTEVQTGGFSKESILPKRNSDKLIARKKDWDPKKYGGFDSPTVAYSVLVVAKVEKGKSKKLKSVKELLGITIMERSSFEKNPIDFLEAKGYKEVKKDLIIKLPKYSLFELENGRKRMLASAGELQKGNELALPSKYVNFLYLASHYEKLKGSPEDNEQKQLFVEQHKHYLDEIIEQISEFSKRVILADANLDKVLSAYNKHRDKPIREQAENIIHLFTLTNLGAPAAFKYFDTTIDRKRYTSTKEVLDATLIHQSITGLYETRIDLSQLGGDGGEAAAKGGSPAPGGVLNLEEEYRLHEKPVPSSIDPSWLQLFPTVWAERAGMGLANQVPPVVVELRSGASPVAVRQYPMSKEAREGIRPHIQRFLDLGVLVPCQSPWNTPLLPVKKPGTNDYRPVQDLREINKRVQDIHPTVPNPYNLLSSLPPSHTWYSVLDLKDAFFCLKLHPNSQPLFAFEWRDPEKGNTGQLTWTRLPQGFKNSPTLFNEALHRDLAPFRALNPQVVLLQYVDDLLVAAPTYRDCKEGTQKLLQELSKLGYRVSAKKAQLCQKEVTYLGYLLKEGKRWLTPARKATVMKIPPPTTPRQVREFLGKAGFCRLFIPGFASLAAPLYPLTKPSIPFIWTEEHQKAFDRIKEALLSAPALALPDLTKPFTLYVDERAGVARGVLTQTLGPWRRPVAYLSKKLDPVASGWPTCLKAVAAVALLLKDADKLTLGQNVTVIASHSLESIVRQPPDRWMTNARMTHYQSLLLNERVSFAPPAVLNPATLLPVESEATPVHRCSEILAEETGTRRDLKDQPLPGVPAWYTDGSSFIAEGKRRAGAAIVDGKRTVWASSLPEGTSAQKAELVALTQALRLAEGKDINIYTDSRYAFATAHIHGAIYKQRGWLTSAGKDIKNKEEILALLEAIHLPKRVAIIHCPGHQKGNDPVATGNRRADEAAKQAALSTRVLAETTKPAGKRTADGSEFEKRTADGSEFESPKKKAKVE

SEQ ID NO: 7227 - protein, 2096 aa, synthetic construct
MPAAKRVKLDGGDKKYSIGLDIGTNSVGWAVITDEYKVPSKKFKVLGNTDRHSIKKNLIGALLFDSGETAEATRLKRTARRRYTRRKNRICYLQEIFSNEMAKVDDSFFHRLEESFLVEEDKKHERHPIFGNIVDEVAYHEKYPTIYHLRKKLVDSTDKADLRLIYLALAHMIKFRGHFLIEGDLNPDNSDVDKLFIQLVQTYNQLFEENPINASGVDAKAILSARLSKSRRLENLIAQLPGEKKNGLFGNLIALSLGLTPNFKSNFDLAEDAKLQLSKDTYDDDLDNLLAQIGDQYADLFLAAKNLSDAILLSDILRVNTEITKAPLSASMIKRYDEHHQDLTLLKALVRQQLPEKYKEIFFDQSKNGYAGYIDGGASQEEFYKFIKPILEKMDGTEELLVKLNREDLLRKQRTFDNGSIPHQIHLGELHAILRRQEDFYPFLKDNREKIEKILTFRIPYYVGPLARGNSRFAWMTRKSEETITPWNFEEVVDKGASAQSFIERMTNFDKNLPNEKVLPKHSLLYEYFTVYNELTKVKYVTEGMRKPAFLSGEQKKAIVDLLFKTNRKVTVKQLKEDYFKKIECFDSVEISGVEDRFNASLGTYHDLLKIIKDKDFLDNEENEDILEDIVLTLTLFEDREMIEERLKTYAHLFDDKVMKQLKRRRYTGWGRLSRKLINGIRDKQSGKTILDFLKSDGFANRNFMQLIHDDSLTFKEDIQKAQVSGQGDSLHEHIANLAGSPAIKKGILQTVKVVDELVKVMGRHKPENIVIEMARENQTTQKGQKNSRERMKRIEEGIKELGSQILKEHPVENTQLQNEKLYLYYLQNGRDMYVDQELDINRLSDYDVDHIVPQSFLKDDSIDNKVLTRSDKARGKSDNVPSEEVVKKMKNYWRQLLNAKLITQRKFDNLTKAERGGLSELDKAGFIKRQLVETRQITKHVAQILDSRMNTKYDENDKLIREVKVITLKSKLVSDFRKDFQFYKVREINNYHHAHDAYLNAVVGTALIKKYPKLESEFVYGDYKVYDVRKMIAKSEQEIGKATAKYFFYSNIMNFFKTEITLANGEIRKRPLIETNGETGEIVWDKGRDFATVRKVLSMPQVNIVKKTEVQTGGFSKESILPKRNSDKLIARKKDWDPKKYGGFDSPTVAYSVLVVAKVEKGKSKKLKSVKELLGITIMERSSFEKNPIDFLEAKGYKEVKKDLIIKLPKYSLFELENGRKRMLASAGELQKGNELALPSKYVNFLYLASHYEKLKGSPEDNEQKQLFVEQHKHYLDEIIEQISEFSKRVILADANLDKVLSAYNKHRDKPIREQAENIIHLFTLTNLGAPAAFKYFDTTIDRKRYTSTKEVLDATLIHQSITGLYETRIDLSQLGGDGGEAAAKGGSPAPGGTLNIEDEYRLHETSKEPDVPLGSTWLSDFPQAWAETGGMGLAVRQAPLIIPLKATSTPVSIKQYPMSQEARLGIKPHIQRLLDQGILVPCQSPWNTPLLPVKKPGTNDYRPVQDLREVNKRVEDIHPTVPNPYNLLSGLPPSHQWYTVLDLKDAFFCLRLHPTSQPLFAFEWRDPEMGISGQLTWTRLPQGFKNSPTLFNEALHRDLADFRIQHPDLILLQYVDDLLLAATSEQDCQRGTRALLQTLGNLGYRASAKKAQICQKQVKYLGYLLKEGQRWLTEARKETVMGQPTPKTPRQLREFLGTAGFCRLWIPGFAEMAAPLYPLTKPGTLFNWGPDQQKAYQEIKQALLTAPALGLPDLTKPFELFVDEKQGYAKGVLTQKLGPWRRPVAYLSKKLDPVAAGWPPCLRMVAAIAVLTKDAGKLTMGQPLVILAPHAVEALVKQPPDRWLSNARMTHYQAMLLDTDRVQFGPVVALNPATLLPLPEKEAPHDCLEILAETHGTRPDLTDQPIPDADYTWYTDGSSFLQEGQRRAGAAVTTETEVIWARALPAGTSAQRAELIALTQALKMAEGKKLNVYTDSRYAFATAHVHGEIYRRRGWLTSEGREIKNKNEILALLKALFLPKRLSIIHCPGHQKGNSAEARGNRMADQAAREAAMKAVLETSTLLAGKRTADGSEFEKRTADGSEFESPKKKAKVE

SEQ ID NO: 7228 - protein, 2087 aa, synthetic construct
MPAAKRVKLDGGDKKYSIGLDIGTNSVGWAVITDEYKVPSKKFKVLGNTDRHSIKKNLIGALLFDSGETAEATRLKRTARRRYTRRKNRICYLQEIFSNEMAKVDDSFFHRLEESFLVEEDKKHERHPIFGNIVDEVAYHEKYPTIYHLRKKLVDSTDKADLRLIYLALAHMIKFRGHFLIEGDLNPDNSDVDKLFIQLVQTYNQLFEENPINASGVDAKAILSARLSKSRRLENLIAQLPGEKKNGLFGNLIALSLGLTPNFKSNFDLAEDAKLQLSKDTYDDDLDNLLAQIGDQYADLFLAAKNLSDAILLSDILRVNTEITKAPLSASMIKRYDEHHQDLTLLKALVRQQLPEKYKEIFFDQSKNGYAGYIDGGASQEEFYKFIKPILEKMDGTEELLVKLNREDLLRKQRTFDNGSIPHQIHLGELHAILRRQEDFYPFLKDNREKIEKILTFRIPYYVGPLARGNSRFAWMTRKSEETITPWNFEEVVDKGASAQSFIERMTNFDKNLPNEKVLPKHSLLYEYFTVYNELTKVKYVTEGMRKPAFLSGEQKKAIVDLLFKTNRKVTVKQLKEDYFKKIECFDSVEISGVEDRFNASLGTYHDLLKIIKDKDFLDNEENEDILEDIVLTLTLFEDREMIEERLKTYAHLFDDKVMKQLKRRRYTGWGRLSRKLINGIRDKQSGKTILDFLKSDGFANRNFMQLIHDDSLTFKEDIQKAQVSGQGDSLHEHIANLAGSPAIKKGILQTVKVVDELVKVMGRHKPENIVIEMARENQTTQKGQKNSRERMKRIEEGIKELGSQILKEHPVENTQLQNEKLYLYYLQNGRDMYVDQELDINRLSDYDVDHIVPQSFLKDDSIDNKVLTRSDKARGKSDNVPSEEVVKKMKNYWRQLLNAKLITQRKFDNLTKAERGGLSELDKAGFIKRQLVETRQITKHVAQILDSRMNTKYDENDKLIREVKVITLKSKLVSDFRKDFQFYKVREINNYHHAHDAYLNAVVGTALIKKYPKLESEFVYGDYKVYDVRKMIAKSEQEIGKATAKYFFYSNIMNFFKTEITLANGEIRKRPLIETNGETGEIVWDKGRDFATVRKVLSMPQVNIVKKTEVQTGGFSKESILPKRNSDKLIARKKDWDPKKYGGFDSPTVAYSVLVVAKVEKGKSKKLKSVKELLGITIMERSSFEKNPIDFLEAKGYKEVKKDLIIKLPKYSLFELENGRKRMLASAGELQKGNELALPSKYVNFLYLASHYEKLKGSPEDNEQKQLFVEQHKHYLDEIIEQISEFSKRVILADANLDKVLSAYNKHRDKPIREQAENIIHLFTLTNLGAPAAFKYFDTTIDRKRYTSTKEVLDATLIHQSITGLYETRIDLSQLGGDGGEAAAKPAPGGSGGVPWILKKPLELTIKLDLEEQQGTLLNNSILSKKGKEELKQLFEKYSALWQSWENQVGHRRIRPHKIATGTVKPTPQKQYHINPKAKPDIQIVINDLLKQGVLIQKESTMNTPVYPVPKPNGRWRMVLDYRAVNKVTPLIAVQNQHSYGILGSLFKGRYKTTIDLSNGFWAHPIVPEDYWITAFTWQGKQYCWTVLPQGFLNSPGLFNGDVVDLLQGIPNVEVYVDDVYISHDSEKEHLEYLDILFNRLKEAGYIISLKKSNIANSIVDFLGFQITNEGRGLTDTFKEKLENITAPTTLKQLQSILGLLNFARNFIPDFTELIAPLYALIPKSPKNYVPWQIEHSTTLETLITKLNGAEYLQGRKGDKTLIMKVNASYTTGYIRYYNEGEKKPISYVSIVFSKTELKFTELEKLLTTVHKGLLKALDLSMGQNIHVYSPIVSMQNIQKTPQTAKKALASRWLSWLSYLEDPRIRFFYDPQMPALKDLPAVDTGKDNKKHPSNFQHIFYTDGSAITSPTKEGHLNAGMGIVYFINKDGNLQKQQEWSISLGNHTAQFAEIAAFEFALKKCLPLGGNILVVTDSNYVAKAYNEELDVWASNGFVNNRKKPLKHISKWKSVADLKRLRPDVVVTHEPGHQKLDSSPHAYGNNLADQLATQASFKVHAGKRTADGSEFEKRTADGSEFESPKKKAKVE

SEQ ID NO: 7229 - protein, 2176 aa, synthetic construct
MPAAKRVKLDGGDKKYSIGLDIGTNSVGWAVITDEYKVPSKKFKVLGNTDRHSIKKNLIGALLFDSGETAEATRLKRTARRRYTRRKNRICYLQEIFSNEMAKVDDSFFHRLEESFLVEEDKKHERHPIFGNIVDEVAYHEKYPTIYHLRKKLVDSTDKADLRLIYLALAHMIKFRGHFLIEGDLNPDNSDVDKLFIQLVQTYNQLFEENPINASGVDAKAILSARLSKSRRLENLIAQLPGEKKNGLFGNLIALSLGLTPNFKSNFDLAEDAKLQLSKDTYDDDLDNLLAQIGDQYADLFLAAKNLSDAILLSDILRVNTEITKAPLSASMIKRYDEHHQDLTLLKALVRQQLPEKYKEIFFDQSKNGYAGYIDGGASQEEFYKFIKPILEKMDGTEELLVKLNREDLLRKQRTFDNGSIPHQIHLGELHAILRRQEDFYPFLKDNREKIEKILTFRIPYYVGPLARGNSRFAWMTRKSEETITPWNFEEVVDKGASAQSFIERMTNFDKNLPNEKVLPKHSLLYEYFTVYNELTKVKYVTEGMRKPAFLSGEQKKAIVDLLFKTNRKVTVKQLKEDYFKKIECFDSVEISGVEDRFNASLGTYHDLLKIIKDKDFLDNEENEDILEDIVLTLTLFEDREMIEERLKTYAHLFDDKVMKQLKRRRYTGWGRLSRKLINGIRDKQSGKTILDFLKSDGFANRNFMQLIHDDSLTFKEDIQKAQVSGQGDSLHEHIANLAGSPAIKKGILQTVKVVDELVKVMGRHKPENIVIEMARENQTTQKGQKNSRERMKRIEEGIKELGSQILKEHPVENTQLQNEKLYLYYLQNGRDMYVDQELDINRLSDYDVDHIVPQSFLKDDSIDNKVLTRSDKARGKSDNVPSEEVVKKMKNYWRQLLNAKLITQRKFDNLTKAERGGLSELDKAGFIKRQLVETRQITKHVAQILDSRMNTKYDENDKLIREVKVITLKSKLVSDFRKDFQFYKVREINNYHHAHDAYLNAVVGTALIKKYPKLESEFVYGDYKVYDVRKMIAKSEQEIGKATAKYFFYSNIMNFFKTEITLANGEIRKRPLIETNGETGEIVWDKGRDFATVRKVLSMPQVNIVKKTEVQTGGFSKESILPKRNSDKLIARKKDWDPKKYGGFDSPTVAYSVLVVAKVEKGKSKKLKSVKELLGITIMERSSFEKNPIDFLEAKGYKEVKKDLIIKLPKYSLFELENGRKRMLASAGELQKGNELALPSKYVNFLYLASHYEKLKGSPEDNEQKQLFVEQHKHYLDEIIEQISEFSKRVILADANLDKVLSAYNKHRDKPIREQAENIIHLFTLTNLGAPAAFKYFDTTIDRKRYTSTKEVLDATLIHQSITGLYETRIDLSQLGGDGGEAAAKPAPGGSGGMNPLQLLQPLPAEIKGTKLLAHWNSGATITCIPESFLEDEQPIKKTLIKTIHGEKQQNVYYVTFKVKGRKVEAEVIASPYEYILLSPTDVPWLTQQPLQLTILVPLQEYQEKILSKTALPEDQKQQLKTLFVKYDNLWQHWENQVGHRKIRPHNIATGDYPPRPQKQYPINPKAKPSIQIVIDDLLKQGVLTPQNSTMNTPVYPVPKPDGRWRMVLDYREVNKTIPLTAAQNQHSAGILATIVRQKYKTTLDLANGFWAHPITPESYWLTAFTWQGKQYCWTRLPQGFLNSPALFNADVVDLLKEIPNVQVYVDDIYLSHDDPKEHVQQLEKVFQILLQAGYVVSLKKSEIGQKTVEFLGFNITKEGRGLTDTFKTKLLNITPPKDLKQLQSILGLLNFARNFIPNFAELVQPLYNLIAPAKGKYIEWSEENTKQLNMVIEALNTASNLEERLPEQRLVIKVNTSPSAGYVRYYNETGKKPIMYLNYVFSKAELKFSMLEKLLTTMHKALIKAMDLAMGQEILVYSPIVSMTKIQKTPLPERKALPIRWITWMTYLEDPRIQFHYDKTLPELKHIPDVYTSSQSPVKHPSQYEGVFYTDGSAIKSPDPTKSNNAGMGIVHATYKPEYQVLNQWSIPLGNHTAQMAEIAAVEFACKKALKIPGPVLVITDSFYVAESANKELPYWKSNGFVNNKKKPLKHISKWKSIAECLSMKPDITIQHEKGISLQIPVFILKGNALADKLATQGSYVVNAGKRTADGSEFEKRTADGSEFESPKKKAKVE

SEQ ID NO: 7230 - protein, 2094 aa, synthetic construct
MPAAKRVKLDGGDKKYSIGLDIGTNSVGWAVITDEYKVPSKKFKVLGNTDRHSIKKNLIGALLFDSGETAEATRLKRTARRRYTRRKNRICYLQEIFSNEMAKVDDSFFHRLEESFLVEEDKKHERHPIFGNIVDEVAYHEKYPTIYHLRKKLVDSTDKADLRLIYLALAHMIKFRGHFLIEGDLNPDNSDVDKLFIQLVQTYNQLFEENPINASGVDAKAILSARLSKSRRLENLIAQLPGEKKNGLFGNLIALSLGLTPNFKSNFDLAEDAKLQLSKDTYDDDLDNLLAQIGDQYADLFLAAKNLSDAILLSDILRVNTEITKAPLSASMIKRYDEHHQDLTLLKALVRQQLPEKYKEIFFDQSKNGYAGYIDGGASQEEFYKFIKPILEKMDGTEELLVKLNREDLLRKQRTFDNGSIPHQIHLGELHAILRRQEDFYPFLKDNREKIEKILTFRIPYYVGPLARGNSRFAWMTRKSEETITPWNFEEVVDKGASAQSFIERMTNFDKNLPNEKVLPKHSLLYEYFTVYNELTKVKYVTEGMRKPAFLSGEQKKAIVDLLFKTNRKVTVKQLKEDYFKKIECFDSVEISGVEDRFNASLGTYHDLLKIIKDKDFLDNEENEDILEDIVLTLTLFEDREMIEERLKTYAHLFDDKVMKQLKRRRYTGWGRLSRKLINGIRDKQSGKTILDFLKSDGFANRNFMQLIHDDSLTFKEDIQKAQVSGQGDSLHEHIANLAGSPAIKKGILQTVKVVDELVKVMGRHKPENIVIEMARENQTTQKGQKNSRERMKRIEEGIKELGSQILKEHPVENTQLQNEKLYLYYLQNGRDMYVDQELDINRLSDYDVDHIVPQSFLKDDSIDNKVLTRSDKARGKSDNVPSEEVVKKMKNYWRQLLNAKLITQRKFDNLTKAERGGLSELDKAGFIKRQLVETRQITKHVAQILDSRMNTKYDENDKLIREVKVITLKSKLVSDFRKDFQFYKVREINNYHHAHDAYLNAVVGTALIKKYPKLESEFVYGDYKVYDVRKMIAKSEQEIGKATAKYFFYSNIMNFFKTEITLANGEIRKRPLIETNGETGEIVWDKGRDFATVRKVLSMPQVNIVKKTEVQTGGFSKESILPKRNSDKLIARKKDWDPKKYGGFDSPTVAYSVLVVAKVEKGKSKKLKSVKELLGITIMERSSFEKNPIDFLEAKGYKEVKKDLIIKLPKYSLFELENGRKRMLASAGELQKGNELALPSKYVNFLYLASHYEKLKGSPEDNEQKQLFVEQHKHYLDEIIEQISEFSKRVILADANLDKVLSAYNKHRDKPIREQAENIIHLFTLTNLGAPAAFKYFDTTIDRKRYTSTKEVLDATLIHQSITGLYETRIDLSQLGGDGGEAAAKPAPGGSGGVLNLEEEYRLHEKPVPSSIDPSWLQLFPTVWAERAGMGLANQVPPVVVELRSGASPVAVRQYPMSKEAREGIRPHIQKFLDLGVLVPCRSPWNTPLLPVKKPGTNDYRPVQDLREINKRVQDIHPTVPNPYNLLSSLPPSYTWYSVLDLKDAFFCLRLHPNSQPLFAFEWKDPEKGNTGQLTWTRLPQGFKNSPTLFNEALHRDLAPFRALNPQVVLLQYVDDLLVAAPTYEDCKKGTQKLLQELSKLGYRVSAKKAQLCQREVTYLGYLLKEGKRWLTPARKATVMKIPVPTTPRQVREFLGTAGFCRLWIPGFASLAAPLYPLTKPSIPFIWTEEHQQAFDHIKKALLSAPALALPDLTKPFTLYIDERAGVARGVLTQTLGPWRRPVAYLSKKLDPVASGWPTCLKAVAAVALLLKDADKLTLGQNVTVIASHSLESIVRQPPDRWMTNARMTHYQSLLLNERVSFAPPAVLNPATLLPVESEATPVHRCSEILAEETGTRRDLEDQPLPGVPTWYTDGSSFITEGKRRAGAPIVDGKRTVWASSLPEGTSAQKAELVALTQALRLAEGKNINIYTDSRYAFATAHIHGAIYKQRGWLTSAGKDIKNKEEILALLEAIHLPRRVAIIHCPGHQRGSNPVATGNRRADEAAKQAALSTRVLAGTTKPAGKRTADGSEFEKRTADGSEFESPKKKAKVE

SEQ ID NO: 7231 - protein, 2127 aa, synthetic construct
MPAAKRVKLDGGDKKYSIGLDIGTNSVGWAVITDEYKVPSKKFKVLGNTDRHSIKKNLIGALLFDSGETAEATRLKRTARRRYTRRKNRICYLQEIFSNEMAKVDDSFFHRLEESFLVEEDKKHERHPIFGNIVDEVAYHEKYPTIYHLRKKLVDSTDKADLRLIYLALAHMIKFRGHFLIEGDLNPDNSDVDKLFIQLVQTYNQLFEENPINASGVDAKAILSARLSKSRRLENLIAQLPGEKKNGLFGNLIALSLGLTPNFKSNFDLAEDAKLQLSKDTYDDDLDNLLAQIGDQYADLFLAAKNLSDAILLSDILRVNTEITKAPLSASMIKRYDEHHQDLTLLKALVRQQLPEKYKEIFFDQSKNGYAGYIDGGASQEEFYKFIKPILEKMDGTEELLVKLNREDLLRKQRTFDNGSIPHQIHLGELHAILRRQEDFYPFLKDNREKIEKILTFRIPYYVGPLARGNSRFAWMTRKSEETITPWNFEEVVDKGASAQSFIERMTNFDKNLPNEKVLPKHSLLYEYFTVYNELTKVKYVTEGMRKPAFLSGEQKKAIVDLLFKTNRKVTVKQLKEDYFKKIECFDSVEISGVEDRFNASLGTYHDLLKIIKDKDFLDNEENEDILEDIVLTLTLFEDREMIEERLKTYAHLFDDKVMKQLKRRRYTGWGRLSRKLINGIRDKQSGKTILDFLKSDGFANRNFMQLIHDDSLTFKEDIQKAQVSGQGDSLHEHIANLAGSPAIKKGILQTVKVVDELVKVMGRHKPENIVIEMARENQTTQKGQKNSRERMKRIEEGIKELGSQILKEHPVENTQLQNEKLYLYYLQNGRDMYVDQELDINRLSDYDVDHIVPQSFLKDDSIDNKVLTRSDKARGKSDNVPSEEVVKKMKNYWRQLLNAKLITQRKFDNLTKAERGGLSELDKAGFIKRQLVETRQITKHVAQILDSRMNTKYDENDKLIREVKVITLKSKLVSDFRKDFQFYKVREINNYHHAHDAYLNAVVGTALIKKYPKLESEFVYGDYKVYDVRKMIAKSEQEIGKATAKYFFYSNIMNFFKTEITLANGEIRKRPLIETNGETGEIVWDKGRDFATVRKVLSMPQVNIVKKTEVQTGGFSKESILPKRNSDKLIARKKDWDPKKYGGFDSPTVAYSVLVVAKVEKGKSKKLKSVKELLGITIMERSSFEKNPIDFLEAKGYKEVKKDLIIKLPKYSLFELENGRKRMLASAGELQKGNELALPSKYVNFLYLASHYEKLKGSPEDNEQKQLFVEQHKHYLDEIIEQISEFSKRVILADANLDKVLSAYNKHRDKPIREQAENIIHLFTLTNLGAPAAFKYFDTTIDRKRYTSTKEVLDATLIHQSITGLYETRIDLSQLGGDGGEAAAKPAPGGSGGLLGRDLLTKLKAQIQFSTEGPQVTWEDRPAMCLVLNLEEEYRLHEKPVPPSIDPSWLQLFPMVWAEKAGMGLANQVPPVVVELKSDASPVAVRQYPMSKEAREGIRPHIQRFLDLGILVPCQSPWNTPLLPVKKPGTNDYRPVQDLREVNKRVQDIHPTVPNPYNLLSSLPPSHTWYSVLDLKDAFFCLKLHPNSQPLFAFEWRDPEKGNTGQLTWTRLPQGFKNSPTLFNEALHRDLASFRALNPQVVMLQYVDDLLVAAPTYRDCKEGTRRLLQELSKLGYRVSAKKAQLCREEVTYLGYLLKGGKRWLTPARKATVMKIPTPTTPRQVREFLGTAGFCRLWIPGFASLAAPLYPLTRPKVPFTWTEAHQEAFGRIKEALLSAPALALPDLTKPFALYVDEKEGVARGVLTQTLGPWRRPVAYLSKKLDPVASGWPTCLKAIAAVALLLKDADKLTLGQNVLVIAPHNLESIVRQPPDRWMTNARMTHYQSLLLNERVSFAPPAILNPATLLPVESDDTPIHICSEILAEETGTRPDLRDQPLPGVPAWYTDGSSFIMDGRRQAGAAIVDNKRTVWASNLPEGTSAQKAELIALTQALRLAEGKSINIYTDSRYAFATAHVHGAIYKQRGWLTSAGKDIKNKEEILALLEAIHLPKRVAIIHCPGHQRGTDPVATGNRKADEAAKQAAQSTRILTETTKNAGKRTADGSEFEKRTADGSEFESPKKKAKVE

SEQ ID NO: 7232 - protein, 2218 aa, synthetic construct
MPAAKRVKLDGGDKKYSIGLDIGTNSVGWAVITDEYKVPSKKFKVLGNTDRHSIKKNLIGALLFDSGETAEATRLKRTARRRYTRRKNRICYLQEIFSNEMAKVDDSFFHRLEESFLVEEDKKHERHPIFGNIVDEVAYHEKYPTIYHLRKKLVDSTDKADLRLIYLALAHMIKFRGHFLIEGDLNPDNSDVDKLFIQLVQTYNQLFEENPINASGVDAKAILSARLSKSRRLENLIAQLPGEKKNGLFGNLIALSLGLTPNFKSNFDLAEDAKLQLSKDTYDDDLDNLLAQIGDQYADLFLAAKNLSDAILLSDILRVNTEITKAPLSASMIKRYDEHHQDLTLLKALVRQQLPEKYKEIFFDQSKNGYAGYIDGGASQEEFYKFIKPILEKMDGTEELLVKLNREDLLRKQRTFDNGSIPHQIHLGELHAILRRQEDFYPFLKDNREKIEKILTFRIPYYVGPLARGNSRFAWMTRKSEETITPWNFEEVVDKGASAQSFIERMTNFDKNLPNEKVLPKHSLLYEYFTVYNELTKVKYVTEGMRKPAFLSGEQKKAIVDLLFKTNRKVTVKQLKEDYFKKIECFDSVEISGVEDRFNASLGTYHDLLKIIKDKDFLDNEENEDILEDIVLTLTLFEDREMIEERLKTYAHLFDDKVMKQLKRRRYTGWGRLSRKLINGIRDKQSGKTILDFLKSDGFANRNFMQLIHDDSLTFKEDIQKAQVSGQGDSLHEHIANLAGSPAIKKGILQTVKVVDELVKVMGRHKPENIVIEMARENQTTQKGQKNSRERMKRIEEGIKELGSQILKEHPVENTQLQNEKLYLYYLQNGRDMYVDQELDINRLSDYDVDHIVPQSFLKDDSIDNKVLTRSDKARGKSDNVPSEEVVKKMKNYWRQLLNAKLITQRKFDNLTKAERGGLSELDKAGFIKRQLVETRQITKHVAQILDSRMNTKYDENDKLIREVKVITLKSKLVSDFRKDFQFYKVREINNYHHAHDAYLNAVVGTALIKKYPKLESEFVYGDYKVYDVRKMIAKSEQEIGKATAKYFFYSNIMNFFKTEITLANGEIRKRPLIETNGETGEIVWDKGRDFATVRKVLSMPQVNIVKKTEVQTGGFSKESILPKRNSDKLIARKKDWDPKKYGGFDSPTVAYSVLVVAKVEKGKSKKLKSVKELLGITIMERSSFEKNPIDFLEAKGYKEVKKDLIIKLPKYSLFELENGRKRMLASAGELQKGNELALPSKYVNFLYLASHYEKLKGSPEDNEQKQLFVEQHKHYLDEIIEQISEFSKRVILADANLDKVLSAYNKHRDKPIREQAENIIHLFTLTNLGAPAAFKYFDTTIDRKRYTSTKEVLDATLIHQSITGLYETRIDLSQLGGDGGEAAAKPAPGGSGGTLGDQGSRGSDPLPEPRVTLTVEGIPTEFLVNTGAEHSVLTKPMGKMGSKRTVVAGATGSKVYPWTTKRLLKIGQKQVTHSFLVIPECPAPLLGRDLLTKLKAQIQFSTEGPQVTWEDRPAMCLVLNLEEEYRLHEKPVPPSIDPSWLQLFPMVWAEKAGMGLANQVPPVVVELKSDASPVAVRQYPMSKEAREGIRPHIQRFLDLGILVPCQSPWNTPLLPVKKPGTNDYRPVQDLREVNKRVQDIHPTVPNPYNLLSSLPPSHTWYSVLDLKDAFFCLKLHPNSQPLFAFEWRDPEKGNTGQLTWTRLPQGFKNSPTLFNEALHRDLASFRALNPQVVMLQYVDDLLVAAPTYRDCKEGTRRLLQELSKLGYRVSAKKAQLCREEVTYLGYLLKGGKRWLTPARKATVMKIPTPTTPRQVREFLGTAGFCRLWIPGFASLAAPLYPLTRPKVPFTWTEAHQEAFGRIKEALLSAPALALPDLTKPFALYVDEKEGVARGVLTQTLGPWRRPVAYLSKKLDPVASGWPTCLKAIAAVALLLKDADKLTLGQNVLVIAPHNLESIVRQPPDRWMTNARMTHYQSLLLNERVSFAPPAILNPATLLPVESDDTPIHICSEILAEETGTRPDLRDQPLPGVPAWYTDGSSFIMDGRRQAGAAIVDNKRTVWASNLPEGTSAQKAELIALTQALRLAEGKSINIYTDSRYAFATAHVHGAIYKQRGWLTSAGKDIKNKEEILALLEAIHLPKRVAIIHCPGHQRGTDPVATGNRKADEAAKQAAQSTRILTETTKNAGKRTADGSEFEKRTADGSEFESPKKKAKVE

SEQ ID NO: 7233 - protein, 2096 aa, synthetic construct
MPAAKRVKLDGGDKKYSIGLDIGTNSVGWAVITDEYKVPSKKFKVLGNTDRHSIKKNLIGALLFDSGETAEATRLKRTARRRYTRRKNRICYLQEIFSNEMAKVDDSFFHRLEESFLVEEDKKHERHPIFGNIVDEVAYHEKYPTIYHLRKKLVDSTDKADLRLIYLALAHMIKFRGHFLIEGDLNPDNSDVDKLFIQLVQTYNQLFEENPINASGVDAKAILSARLSKSRRLENLIAQLPGEKKNGLFGNLIALSLGLTPNFKSNFDLAEDAKLQLSKDTYDDDLDNLLAQIGDQYADLFLAAKNLSDAILLSDILRVNTEITKAPLSASMIKRYDEHHQDLTLLKALVRQQLPEKYKEIFFDQSKNGYAGYIDGGASQEEFYKFIKPILEKMDGTEELLVKLNREDLLRKQRTFDNGSIPHQIHLGELHAILRRQEDFYPFLKDNREKIEKILTFRIPYYVGPLARGNSRFAWMTRKSEETITPWNFEEVVDKGASAQSFIERMTNFDKNLPNEKVLPKHSLLYEYFTVYNELTKVKYVTEGMRKPAFLSGEQKKAIVDLLFKTNRKVTVKQLKEDYFKKIECFDSVEISGVEDRFNASLGTYHDLLKIIKDKDFLDNEENEDILEDIVLTLTLFEDREMIEERLKTYAHLFDDKVMKQLKRRRYTGWGRLSRKLINGIRDKQSGKTILDFLKSDGFANRNFMQLIHDDSLTFKEDIQKAQVSGQGDSLHEHIANLAGSPAIKKGILQTVKVVDELVKVMGRHKPENIVIEMARENQTTQKGQKNSRERMKRIEEGIKELGSQILKEHPVENTQLQNEKLYLYYLQNGRDMYVDQELDINRLSDYDVDHIVPQSFLKDDSIDNKVLTRSDKARGKSDNVPSEEVVKKMKNYWRQLLNAKLITQRKFDNLTKAERGGLSELDKAGFIKRQLVETRQITKHVAQILDSRMNTKYDENDKLIREVKVITLKSKLVSDFRKDFQFYKVREINNYHHAHDAYLNAVVGTALIKKYPKLESEFVYGDYKVYDVRKMIAKSEQEIGKATAKYFFYSNIMNFFKTEITLANGEIRKRPLIETNGETGEIVWDKGRDFATVRKVLSMPQVNIVKKTEVQTGGFSKESILPKRNSDKLIARKKDWDPKKYGGFDSPTVAYSVLVVAKVEKGKSKKLKSVKELLGITIMERSSFEKNPIDFLEAKGYKEVKKDLIIKLPKYSLFELENGRKRMLASAGELQKGNELALPSKYVNFLYLASHYEKLKGSPEDNEQKQLFVEQHKHYLDEIIEQISEFSKRVILADANLDKVLSAYNKHRDKPIREQAENIIHLFTLTNLGAPAAFKYFDTTIDRKRYTSTKEVLDATLIHQSITGLYETRIDLSQLGGDGGEAAAKPAPGGSGGTLGIEDEYRLHETSTEPDVSLGSTWLSDFPQAWAETGGMGLAVRQAPLIIPLKATSTPVSIQQYPMSHEARLGIKPHIQRLLDQGILVPCQSPWNTPLLPVKKPGTNDYRPVQDLREVNKRVEDIHPTVPNPYNLLSGLPPSHQWYTVLDLKDAFFCLRLHPTSQPLFAFEWRDPGMGISGQLTWTRLPQGFKNSPTLFNEALHRDLADFRIQHPDLILLQYVDDILLAATSELDCQQGTRALLQTLGDLGYRASAKKAQICQKQVKYLGYLLREGQRWLTEARKETVMGQPVPKTPRQLREFLGTAGFCRLWIPGFAEMAAPLYPLTKPGTLFSWGPDQQKAYQEIKQALLTAPALGLPDLTKPFELFVDEKQGYAKGVLTQKLGPWRRPVAYLSKKLDPVAAGWPPCLRMVAAIAVLTKDAGKLTMGQPLVILAPHAVEALVKQPPDRWLSNARMTHYQAMLLDTDRVQFGPVVALNPATLLPLPEEGAPHDCLEILAETHGTRPDLTDQPIPDADHTWYTDGSSFLQEGQRKAGAAVTTETEVIWAGALPAGTSAQRAELIALTQALKMAEGKRLNVYTDSRYAFATAHIHGEIYRRRGWLTSEGREIKNKSEILALLKALFLPKRLSIIHCLGHQKGDSAEARGNRLADQAAREAAIKTPPDTSTLLAGKRTADGSEFEKRTADGSEFESPKKKAKVE

SEQ ID NO: 7234 - protein, 2096 aa, synthetic construct
MPAAKRVKLDGGDKKYSIGLDIGTNSVGWAVITDEYKVPSKKFKVLGNTDRHSIKKNLIGALLFDSGETAEATRLKRTARRRYTRRKNRICYLQEIFSNEMAKVDDSFFHRLEESFLVEEDKKHERHPIFGNIVDEVAYHEKYPTIYHLRKKLVDSTDKADLRLIYLALAHMIKFRGHFLIEGDLNPDNSDVDKLFIQLVQTYNQLFEENPINASGVDAKAILSARLSKSRRLENLIAQLPGEKKNGLFGNLIALSLGLTPNFKSNFDLAEDAKLQLSKDTYDDDLDNLLAQIGDQYADLFLAAKNLSDAILLSDILRVNTEITKAPLSASMIKRYDEHHQDLTLLKALVRQQLPEKYKEIFFDQSKNGYAGYIDGGASQEEFYKFIKPILEKMDGTEELLVKLNREDLLRKQRTFDNGSIPHQIHLGELHAILRRQEDFYPFLKDNREKIEKILTFRIPYYVGPLARGNSRFAWMTRKSEETITPWNFEEVVDKGASAQSFIERMTNFDKNLPNEKVLPKHSLLYEYFTVYNELTKVKYVTEGMRKPAFLSGEQKKAIVDLLFKTNRKVTVKQLKEDYFKKIECFDSVEISGVEDRFNASLGTYHDLLKIIKDKDFLDNEENEDILEDIVLTLTLFEDREMIEERLKTYAHLFDDKVMKQLKRRRYTGWGRLSRKLINGIRDKQSGKTILDFLKSDGFANRNFMQLIHDDSLTFKEDIQKAQVSGQGDSLHEHIANLAGSPAIKKGILQTVKVVDELVKVMGRHKPENIVIEMARENQTTQKGQKNSRERMKRIEEGIKELGSQILKEHPVENTQLQNEKLYLYYLQNGRDMYVDQELDINRLSDYDVDHIVPQSFLKDDSIDNKVLTRSDKARGKSDNVPSEEVVKKMKNYWRQLLNAKLITQRKFDNLTKAERGGLSELDKAGFIKRQLVETRQITKHVAQILDSRMNTKYDENDKLIREVKVITLKSKLVSDFRKDFQFYKVREINNYHHAHDAYLNAVVGTALIKKYPKLESEFVYGDYKVYDVRKMIAKSEQEIGKATAKYFFYSNIMNFFKTEITLANGEIRKRPLIETNGETGEIVWDKGRDFATVRKVLSMPQVNIVKKTEVQTGGFSKESILPKRNSDKLIARKKDWDPKKYGGFDSPTVAYSVLVVAKVEKGKSKKLKSVKELLGITIMERSSFEKNPIDFLEAKGYKEVKKDLIIKLPKYSLFELENGRKRMLASAGELQKGNELALPSKYVNFLYLASHYEKLKGSPEDNEQKQLFVEQHKHYLDEIIEQISEFSKRVILADANLDKVLSAYNKHRDKPIREQAENIIHLFTLTNLGAPAAFKYFDTTIDRKRYTSTKEVLDATLIHQSITGLYETRIDLSQLGGDGGEAAAKPAPGGSGGTLGIEDEYRLHETSTEPDVSLGSTWLSDFPQAWAETGGMGLAVRQAPLIIPLKATSTPVSIQQYPMSHEARLGIKPHIQRLLDQGILVPCQSPWNTPLLPVKKPGTNDYRPVQDLREVNKRVEDIHPTVPNPYNLLSGLPPSHQWYTVLDLKDAFFCLRLHPTSQPLFAFEWRDPGMGISGQLTWTRLPQGFKNSPTLFDEALHRDLADFRIQHPDLILLQYVDDILLAATSELDCQQGTRALLQTLGDLGYRASAKKAQICQKQVKYLGYLLREGQRWLTEARKETVMGQPVPKTPRQLREFLGTAGFCRLWIPGFAEMAAPLYPLTKTGTLFSWGPDQQKAYQEIKQALLTAPALGLPDLTKPFELFVDEKQGYAKGVLTQKLGPWRRPVAYLSKKLDPVAAGWPPCLRMVAAIAVLTKDAGKLTMGQPLVILAPHAVEALVKQPPDRWLSNARMTHYQAMLLDTDRVQFGPVVALNPATLLPLPEEGAPHDCLEILAETHGTRPDLTDQPIPDADHTWYTDGSSFLQEGQRKAGAAVTTETEVIWAGALPAGTSAQRAELIALTQALKMAEGKRLNVYTDSRYAFATAHIHGEIYRRRGLLTSEGREIKNKSEILALLKALFLPKRLSIIHCLGHQKGDSAEARGNRLADQAAREAAIKTPPDTSTLLAGKRTADGSEFEKRTADGSEFESPKKKAKVE

SEQ ID NO: 7235 - protein, 2096 aa, synthetic construct; identical to SEQ ID NO: 7233

SEQ ID NO: 7236 - protein, 2096 aa, synthetic construct
MPAAKRVKLDGGDKKYSIGLDIGTNSVGWAVITDEYKVPSKKFKVLGNTDRHSIKKNLIGALLFDSGETAEATRLKRTARRRYTRRKNRICYLQEIFSNEMAKVDDSFFHRLEESFLVEEDKKHERHPIFGNIVDEVAYHEKYPTIYHLRKKLVDSTDKADLRLIYLALAHMIKFRGHFLIEGDLNPDNSDVDKLFIQLVQTYNQLFEENPINASGVDAKAILSARLSKSRRLENLIAQLPGEKKNGLFGNLIALSLGLTPNFKSNFDLAEDAKLQLSKDTYDDDLDNLLAQIGDQYADLFLAAKNLSDAILLSDILRVNTEITKAPLSASMIKRYDEHHQDLTLLKALVRQQLPEKYKEIFFDQSKNGYAGYIDGGASQEEFYKFIKPILEKMDGTEELLVKLNREDLLRKQRTFDNGSIPHQIHLGELHAILRRQEDFYPFLKDNREKIEKILTFRIPYYVGPLARGNSRFAWMTRKSEETITPWNFEEVVDKGASAQSFIERMTNFDKNLPNEKVLPKHSLLYEYFTVYNELTKVKYVTEGMRKPAFLSGEQKKAIVDLLFKTNRKVTVKQLKEDYFKKIECFDSVEISGVEDRFNASLGTYHDLLKIIKDKDFLDNEENEDILEDIVLTLTLFEDREMIEERLKTYAHLFDDKVMKQLKRRRYTGWGRLSRKLINGIRDKQSGKTILDFLKSDGFANRNFMQLIHDDSLTFKEDIQKAQVSGQGDSLHEHIANLAGSPAIKKGILQTVKVVDELVKVMGRHKPENIVIEMARENQTTQKGQKNSRERMKRIEEGIKELGSQILKEHPVENTQLQNEKLYLYYLQNGRDMYVDQELDINRLSDYDVDHIVPQSFLKDDSIDNKVLTRSDKARGKSDNVPSEEVVKKMKNYWRQLLNAKLITQRKFDNLTKAERGGLSELDKAGFIKRQLVETRQITKHVAQILDSRMNTKYDENDKLIREVKVITLKSKLVSDFRKDFQFYKVREINNYHHAHDAYLNAVVGTALIKKYPKLESEFVYGDYKVYDVRKMIAKSEQEIGKATAKYFFYSNIMNFFKTEITLANGEIRKRPLIETNGETGEIVWDKGRDFATVRKVLSMPQVNIVKKTEVQTGGFSKESILPKRNSDKLIARKKDWDPKKYGGFDSPTVAYSVLVVAKVEKGKSKKLKSVKELLGITIMERSSFEKNPIDFLEAKGYKEVKKDLIIKLPKYSLFELENGRKRMLASAGELQKGNELALPSKYVNFLYLASHYEKLKGSPEDNEQKQLFVEQHKHYLDEIIEQISEFSKRVILADANLDKVLSAYNKHRDKPIREQAENIIHLFTLTNLGAPAAFKYFDTTIDRKRYTSTKEVLDATLIHQSITGLYETRIDLSQLGGDGGEAAAKPAPGGSGGTLNIEDEYRLHEISTEPDVSPGSTWLSDFPQAWAETGGMGLAVRQAPLIIPLKATSTPVSIKQYPMSQEAKLGIKPHIQRLLDQGILVPCQSPWNTPLLPVKKPGTNDYRPVQGLREVNKRVEDIHPTVPNPYNLLSGLPTSHRWYTVLDLKDAFFCLRLHPTSQPLFASEWRDPGMGISGQLTWTRLPQGFKNSPTLFNEALHRGLADFRIQHPDLILLQYVDDLLLAATSELDCQQGTRALLKTLGNLGYRASAKKAQICQKQVKYLGYLLREGQRWLTEARKETVMGQPTPKTPRQLREFLGKAGFCRLFIPRFAEMAAPLYPLTKPGTLFNWGPDQQKAYHEIKQALLTAPALGLPDLTKPFELFVDEKQGYAKGVLTQKLGPWRRPVAYLSKKLDPVAAGWPPCLRMVAAIAVLTKDAGKLTMGQPLVILAPHAVEALVKQPPDRWLSNARMTHYQAMLLDTDRVQFGPVVALNPATLLPLPEEGAPHDCLEILAETHGTEPDLTDQPIPDADHTWYTDGSSFLQEGQRKAGAAVTTETEVIWARALPAGTSAQRAELIALTQALKMAEGKRLNVYTDSRYAFATAHIHGEIYKRRGWLTSEGREIKNKSEILALLKALFLPKRLSIIHCLGHQKGDSAEARGNRLADQAAREAAIKTPPDTSTLLAGKRTADGSEFEKRTADGSEFESPKKKAKVE

SEQ ID NO: 7237 - protein, 2116 aa, synthetic construct
MPAAKRVKLDGGDKKYSIGLDIGTNSVGWAVITDEYKVPSKKFKVLGNTDRHSIKKNLIGALLFDSGETAEATRLKRTARRRYTRRKNRICYLQEIFSNEMAKVDDSFFHRLEESFLVEEDKKHERHPIFGNIVDEVAYHEKYPTIYHLRKKLVDSTDKADLRLIYLALAHMIKFRGHFLIEGDLNPDNSDVDKLFIQLVQTYNQLFEENPINASGVDAKAILSARLSKSRRLENLIAQLPGEKKNGLFGNLIALSLGLTPNFKSNFDLAEDAKLQLSKDTYDDDLDNLLAQIGDQYADLFLAAKNLSDAILLSDILRVNTEITKAPLSASMIKRYDEHHQDLTLLKALVRQQLPEKYKEIFFDQSKNGYAGYIDGGASQEEFYKFIKPILEKMDGTEELLVKLNREDLLRKQRTFDNGSIPHQIHLGELHAILRRQEDFYPFLKDNREKIEKILTFRIPYYVGPLARGNSRFAWMTRKSEETITPWNFEEVVDKGASAQSFIERMTNFDKNLPNEKVLPKHSLLYEYFTVYNELTKVKYVTEGMRKPAFLSGEQKKAIVDLLFKTNRKVTVKQLKEDYFKKIECFDSVEISGVEDRFNASLGTYHDLLKIIKDKDFLDNEENEDILEDIVLTLTLFEDREMIEERLKTYAHLFDDKVMKQLKRRRYTGWGRLSRKLINGIRDKQSGKTILDFLKSDGFANRNFMQLIHDDSLTFKEDIQKAQVSGQGDSLHEHIANLAGSPAIKKGILQTVKVVDELVKVMGRHKPENIVIEMARENQTTQKGQKNSRERMKRIEEGIKELGSQILKEHPVENTQLQNEKLYLYYLQNGRDMYVDQELDINRLSDYDVDHIVPQSFLKDDSIDNKVLTRSDKARGKSDNVPSEEVVKKMKNYWRQLLNAKLITQRKFDNLTKAERGGLSELDKAGFIKRQLVETRQITKHVAQILDSRMNTKYDENDKLIREVKVITLKSKLVSDFRKDFQFYKVREINNYHHAHDAYLNAVVGTALIKKYPKLESEFVYGDYKVYDVRKMIAKSEQEIGKATAKYFFYSNIMNFFKTEITLANGEIRKRPLIETNGETGEIVWDKGRDFATVRKVLSMPQVNIVKKTEVQTGGFSKESILPKRNSDKLIARKKDWDPKKYGGFDSPTVAYSVLVVAKVEKGKSKKLKSVKELLGITIMERSSFEKNPIDFLEAKGYKEVKKDLIIKLPKYSLFELENGRKRMLASAGELQKGNELALPSKYVNFLYLASHYEKLKGSPEDNEQKQLFVEQHKHYLDEIIEQISEFSKRVILADANLDKVLSAYNKHRDKPIREQAENIIHLFTLTNLGAPAAFKYFDTTIDRKRYTSTKEVLDATLIHQSITGLYETRIDLSQLGGDGGEAAAKPAPGGSGGVQEISDSRPMLHIYLNGRRFLGLLDTGADKTCIAGRDWPANWPIHQTESSLQGLGMACGVARSSQPLRWQHEDKSGIIHPFVIPTLPFTLWGRDIMKDIKVRLMTDSPDDSQDLMIGAIESNLFADQISWKSDQPVWLNQWPLKQEKLQALQQLVTEQLQLGHLEESNSPWNTPVFVIKKKSGKWRLLQDLRAVNATMHDMGALQPGLPSPVAVPKGWEIIIIDLQDCFFNIKLHPEDCKRFAFSVPSPNFKRPYQRFQWKVLPQGMKNSPTLCQKFVDKAILTVRDKYQDSYIVHYMDDILLAHPSRSIVDEILTSMIQALNKHGLVVSTEKIQKYDNLKYLGTHIQGDSVSYQKLQIRTDKLRTLNDFQKLLGNINWIRPFLKLTTGELKPLFEILNGDSNPISTRKLTPEACKALQLMNERLSTARVKRLDLSQPWSLCILKTEYTPTACLWQDGVVEWIHLPHISPKVITPYDIFCTQLIIKGRHRSKELFSKDPDYIVVPYTKVQFDLLLQEKEDWPISLLGFLGEVHFHLPKDPLLTFTLQTAIIFPHMTSTTPLEKGIVIFTDGSANGRSVTYIQGREPIIKENTQNTAQQAEIVAVITAFEEVSQPFNLYTDSKYVTGLFPEIETATLSPRTKIYTELKHLQRLIHKRQEKFYIGHIRGHTGLPGPLAQGNAYADSLTRILTAAGKRTADGSEFEKRTADGSEFESPKKKAKVE

SEQ ID NO: 7238 - protein, 2087 aa, synthetic construct
MPAAKRVKLDGGDKKYSIGLDIGTNSVGWAVITDEYKVPSKKFKVLGNTDRHSIKKNLIGALLFDSGETAEATRLKRTARRRYTRRKNRICYLQEIFSNEMAKVDDSFFHRLEESFLVEEDKKHERHPIFGNIVDEVAYHEKYPTIYHLRKKLVDSTDKADLRLIYLALAHMIKFRGHFLIEGDLNPDNSDVDKLFIQLVQTYNQLFEENPINASGVDAKAILSARLSKSRRLENLIAQLPGEKKNGLFGNLIALSLGLTPNFKSNFDLAEDAKLQLSKDTYDDDLDNLLAQIGDQYADLFLAAKNLSDAILLSDILRVNTEITKAPLSASMIKRYDEHHQDLTLLKALVRQQLPEKYKEIFFDQSKNGYAGYIDGGASQEEFYKFIKPILEKMDGTEELLVKLNREDLLRKQRTFDNGSIPHQIHLGELHAILRRQEDFYPFLKDNREKIEKILTFRIPYYVGPLARGNSRFAWMTRKSEETITPWNFEEVVDKGASAQSFIERMTNFDKNLPNEKVLPKHSLLYEYFTVYNELTKVKYVTEGMRKPAFLSGEQKKAIVDLLFKTNRKVTVKQLKEDYFKKIECFDSVEISGVEDRFNASLGTYHDLLKIIKDKDFLDNEENEDILEDIVLTLTLFEDREMIEERLKTYAHLFDDKVMKQLKRRRYTGWGRLSRKLINGIRDKQSGKTILDFLKSDGFANRNFMQLIHDDSLTFKEDIQKAQVSGQGDSLHEHIANLAGSPAIKKGILQTVKVVDELVKVMGRHKPENIVIEMARENQTTQKGQKNSRERMKRIEEGIKELGSQILKEHPVENTQLQNEKLYLYYLQNGRDMYVDQELDINRLSDYDVDHIVPQSFLKDDSIDNKVLTRSDKARGKSDNVPSEEVVKKMKNYWRQLLNAKLITQRKFDNLTKAERGGLSELDKAGFIKRQLVETRQITKHVAQILDSRMNTKYDENDKLIREVKVITLKSKLVSDFRKDFQFYKVREINNYHHAHDAYLNAVVGTALIKKYPKLESEFVYGDYKVYDVRKMIAKSEQEIGKATAKYFFYSNIMNFFKTEITLANGEIRKRPLIETNGETGEIVWDKGRDFATVRKVLSMPQVNIVKKTEVQTGGFSKESILPKRNSDKLIARKKDWDPKKYGGFDSPTVAYSVLVVAKVEKGKSKKLKSVKELLGITIMERSSFEKNPIDFLEAKGYKEVKKDLIIKLPKYSLFELENGRKRMLASAGELQKGNELALPSKYVNFLYLASHYEKLKGSPEDNEQKQLFVEQHKHYLDEIIEQISEFSKRVILADANLDKVLSAYNKHRDKPIREQAENIIHLFTLTNLGAPAAFKYFDTTIDRKRYTSTKEVLDATLIHQSITGLYETRIDLSQLGGDGGEAAAKPAPGGSGGIPWLMKKPLQLTTLVPLQEYEERLLKQTMLTGSYKEKLQSLFLKYDALWQHWENQVGHRRIKPHHIATGTVNPRPQKQYPINPKAKASIQTVINDLLKQGVLIQQNSIMNTPVYPVPKPDGKWRMVLDYREVNKTIPLIAAQNQHSAGILSSIFRGKYKTTLDLSNGFWAHSITPESYWLTAFTWLGQQYCWTRLPQGFLNSPALFNADVVDLLKEVPNVQVYVDDIYISHDDPREHLEQLEKVFSLLLNAGYVVSLKKSEIAQHEVEFLGFNITKEGRGLTETFKQKLLNITPPRDLKQLQSILGKLNFARNFIPNFSELVKPLYNIIATAPGKYITWTTDNSQQLQNIISMLNSAENLEERNPEVRLIMKVNTSPSAGYIRFYNEFAKRPIMYLNYVYTKAEVKFTNTEKLLTTIHKGLIKALDLGMGQEILVYSPIVSMTKIQKTPLPERKALPIRWITWMSYLEDPRIQFHYDKTLPELQQVPTVTDDIIAKIKHPSEFSMVFYTDGSAIKHPNVNKSHNAGMGIAQVQFKPEFTVINTWSIPLGDHTAQLAEVAAVEFACKKALKIDGPVLIVTDSFYVAESVNKELPYWQSNGFFNNKKKPLKHVSKWKSIADCIQLKPDIIIIHEKGHQPTASTFHTEGNNLADKLATQGSYVVNAGKRTADGSEFEKRTADGSEFESPKKKAKVE

SEQ ID NO: 7239 - protein, 2176 aa, synthetic construct
MPAAKRVKLDGGDKKYSIGLDIGTNSVGWAVITDEYKVPSKKFKVLGNTDRHSIKKNLIGALLFDSGETAEATRLKRTARRRYTRRKNRICYLQEIFSNEMAKVDDSFFHRLEESFLVEEDKKHERHPIFGNIVDEVAYHEKYPTIYHLRKKLVDSTDKADLRLIYLALAHMIKFRGHFLIEGDLNPDNSDVDKLFIQLVQTYNQLFEENPINASGVDAKAILSARLSKSRRLENLIAQLPGEKKNGLFGNLIALSLGLTPNFKSNFDLAEDAKLQLSKDTYDDDLDNLLAQIGDQYADLFLAAKNLSDAILLSDILRVNTEITKAPLSASMIKRYDEHHQDLTLLKALVRQQLPEKYKEIFFDQSKNGYAGYIDGGASQEEFYKFIKPILEKMDGTEELLVKLNREDLLRKQRTFDNGSIPHQIHLGELHAILRRQEDFYPFLKDNREKIEKILTFRIPYYVGPLARGNSRFAWMTRKSEETITPWNFEEVVDKGASAQSFIERMTNFDKNLPNEKVLPKHSLLYEYFTVYNELTKVKYVTEGMRKPAFLSGEQKKAIVDLLFKTNRKVTVKQLKEDYFKKIECFDSVEISGVEDRFNASLGTYHDLLKIIKDKDFLDNEENEDILEDIVLTLTLFEDREMIEERLKTYAHLFDDKVMKQLKRRRYTGWGRLSRKLINGIRDKQSGKTILDFLKSDGFANRNFMQLIHDDSLTFKEDIQKAQVSGQGDSLHEHIANLAGSPAIKKGILQTVKVVDELVKVMGRHKPENIVIEMARENQTTQKGQKNSRERMKRIEEGIKELGSQILKEHPVENTQLQNEKLYLYYLQNGRDMYVDQELDINRLSDYDVDHIVPQSFLKDDSIDNKVLTRSDKARGKSDNVPSEEVVKKMKNYWRQLLNAKLITQRKFDNLTKAERGGLSELDKAGFIKRQLVETRQITKHVAQILDSRMNTKYDENDKLIREVKVITLKSKLVSDFRKDFQFYKVREINNYHHAHDAYLNAVVGTALIKKYPKLESEFVYGDYKVYDVRKMIAKSEQEIGKATAKYFFYSNIMNFFKTEITLANGEIRKRPLIETNGETGEIVWDKGRDFATVRKVLSMPQVNIVKKTEVQTGGFSKESILPKRNSDKLIARKKDWDPKKYGGFDSPTVAYSVLVVAKVEKGKSKKLKSVKELLGITIMERSSFEKNPIDFLEAKGYKEVKKDLIIKLPKYSLFELENGRKRMLASAGELQKGNELALPSKYVNFLYLASHYEKLKGSPEDNEQKQLFVEQHKHYLDEIIEQISEFSKRVILADANLDKVLSAYNKHRDKPIREQAENIIHLFTLTNLGAPAAFKYFDTTIDRKRYTSTKEVLDATLIHQSITGLYETRIDLSQLGGDGGEAAAKPAPGGSGGMDPLQLLQPLEAEIKGTKLKAHWNSGATITCVPQAFLEEEVPIKNIWIKTIHGEKEQPVYYLTFKIQGRKVEAEVISSPYDYILVSPSDIPWLMKKPLQLTTLVPLQEYEERLLKQTMLTGSYKEKLQSLFLKYDALWQHWENQVGHRRIKPHHIATGTVNPRPQKQYPINPKAKASIQTVINDLLKQGVLIQQNSIMNTPVYPVPKPDGKWRMVLDYREVNKTIPLIAAQNQHSAGILSSIFRGKYKTTLDLSNGFWAHSITPESYWLTAFTWLGQQYCWTRLPQGFLNSPALFNADVVDLLKEVPNVQVYVDDIYISHDDPREHLEQLEKVFSLLLNAGYVVSLKKSEIAQHEVEFLGFNITKEGRGLTETFKQKLLNITPPRDLKQLQSILGLLNFARNFIPNFSELVKPLYNIIATAPGKYITWTTDNSQQLQNIISMLNSAENLEERNPEVRLIMKVNTSPSAGYIRFYNEFAKRPIMYLNYVYTKAEVKFTNTEKLLTTIHKGLIKALDLGMGQEILVYSPIVSMTKIQKTPLPERKALPIRWITWMSYLEDPRIQFHYDKTLPELQQVPTVTDDIIAKIKHPSEFSMVFYTDGSAIKHPNVNKSHNAGMGIAQVQFKPEFTVINTWSIPLGDHTAQLAEVAAVEFACKKALKIDGPVLIVTDSFYVAESVNKELPYWQSNGFFNNKKKPLKHVSKWKSIADCIQLKPDIIIIHEKGHQPTASTFHTEGNNLADKLATQGSYVVNAGKRTADGSEFEKRTADGSEFESPKKKAKVE

SEQ ID NO: 7240 - protein, 2094 aa, synthetic construct
MPAAKRVKLDGGDKKYSIGLDIGTNSVGWAVITDEYKVPSKKFKVLGNTDRHSIKKNLIGALLFDSGETAEATRLKRTARRRYTRRKNRICYLQEIFSNEMAKVDDSFFHRLEESFLVEEDKKHERHPIFGNIVDEVAYHEKYPTIYHLRKKLVDSTDKADLRLIYLALAHMIKFRGHFLIEGDLNPDNSDVDKLFIQLVQTYNQLFEENPINASGVDAKAILSARLSKSRRLENLIAQLPGEKKNGLFGNLIALSLGLTPNFKSNFDLAEDAKLQLSKDTYDDDLDNLLAQIGDQYADLFLAAKNLSDAILLSDILRVNTEITKAPLSASMIKRYDEHHQDLTLLKALVRQQLPEKYKEIFFDQSKNGYAGYIDGGASQEEFYKFIKPILEKMDGTEELLVKLNREDLLRKQRTFDNGSIPHQIHLGELHAILRRQEDFYPFLKDNREKIEKILTFRIPYYVGPLARGNSRFAWMTRKSEETITPWNFEEVVDKGASAQSFIERMTNFDKNLPNEKVLPKHSLLYEYFTVYNELTKVKYVTEGMRKPAFLSGEQKKAIVDLLFKTNRKVTVKQLKEDYFKKIECFDSVEISGVEDRFNASLGTYHDLLKIIKDKDFLDNEENEDILEDIVLTLTLFEDREMIEERLKTYAHLFDDKVMKQLKRRRYTGWGRLSRKLINGIRDKQSGKTILDFLKSDGFANRNFMQLIHDDSLTFKEDIQKAQVSGQGDSLHEHIANLAGSPAIKKGILQTVKVVDELVKVMGRHKPENIVIEMARENQTTQKGQKNSRERMKRIEEGIKELGSQILKEHPVENTQLQNEKLYLYYLQNGRDMYVDQELDINRLSDYDVDHIVPQSFLKDDSIDNKVLTRSDKARGKSDNVPSEEVVKKMKNYWRQLLNAKLITQRKFDNLTKAERGGLSELDKAGFIKRQLVETRQITKHVAQILDSRMNTKYDENDKLIREVKVITLKSKLVSDFRKDFQFYKVREINNYHHAHDAYLNAVVGTALIKKYPKLESEFVYGDYKVYDVRKMIAKSEQEIGKATAKYFFYSNIMNFFKTEITLANGEIRKRPLIETNGETGEIVWDKGRDFATVRKVLSMPQVNIVKKTEVQTGGFSKESILPKRNSDKLIARKKDWDPKKYGGFDSPTVAYSVLVVAKVEKGKSKKLKSVKELLGITIMERSSFEKNPIDFLEAKGYKEVKKDLIIKLPKYSLFELENGRKRMLASAGELQKGNELALPSKYVNFLYLASHYEKLKGSPEDNEQKQLFVEQHKHYLDEIIEQISEFSKRVILADANLDKVLSAYNKHRDKPIREQAENIIHLFTLTNLGAPAAFKYFDTTIDRKRYTSTKEVLDATLIHQSITGLYETRIDLSQLGGDGGEAAAKPAPGGSGGVLNLEEEYRLHEKPVPSSIDPSWLQLFPTVWAERAGMGLANQVPPVVVELRSGASPVAVRQYPMSKEAREGIRPHIQRFLDLGVLVPCQSPWNTPLLPVKKPGTNDYRPVQDLREINKRVQDIHPTVPNPYNLLSSLPPSHTWYSVLDLKDAFFCLKLHPNSQPLFAFEWRDPEKGNTGQLTWTRLPQGFKNSPTLFNEALHRDLAPFRALNPQVVLLQYVDDLLVAAPTYRDCKEGTQKLLQELSKLGYRVSAKKAQLCQKEVTYLGYLLKEGKRWLTPARKATVMKIPPPTTPRQVREFLGTAGFCRLWIPGFASLAAPLYPLTKPSIPFIWTEEHQKAFDRIKEALLSAPALALPDLTKPFTLYVDERAGVARGVLTQTLGPWRRPVAYLSKKLDPVASGWPTCLKAVAAVALLLKDADKLTLGQNVTVIASHSLESIVRQPPDRWMTNARMTHYQSLLLNERVSFAPPAVLNPATLLPVESEATPVHRCSEILAEETGTRRDLKDQPLPGVPAWYTDGSSFIAEGKRRAGAAIVDGKRTVWASSLPEGTSAQKAELVALTQALRLAEGKDINIYTDSRYAFATAHIHGAIYKQRGWLTSAGKDIKNKEEILALLEAIHLPKRVAIIHCPGHQKGNDPVATGNRRADEAAKQAALSTRVLAETTKPAGKRTADGSEFEKRTADGSEFESPKKKAKVE

SEQ ID NO: 7241 - protein, 2096 aa, synthetic construct
MPAAKRVKLDGGDKKYSIGLDIGTNSVGWAVITDEYKVPSKKFKVLGNTDRHSIKKNLIGALLFDSGETAEATRLKRTARRRYTRRKNRICYLQEIFSNEMAKVDDSFFHRLEESFLVEEDKKHERHPIFGNIVDEVAYHEKYPTIYHLRKKLVDSTDKADLRLIYLALAHMIKFRGHFLIEGDLNPDNSDVDKLFIQLVQTYNQLFEENPINASGVDAKAILSARLSKSRRLENLIAQLPGEKKNGLFGNLIALSLGLTPNFKSNFDLAEDAKLQLSKDTYDDDLDNLLAQIGDQYADLFLAAKNLSDAILLSDILRVNTEITKAPLSASMIKRYDEHHQDLTLLKALVRQQLPEKYKEIFFDQSKNGYAGYIDGGASQEEFYKFIKPILEKMDGTEELLVKLNREDLLRKQRTFDNGSIPHQIHLGELHAILRRQEDFYPFLKDNREKIEKILTFRIPYYVGPLARGNSRFAWMTRKSEETITPWNFEEVVDKGASAQSFIERMTNFDKNLPNEKVLPKHSLLYEYFTVYNELTKVKYVTEGMRKPAFLSGEQKKAIVDLLFKTNRKVTVKQLKEDYFKKIECFDSVEISGVEDRFNASLGTYHDLLKIIKDKDFLDNEENEDILEDIVLTLTLFEDREMIEERLKTYAHLFDDKVMKQLKRRRYTGWGRLSRKLINGIRDKQSGKTILDFLKSDGFANRNFMQLIHDDSLTFKEDIQKAQVSGQGDSLHEHIANLAGSPAIKKGILQTVKVVDELVKVMGRHKPENIVIEMARENQTTQKGQKNSRERMKRIEEGIKELGSQILKEHPVENTQLQNEKLYLYYLQNGRDMYVDQELDINRLSDYDVDHIVPQSFLKDDSIDNKVLTRSDKARGKSDNVPSEEVVKKMKNYWRQLLNAKLITQRKFDNLTKAERGGLSELDKAGFIKRQLVETRQITKHVAQILDSRMNTKYDENDKLIREVKVITLKSKLVSDFRKDFQFYKVREINNYHHAHDAYLNAVVGTALIKKYPKLESEFVYGDYKVYDVRKMIAKSEQEIGKATAKYFFYSNIMNFFKTEITLANGEIRKRPLIETNGETGEIVWDKGRDFATVRKVLSMPQVNIVKKTEVQTGGFSKESILPKRNSDKLIARKKDWDPKKYGGFDSPTVAYSVLVVAKVEKGKSKKLKSVKELLGITIMERSSFEKNPIDFLEAKGYKEVKKDLIIKLPKYSLFELENGRKRMLASAGELQKGNELALPSKYVNFLYLASHYEKLKGSPEDNEQKQLFVEQHKHYLDEIIEQISEFSKRVILADANLDKVLSAYNKHRDKPIREQAENIIHLFTLTNLGAPAAFKYFDTTIDRKRYTSTKEVLDATLIHQSITGLYETRIDLSQLGGDGGEAAAKPAPGGSGGTLNIEDEYRLHETSKEPDVPLGSTWLSDFPQAWAETGGMGLAVRQAPLIIPLKATSTPVSIKQYPMSQEARLGIKPHIQRLLDQGILVPCQSPWNTPLLPVKKPGTNDYRPVQDLREVNKRVEDIHPTVPNPYNLLSGLPPSHQWYTVLDLKDAFFCLRLHPTSQPLFAFEWRDPEMGISGQLTWTRLPQGFKNSPTLFDEALHRDLADFRIQHPDLILLQYVDDLLLAATSEQDCQRGTRALLQTLGNLGYRASAKKAQICQKQVKYLGYLLKEGQRWLTEARKETVMGQPTPKTPRQLREFLGTAGFCRLWIPGFAEMAAPLYPLTKTGTLFNWGPDQQKAYQEIKQALLTAPALGLPDLTKPFELFVDEKQGYAKGVLTQKLGPWRRPVAYLSKKLDPVAAGWPPCLRMVAAIAVLTKDAGKLTMGQPLVILAPHAVEALVKQPPDRWLSNARMTHYQAMLLDTDRVQFGPVVALNPATLLPLPEKEAPHDCLEILAETHGTRPDLTDQPIPDADYTWYTDGSSFLQEGQRRAGAAVTTETEVIWARALPAGTSAQRAELIALTQALKMAEGKKLNVYTDSRYAFATAHVHGEIYRRRGLLTSEGREIKNKNEILALLKALFLPKRLSIIHCPGHQKGNSAEARGNRMADQAAREAAMKAVLETSTLLAGKRTADGSEFEKRTADGSEFESPKKKAKVE

SEQ ID NO: 7242 - protein, 2096 aa, synthetic construct; identical to SEQ ID NO: 4527

SEQ ID NO: 7243 - protein, 2098 aa, synthetic construct
MPAAKRVKLDGGDKKYSIGLDIGTNSVGWAVITDEYKVPSKKFKVLGNTDRHSIKKNLIGALLFDSGETAEATRLKRTARRRYTRRKNRICYLQEIFSNEMAKVDDSFFHRLEESFLVEEDKKHERHPIFGNIVDEVAYHEKYPTIYHLRKKLVDSTDKADLRLIYLALAHMIKFRGHFLIEGDLNPDNSDVDKLFIQLVQTYNQLFEENPINASGVDAKAILSARLSKSRRLENLIAQLPGEKKNGLFGNLIALSLGLTPNFKSNFDLAEDAKLQLSKDTYDDDLDNLLAQIGDQYADLFLAAKNLSDAILLSDILRVNTEITKAPLSASMIKRYDEHHQDLTLLKALVRQQLPEKYKEIFFDQSKNGYAGYIDGGASQEEFYKFIKPILEKMDGTEELLVKLNREDLLRKQRTFDNGSIPHQIHLGELHAILRRQEDFYPFLKDNREKIEKILTFRIPYYVGPLARGNSRFAWMTRKSEETITPWNFEEVVDKGASAQSFIERMTNFDKNLPNEKVLPKHSLLYEYFTVYNELTKVKYVTEGMRKPAFLSGEQKKAIVDLLFKTNRKVTVKQLKEDYFKKIECFDSVEISGVEDRFNASLGTYHDLLKIIKDKDFLDNEENEDILEDIVLTLTLFEDREMIEERLKTYAHLFDDKVMKQLKRRRYTGWGRLSRKLINGIRDKQSGKTILDFLKSDGFANRNFMQLIHDDSLTFKEDIQKAQVSGQGDSLHEHIANLAGSPAIKKGILQTVKVVDELVKVMGRHKPENIVIEMARENQTTQKGQKNSRERMKRIEEGIKELGSQILKEHPVENTQLQNEKLYLYYLQNGRDMYVDQELDINRLSDYDVDHIVPQSFLKDDSIDNKVLTRSDKARGKSDNVPSEEVVKKMKNYWRQLLNAKLITQRKFDNLTKAERGGLSELDKAGFIKRQLVETRQITKHVAQILDSRMNTKYDENDKLIREVKVITLKSKLVSDFRKDFQFYKVREINNYHHAHDAYLNAVVGTALIKKYPKLESEFVYGDYKVYDVRKMIAKSEQEIGKATAKYFFYSNIMNFFKTEITLANGEIRKRPLIETNGETGEIVWDKGRDFATVRKVLSMPQVNIVKKTEVQTGGFSKESILPKRNSDKLIARKKDWDPKKYGGFDSPTVAYSVLVVAKVEKGKSKKLKSVKELLGITIMERSSFEKNPIDFLEAKGYKEVKKDLIIKLPKYSLFELENGRKRMLASAGELQKGNELALPSKYVNFLYLASHYEKLKGSPEDNEQKQLFVEQHKHYLDEIIEQISEFSKRVILADANLDKVLSAYNKHRDKPIREQAENIIHLFTLTNLGAPAAFKYFDTTIDRKRYTSTKEVLDATLIHQSITGLYETRIDLSQLGGDGGPAPGGSEAAAKGGTAPLEEEYRLFLEAPIQNVTLLEQWKREIPKVWAEINPPGLASTQAPIHVQLLSTALPVRVRQYPITLEAKRSLRETIRKFRAAGILRPVHSPWNTPLLPVRKSGTSEYRMVQDLREVNKRVETIHPTVPNPYTLLSLLPPDRIWYSVLDLKDAFFCIPLAPESQLIFAFEWADAEEGESGQLTWTRLPQGFKNSPTLFDEALNRDLQGFRLDHPSVSLLQYVDDLLIAADTQAACLSATRDLLMTLAELGYRVSGKKAQLCQEEVTYLGFKIHKGSRSLSNSRTQAILQIPVPKTKRQVREFLGTIGYCRLWIPGFAELAQPLYAATRGGNDPLVWGEKEEEAFQSLKLALTQPPALALPSLDKPFQLFVEETSGAAKGVLTQALGPWKRPVAYLSKRLDPVAAGWPRCLRAIAAAALLTREASKLTFGQDIEITSSHNLESLLRSPPDKWLTNARITQYQVLLLDPPRVRFKQTAALNPATLLPETDDTLPIHHCLDTLDSLTSTRPDLTDQPLAQAEATLFTDGSSYIRDGKRYAGAAVVTLDSVIWAEPLPIGTSAQKAELIALTKALEWSKDKSVNIYTDSRYAFATLHVHGMIYRERGLLTAGGKAIKNAPEILALLTAVWLPKRVAVMHCKGHQKDDAPTSTGNRRADEVAREVAIRPLSTQATISAGKRTADGSEFEKRTADGSEFESPKKKAKVE

SEQ ID NO: 7244 - protein, 2098 aa, synthetic construct
MPAAKRVKLDGGDKKYSIGLDIGTNSVGWAVITDEYKVPSKKFKVLGNTDRHSIKKNLIGALLFDSGETAEATRLKRTARRRYTRRKNRICYLQEIFSNEMAKVDDSFFHRLEESFLVEEDKKHERHPIFGNIVDEVAYHEKYPTIYHLRKKLVDSTDKADLRLIYLALAHMIKFRGHFLIEGDLNPDNSDVDKLFIQLVQTYNQLFEENPINASGVDAKAILSARLSKSRRLENLIAQLPGEKKNGLFGNLIALSLGLTPNFKSNFDLAEDAKLQLSKDTYDDDLDNLLAQIGDQYADLFLAAKNLSDAILLSDILRVNTEITKAPLSASMIKRYDEHHQDLTLLKALVRQQLPEKYKEIFFDQSKNGYAGYIDGGASQEEFYKFIKPILEKMDGTEELLVKLNREDLLRKQRTFDNGSIPHQIHLGELHAILRRQEDFYPFLKDNREKIEKILTFRIPYYVGPLARGNSRFAWMTRKSEETITPWNFEEVVDKGASAQSFIERMTNFDKNLPNEKVLPKHSLLYEYFTVYNELTKVKYVTEGMRKPAFLSGEQKKAIVDLLFKTNRKVTVKQLKEDYFKKIECFDSVEISGVEDRFNASLGTYHDLLKIIKDKDFLDNEENEDILEDIVLTLTLFEDREMIEERLKTYAHLFDDKVMKQLKRRRYTGWGRLSRKLINGIRDKQSGKTILDFLKSDGFANRNFMQLIHDDSLTFKEDIQKAQVSGQGDSLHEHIANLAGSPAIKKGILQTVKVVDELVKVMGRHKPENIVIEMARENQTTQKGQKNSRERMKRIEEGIKELGSQILKEHPVENTQLQNEKLYLYYLQNGRDMYVDQELDINRLSDYDVDHIVPQSFLKDDSIDNKVLTRSDKARGKSDNVPSEEVVKKMKNYWRQLLNAKLITQRKFDNLTKAERGGLSELDKAGFIKRQLVETRQITKHVAQILDSRMNTKYDENDKLIREVKVITLKSKLVSDFRKDFQFYKVREINNYHHAHDAYLNAVVGTALIKKYPKLESEFVYGDYKVYDVRKMIAKSEQEIGKATAKYFFYSNIMNFFKTEITLANGEIRKRPLIETNGETGEIVWDKGRDFATVRKVLSMPQVNIVKKTEVQTGGFSKESILPKRNSDKLIARKKDWDPKKYGGFDSPTVAYSVLVVAKVEKGKSKKLKSVKELLGITIMERSSFEKNPIDFLEAKGYKEVKKDLIIKLPKYSLFELENGRKRMLASAGELQKGNELALPSKYVNFLYLASHYEKLKGSPEDNEQKQLFVEQHKHYLDEIIEQISEFSKRVILADANLDKVLSAYNKHRDKPIREQAENIIHLFTLTNLGAPAAFKYFDTTIDRKRYTSTKEVLDATLIHQSITGLYETRIDLSQLGGDGGPAPGGSEAAAKGGTAPLEEEYRLFLEAPIQNVTLLEQWKREIPKVWAEINPPGLASTQAPIHVQLLSTALPVRVRQYPITLEAKRSLRETIRKFRAAGILRPVHSPWNTPLLPVRKSGTSEYRMVQDLREVNKRVETIHPTVPNPYTLLSLLPPDRIWYSVLDLKDAFFCIPLAPESQLIFAFEWADAEEGESGQLTWTRLPQGFKNSPTLFNEALNRDLQGFRLDHPSVSLLQYVDDLLIAADTQAACLSATRDLLMTLAELGYRVSGKKAQLCQEEVTYLGFKIHKGSRSLSNSRTQAILQIPVPKTKRQVREFLGTIGYCRLWIPGFAELAQPLYAATRPGNDPLVWGEKEEEAFQSLKLALTQPPALALPSLDKPFQLFVEETSGAAKGVLTQALGPWKRPVAYLSKRLDPVAAGWPRCLRAIAAAALLTREASKLTFGQDIEITSSHNLESLLRSPPDKWLTNARITQYQVLLLDPPRVRFKQTAALNPATLLPETDDTLPIHHCLDTLDSLTSTRPDLTDQPLAQAEATLFTDGSSYIRDGKRYAGAAVVTLDSVIWAEPLPIGTSAQKAELIALTKALEWSKDKSVNIYTDSRYAFATLHVHGMIYRERGWLTAGGKAIKNAPEILALLTAVWLPKRVAVMHCKGHQKDDAPTSTGNRRADEVAREVAIRPLSTQATISAGKRTADGSEFEKRTADGSEFESPKKKAKVE

SEQ ID NO: 7245 - protein, 2095 aa, synthetic construct
MPAAKRVKLDGGDKKYSIGLDIGTNSVGWAVITDEYKVPSKKFKVLGNTDRHSIKKNLIGALLFDSGETAEATRLKRTARRRYTRRKNRICYLQEIFSNEMAKVDDSFFHRLEESFLVEEDKKHERHPIFGNIVDEVAYHEKYPTIYHLRKKLVDSTDKADLRLIYLALAHMIKFRGHFLIEGDLNPDNSDVDKLFIQLVQTYNQLFEENPINASGVDAKAILSARLSKSRRLENLIAQLPGEKKNGLFGNLIALSLGLTPNFKSNFDLAEDAKLQLSKDTYDDDLDNLLAQIGDQYADLFLAAKNLSDAILLSDILRVNTEITKAPLSASMIKRYDEHHQDLTLLKALVRQQLPEKYKEIFFDQSKNGYAGYIDGGASQEEFYKFIKPILEKMDGTEELLVKLNREDLLRKQRTFDNGSIPHQIHLGELHAILRRQEDFYPFLKDNREKIEKILTFRIPYYVGPLARGNSRFAWMTRKSEETITPWNFEEVVDKGASAQSFIERMTNFDKNLPNEKVLPKHSLLYEYFTVYNELTKVKYVTEGMRKPAFLSGEQKKAIVDLLFKTNRKVTVKQLKEDYFKKIECFDSVEISGVEDRFNASLGTYHDLLKIIKDKDFLDNEENEDILEDIVLTLTLFEDREMIEERLKTYAHLFDDKVMKQLKRRRYTGWGRLSRKLINGIRDKQSGKTILDFLKSDGFANRNFMQLIHDDSLTFKEDIQKAQVSGQGDSLHEHIANLAGSPAIKKGILQTVKVVDELVKVMGRHKPENIVIEMARENQTTQKGQKNSRERMKRIEEGIKELGSQILKEHPVENTQLQNEKLYLYYLQNGRDMYVDQELDINRLSDYDVDHIVPQSFLKDDSIDNKVLTRSDKARGKSDNVPSEEVVKKMKNYWRQLLNAKLITQRKFDNLTKAERGGLSELDKAGFIKRQLVETRQITKHVAQILDSRMNTKYDENDKLIREVKVITLKSKLVSDFRKDFQFYKVREINNYHHAHDAYLNAVVGTALIKKYPKLESEFVYGDYKVYDVRKMIAKSEQEIGKATAKYFFYSNIMNFFKTEITLANGEIRKRPLIETNGETGEIVWDKGRDFATVRKVLSMPQVNIVKKTEVQTGGFSKESILPKRNSDKLIARKKDWDPKKYGGFDSPTVAYSVLVVAKVEKGKSKKLKSVKELLGITIMERSSFEKNPIDFLEAKGYKEVKKDLIIKLPKYSLFELENGRKRMLASAGELQKGNELALPSKYVNFLYLASHYEKLKGSPEDNEQKQLFVEQHKHYLDEIIEQISEFSKRVILADANLDKVLSAYNKHRDKPIREQAENIIHLFTLTNLGAPAAFKYFDTTIDRKRYTSTKEVLDATLIHQSITGLYETRIDLSQLGGDGGPAPGGSEAAAKGGTLQLEEEYRLFEPESTQKQEMDIWLKNFPQAWAETGGMGTAHCQAPVLIQLKATATPISIRQYPMPHEAYQGIKPHIRRMLDQGILKPCQSPWNTPLLPVKKPGTEDYRPVQDLREVNKRVEDIHPTVPNPYNLLSTLPPSHPWYTVLDLKDAFFCLRLHSESQLLFAFEWRDPEIGLSGQLTWTRLPQGFKNSPTLFNEALHSDLADFRVRYPALVLLQYVDDLLLAAATRTECLEGTKALLETLGNKGYRASAKKAQICLQEVTYLGYSLKDGQRWLTKARKEAILSIPVPKNSRQVREFLGTAGYCRLWIPGFAELAAPLYPLTRPGTLFQWGTEQQLAFEDIKKALLSSPALGLPDITKPFELFIDENSGFAKGVLVQKLGPWKRPVAYLSKKLDTVASGWPPCLRMVAAIAILVKDAGKLTLGQPLTILTSHPVEALVRQPPNKWLSNARMTHYQAMLLDAERVHFGPTVSLNPATLLPLPSGGNHHDCLQILAETHGTRPDLTDQPLPDADLTWYTDGSSFIRNGEREAGAAVTTESEVIWAAPLPPGTSAQRAELIALTQALKMAEGKKLTVYTDSRYAFATTHVHGEIYRRRGWLTSEGKEIKNKNEILALLEALFLPKRLSIIHCPGHQKGDSPQAKGNRLADDTAKKAATETHSSLTVLPAGKRTADGSEFEKRTADGSEFESPKKKAKVE

SEQ ID NO: 7246 - protein, 2096 aa, synthetic construct
MPAAKRVKLDGGDKKYSIGLDIGTNSVGWAVITDEYKVPSKKFKVLGNTDRHSIKKNLIGALLFDSGETAEATRLKRTARRRYTRRKNRICYLQEIFSNEMAKVDDSFFHRLEESFLVEEDKKHERHPIFGNIVDEVAYHEKYPTIYHLRKKLVDSTDKADLRLIYLALAHMIKFRGHFLIEGDLNPDNSDVDKLFIQLVQTYNQLFEENPINASGVDAKAILSARLSKSRRLENLIAQLPGEKKNGLFGNLIALSLGLTPNFKSNFDLAEDAKLQLSKDTYDDDLDNLLAQIGDQYADLFLAAKNLSDAILLSDILRVNTEITKAPLSASMIKRYDEHHQDLTLLKALVRQQLPEKYKEIFFDQSKNGYAGYIDGGASQEEFYKFIKPILEKMDGTEELLVKLNREDLLRKQRTFDNGSIPHQIHLGELHAILRRQEDFYPFLKDNREKIEKILTFRIPYYVGPLARGNSRFAWMTRKSEETITPWNFEEVVDKGASAQSFIERMTNFDKNLPNEKVLPKHSLLYEYFTVYNELTKVKYVTEGMRKPAFLSGEQKKAIVDLLFKTNRKVTVKQLKEDYFKKIECFDSVEISGVEDRFNASLGTYHDLLKIIKDKDFLDNEENEDILEDIVLTLTLFEDREMIEERLKTYAHLFDDKVMKQLKRRRYTGWGRLSRKLINGIRDKQSGKTILDFLKSDGFANRNFMQLIHDDSLTFKEDIQKAQVSGQGDSLHEHIANLAGSPAIKKGILQTVKVVDELVKVMGRHKPENIVIEMARENQTTQKGQKNSRERMKRIEEGIKELGSQILKEHPVENTQLQNEKLYLYYLQNGRDMYVDQELDINRLSDYDVDHIVPQSFLKDDSIDNKVLTRSDKARGKSDNVPSEEVVKKMKNYWRQLLNAKLITQRKFDNLTKAERGGLSELDKAGFIKRQLVETRQITKHVAQILDSRMNTKYDENDKLIREVKVITLKSKLVSDFRKDFQFYKVREINNYHHAHDAYLNAVVGTALIKKYPKLESEFVYGDYKVYDVRKMIAKSEQEIGKATAKYFFYSNIMNFFKTEITLANGEIRKRPLIETNGETGEIVWDKGRDFATVRKVLSMPQVNIVKKTEVQTGGFSKESILPKRNSDKLIARKKDWDPKKYGGFDSPTVAYSVLVVAKVEKGKSKKLKSVKELLGITIMERSSFEKNPIDFLEAKGYKEVKKDLIIKLPKYSLFELENGRKRMLASAGELQKGNELALPSKYVNFLYLASHYEKLKGSPEDNEQKQLFVEQHKHYLDEIIEQISEFSKRVILADANLDKVLSAYNKHRDKPIREQAENIIHLFTLTNLGAPAAFKYFDTTIDRKRYTSTKEVLDATLIHQSITGLYETRIDLSQLGGDGGPAPGGSEAAAKGGTLGIEDEYRLHETSTEPDVSLGSTWLSDFPQAWAETGGMGLAVRQAPLIIPLKATSTPVSIQQYPMSHEARLGIKPHIQRLLDQGILVPCQSPWNTPLLPVKKPGTNDYRPVQDLREVNKRVEDIHPTVPNPYNLLSGLPPSHQWYTVLDLKDAFFCLRLHPTSQPLFAFEWRDPGMGISGQLTWTRLPQGFKNSPTLFNEALHRDLADFRIQHPDLILLQYVDDILLAATSELDCQQGTRALLQTLGDLGYRASAKKAQICQKQVKYLGYLLREGQRWLTEARKETVMGQPVPKTPRQLREFLGTAGFCRLWIPGFAEMAAPLYPLTKPGTLFSWGPDQQKAYQEIKQALLTAPALGLPDLTKPFELFVDEKQGYAKGVLTQKLGPWRRPVAYLSKKLDPVAAGWPPCLRMVAAIAVLTKDAGKLTMGQPLVILAPHAVEALVKQPPDRWLSNARMTHYQAMLLDTDRVQFGPVVALNPATLLPLPEEGAPHDCLEILAETHGTRPDLTDQPIPDADHTWYTDGSSFLQEGQRKAGAAVTTETEVIWAGALPAGTSAQRAELIALTQALKMAEGKRLNVYTDSRYAFATAHIHGEIYRRRGWLTSEGREIKNKSEILALLKALFLPKRLSIIHCLGHQKGDSAEARGNRLADQAAREAAIKTPPDTSTLLAGKRTADGSEFEKRTADGSEFESPKKKAKVE

SEQ ID NO: 7247 - protein, 2096 aa, synthetic construct
MPAAKRVKLDGGDKKYSIGLDIGTNSVGWAVITDEYKVPSKKFKVLGNTDRHSIKKNLIGALLFDSGETAEATRLKRTARRRYTRRKNRICYLQEIFSNEMAKVDDSFFHRLEESFLVEEDKKHERHPIFGNIVDEVAYHEKYPTIYHLRKKLVDSTDKADLRLIYLALAHMIKFRGHFLIEGDLNPDNSDVDKLFIQLVQTYNQLFEENPINASGVDAKAILSARLSKSRRLENLIAQLPGEKKNGLFGNLIALSLGLTPNFKSNFDLAEDAKLQLSKDTYDDDLDNLLAQIGDQYADLFLAAKNLSDAILLSDILRVNTEITKAPLSASMIKRYDEHHQDLTLLKALVRQQLPEKYKEIFFDQSKNGYAGYIDGGASQEEFYKFIKPILEKMDGTEELLVKLNREDLLRKQRTFDNGSIPHQIHLGELHAILRRQEDFYPFLKDNREKIEKILTFRIPYYVGPLARGNSRFAWMTRKSEETITPWNFEEVVDKGASAQSFIERMTNFDKNLPNEKVLPKHSLLYEYFTVYNELTKVKYVTEGMRKPAFLSGEQKKAIVDLLFKTNRKVTVKQLKEDYFKKIECFDSVEISGVEDRFNASLGTYHDLLKIIKDKDFLDNEENEDILEDIVLTLTLFEDREMIEERLKTYAHLFDDKVMKQLKRRRYTGWGRLSRKLINGIRDKQSGKTILDFLKSDGFANRNFMQLIHDDSLTFKEDIQKAQVSGQGDSLHEHIANLAGSPAIKKGILQTVKVVDELVKVMGRHKPENIVIEMARENQTTQKGQKNSRERMKRIEEGIKELGSQILKEHPVENTQLQNEKLYLYYLQNGRDMYVDQELDINRLSDYDVDHIVPQSFLKDDSIDNKVLTRSDKARGKSDNVPSEEVVKKMKNYWRQLLNAKLITQRKFDNLTKAERGGLSELDKAGFIKRQLVETRQITKHVAQILDSRMNTKYDENDKLIREVKVITLKSKLVSDFRKDFQFYKVREINNYHHAHDAYLNAVVGTALIKKYPKLESEFVYGDYKVYDVRKMIAKSEQEIGKATAKYFFYSNIMNFFKTEITLANGEIRKRPLIETNGETGEIVWDKGRDFATVRKVLSMPQVNIVKKTEVQTGGFSKESILPKRNSDKLIARKKDWDPKKYGGFDSPTVAYSVLVVAKVEKGKSKKLKSVKELLGITIMERSSFEKNPIDFLEAKGYKEVKKDLIIKLPKYSLFELENGRKRMLASAGELQKGNELALPSKYVNFLYLASHYEKLKGSPEDNEQKQLFVEQHKHYLDEIIEQISEFSKRVILADANLDKVLSAYNKHRDKPIREQAENIIHLFTLTNLGAPAAFKYFDTTIDRKRYTSTKEVLDATLIHQSITGLYETRIDLSQLGGDGGPAPGGSEAAAKGGTLNIEDEYRLHETSKGPDVPLGSTWLSDFPQAWAETGGMGLAVRQAPLIIPLKATSTPVSIKQYPMSQEARLGIKPHIQRLLDQGILVPCQSPWNTPLLPVKKPGTNDYRPVQDLREVNKRVEDIHPTVPNPYNLLSGLPPSHQWYTVLDLKDAFFCLRLHPTSQSLFAFEWRDPEMGISGQLTWTRLPQGFKNSPTLFDEALHRDLADFRIQHPDLILLQYVDDLLLAATSELDCQQGTRALLQTLGDLGYRASAKKAQICQKQVKYLGYLLKEGQRWLTEARKETVMGQPTPKTPRQLREFLGTAGFCRLWIPGFAEMAAPLYPLTKTGTLFEWGPDQQKAYQEIKQALLTAPALGLPDLTKPFELFVDEKQGYAKGVLTQKLGPWRRPVAYLSKKLDPVAAGWPPCLRMVAAIAVLTKDAGKLTMGQPLVILAPHAVEALVKQPPDRWLSNARMTHYQALLLDTDRVQFGPIVALNPATLLPLPEEGLQHDCLDILAEAHGTRPDLTDQPLPDADHTWYTDGSSFLQEGQRKAGAAVTTETEVVWAKALPAGTSAQRAELIALTQALKMAEGKKLNVYTDSRYAFATAHIHGEIYRRRGLLTSEGKEIKNKDEILALLKALFLPKRLSIIHCPGHQKGNRAEARGNRMADQAAREVATRETPETSTLLAGKRTADGSEFEKRTADGSEFESPKKKAKVE

SEQ ID NO: 7248 - protein, 2090 aa, synthetic construct
MPAAKRVKLDGGDKKYSIGLDIGTNSVGWAVITDEYKVPSKKFKVLGNTDRHSIKKNLIGALLFDSGETAEATRLKRTARRRYTRRKNRICYLQEIFSNEMAKVDDSFFHRLEESFLVEEDKKHERHPIFGNIVDEVAYHEKYPTIYHLRKKLVDSTDKADLRLIYLALAHMIKFRGHFLIEGDLNPDNSDVDKLFIQLVQTYNQLFEENPINASGVDAKAILSARLSKSRRLENLIAQLPGEKKNGLFGNLIALSLGLTPNFKSNFDLAEDAKLQLSKDTYDDDLDNLLAQIGDQYADLFLAAKNLSDAILLSDILRVNTEITKAPLSASMIKRYDEHHQDLTLLKALVRQQLPEKYKEIFFDQSKNGYAGYIDGGASQEEFYKFIKPILEKMDGTEELLVKLNREDLLRKQRTFDNGSIPHQIHLGELHAILRRQEDFYPFLKDNREKIEKILTFRIPYYVGPLARGNSRFAWMTRKSEETITPWNFEEVVDKGASAQSFIERMTNFDKNLPNEKVLPKHSLLYEYFTVYNELTKVKYVTEGMRKPAFLSGEQKKAIVDLLFKTNRKVTVKQLKEDYFKKIECFDSVEISGVEDRFNASLGTYHDLLKIIKDKDFLDNEENEDILEDIVLTLTLFEDREMIEERLKTYAHLFDDKVMKQLKRRRYTGWGRLSRKLINGIRDKQSGKTILDFLKSDGFANRNFMQLIHDDSLTFKEDIQKAQVSGQGDSLHEHIANLAGSPAIKKGILQTVKVVDELVKVMGRHKPENIVIEMARENQTTQKGQKNSRERMKRIEEGIKELGSQILKEHPVENTQLQNEKLYLYYLQNGRDMYVDQELDINRLSDYDVDHIVPQSFLKDDSIDNKVLTRSDKARGKSDNVPSEEVVKKMKNYWRQLLNAKLITQRKFDNLTKAERGGLSELDKAGFIKRQLVETRQITKHVAQILDSRMNTKYDENDKLIREVKVITLKSKLVSDFRKDFQFYKVREINNYHHAHDAYLNAVVGTALIKKYPKLESEFVYGDYKVYDVRKMIAKSEQEIGKATAKYFFYSNIMNFFKTEITLANGEIRKRPLIETNGETGEIVWDKGRDFATVRKVLSMPQVNIVKKTEVQTGGFSKESILPKRNSDKLIARKKDWDPKKYGGFDSPTVAYSVLVVAKVEKGKSKKLKSVKELLGITIMERSSFEKNPIDFLEAKGYKEVKKDLIIKLPKYSLFELENGRKRMLASAGELQKGNELALPSKYVNFLYLASHYEKLKGSPEDNEQKQLFVEQHKHYLDEIIEQISEFSKRVILADANLDKVLSAYNKHRDKPIREQAENIIHLFTLTNLGAPAAFKYFDTTIDRKRYTSTKEVLDATLIHQSITGLYETRIDLSQLGGDGGPAPGGSEAAAKGGTLQLDDEYRLYSPLVKPDQNIQFWLEQFPQAWAETAGMGLAKQVPPQVIQLKASATPVSVRQYPLSKEAQEGIRPHVQRLIQQGILVPVQSPWNTPLLPVRKPGTNDYRPVQDLREVNKRVQDIHPTVPNPYNLLCALPPQRSWYTVLDLKDAFFCLRLHPTSQPLFAFEWRDPGTGRTGQLTWTRLPQGFKNSPTIFDEALHRDLANFRIQHPQVTLLQYVDDLLLAGATKQDCLEGTKALLLELSDLGYRASAKKAQICRREVTYLGYSLRDGQRWLTEARKKTVVQIPAPTTAKQVREFLGTAGFCRLWIPGFATLAAPLYPLTKEKGEFSWAPEHQKAFDAIKKALLSAPALALPDVTKPFTLYVDERKGVARGVLTQTLGPWRRPVAYLSKKLDPVASGWPVCLKAIAAVAILVKDADKLTLGQNITVIAPHALENIVRQPPDRWMTNARMTHYQSLLLTERVTFAPPAALNPATLLPEETDEPVTHDCHQLLIEETGVRKDLTDIPLTGEVLTWFTDGSSYVVEGKRMAGAAVVDGTRTIWASSLPEGTSAQKAELMALTQALRLAEGKSINIYTDSRYAFATAHVHGAIYKQRGLLTSAGREIKNKEEILSLLEALHLPKRLAIIHCPGHQKAKDPISRGNQMADRVAKQAAQGVNLLAGKRTADGSEFEKRTADGSEFESPKKKAKVE

SEQ ID NO: 7249 - protein, 2176 aa, synthetic construct
MPAAKRVKLDGGDKKYSIGLDIGTNSVGWAVITDEYKVPSKKFKVLGNTDRHSIKKNLIGALLFDSGETAEATRLKRTARRRYTRRKNRICYLQEIFSNEMAKVDDSFFHRLEESFLVEEDKKHERHPIFGNIVDEVAYHEKYPTIYHLRKKLVDSTDKADLRLIYLALAHMIKFRGHFLIEGDLNPDNSDVDKLFIQLVQTYNQLFEENPINASGVDAKAILSARLSKSRRLENLIAQLPGEKKNGLFGNLIALSLGLTPNFKSNFDLAEDAKLQLSKDTYDDDLDNLLAQIGDQYADLFLAAKNLSDAILLSDILRVNTEITKAPLSASMIKRYDEHHQDLTLLKALVRQQLPEKYKEIFFDQSKNGYAGYIDGGASQEEFYKFIKPILEKMDGTEELLVKLNREDLLRKQRTFDNGSIPHQIHLGELHAILRRQEDFYPFLKDNREKIEKILTFRIPYYVGPLARGNSRFAWMTRKSEETITPWNFEEVVDKGASAQSFIERMTNFDKNLPNEKVLPKHSLLYEYFTVYNELTKVKYVTEGMRKPAFLSGEQKKAIVDLLFKTNRKVTVKQLKEDYFKKIECFDSVEISGVEDRFNASLGTYHDLLKIIKDKDFLDNEENEDILEDIVLTLTLFEDREMIEERLKTYAHLFDDKVMKQLKRRRYTGWGRLSRKLINGIRDKQSGKTILDFLKSDGFANRNFMQLIHDDSLTFKEDIQKAQVSGQGDSLHEHIANLAGSPAIKKGILQTVKVVDELVKVMGRHKPENIVIEMARENQTTQKGQKNSRERMKRIEEGIKELGSQILKEHPVENTQLQNEKLYLYYLQNGRDMYVDQELDINRLSDYDVDHIVPQSFLKDDSIDNKVLTRSDKARGKSDNVPSEEVVKKMKNYWRQLLNAKLITQRKFDNLTKAERGGLSELDKAGFIKRQLVETRQITKHVAQILDSRMNTKYDENDKLIREVKVITLKSKLVSDFRKDFQFYKVREINNYHHAHDAYLNAVVGTALIKKYPKLESEFVYGDYKVYDVRKMIAKSEQEIGKATAKYFFYSNIMNFFKTEITLANGEIRKRPLIETNGETGEIVWDKGRDFATVRKVLSMPQVNIVKKTEVQTGGFSKESILPKRNSDKLIARKKDWDPKKYGGFDSPTVAYSVLVVAKVEKGKSKKLKSVKELLGITIMERSSFEKNPIDFLEAKGYKEVKKDLIIKLPKYSLFELENGRKRMLASAGELQKGNELALPSKYVNFLYLASHYEKLKGSPEDNEQKQLFVEQHKHYLDEIIEQISEFSKRVILADANLDKVLSAYNKHRDKPIREQAENIIHLFTLTNLGAPAAFKYFDTTIDRKRYTSTKEVLDATLIHQSITGLYETRIDLSQLGGDGGPAPGGSEAAAKGGMDPLQLLQPLEAEIKGTKLKAHWNSGATITCVPEAFLEDERPIQTMLIKTIHGEKQQDVYYLTFKVQGRKVEAEVLASPYDYILLNPSDVPWLMKKPLQLTVLVPLHEYQERLLQQTALPKEQKELLQKLFLKYDALWQHWENQVGHRRIKPHNIATGTLAPRPQKQYPINPKAKPSIQIVIDDLLKQGVLIQQNSTMNTPVYPVPKPDGKWRMVLDYREVNKTIPLIAAQNQHSAGILSSIYRGKYKTTLDLTNGFWAHPITPESYWLTAFTWQGKQYCWTRLPQGFLNSPALFTADVVDLLKEIPNVQAYVDDIYISHDDPQEHLEQLEKIFSILLNAGYVVSLKKSEIAQREVEFLGFNITKEGRGLTDTFKQKLLNITPPKDLKQLQSILGLLNFARNFIPNYSELVKPLYTIVANANGKFISWTEDNSNQLQHIISVLNQADNLEERNPETRLIIKVNSSPSAGYIRYYNEGSKRPIMYVNYIFSKAEAKFTQTEKLLTTMHKGLIKAMDLAMGQEILVYSPIVSMTKIQRTPLPERKALPVRWITWMTYLEDPRIQFHYDKSLPELQQIPNVTEDVIAKTKHPSEFAMVFYTDGSAIKHPDVNKSHSAGMGIAQVQFIPEYKIVHQWSIPLGDHTAQLAEIAAVEFACKKALKISGPVLIVTDSFYVAESANKELPYWKSNGFLNNKKKPLRHVSKWKSIAECLQLKPDIIIMHEKGHQQPMTTLHTEGNNLADKLATQGSYVVHAGKRTADGSEFEKRTADGSEFESPKKKAKVE

SEQ ID NO: 7250 - protein, 2094 aa, synthetic construct
MPAAKRVKLDGGDKKYSIGLDIGTNSVGWAVITDEYKVPSKKFKVLGNTDRHSIKKNLIGALLFDSGETAEATRLKRTARRRYTRRKNRICYLQEIFSNEMAKVDDSFFHRLEESFLVEEDKKHERHPIFGNIVDEVAYHEKYPTIYHLRKKLVDSTDKADLRLIYLALAHMIKFRGHFLIEGDLNPDNSDVDKLFIQLVQTYNQLFEENPINASGVDAKAILSARLSKSRRLENLIAQLPGEKKNGLFGNLIALSLGLTPNFKSNFDLAEDAKLQLSKDTYDDDLDNLLAQIGDQYADLFLAAKNLSDAILLSDILRVNTEITKAPLSASMIKRYDEHHQDLTLLKALVRQQLPEKYKEIFFDQSKNGYAGYIDGGASQEEFYKFIKPILEKMDGTEELLVKLNREDLLRKQRTFDNGSIPHQIHLGELHAILRRQEDFYPFLKDNREKIEKILTFRIPYYVGPLARGNSRFAWMTRKSEETITPWNFEEVVDKGASAQSFIERMTNFDKNLPNEKVLPKHSLLYEYFTVYNELTKVKYVTEGMRKPAFLSGEQKKAIVDLLFKTNRKVTVKQLKEDYFKKIECFDSVEISGVEDRFNASLGTYHDLLKIIKDKDFLDNEENEDILEDIVLTLTLFEDREMIEERLKTYAHLFDDKVMKQLKRRRYTGWGRLSRKLINGIRDKQSGKTILDFLKSDGFANRNFMQLIHDDSLTFKEDIQKAQVSGQGDSLHEHIANLAGSPAIKKGILQTVKVVDELVKVMGRHKPENIVIEMARENQTTQKGQKNSRERMKRIEEGIKELGSQILKEHPVENTQLQNEKLYLYYLQNGRDMYVDQELDINRLSDYDVDHIVPQSFLKDDSIDNKVLTRSDKARGKSDNVPSEEVVKKMKNYWRQLLNAKLITQRKFDNLTKAERGGLSELDKAGFIKRQLVETRQITKHVAQILDSRMNTKYDENDKLIREVKVITLKSKLVSDFRKDFQFYKVREINNYHHAHDAYLNAVVGTALIKKYPKLESEFVYGDYKVYDVRKMIAKSEQEIGKATAKYFFYSNIMNFFKTEITLANGEIRKRPLIETNGETGEIVWDKGRDFATVRKVLSMPQVNIVKKTEVQTGGFSKESILPKRNSDKLIARKKDWDPKKYGGFDSPTVAYSVLVVAKVEKGKSKKLKSVKELLGITIMERSSFEKNPIDFLEAKGYKEVKKDLIIKLPKYSLFELENGRKRMLASAGELQKGNELALPSKYVNFLYLASHYEKLKGSPEDNEQKQLFVEQHKHYLDEIIEQISEFSKRVILADANLDKVLSAYNKHRDKPIREQAENIIHLFTLTNLGAPAAFKYFDTTIDRKRYTSTKEVLDATLIHQSITGLYETRIDLSQLGGDGGPAPGGSEAAAKGGVLNLEEEYRLHEKPVPSSIDPSWLQLFPTVWAERAGMGLANQVPPVVVELRSGASPVAVRQYPMSKEAREGIRPHIQRFLDLGVLVPCQSPWNTPLLPVKKPGTNDYRPVQDLREINKRVQDIHPTVPNPYNLLSSLPPSHTWYSVLDLKDAFFCLKLHPNSQPLFAFEWRDPEKGNTGQLTWTRLPQGFKNSPTLFNEALHRDLAPFRALNPQVVLLQYVDDLLVAAPTYRDCKEGTQKLLQELSKLGYRVSAKKAQLCQKEVTYLGYLLKEGKRWLTPARKATVMKIPPPTTPRQVREFLGKAGFCRLFIPGFASLAAPLYPLTKPSIPFIWTEEHQKAFDRIKEALLSAPALALPDLTKPFTLYVDERAGVARGVLTQTLGPWRRPVAYLSKKLDPVASGWPTCLKAVAAVALLLKDADKLTLGQNVTVIASHSLESIVRQPPDRWMTNARMTHYQSLLLNERVSFAPPAVLNPATLLPVESEATPVHRCSEILAEETGTRRDLKDQPLPGVPAWYTDGSSFIAEGKRRAGAAIVDGKRTVWASSLPEGTSAQKAELVALTQALRLAEGKDINIYTDSRYAFATAHIHGAIYKQRGWLTSAGKDIKNKEEILALLEAIHLPKRVAIIHCPGHQKGNDPVATGNRRADEAAKQAALSTRVLAETTKPAGKRTADGSEFEKRTADGSEFESPKKKAKVE

SEQ ID NO: 7251 - protein, 2096 aa, synthetic construct
MPAAKRVKLDGGDKKYSIGLDIGTNSVGWAVITDEYKVPSKKFKVLGNTDRHSIKKNLIGALLFDSGETAEATRLKRTARRRYTRRKNRICYLQEIFSNEMAKVDDSFFHRLEESFLVEEDKKHERHPIFGNIVDEVAYHEKYPTIYHLRKKLVDSTDKADLRLIYLALAHMIKFRGHFLIEGDLNPDNSDVDKLFIQLVQTYNQLFEENPINASGVDAKAILSARLSKSRRLENLIAQLPGEKKNGLFGNLIALSLGLTPNFKSNFDLAEDAKLQLSKDTYDDDLDNLLAQIGDQYADLFLAAKNLSDAILLSDILRVNTEITKAPLSASMIKRYDEHHQDLTLLKALVRQQLPEKYKEIFFDQSKNGYAGYIDGGASQEEFYKFIKPILEKMDGTEELLVKLNREDLLRKQRTFDNGSIPHQIHLGELHAILRRQEDFYPFLKDNREKIEKILTFRIPYYVGPLARGNSRFAWMTRKSEETITPWNFEEVVDKGASAQSFIERMTNFDKNLPNEKVLPKHSLLYEYFTVYNELTKVKYVTEGMRKPAFLSGEQKKAIVDLLFKTNRKVTVKQLKEDYFKKIECFDSVEISGVEDRFNASLGTYHDLLKIIKDKDFLDNEENEDILEDIVLTLTLFEDREMIEERLKTYAHLFDDKVMKQLKRRRYTGWGRLSRKLINGIRDKQSGKTILDFLKSDGFANRNFMQLIHDDSLTFKEDIQKAQVSGQGDSLHEHIANLAGSPAIKKGILQTVKVVDELVKVMGRHKPENIVIEMARENQTTQKGQKNSRERMKRIEEGIKELGSQILKEHPVENTQLQNEKLYLYYLQNGRDMYVDQELDINRLSDYDVDHIVPQSFLKDDSIDNKVLTRSDKARGKSDNVPSEEVVKKMKNYWRQLLNAKLITQRKFDNLTKAERGGLSELDKAGFIKRQLVETRQITKHVAQILDSRMNTKYDENDKLIREVKVITLKSKLVSDFRKDFQFYKVREINNYHHAHDAYLNAVVGTALIKKYPKLESEFVYGDYKVYDVRKMIAKSEQEIGKATAKYFFYSNIMNFFKTEITLANGEIRKRPLIETNGETGEIVWDKGRDFATVRKVLSMPQVNIVKKTEVQTGGFSKESILPKRNSDKLIARKKDWDPKKYGGFDSPTVAYSVLVVAKVEKGKSKKLKSVKELLGITIMERSSFEKNPIDFLEAKGYKEVKKDLIIKLPKYSLFELENGRKRMLASAGELQKGNELALPSKYVNFLYLASHYEKLKGSPEDNEQKQLFVEQHKHYLDEIIEQISEFSKRVILADANLDKVLSAYNKHRDKPIREQAENIIHLFTLTNLGAPAAFKYFDTTIDRKRYTSTKEVLDATLIHQSITGLYETRIDLSQLGGDGGPAPGGSEAAAKGGTLNIEDEYRLHETSKEPDVPLGSTWLSDFPQAWAETGGMGLAVRQAPLIIPLKATSTPVSIKQYPMSQEARLGIKPHIQRLLDQGILVPCQSPWNTPLLPVKKPGTNDYRPVQDLREVNKRVEDIHPTVPNPYNLLSGLPPSHQWYTVLDLKDAFFCLRLHPTSQPLFAFEWRDPEMGISGQLTWTRLPQGFKNSPTLFDEALHRDLADFRIQHPDLILLQYVDDLLLAATSEQDCQRGTRALLQTLGNLGYRASAKKAQICQKQVKYLGYLLKEGQRWLTEARKETVMGQPTPKTPRQLREFLGTAGFCRLWIPGFAEMAAPLYPLTKTGTLFNWGPDQQKAYQEIKQALLTAPALGLPDLTKPFELFVDEKQGYAKGVLTQKLGPWRRPVAYLSKKLDPVAAGWPPCLRMVAAIAVLTKDAGKLTMGQPLVILAPHAVEALVKQPPDRWLSNARMTHYQAMLLDTDRVQFGPVVALNPATLLPLPEKEAPHDCLEILAETHGTRPDLTDQPIPDADYTWYTDGSSFLQEGQRRAGAAVTTETEVIWARALPAGTSAQRAELIALTQALKMAEGKKLNVYTDSRYAFATAHVHGEIYRRRGLLTSEGREIKNKNEILALLKALFLPKRLSIIHCPGHQKGNSAEARGNRMADQAAREAAMKAVLETSTLLAGKRTADGSEFEKRTADGSEFESPKKKAKVE

SEQ ID NO: 7252 - protein, 2096 aa, synthetic construct
MPAAKRVKLDGGDKKYSIGLDIGTNSVGWAVITDEYKVPSKKFKVLGNTDRHSIKKNLIGALLFDSGETAEATRLKRTARRRYTRRKNRICYLQEIFSNEMAKVDDSFFHRLEESFLVEEDKKHERHPIFGNIVDEVAYHEKYPTIYHLRKKLVDSTDKADLRLIYLALAHMIKFRGHFLIEGDLNPDNSDVDKLFIQLVQTYNQLFEENPINASGVDAKAILSARLSKSRRLENLIAQLPGEKKNGLFGNLIALSLGLTPNFKSNFDLAEDAKLQLSKDTYDDDLDNLLAQIGDQYADLFLAAKNLSDAILLSDILRVNTEITKAPLSASMIKRYDEHHQDLTLLKALVRQQLPEKYKEIFFDQSKNGYAGYIDGGASQEEFYKFIKPILEKMDGTEELLVKLNREDLLRKQRTFDNGSIPHQIHLGELHAILRRQEDFYPFLKDNREKIEKILTFRIPYYVGPLARGNSRFAWMTRKSEETITPWNFEEVVDKGASAQSFIERMTNFDKNLPNEKVLPKHSLLYEYFTVYNELTKVKYVTEGMRKPAFLSGEQKKAIVDLLFKTNRKVTVKQLKEDYFKKIECFDSVEISGVEDRFNASLGTYHDLLKIIKDKDFLDNEENEDILEDIVLTLTLFEDREMIEERLKTYAHLFDDKVMKQLKRRRYTGWGRLSRKLINGIRDKQSGKTILDFLKSDGFANRNFMQLIHDDSLTFKEDIQKAQVSGQGDSLHEHIANLAGSPAIKKGILQTVKVVDELVKVMGRHKPENIVIEMARENQTTQKGQKNSRERMKRIEEGIKELGSQILKEHPVENTQLQNEKLYLYYLQNGRDMYVDQELDINRLSDYDVDHIVPQSFLKDDSIDNKVLTRSDKARGKSDNVPSEEVVKKMKNYWRQLLNAKLITQRKFDNLTKAERGGLSELDKAGFIKRQLVETRQITKHVAQILDSRMNTKYDENDKLIREVKVITLKSKLVSDFRKDFQFYKVREINNYHHAHDAYLNAVVGTALIKKYPKLESEFVYGDYKVYDVRKMIAKSEQEIGKATAKYFFYSNIMNFFKTEITLANGEIRKRPLIETNGETGEIVWDKGRDFATVRKVLSMPQVNIVKKTEVQTGGFSKESILPKRNSDKLIARKKDWDPKKYGGFDSPTVAYSVLVVAKVEKGKSKKLKSVKELLGITIMERSSFEKNPIDFLEAKGYKEVKKDLIIKLPKYSLFELENGRKRMLASAGELQKGNELALPSKYVNFLYLASHYEKLKGSPEDNEQKQLFVEQHKHYLDEIIEQISEFSKRVILADANLDKVLSAYNKHRDKPIREQAENIIHLFTLTNLGAPAAFKYFDTTIDRKRYTSTKEVLDATLIHQSITGLYETRIDLSQLGGDGGPAPGGSEAAAKGGTLNIEDEYRLHETSKEPDVPLGSTWLSDFPQAWAETGGMGLAVRQAPLIIPLKATSTPVSIKQYPMSQEARLGIKPHIQRLLDQGILVPCQSPWNTPLLPVKKPGTNDYRPVQDLREVNKRVEDIHPTVPNPYNLLSGLPPSHQWYTVLDLKDAFFCLRLHPTSQPLFAFEWRDPEMGISGQLTWTRLPQGFKNSPTLFNEALHRDLADFRIQHPDLILLQYVDDLLLAATSEQDCQRGTRALLQTLGNLGYRASAKKAQICQKQVKYLGYLLKEGQRWLTEARKETVMGQPTPKTPRQLREFLGTAGFCRLWIPGFAEMAAPLYPLTKPGTLFNWGPDQQKAYQEIKQALLTAPALGLPDLTKPFELFVDEKQGYAKGVLTQKLGPWRRPVAYLSKKLDPVAAGWPPCLRMVAAIAVLTKDAGKLTMGQPLVILAPHAVEALVKQPPDRWLSNARMTHYQAMLLDTDRVQFGPVVALNPATLLPLPEKEAPHDCLEILAETHGTRPDLTDQPIPDADYTWYTDGSSFLQEGQRRAGAAVTTETEVIWARALPAGTSAQRAELIALTQALKMAEGKKLNVYTDSRYAFATAHVHGEIYRRRGWLTSEGREIKNKNEILALLKALFLPKRLSIIHCPGHQKGNSAEARGNRMADQAAREAAMKAVLETSTLLAGKRTADGSEFEKRTADGSEFESPKKKAKVE

SEQ ID NO: 7253 - protein, 2098 aa, synthetic construct
MPAAKRVKLDGGDKKYSIGLDIGTNSVGWAVITDEYKVPSKKFKVLGNTDRHSIKKNLIGALLFDSGETAEATRLKRTARRRYTRRKNRICYLQEIFSNEMAKVDDSFFHRLEESFLVEEDKKHERHPIFGNIVDEVAYHEKYPTIYHLRKKLVDSTDKADLRLIYLALAHMIKFRGHFLIEGDLNPDNSDVDKLFIQLVQTYNQLFEENPINASGVDAKAILSARLSKSRRLENLIAQLPGEKKNGLFGNLIALSLGLTPNFKSNFDLAEDAKLQLSKDTYDDDLDNLLAQIGDQYADLFLAAKNLSDAILLSDILRVNTEITKAPLSASMIKRYDEHHQDLTLLKALVRQQLPEKYKEIFFDQSKNGYAGYIDGGASQEEFYKFIKPILEKMDGTEELLVKLNREDLLRKQRTFDNGSIPHQIHLGELHAILRRQEDFYPFLKDNREKIEKILTFRIPYYVGPLARGNSRFAWMTRKSEETITPWNFEEVVDKGASAQSFIERMTNFDKNLPNEKVLPKHSLLYEYFTVYNELTKVKYVTEGMRKPAFLSGEQKKAIVDLLFKTNRKVTVKQLKEDYFKKIECFDSVEISGVEDRFNASLGTYHDLLKIIKDKDFLDNEENEDILEDIVLTLTLFEDREMIEERLKTYAHLFDDKVMKQLKRRRYTGWGRLSRKLINGIRDKQSGKTILDFLKSDGFANRNFMQLIHDDSLTFKEDIQKAQVSGQGDSLHEHIANLAGSPAIKKGILQTVKVVDELVKVMGRHKPENIVIEMARENQTTQKGQKNSRERMKRIEEGIKELGSQILKEHPVENTQLQNEKLYLYYLQNGRDMYVDQELDINRLSDYDVDHIVPQSFLKDDSIDNKVLTRSDKARGKSDNVPSEEVVKKMKNYWRQLLNAKLITQRKFDNLTKAERGGLSELDKAGFIKRQLVETRQITKHVAQILDSRMNTKYDENDKLIREVKVITLKSKLVSDFRKDFQFYKVREINNYHHAHDAYLNAVVGTALIKKYPKLESEFVYGDYKVYDVRKMIAKSEQEIGKATAKYFFYSNIMNFFKTEITLANGEIRKRPLIETNGETGEIVWDKGRDFATVRKVLSMPQVNIVKKTEVQTGGFSKESILPKRNSDKLIARKKDWDPKKYGGFDSPTVAYSVLVVAKVEKGKSKKLKSVKELLGITIMERSSFEKNPIDFLEAKGYKEVKKDLIIKLPKYSLFELENGRKRMLASAGELQKGNELALPSKYVNFLYLASHYEKLKGSPEDNEQKQLFVEQHKHYLDEIIEQISEFSKRVILADANLDKVLSAYNKHRDKPIREQAENIIHLFTLTNLGAPAAFKYFDTTIDRKRYTSTKEVLDATLIHQSITGLYETRIDLSQLGGDGGPAPEAAAKGGSGGTAPLEEEYRLFLEAPIQNVTLLEQWKREIPKVWAEINPPGLASTQAPIHVQLLSTALPVRVRQYPITLEAKRSLRETIRKFRAAGILRPVHSPWNTPLLPVRKSGTSEYRMVQDLREVNKRVETIHPTVPNPYTLLSLLPPDRIWYSVLDLKDAFFCIPLAPESQLIFAFEWADAEEGESGQLTWTRLPQGFKNSPTLFDEALNRDLQGFRLDHPSVSLLQYVDDLLIAADTQAACLSATRDLLMTLAELGYRVSGKKAQLCQEEVTYLGFKIHKGSRSLSNSRTQAILQIPVPKTKRQVREFLGTIGYCRLWIPGFAELAQPLYAATRGGNDPLVWGEKEEEAFQSLKLALTQPPALALPSLDKPFQLFVEETSGAAKGVLTQALGPWKRPVAYLSKRLDPVAAGWPRCLRAIAAAALLTREASKLTFGQDIEITSSHNLESLLRSPPDKWLTNARITQYQVLLLDPPRVRFKQTAALNPATLLPETDDTLPIHHCLDTLDSLTSTRPDLTDQPLAQAEATLFTDGSSYIRDGKRYAGAAVVTLDSVIWAEPLPIGTSAQKAELIALTKALEWSKDKSVNIYTDSRYAFATLHVHGMIYRERGLLTAGGKAIKNAPEILALLTAVWLPKRVAVMHCKGHQKDDAPTSTGNRRADEVAREVAIRPLSTQATISAGKRTADGSEFEKRTADGSEFESPKKKAKVE

SEQ ID NO: 7254 - protein, 2173 aa, synthetic construct
MPAAKRVKLDGGDKKYSIGLDIGTNSVGWAVITDEYKVPSKKFKVLGNTDRHSIKKNLIGALLFDSGETAEATRLKRTARRRYTRRKNRICYLQEIFSNEMAKVDDSFFHRLEESFLVEEDKKHERHPIFGNIVDEVAYHEKYPTIYHLRKKLVDSTDKADLRLIYLALAHMIKFRGHFLIEGDLNPDNSDVDKLFIQLVQTYNQLFEENPINASGVDAKAILSARLSKSRRLENLIAQLPGEKKNGLFGNLIALSLGLTPNFKSNFDLAEDAKLQLSKDTYDDDLDNLLAQIGDQYADLFLAAKNLSDAILLSDILRVNTEITKAPLSASMIKRYDEHHQDLTLLKALVRQQLPEKYKEIFFDQSKNGYAGYIDGGASQEEFYKFIKPILEKMDGTEELLVKLNREDLLRKQRTFDNGSIPHQIHLGELHAILRRQEDFYPFLKDNREKIEKILTFRIPYYVGPLARGNSRFAWMTRKSEETITPWNFEEVVDKGASAQSFIERMTNFDKNLPNEKVLPKHSLLYEYFTVYNELTKVKYVTEGMRKPAFLSGEQKKAIVDLLFKTNRKVTVKQLKEDYFKKIECFDSVEISGVEDRFNASLGTYHDLLKIIKDKDFLDNEENEDILEDIVLTLTLFEDREMIEERLKTYAHLFDDKVMKQLKRRRYTGWGRLSRKLINGIRDKQSGKTILDFLKSDGFANRNFMQLIHDDSLTFKEDIQKAQVSGQGDSLHEHIANLAGSPAIKKGILQTVKVVDELVKVMGRHKPENIVIEMARENQTTQKGQKNSRERMKRIEEGIKELGSQILKEHPVENTQLQNEKLYLYYLQNGRDMYVDQELDINRLSDYDVDHIVPQSFLKDDSIDNKVLTRSDKARGKSDNVPSEEVVKKMKNYWRQLLNAKLITQRKFDNLTKAERGGLSELDKAGFIKRQLVETRQITKHVAQILDSRMNTKYDENDKLIREVKVITLKSKLVSDFRKDFQFYKVREINNYHHAHDAYLNAVVGTALIKKYPKLESEFVYGDYKVYDVRKMIAKSEQEIGKATAKYFFYSNIMNFFKTEITLANGEIRKRPLIETNGETGEIVWDKGRDFATVRKVLSMPQVNIVKKTEVQTGGFSKESILPKRNSDKLIARKKDWDPKKYGGFDSPTVAYSVLVVAKVEKGKSKKLKSVKELLGITIMERSSFEKNPIDFLEAKGYKEVKKDLIIKLPKYSLFELENGRKRMLASAGELQKGNELALPSKYVNFLYLASHYEKLKGSPEDNEQKQLFVEQHKHYLDEIIEQISEFSKRVILADANLDKVLSAYNKHRDKPIREQAENIIHLFTLTNLGAPAAFKYFDTTIDRKRYTSTKEVLDATLIHQSITGLYETRIDLSQLGGDGGPAPEAAAKGGSGGMDLLKPLTVERKGVKIKGYWNSQADITCVPKDLLQGEEPVRQQNVTTIHGTQEGDVYYVNLKIDGRRINTEVIGTTLDYAIITPGDVPWILKKPLELTIKLDLEEQQGTLLNNSILSKKGKEELKQLFEKYSALWQSWENQVGHRRIRPHKIATGTVKPTPQKQYHINPKAKPDIQIVINDLLKQGVLIQKESTMNTPVYPVPKPNGRWRMVLDYRAVNKVTPLIAVQNQHSYGILGSLFKGRYKTTIDLSNGFWAHPIVPEDYWITAFTWQGKQYCWTVLPQGFLNSPGLFTGDVVDLLQGIPNVEVYVDDVYISHDSEKEHLEYLDILFNRLKEAGYIISLKKSNIANSIVDFLGFQITNEGRGLTDTFKEKLENITAPTTLKQLQSILGLLNFARNFIPDFTELIAPLYALIPKSTKNYVPWQIEHSTTLETLITKLNGAEYLQGRKGDKTLIMKVNASYTTGYIRYYNEGEKKPISYVSIVFSKTELKFTELEKLLTTVHKGLLKALDLSMGQNIHVYSPIVSMQNIQKTPQTAKKALASRWLSWLSYLEDPRIRFFYDPQMPALKDLPAVDTGKDNKKHPSNFQHIFYTDGSAITSPTKEGHLNAGMGIVYFINKDGNLQKQQEWSISLGNHTAQFAEIAAFEFALKKCLPLGGNILVVTDSNYVAKAYNEELDVWASNGFVNNRKKPLKHISKWKSVADLKRLRPDVVVTHEPGHQKLDSSPHAYGNNLADQLATQASFKVHAGKRTADGSEFEKRTADGSEFESPKKKAKVE

SEQ ID NO: 7255 - protein, 2087 aa, synthetic construct
MPAAKRVKLDGGDKKYSIGLDIGTNSVGWAVITDEYKVPSKKFKVLGNTDRHSIKKNLIGALLFDSGETAEATRLKRTARRRYTRRKNRICYLQEIFSNEMAKVDDSFFHRLEESFLVEEDKKHERHPIFGNIVDEVAYHEKYPTIYHLRKKLVDSTDKADLRLIYLALAHMIKFRGHFLIEGDLNPDNSDVDKLFIQLVQTYNQLFEENPINASGVDAKAILSARLSKSRRLENLIAQLPGEKKNGLFGNLIALSLGLTPNFKSNFDLAEDAKLQLSKDTYDDDLDNLLAQIGDQYADLFLAAKNLSDAILLSDILRVNTEITKAPLSASMIKRYDEHHQDLTLLKALVRQQLPEKYKEIFFDQSKNGYAGYIDGGASQEEFYKFIKPILEKMDGTEELLVKLNREDLLRKQRTFDNGSIPHQIHLGELHAILRRQEDFYPFLKDNREKIEKILTFRIPYYVGPLARGNSRFAWMTRKSEETITPWNFEEVVDKGASAQSFIERMTNFDKNLPNEKVLPKHSLLYEYFTVYNELTKVKYVTEGMRKPAFLSGEQKKAIVDLLFKTNRKVTVKQLKEDYFKKIECFDSVEISGVEDRFNASLGTYHDLLKIIKDKDFLDNEENEDILEDIVLTLTLFEDREMIEERLKTYAHLFDDKVMKQLKRRRYTGWGRLSRKLINGIRDKQSGKTILDFLKSDGFANRNFMQLIHDDSLTFKEDIQKAQVSGQGDSLHEHIANLAGSPAIKKGILQTVKVVDELVKVMGRHKPENIVIEMARENQTTQKGQKNSRERMKRIEEGIKELGSQILKEHPVENTQLQNEKLYLYYLQNGRDMYVDQELDINRLSDYDVDHIVPQSFLKDDSIDNKVLTRSDKARGKSDNVPSEEVVKKMKNYWRQLLNAKLITQRKFDNLTKAERGGLSELDKAGFIKRQLVETRQITKHVAQILDSRMNTKYDENDKLIREVKVITLKSKLVSDFRKDFQFYKVREINNYHHAHDAYLNAVVGTALIKKYPKLESEFVYGDYKVYDVRKMIAKSEQEIGKATAKYFFYSNIMNFFKTEITLANGEIRKRPLIETNGETGEIVWDKGRDFATVRKVLSMPQVNIVKKTEVQTGGFSKESILPKRNSDKLIARKKDWDPKKYGGFDSPTVAYSVLVVAKVEKGKSKKLKSVKELLGITIMERSSFEKNPIDFLEAKGYKEVKKDLIIKLPKYSLFELENGRKRMLASAGELQKGNELALPSKYVNFLYLASHYEKLKGSPEDNEQKQLFVEQHKHYLDEIIEQISEFSKRVILADANLDKVLSAYNKHRDKPIREQAENIIHLFTLTNLGAPAAFKYFDTTIDRKRYTSTKEVLDATLIHQSITGLYETRIDLSQLGGDGGPAPEAAAKGGSGGVPWILKKPLELTIKLDLEEQQGTLLNNSILSKKGKEELKQLFEKYSALWQSWENQVGHRRIRPHKIATGTVKPTPQKQYHINPKAKPDIQIVINDLLKQGVLIQKESTMNTPVYPVPKPNGRWRMVLDYRAVNKVTPLIAVQNQHSYGILGSLFKGRYKTTIDLSNGFWAHPIVPEDYWITAFTWQGKQYCWTVLPQGFLNSPGLFTGDVVDLLQGIPNVEVYVDDVYISHDSEKEHLEYLDILFNRLKEAGYIISLKKSNIANSIVDFLGFQITNEGRGLTDTFKEKLENITAPTTLKQLQSILGLLNFARNFIPDFTELIAPLYALIPKSTKNYVPWQIEHSTTLETLITKLNGAEYLQGRKGDKTLIMKVNASYTTGYIRYYNEGEKKPISYVSIVFSKTELKFTELEKLLTTVHKGLLKALDLSMGQNIHVYSPIVSMQNIQKTPQTAKKALASRWLSWLSYLEDPRIRFFYDPQMPALKDLPAVDTGKDNKKHPSNFQHIFYTDGSAITSPTKEGHLNAGMGIVYFINKDGNLQKQQEWSISLGNHTAQFAEIAAFEFALKKCLPLGGNILVVTDSNYVAKAYNEELDVWASNGFVNNRKKPLKHISKWKSVADLKRLRPDVVVTHEPGHQKLDSSPHAYGNNLADQLATQASFKVHAGKRTADGSEFEKRTADGSEFESPKKKAKVE

SEQ ID NO: 7256 - protein, 2095 aa, synthetic construct
MPAAKRVKLDGGDKKYSIGLDIGTNSVGWAVITDEYKVPSKKFKVLGNTDRHSIKKNLIGALLFDSGETAEATRLKRTARRRYTRRKNRICYLQEIFSNEMAKVDDSFFHRLEESFLVEEDKKHERHPIFGNIVDEVAYHEKYPTIYHLRKKLVDSTDKADLRLIYLALAHMIKFRGHFLIEGDLNPDNSDVDKLFIQLVQTYNQLFEENPINASGVDAKAILSARLSKSRRLENLIAQLPGEKKNGLFGNLIALSLGLTPNFKSNFDLAEDAKLQLSKDTYDDDLDNLLAQIGDQYADLFLAAKNLSDAILLSDILRVNTEITKAPLSASMIKRYDEHHQDLTLLKALVRQQLPEKYKEIFFDQSKNGYAGYIDGGASQEEFYKFIKPILEKMDGTEELLVKLNREDLLRKQRTFDNGSIPHQIHLGELHAILRRQEDFYPFLKDNREKIEKILTFRIPYYVGPLARGNSRFAWMTRKSEETITPWNFEEVVDKGASAQSFIERMTNFDKNLPNEKVLPKHSLLYEYFTVYNELTKVKYVTEGMRKPAFLSGEQKKAIVDLLFKTNRKVTVKQLKEDYFKKIECFDSVEISGVEDRFNASLGTYHDLLKIIKDKDFLDNEENEDILEDIVLTLTLFEDREMIEERLKTYAHLFDDKVMKQLKRRRYTGWGRLSRKLINGIRDKQSGKTILDFLKSDGFANRNFMQLIHDDSLTFKEDIQKAQVSGQGDSLHEHIANLAGSPAIKKGILQTVKVVDELVKVMGRHKPENIVIEMARENQTTQKGQKNSRERMKRIEEGIKELGSQILKEHPVENTQLQNEKLYLYYLQNGRDMYVDQELDINRLSDYDVDHIVPQSFLKDDSIDNKVLTRSDKARGKSDNVPSEEVVKKMKNYWRQLLNAKLITQRKFDNLTKAERGGLSELDKAGFIKRQLVETRQITKHVAQILDSRMNTKYDENDKLIREVKVITLKSKLVSDFRKDFQFYKVREINNYHHAHDAYLNAVVGTALIKKYPKLESEFVYGDYKVYDVRKMIAKSEQEIGKATAKYFFYSNIMNFFKTEITLANGEIRKRPLIETNGETGEIVWDKGRDFATVRKVLSMPQVNIVKKTEVQTGGFSKESILPKRNSDKLIARKKDWDPKKYGGFDSPTVAYSVLVVAKVEKGKSKKLKSVKELLGITIMERSSFEKNPIDFLEAKGYKEVKKDLIIKLPKYSLFELENGRKRMLASAGELQKGNELALPSKYVNFLYLASHYEKLKGSPEDNEQKQLFVEQHKHYLDEIIEQISEFSKRVILADANLDKVLSAYNKHRDKPIREQAENIIHLFTLTNLGAPAAFKYFDTTIDRKRYTSTKEVLDATLIHQSITGLYETRIDLSQLGGDGGPAPEAAAKGGSGGTLQLEEEYRLFEPESTQKQEMDIWLKNFPQAWAETGGMGTAHCQAPVLIQLKATATPISIRQYPMPHEAYQGIKPHIRRMLDQGILKPCQSPWNTPLLPVKKPGTEDYRPVQDLREVNKRVEDIHPTVPNPYNLLSTLPPSHPWYTVLDLKDAFFCLRLHSESQLLFAFEWRDPEIGLSGQLTWTRLPQGFKNSPTLFNEALHSDLADFRVRYPALVLLQYVDDLLLAAATRTECLEGTKALLETLGNKGYRASAKKAQICLQEVTYLGYSLKDGQRWLTKARKEAILSIPVPKNSRQVREFLGTAGYCRLWIPGFAELAAPLYPLTRPGTLFQWGTEQQLAFEDIKKALLSSPALGLPDITKPFELFIDENSGFAKGVLVQKLGPWKRPVAYLSKKLDTVASGWPPCLRMVAAIAILVKDAGKLTLGQPLTILTSHPVEALVRQPPNKWLSNARMTHYQAMLLDAERVHFGPTVSLNPATLLPLPSGGNHHDCLQILAETHGTRPDLTDQPLPDADLTWYTDGSSFIRNGEREAGAAVTTESEVIWAAPLPPGTSAQRAELIALTQALKMAEGKKLTVYTDSRYAFATTHVHGEIYRRRGWLTSEGKEIKNKNEILALLEALFLPKRLSIIHCPGHQKGDSPQAKGNRLADDTAKKAATETHSSLTVLPAGKRTADGSEFEKRTADGSEFESPKKKAKVE

SEQ ID NO: 7257 - protein, 2094 aa, synthetic construct
MPAAKRVKLDGGDKKYSIGLDIGTNSVGWAVITDEYKVPSKKFKVLGNTDRHSIKKNLIGALLFDSGETAEATRLKRTARRRYTRRKNRICYLQEIFSNEMAKVDDSFFHRLEESFLVEEDKKHERHPIFGNIVDEVAYHEKYPTIYHLRKKLVDSTDKADLRLIYLALAHMIKFRGHFLIEGDLNPDNSDVDKLFIQLVQTYNQLFEENPINASGVDAKAILSARLSKSRRLENLIAQLPGEKKNGLFGNLIALSLGLTPNFKSNFDLAEDAKLQLSKDTYDDDLDNLLAQIGDQYADLFLAAKNLSDAILLSDILRVNTEITKAPLSASMIKRYDEHHQDLTLLKALVRQQLPEKYKEIFFDQSKNGYAGYIDGGASQEEFYKFIKPILEKMDGTEELLVKLNREDLLRKQRTFDNGSIPHQIHLGELHAILRRQEDFYPFLKDNREKIEKILTFRIPYYVGPLARGNSRFAWMTRKSEETITPWNFEEVVDKGASAQSFIERMTNFDKNLPNEKVLPKHSLLYEYFTVYNELTKVKYVTEGMRKPAFLSGEQKKAIVDLLFKTNRKVTVKQLKEDYFKKIECFDSVEISGVEDRFNASLGTYHDLLKIIKDKDFLDNEENEDILEDIVLTLTLFEDREMIEERLKTYAHLFDDKVMKQLKRRRYTGWGRLSRKLINGIRDKQSGKTILDFLKSDGFANRNFMQLIHDDSLTFKEDIQKAQVSGQGDSLHEHIANLAGSPAIKKGILQTVKVVDELVKVMGRHKPENIVIEMARENQTTQKGQKNSRERMKRIEEGIKELGSQILKEHPVENTQLQNEKLYLYYLQNGRDMYVDQELDINRLSDYDVDHIVPQSFLKDDSIDNKVLTRSDKARGKSDNVPSEEVVKKMKNYWRQLLNAKLITQRKFDNLTKAERGGLSELDKAGFIKRQLVETRQITKHVAQILDSRMNTKYDENDKLIREVKVITLKSKLVSDFRKDFQFYKVREINNYHHAHDAYLNAVVGTALIKKYPKLESEFVYGDYKVYDVRKMIAKSEQEIGKATAKYFFYSNIMNFFKTEITLANGEIRKRPLIETNGETGEIVWDKGRDFATVRKVLSMPQVNIVKKTEVQTGGFSKESILPKRNSDKLIARKKDWDPKKYGGFDSPTVAYSVLVVAKVEKGKSKKLKSVKELLGITIMERSSFEKNPIDFLEAKGYKEVKKDLIIKLPKYSLFELENGRKRMLASAGELQKGNELALPSKYVNFLYLASHYEKLKGSPEDNEQKQLFVEQHKHYLDEIIEQISEFSKRVILADANLDKVLSAYNKHRDKPIREQAENIIHLFTLTNLGAPAAFKYFDTTIDRKRYTSTKEVLDATLIHQSITGLYETRIDLSQLGGDGGPAPEAAAKGGSGGVLNLEEEYRLHEKPVPSSIDPSWLQLFPTVWAERAGMGLANQVPPVVVELRSGASPVAVRQYPMSKEAREGIRPHIQKFLDLGVLVPCRSPWNTPLLPVKKPGTNDYRPVQDLREINKRVQDIHPTVPNPYNLLSSLPPSYTWYSVLDLKDAFFCLRLHPNSQPLFAFEWKDPEKGNTGQLTWTRLPQGFKNSPTLFNEALHRDLAPFRALNPQVVLLQYVDDLLVAAPTYEDCKKGTQKLLQELSKLGYRVSAKKAQLCQREVTYLGYLLKEGKRWLTPARKATVMKIPVPTTPRQVREFLGKAGFCRLFIPGFASLAAPLYPLTKPSIPFIWTEEHQQAFDHIKKALLSAPALALPDLTKPFTLYIDERAGVARGVLTQTLGPWRRPVAYLSKKLDPVASGWPTCLKAVAAVALLLKDADKLTLGQNVTVIASHSLESIVRQPPDRWMTNARMTHYQSLLLNERVSFAPPAVLNPATLLPVESEATPVHRCSEILAEETGTRRDLEDQPLPGVPTWYTDGSSFITEGKRRAGAPIVDGKRTVWASSLPEGTSAQKAELVALTQALRLAEGKNINIYTDSRYAFATAHIHGAIYKQRGWLTSAGKDIKNKEEILALLEAIHLPRRVAIIHCPGHQRGSNPVATGNRRADEAAKQAALSTRVLAGTTKPAGKRTADGSEFEKRTADGSEFESPKKKAKVE

SEQ ID NO: 7258 - protein, 2127 aa, synthetic construct
MPAAKRVKLDGGDKKYSIGLDIGTNSVGWAVITDEYKVPSKKFKVLGNTDRHSIKKNLIGALLFDSGETAEATRLKRTARRRYTRRKNRICYLQEIFSNEMAKVDDSFFHRLEESFLVEEDKKHERHPIFGNIVDEVAYHEKYPTIYHLRKKLVDSTDKADLRLIYLALAHMIKFRGHFLIEGDLNPDNSDVDKLFIQLVQTYNQLFEENPINASGVDAKAILSARLSKSRRLENLIAQLPGEKKNGLFGNLIALSLGLTPNFKSNFDLAEDAKLQLSKDTYDDDLDNLLAQIGDQYADLFLAAKNLSDAILLSDILRVNTEITKAPLSASMIKRYDEHHQDLTLLKALVRQQLPEKYKEIFFDQSKNGYAGYIDGGASQEEFYKFIKPILEKMDGTEELLVKLNREDLLRKQRTFDNGSIPHQIHLGELHAILRRQEDFYPFLKDNREKIEKILTFRIPYYVGPLARGNSRFAWMTRKSEETITPWNFEEVVDKGASAQSFIERMTNFDKNLPNEKVLPKHSLLYEYFTVYNELTKVKYVTEGMRKPAFLSGEQKKAIVDLLFKTNRKVTVKQLKEDYFKKIECFDSVEISGVEDRFNASLGTYHDLLKIIKDKDFLDNEENEDILEDIVLTLTLFEDREMIEERLKTYAHLFDDKVMKQLKRRRYTGWGRLSRKLINGIRDKQSGKTILDFLKSDGFANRNFMQLIHDDSLTFKEDIQKAQVSGQGDSLHEHIANLAGSPAIKKGILQTVKVVDELVKVMGRHKPENIVIEMARENQTTQKGQKNSRERMKRIEEGIKELGSQILKEHPVENTQLQNEKLYLYYLQNGRDMYVDQELDINRLSDYDVDHIVPQSFLKDDSIDNKVLTRSDKARGKSDNVPSEEVVKKMKNYWRQLLNAKLITQRKFDNLTKAERGGLSELDKAGFIKRQLVETRQITKHVAQILDSRMNTKYDENDKLIREVKVITLKSKLVSDFRKDFQFYKVREINNYHHAHDAYLNAVVGTALIKKYPKLESEFVYGDYKVYDVRKMIAKSEQEIGKATAKYFFYSNIMNFFKTEITLANGEIRKRPLIETNGETGEIVWDKGRDFATVRKVLSMPQVNIVKKTEVQTGGFSKESILPKRNSDKLIARKKDWDPKKYGGFDSPTVAYSVLVVAKVEKGKSKKLKSVKELLGITIMERSSFEKNPIDFLEAKGYKEVKKDLIIKLPKYSLFELENGRKRMLASAGELQKGNELALPSKYVNFLYLASHYEKLKGSPEDNEQKQLFVEQHKHYLDEIIEQISEFSKRVILADANLDKVLSAYNKHRDKPIREQAENIIHLFTLTNLGAPAAFKYFDTTIDRKRYTSTKEVLDATLIHQSITGLYETRIDLSQLGGDGGPAPEAAAKGGSGGLLGRDLLTKLKAQIQFSTEGPQVTWEDRPAMCLVLNLEEEYRLHEKPVPPSIDPSWLQLFPMVWAEKAGMGLANQVPPVVVELKSDASPVAVRQYPMSKEAREGIRPHIQRFLDLGILVPCQSPWNTPLLPVKKPGTNDYRPVQDLREVNKRVQDIHPTVPNPYNLLSSLPPSHTWYSVLDLKDAFFCLKLHPNSQPLFAFEWRDPEKGNTGQLTWTRLPQGFKNSPTLFNEALHRDLASFRALNPQVVMLQYVDDLLVAAPTYRDCKEGTRRLLQELSKLGYRVSAKKAQLCREEVTYLGYLLKGGKRWLTPARKATVMKIPTPTTPRQVREFLGKAGFCRLFIPGFASLAAPLYPLTRPKVPFTWTEAHQEAFGRIKEALLSAPALALPDLTKPFALYVDEKEGVARGVLTQTLGPWRRPVAYLSKKLDPVASGWPTCLKAIAAVALLLKDADKLTLGQNVLVIAPHNLESIVRQPPDRWMTNARMTHYQSLLLNERVSFAPPAILNPATLLPVESDDTPIHICSEILAEETGTRPDLRDQPLPGVPAWYTDGSSFIMDGRRQAGAAIVDNKRTVWASNLPEGTSAQKAELIALTQALRLAEGKSINIYTDSRYAFATAHVHGAIYKQRGWLTSAGKDIKNKEEILALLEAIHLPKRVAIIHCPGHQRGTDPVATGNRKADEAAKQAAQSTRILTETTKNAGKRTADGSEFEKRTADGSEFESPKKKAKVE

SEQ ID NO: 7259 - protein, 2218 aa, synthetic construct
MPAAKRVKLDGGDKKYSIGLDIGTNSVGWAVITDEYKVPSKKFKVLGNTDRHSIKKNLIGALLFDSGETAEATRLKRTARRRYTRRKNRICYLQEIFSNEMAKVDDSFFHRLEESFLVEEDKKHERHPIFGNIVDEVAYHEKYPTIYHLRKKLVDSTDKADLRLIYLALAHMIKFRGHFLIEGDLNPDNSDVDKLFIQLVQTYNQLFEENPINASGVDAKAILSARLSKSRRLENLIAQLPGEKKNGLFGNLIALSLGLTPNFKSNFDLAEDAKLQLSKDTYDDDLDNLLAQIGDQYADLFLAAKNLSDAILLSDILRVNTEITKAPLSASMIKRYDEHHQDLTLLKALVRQQLPEKYKEIFFDQSKNGYAGYIDGGASQEEFYKFIKPILEKMDGTEELLVKLNREDLLRKQRTFDNGSIPHQIHLGELHAILRRQEDFYPFLKDNREKIEKILTFRIPYYVGPLARGNSRFAWMTRKSEETITPWNFEEVVDKGASAQSFIERMTNFDKNLPNEKVLPKHSLLYEYFTVYNELTKVKYVTEGMRKPAFLSGEQKKAIVDLLFKTNRKVTVKQLKEDYFKKIECFDSVEISGVEDRFNASLGTYHDLLKIIKDKDFLDNEENEDILEDIVLTLTLFEDREMIEERLKTYAHLFDDKVMKQLKRRRYTGWGRLSRKLINGIRDKQSGKTILDFLKSDGFANRNFMQLIHDDSLTFKEDIQKAQVSGQGDSLHEHIANLAGSPAIKKGILQTVKVVDELVKVMGRHKPENIVIEMARENQTTQKGQKNSRERMKRIEEGIKELGSQILKEHPVENTQLQNEKLYLYYLQNGRDMYVDQELDINRLSDYDVDHIVPQSFLKDDSIDNKVLTRSDKARGKSDNVPSEEVVKKMKNYWRQLLNAKLITQRKFDNLTKAERGGLSELDKAGFIKRQLVETRQITKHVAQILDSRMNTKYDENDKLIREVKVITLKSKLVSDFRKDFQFYKVREINNYHHAHDAYLNAVVGTALIKKYPKLESEFVYGDYKVYDVRKMIAKSEQEIGKATAKYFFYSNIMNFFKTEITLANGEIRKRPLIETNGETGEIVWDKGRDFATVRKVLSMPQVNIVKKTEVQTGGFSKESILPKRNSDKLIARKKDWDPKKYGGFDSPTVAYSVLVVAKVEKGKSKKLKSVKELLGITIMERSSFEKNPIDFLEAKGYKEVKKDLIIKLPKYSLFELENGRKRMLASAGELQKGNELALPSKYVNFLYLASHYEKLKGSPEDNEQKQLFVEQHKHYLDEIIEQISEFSKRVILADANLDKVLSAYNKHRDKPIREQAENIIHLFTLTNLGAPAAFKYFDTTIDRKRYTSTKEVLDATLIHQSITGLYETRIDLSQLGGDGGPAPEAAAKGGSGGTLGDQGSRGSDPLPEPRVTLTVEGIPTEFLVNTGAEHSVLTKPMGKMGSKRTVVAGATGSKVYPWTTKRLLKIGQKQVTHSFLVIPECPAPLLGRDLLTKLKAQIQFSTEGPQVTWEDRPAMCLVLNLEEEYRLHEKPVPPSIDPSWLQLFPMVWAEKAGMGLANQVPPVVVELKSDASPVAVRQYPMSKEAREGIRPHIQRFLDLGILVPCQSPWNTPLLPVKKPGTNDYRPVQDLREVNKRVQDIHPTVPNPYNLLSSLPPSHTWYSVLDLKDAFFCLKLHPNSQPLFAFEWRDPEKGNTGQLTWTRLPQGFKNSPTLFNEALHRDLASFRALNPQVVMLQYVDDLLVAAPTYRDCKEGTRRLLQELSKLGYRVSAKKAQLCREEVTYLGYLLKGGKRWLTPARKATVMKIPTPTTPRQVREFLGTAGFCRLWIPGFASLAAPLYPLTRPKVPFTWTEAHQEAFGRIKEALLSAPALALPDLTKPFALYVDEKEGVARGVLTQTLGPWRRPVAYLSKKLDPVASGWPTCLKAIAAVALLLKDADKLTLGQNVLVIAPHNLESIVRQPPDRWMTNARMTHYQSLLLNERVSFAPPAILNPATLLPVESDDTPIHICSEILAEETGTRPDLRDQPLPGVPAWYTDGSSFIMDGRRQAGAAIVDNKRTVWASNLPEGTSAQKAELIALTQALRLAEGKSINIYTDSRYAFATAHVHGAIYKQRGWLTSAGKDIKNKEEILALLEAIHLPKRVAIIHCPGHQRGTDPVATGNRKADEAAKQAAQSTRILTETTKNAGKRTADGSEFEKRTADGSEFESPKKKAKVE

SEQ ID NO: 7260 - protein, 2218 aa, synthetic construct
MPAAKRVKLDGGDKKYSIGLDIGTNSVGWAVITDEYKVPSKKFKVLGNTDRHSIKKNLIGALLFDSGETAEATRLKRTARRRYTRRKNRICYLQEIFSNEMAKVDDSFFHRLEESFLVEEDKKHERHPIFGNIVDEVAYHEKYPTIYHLRKKLVDSTDKADLRLIYLALAHMIKFRGHFLIEGDLNPDNSDVDKLFIQLVQTYNQLFEENPINASGVDAKAILSARLSKSRRLENLIAQLPGEKKNGLFGNLIALSLGLTPNFKSNFDLAEDAKLQLSKDTYDDDLDNLLAQIGDQYADLFLAAKNLSDAILLSDILRVNTEITKAPLSASMIKRYDEHHQDLTLLKALVRQQLPEKYKEIFFDQSKNGYAGYIDGGASQEEFYKFIKPILEKMDGTEELLVKLNREDLLRKQRTFDNGSIPHQIHLGELHAILRRQEDFYPFLKDNREKIEKILTFRIPYYVGPLARGNSRFAWMTRKSEETITPWNFEEVVDKGASAQSFIERMTNFDKNLPNEKVLPKHSLLYEYFTVYNELTKVKYVTEGMRKPAFLSGEQKKAIVDLLFKTNRKVTVKQLKEDYFKKIECFDSVEISGVEDRFNASLGTYHDLLKIIKDKDFLDNEENEDILEDIVLTLTLFEDREMIEERLKTYAHLFDDKVMKQLKRRRYTGWGRLSRKLINGIRDKQSGKTILDFLKSDGFANRNFMQLIHDDSLTFKEDIQKAQVSGQGDSLHEHIANLAGSPAIKKGILQTVKVVDELVKVMGRHKPENIVIEMARENQTTQKGQKNSRERMKRIEEGIKELGSQILKEHPVENTQLQNEKLYLYYLQNGRDMYVDQELDINRLSDYDVDHIVPQSFLKDDSIDNKVLTRSDKARGKSDNVPSEEVVKKMKNYWRQLLNAKLITQRKFDNLTKAERGGLSELDKAGFIKRQLVETRQITKHVAQILDSRMNTKYDENDKLIREVKVITLKSKLVSDFRKDFQFYKVREINNYHHAHDAYLNAVVGTALIKKYPKLESEFVYGDYKVYDVRKMIAKSEQEIGKATAKYFFYSNIMNFFKTEITLANGEIRKRPLIETNGETGEIVWDKGRDFATVRKVLSMPQVNIVKKTEVQTGGFSKESILPKRNSDKLIARKKDWDPKKYGGFDSPTVAYSVLVVAKVEKGKSKKLKSVKELLGITIMERSSFEKNPIDFLEAKGYKEVKKDLIIKLPKYSLFELENGRKRMLASAGELQKGNELALPSKYVNFLYLASHYEKLKGSPEDNEQKQLFVEQHKHYLDEIIEQISEFSKRVILADANLDKVLSAYNKHRDKPIREQAENIIHLFTLTNLGAPAAFKYFDTTIDRKRYTSTKEVLDATLIHQSITGLYETRIDLSQLGGDGGPAPEAAAKGGSGGTLGDQGSRGSDPLPEPRVTLTVEGIPTEFLVNTGAEHSVLTKPMGKMGSKRTVVAGATGSKVYPWTTKRLLKIGQKQVTHSFLVIPECPAPLLGRDLLTKLKAQIQFSTEGPQVTWEDRPAMCLVLNLEEEYRLHEKPVPPSIDPSWLQLFPMVWAEKAGMGLANQVPPVVVELKSDASPVAVRQYPMSKEAREGIRPHIQRFLDLGILVPCQSPWNTPLLPVKKPGTNDYRPVQDLREVNKRVQDIHPTVPNPYNLLSSLPPSHTWYSVLDLKDAFFCLKLHPNSQPLFAFEWRDPEKGNTGQLTWTRLPQGFKNSPTLFNEALHRDLASFRALNPQVVMLQYVDDLLVAAPTYRDCKEGTRRLLQELSKLGYRVSAKKAQLCREEVTYLGYLLKGGKRWLTPARKATVMKIPTPTTPRQVREFLGKAGFCRLFIPGFASLAAPLYPLTRPKVPFTWTEAHQEAFGRIKEALLSAPALALPDLTKPFALYVDEKEGVARGVLTQTLGPWRRPVAYLSKKLDPVASGWPTCLKAIAAVALLLKDADKLTLGQNVLVIAPHNLESIVRQPPDRWMTNARMTHYQSLLLNERVSFAPPAILNPATLLPVESDDTPIHICSEILAEETGTRPDLRDQPLPGVPAWYTDGSSFIMDGRRQAGAAIVDNKRTVWASNLPEGTSAQKAELIALTQALRLAEGKSINIYTDSRYAFATAHVHGAIYKQRGWLTSAGKDIKNKEEILALLEAIHLPKRVAIIHCPGHQRGTDPVATGNRKADEAAKQAAQSTRILTETTKNAGKRTADGSEFEKRTADGSEFESPKKKAKVE

SEQ ID NO: 7261 - protein, 2096 aa, synthetic construct
MPAAKRVKLDGGDKKYSIGLDIGTNSVGWAVITDEYKVPSKKFKVLGNTDRHSIKKNLIGALLFDSGETAEATRLKRTARRRYTRRKNRICYLQEIFSNEMAKVDDSFFHRLEESFLVEEDKKHERHPIFGNIVDEVAYHEKYPTIYHLRKKLVDSTDKADLRLIYLALAHMIKFRGHFLIEGDLNPDNSDVDKLFIQLVQTYNQLFEENPINASGVDAKAILSARLSKSRRLENLIAQLPGEKKNGLFGNLIALSLGLTPNFKSNFDLAEDAKLQLSKDTYDDDLDNLLAQIGDQYADLFLAAKNLSDAILLSDILRVNTEITKAPLSASMIKRYDEHHQDLTLLKALVRQQLPEKYKEIFFDQSKNGYAGYIDGGASQEEFYKFIKPILEKMDGTEELLVKLNREDLLRKQRTFDNGSIPHQIHLGELHAILRRQEDFYPFLKDNREKIEKILTFRIPYYVGPLARGNSRFAWMTRKSEETITPWNFEEVVDKGASAQSFIERMTNFDKNLPNEKVLPKHSLLYEYFTVYNELTKVKYVTEGMRKPAFLSGEQKKAIVDLLFKTNRKVTVKQLKEDYFKKIECFDSVEISGVEDRFNASLGTYHDLLKIIKDKDFLDNEENEDILEDIVLTLTLFEDREMIEERLKTYAHLFDDKVMKQLKRRRYTGWGRLSRKLINGIRDKQSGKTILDFLKSDGFANRNFMQLIHDDSLTFKEDIQKAQVSGQGDSLHEHIANLAGSPAIKKGILQTVKVVDELVKVMGRHKPENIVIEMARENQTTQKGQKNSRERMKRIEEGIKELGSQILKEHPVENTQLQNEKLYLYYLQNGRDMYVDQELDINRLSDYDVDHIVPQSFLKDDSIDNKVLTRSDKARGKSDNVPSEEVVKKMKNYWRQLLNAKLITQRKFDNLTKAERGGLSELDKAGFIKRQLVETRQITKHVAQILDSRMNTKYDENDKLIREVKVITLKSKLVSDFRKDFQFYKVREINNYHHAHDAYLNAVVGTALIKKYPKLESEFVYGDYKVYDVRKMIAKSEQEIGKATAKYFFYSNIMNFFKTEITLANGEIRKRPLIETNGETGEIVWDKGRDFATVRKVLSMPQVNIVKKTEVQTGGFSKESILPKRNSDKLIARKKDWDPKKYGGFDSPTVAYSVLVVAKVEKGKSKKLKSVKELLGITIMERSSFEKNPIDFLEAKGYKEVKKDLIIKLPKYSLFELENGRKRMLASAGELQKGNELALPSKYVNFLYLASHYEKLKGSPEDNEQKQLFVEQHKHYLDEIIEQISEFSKRVILADANLDKVLSAYNKHRDKPIREQAENIIHLFTLTNLGAPAAFKYFDTTIDRKRYTSTKEVLDATLIHQSITGLYETRIDLSQLGGDGGPAPEAAAKGGSGGTLNLEDEYRLYETSAEPEVSPGSTWLSDFPQAWAETGGMGLAVRQAPLIIPLKATSTPVSIKQYPMSQEAKLGIKPHIQRLLDQGILVPCQSPWNTPLLPVKKPGTNDYRPVQDLREVNKRVEDIHPTVPNPYNLLSGLPPSHRWYTVLDLKDAFFCLRLHPTSQPLFAFEWRDPGMGISGQLTWTRLPQGFKNSPTLFNEALHRDLADFRIQHPDLILLQYVDDILLAATSELDCQQGTRALLLTLGNLGYRASAKKAQLCQKQVKYLGYLLKEGQRWLTEARKETVMGQPTPKTPRQLREFLGTAGFCRLWIPGFAEMAAPLYPLTKPGTLFNWGPDQQKAYQEIKQALLTAPALGLPDLTKPFELFVDEKQGYAKGVLTQKLGPWRRPVAYLSKKLDPVAAGWPPCLRMVAAIAVLRKDAGKLTMGQPLVILAPHAVEALVKQPPDRWLSNARMTHYQAMLLDTDRVQFGPVVALNPATLLPLPEEGAPHDCLEILAETHGTRPDLTDQPIPDADHTWYTDGSSFLQEGQRKAGAAVTTETEVIWARALPAGTSAQRAELIALTQALKMAEGKRLNVYTDSRYAFATAHIHGEIYRRRGWLTSEGREIKNKSEILALLKALFLPKRLSIIHCLGHQKGDSAEARGNRLADQAAREAAIKTPPDTSTLLAGKRTADGSEFEKRTADGSEFESPKKKAKVE

SEQ ID NO: 7262 - protein, 2096 aa, synthetic construct; identical to SEQ ID NO: 4528

SEQ ID NO: 7263 - protein, 2096 aa, synthetic construct
MPAAKRVKLDGGDKKYSIGLDIGTNSVGWAVITDEYKVPSKKFKVLGNTDRHSIKKNLIGALLFDSGETAEATRLKRTARRRYTRRKNRICYLQEIFSNEMAKVDDSFFHRLEESFLVEEDKKHERHPIFGNIVDEVAYHEKYPTIYHLRKKLVDSTDKADLRLIYLALAHMIKFRGHFLIEGDLNPDNSDVDKLFIQLVQTYNQLFEENPINASGVDAKAILSARLSKSRRLENLIAQLPGEKKNGLFGNLIALSLGLTPNFKSNFDLAEDAKLQLSKDTYDDDLDNLLAQIGDQYADLFLAAKNLSDAILLSDILRVNTEITKAPLSASMIKRYDEHHQDLTLLKALVRQQLPEKYKEIFFDQSKNGYAGYIDGGASQEEFYKFIKPILEKMDGTEELLVKLNREDLLRKQRTFDNGSIPHQIHLGELHAILRRQEDFYPFLKDNREKIEKILTFRIPYYVGPLARGNSRFAWMTRKSEETITPWNFEEVVDKGASAQSFIERMTNFDKNLPNEKVLPKHSLLYEYFTVYNELTKVKYVTEGMRKPAFLSGEQKKAIVDLLFKTNRKVTVKQLKEDYFKKIECFDSVEISGVEDRFNASLGTYHDLLKIIKDKDFLDNEENEDILEDIVLTLTLFEDREMIEERLKTYAHLFDDKVMKQLKRRRYTGWGRLSRKLINGIRDKQSGKTILDFLKSDGFANRNFMQLIHDDSLTFKEDIQKAQVSGQGDSLHEHIANLAGSPAIKKGILQTVKVVDELVKVMGRHKPENIVIEMARENQTTQKGQKNSRERMKRIEEGIKELGSQILKEHPVENTQLQNEKLYLYYLQNGRDMYVDQELDINRLSDYDVDHIVPQSFLKDDSIDNKVLTRSDKARGKSDNVPSEEVVKKMKNYWRQLLNAKLITQRKFDNLTKAERGGLSELDKAGFIKRQLVETRQITKHVAQILDSRMNTKYDENDKLIREVKVITLKSKLVSDFRKDFQFYKVREINNYHHAHDAYLNAVVGTALIKKYPKLESEFVYGDYKVYDVRKMIAKSEQEIGKATAKYFFYSNIMNFFKTEITLANGEIRKRPLIETNGETGEIVWDKGRDFATVRKVLSMPQVNIVKKTEVQTGGFSKESILPKRNSDKLIARKKDWDPKKYGGFDSPTVAYSVLVVAKVEKGKSKKLKSVKELLGITIMERSSFEKNPIDFLEAKGYKEVKKDLIIKLPKYSLFELENGRKRMLASAGELQKGNELALPSKYVNFLYLASHYEKLKGSPEDNEQKQLFVEQHKHYLDEIIEQISEFSKRVILADANLDKVLSAYNKHRDKPIREQAENIIHLFTLTNLGAPAAFKYFDTTIDRKRYTSTKEVLDATLIHQSITGLYETRIDLSQLGGDGGPAPEAAAKGGSGGTLGIEDEYRLHETSTEPDVSLGSTWLSDFPQAWAETGGMGLAVRQAPLIIPLKATSTPVSIQQYPMSHEARLGIKPHIQRLLDQGILVPCQSPWNTPLLPVKKPGTNDYRPVQDLREVNKRVEDIHPTVPNPYNLLSGLPPSHQWYTVLDLKDAFFCLRLHPTSQPLFAFEWRDPGMGISGQLTWTRLPQGFKNSPTLFNEALHRDLADFRIQHPDLILLQYVDDILLAATSELDCQQGTRALLQTLGDLGYRASAKKAQICQKQVKYLGYLLREGQRWLTEARKETVMGQPVPKTPRQLREFLGTAGFCRLWIPGFAEMAAPLYPLTKPGTLFSWGPDQQKAYQEIKQALLTAPALGLPDLTKPFELFVDEKQGYAKGVLTQKLGPWRRPVAYLSKKLDPVAAGWPPCLRMVAAIAVLTKDAGKLTMGQPLVILAPHAVEALVKQPPDRWLSNARMTHYQAMLLDTDRVQFGPVVALNPATLLPLPEEGAPHDCLEILAETHGTRPDLTDQPIPDADHTWYTDGSSFLQEGQRKAGAAVTTETEVIWAGALPAGTSAQRAELIALTQALKMAEGKRLNVYTDSRYAFATAHIHGEIYRRRGWLTSEGREIKNKSEILALLKALFLPKRLSIIHCLGHQKGDSAEARGNRLADQAAREAAIKTPPDTSTLLAGKRTADGSEFEKRTADGSEFESPKKKAKVE

SEQ ID NO: 7264 - protein, 2096 aa, synthetic construct
MPAAKRVKLDGGDKKYSIGLDIGTNSVGWAVITDEYKVPSKKFKVLGNTDRHSIKKNLIGALLFDSGETAEATRLKRTARRRYTRRKNRICYLQEIFSNEMAKVDDSFFHRLEESFLVEEDKKHERHPIFGNIVDEVAYHEKYPTIYHLRKKLVDSTDKADLRLIYLALAHMIKFRGHFLIEGDLNPDNSDVDKLFIQLVQTYNQLFEENPINASGVDAKAILSARLSKSRRLENLIAQLPGEKKNGLFGNLIALSLGLTPNFKSNFDLAEDAKLQLSKDTYDDDLDNLLAQIGDQYADLFLAAKNLSDAILLSDILRVNTEITKAPLSASMIKRYDEHHQDLTLLKALVRQQLPEKYKEIFFDQSKNGYAGYIDGGASQEEFYKFIKPILEKMDGTEELLVKLNREDLLRKQRTFDNGSIPHQIHLGELHAILRRQEDFYPFLKDNREKIEKILTFRIPYYVGPLARGNSRFAWMTRKSEETITPWNFEEVVDKGASAQSFIERMTNFDKNLPNEKVLPKHSLLYEYFTVYNELTKVKYVTEGMRKPAFLSGEQKKAIVDLLFKTNRKVTVKQLKEDYFKKIECFDSVEISGVEDRFNASLGTYHDLLKIIKDKDFLDNEENEDILEDIVLTLTLFEDREMIEERLKTYAHLFDDKVMKQLKRRRYTGWGRLSRKLINGIRDKQSGKTILDFLKSDGFANRNFMQLIHDDSLTFKEDIQKAQVSGQGDSLHEHIANLAGSPAIKKGILQTVKVVDELVKVMGRHKPENIVIEMARENQTTQKGQKNSRERMKRIEEGIKELGSQILKEHPVENTQLQNEKLYLYYLQNGRDMYVDQELDINRLSDYDVDHIVPQSFLKDDSIDNKVLTRSDKARGKSDNVPSEEVVKKMKNYWRQLLNAKLITQRKFDNLTKAERGGLSELDKAGFIKRQLVETRQITKHVAQILDSRMNTKYDENDKLIREVKVITLKSKLVSDFRKDFQFYKVREINNYHHAHDAYLNAVVGTALIKKYPKLESEFVYGDYKVYDVRKMIAKSEQEIGKATAKYFFYSNIMNFFKTEITLANGEIRKRPLIETNGETGEIVWDKGRDFATVRKVLSMPQVNIVKKTEVQTGGFSKESILPKRNSDKLIARKKDWDPKKYGGFDSPTVAYSVLVVAKVEKGKSKKLKSVKELLGITIMERSSFEKNPIDFLEAKGYKEVKKDLIIKLPKYSLFELENGRKRMLASAGELQKGNELALPSKYVNFLYLASHYEKLKGSPEDNEQKQLFVEQHKHYLDEIIEQISEFSKRVILADANLDKVLSAYNKHRDKPIREQAENIIHLFTLTNLGAPAAFKYFDTTIDRKRYTSTKEVLDATLIHQSITGLYETRIDLSQLGGDGGPAPEAAAKGGSGGTLNIEDEYRLHETSKGPDVPLGSTWLSDFPQAWAETGGMGLAVRQAPLIIPLKATSTPVSIKQYPMSQEARLGIKPHIQRLLDQGILVPCQSPWNTPLLPVKKPGTNDYRPVQDLREVNKRVEDIHPTVPNPYNLLSGLPPSHQWYTVLDLKDAFFCLRLHPTSQSLFAFEWRDPEMGISGQLTWTRLPQGFKNSPTLFNEALHRDLADFRIQHPDLILLQYVDDLLLAATSELDCQQGTRALLQTLGDLGYRASAKKAQICQKQVKYLGYLLKEGQRWLTEARKETVMGQPTPKTPRQLREFLGTAGFCRLWIPGFAEMAAPLYPLTKPGTLFEWGPDQQKAYQEIKQALLTAPALGLPDLTKPFELFVDEKQGYAKGVLTQKLGPWRRPVAYLSKKLDPVAAGWPPCLRMVAAIAVLTKDAGKLTMGQPLVILAPHAVEALVKQPPDRWLSNARMTHYQALLLDTDRVQFGPIVALNPATLLPLPEEGLQHDCLDILAEAHGTRPDLTDQPLPDADHTWYTDGSSFLQEGQRKAGAAVTTETEVVWAKALPAGTSAQRAELIALTQALKMAEGKKLNVYTDSRYAFATAHIHGEIYRRRGWLTSEGKEIKNKDEILALLKALFLPKRLSIIHCPGHQKGNRAEARGNRMADQAAREVATRETPETSTLLAGKRTADGSEFEKRTADGSEFESPKKKAKVE

SEQ ID NO: 7265 - protein, 2088 aa, synthetic construct; identical to SEQ ID NO: 4529

SEQ ID NO: 7266 - protein, 2090 aa, synthetic construct
MPAAKRVKLDGGDKKYSIGLDIGTNSVGWAVITDEYKVPSKKFKVLGNTDRHSIKKNLIGALLFDSGETAEATRLKRTARRRYTRRKNRICYLQEIFSNEMAKVDDSFFHRLEESFLVEEDKKHERHPIFGNIVDEVAYHEKYPTIYHLRKKLVDSTDKADLRLIYLALAHMIKFRGHFLIEGDLNPDNSDVDKLFIQLVQTYNQLFEENPINASGVDAKAILSARLSKSRRLENLIAQLPGEKKNGLFGNLIALSLGLTPNFKSNFDLAEDAKLQLSKDTYDDDLDNLLAQIGDQYADLFLAAKNLSDAILLSDILRVNTEITKAPLSASMIKRYDEHHQDLTLLKALVRQQLPEKYKEIFFDQSKNGYAGYIDGGASQEEFYKFIKPILEKMDGTEELLVKLNREDLLRKQRTFDNGSIPHQIHLGELHAILRRQEDFYPFLKDNREKIEKILTFRIPYYVGPLARGNSRFAWMTRKSEETITPWNFEEVVDKGASAQSFIERMTNFDKNLPNEKVLPKHSLLYEYFTVYNELTKVKYVTEGMRKPAFLSGEQKKAIVDLLFKTNRKVTVKQLKEDYFKKIECFDSVEISGVEDRFNASLGTYHDLLKIIKDKDFLDNEENEDILEDIVLTLTLFEDREMIEERLKTYAHLFDDKVMKQLKRRRYTGWGRLSRKLINGIRDKQSGKTILDFLKSDGFANRNFMQLIHDDSLTFKEDIQKAQVSGQGDSLHEHIANLAGSPAIKKGILQTVKVVDELVKVMGRHKPENIVIEMARENQTTQKGQKNSRERMKRIEEGIKELGSQILKEHPVENTQLQNEKLYLYYLQNGRDMYVDQELDINRLSDYDVDHIVPQSFLKDDSIDNKVLTRSDKARGKSDNVPSEEVVKKMKNYWRQLLNAKLITQRKFDNLTKAERGGLSELDKAGFIKRQLVETRQITKHVAQILDSRMNTKYDENDKLIREVKVITLKSKLVSDFRKDFQFYKVREINNYHHAHDAYLNAVVGTALIKKYPKLESEFVYGDYKVYDVRKMIAKSEQEIGKATAKYFFYSNIMNFFKTEITLANGEIRKRPLIETNGETGEIVWDKGRDFATVRKVLSMPQVNIVKKTEVQTGGFSKESILPKRNSDKLIARKKDWDPKKYGGFDSPTVAYSVLVVAKVEKGKSKKLKSVKELLGITIMERSSFEKNPIDFLEAKGYKEVKKDLIIKLPKYSLFELENGRKRMLASAGELQKGNELALPSKYVNFLYLASHYEKLKGSPEDNEQKQLFVEQHKHYLDEIIEQISEFSKRVILADANLDKVLSAYNKHRDKPIREQAENIIHLFTLTNLGAPAAFKYFDTTIDRKRYTSTKEVLDATLIHQSITGLYETRIDLSQLGGDGGPAPEAAAKGGSGGTLQLDDEYRLYSPLVKPDQNIQFWLEQFPQAWAETAGMGLAKQVPPQVIQLKASATPVSVRQYPLSKEAQEGIRPHVQRLIQQGILVPVQSPWNTPLLPVRKPGTNDYRPVQDLREVNKRVQDIHPTVPNPYNLLCALPPQRSWYTVLDLKDAFFCLRLHPTSQPLFAFEWRDPGTGRTGQLTWTRLPQGFKNSPTIFDEALHRDLANFRIQHPQVTLLQYVDDLLLAGATKQDCLEGTKALLLELSDLGYRASAKKAQICRREVTYLGYSLRDGQRWLTEARKKTVVQIPAPTTAKQVREFLGTAGFCRLWIPGFATLAAPLYPLTKEKGEFSWAPEHQKAFDAIKKALLSAPALALPDVTKPFTLYVDERKGVARGVLTQTLGPWRRPVAYLSKKLDPVASGWPVCLKAIAAVAILVKDADKLTLGQNITVIAPHALENIVRQPPDRWMTNARMTHYQSLLLTERVTFAPPAALNPATLLPEETDEPVTHDCHQLLIEETGVRKDLTDIPLTGEVLTWFTDGSSYVVEGKRMAGAAVVDGTRTIWASSLPEGTSAQKAELMALTQALRLAEGKSINIYTDSRYAFATAHVHGAIYKQRGLLTSAGREIKNKEEILSLLEALHLPKRLAIIHCPGHQKAKDPISRGNQMADRVAKQAAQGVNLLAGKRTADGSEFEKRTADGSEFESPKKKAKVE

SEQ ID NO: 7267 - protein, 2088 aa, synthetic construct; identical to SEQ ID NO: 4529

SEQ ID NO: 7268 - protein, 2176 aa, synthetic construct
MPAAKRVKLDGGDKKYSIGLDIGTNSVGWAVITDEYKVPSKKFKVLGNTDRHSIKKNLIGALLFDSGETAEATRLKRTARRRYTRRKNRICYLQEIFSNEMAKVDDSFFHRLEESFLVEEDKKHERHPIFGNIVDEVAYHEKYPTIYHLRKKLVDSTDKADLRLIYLALAHMIKFRGHFLIEGDLNPDNSDVDKLFIQLVQTYNQLFEENPINASGVDAKAILSARLSKSRRLENLIAQLPGEKKNGLFGNLIALSLGLTPNFKSNFDLAEDAKLQLSKDTYDDDLDNLLAQIGDQYADLFLAAKNLSDAILLSDILRVNTEITKAPLSASMIKRYDEHHQDLTLLKALVRQQLPEKYKEIFFDQSKNGYAGYIDGGASQEEFYKFIKPILEKMDGTEELLVKLNREDLLRKQRTFDNGSIPHQIHLGELHAILRRQEDFYPFLKDNREKIEKILTFRIPYYVGPLARGNSRFAWMTRKSEETITPWNFEEVVDKGASAQSFIERMTNFDKNLPNEKVLPKHSLLYEYFTVYNELTKVKYVTEGMRKPAFLSGEQKKAIVDLLFKTNRKVTVKQLKEDYFKKIECFDSVEISGVEDRFNASLGTYHDLLKIIKDKDFLDNEENEDILEDIVLTLTLFEDREMIEERLKTYAHLFDDKVMKQLKRRRYTGWGRLSRKLINGIRDKQSGKTILDFLKSDGFANRNFMQLIHDDSLTFKEDIQKAQVSGQGDSLHEHIANLAGSPAIKKGILQTVKVVDELVKVMGRHKPENIVIEMARENQTTQKGQKNSRERMKRIEEGIKELGSQILKEHPVENTQLQNEKLYLYYLQNGRDMYVDQELDINRLSDYDVDHIVPQSFLKDDSIDNKVLTRSDKARGKSDNVPSEEVVKKMKNYWRQLLNAKLITQRKFDNLTKAERGGLSELDKAGFIKRQLVETRQITKHVAQILDSRMNTKYDENDKLIREVKVITLKSKLVSDFRKDFQFYKVREINNYHHAHDAYLNAVVGTALIKKYPKLESEFVYGDYKVYDVRKMIAKSEQEIGKATAKYFFYSNIMNFFKTEITLANGEIRKRPLIETNGETGEIVWDKGRDFATVRKVLSMPQVNIVKKTEVQTGGFSKESILPKRNSDKLIARKKDWDPKKYGGFDSPTVAYSVLVVAKVEKGKSKKLKSVKELLGITIMERSSFEKNPIDFLEAKGYKEVKKDLIIKLPKYSLFELENGRKRMLASAGELQKGNELALPSKYVNFLYLASHYEKLKGSPEDNEQKQLFVEQHKHYLDEIIEQISEFSKRVILADANLDKVLSAYNKHRDKPIREQAENIIHLFTLTNLGAPAAFKYFDTTIDRKRYTSTKEVLDATLIHQSITGLYETRIDLSQLGGDGGPAPEAAAKGGSGGMDPLQLLQPLEAEIKGTKLKAHWNSGATITCVPEAFLEDERPIQTMLIKTIHGEKQQDVYYLTFKVQGRKVEAEVLASPYDYILLNPSDVPWLMKKPLQLTVLVPLHEYQERLLQQTALPKEQKELLQKLFLKYDALWQHWENQVGHRRIKPHNIATGTLAPRPQKQYPINPKAKPSIQIVIDDLLKQGVLIQQNSTMNTPVYPVPKPDGKWRMVLDYREVNKTIPLIAAQNQHSAGILSSIYRGKYKTTLDLTNGFWAHPITPESYWLTAFTWQGKQYCWTRLPQGFLNSPALFTADVVDLLKEIPNVQAYVDDIYISHDDPQEHLEQLEKIFSILLNAGYVVSLKKSEIAQREVEFLGFNITKEGRGLTDTFKQKLLNITPPKDLKQLQSILGLLNFARNFIPNYSELVKPLYTIVANANGKFISWTEDNSNQLQHIISVLNQADNLEERNPETRLIIKVNSSPSAGYIRYYNEGSKRPIMYVNYIFSKAEAKFTQTEKLLTTMHKGLIKAMDLAMGQEILVYSPIVSMTKIQRTPLPERKALPVRWITWMTYLEDPRIQFHYDKSLPELQQIPNVTEDVIAKTKHPSEFAMVFYTDGSAIKHPDVNKSHSAGMGIAQVQFIPEYKIVHQWSIPLGDHTAQLAEIAAVEFACKKALKISGPVLIVTDSFYVAESANKELPYWKSNGFLNNKKKPLRHVSKWKSIAECLQLKPDIIIMHEKGHQQPMTTLHTEGNNLADKLATQGSYVVHAGKRTADGSEFEKRTADGSEFESPKKKAKVE

SEQ ID NO: 7269 - protein, 2087 aa, synthetic construct
MPAAKRVKLDGGDKKYSIGLDIGTNSVGWAVITDEYKVPSKKFKVLGNTDRHSIKKNLIGALLFDSGETAEATRLKRTARRRYTRRKNRICYLQEIFSNEMAKVDDSFFHRLEESFLVEEDKKHERHPIFGNIVDEVAYHEKYPTIYHLRKKLVDSTDKADLRLIYLALAHMIKFRGHFLIEGDLNPDNSDVDKLFIQLVQTYNQLFEENPINASGVDAKAILSARLSKSRRLENLIAQLPGEKKNGLFGNLIALSLGLTPNFKSNFDLAEDAKLQLSKDTYDDDLDNLLAQIGDQYADLFLAAKNLSDAILLSDILRVNTEITKAPLSASMIKRYDEHHQDLTLLKALVRQQLPEKYKEIFFDQSKNGYAGYIDGGASQEEFYKFIKPILEKMDGTEELLVKLNREDLLRKQRTFDNGSIPHQIHLGELHAILRRQEDFYPFLKDNREKIEKILTFRIPYYVGPLARGNSRFAWMTRKSEETITPWNFEEVVDKGASAQSFIERMTNFDKNLPNEKVLPKHSLLYEYFTVYNELTKVKYVTEGMRKPAFLSGEQKKAIVDLLFKTNRKVTVKQLKEDYFKKIECFDSVEISGVEDRFNASLGTYHDLLKIIKDKDFLDNEENEDILEDIVLTLTLFEDREMIEERLKTYAHLFDDKVMKQLKRRRYTGWGRLSRKLINGIRDKQSGKTILDFLKSDGFANRNFMQLIHDDSLTFKEDIQKAQVSGQGDSLHEHIANLAGSPAIKKGILQTVKVVDELVKVMGRHKPENIVIEMARENQTTQKGQKNSRERMKRIEEGIKELGSQILKEHPVENTQLQNEKLYLYYLQNGRDMYVDQELDINRLSDYDVDHIVPQSFLKDDSIDNKVLTRSDKARGKSDNVPSEEVVKKMKNYWRQLLNAKLITQRKFDNLTKAERGGLSELDKAGFIKRQLVETRQITKHVAQILDSRMNTKYDENDKLIREVKVITLKSKLVSDFRKDFQFYKVREINNYHHAHDAYLNAVVGTALIKKYPKLESEFVYGDYKVYDVRKMIAKSEQEIGKATAKYFFYSNIMNFFKTEITLANGEIRKRPLIETNGETGEIVWDKGRDFATVRKVLSMPQVNIVKKTEVQTGGFSKESILPKRNSDKLIARKKDWDPKKYGGFDSPTVAYSVLVVAKVEKGKSKKLKSVKELLGITIMERSSFEKNPIDFLEAKGYKEVKKDLIIKLPKYSLFELENGRKRMLASAGELQKGNELALPSKYVNFLYLASHYEKLKGSPEDNEQKQLFVEQHKHYLDEIIEQISEFSKRVILADANLDKVLSAYNKHRDKPIREQAENIIHLFTLTNLGAPAAFKYFDTTIDRKRYTSTKEVLDATLIHQSITGLYETRIDLSQLGGDGGPAPEAAAKGGSGGIPWLMKKPLQLTTLVPLQEYEERLLKQTMLTGSYKEKLQSLFLKYDALWQHWENQVGHRRIKPHHIATGTVNPRPQKQYPINPKAKASIQTVINDLLKQGVLIQQNSIMNTPVYPVPKPDGKWRMVLDYREVNKTIPLIAAQNQHSAGILSSIFRGKYKTTLDLSNGFWAHSITPESYWLTAFTWLGQQYCWTRLPQGFLNSPALFNADVVDLLKEVPNVQVYVDDIYISHDDPREHLEQLEKVFSLLLNAGYVVSLKKSEIAQHEVEFLGFNITKEGRGLTETFKQKLLNITPPRDLKQLQSILGKLNFARNFIPNFSELVKPLYNIIATAPGKYITWTTDNSQQLQNIISMLNSAENLEERNPEVRLIMKVNTSPSAGYIRFYNEFAKRPIMYLNYVYTKAEVKFTNTEKLLTTIHKGLIKALDLGMGQEILVYSPIVSMTKIQKTPLPERKALPIRWITWMSYLEDPRIQFHYDKTLPELQQVPTVTDDIIAKIKHPSEFSMVFYTDGSAIKHPNVNKSHNAGMGIAQVQFKPEFTVINTWSIPLGDHTAQLAEVAAVEFACKKALKIDGPVLIVTDSFYVAESVNKELPYWQSNGFFNNKKKPLKHVSKWKSIADCIQLKPDIIIIHEKGHQPTASTFHTEGNNLADKLATQGSYVVNAGKRTADGSEFEKRTADGSEFESPKKKAKVE

SEQ ID NO: 7270 - protein, 2176 aa, synthetic construct
MPAAKRVKLDGGDKKYSIGLDIGTNSVGWAVITDEYKVPSKKFKVLGNTDRHSIKKNLIGALLFDSGETAEATRLKRTARRRYTRRKNRICYLQEIFSNEMAKVDDSFFHRLEESFLVEEDKKHERHPIFGNIVDEVAYHEKYPTIYHLRKKLVDSTDKADLRLIYLALAHMIKFRGHFLIEGDLNPDNSDVDKLFIQLVQTYNQLFEENPINASGVDAKAILSARLSKSRRLENLIAQLPGEKKNGLFGNLIALSLGLTPNFKSNFDLAEDAKLQLSKDTYDDDLDNLLAQIGDQYADLFLAAKNLSDAILLSDILRVNTEITKAPLSASMIKRYDEHHQDLTLLKALVRQQLPEKYKEIFFDQSKNGYAGYIDGGASQEEFYKFIKPILEKMDGTEELLVKLNREDLLRKQRTFDNGSIPHQIHLGELHAILRRQEDFYPFLKDNREKIEKILTFRIPYYVGPLARGNSRFAWMTRKSEETITPWNFEEVVDKGASAQSFIERMTNFDKNLPNEKVLPKHSLLYEYFTVYNELTKVKYVTEGMRKPAFLSGEQKKAIVDLLFKTNRKVTVKQLKEDYFKKIECFDSVEISGVEDRFNASLGTYHDLLKIIKDKDFLDNEENEDILEDIVLTLTLFEDREMIEERLKTYAHLFDDKVMKQLKRRRYTGWGRLSRKLINGIRDKQSGKTILDFLKSDGFANRNFMQLIHDDSLTFKEDIQKAQVSGQGDSLHEHIANLAGSPAIKKGILQTVKVVDELVKVMGRHKPENIVIEMARENQTTQKGQKNSRERMKRIEEGIKELGSQILKEHPVENTQLQNEKLYLYYLQNGRDMYVDQELDINRLSDYDVDHIVPQSFLKDDSIDNKVLTRSDKARGKSDNVPSEEVVKKMKNYWRQLLNAKLITQRKFDNLTKAERGGLSELDKAGFIKRQLVETRQITKHVAQILDSRMNTKYDENDKLIREVKVITLKSKLVSDFRKDFQFYKVREINNYHHAHDAYLNAVVGTALIKKYPKLESEFVYGDYKVYDVRKMIAKSEQEIGKATAKYFFYSNIMNFFKTEITLANGEIRKRPLIETNGETGEIVWDKGRDFATVRKVLSMPQVNIVKKTEVQTGGFSKESILPKRNSDKLIARKKDWDPKKYGGFDSPTVAYSVLVVAKVEKGKSKKLKSVKELLGITIMERSSFEKNPIDFLEAKGYKEVKKDLIIKLPKYSLFELENGRKRMLASAGELQKGNELALPSKYVNFLYLASHYEKLKGSPEDNEQKQLFVEQHKHYLDEIIEQISEFSKRVILADANLDKVLSAYNKHRDKPIREQAENIIHLFTLTNLGAPAAFKYFDTTIDRKRYTSTKEVLDATLIHQSITGLYETRIDLSQLGGDGGPAPEAAAKGGSGGMDPLQLLQPLEAEIKGTKLKAHWNSGATITCVPQAFLEEEVPIKNIWIKTIHGEKEQPVYYLTFKIQGRKVEAEVISSPYDYILVSPSDIPWLMKKPLQLTTLVPLQEYEERLLKQTMLTGSYKEKLQSLFLKYDALWQHWENQVGHRRIKPHHIATGTVNPRPQKQYPINPKAKASIQTVINDLLKQGVLIQQNSIMNTPVYPVPKPDGKWRMVLDYREVNKTIPLIAAQNQHSAGILSSIFRGKYKTTLDLSNGFWAHSITPESYWLTAFTWLGQQYCWTRLPQGFLNSPALFNADVVDLLKEVPNVQVYVDDIYISHDDPREHLEQLEKVFSLLLNAGYVVSLKKSEIAQHEVEFLGFNITKEGRGLTETFKQKLLNITPPRDLKQLQSILGKLNFARNFIPNFSELVKPLYNIIATAPGKYITWTTDNSQQLQNIISMLNSAENLEERNPEVRLIMKVNTSPSAGYIRFYNEFAKRPIMYLNYVYTKAEVKFTNTEKLLTTIHKGLIKALDLGMGQEILVYSPIVSMTKIQKTPLPERKALPIRWITWMSYLEDPRIQFHYDKTLPELQQVPTVTDDIIAKIKHPSEFSMVFYTDGSAIKHPNVNKSHNAGMGIAQVQFKPEFTVINTWSIPLGDHTAQLAEVAAVEFACKKALKIDGPVLIVTDSFYVAESVNKELPYWQSNGFFNNKKKPLKHVSKWKSIADCIQLKPDIIIIHEKGHQPTASTFHTEGNNLADKLATQGSYVVNAGKRTADGSEFEKRTADGSEFESPKKKAKVE

SEQ ID NO: 7271 - protein, 2094 aa, synthetic construct
MPAAKRVKLDGGDKKYSIGLDIGTNSVGWAVITDEYKVPSKKFKVLGNTDRHSIKKNLIGALLFDSGETAEATRLKRTARRRYTRRKNRICYLQEIFSNEMAKVDDSFFHRLEESFLVEEDKKHERHPIFGNIVDEVAYHEKYPTIYHLRKKLVDSTDKADLRLIYLALAHMIKFRGHFLIEGDLNPDNSDVDKLFIQLVQTYNQLFEENPINASGVDAKAILSARLSKSRRLENLIAQLPGEKKNGLFGNLIALSLGLTPNFKSNFDLAEDAKLQLSKDTYDDDLDNLLAQIGDQYADLFLAAKNLSDAILLSDILRVNTEITKAPLSASMIKRYDEHHQDLTLLKALVRQQLPEKYKEIFFDQSKNGYAGYIDGGASQEEFYKFIKPILEKMDGTEELLVKLNREDLLRKQRTFDNGSIPHQIHLGELHAILRRQEDFYPFLKDNREKIEKILTFRIPYYVGPLARGNSRFAWMTRKSEETITPWNFEEVVDKGASAQSFIERMTNFDKNLPNEKVLPKHSLLYEYFTVYNELTKVKYVTEGMRKPAFLSGEQKKAIVDLLFKTNRKVTVKQLKEDYFKKIECFDSVEISGVEDRFNASLGTYHDLLKIIKDKDFLDNEENEDILEDIVLTLTLFEDREMIEERLKTYAHLFDDKVMKQLKRRRYTGWGRLSRKLINGIRDKQSGKTILDFLKSDGFANRNFMQLIHDDSLTFKEDIQKAQVSGQGDSLHEHIANLAGSPAIKKGILQTVKVVDELVKVMGRHKPENIVIEMARENQTTQKGQKNSRERMKRIEEGIKELGSQILKEHPVENTQLQNEKLYLYYLQNGRDMYVDQELDINRLSDYDVDHIVPQSFLKDDSIDNKVLTRSDKARGKSDNVPSEEVVKKMKNYWRQLLNAKLITQRKFDNLTKAERGGLSELDKAGFIKRQLVETRQITKHVAQILDSRMNTKYDENDKLIREVKVITLKSKLVSDFRKDFQFYKVREINNYHHAHDAYLNAVVGTALIKKYPKLESEFVYGDYKVYDVRKMIAKSEQEIGKATAKYFFYSNIMNFFKTEITLANGEIRKRPLIETNGETGEIVWDKGRDFATVRKVLSMPQVNIVKKTEVQTGGFSKESILPKRNSDKLIARKKDWDPKKYGGFDSPTVAYSVLVVAKVEKGKSKKLKSVKELLGITIMERSSFEKNPIDFLEAKGYKEVKKDLIIKLPKYSLFELENGRKRMLASAGELQKGNELALPSKYVNFLYLASHYEKLKGSPEDNEQKQLFVEQHKHYLDEIIEQISEFSKRVILADANLDKVLSAYNKHRDKPIREQAENIIHLFTLTNLGAPAAFKYFDTTIDRKRYTSTKEVLDATLIHQSITGLYETRIDLSQLGGDGGPAPEAAAKGGSGGVLNLEEEYRLHEKPVPSSIDPSWLQLFPTVWAERAGMGLANQVPPVVVELRSGASPVAVRQYPMSKEAREGIRPHIQRFLDLGVLVPCQSPWNTPLLPVKKPGTNDYRPVQDLREINKRVQDIHPTVPNPYNLLSSLPPSHTWYSVLDLKDAFFCLKLHPNSQPLFAFEWRDPEKGNTGQLTWTRLPQGFKNSPTLFDEALHRDLAPFRALNPQVVLLQYVDDLLVAAPTYRDCKEGTQKLLQELSKLGYRVSAKKAQLCQKEVTYLGYLLKEGKRWLTPARKATVMKIPPPTTPRQVREFLGTAGFCRLWIPGFASLAAPLYPLTKESIPFIWTEEHQKAFDRIKEALLSAPALALPDLTKPFTLYVDERAGVARGVLTQTLGPWRRPVAYLSKKLDPVASGWPTCLKAVAAVALLLKDADKLTLGQNVTVIASHSLESIVRQPPDRWMTNARMTHYQSLLLNERVSFAPPAVLNPATLLPVESEATPVHRCSEILAEETGTRRDLKDQPLPGVPAWYTDGSSFIAEGKRRAGAAIVDGKRTVWASSLPEGTSAQKAELVALTQALRLAEGKDINIYTDSRYAFATAHIHGAIYKQRGLLTSAGKDIKNKEEILALLEAIHLPKRVAIIHCPGHQKGNDPVATGNRRADEAAKQAALSTRVLAETTKPAGKRTADGSEFEKRTADGSEFESPKKKAKVE

SEQ ID NO: 7272 - protein, 2096 aa, synthetic construct
MPAAKRVKLDGGDKKYSIGLDIGTNSVGWAVITDEYKVPSKKFKVLGNTDRHSIKKNLIGALLFDSGETAEATRLKRTARRRYTRRKNRICYLQEIFSNEMAKVDDSFFHRLEESFLVEEDKKHERHPIFGNIVDEVAYHEKYPTIYHLRKKLVDSTDKADLRLIYLALAHMIKFRGHFLIEGDLNPDNSDVDKLFIQLVQTYNQLFEENPINASGVDAKAILSARLSKSRRLENLIAQLPGEKKNGLFGNLIALSLGLTPNFKSNFDLAEDAKLQLSKDTYDDDLDNLLAQIGDQYADLFLAAKNLSDAILLSDILRVNTEITKAPLSASMIKRYDEHHQDLTLLKALVRQQLPEKYKEIFFDQSKNGYAGYIDGGASQEEFYKFIKPILEKMDGTEELLVKLNREDLLRKQRTFDNGSIPHQIHLGELHAILRRQEDFYPFLKDNREKIEKILTFRIPYYVGPLARGNSRFAWMTRKSEETITPWNFEEVVDKGASAQSFIERMTNFDKNLPNEKVLPKHSLLYEYFTVYNELTKVKYVTEGMRKPAFLSGEQKKAIVDLLFKTNRKVTVKQLKEDYFKKIECFDSVEISGVEDRFNASLGTYHDLLKIIKDKDFLDNEENEDILEDIVLTLTLFEDREMIEERLKTYAHLFDDKVMKQLKRRRYTGWGRLSRKLINGIRDKQSGKTILDFLKSDGFANRNFMQLIHDDSLTFKEDIQKAQVSGQGDSLHEHIANLAGSPAIKKGILQTVKVVDELVKVMGRHKPENIVIEMARENQTTQKGQKNSRERMKRIEEGIKELGSQILKEHPVENTQLQNEKLYLYYLQNGRDMYVDQELDINRLSDYDVDHIVPQSFLKDDSIDNKVLTRSDKARGKSDNVPSEEVVKKMKNYWRQLLNAKLITQRKFDNLTKAERGGLSELDKAGFIKRQLVETRQITKHVAQILDSRMNTKYDENDKLIREVKVITLKSKLVSDFRKDFQFYKVREINNYHHAHDAYLNAVVGTALIKKYPKLESEFVYGDYKVYDVRKMIAKSEQEIGKATAKYFFYSNIMNFFKTEITLANGEIRKRPLIETNGETGEIVWDKGRDFATVRKVLSMPQVNIVKKTEVQTGGFSKESILPKRNSDKLIARKKDWDPKKYGGFDSPTVAYSVLVVAKVEKGKSKKLKSVKELLGITIMERSSFEKNPIDFLEAKGYKEVKKDLIIKLPKYSLFELENGRKRMLASAGELQKGNELALPSKYVNFLYLASHYEKLKGSPEDNEQKQLFVEQHKHYLDEIIEQISEFSKRVILADANLDKVLSAYNKHRDKPIREQAENIIHLFTLTNLGAPAAFKYFDTTIDRKRYTSTKEVLDATLIHQSITGLYETRIDLSQLGGDGGPAPEAAAKGGSGGTLNIEDEYRLHETSKEPDVPLGSTWLSDFPQAWAETGGMGLAVRQAPLIIPLKATSTPVSIKQYPMSQEARLGIKPHIQRLLDQGILVPCQSPWNTPLLPVKKPGTNDYRPVQDLREVNKRVEDIHPTVPNPYNLLSGLPPSHQWYTVLDLKDAFFCLRLHPTSQPLFAFEWRDPEMGISGQLTWTRLPQGFKNSPTLFNEALHRDLADFRIQHPDLILLQYVDDLLLAATSEQDCQRGTRALLQTLGNLGYRASAKKAQICQKQVKYLGYLLKEGQRWLTEARKETVMGQPTPKTPRQLREFLGTAGFCRLWIPGFAEMAAPLYPLTKPGTLFNWGPDQQKAYQEIKQALLTAPALGLPDLTKPFELFVDEKQGYAKGVLTQKLGPWRRPVAYLSKKLDPVAAGWPPCLRMVAAIAVLTKDAGKLTMGQPLVILAPHAVEALVKQPPDRWLSNARMTHYQAMLLDTDRVQFGPVVALNPATLLPLPEKEAPHDCLEILAETHGTRPDLTDQPIPDADYTWYTDGSSFLQEGQRRAGAAVTTETEVIWARALPAGTSAQRAELIALTQALKMAEGKKLNVYTDSRYAFATAHVHGEIYRRRGWLTSEGREIKNKNEILALLKALFLPKRLSIIHCPGHQKGNSAEARGNRMADQAAREAAMKAVLETSTLLAGKRTADGSEFEKRTADGSEFESPKKKAKVE

SEQ ID NO: 7273 - protein, 2098 aa, synthetic construct
MPAAKRVKLDGGDKKYSIGLDIGTNSVGWAVITDEYKVPSKKFKVLGNTDRHSIKKNLIGALLFDSGETAEATRLKRTARRRYTRRKNRICYLQEIFSNEMAKVDDSFFHRLEESFLVEEDKKHERHPIFGNIVDEVAYHEKYPTIYHLRKKLVDSTDKADLRLIYLALAHMIKFRGHFLIEGDLNPDNSDVDKLFIQLVQTYNQLFEENPINASGVDAKAILSARLSKSRRLENLIAQLPGEKKNGLFGNLIALSLGLTPNFKSNFDLAEDAKLQLSKDTYDDDLDNLLAQIGDQYADLFLAAKNLSDAILLSDILRVNTEITKAPLSASMIKRYDEHHQDLTLLKALVRQQLPEKYKEIFFDQSKNGYAGYIDGGASQEEFYKFIKPILEKMDGTEELLVKLNREDLLRKQRTFDNGSIPHQIHLGELHAILRRQEDFYPFLKDNREKIEKILTFRIPYYVGPLARGNSRFAWMTRKSEETITPWNFEEVVDKGASAQSFIERMTNFDKNLPNEKVLPKHSLLYEYFTVYNELTKVKYVTEGMRKPAFLSGEQKKAIVDLLFKTNRKVTVKQLKEDYFKKIECFDSVEISGVEDRFNASLGTYHDLLKIIKDKDFLDNEENEDILEDIVLTLTLFEDREMIEERLKTYAHLFDDKVMKQLKRRRYTGWGRLSRKLINGIRDKQSGKTILDFLKSDGFANRNFMQLIHDDSLTFKEDIQKAQVSGQGDSLHEHIANLAGSPAIKKGILQTVKVVDELVKVMGRHKPENIVIEMARENQTTQKGQKNSRERMKRIEEGIKELGSQILKEHPVENTQLQNEKLYLYYLQNGRDMYVDQELDINRLSDYDVDHIVPQSFLKDDSIDNKVLTRSDKARGKSDNVPSEEVVKKMKNYWRQLLNAKLITQRKFDNLTKAERGGLSELDKAGFIKRQLVETRQITKHVAQILDSRMNTKYDENDKLIREVKVITLKSKLVSDFRKDFQFYKVREINNYHHAHDAYLNAVVGTALIKKYPKLESEFVYGDYKVYDVRKMIAKSEQEIGKATAKYFFYSNIMNFFKTEITLANGEIRKRPLIETNGETGEIVWDKGRDFATVRKVLSMPQVNIVKKTEVQTGGFSKESILPKRNSDKLIARKKDWDPKKYGGFDSPTVAYSVLVVAKVEKGKSKKLKSVKELLGITIMERSSFEKNPIDFLEAKGYKEVKKDLIIKLPKYSLFELENGRKRMLASAGELQKGNELALPSKYVNFLYLASHYEKLKGSPEDNEQKQLFVEQHKHYLDEIIEQISEFSKRVILADANLDKVLSAYNKHRDKPIREQAENIIHLFTLTNLGAPAAFKYFDTTIDRKRYTSTKEVLDATLIHQSITGLYETRIDLSQLGGDGGGGGGSSEAAAKGGTAPLEEEYRLFLEAPIQNVTLLEQWKREIPKVWAEINPPGLASTQAPIHVQLLSTALPVRVRQYPITLEAKRSLRETIRKFRAAGILRPVHSPWNTPLLPVRKSGTSEYRMVQDLREVNKRVETIHPTVPNPYTLLSLLPPDRIWYSVLDLKDAFFCIPLAPESQLIFAFEWADAEEGESGQLTWTRLPQGFKNSPTLFNEALNRDLQGFRLDHPSVSLLQYVDDLLIAADTQAACLSATRDLLMTLAELGYRVSGKKAQLCQEEVTYLGFKIHKGSRSLSNSRTQAILQIPVPKTKRQVREFLGTIGYCRLWIPGFAELAQPLYAATRPGNDPLVWGEKEEEAFQSLKLALTQPPALALPSLDKPFQLFVEETSGAAKGVLTQALGPWKRPVAYLSKRLDPVAAGWPRCLRAIAAAALLTREASKLTFGQDIEITSSHNLESLLRSPPDKWLTNARITQYQVLLLDPPRVRFKQTAALNPATLLPETDDTLPIHHCLDTLDSLTSTRPDLTDQPLAQAEATLFTDGSSYIRDGKRYAGAAVVTLDSVIWAEPLPIGTSAQKAELIALTKALEWSKDKSVNIYTDSRYAFATLHVHGMIYRERGWLTAGGKAIKNAPEILALLTAVWLPKRVAVMHCKGHQKDDAPTSTGNRRADEVAREVAIRPLSTQATISAGKRTADGSEFEKRTADGSEFESPKKKAKVE

SEQ ID NO: 7274 - protein, 2218 aa, synthetic construct
MPAAKRVKLDGGDKKYSIGLDIGTNSVGWAVITDEYKVPSKKFKVLGNTDRHSIKKNLIGALLFDSGETAEATRLKRTARRRYTRRKNRICYLQEIFSNEMAKVDDSFFHRLEESFLVEEDKKHERHPIFGNIVDEVAYHEKYPTIYHLRKKLVDSTDKADLRLIYLALAHMIKFRGHFLIEGDLNPDNSDVDKLFIQLVQTYNQLFEENPINASGVDAKAILSARLSKSRRLENLIAQLPGEKKNGLFGNLIALSLGLTPNFKSNFDLAEDAKLQLSKDTYDDDLDNLLAQIGDQYADLFLAAKNLSDAILLSDILRVNTEITKAPLSASMIKRYDEHHQDLTLLKALVRQQLPEKYKEIFFDQSKNGYAGYIDGGASQEEFYKFIKPILEKMDGTEELLVKLNREDLLRKQRTFDNGSIPHQIHLGELHAILRRQEDFYPFLKDNREKIEKILTFRIPYYVGPLARGNSRFAWMTRKSEETITPWNFEEVVDKGASAQSFIERMTNFDKNLPNEKVLPKHSLLYEYFTVYNELTKVKYVTEGMRKPAFLSGEQKKAIVDLLFKTNRKVTVKQLKEDYFKKIECFDSVEISGVEDRFNASLGTYHDLLKIIKDKDFLDNEENEDILEDIVLTLTLFEDREMIEERLKTYAHLFDDKVMKQLKRRRYTGWGRLSRKLINGIRDKQSGKTILDFLKSDGFANRNFMQLIHDDSLTFKEDIQKAQVSGQGDSLHEHIANLAGSPAIKKGILQTVKVVDELVKVMGRHKPENIVIEMARENQTTQKGQKNSRERMKRIEEGIKELGSQILKEHPVENTQLQNEKLYLYYLQNGRDMYVDQELDINRLSDYDVDHIVPQSFLKDDSIDNKVLTRSDKARGKSDNVPSEEVVKKMKNYWRQLLNAKLITQRKFDNLTKAERGGLSELDKAGFIKRQLVETRQITKHVAQILDSRMNTKYDENDKLIREVKVITLKSKLVSDFRKDFQFYKVREINNYHHAHDAYLNAVVGTALIKKYPKLESEFVYGDYKVYDVRKMIAKSEQEIGKATAKYFFYSNIMNFFKTEITLANGEIRKRPLIETNGETGEIVWDKGRDFATVRKVLSMPQVNIVKKTEVQTGGFSKESILPKRNSDKLIARKKDWDPKKYGGFDSPTVAYSVLVVAKVEKGKSKKLKSVKELLGITIMERSSFEKNPIDFLEAKGYKEVKKDLIIKLPKYSLFELENGRKRMLASAGELQKGNELALPSKYVNFLYLASHYEKLKGSPEDNEQKQLFVEQHKHYLDEIIEQISEFSKRVILADANLDKVLSAYNKHRDKPIREQAENIIHLFTLTNLGAPAAFKYFDTTIDRKRYTSTKEVLDATLIHQSITGLYETRIDLSQLGGDGGGGGGSSEAAAKGGTLGDQGSRGSDPLPEPRVTLTVEGIPTEFLVNTGAEHSVLTKPMGKMGSKRTVVAGATGSKVYPWTTKRLLKIGQKQVTHSFLVIPECPAPLLGRDLLTKLKAQIQFSTEGPQVTWEDRPAMCLVLNLEEEYRLHEKPVPPSIDPSWLQLFPMVWAEKAGMGLANQVPPVVVELKSDASPVAVRQYPMSKEAREGIRPHIQRFLDLGILVPCQSPWNTPLLPVKKPGTNDYRPVQDLREVNKRVQDIHPTVPNPYNLLSSLPPSHTWYSVLDLKDAFFCLKLHPNSQPLFAFEWRDPEKGNTGQLTWTRLPQGFKNSPTLFNEALHRDLASFRALNPQVVMLQYVDDLLVAAPTYRDCKEGTRRLLQELSKLGYRVSAKKAQLCREEVTYLGYLLKGGKRWLTPARKATVMKIPTPTTPRQVREFLGTAGFCRLWIPGFASLAAPLYPLTRPKVPFTWTEAHQEAFGRIKEALLSAPALALPDLTKPFALYVDEKEGVARGVLTQTLGPWRRPVAYLSKKLDPVASGWPTCLKAIAAVALLLKDADKLTLGQNVLVIAPHNLESIVRQPPDRWMTNARMTHYQSLLLNERVSFAPPAILNPATLLPVESDDTPIHICSEILAEETGTRPDLRDQPLPGVPAWYTDGSSFIMDGRRQAGAAIVDNKRTVWASNLPEGTSAQKAELIALTQALRLAEGKSINIYTDSRYAFATAHVHGAIYKQRGWLTSAGKDIKNKEEILALLEAIHLPKRVAIIHCPGHQRGTDPVATGNRKADEAAKQAAQSTRILTETTKNAGKRTADGSEFEKRTADGSEFESPKKKAKVE

SEQ ID NO: 7275 - protein, 2096 aa, synthetic construct
MPAAKRVKLDGGDKKYSIGLDIGTNSVGWAVITDEYKVPSKKFKVLGNTDRHSIKKNLIGALLFDSGETAEATRLKRTARRRYTRRKNRICYLQEIFSNEMAKVDDSFFHRLEESFLVEEDKKHERHPIFGNIVDEVAYHEKYPTIYHLRKKLVDSTDKADLRLIYLALAHMIKFRGHFLIEGDLNPDNSDVDKLFIQLVQTYNQLFEENPINASGVDAKAILSARLSKSRRLENLIAQLPGEKKNGLFGNLIALSLGLTPNFKSNFDLAEDAKLQLSKDTYDDDLDNLLAQIGDQYADLFLAAKNLSDAILLSDILRVNTEITKAPLSASMIKRYDEHHQDLTLLKALVRQQLPEKYKEIFFDQSKNGYAGYIDGGASQEEFYKFIKPILEKMDGTEELLVKLNREDLLRKQRTFDNGSIPHQIHLGELHAILRRQEDFYPFLKDNREKIEKILTFRIPYYVGPLARGNSRFAWMTRKSEETITPWNFEEVVDKGASAQSFIERMTNFDKNLPNEKVLPKHSLLYEYFTVYNELTKVKYVTEGMRKPAFLSGEQKKAIVDLLFKTNRKVTVKQLKEDYFKKIECFDSVEISGVEDRFNASLGTYHDLLKIIKDKDFLDNEENEDILEDIVLTLTLFEDREMIEERLKTYAHLFDDKVMKQLKRRRYTGWGRLSRKLINGIRDKQSGKTILDFLKSDGFANRNFMQLIHDDSLTFKEDIQKAQVSGQGDSLHEHIANLAGSPAIKKGILQTVKVVDELVKVMGRHKPENIVIEMARENQTTQKGQKNSRERMKRIEEGIKELGSQILKEHPVENTQLQNEKLYLYYLQNGRDMYVDQELDINRLSDYDVDHIVPQSFLKDDSIDNKVLTRSDKARGKSDNVPSEEVVKKMKNYWRQLLNAKLITQRKFDNLTKAERGGLSELDKAGFIKRQLVETRQITKHVAQILDSRMNTKYDENDKLIREVKVITLKSKLVSDFRKDFQFYKVREINNYHHAHDAYLNAVVGTALIKKYPKLESEFVYGDYKVYDVRKMIAKSEQEIGKATAKYFFYSNIMNFFKTEITLANGEIRKRPLIETNGETGEIVWDKGRDFATVRKVLSMPQVNIVKKTEVQTGGFSKESILPKRNSDKLIARKKDWDPKKYGGFDSPTVAYSVLVVAKVEKGKSKKLKSVKELLGITIMERSSFEKNPIDFLEAKGYKEVKKDLIIKLPKYSLFELENGRKRMLASAGELQKGNELALPSKYVNFLYLASHYEKLKGSPEDNEQKQLFVEQHKHYLDEIIEQISEFSKRVILADANLDKVLSAYNKHRDKPIREQAENIIHLFTLTNLGAPAAFKYFDTTIDRKRYTSTKEVLDATLIHQSITGLYETRIDLSQLGGDGGGGGGSSEAAAKGGTLNLEDEYRLYETSAEPEVSPGSTWLSDFPQAWAETGGMGLAVRQAPLIIPLKATSTPVSIKQYPMSQEAKLGIKPHIQRLLDQGILVPCQSPWNTPLLPVKKPGTNDYRPVQDLREVNKRVEDIHPTVPNPYNLLSGLPPSHRWYTVLDLKDAFFCLRLHPTSQPLFAFEWRDPGMGISGQLTWTRLPQGFKNSPTLFNEALHRDLADFRIQHPDLILLQYVDDILLAATSELDCQQGTRALLLTLGNLGYRASAKKAQLCQKQVKYLGYLLKEGQRWLTEARKETVMGQPTPKTPRQLREFLGKAGFCRLFIPGFAEMAAPLYPLTKPGTLFNWGPDQQKAYQEIKQALLTAPALGLPDLTKPFELFVDEKQGYAKGVLTQKLGPWRRPVAYLSKKLDPVAAGWPPCLRMVAAIAVLRKDAGKLTMGQPLVILAPHAVEALVKQPPDRWLSNARMTHYQAMLLDTDRVQFGPVVALNPATLLPLPEEGAPHDCLEILAETHGTRPDLTDQPIPDADHTWYTDGSSFLQEGQRKAGAAVTTETEVIWARALPAGTSAQRAELIALTQALKMAEGKRLNVYTDSRYAFATAHIHGEIYRRRGWLTSEGREIKNKSEILALLKALFLPKRLSIIHCLGHQKGDSAEARGNRLADQAAREAAIKTPPDTSTLLAGKRTADGSEFEKRTADGSEFESPKKKAKVE

SEQ ID NO: 7276 - protein, 2096 aa, synthetic construct
MPAAKRVKLDGGDKKYSIGLDIGTNSVGWAVITDEYKVPSKKFKVLGNTDRHSIKKNLIGALLFDSGETAEATRLKRTARRRYTRRKNRICYLQEIFSNEMAKVDDSFFHRLEESFLVEEDKKHERHPIFGNIVDEVAYHEKYPTIYHLRKKLVDSTDKADLRLIYLALAHMIKFRGHFLIEGDLNPDNSDVDKLFIQLVQTYNQLFEENPINASGVDAKAILSARLSKSRRLENLIAQLPGEKKNGLFGNLIALSLGLTPNFKSNFDLAEDAKLQLSKDTYDDDLDNLLAQIGDQYADLFLAAKNLSDAILLSDILRVNTEITKAPLSASMIKRYDEHHQDLTLLKALVRQQLPEKYKEIFFDQSKNGYAGYIDGGASQEEFYKFIKPILEKMDGTEELLVKLNREDLLRKQRTFDNGSIPHQIHLGELHAILRRQEDFYPFLKDNREKIEKILTFRIPYYVGPLARGNSRFAWMTRKSEETITPWNFEEVVDKGASAQSFIERMTNFDKNLPNEKVLPKHSLLYEYFTVYNELTKVKYVTEGMRKPAFLSGEQKKAIVDLLFKTNRKVTVKQLKEDYFKKIECFDSVEISGVEDRFNASLGTYHDLLKIIKDKDFLDNEENEDILEDIVLTLTLFEDREMIEERLKTYAHLFDDKVMKQLKRRRYTGWGRLSRKLINGIRDKQSGKTILDFLKSDGFANRNFMQLIHDDSLTFKEDIQKAQVSGQGDSLHEHIANLAGSPAIKKGILQTVKVVDELVKVMGRHKPENIVIEMARENQTTQKGQKNSRERMKRIEEGIKELGSQILKEHPVENTQLQNEKLYLYYLQNGRDMYVDQELDINRLSDYDVDHIVPQSFLKDDSIDNKVLTRSDKARGKSDNVPSEEVVKKMKNYWRQLLNAKLITQRKFDNLTKAERGGLSELDKAGFIKRQLVETRQITKHVAQILDSRMNTKYDENDKLIREVKVITLKSKLVSDFRKDFQFYKVREINNYHHAHDAYLNAVVGTALIKKYPKLESEFVYGDYKVYDVRKMIAKSEQEIGKATAKYFFYSNIMNFFKTEITLANGEIRKRPLIETNGETGEIVWDKGRDFATVRKVLSMPQVNIVKKTEVQTGGFSKESILPKRNSDKLIARKKDWDPKKYGGFDSPTVAYSVLVVAKVEKGKSKKLKSVKELLGITIMERSSFEKNPIDFLEAKGYKEVKKDLIIKLPKYSLFELENGRKRMLASAGELQKGNELALPSKYVNFLYLASHYEKLKGSPEDNEQKQLFVEQHKHYLDEIIEQISEFSKRVILADANLDKVLSAYNKHRDKPIREQAENIIHLFTLTNLGAPAAFKYFDTTIDRKRYTSTKEVLDATLIHQSITGLYETRIDLSQLGGDGGGGGGSSEAAAKGGTLNIEDEYRLHETSKEPDVSLGSTWLSDFPQAWAETGGMGLAVRQAPLIIPLKATSTPVSIKQYPMSQEARLGIKPHIQRLLDQGILVPCQSPWNTPLLPVKKPGTNDYRPVQDLREVNKRVEDIHPTVPNPYNLLSGLPPSHQWYTVLDLKDAFFCLRLHPTSQPLFAFEWRDPEMGISGQLTWTRLPQGFKNSPTLFNEALHRDLAGFRIQHPDLILLQYVDDLLLAATSELDCQQGTRALLQTLGDLGYRASAKKAQICQKQVKYLGYLLKEGQRWLTEARKETVMGQPIPKTPRQLREFLGTAGFCRLWIPGFAEMAAPLYPLTKPGTLFNWGPDQQKAFQEIKQALLTAPALGLPDLTKPFELFVDEKQGYAKGVLTQKLGPWRRPVAYLSKKLDPVAAGWPPCLRMVAAIAVLTKDAGKLTMGQPLVILAPHAVEALVKQPPDRWLSNARMTHYQALLLDTDRVQFGPVVALNPATLLPLPEEGLQHDCLDILAEAHGTRSDLMDQPLPDADHTWYTDGSSFLQEGQRKAGAAVTTETEVIWARALPAGTSAQRAELIALTQALKMAEGKKLNVYTDSRYAFATAHIHGEIYRRRGWLTSEGKEIKNKDEILALLKALFLPKRLSIIHCPGHQKGNSAEARGNRMADQAAREVATRETPETSTLLAGKRTADGSEFEKRTADGSEFESPKKKAKVE

SEQ ID NO: 7277 - protein, 2096 aa, synthetic construct
MPAAKRVKLDGGDKKYSIGLDIGTNSVGWAVITDEYKVPSKKFKVLGNTDRHSIKKNLIGALLFDSGETAEATRLKRTARRRYTRRKNRICYLQEIFSNEMAKVDDSFFHRLEESFLVEEDKKHERHPIFGNIVDEVAYHEKYPTIYHLRKKLVDSTDKADLRLIYLALAHMIKFRGHFLIEGDLNPDNSDVDKLFIQLVQTYNQLFEENPINASGVDAKAILSARLSKSRRLENLIAQLPGEKKNGLFGNLIALSLGLTPNFKSNFDLAEDAKLQLSKDTYDDDLDNLLAQIGDQYADLFLAAKNLSDAILLSDILRVNTEITKAPLSASMIKRYDEHHQDLTLLKALVRQQLPEKYKEIFFDQSKNGYAGYIDGGASQEEFYKFIKPILEKMDGTEELLVKLNREDLLRKQRTFDNGSIPHQIHLGELHAILRRQEDFYPFLKDNREKIEKILTFRIPYYVGPLARGNSRFAWMTRKSEETITPWNFEEVVDKGASAQSFIERMTNFDKNLPNEKVLPKHSLLYEYFTVYNELTKVKYVTEGMRKPAFLSGEQKKAIVDLLFKTNRKVTVKQLKEDYFKKIECFDSVEISGVEDRFNASLGTYHDLLKIIKDKDFLDNEENEDILEDIVLTLTLFEDREMIEERLKTYAHLFDDKVMKQLKRRRYTGWGRLSRKLINGIRDKQSGKTILDFLKSDGFANRNFMQLIHDDSLTFKEDIQKAQVSGQGDSLHEHIANLAGSPAIKKGILQTVKVVDELVKVMGRHKPENIVIEMARENQTTQKGQKNSRERMKRIEEGIKELGSQILKEHPVENTQLQNEKLYLYYLQNGRDMYVDQELDINRLSDYDVDHIVPQSFLKDDSIDNKVLTRSDKARGKSDNVPSEEVVKKMKNYWRQLLNAKLITQRKFDNLTKAERGGLSELDKAGFIKRQLVETRQITKHVAQILDSRMNTKYDENDKLIREVKVITLKSKLVSDFRKDFQFYKVREINNYHHAHDAYLNAVVGTALIKKYPKLESEFVYGDYKVYDVRKMIAKSEQEIGKATAKYFFYSNIMNFFKTEITLANGEIRKRPLIETNGETGEIVWDKGRDFATVRKVLSMPQVNIVKKTEVQTGGFSKESILPKRNSDKLIARKKDWDPKKYGGFDSPTVAYSVLVVAKVEKGKSKKLKSVKELLGITIMERSSFEKNPIDFLEAKGYKEVKKDLIIKLPKYSLFELENGRKRMLASAGELQKGNELALPSKYVNFLYLASHYEKLKGSPEDNEQKQLFVEQHKHYLDEIIEQISEFSKRVILADANLDKVLSAYNKHRDKPIREQAENIIHLFTLTNLGAPAAFKYFDTTIDRKRYTSTKEVLDATLIHQSITGLYETRIDLSQLGGDGGGGGGSSEAAAKGGTLNIEDEHRLHETSKEPDVSLGSTWLSDFPQAWAETGGMGLAVRQAPLIIPLKATSTPVSIKQYPMSQEARLGIKPHIQRLLDQGILVPCQSPWNTPLLPVKKPGTNDYRPVQDLREVNKRVEDIHPTVPNPYNLLSGLPPSHQWYTVLDLKDAFFCLRLHPTSQPLFAFEWRDPEMGISGQLTWTRLPQGFKNSPTLFDEALHRDLADFRIQHPDLILLQYVDDLLLAATSELDCQQGTRALLQTLGNLGYRASAKKAQICQKQVKYLGYLLKEGQRWLTEARKETVMGQPTPKTPRQLREFLGTAGFCRLWIPGFAEMAAPLYPLTKTGTLFNWGPDQQKAYQEIKQALLTAPALGLPDLTKPFELFVDEKQGYAKGVLTQKLGPWRRPVAYLSKKLDPVAAGWPPCLRMVAAIAVLTKDAGKLTMGQPLVILAPHAVEALVKQPPDRWLSNARMTHYQALLLDTDRVQFGPVVALNPATLLPLPEEGLQHNCLDILAEAHGTRPDLTDQPLPDADHTWYTDGSSLLQEGQRKAGAAVTTETEVIWAKALPAGTSAQRAELIALTQALKMAEGKKLNVYTDSRYAFATAHIHGEIYRRRGLLTSEGKEIKNKDEILALLKALFLPKRLSIIHCPGHQKGHSAEARGNRMADQAARKAAITETPDTSTLLAGKRTADGSEFEKRTADGSEFESPKKKAKVE

SEQ ID NO: 7278 - protein, 2088 aa, synthetic construct
MPAAKRVKLDGGDKKYSIGLDIGTNSVGWAVITDEYKVPSKKFKVLGNTDRHSIKKNLIGALLFDSGETAEATRLKRTARRRYTRRKNRICYLQEIFSNEMAKVDDSFFHRLEESFLVEEDKKHERHPIFGNIVDEVAYHEKYPTIYHLRKKLVDSTDKADLRLIYLALAHMIKFRGHFLIEGDLNPDNSDVDKLFIQLVQTYNQLFEENPINASGVDAKAILSARLSKSRRLENLIAQLPGEKKNGLFGNLIALSLGLTPNFKSNFDLAEDAKLQLSKDTYDDDLDNLLAQIGDQYADLFLAAKNLSDAILLSDILRVNTEITKAPLSASMIKRYDEHHQDLTLLKALVRQQLPEKYKEIFFDQSKNGYAGYIDGGASQEEFYKFIKPILEKMDGTEELLVKLNREDLLRKQRTFDNGSIPHQIHLGELHAILRRQEDFYPFLKDNREKIEKILTFRIPYYVGPLARGNSRFAWMTRKSEETITPWNFEEVVDKGASAQSFIERMTNFDKNLPNEKVLPKHSLLYEYFTVYNELTKVKYVTEGMRKPAFLSGEQKKAIVDLLFKTNRKVTVKQLKEDYFKKIECFDSVEISGVEDRFNASLGTYHDLLKIIKDKDFLDNEENEDILEDIVLTLTLFEDREMIEERLKTYAHLFDDKVMKQLKRRRYTGWGRLSRKLINGIRDKQSGKTILDFLKSDGFANRNFMQLIHDDSLTFKEDIQKAQVSGQGDSLHEHIANLAGSPAIKKGILQTVKVVDELVKVMGRHKPENIVIEMARENQTTQKGQKNSRERMKRIEEGIKELGSQILKEHPVENTQLQNEKLYLYYLQNGRDMYVDQELDINRLSDYDVDHIVPQSFLKDDSIDNKVLTRSDKARGKSDNVPSEEVVKKMKNYWRQLLNAKLITQRKFDNLTKAERGGLSELDKAGFIKRQLVETRQITKHVAQILDSRMNTKYDENDKLIREVKVITLKSKLVSDFRKDFQFYKVREINNYHHAHDAYLNAVVGTALIKKYPKLESEFVYGDYKVYDVRKMIAKSEQEIGKATAKYFFYSNIMNFFKTEITLANGEIRKRPLIETNGETGEIVWDKGRDFATVRKVLSMPQVNIVKKTEVQTGGFSKESILPKRNSDKLIARKKDWDPKKYGGFDSPTVAYSVLVVAKVEKGKSKKLKSVKELLGITIMERSSFEKNPIDFLEAKGYKEVKKDLIIKLPKYSLFELENGRKRMLASAGELQKGNELALPSKYVNFLYLASHYEKLKGSPEDNEQKQLFVEQHKHYLDEIIEQISEFSKRVILADANLDKVLSAYNKHRDKPIREQAENIIHLFTLTNLGAPAAFKYFDTTIDRKRYTSTKEVLDATLIHQSITGLYETRIDLSQLGGDGGGGGGSSEAAAKGGLDDEYRLYSPLVKPDQNIQFWLEQFPQAWAETAGMGLAKQVPPQVIQLKASATPVSVRQYPLSKEAQEGIRPHVQRLIQQGILVPVQSPWNTPLLPVRKPGTNDYRPVQDLREVNKRVQDIHPTVPNPYNLLCALPPQRSWYTVLDLKDAFFCLRLHPTSQPLFAFEWRDPGTGRTGQLTWTRLPQGFKNSPTIFNEALHRDLANFRIQHPQVTLLQYVDDLLLAGATKQDCLEGTKALLLELSDLGYRASAKKAQICRREVTYLGYSLRDGQRWLTEARKKTVVQIPAPTTAKQVREFLGKAGFCRLFIPGFATLAAPLYPLTKPKGEFSWAPEHQKAFDAIKKALLSAPALALPDVTKPFTLYVDERKGVARGVLTQTLGPWRRPVAYLSKKLDPVASGWPVCLKAIAAVAILVKDADKLTLGQNITVIAPHALENIVRQPPDRWMTNARMTHYQSLLLTERVTFAPPAALNPATLLPEETDEPVTHDCHQLLIEETGVRKDLTDIPLTGEVLTWFTDGSSYVVEGKRMAGAAVVDGTRTIWASSLPEGTSAQKAELMALTQALRLAEGKSINIYTDSRYAFATAHVHGAIYKQRGWLTSAGREIKNKEEILSLLEALHLPKRLAIIHCPGHQKAKDPISRGNQMADRVAKQAAQGVNLLPAGKRTADGSEFEKRTADGSEFESPKKKAKVE

SEQ ID NO: 7279 - protein, 2088 aa, synthetic construct; identical to SEQ ID NO: 7278

SEQ ID NO: 7280 - protein, 2090 aa, synthetic construct
MPAAKRVKLDGGDKKYSIGLDIGTNSVGWAVITDEYKVPSKKFKVLGNTDRHSIKKNLIGALLFDSGETAEATRLKRTARRRYTRRKNRICYLQEIFSNEMAKVDDSFFHRLEESFLVEEDKKHERHPIFGNIVDEVAYHEKYPTIYHLRKKLVDSTDKADLRLIYLALAHMIKFRGHFLIEGDLNPDNSDVDKLFIQLVQTYNQLFEENPINASGVDAKAILSARLSKSRRLENLIAQLPGEKKNGLFGNLIALSLGLTPNFKSNFDLAEDAKLQLSKDTYDDDLDNLLAQIGDQYADLFLAAKNLSDAILLSDILRVNTEITKAPLSASMIKRYDEHHQDLTLLKALVRQQLPEKYKEIFFDQSKNGYAGYIDGGASQEEFYKFIKPILEKMDGTEELLVKLNREDLLRKQRTFDNGSIPHQIHLGELHAILRRQEDFYPFLKDNREKIEKILTFRIPYYVGPLARGNSRFAWMTRKSEETITPWNFEEVVDKGASAQSFIERMTNFDKNLPNEKVLPKHSLLYEYFTVYNELTKVKYVTEGMRKPAFLSGEQKKAIVDLLFKTNRKVTVKQLKEDYFKKIECFDSVEISGVEDRFNASLGTYHDLLKIIKDKDFLDNEENEDILEDIVLTLTLFEDREMIEERLKTYAHLFDDKVMKQLKRRRYTGWGRLSRKLINGIRDKQSGKTILDFLKSDGFANRNFMQLIHDDSLTFKEDIQKAQVSGQGDSLHEHIANLAGSPAIKKGILQTVKVVDELVKVMGRHKPENIVIEMARENQTTQKGQKNSRERMKRIEEGIKELGSQILKEHPVENTQLQNEKLYLYYLQNGRDMYVDQELDINRLSDYDVDHIVPQSFLKDDSIDNKVLTRSDKARGKSDNVPSEEVVKKMKNYWRQLLNAKLITQRKFDNLTKAERGGLSELDKAGFIKRQLVETRQITKHVAQILDSRMNTKYDENDKLIREVKVITLKSKLVSDFRKDFQFYKVREINNYHHAHDAYLNAVVGTALIKKYPKLESEFVYGDYKVYDVRKMIAKSEQEIGKATAKYFFYSNIMNFFKTEITLANGEIRKRPLIETNGETGEIVWDKGRDFATVRKVLSMPQVNIVKKTEVQTGGFSKESILPKRNSDKLIARKKDWDPKKYGGFDSPTVAYSVLVVAKVEKGKSKKLKSVKELLGITIMERSSFEKNPIDFLEAKGYKEVKKDLIIKLPKYSLFELENGRKRMLASAGELQKGNELALPSKYVNFLYLASHYEKLKGSPEDNEQKQLFVEQHKHYLDEIIEQISEFSKRVILADANLDKVLSAYNKHRDKPIREQAENIIHLFTLTNLGAPAAFKYFDTTIDRKRYTSTKEVLDATLIHQSITGLYETRIDLSQLGGDGGGGGGSSEAAAKGGTLQLDDEYRLYSPLVKPDQNIQFWLEQFPQAWAETAGMGLAKQVPPQVIQLKASATPVSVRQYPLSKEAQEGIRPHVQRLIQQGILVPVQSPWNTPLLPVRKPGTNDYRPVQDLREVNKRVQDIHPTVPNPYNLLCALPPQRSWYTVLDLKDAFFCLRLHPTSQPLFAFEWRDPGTGRTGQLTWTRLPQGFKNSPTIFDEALHRDLANFRIQHPQVTLLQYVDDLLLAGATKQDCLEGTKALLLELSDLGYRASAKKAQICRREVTYLGYSLRDGQRWLTEARKKTVVQIPAPTTAKQVREFLGTAGFCRLWIPGFATLAAPLYPLTKEKGEFSWAPEHQKAFDAIKKALLSAPALALPDVTKPFTLYVDERKGVARGVLTQTLGPWRRPVAYLSKKLDPVASGWPVCLKAIAAVAILVKDADKLTLGQNITVIAPHALENIVRQPPDRWMTNARMTHYQSLLLTERVTFAPPAALNPATLLPEETDEPVTHDCHQLLIEETGVRKDLTDIPLTGEVLTWFTDGSSYVVEGKRMAGAAVVDGTRTIWASSLPEGTSAQKAELMALTQALRLAEGKSINIYTDSRYAFATAHVHGAIYKQRGLLTSAGREIKNKEEILSLLEALHLPKRLAIIHCPGHQKAKDPISRGNQMADRVAKQAAQGVNLLAGKRTADGSEFEKRTADGSEFESPKKKAKVE

SEQ ID NO: 7281 - protein, 2094 aa, synthetic construct
MPAAKRVKLDGGDKKYSIGLDIGTNSVGWAVITDEYKVPSKKFKVLGNTDRHSIKKNLIGALLFDSGETAEATRLKRTARRRYTRRKNRICYLQEIFSNEMAKVDDSFFHRLEESFLVEEDKKHERHPIFGNIVDEVAYHEKYPTIYHLRKKLVDSTDKADLRLIYLALAHMIKFRGHFLIEGDLNPDNSDVDKLFIQLVQTYNQLFEENPINASGVDAKAILSARLSKSRRLENLIAQLPGEKKNGLFGNLIALSLGLTPNFKSNFDLAEDAKLQLSKDTYDDDLDNLLAQIGDQYADLFLAAKNLSDAILLSDILRVNTEITKAPLSASMIKRYDEHHQDLTLLKALVRQQLPEKYKEIFFDQSKNGYAGYIDGGASQEEFYKFIKPILEKMDGTEELLVKLNREDLLRKQRTFDNGSIPHQIHLGELHAILRRQEDFYPFLKDNREKIEKILTFRIPYYVGPLARGNSRFAWMTRKSEETITPWNFEEVVDKGASAQSFIERMTNFDKNLPNEKVLPKHSLLYEYFTVYNELTKVKYVTEGMRKPAFLSGEQKKAIVDLLFKTNRKVTVKQLKEDYFKKIECFDSVEISGVEDRFNASLGTYHDLLKIIKDKDFLDNEENEDILEDIVLTLTLFEDREMIEERLKTYAHLFDDKVMKQLKRRRYTGWGRLSRKLINGIRDKQSGKTILDFLKSDGFANRNFMQLIHDDSLTFKEDIQKAQVSGQGDSLHEHIANLAGSPAIKKGILQTVKVVDELVKVMGRHKPENIVIEMARENQTTQKGQKNSRERMKRIEEGIKELGSQILKEHPVENTQLQNEKLYLYYLQNGRDMYVDQELDINRLSDYDVDHIVPQSFLKDDSIDNKVLTRSDKARGKSDNVPSEEVVKKMKNYWRQLLNAKLITQRKFDNLTKAERGGLSELDKAGFIKRQLVETRQITKHVAQILDSRMNTKYDENDKLIREVKVITLKSKLVSDFRKDFQFYKVREINNYHHAHDAYLNAVVGTALIKKYPKLESEFVYGDYKVYDVRKMIAKSEQEIGKATAKYFFYSNIMNFFKTEITLANGEIRKRPLIETNGETGEIVWDKGRDFATVRKVLSMPQVNIVKKTEVQTGGFSKESILPKRNSDKLIARKKDWDPKKYGGFDSPTVAYSVLVVAKVEKGKSKKLKSVKELLGITIMERSSFEKNPIDFLEAKGYKEVKKDLIIKLPKYSLFELENGRKRMLASAGELQKGNELALPSKYVNFLYLASHYEKLKGSPEDNEQKQLFVEQHKHYLDEIIEQISEFSKRVILADANLDKVLSAYNKHRDKPIREQAENIIHLFTLTNLGAPAAFKYFDTTIDRKRYTSTKEVLDATLIHQSITGLYETRIDLSQLGGDGGGGGGSSEAAAKGGVLNLEEEYRLHEKPVPSSIDPSWLQLFPTVWAERAGMGLANQVPPVVVELRSGASPVAVRQYPMSKEAREGIRPHIQRFLDLGVLVPCQSPWNTPLLPVKKPGTNDYRPVQDLREINKRVQDIHPTVPNPYNLLSSLPPSHTWYSVLDLKDAFFCLKLHPNSQPLFAFEWRDPEKGNTGQLTWTRLPQGFKNSPTLFNEALHRDLAPFRALNPQVVLLQYVDDLLVAAPTYRDCKEGTQKLLQELSKLGYRVSAKKAQLCQKEVTYLGYLLKEGKRWLTPARKATVMKIPPPTTPRQVREFLGKAGFCRLFIPGFASLAAPLYPLTKPSIPFIWTEEHQKAFDRIKEALLSAPALALPDLTKPFTLYVDERAGVARGVLTQTLGPWRRPVAYLSKKLDPVASGWPTCLKAVAAVALLLKDADKLTLGQNVTVIASHSLESIVRQPPDRWMTNARMTHYQSLLLNERVSFAPPAVLNPATLLPVESEATPVHRCSEILAEETGTRRDLKDQPLPGVPAWYTDGSSFIAEGKRRAGAAIVDGKRTVWASSLPEGTSAQKAELVALTQALRLAEGKDINIYTDSRYAFATAHIHGAIYKQRGWLTSAGKDIKNKEEILALLEAIHLPKRVAIIHCPGHQKGNDPVATGNRRADEAAKQAALSTRVLAETTKPAGKRTADGSEFEKRTADGSEFESPKKKAKVE

SEQ ID NO: 7282 - protein, 2096 aa, synthetic construct
MPAAKRVKLDGGDKKYSIGLDIGTNSVGWAVITDEYKVPSKKFKVLGNTDRHSIKKNLIGALLFDSGETAEATRLKRTARRRYTRRKNRICYLQEIFSNEMAKVDDSFFHRLEESFLVEEDKKHERHPIFGNIVDEVAYHEKYPTIYHLRKKLVDSTDKADLRLIYLALAHMIKFRGHFLIEGDLNPDNSDVDKLFIQLVQTYNQLFEENPINASGVDAKAILSARLSKSRRLENLIAQLPGEKKNGLFGNLIALSLGLTPNFKSNFDLAEDAKLQLSKDTYDDDLDNLLAQIGDQYADLFLAAKNLSDAILLSDILRVNTEITKAPLSASMIKRYDEHHQDLTLLKALVRQQLPEKYKEIFFDQSKNGYAGYIDGGASQEEFYKFIKPILEKMDGTEELLVKLNREDLLRKQRTFDNGSIPHQIHLGELHAILRRQEDFYPFLKDNREKIEKILTFRIPYYVGPLARGNSRFAWMTRKSEETITPWNFEEVVDKGASAQSFIERMTNFDKNLPNEKVLPKHSLLYEYFTVYNELTKVKYVTEGMRKPAFLSGEQKKAIVDLLFKTNRKVTVKQLKEDYFKKIECFDSVEISGVEDRFNASLGTYHDLLKIIKDKDFLDNEENEDILEDIVLTLTLFEDREMIEERLKTYAHLFDDKVMKQLKRRRYTGWGRLSRKLINGIRDKQSGKTILDFLKSDGFANRNFMQLIHDDSLTFKEDIQKAQVSGQGDSLHEHIANLAGSPAIKKGILQTVKVVDELVKVMGRHKPENIVIEMARENQTTQKGQKNSRERMKRIEEGIKELGSQILKEHPVENTQLQNEKLYLYYLQNGRDMYVDQELDINRLSDYDVDHIVPQSFLKDDSIDNKVLTRSDKARGKSDNVPSEEVVKKMKNYWRQLLNAKLITQRKFDNLTKAERGGLSELDKAGFIKRQLVETRQITKHVAQILDSRMNTKYDENDKLIREVKVITLKSKLVSDFRKDFQFYKVREINNYHHAHDAYLNAVVGTALIKKYPKLESEFVYGDYKVYDVRKMIAKSEQEIGKATAKYFFYSNIMNFFKTEITLANGEIRKRPLIETNGETGEIVWDKGRDFATVRKVLSMPQVNIVKKTEVQTGGFSKESILPKRNSDKLIARKKDWDPKKYGGFDSPTVAYSVLVVAKVEKGKSKKLKSVKELLGITIMERSSFEKNPIDFLEAKGYKEVKKDLIIKLPKYSLFELENGRKRMLASAGELQKGNELALPSKYVNFLYLASHYEKLKGSPEDNEQKQLFVEQHKHYLDEIIEQISEFSKRVILADANLDKVLSAYNKHRDKPIREQAENIIHLFTLTNLGAPAAFKYFDTTIDRKRYTSTKEVLDATLIHQSITGLYETRIDLSQLGGDGGGGGGSSEAAAKGGTLNIEDEYRLHETSKEPDVPLGSTWLSDFPQAWAETGGMGLAVRQAPLIIPLKATSTPVSIKQYPMSQEARLGIKPHIQRLLDQGILVPCQSPWNTPLLPVKKPGTNDYRPVQDLREVNKRVEDIHPTVPNPYNLLSGLPPSHQWYTVLDLKDAFFCLRLHPTSQPLFAFEWRDPEMGISGQLTWTRLPQGFKNSPTLFNEALHRDLADFRIQHPDLILLQYVDDLLLAATSEQDCQRGTRALLQTLGNLGYRASAKKAQICQKQVKYLGYLLKEGQRWLTEARKETVMGQPTPKTPRQLREFLGTAGFCRLWIPGFAEMAAPLYPLTKPGTLFNWGPDQQKAYQEIKQALLTAPALGLPDLTKPFELFVDEKQGYAKGVLTQKLGPWRRPVAYLSKKLDPVAAGWPPCLRMVAAIAVLTKDAGKLTMGQPLVILAPHAVEALVKQPPDRWLSNARMTHYQAMLLDTDRVQFGPVVALNPATLLPLPEKEAPHDCLEILAETHGTRPDLTDQPIPDADYTWYTDGSSFLQEGQRRAGAAVTTETEVIWARALPAGTSAQRAELIALTQALKMAEGKKLNVYTDSRYAFATAHVHGEIYRRRGWLTSEGREIKNKNEILALLKALFLPKRLSIIHCPGHQKGNSAEARGNRMADQAAREAAMKAVLETSTLLAGKRTADGSEFEKRTADGSEFESPKKKAKVE

SEQ ID NO: 7283 - protein, 2173 aa, synthetic construct
MPAAKRVKLDGGDKKYSIGLDIGTNSVGWAVITDEYKVPSKKFKVLGNTDRHSIKKNLIGALLFDSGETAEATRLKRTARRRYTRRKNRICYLQEIFSNEMAKVDDSFFHRLEESFLVEEDKKHERHPIFGNIVDEVAYHEKYPTIYHLRKKLVDSTDKADLRLIYLALAHMIKFRGHFLIEGDLNPDNSDVDKLFIQLVQTYNQLFEENPINASGVDAKAILSARLSKSRRLENLIAQLPGEKKNGLFGNLIALSLGLTPNFKSNFDLAEDAKLQLSKDTYDDDLDNLLAQIGDQYADLFLAAKNLSDAILLSDILRVNTEITKAPLSASMIKRYDEHHQDLTLLKALVRQQLPEKYKEIFFDQSKNGYAGYIDGGASQEEFYKFIKPILEKMDGTEELLVKLNREDLLRKQRTFDNGSIPHQIHLGELHAILRRQEDFYPFLKDNREKIEKILTFRIPYYVGPLARGNSRFAWMTRKSEETITPWNFEEVVDKGASAQSFIERMTNFDKNLPNEKVLPKHSLLYEYFTVYNELTKVKYVTEGMRKPAFLSGEQKKAIVDLLFKTNRKVTVKQLKEDYFKKIECFDSVEISGVEDRFNASLGTYHDLLKIIKDKDFLDNEENEDILEDIVLTLTLFEDREMIEERLKTYAHLFDDKVMKQLKRRRYTGWGRLSRKLINGIRDKQSGKTILDFLKSDGFANRNFMQLIHDDSLTFKEDIQKAQVSGQGDSLHEHIANLAGSPAIKKGILQTVKVVDELVKVMGRHKPENIVIEMARENQTTQKGQKNSRERMKRIEEGIKELGSQILKEHPVENTQLQNEKLYLYYLQNGRDMYVDQELDINRLSDYDVDHIVPQSFLKDDSIDNKVLTRSDKARGKSDNVPSEEVVKKMKNYWRQLLNAKLITQRKFDNLTKAERGGLSELDKAGFIKRQLVETRQITKHVAQILDSRMNTKYDENDKLIREVKVITLKSKLVSDFRKDFQFYKVREINNYHHAHDAYLNAVVGTALIKKYPKLESEFVYGDYKVYDVRKMIAKSEQEIGKATAKYFFYSNIMNFFKTEITLANGEIRKRPLIETNGETGEIVWDKGRDFATVRKVLSMPQVNIVKKTEVQTGGFSKESILPKRNSDKLIARKKDWDPKKYGGFDSPTVAYSVLVVAKVEKGKSKKLKSVKELLGITIMERSSFEKNPIDFLEAKGYKEVKKDLIIKLPKYSLFELENGRKRMLASAGELQKGNELALPSKYVNFLYLASHYEKLKGSPEDNEQKQLFVEQHKHYLDEIIEQISEFSKRVILADANLDKVLSAYNKHRDKPIREQAENIIHLFTLTNLGAPAAFKYFDTTIDRKRYTSTKEVLDATLIHQSITGLYETRIDLSQLGGDGGGGGEAAAKGSSGGMDLLKPLTVERKGVKIKGYWNSQADITCVPKDLLQGEEPVRQQNVTTIHGTQEGDVYYVNLKIDGRRINTEVIGTTLDYAIITPGDVPWILKKPLELTIKLDLEEQQGTLLNNSILSKKGKEELKQLFEKYSALWQSWENQVGHRRIRPHKIATGTVKPTPQKQYHINPKAKPDIQIVINDLLKQGVLIQKESTMNTPVYPVPKPNGRWRMVLDYRAVNKVTPLIAVQNQHSYGILGSLFKGRYKTTIDLSNGFWAHPIVPEDYWITAFTWQGKQYCWTVLPQGFLNSPGLFNGDVVDLLQGIPNVEVYVDDVYISHDSEKEHLEYLDILFNRLKEAGYIISLKKSNIANSIVDFLGFQITNEGRGLTDTFKEKLENITAPTTLKQLQSILGKLNFARNFIPDFTELIAPLYALIPKSPKNYVPWQIEHSTTLETLITKLNGAEYLQGRKGDKTLIMKVNASYTTGYIRYYNEGEKKPISYVSIVFSKTELKFTELEKLLTTVHKGLLKALDLSMGQNIHVYSPIVSMQNIQKTPQTAKKALASRWLSWLSYLEDPRIRFFYDPQMPALKDLPAVDTGKDNKKHPSNFQHIFYTDGSAITSPTKEGHLNAGMGIVYFINKDGNLQKQQEWSISLGNHTAQFAEIAAFEFALKKCLPLGGNILVVTDSNYVAKAYNEELDVWASNGFVNNRKKPLKHISKWKSVADLKRLRPDVVVTHEPGHQKLDSSPHAYGNNLADQLATQASFKVHAGKRTADGSEFEKRTADGSEFESPKKKAKVE

SEQ ID NO: 7284 - protein, 2095 aa, synthetic construct
MPAAKRVKLDGGDKKYSIGLDIGTNSVGWAVITDEYKVPSKKFKVLGNTDRHSIKKNLIGALLFDSGETAEATRLKRTARRRYTRRKNRICYLQEIFSNEMAKVDDSFFHRLEESFLVEEDKKHERHPIFGNIVDEVAYHEKYPTIYHLRKKLVDSTDKADLRLIYLALAHMIKFRGHFLIEGDLNPDNSDVDKLFIQLVQTYNQLFEENPINASGVDAKAILSARLSKSRRLENLIAQLPGEKKNGLFGNLIALSLGLTPNFKSNFDLAEDAKLQLSKDTYDDDLDNLLAQIGDQYADLFLAAKNLSDAILLSDILRVNTEITKAPLSASMIKRYDEHHQDLTLLKALVRQQLPEKYKEIFFDQSKNGYAGYIDGGASQEEFYKFIKPILEKMDGTEELLVKLNREDLLRKQRTFDNGSIPHQIHLGELHAILRRQEDFYPFLKDNREKIEKILTFRIPYYVGPLARGNSRFAWMTRKSEETITPWNFEEVVDKGASAQSFIERMTNFDKNLPNEKVLPKHSLLYEYFTVYNELTKVKYVTEGMRKPAFLSGEQKKAIVDLLFKTNRKVTVKQLKEDYFKKIECFDSVEISGVEDRFNASLGTYHDLLKIIKDKDFLDNEENEDILEDIVLTLTLFEDREMIEERLKTYAHLFDDKVMKQLKRRRYTGWGRLSRKLINGIRDKQSGKTILDFLKSDGFANRNFMQLIHDDSLTFKEDIQKAQVSGQGDSLHEHIANLAGSPAIKKGILQTVKVVDELVKVMGRHKPENIVIEMARENQTTQKGQKNSRERMKRIEEGIKELGSQILKEHPVENTQLQNEKLYLYYLQNGRDMYVDQELDINRLSDYDVDHIVPQSFLKDDSIDNKVLTRSDKARGKSDNVPSEEVVKKMKNYWRQLLNAKLITQRKFDNLTKAERGGLSELDKAGFIKRQLVETRQITKHVAQILDSRMNTKYDENDKLIREVKVITLKSKLVSDFRKDFQFYKVREINNYHHAHDAYLNAVVGTALIKKYPKLESEFVYGDYKVYDVRKMIAKSEQEIGKATAKYFFYSNIMNFFKTEITLANGEIRKRPLIETNGETGEIVWDKGRDFATVRKVLSMPQVNIVKKTEVQTGGFSKESILPKRNSDKLIARKKDWDPKKYGGFDSPTVAYSVLVVAKVEKGKSKKLKSVKELLGITIMERSSFEKNPIDFLEAKGYKEVKKDLIIKLPKYSLFELENGRKRMLASAGELQKGNELALPSKYVNFLYLASHYEKLKGSPEDNEQKQLFVEQHKHYLDEIIEQISEFSKRVILADANLDKVLSAYNKHRDKPIREQAENIIHLFTLTNLGAPAAFKYFDTTIDRKRYTSTKEVLDATLIHQSITGLYETRIDLSQLGGDGGGGGEAAAKGSSGGTLQLEEEYRLFEPESTQKQEMDIWLKNFPQAWAETGGMGTAHCQAPVLIQLKATATPISIRQYPMPHEAYQGIKPHIRRMLDQGILKPCQSPWNTPLLPVKKPGTEDYRPVQDLREVNKRVEDIHPTVPNPYNLLSTLPPSHPWYTVLDLKDAFFCLRLHSESQLLFAFEWRDPEIGLSGQLTWTRLPQGFKNSPTLFNEALHSDLADFRVRYPALVLLQYVDDLLLAAATRTECLEGTKALLETLGNKGYRASAKKAQICLQEVTYLGYSLKDGQRWLTKARKEAILSIPVPKNSRQVREFLGKAGYCRLFIPGFAELAAPLYPLTRPGTLFQWGTEQQLAFEDIKKALLSSPALGLPDITKPFELFIDENSGFAKGVLVQKLGPWKRPVAYLSKKLDTVASGWPPCLRMVAAIAILVKDAGKLTLGQPLTILTSHPVEALVRQPPNKWLSNARMTHYQAMLLDAERVHFGPTVSLNPATLLPLPSGGNHHDCLQILAETHGTRPDLTDQPLPDADLTWYTDGSSFIRNGEREAGAAVTTESEVIWAAPLPPGTSAQRAELIALTQALKMAEGKKLTVYTDSRYAFATTHVHGEIYRRRGWLTSEGKEIKNKNEILALLEALFLPKRLSIIHCPGHQKGDSPQAKGNRLADDTAKKAATETHSSLTVLPAGKRTADGSEFEKRTADGSEFESPKKKAKVE

SEQ ID NO: 7285 - protein, 2176 aa, synthetic construct
MPAAKRVKLDGGDKKYSIGLDIGTNSVGWAVITDEYKVPSKKFKVLGNTDRHSIKKNLIGALLFDSGETAEATRLKRTARRRYTRRKNRICYLQEIFSNEMAKVDDSFFHRLEESFLVEEDKKHERHPIFGNIVDEVAYHEKYPTIYHLRKKLVDSTDKADLRLIYLALAHMIKFRGHFLIEGDLNPDNSDVDKLFIQLVQTYNQLFEENPINASGVDAKAILSARLSKSRRLENLIAQLPGEKKNGLFGNLIALSLGLTPNFKSNFDLAEDAKLQLSKDTYDDDLDNLLAQIGDQYADLFLAAKNLSDAILLSDILRVNTEITKAPLSASMIKRYDEHHQDLTLLKALVRQQLPEKYKEIFFDQSKNGYAGYIDGGASQEEFYKFIKPILEKMDGTEELLVKLNREDLLRKQRTFDNGSIPHQIHLGELHAILRRQEDFYPFLKDNREKIEKILTFRIPYYVGPLARGNSRFAWMTRKSEETITPWNFEEVVDKGASAQSFIERMTNFDKNLPNEKVLPKHSLLYEYFTVYNELTKVKYVTEGMRKPAFLSGEQKKAIVDLLFKTNRKVTVKQLKEDYFKKIECFDSVEISGVEDRFNASLGTYHDLLKIIKDKDFLDNEENEDILEDIVLTLTLFEDREMIEERLKTYAHLFDDKVMKQLKRRRYTGWGRLSRKLINGIRDKQSGKTILDFLKSDGFANRNFMQLIHDDSLTFKEDIQKAQVSGQGDSLHEHIANLAGSPAIKKGILQTVKVVDELVKVMGRHKPENIVIEMARENQTTQKGQKNSRERMKRIEEGIKELGSQILKEHPVENTQLQNEKLYLYYLQNGRDMYVDQELDINRLSDYDVDHIVPQSFLKDDSIDNKVLTRSDKARGKSDNVPSEEVVKKMKNYWRQLLNAKLITQRKFDNLTKAERGGLSELDKAGFIKRQLVETRQITKHVAQILDSRMNTKYDENDKLIREVKVITLKSKLVSDFRKDFQFYKVREINNYHHAHDAYLNAVVGTALIKKYPKLESEFVYGDYKVYDVRKMIAKSEQEIGKATAKYFFYSNIMNFFKTEITLANGEIRKRPLIETNGETGEIVWDKGRDFATVRKVLSMPQVNIVKKTEVQTGGFSKESILPKRNSDKLIARKKDWDPKKYGGFDSPTVAYSVLVVAKVEKGKSKKLKSVKELLGITIMERSSFEKNPIDFLEAKGYKEVKKDLIIKLPKYSLFELENGRKRMLASAGELQKGNELALPSKYVNFLYLASHYEKLKGSPEDNEQKQLFVEQHKHYLDEIIEQISEFSKRVILADANLDKVLSAYNKHRDKPIREQAENIIHLFTLTNLGAPAAFKYFDTTIDRKRYTSTKEVLDATLIHQSITGLYETRIDLSQLGGDGGGGGEAAAKGSSGGMNPLQLLQPLPAEIKGTKLLAHWNSGATITCIPESFLEDEQPIKKTLIKTIHGEKQQNVYYVTFKVKGRKVEAEVIASPYEYILLSPTDVPWLTQQPLQLTILVPLQEYQEKILSKTALPEDQKQQLKTLFVKYDNLWQHWENQVGHRKIRPHNIATGDYPPRPQKQYPINPKAKPSIQIVIDDLLKQGVLTPQNSTMNTPVYPVPKPDGRWRMVLDYREVNKTIPLTAAQNQHSAGILATIVRQKYKTTLDLANGFWAHPITPESYWLTAFTWQGKQYCWTRLPQGFLNSPALFTADVVDLLKEIPNVQVYVDDIYLSHDDPKEHVQQLEKVFQILLQAGYVVSLKKSEIGQKTVEFLGFNITKEGRGLTDTFKTKLLNITPPKDLKQLQSILGLLNFARNFIPNFAELVQPLYNLIASAKGKYIEWSEENTKQLNMVIEALNTASNLEERLPEQRLVIKVNTSPSAGYVRYYNETGKKPIMYLNYVFSKAELKFSMLEKLLTTMHKALIKAMDLAMGQEILVYSPIVSMTKIQKTPLPERKALPIRWITWMTYLEDPRIQFHYDKTLPELKHIPDVYTSSQSPVKHPSQYEGVFYTDGSAIKSPDPTKSNNAGMGIVHATYKPEYQVLNQWSIPLGNHTAQMAEIAAVEFACKKALKIPGPVLVITDSFYVAESANKELPYWKSNGFVNNKKKPLKHISKWKSIAECLSMKPDITIQHEKGISLQIPVFILKGNALADKLATQGSYVVNAGKRTADGSEFEKRTADGSEFESPKKKAKVE

SEQ ID NO: 7286 - protein, 2127 aa, synthetic construct
MPAAKRVKLDGGDKKYSIGLDIGTNSVGWAVITDEYKVPSKKFKVLGNTDRHSIKKNLIGALLFDSGETAEATRLKRTARRRYTRRKNRICYLQEIFSNEMAKVDDSFFHRLEESFLVEEDKKHERHPIFGNIVDEVAYHEKYPTIYHLRKKLVDSTDKADLRLIYLALAHMIKFRGHFLIEGDLNPDNSDVDKLFIQLVQTYNQLFEENPINASGVDAKAILSARLSKSRRLENLIAQLPGEKKNGLFGNLIALSLGLTPNFKSNFDLAEDAKLQLSKDTYDDDLDNLLAQIGDQYADLFLAAKNLSDAILLSDILRVNTEITKAPLSASMIKRYDEHHQDLTLLKALVRQQLPEKYKEIFFDQSKNGYAGYIDGGASQEEFYKFIKPILEKMDGTEELLVKLNREDLLRKQRTFDNGSIPHQIHLGELHAILRRQEDFYPFLKDNREKIEKILTFRIPYYVGPLARGNSRFAWMTRKSEETITPWNFEEVVDKGASAQSFIERMTNFDKNLPNEKVLPKHSLLYEYFTVYNELTKVKYVTEGMRKPAFLSGEQKKAIVDLLFKTNRKVTVKQLKEDYFKKIECFDSVEISGVEDRFNASLGTYHDLLKIIKDKDFLDNEENEDILEDIVLTLTLFEDREMIEERLKTYAHLFDDKVMKQLKRRRYTGWGRLSRKLINGIRDKQSGKTILDFLKSDGFANRNFMQLIHDDSLTFKEDIQKAQVSGQGDSLHEHIANLAGSPAIKKGILQTVKVVDELVKVMGRHKPENIVIEMARENQTTQKGQKNSRERMKRIEEGIKELGSQILKEHPVENTQLQNEKLYLYYLQNGRDMYVDQELDINRLSDYDVDHIVPQSFLKDDSIDNKVLTRSDKARGKSDNVPSEEVVKKMKNYWRQLLNAKLITQRKFDNLTKAERGGLSELDKAGFIKRQLVETRQITKHVAQILDSRMNTKYDENDKLIREVKVITLKSKLVSDFRKDFQFYKVREINNYHHAHDAYLNAVVGTALIKKYPKLESEFVYGDYKVYDVRKMIAKSEQEIGKATAKYFFYSNIMNFFKTEITLANGEIRKRPLIETNGETGEIVWDKGRDFATVRKVLSMPQVNIVKKTEVQTGGFSKESILPKRNSDKLIARKKDWDPKKYGGFDSPTVAYSVLVVAKVEKGKSKKLKSVKELLGITIMERSSFEKNPIDFLEAKGYKEVKKDLIIKLPKYSLFELENGRKRMLASAGELQKGNELALPSKYVNFLYLASHYEKLKGSPEDNEQKQLFVEQHKHYLDEIIEQISEFSKRVILADANLDKVLSAYNKHRDKPIREQAENIIHLFTLTNLGAPAAFKYFDTTIDRKRYTSTKEVLDATLIHQSITGLYETRIDLSQLGGDGGGGGEAAAKGSSGGLLGRDLLTKLKAQIQFSTEGPQVTWEDRPAMCLVLNLEEEYRLHEKPVPPSIDPSWLQLFPMVWAEKAGMGLANQVPPVVVELKSDASPVAVRQYPMSKEAREGIRPHIQRFLDLGILVPCQSPWNTPLLPVKKPGTNDYRPVQDLREVNKRVQDIHPTVPNPYNLLSSLPPSHTWYSVLDLKDAFFCLKLHPNSQPLFAFEWRDPEKGNTGQLTWTRLPQGFKNSPTLFNEALHRDLASFRALNPQVVMLQYVDDLLVAAPTYRDCKEGTRRLLQELSKLGYRVSAKKAQLCREEVTYLGYLLKGGKRWLTPARKATVMKIPTPTTPRQVREFLGTAGFCRLWIPGFASLAAPLYPLTRPKVPFTWTEAHQEAFGRIKEALLSAPALALPDLTKPFALYVDEKEGVARGVLTQTLGPWRRPVAYLSKKLDPVASGWPTCLKAIAAVALLLKDADKLTLGQNVLVIAPHNLESIVRQPPDRWMTNARMTHYQSLLLNERVSFAPPAILNPATLLPVESDDTPIHICSEILAEETGTRPDLRDQPLPGVPAWYTDGSSFIMDGRRQAGAAIVDNKRTVWASNLPEGTSAQKAELIALTQALRLAEGKSINIYTDSRYAFATAHVHGAIYKQRGWLTSAGKDIKNKEEILALLEAIHLPKRVAIIHCPGHQRGTDPVATGNRKADEAAKQAAQSTRILTETTKNAGKRTADGSEFEKRTADGSEFESPKKKAKVE

SEQ ID NO: 7287 - protein, 2218 aa, synthetic construct
MPAAKRVKLDGGDKKYSIGLDIGTNSVGWAVITDEYKVPSKKFKVLGNTDRHSIKKNLIGALLFDSGETAEATRLKRTARRRYTRRKNRICYLQEIFSNEMAKVDDSFFHRLEESFLVEEDKKHERHPIFGNIVDEVAYHEKYPTIYHLRKKLVDSTDKADLRLIYLALAHMIKFRGHFLIEGDLNPDNSDVDKLFIQLVQTYNQLFEENPINASGVDAKAILSARLSKSRRLENLIAQLPGEKKNGLFGNLIALSLGLTPNFKSNFDLAEDAKLQLSKDTYDDDLDNLLAQIGDQYADLFLAAKNLSDAILLSDILRVNTEITKAPLSASMIKRYDEHHQDLTLLKALVRQQLPEKYKEIFFDQSKNGYAGYIDGGASQEEFYKFIKPILEKMDGTEELLVKLNREDLLRKQRTFDNGSIPHQIHLGELHAILRRQEDFYPFLKDNREKIEKILTFRIPYYVGPLARGNSRFAWMTRKSEETITPWNFEEVVDKGASAQSFIERMTNFDKNLPNEKVLPKHSLLYEYFTVYNELTKVKYVTEGMRKPAFLSGEQKKAIVDLLFKTNRKVTVKQLKEDYFKKIECFDSVEISGVEDRFNASLGTYHDLLKIIKDKDFLDNEENEDILEDIVLTLTLFEDREMIEERLKTYAHLFDDKVMKQLKRRRYTGWGRLSRKLINGIRDKQSGKTILDFLKSDGFANRNFMQLIHDDSLTFKEDIQKAQVSGQGDSLHEHIANLAGSPAIKKGILQTVKVVDELVKVMGRHKPENIVIEMARENQTTQKGQKNSRERMKRIEEGIKELGSQILKEHPVENTQLQNEKLYLYYLQNGRDMYVDQELDINRLSDYDVDHIVPQSFLKDDSIDNKVLTRSDKARGKSDNVPSEEVVKKMKNYWRQLLNAKLITQRKFDNLTKAERGGLSELDKAGFIKRQLVETRQITKHVAQILDSRMNTKYDENDKLIREVKVITLKSKLVSDFRKDFQFYKVREINNYHHAHDAYLNAVVGTALIKKYPKLESEFVYGDYKVYDVRKMIAKSEQEIGKATAKYFFYSNIMNFFKTEITLANGEIRKRPLIETNGETGEIVWDKGRDFATVRKVLSMPQVNIVKKTEVQTGGFSKESILPKRNSDKLIARKKDWDPKKYGGFDSPTVAYSVLVVAKVEKGKSKKLKSVKELLGITIMERSSFEKNPIDFLEAKGYKEVKKDLIIKLPKYSLFELENGRKRMLASAGELQKGNELALPSKYVNFLYLASHYEKLKGSPEDNEQKQLFVEQHKHYLDEIIEQISEFSKRVILADANLDKVLSAYNKHRDKPIREQAENIIHLFTLTNLGAPAAFKYFDTTIDRKRYTSTKEVLDATLIHQSITGLYETRIDLSQLGGDGGGGGEAAAKGSSGGTLGDQGSRGSDPLPEPRVTLTVEGIPTEFLVNTGAEHSVLTKPMGKMGSKRTVVAGATGSKVYPWTTKRLLKIGQKQVTHSFLVIPECPAPLLGRDLLTKLKAQIQFSTEGPQVTWEDRPAMCLVLNLEEEYRLHEKPVPPSIDPSWLQLFPMVWAEKAGMGLANQVPPVVVELKSDASPVAVRQYPMSKEAREGIRPHIQRFLDLGILVPCQSPWNTPLLPVKKPGTNDYRPVQDLREVNKRVQDIHPTVPNPYNLLSSLPPSHTWYSVLDLKDAFFCLKLHPNSQPLFAFEWRDPEKGNTGQLTWTRLPQGFKNSPTLFNEALHRDLASFRALNPQVVMLQYVDDLLVAAPTYRDCKEGTRRLLQELSKLGYRVSAKKAQLCREEVTYLGYLLKGGKRWLTPARKATVMKIPTPTTPRQVREFLGTAGFCRLWIPGFASLAAPLYPLTRPKVPFTWTEAHQEAFGRIKEALLSAPALALPDLTKPFALYVDEKEGVARGVLTQTLGPWRRPVAYLSKKLDPVASGWPTCLKAIAAVALLLKDADKLTLGQNVLVIAPHNLESIVRQPPDRWMTNARMTHYQSLLLNERVSFAPPAILNPATLLPVESDDTPIHICSEILAEETGTRPDLRDQPLPGVPAWYTDGSSFIMDGRRQAGAAIVDNKRTVWASNLPEGTSAQKAELIALTQALRLAEGKSINIYTDSRYAFATAHVHGAIYKQRGWLTSAGKDIKNKEEILALLEAIHLPKRVAIIHCPGHQRGTDPVATGNRKADEAAKQAAQSTRILTETTKNAGKRTADGSEFEKRTADGSEFESPKKKAKVE

SEQ ID NO: 7288 - protein, 2096 aa, synthetic construct
MPAAKRVKLDGGDKKYSIGLDIGTNSVGWAVITDEYKVPSKKFKVLGNTDRHSIKKNLIGALLFDSGETAEATRLKRTARRRYTRRKNRICYLQEIFSNEMAKVDDSFFHRLEESFLVEEDKKHERHPIFGNIVDEVAYHEKYPTIYHLRKKLVDSTDKADLRLIYLALAHMIKFRGHFLIEGDLNPDNSDVDKLFIQLVQTYNQLFEENPINASGVDAKAILSARLSKSRRLENLIAQLPGEKKNGLFGNLIALSLGLTPNFKSNFDLAEDAKLQLSKDTYDDDLDNLLAQIGDQYADLFLAAKNLSDAILLSDILRVNTEITKAPLSASMIKRYDEHHQDLTLLKALVRQQLPEKYKEIFFDQSKNGYAGYIDGGASQEEFYKFIKPILEKMDGTEELLVKLNREDLLRKQRTFDNGSIPHQIHLGELHAILRRQEDFYPFLKDNREKIEKILTFRIPYYVGPLARGNSRFAWMTRKSEETITPWNFEEVVDKGASAQSFIERMTNFDKNLPNEKVLPKHSLLYEYFTVYNELTKVKYVTEGMRKPAFLSGEQKKAIVDLLFKTNRKVTVKQLKEDYFKKIECFDSVEISGVEDRFNASLGTYHDLLKIIKDKDFLDNEENEDILEDIVLTLTLFEDREMIEERLKTYAHLFDDKVMKQLKRRRYTGWGRLSRKLINGIRDKQSGKTILDFLKSDGFANRNFMQLIHDDSLTFKEDIQKAQVSGQGDSLHEHIANLAGSPAIKKGILQTVKVVDELVKVMGRHKPENIVIEMARENQTTQKGQKNSRERMKRIEEGIKELGSQILKEHPVENTQLQNEKLYLYYLQNGRDMYVDQELDINRLSDYDVDHIVPQSFLKDDSIDNKVLTRSDKARGKSDNVPSEEVVKKMKNYWRQLLNAKLITQRKFDNLTKAERGGLSELDKAGFIKRQLVETRQITKHVAQILDSRMNTKYDENDKLIREVKVITLKSKLVSDFRKDFQFYKVREINNYHHAHDAYLNAVVGTALIKKYPKLESEFVYGDYKVYDVRKMIAKSEQEIGKATAKYFFYSNIMNFFKTEITLANGEIRKRPLIETNGETGEIVWDKGRDFATVRKVLSMPQVNIVKKTEVQTGGFSKESILPKRNSDKLIARKKDWDPKKYGGFDSPTVAYSVLVVAKVEKGKSKKLKSVKELLGITIMERSSFEKNPIDFLEAKGYKEVKKDLIIKLPKYSLFELENGRKRMLASAGELQKGNELALPSKYVNFLYLASHYEKLKGSPEDNEQKQLFVEQHKHYLDEIIEQISEFSKRVILADANLDKVLSAYNKHRDKPIREQAENIIHLFTLTNLGAPAAFKYFDTTIDRKRYTSTKEVLDATLIHQSITGLYETRIDLSQLGGDGGGGGEAAAKGSSGGTLNLEDEYRLYETSAEPEVSPGSTWLSDFPQAWAETGGMGLAVRQAPLIIPLKATSTPVSIKQYPMSQEAKLGIKPHIQRLLDQGILVPCQSPWNTPLLPVKKPGTNDYRPVQDLREVNKRVEDIHPTVPNPYNLLSGLPPSHRWYTVLDLKDAFFCLRLHPTSQPLFAFEWRDPGMGISGQLTWTRLPQGFKNSPTLFNEALHRDLADFRIQHPDLILLQYVDDILLAATSELDCQQGTRALLLTLGNLGYRASAKKAQLCQKQVKYLGYLLKEGQRWLTEARKETVMGQPTPKTPRQLREFLGTAGFCRLWIPGFAEMAAPLYPLTKPGTLFNWGPDQQKAYQEIKQALLTAPALGLPDLTKPFELFVDEKQGYAKGVLTQKLGPWRRPVAYLSKKLDPVAAGWPPCLRMVAAIAVLRKDAGKLTMGQPLVILAPHAVEALVKQPPDRWLSNARMTHYQAMLLDTDRVQFGPVVALNPATLLPLPEEGAPHDCLEILAETHGTRPDLTDQPIPDADHTWYTDGSSFLQEGQRKAGAAVTTETEVIWARALPAGTSAQRAELIALTQALKMAEGKRLNVYTDSRYAFATAHIHGEIYRRRGWLTSEGREIKNKSEILALLKALFLPKRLSIIHCLGHQKGDSAEARGNRLADQAAREAAIKTPPDTSTLLAGKRTADGSEFEKRTADGSEFESPKKKAKVE

SEQ ID NO: 7289 - protein, 2096 aa, synthetic construct
MPAAKRVKLDGGDKKYSIGLDIGTNSVGWAVITDEYKVPSKKFKVLGNTDRHSIKKNLIGALLFDSGETAEATRLKRTARRRYTRRKNRICYLQEIFSNEMAKVDDSFFHRLEESFLVEEDKKHERHPIFGNIVDEVAYHEKYPTIYHLRKKLVDSTDKADLRLIYLALAHMIKFRGHFLIEGDLNPDNSDVDKLFIQLVQTYNQLFEENPINASGVDAKAILSARLSKSRRLENLIAQLPGEKKNGLFGNLIALSLGLTPNFKSNFDLAEDAKLQLSKDTYDDDLDNLLAQIGDQYADLFLAAKNLSDAILLSDILRVNTEITKAPLSASMIKRYDEHHQDLTLLKALVRQQLPEKYKEIFFDQSKNGYAGYIDGGASQEEFYKFIKPILEKMDGTEELLVKLNREDLLRKQRTFDNGSIPHQIHLGELHAILRRQEDFYPFLKDNREKIEKILTFRIPYYVGPLARGNSRFAWMTRKSEETITPWNFEEVVDKGASAQSFIERMTNFDKNLPNEKVLPKHSLLYEYFTVYNELTKVKYVTEGMRKPAFLSGEQKKAIVDLLFKTNRKVTVKQLKEDYFKKIECFDSVEISGVEDRFNASLGTYHDLLKIIKDKDFLDNEENEDILEDIVLTLTLFEDREMIEERLKTYAHLFDDKVMKQLKRRRYTGWGRLSRKLINGIRDKQSGKTILDFLKSDGFANRNFMQLIHDDSLTFKEDIQKAQVSGQGDSLHEHIANLAGSPAIKKGILQTVKVVDELVKVMGRHKPENIVIEMARENQTTQKGQKNSRERMKRIEEGIKELGSQILKEHPVENTQLQNEKLYLYYLQNGRDMYVDQELDINRLSDYDVDHIVPQSFLKDDSIDNKVLTRSDKARGKSDNVPSEEVVKKMKNYWRQLLNAKLITQRKFDNLTKAERGGLSELDKAGFIKRQLVETRQITKHVAQILDSRMNTKYDENDKLIREVKVITLKSKLVSDFRKDFQFYKVREINNYHHAHDAYLNAVVGTALIKKYPKLESEFVYGDYKVYDVRKMIAKSEQEIGKATAKYFFYSNIMNFFKTEITLANGEIRKRPLIETNGETGEIVWDKGRDFATVRKVLSMPQVNIVKKTEVQTGGFSKESILPKRNSDKLIARKKDWDPKKYGGFDSPTVAYSVLVVAKVEKGKSKKLKSVKELLGITIMERSSFEKNPIDFLEAKGYKEVKKDLIIKLPKYSLFELENGRKRMLASAGELQKGNELALPSKYVNFLYLASHYEKLKGSPEDNEQKQLFVEQHKHYLDEIIEQISEFSKRVILADANLDKVLSAYNKHRDKPIREQAENIIHLFTLTNLGAPAAFKYFDTTIDRKRYTSTKEVLDATLIHQSITGLYETRIDLSQLGGDGGGGGEAAAKGSSGGTLGIEDEYRLHETSTEPDVSLGSTWLSDFPQAWAETGGMGLAVRQAPLIIPLKATSTPVSIQQYPMSHEARLGIKPHIQRLLDQGILVPCQSPWNTPLLPVKKPGTNDYRPVQDLREVNKRVEDIHPTVPNPYNLLSGLPPSHQWYTVLDLKDAFFCLRLHPTSQPLFAFEWRDPGMGISGQLTWTRLPQGFKNSPTLFDEALHRDLADFRIQHPDLILLQYVDDILLAATSELDCQQGTRALLQTLGDLGYRASAKKAQICQKQVKYLGYLLREGQRWLTEARKETVMGQPVPKTPRQLREFLGTAGFCRLWIPGFAEMAAPLYPLTKTGTLFSWGPDQQKAYQEIKQALLTAPALGLPDLTKPFELFVDEKQGYAKGVLTQKLGPWRRPVAYLSKKLDPVAAGWPPCLRMVAAIAVLTKDAGKLTMGQPLVILAPHAVEALVKQPPDRWLSNARMTHYQAMLLDTDRVQFGPVVALNPATLLPLPEEGAPHDCLEILAETHGTRPDLTDQPIPDADHTWYTDGSSFLQEGQRKAGAAVTTETEVIWAGALPAGTSAQRAELIALTQALKMAEGKRLNVYTDSRYAFATAHIHGEIYRRRGLLTSEGREIKNKSEILALLKALFLPKRLSIIHCLGHQKGDSAEARGNRLADQAAREAAIKTPPDTSTLLAGKRTADGSEFEKRTADGSEFESPKKKAKVE

SEQ ID NO: 7290 - protein, 2096 aa, synthetic construct
MPAAKRVKLDGGDKKYSIGLDIGTNSVGWAVITDEYKVPSKKFKVLGNTDRHSIKKNLIGALLFDSGETAEATRLKRTARRRYTRRKNRICYLQEIFSNEMAKVDDSFFHRLEESFLVEEDKKHERHPIFGNIVDEVAYHEKYPTIYHLRKKLVDSTDKADLRLIYLALAHMIKFRGHFLIEGDLNPDNSDVDKLFIQLVQTYNQLFEENPINASGVDAKAILSARLSKSRRLENLIAQLPGEKKNGLFGNLIALSLGLTPNFKSNFDLAEDAKLQLSKDTYDDDLDNLLAQIGDQYADLFLAAKNLSDAILLSDILRVNTEITKAPLSASMIKRYDEHHQDLTLLKALVRQQLPEKYKEIFFDQSKNGYAGYIDGGASQEEFYKFIKPILEKMDGTEELLVKLNREDLLRKQRTFDNGSIPHQIHLGELHAILRRQEDFYPFLKDNREKIEKILTFRIPYYVGPLARGNSRFAWMTRKSEETITPWNFEEVVDKGASAQSFIERMTNFDKNLPNEKVLPKHSLLYEYFTVYNELTKVKYVTEGMRKPAFLSGEQKKAIVDLLFKTNRKVTVKQLKEDYFKKIECFDSVEISGVEDRFNASLGTYHDLLKIIKDKDFLDNEENEDILEDIVLTLTLFEDREMIEERLKTYAHLFDDKVMKQLKRRRYTGWGRLSRKLINGIRDKQSGKTILDFLKSDGFANRNFMQLIHDDSLTFKEDIQKAQVSGQGDSLHEHIANLAGSPAIKKGILQTVKVVDELVKVMGRHKPENIVIEMARENQTTQKGQKNSRERMKRIEEGIKELGSQILKEHPVENTQLQNEKLYLYYLQNGRDMYVDQELDINRLSDYDVDHIVPQSFLKDDSIDNKVLTRSDKARGKSDNVPSEEVVKKMKNYWRQLLNAKLITQRKFDNLTKAERGGLSELDKAGFIKRQLVETRQITKHVAQILDSRMNTKYDENDKLIREVKVITLKSKLVSDFRKDFQFYKVREINNYHHAHDAYLNAVVGTALIKKYPKLESEFVYGDYKVYDVRKMIAKSEQEIGKATAKYFFYSNIMNFFKTEITLANGEIRKRPLIETNGETGEIVWDKGRDFATVRKVLSMPQVNIVKKTEVQTGGFSKESILPKRNSDKLIARKKDWDPKKYGGFDSPTVAYSVLVVAKVEKGKSKKLKSVKELLGITIMERSSFEKNPIDFLEAKGYKEVKKDLIIKLPKYSLFELENGRKRMLASAGELQKGNELALPSKYVNFLYLASHYEKLKGSPEDNEQKQLFVEQHKHYLDEIIEQISEFSKRVILADANLDKVLSAYNKHRDKPIREQAENIIHLFTLTNLGAPAAFKYFDTTIDRKRYTSTKEVLDATLIHQSITGLYETRIDLSQLGGDGGGGGEAAAKGSSGGTLGIEDEYRLHETSTEPDVSLGSTWLSDFPQAWAETGGMGLAVRQAPLIIPLKATSTPVSIQQYPMSHEARLGIKPHIQRLLDQGILVPCQSPWNTPLLPVKKPGTNDYRPVQDLREVNKRVEDIHPTVPNPYNLLSGLPPSHQWYTVLDLKDAFFCLRLHPTSQPLFAFEWRDPGMGISGQLTWTRLPQGFKNSPTLFNEALHRDLADFRIQHPDLILLQYVDDILLAATSELDCQQGTRALLQTLGDLGYRASAKKAQICQKQVKYLGYLLREGQRWLTEARKETVMGQPVPKTPRQLREFLGTAGFCRLWIPGFAEMAAPLYPLTKPGTLFSWGPDQQKAYQEIKQALLTAPALGLPDLTKPFELFVDEKQGYAKGVLTQKLGPWRRPVAYLSKKLDPVAAGWPPCLRMVAAIAVLTKDAGKLTMGQPLVILAPHAVEALVKQPPDRWLSNARMTHYQAMLLDTDRVQFGPVVALNPATLLPLPEEGAPHDCLEILAETHGTRPDLTDQPIPDADHTWYTDGSSFLQEGQRKAGAAVTTETEVIWAGALPAGTSAQRAELIALTQALKMAEGKRLNVYTDSRYAFATAHIHGEIYRRRGWLTSEGREIKNKSEILALLKALFLPKRLSIIHCLGHQKGDSAEARGNRLADQAAREAAIKTPPDTSTLLAGKRTADGSEFEKRTADGSEFESPKKKAKVE

SEQ ID NO: 7291 - protein, 2096 aa, synthetic construct
MPAAKRVKLDGGDKKYSIGLDIGTNSVGWAVITDEYKVPSKKFKVLGNTDRHSIKKNLIGALLFDSGETAEATRLKRTARRRYTRRKNRICYLQEIFSNEMAKVDDSFFHRLEESFLVEEDKKHERHPIFGNIVDEVAYHEKYPTIYHLRKKLVDSTDKADLRLIYLALAHMIKFRGHFLIEGDLNPDNSDVDKLFIQLVQTYNQLFEENPINASGVDAKAILSARLSKSRRLENLIAQLPGEKKNGLFGNLIALSLGLTPNFKSNFDLAEDAKLQLSKDTYDDDLDNLLAQIGDQYADLFLAAKNLSDAILLSDILRVNTEITKAPLSASMIKRYDEHHQDLTLLKALVRQQLPEKYKEIFFDQSKNGYAGYIDGGASQEEFYKFIKPILEKMDGTEELLVKLNREDLLRKQRTFDNGSIPHQIHLGELHAILRRQEDFYPFLKDNREKIEKILTFRIPYYVGPLARGNSRFAWMTRKSEETITPWNFEEVVDKGASAQSFIERMTNFDKNLPNEKVLPKHSLLYEYFTVYNELTKVKYVTEGMRKPAFLSGEQKKAIVDLLFKTNRKVTVKQLKEDYFKKIECFDSVEISGVEDRFNASLGTYHDLLKIIKDKDFLDNEENEDILEDIVLTLTLFEDREMIEERLKTYAHLFDDKVMKQLKRRRYTGWGRLSRKLINGIRDKQSGKTILDFLKSDGFANRNFMQLIHDDSLTFKEDIQKAQVSGQGDSLHEHIANLAGSPAIKKGILQTVKVVDELVKVMGRHKPENIVIEMARENQTTQKGQKNSRERMKRIEEGIKELGSQILKEHPVENTQLQNEKLYLYYLQNGRDMYVDQELDINRLSDYDVDHIVPQSFLKDDSIDNKVLTRSDKARGKSDNVPSEEVVKKMKNYWRQLLNAKLITQRKFDNLTKAERGGLSELDKAGFIKRQLVETRQITKHVAQILDSRMNTKYDENDKLIREVKVITLKSKLVSDFRKDFQFYKVREINNYHHAHDAYLNAVVGTALIKKYPKLESEFVYGDYKVYDVRKMIAKSEQEIGKATAKYFFYSNIMNFFKTEITLANGEIRKRPLIETNGETGEIVWDKGRDFATVRKVLSMPQVNIVKKTEVQTGGFSKESILPKRNSDKLIARKKDWDPKKYGGFDSPTVAYSVLVVAKVEKGKSKKLKSVKELLGITIMERSSFEKNPIDFLEAKGYKEVKKDLIIKLPKYSLFELENGRKRMLASAGELQKGNELALPSKYVNFLYLASHYEKLKGSPEDNEQKQLFVEQHKHYLDEIIEQISEFSKRVILADANLDKVLSAYNKHRDKPIREQAENIIHLFTLTNLGAPAAFKYFDTTIDRKRYTSTKEVLDATLIHQSITGLYETRIDLSQLGGDGGGGGEAAAKGSSGGTLNIEDEYRLHETSKEPDVSLGSTWLSDFPQAWAETGGMGLAVRQAPLIIPLKATSTPVSIKQYPMSQEARLGIKPHIQRLLDQGILVPCQSPWNTPLLPVKKPGTNDYRPVQDLREVNKRVEDIHPTVPNPYNLLSGLPPSHQWYTVLDLKDAFFCLRLHPTSQPLFAFEWRDPEMGISGQLTWTRLPQGFKNSPTLFNEALHRDLAGFRIQHPDLILLQYVDDLLLAATSELDCQQGTRALLQTLGDLGYRASAKKAQICQKQVKYLGYLLKEGQRWLTEARKETVMGQPIPKTPRQLREFLGTAGFCRLWIPGFAEMAAPLYPLTKPGTLFNWGPDQQKAFQEIKQALLTAPALGLPDLTKPFELFVDEKQGYAKGVLTQKLGPWRRPVAYLSKKLDPVAAGWPPCLRMVAAIAVLTKDAGKLTMGQPLVILAPHAVEALVKQPPDRWLSNARMTHYQALLLDTDRVQFGPVVALNPATLLPLPEEGLQHDCLDILAEAHGTRSDLMDQPLPDADHTWYTDGSSFLQEGQRKAGAAVTTETEVIWARALPAGTSAQRAELIALTQALKMAEGKKLNVYTDSRYAFATAHIHGEIYRRRGWLTSEGKEIKNKDEILALLKALFLPKRLSIIHCPGHQKGNSAEARGNRMADQAAREVATRETPETSTLLAGKRTADGSEFEKRTADGSEFESPKKKAKVE

SEQ ID NO: 7292 - protein, 2096 aa, synthetic construct
MPAAKRVKLDGGDKKYSIGLDIGTNSVGWAVITDEYKVPSKKFKVLGNTDRHSIKKNLIGALLFDSGETAEATRLKRTARRRYTRRKNRICYLQEIFSNEMAKVDDSFFHRLEESFLVEEDKKHERHPIFGNIVDEVAYHEKYPTIYHLRKKLVDSTDKADLRLIYLALAHMIKFRGHFLIEGDLNPDNSDVDKLFIQLVQTYNQLFEENPINASGVDAKAILSARLSKSRRLENLIAQLPGEKKNGLFGNLIALSLGLTPNFKSNFDLAEDAKLQLSKDTYDDDLDNLLAQIGDQYADLFLAAKNLSDAILLSDILRVNTEITKAPLSASMIKRYDEHHQDLTLLKALVRQQLPEKYKEIFFDQSKNGYAGYIDGGASQEEFYKFIKPILEKMDGTEELLVKLNREDLLRKQRTFDNGSIPHQIHLGELHAILRRQEDFYPFLKDNREKIEKILTFRIPYYVGPLARGNSRFAWMTRKSEETITPWNFEEVVDKGASAQSFIERMTNFDKNLPNEKVLPKHSLLYEYFTVYNELTKVKYVTEGMRKPAFLSGEQKKAIVDLLFKTNRKVTVKQLKEDYFKKIECFDSVEISGVEDRFNASLGTYHDLLKIIKDKDFLDNEENEDILEDIVLTLTLFEDREMIEERLKTYAHLFDDKVMKQLKRRRYTGWGRLSRKLINGIRDKQSGKTILDFLKSDGFANRNFMQLIHDDSLTFKEDIQKAQVSGQGDSLHEHIANLAGSPAIKKGILQTVKVVDELVKVMGRHKPENIVIEMARENQTTQKGQKNSRERMKRIEEGIKELGSQILKEHPVENTQLQNEKLYLYYLQNGRDMYVDQELDINRLSDYDVDHIVPQSFLKDDSIDNKVLTRSDKARGKSDNVPSEEVVKKMKNYWRQLLNAKLITQRKFDNLTKAERGGLSELDKAGFIKRQLVETRQITKHVAQILDSRMNTKYDENDKLIREVKVITLKSKLVSDFRKDFQFYKVREINNYHHAHDAYLNAVVGTALIKKYPKLESEFVYGDYKVYDVRKMIAKSEQEIGKATAKYFFYSNIMNFFKTEITLANGEIRKRPLIETNGETGEIVWDKGRDFATVRKVLSMPQVNIVKKTEVQTGGFSKESILPKRNSDKLIARKKDWDPKKYGGFDSPTVAYSVLVVAKVEKGKSKKLKSVKELLGITIMERSSFEKNPIDFLEAKGYKEVKKDLIIKLPKYSLFELENGRKRMLASAGELQKGNELALPSKYVNFLYLASHYEKLKGSPEDNEQKQLFVEQHKHYLDEIIEQISEFSKRVILADANLDKVLSAYNKHRDKPIREQAENIIHLFTLTNLGAPAAFKYFDTTIDRKRYTSTKEVLDATLIHQSITGLYETRIDLSQLGGDGGGGGEAAAKGSSGGTLNIEDEYRLHETSKGPDVPLGSTWLSDFPQAWAETGGMGLAVRQAPLIIPLKATSTPVSIKQYPMSQEARLGIKPHIQRLLDQGILVPCQSPWNTPLLPVKKPGTNDYRPVQDLREVNKRVEDIHPTVPNPYNLLSGLPPSHQWYTVLDLKDAFFCLRLHPTSQSLFAFEWRDPEMGISGQLTWTRLPQGFKNSPTLFNEALHRDLADFRIQHPDLILLQYVDDLLLAATSELDCQQGTRALLQTLGDLGYRASAKKAQICQKQVKYLGYLLKEGQRWLTEARKETVMGQPTPKTPRQLREFLGTAGFCRLWIPGFAEMAAPLYPLTKPGTLFEWGPDQQKAYQEIKQALLTAPALGLPDLTKPFELFVDEKQGYAKGVLTQKLGPWRRPVAYLSKKLDPVAAGWPPCLRMVAAIAVLTKDAGKLTMGQPLVILAPHAVEALVKQPPDRWLSNARMTHYQALLLDTDRVQFGPIVALNPATLLPLPEEGLQHDCLDILAEAHGTRPDLTDQPLPDADHTWYTDGSSFLQEGQRKAGAAVTTETEVVWAKALPAGTSAQRAELIALTQALKMAEGKKLNVYTDSRYAFATAHIHGEIYRRRGWLTSEGKEIKNKDEILALLKALFLPKRLSIIHCPGHQKGNRAEARGNRMADQAAREVATRETPETSTLLAGKRTADGSEFEKRTADGSEFESPKKKAKVE

SEQ ID NO: 7293 - protein, 2096 aa, synthetic construct; identical to SEQ ID NO: 4530

SEQ ID NO: 7294 - protein, 2096 aa, synthetic construct
MPAAKRVKLDGGDKKYSIGLDIGTNSVGWAVITDEYKVPSKKFKVLGNTDRHSIKKNLIGALLFDSGETAEATRLKRTARRRYTRRKNRICYLQEIFSNEMAKVDDSFFHRLEESFLVEEDKKHERHPIFGNIVDEVAYHEKYPTIYHLRKKLVDSTDKADLRLIYLALAHMIKFRGHFLIEGDLNPDNSDVDKLFIQLVQTYNQLFEENPINASGVDAKAILSARLSKSRRLENLIAQLPGEKKNGLFGNLIALSLGLTPNFKSNFDLAEDAKLQLSKDTYDDDLDNLLAQIGDQYADLFLAAKNLSDAILLSDILRVNTEITKAPLSASMIKRYDEHHQDLTLLKALVRQQLPEKYKEIFFDQSKNGYAGYIDGGASQEEFYKFIKPILEKMDGTEELLVKLNREDLLRKQRTFDNGSIPHQIHLGELHAILRRQEDFYPFLKDNREKIEKILTFRIPYYVGPLARGNSRFAWMTRKSEETITPWNFEEVVDKGASAQSFIERMTNFDKNLPNEKVLPKHSLLYEYFTVYNELTKVKYVTEGMRKPAFLSGEQKKAIVDLLFKTNRKVTVKQLKEDYFKKIECFDSVEISGVEDRFNASLGTYHDLLKIIKDKDFLDNEENEDILEDIVLTLTLFEDREMIEERLKTYAHLFDDKVMKQLKRRRYTGWGRLSRKLINGIRDKQSGKTILDFLKSDGFANRNFMQLIHDDSLTFKEDIQKAQVSGQGDSLHEHIANLAGSPAIKKGILQTVKVVDELVKVMGRHKPENIVIEMARENQTTQKGQKNSRERMKRIEEGIKELGSQILKEHPVENTQLQNEKLYLYYLQNGRDMYVDQELDINRLSDYDVDHIVPQSFLKDDSIDNKVLTRSDKARGKSDNVPSEEVVKKMKNYWRQLLNAKLITQRKFDNLTKAERGGLSELDKAGFIKRQLVETRQITKHVAQILDSRMNTKYDENDKLIREVKVITLKSKLVSDFRKDFQFYKVREINNYHHAHDAYLNAVVGTALIKKYPKLESEFVYGDYKVYDVRKMIAKSEQEIGKATAKYFFYSNIMNFFKTEITLANGEIRKRPLIETNGETGEIVWDKGRDFATVRKVLSMPQVNIVKKTEVQTGGFSKESILPKRNSDKLIARKKDWDPKKYGGFDSPTVAYSVLVVAKVEKGKSKKLKSVKELLGITIMERSSFEKNPIDFLEAKGYKEVKKDLIIKLPKYSLFELENGRKRMLASAGELQKGNELALPSKYVNFLYLASHYEKLKGSPEDNEQKQLFVEQHKHYLDEIIEQISEFSKRVILADANLDKVLSAYNKHRDKPIREQAENIIHLFTLTNLGAPAAFKYFDTTIDRKRYTSTKEVLDATLIHQSITGLYETRIDLSQLGGDGGGGGEAAAKGSSGGTLNIEDEHRLHETSKEPDVSLGSTWLSDFPQAWAETGGMGLAVRQAPLIIPLKATSTPVSIKQYPMSQEARLGIKPHIQRLLDQGILVPCQSPWNTPLLPVKKPGTNDYRPVQDLREVNKRVEDIHPTVPNPYNLLSGLPPSHQWYTVLDLKDAFFCLRLHPTSQPLFAFEWRDPEMGISGQLTWTRLPQGFKNSPTLFDEALHRDLADFRIQHPDLILLQYVDDLLLAATSELDCQQGTRALLQTLGNLGYRASAKKAQICQKQVKYLGYLLKEGQRWLTEARKETVMGQPTPKTPRQLREFLGTAGFCRLWIPGFAEMAAPLYPLTKTGTLFNWGPDQQKAYQEIKQALLTAPALGLPDLTKPFELFVDEKQGYAKGVLTQKLGPWRRPVAYLSKKLDPVAAGWPPCLRMVAAIAVLTKDAGKLTMGQPLVILAPHAVEALVKQPPDRWLSNARMTHYQALLLDTDRVQFGPVVALNPATLLPLPEEGLQHNCLDILAEAHGTRPDLTDQPLPDADHTWYTDGSSLLQEGQRKAGAAVTTETEVIWAKALPAGTSAQRAELIALTQALKMAEGKKLNVYTDSRYAFATAHIHGEIYRRRGLLTSEGKEIKNKDEILALLKALFLPKRLSIIHCPGHQKGHSAEARGNRMADQAARKAAITETPDTSTLLAGKRTADGSEFEKRTADGSEFESPKKKAKVE

SEQ ID NO: 7295 - protein, 2096 aa, synthetic construct; identical to SEQ ID NO: 4530

SEQ ID NO: 7296 - protein, 2090 aa, synthetic construct
MPAAKRVKLDGGDKKYSIGLDIGTNSVGWAVITDEYKVPSKKFKVLGNTDRHSIKKNLIGALLFDSGETAEATRLKRTARRRYTRRKNRICYLQEIFSNEMAKVDDSFFHRLEESFLVEEDKKHERHPIFGNIVDEVAYHEKYPTIYHLRKKLVDSTDKADLRLIYLALAHMIKFRGHFLIEGDLNPDNSDVDKLFIQLVQTYNQLFEENPINASGVDAKAILSARLSKSRRLENLIAQLPGEKKNGLFGNLIALSLGLTPNFKSNFDLAEDAKLQLSKDTYDDDLDNLLAQIGDQYADLFLAAKNLSDAILLSDILRVNTEITKAPLSASMIKRYDEHHQDLTLLKALVRQQLPEKYKEIFFDQSKNGYAGYIDGGASQEEFYKFIKPILEKMDGTEELLVKLNREDLLRKQRTFDNGSIPHQIHLGELHAILRRQEDFYPFLKDNREKIEKILTFRIPYYVGPLARGNSRFAWMTRKSEETITPWNFEEVVDKGASAQSFIERMTNFDKNLPNEKVLPKHSLLYEYFTVYNELTKVKYVTEGMRKPAFLSGEQKKAIVDLLFKTNRKVTVKQLKEDYFKKIECFDSVEISGVEDRFNASLGTYHDLLKIIKDKDFLDNEENEDILEDIVLTLTLFEDREMIEERLKTYAHLFDDKVMKQLKRRRYTGWGRLSRKLINGIRDKQSGKTILDFLKSDGFANRNFMQLIHDDSLTFKEDIQKAQVSGQGDSLHEHIANLAGSPAIKKGILQTVKVVDELVKVMGRHKPENIVIEMARENQTTQKGQKNSRERMKRIEEGIKELGSQILKEHPVENTQLQNEKLYLYYLQNGRDMYVDQELDINRLSDYDVDHIVPQSFLKDDSIDNKVLTRSDKARGKSDNVPSEEVVKKMKNYWRQLLNAKLITQRKFDNLTKAERGGLSELDKAGFIKRQLVETRQITKHVAQILDSRMNTKYDENDKLIREVKVITLKSKLVSDFRKDFQFYKVREINNYHHAHDAYLNAVVGTALIKKYPKLESEFVYGDYKVYDVRKMIAKSEQEIGKATAKYFFYSNIMNFFKTEITLANGEIRKRPLIETNGETGEIVWDKGRDFATVRKVLSMPQVNIVKKTEVQTGGFSKESILPKRNSDKLIARKKDWDPKKYGGFDSPTVAYSVLVVAKVEKGKSKKLKSVKELLGITIMERSSFEKNPIDFLEAKGYKEVKKDLIIKLPKYSLFELENGRKRMLASAGELQKGNELALPSKYVNFLYLASHYEKLKGSPEDNEQKQLFVEQHKHYLDEIIEQISEFSKRVILADANLDKVLSAYNKHRDKPIREQAENIIHLFTLTNLGAPAAFKYFDTTIDRKRYTSTKEVLDATLIHQSITGLYETRIDLSQLGGDGGGGGEAAAKGSSGGTLQLDDEYRLYSPLVKPDQNIQFWLEQFPQAWAETAGMGLAKQVPPQVIQLKASATPVSVRQYPLSKEAQEGIRPHVQRLIQQGILVPVQSPWNTPLLPVRKPGTNDYRPVQDLREVNKRVQDIHPTVPNPYNLLCALPPQRSWYTVLDLKDAFFCLRLHPTSQPLFAFEWRDPGTGRTGQLTWTRLPQGFKNSPTIFDEALHRDLANFRIQHPQVTLLQYVDDLLLAGATKQDCLEGTKALLLELSDLGYRASAKKAQICRREVTYLGYSLRDGQRWLTEARKKTVVQIPAPTTAKQVREFLGTAGFCRLWIPGFATLAAPLYPLTKEKGEFSWAPEHQKAFDAIKKALLSAPALALPDVTKPFTLYVDERKGVARGVLTQTLGPWRRPVAYLSKKLDPVASGWPVCLKAIAAVAILVKDADKLTLGQNITVIAPHALENIVRQPPDRWMTNARMTHYQSLLLTERVTFAPPAALNPATLLPEETDEPVTHDCHQLLIEETGVRKDLTDIPLTGEVLTWFTDGSSYVVEGKRMAGAAVVDGTRTIWASSLPEGTSAQKAELMALTQALRLAEGKSINIYTDSRYAFATAHVHGAIYKQRGLLTSAGREIKNKEEILSLLEALHLPKRLAIIHCPGHQKAKDPISRGNQMADRVAKQAAQGVNLLAGKRTADGSEFEKRTADGSEFESPKKKAKVE

SEQ ID NO: 7297 - protein, 2176 aa, synthetic construct
MPAAKRVKLDGGDKKYSIGLDIGTNSVGWAVITDEYKVPSKKFKVLGNTDRHSIKKNLIGALLFDSGETAEATRLKRTARRRYTRRKNRICYLQEIFSNEMAKVDDSFFHRLEESFLVEEDKKHERHPIFGNIVDEVAYHEKYPTIYHLRKKLVDSTDKADLRLIYLALAHMIKFRGHFLIEGDLNPDNSDVDKLFIQLVQTYNQLFEENPINASGVDAKAILSARLSKSRRLENLIAQLPGEKKNGLFGNLIALSLGLTPNFKSNFDLAEDAKLQLSKDTYDDDLDNLLAQIGDQYADLFLAAKNLSDAILLSDILRVNTEITKAPLSASMIKRYDEHHQDLTLLKALVRQQLPEKYKEIFFDQSKNGYAGYIDGGASQEEFYKFIKPILEKMDGTEELLVKLNREDLLRKQRTFDNGSIPHQIHLGELHAILRRQEDFYPFLKDNREKIEKILTFRIPYYVGPLARGNSRFAWMTRKSEETITPWNFEEVVDKGASAQSFIERMTNFDKNLPNEKVLPKHSLLYEYFTVYNELTKVKYVTEGMRKPAFLSGEQKKAIVDLLFKTNRKVTVKQLKEDYFKKIECFDSVEISGVEDRFNASLGTYHDLLKIIKDKDFLDNEENEDILEDIVLTLTLFEDREMIEERLKTYAHLFDDKVMKQLKRRRYTGWGRLSRKLINGIRDKQSGKTILDFLKSDGFANRNFMQLIHDDSLTFKEDIQKAQVSGQGDSLHEHIANLAGSPAIKKGILQTVKVVDELVKVMGRHKPENIVIEMARENQTTQKGQKNSRERMKRIEEGIKELGSQILKEHPVENTQLQNEKLYLYYLQNGRDMYVDQELDINRLSDYDVDHIVPQSFLKDDSIDNKVLTRSDKARGKSDNVPSEEVVKKMKNYWRQLLNAKLITQRKFDNLTKAERGGLSELDKAGFIKRQLVETRQITKHVAQILDSRMNTKYDENDKLIREVKVITLKSKLVSDFRKDFQFYKVREINNYHHAHDAYLNAVVGTALIKKYPKLESEFVYGDYKVYDVRKMIAKSEQEIGKATAKYFFYSNIMNFFKTEITLANGEIRKRPLIETNGETGEIVWDKGRDFATVRKVLSMPQVNIVKKTEVQTGGFSKESILPKRNSDKLIARKKDWDPKKYGGFDSPTVAYSVLVVAKVEKGKSKKLKSVKELLGITIMERSSFEKNPIDFLEAKGYKEVKKDLIIKLPKYSLFELENGRKRMLASAGELQKGNELALPSKYVNFLYLASHYEKLKGSPEDNEQKQLFVEQHKHYLDEIIEQISEFSKRVILADANLDKVLSAYNKHRDKPIREQAENIIHLFTLTNLGAPAAFKYFDTTIDRKRYTSTKEVLDATLIHQSITGLYETRIDLSQLGGDGGGGGEAAAKGSSGGMNPLQLLQPLPAEVKGTKLLAHWNSGATITCIPESFLEDEQPIKQTLIKTIHGEKQQNVYYLTFKVKGRKVEAEVIASPYEYILLSPTDVPWLTQQPLQLTILVPLQEYQDRILNKTALPEEQKQQLKALFTKYDNLWQHWENQVGHRKIRPHNIATGDYPPRPQKQYPINPKAKPSIQIVIDDLLKQGVLTPQNSTMNTPVYPVPKPDGRWRMVLDYREVNKTIPLTAAQNQHSAGILATIVRQKYKTTLDLANGFWAHPITPDSYWLTAFTWQGKQYCWTRLPQGFLNSPALFTADAVDLLKEVPNVQVYVDDIYLSHDNPHEHIQQLEKVFQILLQAGYVVSLKKSEIGQRTVEFLGFNITKEGRGLTDTFKTKLLNVTPPKDLKQLQSILGLLNFARNFIPNFAELVQTLYNLIASSKGKYIEWTEDNTKQLNKVIEALNTASNLEERLPDQRLVIKVNTSPSAGYVRYYNESGKKPIMYLNYVFSKAELKFSMLEKLLTTMHKALIKAMDLAMGQEILVYSPIVSMTKIQKTPLPERKALPIRWITWMTYLEDPRIQFHYDKTLPELKHIPDVYTSSIPPLKHPSQYEGVFCTDGSAIKSPDPTKSNNAGMGIVHAIYNPEYKILNQWSIPLGHHTAQMAEIAAVEFACKKALKVPGPVLVITDSFYVAESANKELPYWKSNGFVNNKKEPLKHISKWKSIAECLSIKPDITIQHEKGHQPINTSIHTEGNALADKLATQGSYVVNAGKRTADGSEFEKRTADGSEFESPKKKAKVE

SEQ ID NO: 7298 - protein, 2096 aa, synthetic construct
MPAAKRVKLDGGDKKYSIGLDIGTNSVGWAVITDEYKVPSKKFKVLGNTDRHSIKKNLIGALLFDSGETAEATRLKRTARRRYTRRKNRICYLQEIFSNEMAKVDDSFFHRLEESFLVEEDKKHERHPIFGNIVDEVAYHEKYPTIYHLRKKLVDSTDKADLRLIYLALAHMIKFRGHFLIEGDLNPDNSDVDKLFIQLVQTYNQLFEENPINASGVDAKAILSARLSKSRRLENLIAQLPGEKKNGLFGNLIALSLGLTPNFKSNFDLAEDAKLQLSKDTYDDDLDNLLAQIGDQYADLFLAAKNLSDAILLSDILRVNTEITKAPLSASMIKRYDEHHQDLTLLKALVRQQLPEKYKEIFFDQSKNGYAGYIDGGASQEEFYKFIKPILEKMDGTEELLVKLNREDLLRKQRTFDNGSIPHQIHLGELHAILRRQEDFYPFLKDNREKIEKILTFRIPYYVGPLARGNSRFAWMTRKSEETITPWNFEEVVDKGASAQSFIERMTNFDKNLPNEKVLPKHSLLYEYFTVYNELTKVKYVTEGMRKPAFLSGEQKKAIVDLLFKTNRKVTVKQLKEDYFKKIECFDSVEISGVEDRFNASLGTYHDLLKIIKDKDFLDNEENEDILEDIVLTLTLFEDREMIEERLKTYAHLFDDKVMKQLKRRRYTGWGRLSRKLINGIRDKQSGKTILDFLKSDGFANRNFMQLIHDDSLTFKEDIQKAQVSGQGDSLHEHIANLAGSPAIKKGILQTVKVVDELVKVMGRHKPENIVIEMARENQTTQKGQKNSRERMKRIEEGIKELGSQILKEHPVENTQLQNEKLYLYYLQNGRDMYVDQELDINRLSDYDVDHIVPQSFLKDDSIDNKVLTRSDKARGKSDNVPSEEVVKKMKNYWRQLLNAKLITQRKFDNLTKAERGGLSELDKAGFIKRQLVETRQITKHVAQILDSRMNTKYDENDKLIREVKVITLKSKLVSDFRKDFQFYKVREINNYHHAHDAYLNAVVGTALIKKYPKLESEFVYGDYKVYDVRKMIAKSEQEIGKATAKYFFYSNIMNFFKTEITLANGEIRKRPLIETNGETGEIVWDKGRDFATVRKVLSMPQVNIVKKTEVQTGGFSKESILPKRNSDKLIARKKDWDPKKYGGFDSPTVAYSVLVVAKVEKGKSKKLKSVKELLGITIMERSSFEKNPIDFLEAKGYKEVKKDLIIKLPKYSLFELENGRKRMLASAGELQKGNELALPSKYVNFLYLASHYEKLKGSPEDNEQKQLFVEQHKHYLDEIIEQISEFSKRVILADANLDKVLSAYNKHRDKPIREQAENIIHLFTLTNLGAPAAFKYFDTTIDRKRYTSTKEVLDATLIHQSITGLYETRIDLSQLGGDGGGGGEAAAKGSSGGTLNIEDEYRLHETSKEPDVPLGSTWLSDFPQAWAETGGMGLAVRQAPLIIPLKATSTPVSIKQYPMSQEARLGIKPHIQRLLDQGILVPCQSPWNTPLLPVKKPGTNDYRPVQDLREVNKRVEDIHPTVPNPYNLLSGLPPSHQWYTVLDLKDAFFCLRLHPTSQPLFAFEWRDPEMGISGQLTWTRLPQGFKNSPTLFNEALHRDLADFRIQHPDLILLQYVDDLLLAATSEQDCQRGTRALLQTLGNLGYRASAKKAQICQKQVKYLGYLLKEGQRWLTEARKETVMGQPTPKTPRQLREFLGTAGFCRLWIPGFAEMAAPLYPLTKPGTLFNWGPDQQKAYQEIKQALLTAPALGLPDLTKPFELFVDEKQGYAKGVLTQKLGPWRRPVAYLSKKLDPVAAGWPPCLRMVAAIAVLTKDAGKLTMGQPLVILAPHAVEALVKQPPDRWLSNARMTHYQAMLLDTDRVQFGPVVALNPATLLPLPEKEAPHDCLEILAETHGTRPDLTDQPIPDADYTWYTDGSSFLQEGQRRAGAAVTTETEVIWARALPAGTSAQRAELIALTQALKMAEGKKLNVYTDSRYAFATAHVHGEIYRRRGWLTSEGREIKNKNEILALLKALFLPKRLSIIHCPGHQKGNSAEARGNRMADQAAREAAMKAVLETSTLLAGKRTADGSEFEKRTADGSEFESPKKKAKVE

SEQ ID NO: 7299 - protein, 2102 aa, synthetic construct
MPAAKRVKLDGGDKKYSIGLDIGTNSVGWAVITDEYKVPSKKFKVLGNTDRHSIKKNLIGALLFDSGETAEATRLKRTARRRYTRRKNRICYLQEIFSNEMAKVDDSFFHRLEESFLVEEDKKHERHPIFGNIVDEVAYHEKYPTIYHLRKKLVDSTDKADLRLIYLALAHMIKFRGHFLIEGDLNPDNSDVDKLFIQLVQTYNQLFEENPINASGVDAKAILSARLSKSRRLENLIAQLPGEKKNGLFGNLIALSLGLTPNFKSNFDLAEDAKLQLSKDTYDDDLDNLLAQIGDQYADLFLAAKNLSDAILLSDILRVNTEITKAPLSASMIKRYDEHHQDLTLLKALVRQQLPEKYKEIFFDQSKNGYAGYIDGGASQEEFYKFIKPILEKMDGTEELLVKLNREDLLRKQRTFDNGSIPHQIHLGELHAILRRQEDFYPFLKDNREKIEKILTFRIPYYVGPLARGNSRFAWMTRKSEETITPWNFEEVVDKGASAQSFIERMTNFDKNLPNEKVLPKHSLLYEYFTVYNELTKVKYVTEGMRKPAFLSGEQKKAIVDLLFKTNRKVTVKQLKEDYFKKIECFDSVEISGVEDRFNASLGTYHDLLKIIKDKDFLDNEENEDILEDIVLTLTLFEDREMIEERLKTYAHLFDDKVMKQLKRRRYTGWGRLSRKLINGIRDKQSGKTILDFLKSDGFANRNFMQLIHDDSLTFKEDIQKAQVSGQGDSLHEHIANLAGSPAIKKGILQTVKVVDELVKVMGRHKPENIVIEMARENQTTQKGQKNSRERMKRIEEGIKELGSQILKEHPVENTQLQNEKLYLYYLQNGRDMYVDQELDINRLSDYDVDHIVPQSFLKDDSIDNKVLTRSDKARGKSDNVPSEEVVKKMKNYWRQLLNAKLITQRKFDNLTKAERGGLSELDKAGFIKRQLVETRQITKHVAQILDSRMNTKYDENDKLIREVKVITLKSKLVSDFRKDFQFYKVREINNYHHAHDAYLNAVVGTALIKKYPKLESEFVYGDYKVYDVRKMIAKSEQEIGKATAKYFFYSNIMNFFKTEITLANGEIRKRPLIETNGETGEIVWDKGRDFATVRKVLSMPQVNIVKKTEVQTGGFSKESILPKRNSDKLIARKKDWDPKKYGGFDSPTVAYSVLVVAKVEKGKSKKLKSVKELLGITIMERSSFEKNPIDFLEAKGYKEVKKDLIIKLPKYSLFELENGRKRMLASAGELQKGNELALPSKYVNFLYLASHYEKLKGSPEDNEQKQLFVEQHKHYLDEIIEQISEFSKRVILADANLDKVLSAYNKHRDKPIREQAENIIHLFTLTNLGAPAAFKYFDTTIDRKRYTSTKEVLDATLIHQSITGLYETRIDLSQLGGDGGGSSGGGEAAAKGGTVSLQDEHRLFDIPVTTSLPDVWLQDFPQAWAETGGLGRAKCQAPIIIDLKPTAVPVSIKQYPMSLEAHMGIRQHIIKFLELGVLRPCRSPWNTPLLPVKKPGTQDYRPVQDLREINKRTVDIHPTVPNPYNLLSTLKPDYSWYTVLDLKDAFFCLPLAPQSQELFAFEWKDPERGISGQLTWTRLPQGFKNSPTLFNEALHRDLTDFRTQHPEVTLLQYVDDLLLAAPTKKACTQGTRHLLQELGEKGYRASAKKAQICQTKVTYLGYILSEGKRWLTPGRIETVARIPPPRNPREVREFLGTAGFCRLWIPGFAELAAPLYALTKPSTPFTWQTEHQLAFEALKKALLSAPALGLPDTSKPFTLFLDERQGIAKGVLTQKLGPWKRPVAYLSKKLDPVAAGWPPCLRIMAATAMLVKDSAKLTLGQPLTVITPHTLEAIVRQPPDRWITNARLTHYQALLLDTDRVQFGPPVTLNPATLLPVPENQPSPHDCRQVLAETHGTREDLKDQELPDADHTWYTDGSSYLDSGTRRAGAAVVDGHNTIWAQSLPPGTSAQKAELIALTKALELSKGKKANIYTDSRYAFATAHTHGSIYERRGWLTSEGKEIKNKAEIIALLKALFLPQEVAIIHCPGHQKGQDPVAVGNRQADRVARQAAMAEVLTLATEPDNTSHITAGKRTADGSEFEKRTADGSEFESPKKKAKVE

SEQ ID NO: 7300 - protein, 2218 aa, synthetic construct
MPAAKRVKLDGGDKKYSIGLDIGTNSVGWAVITDEYKVPSKKFKVLGNTDRHSIKKNLIGALLFDSGETAEATRLKRTARRRYTRRKNRICYLQEIFSNEMAKVDDSFFHRLEESFLVEEDKKHERHPIFGNIVDEVAYHEKYPTIYHLRKKLVDSTDKADLRLIYLALAHMIKFRGHFLIEGDLNPDNSDVDKLFIQLVQTYNQLFEENPINASGVDAKAILSARLSKSRRLENLIAQLPGEKKNGLFGNLIALSLGLTPNFKSNFDLAEDAKLQLSKDTYDDDLDNLLAQIGDQYADLFLAAKNLSDAILLSDILRVNTEITKAPLSASMIKRYDEHHQDLTLLKALVRQQLPEKYKEIFFDQSKNGYAGYIDGGASQEEFYKFIKPILEKMDGTEELLVKLNREDLLRKQRTFDNGSIPHQIHLGELHAILRRQEDFYPFLKDNREKIEKILTFRIPYYVGPLARGNSRFAWMTRKSEETITPWNFEEVVDKGASAQSFIERMTNFDKNLPNEKVLPKHSLLYEYFTVYNELTKVKYVTEGMRKPAFLSGEQKKAIVDLLFKTNRKVTVKQLKEDYFKKIECFDSVEISGVEDRFNASLGTYHDLLKIIKDKDFLDNEENEDILEDIVLTLTLFEDREMIEERLKTYAHLFDDKVMKQLKRRRYTGWGRLSRKLINGIRDKQSGKTILDFLKSDGFANRNFMQLIHDDSLTFKEDIQKAQVSGQGDSLHEHIANLAGSPAIKKGILQTVKVVDELVKVMGRHKPENIVIEMARENQTTQKGQKNSRERMKRIEEGIKELGSQILKEHPVENTQLQNEKLYLYYLQNGRDMYVDQELDINRLSDYDVDHIVPQSFLKDDSIDNKVLTRSDKARGKSDNVPSEEVVKKMKNYWRQLLNAKLITQRKFDNLTKAERGGLSELDKAGFIKRQLVETRQITKHVAQILDSRMNTKYDENDKLIREVKVITLKSKLVSDFRKDFQFYKVREINNYHHAHDAYLNAVVGTALIKKYPKLESEFVYGDYKVYDVRKMIAKSEQEIGKATAKYFFYSNIMNFFKTEITLANGEIRKRPLIETNGETGEIVWDKGRDFATVRKVLSMPQVNIVKKTEVQTGGFSKESILPKRNSDKLIARKKDWDPKKYGGFDSPTVAYSVLVVAKVEKGKSKKLKSVKELLGITIMERSSFEKNPIDFLEAKGYKEVKKDLIIKLPKYSLFELENGRKRMLASAGELQKGNELALPSKYVNFLYLASHYEKLKGSPEDNEQKQLFVEQHKHYLDEIIEQISEFSKRVILADANLDKVLSAYNKHRDKPIREQAENIIHLFTLTNLGAPAAFKYFDTTIDRKRYTSTKEVLDATLIHQSITGLYETRIDLSQLGGDGGGSSGGGEAAAKGGTLGDQGSRGSDPLPEPRVTLTVEGIPTEFLVNTGAEHSVLTKPMGKMGSKRTVVAGATGSKVYPWTTKRLLKIGQKQVTHSFLVIPECPAPLLGRDLLTKLKAQIQFSTEGPQVTWEDRPAMCLVLNLEEEYRLHEKPVPPSIDPSWLQLFPMVWAEKAGMGLANQVPPVVVELKSDASPVAVRQYPMSKEAREGIRPHIQRFLDLGILVPCQSPWNTPLLPVKKPGTNDYRPVQDLREVNKRVQDIHPTVPNPYNLLSSLPPSHTWYSVLDLKDAFFCLKLHPNSQPLFAFEWRDPEKGNTGQLTWTRLPQGFKNSPTLFDEALHRDLASFRALNPQVVMLQYVDDLLVAAPTYRDCKEGTRRLLQELSKLGYRVSAKKAQLCREEVTYLGYLLKGGKRWLTPARKATVMKIPTPTTPRQVREFLGTAGFCRLWIPGFASLAAPLYPLTREKVPFTWTEAHQEAFGRIKEALLSAPALALPDLTKPFALYVDEKEGVARGVLTQTLGPWRRPVAYLSKKLDPVASGWPTCLKAIAAVALLLKDADKLTLGQNVLVIAPHNLESIVRQPPDRWMTNARMTHYQSLLLNERVSFAPPAILNPATLLPVESDDTPIHICSEILAEETGTRPDLRDQPLPGVPAWYTDGSSFIMDGRRQAGAAIVDNKRTVWASNLPEGTSAQKAELIALTQALRLAEGKSINIYTDSRYAFATAHVHGAIYKQRGLLTSAGKDIKNKEEILALLEAIHLPKRVAIIHCPGHQRGTDPVATGNRKADEAAKQAAQSTRILTETTKNAGKRTADGSEFEKRTADGSEFESPKKKAKVE

SEQ ID NO: 7301 - protein, 2127 aa, synthetic construct
MPAAKRVKLDGGDKKYSIGLDIGTNSVGWAVITDEYKVPSKKFKVLGNTDRHSIKKNLIGALLFDSGETAEATRLKRTARRRYTRRKNRICYLQEIFSNEMAKVDDSFFHRLEESFLVEEDKKHERHPIFGNIVDEVAYHEKYPTIYHLRKKLVDSTDKADLRLIYLALAHMIKFRGHFLIEGDLNPDNSDVDKLFIQLVQTYNQLFEENPINASGVDAKAILSARLSKSRRLENLIAQLPGEKKNGLFGNLIALSLGLTPNFKSNFDLAEDAKLQLSKDTYDDDLDNLLAQIGDQYADLFLAAKNLSDAILLSDILRVNTEITKAPLSASMIKRYDEHHQDLTLLKALVRQQLPEKYKEIFFDQSKNGYAGYIDGGASQEEFYKFIKPILEKMDGTEELLVKLNREDLLRKQRTFDNGSIPHQIHLGELHAILRRQEDFYPFLKDNREKIEKILTFRIPYYVGPLARGNSRFAWMTRKSEETITPWNFEEVVDKGASAQSFIERMTNFDKNLPNEKVLPKHSLLYEYFTVYNELTKVKYVTEGMRKPAFLSGEQKKAIVDLLFKTNRKVTVKQLKEDYFKKIECFDSVEISGVEDRFNASLGTYHDLLKIIKDKDFLDNEENEDILEDIVLTLTLFEDREMIEERLKTYAHLFDDKVMKQLKRRRYTGWGRLSRKLINGIRDKQSGKTILDFLKSDGFANRNFMQLIHDDSLTFKEDIQKAQVSGQGDSLHEHIANLAGSPAIKKGILQTVKVVDELVKVMGRHKPENIVIEMARENQTTQKGQKNSRERMKRIEEGIKELGSQILKEHPVENTQLQNEKLYLYYLQNGRDMYVDQELDINRLSDYDVDHIVPQSFLKDDSIDNKVLTRSDKARGKSDNVPSEEVVKKMKNYWRQLLNAKLITQRKFDNLTKAERGGLSELDKAGFIKRQLVETRQITKHVAQILDSRMNTKYDENDKLIREVKVITLKSKLVSDFRKDFQFYKVREINNYHHAHDAYLNAVVGTALIKKYPKLESEFVYGDYKVYDVRKMIAKSEQEIGKATAKYFFYSNIMNFFKTEITLANGEIRKRPLIETNGETGEIVWDKGRDFATVRKVLSMPQVNIVKKTEVQTGGFSKESILPKRNSDKLIARKKDWDPKKYGGFDSPTVAYSVLVVAKVEKGKSKKLKSVKELLGITIMERSSFEKNPIDFLEAKGYKEVKKDLIIKLPKYSLFELENGRKRMLASAGELQKGNELALPSKYVNFLYLASHYEKLKGSPEDNEQKQLFVEQHKHYLDEIIEQISEFSKRVILADANLDKVLSAYNKHRDKPIREQAENIIHLFTLTNLGAPAAFKYFDTTIDRKRYTSTKEVLDATLIHQSITGLYETRIDLSQLGGDGGGSSGGGEAAAKGGLLGRDLLTKLKAQIQFSTEGPQVTWEDRPAMCLVLNLEEEYRLHEKPVPPSIDPSWLQLFPMVWAEKAGMGLANQVPPVVVELKSDASPVAVRQYPMSKEAREGIRPHIQRFLDLGILVPCQSPWNTPLLPVKKPGTNDYRPVQDLREVNKRVQDIHPTVPNPYNLLSSLPPSHTWYSVLDLKDAFFCLKLHPNSQPLFAFEWRDPEKGNTGQLTWTRLPQGFKNSPTLFNEALHRDLASFRALNPQVVMLQYVDDLLVAAPTYRDCKEGTRRLLQELSKLGYRVSAKKAQLCREEVTYLGYLLKGGKRWLTPARKATVMKIPTPTTPRQVREFLGTAGFCRLWIPGFASLAAPLYPLTRPKVPFTWTEAHQEAFGRIKEALLSAPALALPDLTKPFALYVDEKEGVARGVLTQTLGPWRRPVAYLSKKLDPVASGWPTCLKAIAAVALLLKDADKLTLGQNVLVIAPHNLESIVRQPPDRWMTNARMTHYQSLLLNERVSFAPPAILNPATLLPVESDDTPIHICSEILAEETGTRPDLRDQPLPGVPAWYTDGSSFIMDGRRQAGAAIVDNKRTVWASNLPEGTSAQKAELIALTQALRLAEGKSINIYTDSRYAFATAHVHGAIYKQRGWLTSAGKDIKNKEEILALLEAIHLPKRVAIIHCPGHQRGTDPVATGNRKADEAAKQAAQSTRILTETTKNAGKRTADGSEFEKRTADGSEFESPKKKAKVE

SEQ ID NO: 7302 - protein, 2096 aa, synthetic construct
MPAAKRVKLDGGDKKYSIGLDIGTNSVGWAVITDEYKVPSKKFKVLGNTDRHSIKKNLIGALLFDSGETAEATRLKRTARRRYTRRKNRICYLQEIFSNEMAKVDDSFFHRLEESFLVEEDKKHERHPIFGNIVDEVAYHEKYPTIYHLRKKLVDSTDKADLRLIYLALAHMIKFRGHFLIEGDLNPDNSDVDKLFIQLVQTYNQLFEENPINASGVDAKAILSARLSKSRRLENLIAQLPGEKKNGLFGNLIALSLGLTPNFKSNFDLAEDAKLQLSKDTYDDDLDNLLAQIGDQYADLFLAAKNLSDAILLSDILRVNTEITKAPLSASMIKRYDEHHQDLTLLKALVRQQLPEKYKEIFFDQSKNGYAGYIDGGASQEEFYKFIKPILEKMDGTEELLVKLNREDLLRKQRTFDNGSIPHQIHLGELHAILRRQEDFYPFLKDNREKIEKILTFRIPYYVGPLARGNSRFAWMTRKSEETITPWNFEEVVDKGASAQSFIERMTNFDKNLPNEKVLPKHSLLYEYFTVYNELTKVKYVTEGMRKPAFLSGEQKKAIVDLLFKTNRKVTVKQLKEDYFKKIECFDSVEISGVEDRFNASLGTYHDLLKIIKDKDFLDNEENEDILEDIVLTLTLFEDREMIEERLKTYAHLFDDKVMKQLKRRRYTGWGRLSRKLINGIRDKQSGKTILDFLKSDGFANRNFMQLIHDDSLTFKEDIQKAQVSGQGDSLHEHIANLAGSPAIKKGILQTVKVVDELVKVMGRHKPENIVIEMARENQTTQKGQKNSRERMKRIEEGIKELGSQILKEHPVENTQLQNEKLYLYYLQNGRDMYVDQELDINRLSDYDVDHIVPQSFLKDDSIDNKVLTRSDKARGKSDNVPSEEVVKKMKNYWRQLLNAKLITQRKFDNLTKAERGGLSELDKAGFIKRQLVETRQITKHVAQILDSRMNTKYDENDKLIREVKVITLKSKLVSDFRKDFQFYKVREINNYHHAHDAYLNAVVGTALIKKYPKLESEFVYGDYKVYDVRKMIAKSEQEIGKATAKYFFYSNIMNFFKTEITLANGEIRKRPLIETNGETGEIVWDKGRDFATVRKVLSMPQVNIVKKTEVQTGGFSKESILPKRNSDKLIARKKDWDPKKYGGFDSPTVAYSVLVVAKVEKGKSKKLKSVKELLGITIMERSSFEKNPIDFLEAKGYKEVKKDLIIKLPKYSLFELENGRKRMLASAGELQKGNELALPSKYVNFLYLASHYEKLKGSPEDNEQKQLFVEQHKHYLDEIIEQISEFSKRVILADANLDKVLSAYNKHRDKPIREQAENIIHLFTLTNLGAPAAFKYFDTTIDRKRYTSTKEVLDATLIHQSITGLYETRIDLSQLGGDGGGSSGGGEAAAKGGTLNIEDEYRLHETSKGPDVPLGSTWLSDFPQAWAETGGMGLAVRQAPLIIPLKATSTPVSIKQYPMSQEARLGIKPHIQRLLDQGILVPCQSPWNTPLLPVKKPGTNDYRPVQDLREVNKRVEDIHPTVPNPYNLLSGLPPSHQWYTVLDLKDAFFCLRLHPTSQSLFAFEWRDPEMGISGQLTWTRLPQGFKNSPTLFNEALHRDLADFRIQHPDLILLQYVDDLLLAATSELDCQQGTRALLQTLGDLGYRASAKKAQICQKQVKYLGYLLKEGQRWLTEARKETVMGQPTPKTPRQLREFLGTAGFCRLWIPGFAEMAAPLYPLTKPGTLFEWGPDQQKAYQEIKQALLTAPALGLPDLTKPFELFVDEKQGYAKGVLTQKLGPWRRPVAYLSKKLDPVAAGWPPCLRMVAAIAVLTKDAGKLTMGQPLVILAPHAVEALVKQPPDRWLSNARMTHYQALLLDTDRVQFGPIVALNPATLLPLPEEGLQHDCLDILAEAHGTRPDLTDQPLPDADHTWYTDGSSFLQEGQRKAGAAVTTETEVVWAKALPAGTSAQRAELIALTQALKMAEGKKLNVYTDSRYAFATAHIHGEIYRRRGWLTSEGKEIKNKDEILALLKALFLPKRLSIIHCPGHQKGNRAEARGNRMADQAAREVATRETPETSTLLAGKRTADGSEFEKRTADGSEFESPKKKAKVE

SEQ ID NO: 7303 - protein, 2090 aa, synthetic construct
MPAAKRVKLDGGDKKYSIGLDIGTNSVGWAVITDEYKVPSKKFKVLGNTDRHSIKKNLIGALLFDSGETAEATRLKRTARRRYTRRKNRICYLQEIFSNEMAKVDDSFFHRLEESFLVEEDKKHERHPIFGNIVDEVAYHEKYPTIYHLRKKLVDSTDKADLRLIYLALAHMIKFRGHFLIEGDLNPDNSDVDKLFIQLVQTYNQLFEENPINASGVDAKAILSARLSKSRRLENLIAQLPGEKKNGLFGNLIALSLGLTPNFKSNFDLAEDAKLQLSKDTYDDDLDNLLAQIGDQYADLFLAAKNLSDAILLSDILRVNTEITKAPLSASMIKRYDEHHQDLTLLKALVRQQLPEKYKEIFFDQSKNGYAGYIDGGASQEEFYKFIKPILEKMDGTEELLVKLNREDLLRKQRTFDNGSIPHQIHLGELHAILRRQEDFYPFLKDNREKIEKILTFRIPYYVGPLARGNSRFAWMTRKSEETITPWNFEEVVDKGASAQSFIERMTNFDKNLPNEKVLPKHSLLYEYFTVYNELTKVKYVTEGMRKPAFLSGEQKKAIVDLLFKTNRKVTVKQLKEDYFKKIECFDSVEISGVEDRFNASLGTYHDLLKIIKDKDFLDNEENEDILEDIVLTLTLFEDREMIEERLKTYAHLFDDKVMKQLKRRRYTGWGRLSRKLINGIRDKQSGKTILDFLKSDGFANRNFMQLIHDDSLTFKEDIQKAQVSGQGDSLHEHIANLAGSPAIKKGILQTVKVVDELVKVMGRHKPENIVIEMARENQTTQKGQKNSRERMKRIEEGIKELGSQILKEHPVENTQLQNEKLYLYYLQNGRDMYVDQELDINRLSDYDVDHIVPQSFLKDDSIDNKVLTRSDKARGKSDNVPSEEVVKKMKNYWRQLLNAKLITQRKFDNLTKAERGGLSELDKAGFIKRQLVETRQITKHVAQILDSRMNTKYDENDKLIREVKVITLKSKLVSDFRKDFQFYKVREINNYHHAHDAYLNAVVGTALIKKYPKLESEFVYGDYKVYDVRKMIAKSEQEIGKATAKYFFYSNIMNFFKTEITLANGEIRKRPLIETNGETGEIVWDKGRDFATVRKVLSMPQVNIVKKTEVQTGGFSKESILPKRNSDKLIARKKDWDPKKYGGFDSPTVAYSVLVVAKVEKGKSKKLKSVKELLGITIMERSSFEKNPIDFLEAKGYKEVKKDLIIKLPKYSLFELENGRKRMLASAGELQKGNELALPSKYVNFLYLASHYEKLKGSPEDNEQKQLFVEQHKHYLDEIIEQISEFSKRVILADANLDKVLSAYNKHRDKPIREQAENIIHLFTLTNLGAPAAFKYFDTTIDRKRYTSTKEVLDATLIHQSITGLYETRIDLSQLGGDGGGSSGGGEAAAKGGTLQLDDEYRLYSPLVKPDQNIQFWLEQFPQAWAETAGMGLAKQVPPQVIQLKASATPVSVRQYPLSKEAQEGIRPHVQRLIQQGILVPVQSPWNTPLLPVRKPGTNDYRPVQDLREVNKRVQDIHPTVPNPYNLLCALPPQRSWYTVLDLKDAFFCLRLHPTSQPLFAFEWRDPGTGRTGQLTWTRLPQGFKNSPTIFDEALHRDLANFRIQHPQVTLLQYVDDLLLAGATKQDCLEGTKALLLELSDLGYRASAKKAQICRREVTYLGYSLRDGQRWLTEARKKTVVQIPAPTTAKQVREFLGTAGFCRLWIPGFATLAAPLYPLTKEKGEFSWAPEHQKAFDAIKKALLSAPALALPDVTKPFTLYVDERKGVARGVLTQTLGPWRRPVAYLSKKLDPVASGWPVCLKAIAAVAILVKDADKLTLGQNITVIAPHALENIVRQPPDRWMTNARMTHYQSLLLTERVTFAPPAALNPATLLPEETDEPVTHDCHQLLIEETGVRKDLTDIPLTGEVLTWFTDGSSYVVEGKRMAGAAVVDGTRTIWASSLPEGTSAQKAELMALTQALRLAEGKSINIYTDSRYAFATAHVHGAIYKQRGLLTSAGREIKNKEEILSLLEALHLPKRLAIIHCPGHQKAKDPISRGNQMADRVAKQAAQGVNLLAGKRTADGSEFEKRTADGSEFESPKKKAKVE

SEQ ID NO: 7304 - protein, 2087 aa, synthetic construct
MPAAKRVKLDGGDKKYSIGLDIGTNSVGWAVITDEYKVPSKKFKVLGNTDRHSIKKNLIGALLFDSGETAEATRLKRTARRRYTRRKNRICYLQEIFSNEMAKVDDSFFHRLEESFLVEEDKKHERHPIFGNIVDEVAYHEKYPTIYHLRKKLVDSTDKADLRLIYLALAHMIKFRGHFLIEGDLNPDNSDVDKLFIQLVQTYNQLFEENPINASGVDAKAILSARLSKSRRLENLIAQLPGEKKNGLFGNLIALSLGLTPNFKSNFDLAEDAKLQLSKDTYDDDLDNLLAQIGDQYADLFLAAKNLSDAILLSDILRVNTEITKAPLSASMIKRYDEHHQDLTLLKALVRQQLPEKYKEIFFDQSKNGYAGYIDGGASQEEFYKFIKPILEKMDGTEELLVKLNREDLLRKQRTFDNGSIPHQIHLGELHAILRRQEDFYPFLKDNREKIEKILTFRIPYYVGPLARGNSRFAWMTRKSEETITPWNFEEVVDKGASAQSFIERMTNFDKNLPNEKVLPKHSLLYEYFTVYNELTKVKYVTEGMRKPAFLSGEQKKAIVDLLFKTNRKVTVKQLKEDYFKKIECFDSVEISGVEDRFNASLGTYHDLLKIIKDKDFLDNEENEDILEDIVLTLTLFEDREMIEERLKTYAHLFDDKVMKQLKRRRYTGWGRLSRKLINGIRDKQSGKTILDFLKSDGFANRNFMQLIHDDSLTFKEDIQKAQVSGQGDSLHEHIANLAGSPAIKKGILQTVKVVDELVKVMGRHKPENIVIEMARENQTTQKGQKNSRERMKRIEEGIKELGSQILKEHPVENTQLQNEKLYLYYLQNGRDMYVDQELDINRLSDYDVDHIVPQSFLKDDSIDNKVLTRSDKARGKSDNVPSEEVVKKMKNYWRQLLNAKLITQRKFDNLTKAERGGLSELDKAGFIKRQLVETRQITKHVAQILDSRMNTKYDENDKLIREVKVITLKSKLVSDFRKDFQFYKVREINNYHHAHDAYLNAVVGTALIKKYPKLESEFVYGDYKVYDVRKMIAKSEQEIGKATAKYFFYSNIMNFFKTEITLANGEIRKRPLIETNGETGEIVWDKGRDFATVRKVLSMPQVNIVKKTEVQTGGFSKESILPKRNSDKLIARKKDWDPKKYGGFDSPTVAYSVLVVAKVEKGKSKKLKSVKELLGITIMERSSFEKNPIDFLEAKGYKEVKKDLIIKLPKYSLFELENGRKRMLASAGELQKGNELALPSKYVNFLYLASHYEKLKGSPEDNEQKQLFVEQHKHYLDEIIEQISEFSKRVILADANLDKVLSAYNKHRDKPIREQAENIIHLFTLTNLGAPAAFKYFDTTIDRKRYTSTKEVLDATLIHQSITGLYETRIDLSQLGGDGGGSSGGGEAAAKGGIPWLMKKPLQLTTLVPLQEYEERLLKQTMLTGSYKEKLQSLFLKYDALWQHWENQVGHRRIKPHHIATGTVNPRPQKQYPINPKAKASIQTVINDLLKQGVLIQQNSIMNTPVYPVPKPDGKWRMVLDYREVNKTIPLIAAQNQHSAGILSSIFRGKYKTTLDLSNGFWAHSITPESYWLTAFTWLGQQYCWTRLPQGFLNSPALFNADVVDLLKEVPNVQVYVDDIYISHDDPREHLEQLEKVFSLLLNAGYVVSLKKSEIAQHEVEFLGFNITKEGRGLTETFKQKLLNITPPRDLKQLQSILGKLNFARNFIPNFSELVKPLYNIIATAPGKYITWTTDNSQQLQNIISMLNSAENLEERNPEVRLIMKVNTSPSAGYIRFYNEFAKRPIMYLNYVYTKAEVKFTNTEKLLTTIHKGLIKALDLGMGQEILVYSPIVSMTKIQKTPLPERKALPIRWITWMSYLEDPRIQFHYDKTLPELQQVPTVTDDIIAKIKHPSEFSMVFYTDGSAIKHPNVNKSHNAGMGIAQVQFKPEFTVINTWSIPLGDHTAQLAEVAAVEFACKKALKIDGPVLIVTDSFYVAESVNKELPYWQSNGFFNNKKKPLKHVSKWKSIADCIQLKPDIIIIHEKGHQPTASTFHTEGNNLADKLATQGSYVVNAGKRTADGSEFEKRTADGSEFESPKKKAKVE

SEQ ID NO: 7305 - protein, 2176 aa, synthetic construct
MPAAKRVKLDGGDKKYSIGLDIGTNSVGWAVITDEYKVPSKKFKVLGNTDRHSIKKNLIGALLFDSGETAEATRLKRTARRRYTRRKNRICYLQEIFSNEMAKVDDSFFHRLEESFLVEEDKKHERHPIFGNIVDEVAYHEKYPTIYHLRKKLVDSTDKADLRLIYLALAHMIKFRGHFLIEGDLNPDNSDVDKLFIQLVQTYNQLFEENPINASGVDAKAILSARLSKSRRLENLIAQLPGEKKNGLFGNLIALSLGLTPNFKSNFDLAEDAKLQLSKDTYDDDLDNLLAQIGDQYADLFLAAKNLSDAILLSDILRVNTEITKAPLSASMIKRYDEHHQDLTLLKALVRQQLPEKYKEIFFDQSKNGYAGYIDGGASQEEFYKFIKPILEKMDGTEELLVKLNREDLLRKQRTFDNGSIPHQIHLGELHAILRRQEDFYPFLKDNREKIEKILTFRIPYYVGPLARGNSRFAWMTRKSEETITPWNFEEVVDKGASAQSFIERMTNFDKNLPNEKVLPKHSLLYEYFTVYNELTKVKYVTEGMRKPAFLSGEQKKAIVDLLFKTNRKVTVKQLKEDYFKKIECFDSVEISGVEDRFNASLGTYHDLLKIIKDKDFLDNEENEDILEDIVLTLTLFEDREMIEERLKTYAHLFDDKVMKQLKRRRYTGWGRLSRKLINGIRDKQSGKTILDFLKSDGFANRNFMQLIHDDSLTFKEDIQKAQVSGQGDSLHEHIANLAGSPAIKKGILQTVKVVDELVKVMGRHKPENIVIEMARENQTTQKGQKNSRERMKRIEEGIKELGSQILKEHPVENTQLQNEKLYLYYLQNGRDMYVDQELDINRLSDYDVDHIVPQSFLKDDSIDNKVLTRSDKARGKSDNVPSEEVVKKMKNYWRQLLNAKLITQRKFDNLTKAERGGLSELDKAGFIKRQLVETRQITKHVAQILDSRMNTKYDENDKLIREVKVITLKSKLVSDFRKDFQFYKVREINNYHHAHDAYLNAVVGTALIKKYPKLESEFVYGDYKVYDVRKMIAKSEQEIGKATAKYFFYSNIMNFFKTEITLANGEIRKRPLIETNGETGEIVWDKGRDFATVRKVLSMPQVNIVKKTEVQTGGFSKESILPKRNSDKLIARKKDWDPKKYGGFDSPTVAYSVLVVAKVEKGKSKKLKSVKELLGITIMERSSFEKNPIDFLEAKGYKEVKKDLIIKLPKYSLFELENGRKRMLASAGELQKGNELALPSKYVNFLYLASHYEKLKGSPEDNEQKQLFVEQHKHYLDEIIEQISEFSKRVILADANLDKVLSAYNKHRDKPIREQAENIIHLFTLTNLGAPAAFKYFDTTIDRKRYTSTKEVLDATLIHQSITGLYETRIDLSQLGGDGGGSSGGGEAAAKGGMDPLQLLQPLEAEIKGTKLKAHWNSGATITCVPQAFLEEEVPIKNIWIKTIHGEKEQPVYYLTFKIQGRKVEAEVISSPYDYILVSPSDIPWLMKKPLQLTTLVPLQEYEERLLKQTMLTGSYKEKLQSLFLKYDALWQHWENQVGHRRIKPHHIATGTVNPRPQKQYPINPKAKASIQTVINDLLKQGVLIQQNSIMNTPVYPVPKPDGKWRMVLDYREVNKTIPLIAAQNQHSAGILSSIFRGKYKTTLDLSNGFWAHSITPESYWLTAFTWLGQQYCWTRLPQGFLNSPALFNADVVDLLKEVPNVQVYVDDIYISHDDPREHLEQLEKVFSLLLNAGYVVSLKKSEIAQHEVEFLGFNITKEGRGLTETFKQKLLNITPPRDLKQLQSILGLLNFARNFIPNFSELVKPLYNIIATAPGKYITWTTDNSQQLQNIISMLNSAENLEERNPEVRLIMKVNTSPSAGYIRFYNEFAKRPIMYLNYVYTKAEVKFTNTEKLLTTIHKGLIKALDLGMGQEILVYSPIVSMTKIQKTPLPERKALPIRWITWMSYLEDPRIQFHYDKTLPELQQVPTVTDDIIAKIKHPSEFSMVFYTDGSAIKHPNVNKSHNAGMGIAQVQFKPEFTVINTWSIPLGDHTAQLAEVAAVEFACKKALKIDGPVLIVTDSFYVAESVNKELPYWQSNGFFNNKKKPLKHVSKWKSIADCIQLKPDIIIIHEKGHQPTASTFHTEGNNLADKLATQGSYVVNAGKRTADGSEFEKRTADGSEFESPKKKAKVE

SEQ ID NO: 7306 - protein, 2094 aa, synthetic construct
MPAAKRVKLDGGDKKYSIGLDIGTNSVGWAVITDEYKVPSKKFKVLGNTDRHSIKKNLIGALLFDSGETAEATRLKRTARRRYTRRKNRICYLQEIFSNEMAKVDDSFFHRLEESFLVEEDKKHERHPIFGNIVDEVAYHEKYPTIYHLRKKLVDSTDKADLRLIYLALAHMIKFRGHFLIEGDLNPDNSDVDKLFIQLVQTYNQLFEENPINASGVDAKAILSARLSKSRRLENLIAQLPGEKKNGLFGNLIALSLGLTPNFKSNFDLAEDAKLQLSKDTYDDDLDNLLAQIGDQYADLFLAAKNLSDAILLSDILRVNTEITKAPLSASMIKRYDEHHQDLTLLKALVRQQLPEKYKEIFFDQSKNGYAGYIDGGASQEEFYKFIKPILEKMDGTEELLVKLNREDLLRKQRTFDNGSIPHQIHLGELHAILRRQEDFYPFLKDNREKIEKILTFRIPYYVGPLARGNSRFAWMTRKSEETITPWNFEEVVDKGASAQSFIERMTNFDKNLPNEKVLPKHSLLYEYFTVYNELTKVKYVTEGMRKPAFLSGEQKKAIVDLLFKTNRKVTVKQLKEDYFKKIECFDSVEISGVEDRFNASLGTYHDLLKIIKDKDFLDNEENEDILEDIVLTLTLFEDREMIEERLKTYAHLFDDKVMKQLKRRRYTGWGRLSRKLINGIRDKQSGKTILDFLKSDGFANRNFMQLIHDDSLTFKEDIQKAQVSGQGDSLHEHIANLAGSPAIKKGILQTVKVVDELVKVMGRHKPENIVIEMARENQTTQKGQKNSRERMKRIEEGIKELGSQILKEHPVENTQLQNEKLYLYYLQNGRDMYVDQELDINRLSDYDVDHIVPQSFLKDDSIDNKVLTRSDKARGKSDNVPSEEVVKKMKNYWRQLLNAKLITQRKFDNLTKAERGGLSELDKAGFIKRQLVETRQITKHVAQILDSRMNTKYDENDKLIREVKVITLKSKLVSDFRKDFQFYKVREINNYHHAHDAYLNAVVGTALIKKYPKLESEFVYGDYKVYDVRKMIAKSEQEIGKATAKYFFYSNIMNFFKTEITLANGEIRKRPLIETNGETGEIVWDKGRDFATVRKVLSMPQVNIVKKTEVQTGGFSKESILPKRNSDKLIARKKDWDPKKYGGFDSPTVAYSVLVVAKVEKGKSKKLKSVKELLGITIMERSSFEKNPIDFLEAKGYKEVKKDLIIKLPKYSLFELENGRKRMLASAGELQKGNELALPSKYVNFLYLASHYEKLKGSPEDNEQKQLFVEQHKHYLDEIIEQISEFSKRVILADANLDKVLSAYNKHRDKPIREQAENIIHLFTLTNLGAPAAFKYFDTTIDRKRYTSTKEVLDATLIHQSITGLYETRIDLSQLGGDGGGSSGGGEAAAKGGVLNLEEEYRLHEKPVPSSIDPSWLQLFPTVWAERAGMGLANQVPPVVVELRSGASPVAVRQYPMSKEAREGIRPHIQRFLDLGVLVPCQSPWNTPLLPVKKPGTNDYRPVQDLREINKRVQDIHPTVPNPYNLLSSLPPSHTWYSVLDLKDAFFCLKLHPNSQPLFAFEWRDPEKGNTGQLTWTRLPQGFKNSPTLFNEALHRDLAPFRALNPQVVLLQYVDDLLVAAPTYRDCKEGTQKLLQELSKLGYRVSAKKAQLCQKEVTYLGYLLKEGKRWLTPARKATVMKIPPPTTPRQVREFLGTAGFCRLWIPGFASLAAPLYPLTKPSIPFIWTEEHQKAFDRIKEALLSAPALALPDLTKPFTLYVDERAGVARGVLTQTLGPWRRPVAYLSKKLDPVASGWPTCLKAVAAVALLLKDADKLTLGQNVTVIASHSLESIVRQPPDRWMTNARMTHYQSLLLNERVSFAPPAVLNPATLLPVESEATPVHRCSEILAEETGTRRDLKDQPLPGVPAWYTDGSSFIAEGKRRAGAAIVDGKRTVWASSLPEGTSAQKAELVALTQALRLAEGKDINIYTDSRYAFATAHIHGAIYKQRGWLTSAGKDIKNKEEILALLEAIHLPKRVAIIHCPGHQKGNDPVATGNRRADEAAKQAALSTRVLAETTKPAGKRTADGSEFEKRTADGSEFESPKKKAKVE

SEQ ID NO: 7307 - protein, 2102 aa, synthetic construct
MPAAKRVKLDGGDKKYSIGLDIGTNSVGWAVITDEYKVPSKKFKVLGNTDRHSIKKNLIGALLFDSGETAEATRLKRTARRRYTRRKNRICYLQEIFSNEMAKVDDSFFHRLEESFLVEEDKKHERHPIFGNIVDEVAYHEKYPTIYHLRKKLVDSTDKADLRLIYLALAHMIKFRGHFLIEGDLNPDNSDVDKLFIQLVQTYNQLFEENPINASGVDAKAILSARLSKSRRLENLIAQLPGEKKNGLFGNLIALSLGLTPNFKSNFDLAEDAKLQLSKDTYDDDLDNLLAQIGDQYADLFLAAKNLSDAILLSDILRVNTEITKAPLSASMIKRYDEHHQDLTLLKALVRQQLPEKYKEIFFDQSKNGYAGYIDGGASQEEFYKFIKPILEKMDGTEELLVKLNREDLLRKQRTFDNGSIPHQIHLGELHAILRRQEDFYPFLKDNREKIEKILTFRIPYYVGPLARGNSRFAWMTRKSEETITPWNFEEVVDKGASAQSFIERMTNFDKNLPNEKVLPKHSLLYEYFTVYNELTKVKYVTEGMRKPAFLSGEQKKAIVDLLFKTNRKVTVKQLKEDYFKKIECFDSVEISGVEDRFNASLGTYHDLLKIIKDKDFLDNEENEDILEDIVLTLTLFEDREMIEERLKTYAHLFDDKVMKQLKRRRYTGWGRLSRKLINGIRDKQSGKTILDFLKSDGFANRNFMQLIHDDSLTFKEDIQKAQVSGQGDSLHEHIANLAGSPAIKKGILQTVKVVDELVKVMGRHKPENIVIEMARENQTTQKGQKNSRERMKRIEEGIKELGSQILKEHPVENTQLQNEKLYLYYLQNGRDMYVDQELDINRLSDYDVDHIVPQSFLKDDSIDNKVLTRSDKARGKSDNVPSEEVVKKMKNYWRQLLNAKLITQRKFDNLTKAERGGLSELDKAGFIKRQLVETRQITKHVAQILDSRMNTKYDENDKLIREVKVITLKSKLVSDFRKDFQFYKVREINNYHHAHDAYLNAVVGTALIKKYPKLESEFVYGDYKVYDVRKMIAKSEQEIGKATAKYFFYSNIMNFFKTEITLANGEIRKRPLIETNGETGEIVWDKGRDFATVRKVLSMPQVNIVKKTEVQTGGFSKESILPKRNSDKLIARKKDWDPKKYGGFDSPTVAYSVLVVAKVEKGKSKKLKSVKELLGITIMERSSFEKNPIDFLEAKGYKEVKKDLIIKLPKYSLFELENGRKRMLASAGELQKGNELALPSKYVNFLYLASHYEKLKGSPEDNEQKQLFVEQHKHYLDEIIEQISEFSKRVILADANLDKVLSAYNKHRDKPIREQAENIIHLFTLTNLGAPAAFKYFDTTIDRKRYTSTKEVLDATLIHQSITGLYETRIDLSQLGGDGGGSSEAAAKGGGGGTVSLQDEHRLFDIPVTTSLPDVWLQDFPQAWAETGGLGRAKCQAPIIIDLKPTAVPVSIKQYPMSLEAHMGIRQHIIKFLELGVLRPCRSPWNTPLLPVKKPGTQDYRPVQDLREINKRTVDIHPTVPNPYNLLSTLKPDYSWYTVLDLKDAFFCLPLAPQSQELFAFEWKDPERGISGQLTWTRLPQGFKNSPTLFNEALHRDLTDFRTQHPEVTLLQYVDDLLLAAPTKKACTQGTRHLLQELGEKGYRASAKKAQICQTKVTYLGYILSEGKRWLTPGRIETVARIPPPRNPREVREFLGTAGFCRLWIPGFAELAAPLYALTKPSTPFTWQTEHQLAFEALKKALLSAPALGLPDTSKPFTLFLDERQGIAKGVLTQKLGPWKRPVAYLSKKLDPVAAGWPPCLRIMAATAMLVKDSAKLTLGQPLTVITPHTLEAIVRQPPDRWITNARLTHYQALLLDTDRVQFGPPVTLNPATLLPVPENQPSPHDCRQVLAETHGTREDLKDQELPDADHTWYTDGSSYLDSGTRRAGAAVVDGHNTIWAQSLPPGTSAQKAELIALTKALELSKGKKANIYTDSRYAFATAHTHGSIYERRGWLTSEGKEIKNKAEIIALLKALFLPQEVAIIHCPGHQKGQDPVAVGNRQADRVARQAAMAEVLTLATEPDNTSHITAGKRTADGSEFEKRTADGSEFESPKKKAKVE

SEQ ID NO: 7308 - protein, 2173 aa, synthetic construct
MPAAKRVKLDGGDKKYSIGLDIGTNSVGWAVITDEYKVPSKKFKVLGNTDRHSIKKNLIGALLFDSGETAEATRLKRTARRRYTRRKNRICYLQEIFSNEMAKVDDSFFHRLEESFLVEEDKKHERHPIFGNIVDEVAYHEKYPTIYHLRKKLVDSTDKADLRLIYLALAHMIKFRGHFLIEGDLNPDNSDVDKLFIQLVQTYNQLFEENPINASGVDAKAILSARLSKSRRLENLIAQLPGEKKNGLFGNLIALSLGLTPNFKSNFDLAEDAKLQLSKDTYDDDLDNLLAQIGDQYADLFLAAKNLSDAILLSDILRVNTEITKAPLSASMIKRYDEHHQDLTLLKALVRQQLPEKYKEIFFDQSKNGYAGYIDGGASQEEFYKFIKPILEKMDGTEELLVKLNREDLLRKQRTFDNGSIPHQIHLGELHAILRRQEDFYPFLKDNREKIEKILTFRIPYYVGPLARGNSRFAWMTRKSEETITPWNFEEVVDKGASAQSFIERMTNFDKNLPNEKVLPKHSLLYEYFTVYNELTKVKYVTEGMRKPAFLSGEQKKAIVDLLFKTNRKVTVKQLKEDYFKKIECFDSVEISGVEDRFNASLGTYHDLLKIIKDKDFLDNEENEDILEDIVLTLTLFEDREMIEERLKTYAHLFDDKVMKQLKRRRYTGWGRLSRKLINGIRDKQSGKTILDFLKSDGFANRNFMQLIHDDSLTFKEDIQKAQVSGQGDSLHEHIANLAGSPAIKKGILQTVKVVDELVKVMGRHKPENIVIEMARENQTTQKGQKNSRERMKRIEEGIKELGSQILKEHPVENTQLQNEKLYLYYLQNGRDMYVDQELDINRLSDYDVDHIVPQSFLKDDSIDNKVLTRSDKARGKSDNVPSEEVVKKMKNYWRQLLNAKLITQRKFDNLTKAERGGLSELDKAGFIKRQLVETRQITKHVAQILDSRMNTKYDENDKLIREVKVITLKSKLVSDFRKDFQFYKVREINNYHHAHDAYLNAVVGTALIKKYPKLESEFVYGDYKVYDVRKMIAKSEQEIGKATAKYFFYSNIMNFFKTEITLANGEIRKRPLIETNGETGEIVWDKGRDFATVRKVLSMPQVNIVKKTEVQTGGFSKESILPKRNSDKLIARKKDWDPKKYGGFDSPTVAYSVLVVAKVEKGKSKKLKSVKELLGITIMERSSFEKNPIDFLEAKGYKEVKKDLIIKLPKYSLFELENGRKRMLASAGELQKGNELALPSKYVNFLYLASHYEKLKGSPEDNEQKQLFVEQHKHYLDEIIEQISEFSKRVILADANLDKVLSAYNKHRDKPIREQAENIIHLFTLTNLGAPAAFKYFDTTIDRKRYTSTKEVLDATLIHQSITGLYETRIDLSQLGGDGGGSSEAAAKGGGGGMDLLKPLTVERKGVKIKGYWNSQADITCVPKDLLQGEEPVRQQNVTTIHGTQEGDVYYVNLKIDGRRINTEVIGTTLDYAIITPGDVPWILKKPLELTIKLDLEEQQGTLLNNSILSKKGKEELKQLFEKYSALWQSWENQVGHRRIRPHKIATGTVKPTPQKQYHINPKAKPDIQIVINDLLKQGVLIQKESTMNTPVYPVPKPNGRWRMVLDYRAVNKVTPLIAVQNQHSYGILGSLFKGRYKTTIDLSNGFWAHPIVPEDYWITAFTWQGKQYCWTVLPQGFLNSPGLFNGDVVDLLQGIPNVEVYVDDVYISHDSEKEHLEYLDILFNRLKEAGYIISLKKSNIANSIVDFLGFQITNEGRGLTDTFKEKLENITAPTTLKQLQSILGKLNFARNFIPDFTELIAPLYALIPKSPKNYVPWQIEHSTTLETLITKLNGAEYLQGRKGDKTLIMKVNASYTTGYIRYYNEGEKKPISYVSIVFSKTELKFTELEKLLTTVHKGLLKALDLSMGQNIHVYSPIVSMQNIQKTPQTAKKALASRWLSWLSYLEDPRIRFFYDPQMPALKDLPAVDTGKDNKKHPSNFQHIFYTDGSAITSPTKEGHLNAGMGIVYFINKDGNLQKQQEWSISLGNHTAQFAEIAAFEFALKKCLPLGGNILVVTDSNYVAKAYNEELDVWASNGFVNNRKKPLKHISKWKSVADLKRLRPDVVVTHEPGHQKLDSSPHAYGNNLADQLATQASFKVHAGKRTADGSEFEKRTADGSEFESPKKKAKVE

SEQ ID NO: 7309 - protein, 2095 aa, synthetic construct
MPAAKRVKLDGGDKKYSIGLDIGTNSVGWAVITDEYKVPSKKFKVLGNTDRHSIKKNLIGALLFDSGETAEATRLKRTARRRYTRRKNRICYLQEIFSNEMAKVDDSFFHRLEESFLVEEDKKHERHPIFGNIVDEVAYHEKYPTIYHLRKKLVDSTDKADLRLIYLALAHMIKFRGHFLIEGDLNPDNSDVDKLFIQLVQTYNQLFEENPINASGVDAKAILSARLSKSRRLENLIAQLPGEKKNGLFGNLIALSLGLTPNFKSNFDLAEDAKLQLSKDTYDDDLDNLLAQIGDQYADLFLAAKNLSDAILLSDILRVNTEITKAPLSASMIKRYDEHHQDLTLLKALVRQQLPEKYKEIFFDQSKNGYAGYIDGGASQEEFYKFIKPILEKMDGTEELLVKLNREDLLRKQRTFDNGSIPHQIHLGELHAILRRQEDFYPFLKDNREKIEKILTFRIPYYVGPLARGNSRFAWMTRKSEETITPWNFEEVVDKGASAQSFIERMTNFDKNLPNEKVLPKHSLLYEYFTVYNELTKVKYVTEGMRKPAFLSGEQKKAIVDLLFKTNRKVTVKQLKEDYFKKIECFDSVEISGVEDRFNASLGTYHDLLKIIKDKDFLDNEENEDILEDIVLTLTLFEDREMIEERLKTYAHLFDDKVMKQLKRRRYTGWGRLSRKLINGIRDKQSGKTILDFLKSDGFANRNFMQLIHDDSLTFKEDIQKAQVSGQGDSLHEHIANLAGSPAIKKGILQTVKVVDELVKVMGRHKPENIVIEMARENQTTQKGQKNSRERMKRIEEGIKELGSQILKEHPVENTQLQNEKLYLYYLQNGRDMYVDQELDINRLSDYDVDHIVPQSFLKDDSIDNKVLTRSDKARGKSDNVPSEEVVKKMKNYWRQLLNAKLITQRKFDNLTKAERGGLSELDKAGFIKRQLVETRQITKHVAQILDSRMNTKYDENDKLIREVKVITLKSKLVSDFRKDFQFYKVREINNYHHAHDAYLNAVVGTALIKKYPKLESEFVYGDYKVYDVRKMIAKSEQEIGKATAKYFFYSNIMNFFKTEITLANGEIRKRPLIETNGETGEIVWDKGRDFATVRKVLSMPQVNIVKKTEVQTGGFSKESILPKRNSDKLIARKKDWDPKKYGGFDSPTVAYSVLVVAKVEKGKSKKLKSVKELLGITIMERSSFEKNPIDFLEAKGYKEVKKDLIIKLPKYSLFELENGRKRMLASAGELQKGNELALPSKYVNFLYLASHYEKLKGSPEDNEQKQLFVEQHKHYLDEIIEQISEFSKRVILADANLDKVLSAYNKHRDKPIREQAENIIHLFTLTNLGAPAAFKYFDTTIDRKRYTSTKEVLDATLIHQSITGLYETRIDLSQLGGDGGGSSEAAAKGGGGGTLQLEEEYRLFEPESTQKQEMDIWLKNFPQAWAETGGMGTAHCQAPVLIQLKATATPISIRQYPMPHEAYQGIKPHIRRMLDQGILKPCQSPWNTPLLPVKKPGTEDYRPVQDLREVNKRVEDIHPTVPNPYNLLSTLPPSHPWYTVLDLKDAFFCLRLHSESQLLFAFEWRDPEIGLSGQLTWTRLPQGFKNSPTLFNEALHSDLADFRVRYPALVLLQYVDDLLLAAATRTECLEGTKALLETLGNKGYRASAKKAQICLQEVTYLGYSLKDGQRWLTKARKEAILSIPVPKNSRQVREFLGKAGYCRLFIPGFAELAAPLYPLTRPGTLFQWGTEQQLAFEDIKKALLSSPALGLPDITKPFELFIDENSGFAKGVLVQKLGPWKRPVAYLSKKLDTVASGWPPCLRMVAAIAILVKDAGKLTLGQPLTILTSHPVEALVRQPPNKWLSNARMTHYQAMLLDAERVHFGPTVSLNPATLLPLPSGGNHHDCLQILAETHGTRPDLTDQPLPDADLTWYTDGSSFIRNGEREAGAAVTTESEVIWAAPLPPGTSAQRAELIALTQALKMAEGKKLTVYTDSRYAFATTHVHGEIYRRRGWLTSEGKEIKNKNEILALLEALFLPKRLSIIHCPGHQKGDSPQAKGNRLADDTAKKAATETHSSLTVLPAGKRTADGSEFEKRTADGSEFESPKKKAKVE

SEQ ID NO: 7310 - protein, 2094 aa, synthetic construct
MPAAKRVKLDGGDKKYSIGLDIGTNSVGWAVITDEYKVPSKKFKVLGNTDRHSIKKNLIGALLFDSGETAEATRLKRTARRRYTRRKNRICYLQEIFSNEMAKVDDSFFHRLEESFLVEEDKKHERHPIFGNIVDEVAYHEKYPTIYHLRKKLVDSTDKADLRLIYLALAHMIKFRGHFLIEGDLNPDNSDVDKLFIQLVQTYNQLFEENPINASGVDAKAILSARLSKSRRLENLIAQLPGEKKNGLFGNLIALSLGLTPNFKSNFDLAEDAKLQLSKDTYDDDLDNLLAQIGDQYADLFLAAKNLSDAILLSDILRVNTEITKAPLSASMIKRYDEHHQDLTLLKALVRQQLPEKYKEIFFDQSKNGYAGYIDGGASQEEFYKFIKPILEKMDGTEELLVKLNREDLLRKQRTFDNGSIPHQIHLGELHAILRRQEDFYPFLKDNREKIEKILTFRIPYYVGPLARGNSRFAWMTRKSEETITPWNFEEVVDKGASAQSFIERMTNFDKNLPNEKVLPKHSLLYEYFTVYNELTKVKYVTEGMRKPAFLSGEQKKAIVDLLFKTNRKVTVKQLKEDYFKKIECFDSVEISGVEDRFNASLGTYHDLLKIIKDKDFLDNEENEDILEDIVLTLTLFEDREMIEERLKTYAHLFDDKVMKQLKRRRYTGWGRLSRKLINGIRDKQSGKTILDFLKSDGFANRNFMQLIHDDSLTFKEDIQKAQVSGQGDSLHEHIANLAGSPAIKKGILQTVKVVDELVKVMGRHKPENIVIEMARENQTTQKGQKNSRERMKRIEEGIKELGSQILKEHPVENTQLQNEKLYLYYLQNGRDMYVDQELDINRLSDYDVDHIVPQSFLKDDSIDNKVLTRSDKARGKSDNVPSEEVVKKMKNYWRQLLNAKLITQRKFDNLTKAERGGLSELDKAGFIKRQLVETRQITKHVAQILDSRMNTKYDENDKLIREVKVITLKSKLVSDFRKDFQFYKVREINNYHHAHDAYLNAVVGTALIKKYPKLESEFVYGDYKVYDVRKMIAKSEQEIGKATAKYFFYSNIMNFFKTEITLANGEIRKRPLIETNGETGEIVWDKGRDFATVRKVLSMPQVNIVKKTEVQTGGFSKESILPKRNSDKLIARKKDWDPKKYGGFDSPTVAYSVLVVAKVEKGKSKKLKSVKELLGITIMERSSFEKNPIDFLEAKGYKEVKKDLIIKLPKYSLFELENGRKRMLASAGELQKGNELALPSKYVNFLYLASHYEKLKGSPEDNEQKQLFVEQHKHYLDEIIEQISEFSKRVILADANLDKVLSAYNKHRDKPIREQAENIIHLFTLTNLGAPAAFKYFDTTIDRKRYTSTKEVLDATLIHQSITGLYETRIDLSQLGGDGGGSSEAAAKGGGGGVLNLEEEYRLHEKPVPSSIDPSWLQLFPTVWAERAGMGLANQVPPVVVELRSGASPVAVRQYPMSKEAREGIRPHIQKFLDLGVLVPCRSPWNTPLLPVKKPGTNDYRPVQDLREINKRVQDIHPTVPNPYNLLSSLPPSYTWYSVLDLKDAFFCLRLHPNSQPLFAFEWKDPEKGNTGQLTWTRLPQGFKNSPTLFNEALHRDLAPFRALNPQVVLLQYVDDLLVAAPTYEDCKKGTQKLLQELSKLGYRVSAKKAQLCQREVTYLGYLLKEGKRWLTPARKATVMKIPVPTTPRQVREFLGKAGFCRLFIPGFASLAAPLYPLTKPSIPFIWTEEHQQAFDHIKKALLSAPALALPDLTKPFTLYIDERAGVARGVLTQTLGPWRRPVAYLSKKLDPVASGWPTCLKAVAAVALLLKDADKLTLGQNVTVIASHSLESIVRQPPDRWMTNARMTHYQSLLLNERVSFAPPAVLNPATLLPVESEATPVHRCSEILAEETGTRRDLEDQPLPGVPTWYTDGSSFITEGKRRAGAPIVDGKRTVWASSLPEGTSAQKAELVALTQALRLAEGKNINIYTDSRYAFATAHIHGAIYKQRGWLTSAGKDIKNKEEILALLEAIHLPRRVAIIHCPGHQRGSNPVATGNRRADEAAKQAALSTRVLAGTTKPAGKRTADGSEFEKRTADGSEFESPKKKAKVE

SEQ ID NO: 7311 - protein, 2218 aa, synthetic construct
MPAAKRVKLDGGDKKYSIGLDIGTNSVGWAVITDEYKVPSKKFKVLGNTDRHSIKKNLIGALLFDSGETAEATRLKRTARRRYTRRKNRICYLQEIFSNEMAKVDDSFFHRLEESFLVEEDKKHERHPIFGNIVDEVAYHEKYPTIYHLRKKLVDSTDKADLRLIYLALAHMIKFRGHFLIEGDLNPDNSDVDKLFIQLVQTYNQLFEENPINASGVDAKAILSARLSKSRRLENLIAQLPGEKKNGLFGNLIALSLGLTPNFKSNFDLAEDAKLQLSKDTYDDDLDNLLAQIGDQYADLFLAAKNLSDAILLSDILRVNTEITKAPLSASMIKRYDEHHQDLTLLKALVRQQLPEKYKEIFFDQSKNGYAGYIDGGASQEEFYKFIKPILEKMDGTEELLVKLNREDLLRKQRTFDNGSIPHQIHLGELHAILRRQEDFYPFLKDNREKIEKILTFRIPYYVGPLARGNSRFAWMTRKSEETITPWNFEEVVDKGASAQSFIERMTNFDKNLPNEKVLPKHSLLYEYFTVYNELTKVKYVTEGMRKPAFLSGEQKKAIVDLLFKTNRKVTVKQLKEDYFKKIECFDSVEISGVEDRFNASLGTYHDLLKIIKDKDFLDNEENEDILEDIVLTLTLFEDREMIEERLKTYAHLFDDKVMKQLKRRRYTGWGRLSRKLINGIRDKQSGKTILDFLKSDGFANRNFMQLIHDDSLTFKEDIQKAQVSGQGDSLHEHIANLAGSPAIKKGILQTVKVVDELVKVMGRHKPENIVIEMARENQTTQKGQKNSRERMKRIEEGIKELGSQILKEHPVENTQLQNEKLYLYYLQNGRDMYVDQELDINRLSDYDVDHIVPQSFLKDDSIDNKVLTRSDKARGKSDNVPSEEVVKKMKNYWRQLLNAKLITQRKFDNLTKAERGGLSELDKAGFIKRQLVETRQITKHVAQILDSRMNTKYDENDKLIREVKVITLKSKLVSDFRKDFQFYKVREINNYHHAHDAYLNAVVGTALIKKYPKLESEFVYGDYKVYDVRKMIAKSEQEIGKATAKYFFYSNIMNFFKTEITLANGEIRKRPLIETNGETGEIVWDKGRDFATVRKVLSMPQVNIVKKTEVQTGGFSKESILPKRNSDKLIARKKDWDPKKYGGFDSPTVAYSVLVVAKVEKGKSKKLKSVKELLGITIMERSSFEKNPIDFLEAKGYKEVKKDLIIKLPKYSLFELENGRKRMLASAGELQKGNELALPSKYVNFLYLASHYEKLKGSPEDNEQKQLFVEQHKHYLDEIIEQISEFSKRVILADANLDKVLSAYNKHRDKPIREQAENIIHLFTLTNLGAPAAFKYFDTTIDRKRYTSTKEVLDATLIHQSITGLYETRIDLSQLGGDGGGSSEAAAKGGGGGTLGDQGSRGSDPLPEPRVTLTVEGIPTEFLVNTGAEHSVLTKPMGKMGSKRTVVAGATGSKVYPWTTKRLLKIGQKQVTHSFLVIPECPAPLLGRDLLTKLKAQIQFSTEGPQVTWEDRPAMCLVLNLEEEYRLHEKPVPPSIDPSWLQLFPMVWAEKAGMGLANQVPPVVVELKSDASPVAVRQYPMSKEAREGIRPHIQRFLDLGILVPCQSPWNTPLLPVKKPGTNDYRPVQDLREVNKRVQDIHPTVPNPYNLLSSLPPSHTWYSVLDLKDAFFCLKLHPNSQPLFAFEWRDPEKGNTGQLTWTRLPQGFKNSPTLFNEALHRDLASFRALNPQVVMLQYVDDLLVAAPTYRDCKEGTRRLLQELSKLGYRVSAKKAQLCREEVTYLGYLLKGGKRWLTPARKATVMKIPTPTTPRQVREFLGTAGFCRLWIPGFASLAAPLYPLTRPKVPFTWTEAHQEAFGRIKEALLSAPALALPDLTKPFALYVDEKEGVARGVLTQTLGPWRRPVAYLSKKLDPVASGWPTCLKAIAAVALLLKDADKLTLGQNVLVIAPHNLESIVRQPPDRWMTNARMTHYQSLLLNERVSFAPPAILNPATLLPVESDDTPIHICSEILAEETGTRPDLRDQPLPGVPAWYTDGSSFIMDGRRQAGAAIVDNKRTVWASNLPEGTSAQKAELIALTQALRLAEGKSINIYTDSRYAFATAHVHGAIYKQRGWLTSAGKDIKNKEEILALLEAIHLPKRVAIIHCPGHQRGTDPVATGNRKADEAAKQAAQSTRILTETTKNAGKRTADGSEFEKRTADGSEFESPKKKAKVE

SEQ ID NO: 7312 - protein, 2096 aa, synthetic construct
MPAAKRVKLDGGDKKYSIGLDIGTNSVGWAVITDEYKVPSKKFKVLGNTDRHSIKKNLIGALLFDSGETAEATRLKRTARRRYTRRKNRICYLQEIFSNEMAKVDDSFFHRLEESFLVEEDKKHERHPIFGNIVDEVAYHEKYPTIYHLRKKLVDSTDKADLRLIYLALAHMIKFRGHFLIEGDLNPDNSDVDKLFIQLVQTYNQLFEENPINASGVDAKAILSARLSKSRRLENLIAQLPGEKKNGLFGNLIALSLGLTPNFKSNFDLAEDAKLQLSKDTYDDDLDNLLAQIGDQYADLFLAAKNLSDAILLSDILRVNTEITKAPLSASMIKRYDEHHQDLTLLKALVRQQLPEKYKEIFFDQSKNGYAGYIDGGASQEEFYKFIKPILEKMDGTEELLVKLNREDLLRKQRTFDNGSIPHQIHLGELHAILRRQEDFYPFLKDNREKIEKILTFRIPYYVGPLARGNSRFAWMTRKSEETITPWNFEEVVDKGASAQSFIERMTNFDKNLPNEKVLPKHSLLYEYFTVYNELTKVKYVTEGMRKPAFLSGEQKKAIVDLLFKTNRKVTVKQLKEDYFKKIECFDSVEISGVEDRFNASLGTYHDLLKIIKDKDFLDNEENEDILEDIVLTLTLFEDREMIEERLKTYAHLFDDKVMKQLKRRRYTGWGRLSRKLINGIRDKQSGKTILDFLKSDGFANRNFMQLIHDDSLTFKEDIQKAQVSGQGDSLHEHIANLAGSPAIKKGILQTVKVVDELVKVMGRHKPENIVIEMARENQTTQKGQKNSRERMKRIEEGIKELGSQILKEHPVENTQLQNEKLYLYYLQNGRDMYVDQELDINRLSDYDVDHIVPQSFLKDDSIDNKVLTRSDKARGKSDNVPSEEVVKKMKNYWRQLLNAKLITQRKFDNLTKAERGGLSELDKAGFIKRQLVETRQITKHVAQILDSRMNTKYDENDKLIREVKVITLKSKLVSDFRKDFQFYKVREINNYHHAHDAYLNAVVGTALIKKYPKLESEFVYGDYKVYDVRKMIAKSEQEIGKATAKYFFYSNIMNFFKTEITLANGEIRKRPLIETNGETGEIVWDKGRDFATVRKVLSMPQVNIVKKTEVQTGGFSKESILPKRNSDKLIARKKDWDPKKYGGFDSPTVAYSVLVVAKVEKGKSKKLKSVKELLGITIMERSSFEKNPIDFLEAKGYKEVKKDLIIKLPKYSLFELENGRKRMLASAGELQKGNELALPSKYVNFLYLASHYEKLKGSPEDNEQKQLFVEQHKHYLDEIIEQISEFSKRVILADANLDKVLSAYNKHRDKPIREQAENIIHLFTLTNLGAPAAFKYFDTTIDRKRYTSTKEVLDATLIHQSITGLYETRIDLSQLGGDGGGSSEAAAKGGGGGLGIEDEYRLHETSTEPDVSLGSTWLSDFPQAWAETGGMGLAVRQAPLIIPLKATSTPVSIQQYPMSHEARLGIKPHIQRLLDQGILVPCQSPWNTPLLPVKKPGTNDYRPVQDLREVNKRVEDIHPTVPNPYNLLSGLPPSHQWYTVLDLKDAFFCLRLHPTSQPLFAFEWRDPGMGISGQLTWTRLPQGFKNSPTLFNEALHRDLADFRIQHPDLILLQYVDDILLAATSELDCQQGTRALLQTLGDLGYRASAKKAQICQKQVKYLGYLLREGQRWLTEARKETVMGQPVPKTPRQLREFLGKAGFCRLFIPGFAEMAAPLYPLTKPGTLFSWGPDQQKAYQEIKQALLTAPALGLPDLTKPFELFVDEKQGYAKGVLTQKLGPWRRPVAYLSKKLDPVAAGWPPCLRMVAAIAVLTKDAGKLTMGQPLVILAPHAVEALVKQPPDRWLSNARMTHYQAMLLDTDRVQFGPVVALNPATLLPLPEEGAPHDCLEILAETHGTRPDLTDQPIPDADHTWYTDGSSFLQEGQRKAGAAVTTETEVIWAGALPAGTSAQRAELIALTQALKMAEGKRLNVYTDSRYAFATAHIHGEIYRRRGWLTSEGREIKNKSEILALLKALFLPKRLSIIHCLGHQKGDSAEARGNRLADQAAREAAIKTPPDTSTLLIAGKRTADGSEFEKRTADGSEFESPKKKAKVE

SEQ ID NO: 7313 - protein, 2116 aa, synthetic construct
MPAAKRVKLDGGDKKYSIGLDIGTNSVGWAVITDEYKVPSKKFKVLGNTDRHSIKKNLIGALLFDSGETAEATRLKRTARRRYTRRKNRICYLQEIFSNEMAKVDDSFFHRLEESFLVEEDKKHERHPIFGNIVDEVAYHEKYPTIYHLRKKLVDSTDKADLRLIYLALAHMIKFRGHFLIEGDLNPDNSDVDKLFIQLVQTYNQLFEENPINASGVDAKAILSARLSKSRRLENLIAQLPGEKKNGLFGNLIALSLGLTPNFKSNFDLAEDAKLQLSKDTYDDDLDNLLAQIGDQYADLFLAAKNLSDAILLSDILRVNTEITKAPLSASMIKRYDEHHQDLTLLKALVRQQLPEKYKEIFFDQSKNGYAGYIDGGASQEEFYKFIKPILEKMDGTEELLVKLNREDLLRKQRTFDNGSIPHQIHLGELHAILRRQEDFYPFLKDNREKIEKILTFRIPYYVGPLARGNSRFAWMTRKSEETITPWNFEEVVDKGASAQSFIERMTNFDKNLPNEKVLPKHSLLYEYFTVYNELTKVKYVTEGMRKPAFLSGEQKKAIVDLLFKTNRKVTVKQLKEDYFKKIECFDSVEISGVEDRFNASLGTYHDLLKIIKDKDFLDNEENEDILEDIVLTLTLFEDREMIEERLKTYAHLFDDKVMKQLKRRRYTGWGRLSRKLINGIRDKQSGKTILDFLKSDGFANRNFMQLIHDDSLTFKEDIQKAQVSGQGDSLHEHIANLAGSPAIKKGILQTVKVVDELVKVMGRHKPENIVIEMARENQTTQKGQKNSRERMKRIEEGIKELGSQILKEHPVENTQLQNEKLYLYYLQNGRDMYVDQELDINRLSDYDVDHIVPQSFLKDDSIDNKVLTRSDKARGKSDNVPSEEVVKKMKNYWRQLLNAKLITQRKFDNLTKAERGGLSELDKAGFIKRQLVETRQITKHVAQILDSRMNTKYDENDKLIREVKVITLKSKLVSDFRKDFQFYKVREINNYHHAHDAYLNAVVGTALIKKYPKLESEFVYGDYKVYDVRKMIAKSEQEIGKATAKYFFYSNIMNFFKTEITLANGEIRKRPLIETNGETGEIVWDKGRDFATVRKVLSMPQVNIVKKTEVQTGGFSKESILPKRNSDKLIARKKDWDPKKYGGFDSPTVAYSVLVVAKVEKGKSKKLKSVKELLGITIMERSSFEKNPIDFLEAKGYKEVKKDLIIKLPKYSLFELENGRKRMLASAGELQKGNELALPSKYVNFLYLASHYEKLKGSPEDNEQKQLFVEQHKHYLDEIIEQISEFSKRVILADANLDKVLSAYNKHRDKPIREQAENIIHLFTLTNLGAPAAFKYFDTTIDRKRYTSTKEVLDATLIHQSITGLYETRIDLSQLGGDGGGSSEAAAKGGGGGTLNIEDEYRLHETSKEPDVSLGSTWLSDFPQAWAETGGMGLAVRQAPLIIPLKATSTPVSIKQYPMSQEARLGIKPHIQRLLDQGILVPCQSPWNTPLLPVKKPGTNDYRPVQDLREVNKRVEDIHPTVPNPYNLLSGLPPSHQWYTVLDLKDAFFCLRLHPTSQPLFAFEWRDPEMGISGQLTWTRLPQGFKNSPTLFNEALHRDLADFRIQHPDLILLQYVDDLLLAATSELDCQQGTRALLQTLGNLGYRASAKKAQICQKQVKYLGYLLKEGQRWLTEARKETVMGQPTPKTPRQLREFLGKAGFCRLFIPGFAEMAAPLYPLTKPGTLFNWGPDQQKAYQEIKQALLTAPALGLPDLTKPFELFVDEKQGYAKGVLTQKLGPWRRPVAYLSKKLDPVAAGWPPCLRMVAAIAVLTKDAGKLTMGQPLVILAPHAVEALVKQPPDRWLSNARMTHYQALLLDTDRVQFGPVVALNPATLLPLPEEGLQHNCLDILAEAHGTRPDLTDQPLPDADHTWYTDGSSLLQEGQRKAGAAVTTETEVIWAKALPAGTSAQRAELIALTQALKMAEGKKLNVYTDSRYAFATAHIHGEIYRRRGWLTSEGKEIKNKDEILALLKALFLPKRLSIIHCPGHQKGHSAEARGNRMADQAARKAAITETPDTSTLLIENSSPSGGSKRTADGSEFEAGKRTADGSEFEKRTADGSEFESPKKKAKVE

SEQ ID NO: 7314 - protein, 2116 aa, synthetic construct; identical to SEQ ID NO: 7313

SEQ ID NO: 7315 - protein, 2087 aa, synthetic construct
MPAAKRVKLDGGDKKYSIGLDIGTNSVGWAVITDEYKVPSKKFKVLGNTDRHSIKKNLIGALLFDSGETAEATRLKRTARRRYTRRKNRICYLQEIFSNEMAKVDDSFFHRLEESFLVEEDKKHERHPIFGNIVDEVAYHEKYPTIYHLRKKLVDSTDKADLRLIYLALAHMIKFRGHFLIEGDLNPDNSDVDKLFIQLVQTYNQLFEENPINASGVDAKAILSARLSKSRRLENLIAQLPGEKKNGLFGNLIALSLGLTPNFKSNFDLAEDAKLQLSKDTYDDDLDNLLAQIGDQYADLFLAAKNLSDAILLSDILRVNTEITKAPLSASMIKRYDEHHQDLTLLKALVRQQLPEKYKEIFFDQSKNGYAGYIDGGASQEEFYKFIKPILEKMDGTEELLVKLNREDLLRKQRTFDNGSIPHQIHLGELHAILRRQEDFYPFLKDNREKIEKILTFRIPYYVGPLARGNSRFAWMTRKSEETITPWNFEEVVDKGASAQSFIERMTNFDKNLPNEKVLPKHSLLYEYFTVYNELTKVKYVTEGMRKPAFLSGEQKKAIVDLLFKTNRKVTVKQLKEDYFKKIECFDSVEISGVEDRFNASLGTYHDLLKIIKDKDFLDNEENEDILEDIVLTLTLFEDREMIEERLKTYAHLFDDKVMKQLKRRRYTGWGRLSRKLINGIRDKQSGKTILDFLKSDGFANRNFMQLIHDDSLTFKEDIQKAQVSGQGDSLHEHIANLAGSPAIKKGILQTVKVVDELVKVMGRHKPENIVIEMARENQTTQKGQKNSRERMKRIEEGIKELGSQILKEHPVENTQLQNEKLYLYYLQNGRDMYVDQELDINRLSDYDVDHIVPQSFLKDDSIDNKVLTRSDKARGKSDNVPSEEVVKKMKNYWRQLLNAKLITQRKFDNLTKAERGGLSELDKAGFIKRQLVETRQITKHVAQILDSRMNTKYDENDKLIREVKVITLKSKLVSDFRKDFQFYKVREINNYHHAHDAYLNAVVGTALIKKYPKLESEFVYGDYKVYDVRKMIAKSEQEIGKATAKYFFYSNIMNFFKTEITLANGEIRKRPLIETNGETGEIVWDKGRDFATVRKVLSMPQVNIVKKTEVQTGGFSKESILPKRNSDKLIARKKDWDPKKYGGFDSPTVAYSVLVVAKVEKGKSKKLKSVKELLGITIMERSSFEKNPIDFLEAKGYKEVKKDLIIKLPKYSLFELENGRKRMLASAGELQKGNELALPSKYVNFLYLASHYEKLKGSPEDNEQKQLFVEQHKHYLDEIIEQISEFSKRVILADANLDKVLSAYNKHRDKPIREQAENIIHLFTLTNLGAPAAFKYFDTTIDRKRYTSTKEVLDATLIHQSITGLYETRIDLSQLGGDGGGSSEAAAKGGGGGIPWLMKKPLQLTTLVPLQEYEERLLKQTMLTGSYKEKLQSLFLKYDALWQHWENQVGHRRIKPHHIATGTVNPRPQKQYPINPKAKASIQTVINDLLKQGVLIQQNSIMNTPVYPVPKPDGKWRMVLDYREVNKTIPLIAAQNQHSAGILSSIFRGKYKTTLDLSNGFWAHSITPESYWLTAFTWLGQQYCWTRLPQGFLNSPALFNADVVDLLKEVPNVQVYVDDIYISHDDPREHLEQLEKVFSLLLNAGYVVSLKKSEIAQHEVEFLGFNITKEGRGLTETFKQKLLNITPPRDLKQLQSILGLLNFARNFIPNFSELVKPLYNIIATAPGKYITWTTDNSQQLQNIISMLNSAENLEERNPEVRLIMKVNTSPSAGYIRFYNEFAKRPIMYLNYVYTKAEVKFTNTEKLLTTIHKGLIKALDLGMGQEILVYSPIVSMTKIQKTPLPERKALPIRWITWMSYLEDPRIQFHYDKTLPELQQVPTVTDDIIAKIKHPSEFSMVFYTDGSAIKHPNVNKSHNAGMGIAQVQFKPEFTVINTWSIPLGDHTAQLAEVAAVEFACKKALKIDGPVLIVTDSFYVAESVNKELPYWQSNGFFNNKKKPLKHVSKWKSIADCIQLKPDIIIIHEKGHQPTASTFHTEGNNLADKLATQGSYVVNAGKRTADGSEFEKRTADGSEFESPKKKAKVE

SEQ ID NO: 7316 - protein, 2096 aa, synthetic construct
MPAAKRVKLDGGDKKYSIGLDIGTNSVGWAVITDEYKVPSKKFKVLGNTDRHSIKKNLIGALLFDSGETAEATRLKRTARRRYTRRKNRICYLQEIFSNEMAKVDDSFFHRLEESFLVEEDKKHERHPIFGNIVDEVAYHEKYPTIYHLRKKLVDSTDKADLRLIYLALAHMIKFRGHFLIEGDLNPDNSDVDKLFIQLVQTYNQLFEENPINASGVDAKAILSARLSKSRRLENLIAQLPGEKKNGLFGNLIALSLGLTPNFKSNFDLAEDAKLQLSKDTYDDDLDNLLAQIGDQYADLFLAAKNLSDAILLSDILRVNTEITKAPLSASMIKRYDEHHQDLTLLKALVRQQLPEKYKEIFFDQSKNGYAGYIDGGASQEEFYKFIKPILEKMDGTEELLVKLNREDLLRKQRTFDNGSIPHQIHLGELHAILRRQEDFYPFLKDNREKIEKILTFRIPYYVGPLARGNSRFAWMTRKSEETITPWNFEEVVDKGASAQSFIERMTNFDKNLPNEKVLPKHSLLYEYFTVYNELTKVKYVTEGMRKPAFLSGEQKKAIVDLLFKTNRKVTVKQLKEDYFKKIECFDSVEISGVEDRFNASLGTYHDLLKIIKDKDFLDNEENEDILEDIVLTLTLFEDREMIEERLKTYAHLFDDKVMKQLKRRRYTGWGRLSRKLINGIRDKQSGKTILDFLKSDGFANRNFMQLIHDDSLTFKEDIQKAQVSGQGDSLHEHIANLAGSPAIKKGILQTVKVVDELVKVMGRHKPENIVIEMARENQTTQKGQKNSRERMKRIEEGIKELGSQILKEHPVENTQLQNEKLYLYYLQNGRDMYVDQELDINRLSDYDVDHIVPQSFLKDDSIDNKVLTRSDKARGKSDNVPSEEVVKKMKNYWRQLLNAKLITQRKFDNLTKAERGGLSELDKAGFIKRQLVETRQITKHVAQILDSRMNTKYDENDKLIREVKVITLKSKLVSDFRKDFQFYKVREINNYHHAHDAYLNAVVGTALIKKYPKLESEFVYGDYKVYDVRKMIAKSEQEIGKATAKYFFYSNIMNFFKTEITLANGEIRKRPLIETNGETGEIVWDKGRDFATVRKVLSMPQVNIVKKTEVQTGGFSKESILPKRNSDKLIARKKDWDPKKYGGFDSPTVAYSVLVVAKVEKGKSKKLKSVKELLGITIMERSSFEKNPIDFLEAKGYKEVKKDLIIKLPKYSLFELENGRKRMLASAGELQKGNELALPSKYVNFLYLASHYEKLKGSPEDNEQKQLFVEQHKHYLDEIIEQISEFSKRVILADANLDKVLSAYNKHRDKPIREQAENIIHLFTLTNLGAPAAFKYFDTTIDRKRYTSTKEVLDATLIHQSITGLYETRIDLSQLGGDGGGSSEAAAKGGGGGTLNIEDEYRLHETSKEPDVPLGSTWLSDFPQAWAETGGMGLAVRQAPLIIPLKATSTPVSIKQYPMSQEARLGIKPHIQRLLDQGILVPCQSPWNTPLLPVKKPGTNDYRPVQDLREVNKRVEDIHPTVPNPYNLLSGLPPSHQWYTVLDLKDAFFCLRLHPTSQPLFAFEWRDPEMGISGQLTWTRLPQGFKNSPTLFNEALHRDLADFRIQHPDLILLQYVDDLLLAATSEQDCQRGTRALLQTLGNLGYRASAKKAQICQKQVKYLGYLLKEGQRWLTEARKETVMGQPTPKTPRQLREFLGTAGFCRLWIPGFAEMAAPLYPLTKPGTLFNWGPDQQKAYQEIKQALLTAPALGLPDLTKPFELFVDEKQGYAKGVLTQKLGPWRRPVAYLSKKLDPVAAGWPPCLRMVAAIAVLTKDAGKLTMGQPLVILAPHAVEALVKQPPDRWLSNARMTHYQAMLLDTDRVQFGPVVALNPATLLPLPEKEAPHDCLEILAETHGTRPDLTDQPIPDADYTWYTDGSSFLQEGQRRAGAAVTTETEVIWARALPAGTSAQRAELIALTQALKMAEGKKLNVYTDSRYAFATAHVHGEIYRRRGWLTSEGREIKNKNEILALLKALFLPKRLSIIHCPGHQKGNSAEARGNRMADQAAREAAMKAVLETSTLLAGKRTADGSEFEKRTADGSEFESPKKKAKVE

SEQ ID NO: 7317 - protein, 2096 aa, synthetic construct
MPAAKRVKLDGGDKKYSIGLDIGTNSVGWAVITDEYKVPSKKFKVLGNTDRHSIKKNLIGALLFDSGETAEATRLKRTARRRYTRRKNRICYLQEIFSNEMAKVDDSFFHRLEESFLVEEDKKHERHPIFGNIVDEVAYHEKYPTIYHLRKKLVDSTDKADLRLIYLALAHMIKFRGHFLIEGDLNPDNSDVDKLFIQLVQTYNQLFEENPINASGVDAKAILSARLSKSRRLENLIAQLPGEKKNGLFGNLIALSLGLTPNFKSNFDLAEDAKLQLSKDTYDDDLDNLLAQIGDQYADLFLAAKNLSDAILLSDILRVNTEITKAPLSASMIKRYDEHHQDLTLLKALVRQQLPEKYKEIFFDQSKNGYAGYIDGGASQEEFYKFIKPILEKMDGTEELLVKLNREDLLRKQRTFDNGSIPHQIHLGELHAILRRQEDFYPFLKDNREKIEKILTFRIPYYVGPLARGNSRFAWMTRKSEETITPWNFEEVVDKGASAQSFIERMTNFDKNLPNEKVLPKHSLLYEYFTVYNELTKVKYVTEGMRKPAFLSGEQKKAIVDLLFKTNRKVTVKQLKEDYFKKIECFDSVEISGVEDRFNASLGTYHDLLKIIKDKDFLDNEENEDILEDIVLTLTLFEDREMIEERLKTYAHLFDDKVMKQLKRRRYTGWGRLSRKLINGIRDKQSGKTILDFLKSDGFANRNFMQLIHDDSLTFKEDIQKAQVSGQGDSLHEHIANLAGSPAIKKGILQTVKVVDELVKVMGRHKPENIVIEMARENQTTQKGQKNSRERMKRIEEGIKELGSQILKEHPVENTQLQNEKLYLYYLQNGRDMYVDQELDINRLSDYDVDHIVPQSFLKDDSIDNKVLTRSDKARGKSDNVPSEEVVKKMKNYWRQLLNAKLITQRKFDNLTKAERGGLSELDKAGFIKRQLVETRQITKHVAQILDSRMNTKYDENDKLIREVKVITLKSKLVSDFRKDFQFYKVREINNYHHAHDAYLNAVVGTALIKKYPKLESEFVYGDYKVYDVRKMIAKSEQEIGKATAKYFFYSNIMNFFKTEITLANGEIRKRPLIETNGETGEIVWDKGRDFATVRKVLSMPQVNIVKKTEVQTGGFSKESILPKRNSDKLIARKKDWDPKKYGGFDSPTVAYSVLVVAKVEKGKSKKLKSVKELLGITIMERSSFEKNPIDFLEAKGYKEVKKDLIIKLPKYSLFELENGRKRMLASAGELQKGNELALPSKYVNFLYLASHYEKLKGSPEDNEQKQLFVEQHKHYLDEIIEQISEFSKRVILADANLDKVLSAYNKHRDKPIREQAENIIHLFTLTNLGAPAAFKYFDTTIDRKRYTSTKEVLDATLIHQSITGLYETRIDLSQLGGDGGGSSEAAAKGGGGGTLNIEDEYRLHETSKEPDVPLGSTWLSDFPQAWAETGGMGLAVRQAPLIIPLKATSTPVSIKQYPMSQEARLGIKPHIQRLLDQGILVPCQSPWNTPLLPVKKPGTNDYRPVQDLREVNKRVEDIHPTVPNPYNLLSGLPPSHQWYTVLDLKDAFFCLRLHPTSQPLFAFEWRDPEMGISGQLTWTRLPQGFKNSPTLFNEALHRDLADFRIQHPDLILLQYVDDLLLAATSEQDCQRGTRALLQTLGNLGYRASAKKAQICQKQVKYLGYLLKEGQRWLTEARKETVMGQPTPKTPRQLREFLGKAGFCRLFIPGFAEMAAPLYPLTKPGTLFNWGPDQQKAYQEIKQALLTAPALGLPDLTKPFELFVDEKQGYAKGVLTQKLGPWRRPVAYLSKKLDPVAAGWPPCLRMVAAIAVLTKDAGKLTMGQPLVILAPHAVEALVKQPPDRWLSNARMTHYQAMLLDTDRVQFGPVVALNPATLLPLPEKEAPHDCLEILAETHGTRPDLTDQPIPDADYTWYTDGSSFLQEGQRRAGAAVTTETEVIWARALPAGTSAQRAELIALTQALKMAEGKKLNVYTDSRYAFATAHVHGEIYRRRGWLTSEGREIKNKNEILALLKALFLPKRLSIIHCPGHQKGNSAEARGNRMADQAAREAAMKAVLETSTLLAGKRTADGSEFEKRTADGSEFESPKKKAKVE

SEQ ID NO: 7318 - protein, 2098 aa, synthetic construct
MPAAKRVKLDGGDKKYSIGLDIGTNSVGWAVITDEYKVPSKKFKVLGNTDRHSIKKNLIGALLFDSGETAEATRLKRTARRRYTRRKNRICYLQEIFSNEMAKVDDSFFHRLEESFLVEEDKKHERHPIFGNIVDEVAYHEKYPTIYHLRKKLVDSTDKADLRLIYLALAHMIKFRGHFLIEGDLNPDNSDVDKLFIQLVQTYNQLFEENPINASGVDAKAILSARLSKSRRLENLIAQLPGEKKNGLFGNLIALSLGLTPNFKSNFDLAEDAKLQLSKDTYDDDLDNLLAQIGDQYADLFLAAKNLSDAILLSDILRVNTEITKAPLSASMIKRYDEHHQDLTLLKALVRQQLPEKYKEIFFDQSKNGYAGYIDGGASQEEFYKFIKPILEKMDGTEELLVKLNREDLLRKQRTFDNGSIPHQIHLGELHAILRRQEDFYPFLKDNREKIEKILTFRIPYYVGPLARGNSRFAWMTRKSEETITPWNFEEVVDKGASAQSFIERMTNFDKNLPNEKVLPKHSLLYEYFTVYNELTKVKYVTEGMRKPAFLSGEQKKAIVDLLFKTNRKVTVKQLKEDYFKKIECFDSVEISGVEDRFNASLGTYHDLLKIIKDKDFLDNEENEDILEDIVLTLTLFEDREMIEERLKTYAHLFDDKVMKQLKRRRYTGWGRLSRKLINGIRDKQSGKTILDFLKSDGFANRNFMQLIHDDSLTFKEDIQKAQVSGQGDSLHEHIANLAGSPAIKKGILQTVKVVDELVKVMGRHKPENIVIEMARENQTTQKGQKNSRERMKRIEEGIKELGSQILKEHPVENTQLQNEKLYLYYLQNGRDMYVDQELDINRLSDYDVDHIVPQSFLKDDSIDNKVLTRSDKARGKSDNVPSEEVVKKMKNYWRQLLNAKLITQRKFDNLTKAERGGLSELDKAGFIKRQLVETRQITKHVAQILDSRMNTKYDENDKLIREVKVITLKSKLVSDFRKDFQFYKVREINNYHHAHDAYLNAVVGTALIKKYPKLESEFVYGDYKVYDVRKMIAKSEQEIGKATAKYFFYSNIMNFFKTEITLANGEIRKRPLIETNGETGEIVWDKGRDFATVRKVLSMPQVNIVKKTEVQTGGFSKESILPKRNSDKLIARKKDWDPKKYGGFDSPTVAYSVLVVAKVEKGKSKKLKSVKELLGITIMERSSFEKNPIDFLEAKGYKEVKKDLIIKLPKYSLFELENGRKRMLASAGELQKGNELALPSKYVNFLYLASHYEKLKGSPEDNEQKQLFVEQHKHYLDEIIEQISEFSKRVILADANLDKVLSAYNKHRDKPIREQAENIIHLFTLTNLGAPAAFKYFDTTIDRKRYTSTKEVLDATLIHQSITGLYETRIDLSQLGGDGGEAAAKGGGGSSGGTAPLEEEYRLFLEAPIQNVTLLEQWKREIPKVWAEINPPGLASTQAPIHVQLLSTALPVRVRQYPITLEAKRSLRETIRKFRAAGILRPVHSPWNTPLLPVRKSGTSEYRMVQDLREVNKRVETIHPTVPNPYTLLSLLPPDRIWYSVLDLKDAFFCIPLAPESQLIFAFEWADAEEGESGQLTWTRLPQGFKNSPTLFDEALNRDLQGFRLDHPSVSLLQYVDDLLIAADTQAACLSATRDLLMTLAELGYRVSGKKAQLCQEEVTYLGFKIHKGSRSLSNSRTQAILQIPVPKTKRQVREFLGTIGYCRLWIPGFAELAQPLYAATRGGNDPLVWGEKEEEAFQSLKLALTQPPALALPSLDKPFQLFVEETSGAAKGVLTQALGPWKRPVAYLSKRLDPVAAGWPRCLRAIAAAALLTREASKLTFGQDIEITSSHNLESLLRSPPDKWLTNARITQYQVLLLDPPRVRFKQTAALNPATLLPETDDTLPIHHCLDTLDSLTSTRPDLTDQPLAQAEATLFTDGSSYIRDGKRYAGAAVVTLDSVIWAEPLPIGTSAQKAELIALTKALEWSKDKSVNIYTDSRYAFATLHVHGMIYRERGLLTAGGKAIKNAPEILALLTAVWLPKRVAVMHCKGHQKDDAPTSTGNRRADEVAREVAIRPLSTQATISAGKRTADGSEFEKRTADGSEFESPKKKAKVE

SEQ ID NO: 7319 - protein, 2098 aa, synthetic construct
MPAAKRVKLDGGDKKYSIGLDIGTNSVGWAVITDEYKVPSKKFKVLGNTDRHSIKKNLIGALLFDSGETAEATRLKRTARRRYTRRKNRICYLQEIFSNEMAKVDDSFFHRLEESFLVEEDKKHERHPIFGNIVDEVAYHEKYPTIYHLRKKLVDSTDKADLRLIYLALAHMIKFRGHFLIEGDLNPDNSDVDKLFIQLVQTYNQLFEENPINASGVDAKAILSARLSKSRRLENLIAQLPGEKKNGLFGNLIALSLGLTPNFKSNFDLAEDAKLQLSKDTYDDDLDNLLAQIGDQYADLFLAAKNLSDAILLSDILRVNTEITKAPLSASMIKRYDEHHQDLTLLKALVRQQLPEKYKEIFFDQSKNGYAGYIDGGASQEEFYKFIKPILEKMDGTEELLVKLNREDLLRKQRTFDNGSIPHQIHLGELHAILRRQEDFYPFLKDNREKIEKILTFRIPYYVGPLARGNSRFAWMTRKSEETITPWNFEEVVDKGASAQSFIERMTNFDKNLPNEKVLPKHSLLYEYFTVYNELTKVKYVTEGMRKPAFLSGEQKKAIVDLLFKTNRKVTVKQLKEDYFKKIECFDSVEISGVEDRFNASLGTYHDLLKIIKDKDFLDNEENEDILEDIVLTLTLFEDREMIEERLKTYAHLFDDKVMKQLKRRRYTGWGRLSRKLINGIRDKQSGKTILDFLKSDGFANRNFMQLIHDDSLTFKEDIQKAQVSGQGDSLHEHIANLAGSPAIKKGILQTVKVVDELVKVMGRHKPENIVIEMARENQTTQKGQKNSRERMKRIEEGIKELGSQILKEHPVENTQLQNEKLYLYYLQNGRDMYVDQELDINRLSDYDVDHIVPQSFLKDDSIDNKVLTRSDKARGKSDNVPSEEVVKKMKNYWRQLLNAKLITQRKFDNLTKAERGGLSELDKAGFIKRQLVETRQITKHVAQILDSRMNTKYDENDKLIREVKVITLKSKLVSDFRKDFQFYKVREINNYHHAHDAYLNAVVGTALIKKYPKLESEFVYGDYKVYDVRKMIAKSEQEIGKATAKYFFYSNIMNFFKTEITLANGEIRKRPLIETNGETGEIVWDKGRDFATVRKVLSMPQVNIVKKTEVQTGGFSKESILPKRNSDKLIARKKDWDPKKYGGFDSPTVAYSVLVVAKVEKGKSKKLKSVKELLGITIMERSSFEKNPIDFLEAKGYKEVKKDLIIKLPKYSLFELENGRKRMLASAGELQKGNELALPSKYVNFLYLASHYEKLKGSPEDNEQKQLFVEQHKHYLDEIIEQISEFSKRVILADANLDKVLSAYNKHRDKPIREQAENIIHLFTLTNLGAPAAFKYFDTTIDRKRYTSTKEVLDATLIHQSITGLYETRIDLSQLGGDGGEAAAKGGGGSSGGTAPLEEEYRLFLEAPIQNVTLLEQWKREIPKVWAEINPPGLASTQAPIHVQLLSTALPVRVRQYPITLEAKRSLRETIRKFRAAGILRPVHSPWNTPLLPVRKSGTSEYRMVQDLREVNKRVETIHPTVPNPYTLLSLLPPDRIWYSVLDLKDAFFCIPLAPESQLIFAFEWADAEEGESGQLTWTRLPQGFKNSPTLFNEALNRDLQGFRLDHPSVSLLQYVDDLLIAADTQAACLSATRDLLMTLAELGYRVSGKKAQLCQEEVTYLGFKIHKGSRSLSNSRTQAILQIPVPKTKRQVREFLGTIGYCRLWIPGFAELAQPLYAATRPGNDPLVWGEKEEEAFQSLKLALTQPPALALPSLDKPFQLFVEETSGAAKGVLTQALGPWKRPVAYLSKRLDPVAAGWPRCLRAIAAAALLTREASKLTFGQDIEITSSHNLESLLRSPPDKWLTNARITQYQVLLLDPPRVRFKQTAALNPATLLPETDDTLPIHHCLDTLDSLTSTRPDLTDQPLAQAEATLFTDGSSYIRDGKRYAGAAVVTLDSVIWAEPLPIGTSAQKAELIALTKALEWSKDKSVNIYTDSRYAFATLHVHGMIYRERGWLTAGGKAIKNAPEILALLTAVWLPKRVAVMHCKGHQKDDAPTSTGNRRADEVAREVAIRPLSTQATISAGKRTADGSEFEKRTADGSEFESPKKKAKVE

SEQ ID NO: 7320 - protein, 2098 aa, synthetic construct
MPAAKRVKLDGGDKKYSIGLDIGTNSVGWAVITDEYKVPSKKFKVLGNTDRHSIKKNLIGALLFDSGETAEATRLKRTARRRYTRRKNRICYLQEIFSNEMAKVDDSFFHRLEESFLVEEDKKHERHPIFGNIVDEVAYHEKYPTIYHLRKKLVDSTDKADLRLIYLALAHMIKFRGHFLIEGDLNPDNSDVDKLFIQLVQTYNQLFEENPINASGVDAKAILSARLSKSRRLENLIAQLPGEKKNGLFGNLIALSLGLTPNFKSNFDLAEDAKLQLSKDTYDDDLDNLLAQIGDQYADLFLAAKNLSDAILLSDILRVNTEITKAPLSASMIKRYDEHHQDLTLLKALVRQQLPEKYKEIFFDQSKNGYAGYIDGGASQEEFYKFIKPILEKMDGTEELLVKLNREDLLRKQRTFDNGSIPHQIHLGELHAILRRQEDFYPFLKDNREKIEKILTFRIPYYVGPLARGNSRFAWMTRKSEETITPWNFEEVVDKGASAQSFIERMTNFDKNLPNEKVLPKHSLLYEYFTVYNELTKVKYVTEGMRKPAFLSGEQKKAIVDLLFKTNRKVTVKQLKEDYFKKIECFDSVEISGVEDRFNASLGTYHDLLKIIKDKDFLDNEENEDILEDIVLTLTLFEDREMIEERLKTYAHLFDDKVMKQLKRRRYTGWGRLSRKLINGIRDKQSGKTILDFLKSDGFANRNFMQLIHDDSLTFKEDIQKAQVSGQGDSLHEHIANLAGSPAIKKGILQTVKVVDELVKVMGRHKPENIVIEMARENQTTQKGQKNSRERMKRIEEGIKELGSQILKEHPVENTQLQNEKLYLYYLQNGRDMYVDQELDINRLSDYDVDHIVPQSFLKDDSIDNKVLTRSDKARGKSDNVPSEEVVKKMKNYWRQLLNAKLITQRKFDNLTKAERGGLSELDKAGFIKRQLVETRQITKHVAQILDSRMNTKYDENDKLIREVKVITLKSKLVSDFRKDFQFYKVREINNYHHAHDAYLNAVVGTALIKKYPKLESEFVYGDYKVYDVRKMIAKSEQEIGKATAKYFFYSNIMNFFKTEITLANGEIRKRPLIETNGETGEIVWDKGRDFATVRKVLSMPQVNIVKKTEVQTGGFSKESILPKRNSDKLIARKKDWDPKKYGGFDSPTVAYSVLVVAKVEKGKSKKLKSVKELLGITIMERSSFEKNPIDFLEAKGYKEVKKDLIIKLPKYSLFELENGRKRMLASAGELQKGNELALPSKYVNFLYLASHYEKLKGSPEDNEQKQLFVEQHKHYLDEIIEQISEFSKRVILADANLDKVLSAYNKHRDKPIREQAENIIHLFTLTNLGAPAAFKYFDTTIDRKRYTSTKEVLDATLIHQSITGLYETRIDLSQLGGDGGEAAAKGGGGSSGGTAPLEEEYRLFLEAPIQNVTLLEQWKREIPKVWAEINPPGLASTQAPIHVQLLSTALPVRVRQYPITLEAKRSLRETIRKFRAAGILRPVHSPWNTPLLPVRKSGTSEYRMVQDLREVNKRVETIHPTVPNPYTLLSLLPPDRIWYSVLDLKDAFFCIPLAPESQLIFAFEWADAEEGESGQLTWTRLPQGFKNSPTLFNEALNRDLQGFRLDHPSVSLLQYVDDLLIAADTQAACLSATRDLLMTLAELGYRVSGKKAQLCQEEVTYLGFKIHKGSRSLSNSRTQAILQIPVPKTKRQVREFLGKIGYCRLFIPGFAELAQPLYAATRPGNDPLVWGEKEEEAFQSLKLALTQPPALALPSLDKPFQLFVEETSGAAKGVLTQALGPWKRPVAYLSKRLDPVAAGWPRCLRAIAAAALLTREASKLTFGQDIEITSSHNLESLLRSPPDKWLTNARITQYQVLLLDPPRVRFKQTAALNPATLLPETDDTLPIHHCLDTLDSLTSTRPDLTDQPLAQAEATLFTDGSSYIRDGKRYAGAAVVTLDSVIWAEPLPIGTSAQKAELIALTKALEWSKDKSVNIYTDSRYAFATLHVHGMIYRERGWLTAGGKAIKNAPEILALLTAVWLPKRVAVMHCKGHQKDDAPTSTGNRRADEVAREVAIRPLSTQATISAGKRTADGSEFEKRTADGSEFESPKKKAKVE

SEQ ID NO: 7321 - protein, 2102 aa, synthetic construct
MPAAKRVKLDGGDKKYSIGLDIGTNSVGWAVITDEYKVPSKKFKVLGNTDRHSIKKNLIGALLFDSGETAEATRLKRTARRRYTRRKNRICYLQEIFSNEMAKVDDSFFHRLEESFLVEEDKKHERHPIFGNIVDEVAYHEKYPTIYHLRKKLVDSTDKADLRLIYLALAHMIKFRGHFLIEGDLNPDNSDVDKLFIQLVQTYNQLFEENPINASGVDAKAILSARLSKSRRLENLIAQLPGEKKNGLFGNLIALSLGLTPNFKSNFDLAEDAKLQLSKDTYDDDLDNLLAQIGDQYADLFLAAKNLSDAILLSDILRVNTEITKAPLSASMIKRYDEHHQDLTLLKALVRQQLPEKYKEIFFDQSKNGYAGYIDGGASQEEFYKFIKPILEKMDGTEELLVKLNREDLLRKQRTFDNGSIPHQIHLGELHAILRRQEDFYPFLKDNREKIEKILTFRIPYYVGPLARGNSRFAWMTRKSEETITPWNFEEVVDKGASAQSFIERMTNFDKNLPNEKVLPKHSLLYEYFTVYNELTKVKYVTEGMRKPAFLSGEQKKAIVDLLFKTNRKVTVKQLKEDYFKKIECFDSVEISGVEDRFNASLGTYHDLLKIIKDKDFLDNEENEDILEDIVLTLTLFEDREMIEERLKTYAHLFDDKVMKQLKRRRYTGWGRLSRKLINGIRDKQSGKTILDFLKSDGFANRNFMQLIHDDSLTFKEDIQKAQVSGQGDSLHEHIANLAGSPAIKKGILQTVKVVDELVKVMGRHKPENIVIEMARENQTTQKGQKNSRERMKRIEEGIKELGSQILKEHPVENTQLQNEKLYLYYLQNGRDMYVDQELDINRLSDYDVDHIVPQSFLKDDSIDNKVLTRSDKARGKSDNVPSEEVVKKMKNYWRQLLNAKLITQRKFDNLTKAERGGLSELDKAGFIKRQLVETRQITKHVAQILDSRMNTKYDENDKLIREVKVITLKSKLVSDFRKDFQFYKVREINNYHHAHDAYLNAVVGTALIKKYPKLESEFVYGDYKVYDVRKMIAKSEQEIGKATAKYFFYSNIMNFFKTEITLANGEIRKRPLIETNGETGEIVWDKGRDFATVRKVLSMPQVNIVKKTEVQTGGFSKESILPKRNSDKLIARKKDWDPKKYGGFDSPTVAYSVLVVAKVEKGKSKKLKSVKELLGITIMERSSFEKNPIDFLEAKGYKEVKKDLIIKLPKYSLFELENGRKRMLASAGELQKGNELALPSKYVNFLYLASHYEKLKGSPEDNEQKQLFVEQHKHYLDEIIEQISEFSKRVILADANLDKVLSAYNKHRDKPIREQAENIIHLFTLTNLGAPAAFKYFDTTIDRKRYTSTKEVLDATLIHQSITGLYETRIDLSQLGGDGGEAAAKGGGGSSGGTVSLQDEHRLFDIPVTTSLPDVWLQDFPQAWAETGGLGRAKCQAPIIIDLKPTAVPVSIKQYPMSLEAHMGIRQHIIKFLELGVLRPCRSPWNTPLLPVKKPGTQDYRPVQDLREINKRTVDIHPTVPNPYNLLSTLKPDYSWYTVLDLKDAFFCLPLAPQSQELFAFEWKDPERGISGQLTWTRLPQGFKNSPTLFDEALHRDLTDFRTQHPEVTLLQYVDDLLLAAPTKKACTQGTRHLLQELGEKGYRASAKKAQICQTKVTYLGYILSEGKRWLTPGRIETVARIPPPRNPREVREFLGTAGFCRLWIPGFAELAAPLYALTKESTPFTWQTEHQLAFEALKKALLSAPALGLPDTSKPFTLFLDERQGIAKGVLTQKLGPWKRPVAYLSKKLDPVAAGWPPCLRIMAATAMLVKDSAKLTLGQPLTVITPHTLEAIVRQPPDRWITNARLTHYQALLLDTDRVQFGPPVTLNPATLLPVPENQPSPHDCRQVLAETHGTREDLKDQELPDADHTWYTDGSSYLDSGTRRAGAAVVDGHNTIWAQSLPPGTSAQKAELIALTKALELSKGKKANIYTDSRYAFATAHTHGSIYERRGLLTSEGKEIKNKAEIIALLKALFLPQEVAIIHCPGHQKGQDPVAVGNRQADRVARQAAMAEVLTLATEPDNTSHITAGKRTADGSEFEKRTADGSEFESPKKKAKVE

SEQ ID NO: 7322 - protein, 2087 aa, synthetic construct
MPAAKRVKLDGGDKKYSIGLDIGTNSVGWAVITDEYKVPSKKFKVLGNTDRHSIKKNLIGALLFDSGETAEATRLKRTARRRYTRRKNRICYLQEIFSNEMAKVDDSFFHRLEESFLVEEDKKHERHPIFGNIVDEVAYHEKYPTIYHLRKKLVDSTDKADLRLIYLALAHMIKFRGHFLIEGDLNPDNSDVDKLFIQLVQTYNQLFEENPINASGVDAKAILSARLSKSRRLENLIAQLPGEKKNGLFGNLIALSLGLTPNFKSNFDLAEDAKLQLSKDTYDDDLDNLLAQIGDQYADLFLAAKNLSDAILLSDILRVNTEITKAPLSASMIKRYDEHHQDLTLLKALVRQQLPEKYKEIFFDQSKNGYAGYIDGGASQEEFYKFIKPILEKMDGTEELLVKLNREDLLRKQRTFDNGSIPHQIHLGELHAILRRQEDFYPFLKDNREKIEKILTFRIPYYVGPLARGNSRFAWMTRKSEETITPWNFEEVVDKGASAQSFIERMTNFDKNLPNEKVLPKHSLLYEYFTVYNELTKVKYVTEGMRKPAFLSGEQKKAIVDLLFKTNRKVTVKQLKEDYFKKIECFDSVEISGVEDRFNASLGTYHDLLKIIKDKDFLDNEENEDILEDIVLTLTLFEDREMIEERLKTYAHLFDDKVMKQLKRRRYTGWGRLSRKLINGIRDKQSGKTILDFLKSDGFANRNFMQLIHDDSLTFKEDIQKAQVSGQGDSLHEHIANLAGSPAIKKGILQTVKVVDELVKVMGRHKPENIVIEMARENQTTQKGQKNSRERMKRIEEGIKELGSQILKEHPVENTQLQNEKLYLYYLQNGRDMYVDQELDINRLSDYDVDHIVPQSFLKDDSIDNKVLTRSDKARGKSDNVPSEEVVKKMKNYWRQLLNAKLITQRKFDNLTKAERGGLSELDKAGFIKRQLVETRQITKHVAQILDSRMNTKYDENDKLIREVKVITLKSKLVSDFRKDFQFYKVREINNYHHAHDAYLNAVVGTALIKKYPKLESEFVYGDYKVYDVRKMIAKSEQEIGKATAKYFFYSNIMNFFKTEITLANGEIRKRPLIETNGETGEIVWDKGRDFATVRKVLSMPQVNIVKKTEVQTGGFSKESILPKRNSDKLIARKKDWDPKKYGGFDSPTVAYSVLVVAKVEKGKSKKLKSVKELLGITIMERSSFEKNPIDFLEAKGYKEVKKDLIIKLPKYSLFELENGRKRMLASAGELQKGNELALPSKYVNFLYLASHYEKLKGSPEDNEQKQLFVEQHKHYLDEIIEQISEFSKRVILADANLDKVLSAYNKHRDKPIREQAENIIHLFTLTNLGAPAAFKYFDTTIDRKRYTSTKEVLDATLIHQSITGLYETRIDLSQLGGDGGEAAAKGGGGSSGGVPWILKKPLELTIKLDLEEQQGTLLNNSILSKKGKEELKQLFEKYSALWQSWENQVGHRRIRPHKIATGTVKPTPQKQYHINPKAKPDIQIVINDLLKQGVLIQKESTMNTPVYPVPKPNGRWRMVLDYRAVNKVTPLIAVQNQHSYGILGSLFKGRYKTTIDLSNGFWAHPIVPEDYWITAFTWQGKQYCWTVLPQGFLNSPGLFTGDVVDLLQGIPNVEVYVDDVYISHDSEKEHLEYLDILFNRLKEAGYIISLKKSNIANSIVDFLGFQITNEGRGLTDTFKEKLENITAPTTLKQLQSILGLLNFARNFIPDFTELIAPLYALIPKSTKNYVPWQIEHSTTLETLITKLNGAEYLQGRKGDKTLIMKVNASYTTGYIRYYNEGEKKPISYVSIVFSKTELKFTELEKLLTTVHKGLLKALDLSMGQNIHVYSPIVSMQNIQKTPQTAKKALASRWLSWLSYLEDPRIRFFYDPQMPALKDLPAVDTGKDNKKHPSNFQHIFYTDGSAITSPTKEGHLNAGMGIVYFINKDGNLQKQQEWSISLGNHTAQFAEIAAFEFALKKCLPLGGNILVVTDSNYVAKAYNEELDVWASNGFVNNRKKPLKHISKWKSVADLKRLRPDVVVTHEPGHQKLDSSPHAYGNNLADQLATQASFKVHAGKRTADGSEFEKRTADGSEFESPKKKAKVE

SEQ ID NO: 7323 - protein, 2095 aa, synthetic construct
MPAAKRVKLDGGDKKYSIGLDIGTNSVGWAVITDEYKVPSKKFKVLGNTDRHSIKKNLIGALLFDSGETAEATRLKRTARRRYTRRKNRICYLQEIFSNEMAKVDDSFFHRLEESFLVEEDKKHERHPIFGNIVDEVAYHEKYPTIYHLRKKLVDSTDKADLRLIYLALAHMIKFRGHFLIEGDLNPDNSDVDKLFIQLVQTYNQLFEENPINASGVDAKAILSARLSKSRRLENLIAQLPGEKKNGLFGNLIALSLGLTPNFKSNFDLAEDAKLQLSKDTYDDDLDNLLAQIGDQYADLFLAAKNLSDAILLSDILRVNTEITKAPLSASMIKRYDEHHQDLTLLKALVRQQLPEKYKEIFFDQSKNGYAGYIDGGASQEEFYKFIKPILEKMDGTEELLVKLNREDLLRKQRTFDNGSIPHQIHLGELHAILRRQEDFYPFLKDNREKIEKILTFRIPYYVGPLARGNSRFAWMTRKSEETITPWNFEEVVDKGASAQSFIERMTNFDKNLPNEKVLPKHSLLYEYFTVYNELTKVKYVTEGMRKPAFLSGEQKKAIVDLLFKTNRKVTVKQLKEDYFKKIECFDSVEISGVEDRFNASLGTYHDLLKIIKDKDFLDNEENEDILEDIVLTLTLFEDREMIEERLKTYAHLFDDKVMKQLKRRRYTGWGRLSRKLINGIRDKQSGKTILDFLKSDGFANRNFMQLIHDDSLTFKEDIQKAQVSGQGDSLHEHIANLAGSPAIKKGILQTVKVVDELVKVMGRHKPENIVIEMARENQTTQKGQKNSRERMKRIEEGIKELGSQILKEHPVENTQLQNEKLYLYYLQNGRDMYVDQELDINRLSDYDVDHIVPQSFLKDDSIDNKVLTRSDKARGKSDNVPSEEVVKKMKNYWRQLLNAKLITQRKFDNLTKAERGGLSELDKAGFIKRQLVETRQITKHVAQILDSRMNTKYDENDKLIREVKVITLKSKLVSDFRKDFQFYKVREINNYHHAHDAYLNAVVGTALIKKYPKLESEFVYGDYKVYDVRKMIAKSEQEIGKATAKYFFYSNIMNFFKTEITLANGEIRKRPLIETNGETGEIVWDKGRDFATVRKVLSMPQVNIVKKTEVQTGGFSKESILPKRNSDKLIARKKDWDPKKYGGFDSPTVAYSVLVVAKVEKGKSKKLKSVKELLGITIMERSSFEKNPIDFLEAKGYKEVKKDLIIKLPKYSLFELENGRKRMLASAGELQKGNELALPSKYVNFLYLASHYEKLKGSPEDNEQKQLFVEQHKHYLDEIIEQISEFSKRVILADANLDKVLSAYNKHRDKPIREQAENIIHLFTLTNLGAPAAFKYFDTTIDRKRYTSTKEVLDATLIHQSITGLYETRIDLSQLGGDGGEAAAKGGGGSSGGTLQLEEEYRLFEPESTQKQEMDIWLKNFPQAWAETGGMGTAHCQAPVLIQLKATATPISIRQYPMPHEAYQGIKPHIRRMLDQGILKPCQSPWNTPLLPVKKPGTEDYRPVQDLREVNKRVEDIHPTVPNPYNLLSTLPPSHPWYTVLDLKDAFFCLRLHSESQLLFAFEWRDPEIGLSGQLTWTRLPQGFKNSPTLFNEALHSDLADFRVRYPALVLLQYVDDLLLAAATRTECLEGTKALLETLGNKGYRASAKKAQICLQEVTYLGYSLKDGQRWLTKARKEAILSIPVPKNSRQVREFLGTAGYCRLWIPGFAELAAPLYPLTRPGTLFQWGTEQQLAFEDIKKALLSSPALGLPDITKPFELFIDENSGFAKGVLVQKLGPWKRPVAYLSKKLDTVASGWPPCLRMVAAIAILVKDAGKLTLGQPLTILTSHPVEALVRQPPNKWLSNARMTHYQAMLLDAERVHFGPTVSLNPATLLPLPSGGNHHDCLQILAETHGTRPDLTDQPLPDADLTWYTDGSSFIRNGEREAGAAVTTESEVIWAAPLPPGTSAQRAELIALTQALKMAEGKKLTVYTDSRYAFATTHVHGEIYRRRGWLTSEGKEIKNKNEILALLEALFLPKRLSIIHCPGHQKGDSPQAKGNRLADDTAKKAATETHSSLTVLPAGKRTADGSEFEKRTADGSEFESPKKKAKVE

SEQ ID NO: 7324 - protein, 2095 aa, synthetic construct
MPAAKRVKLDGGDKKYSIGLDIGTNSVGWAVITDEYKVPSKKFKVLGNTDRHSIKKNLIGALLFDSGETAEATRLKRTARRRYTRRKNRICYLQEIFSNEMAKVDDSFFHRLEESFLVEEDKKHERHPIFGNIVDEVAYHEKYPTIYHLRKKLVDSTDKADLRLIYLALAHMIKFRGHFLIEGDLNPDNSDVDKLFIQLVQTYNQLFEENPINASGVDAKAILSARLSKSRRLENLIAQLPGEKKNGLFGNLIALSLGLTPNFKSNFDLAEDAKLQLSKDTYDDDLDNLLAQIGDQYADLFLAAKNLSDAILLSDILRVNTEITKAPLSASMIKRYDEHHQDLTLLKALVRQQLPEKYKEIFFDQSKNGYAGYIDGGASQEEFYKFIKPILEKMDGTEELLVKLNREDLLRKQRTFDNGSIPHQIHLGELHAILRRQEDFYPFLKDNREKIEKILTFRIPYYVGPLARGNSRFAWMTRKSEETITPWNFEEVVDKGASAQSFIERMTNFDKNLPNEKVLPKHSLLYEYFTVYNELTKVKYVTEGMRKPAFLSGEQKKAIVDLLFKTNRKVTVKQLKEDYFKKIECFDSVEISGVEDRFNASLGTYHDLLKIIKDKDFLDNEENEDILEDIVLTLTLFEDREMIEERLKTYAHLFDDKVMKQLKRRRYTGWGRLSRKLINGIRDKQSGKTILDFLKSDGFANRNFMQLIHDDSLTFKEDIQKAQVSGQGDSLHEHIANLAGSPAIKKGILQTVKVVDELVKVMGRHKPENIVIEMARENQTTQKGQKNSRERMKRIEEGIKELGSQILKEHPVENTQLQNEKLYLYYLQNGRDMYVDQELDINRLSDYDVDHIVPQSFLKDDSIDNKVLTRSDKARGKSDNVPSEEVVKKMKNYWRQLLNAKLITQRKFDNLTKAERGGLSELDKAGFIKRQLVETRQITKHVAQILDSRMNTKYDENDKLIREVKVITLKSKLVSDFRKDFQFYKVREINNYHHAHDAYLNAVVGTALIKKYPKLESEFVYGDYKVYDVRKMIAKSEQEIGKATAKYFFYSNIMNFFKTEITLANGEIRKRPLIETNGETGEIVWDKGRDFATVRKVLSMPQVNIVKKTEVQTGGFSKESILPKRNSDKLIARKKDWDPKKYGGFDSPTVAYSVLVVAKVEKGKSKKLKSVKELLGITIMERSSFEKNPIDFLEAKGYKEVKKDLIIKLPKYSLFELENGRKRMLASAGELQKGNELALPSKYVNFLYLASHYEKLKGSPEDNEQKQLFVEQHKHYLDEIIEQISEFSKRVILADANLDKVLSAYNKHRDKPIREQAENIIHLFTLTNLGAPAAFKYFDTTIDRKRYTSTKEVLDATLIHQSITGLYETRIDLSQLGGDGGEAAAKGGGGSSGGTLQLEEEYRLFEPESTQKQEMDIWLKNFPQAWAETGGMGTAHCQAPVLIQLKATATPISIRQYPMPHEAYQGIKPHIRRMLDQGILKPCQSPWNTPLLPVKKPGTEDYRPVQDLREVNKRVEDIHPTVPNPYNLLSTLPPSHPWYTVLDLKDAFFCLRLHSESQLLFAFEWRDPEIGLSGQLTWTRLPQGFKNSPTLFNEALHSDLADFRVRYPALVLLQYVDDLLLAAATRTECLEGTKALLETLGNKGYRASAKKAQICLQEVTYLGYSLKDGQRWLTKARKEAILSIPVPKNSRQVREFLGKAGYCRLFIPGFAELAAPLYPLTRPGTLFQWGTEQQLAFEDIKKALLSSPALGLPDITKPFELFIDENSGFAKGVLVQKLGPWKRPVAYLSKKLDTVASGWPPCLRMVAAIAILVKDAGKLTLGQPLTILTSHPVEALVRQPPNKWLSNARMTHYQAMLLDAERVHFGPTVSLNPATLLPLPSGGNHHDCLQILAETHGTRPDLTDQPLPDADLTWYTDGSSFIRNGEREAGAAVTTESEVIWAAPLPPGTSAQRAELIALTQALKMAEGKKLTVYTDSRYAFATTHVHGEIYRRRGWLTSEGKEIKNKNEILALLEALFLPKRLSIIHCPGHQKGDSPQAKGNRLADDTAKKAATETHSSLTVLPAGKRTADGSEFEKRTADGSEFESPKKKAKVE

SEQ ID NO: 7325 - protein, 2176 aa, synthetic construct
MPAAKRVKLDGGDKKYSIGLDIGTNSVGWAVITDEYKVPSKKFKVLGNTDRHSIKKNLIGALLFDSGETAEATRLKRTARRRYTRRKNRICYLQEIFSNEMAKVDDSFFHRLEESFLVEEDKKHERHPIFGNIVDEVAYHEKYPTIYHLRKKLVDSTDKADLRLIYLALAHMIKFRGHFLIEGDLNPDNSDVDKLFIQLVQTYNQLFEENPINASGVDAKAILSARLSKSRRLENLIAQLPGEKKNGLFGNLIALSLGLTPNFKSNFDLAEDAKLQLSKDTYDDDLDNLLAQIGDQYADLFLAAKNLSDAILLSDILRVNTEITKAPLSASMIKRYDEHHQDLTLLKALVRQQLPEKYKEIFFDQSKNGYAGYIDGGASQEEFYKFIKPILEKMDGTEELLVKLNREDLLRKQRTFDNGSIPHQIHLGELHAILRRQEDFYPFLKDNREKIEKILTFRIPYYVGPLARGNSRFAWMTRKSEETITPWNFEEVVDKGASAQSFIERMTNFDKNLPNEKVLPKHSLLYEYFTVYNELTKVKYVTEGMRKPAFLSGEQKKAIVDLLFKTNRKVTVKQLKEDYFKKIECFDSVEISGVEDRFNASLGTYHDLLKIIKDKDFLDNEENEDILEDIVLTLTLFEDREMIEERLKTYAHLFDDKVMKQLKRRRYTGWGRLSRKLINGIRDKQSGKTILDFLKSDGFANRNFMQLIHDDSLTFKEDIQKAQVSGQGDSLHEHIANLAGSPAIKKGILQTVKVVDELVKVMGRHKPENIVIEMARENQTTQKGQKNSRERMKRIEEGIKELGSQILKEHPVENTQLQNEKLYLYYLQNGRDMYVDQELDINRLSDYDVDHIVPQSFLKDDSIDNKVLTRSDKARGKSDNVPSEEVVKKMKNYWRQLLNAKLITQRKFDNLTKAERGGLSELDKAGFIKRQLVETRQITKHVAQILDSRMNTKYDENDKLIREVKVITLKSKLVSDFRKDFQFYKVREINNYHHAHDAYLNAVVGTALIKKYPKLESEFVYGDYKVYDVRKMIAKSEQEIGKATAKYFFYSNIMNFFKTEITLANGEIRKRPLIETNGETGEIVWDKGRDFATVRKVLSMPQVNIVKKTEVQTGGFSKESILPKRNSDKLIARKKDWDPKKYGGFDSPTVAYSVLVVAKVEKGKSKKLKSVKELLGITIMERSSFEKNPIDFLEAKGYKEVKKDLIIKLPKYSLFELENGRKRMLASAGELQKGNELALPSKYVNFLYLASHYEKLKGSPEDNEQKQLFVEQHKHYLDEIIEQISEFSKRVILADANLDKVLSAYNKHRDKPIREQAENIIHLFTLTNLGAPAAFKYFDTTIDRKRYTSTKEVLDATLIHQSITGLYETRIDLSQLGGDGGEAAAKGGGGSSGGMNPLQLLQPLPAEIKGTKLLAHWNSGATITCIPESFLEDEQPIKKTLIKTIHGEKQQNVYYVTFKVKGRKVEAEVIASPYEYILLSPTDVPWLTQQPLQLTILVPLQEYQEKILSKTALPEDQKQQLKTLFVKYDNLWQHWENQVGHRKIRPHNIATGDYPPRPQKQYPINPKAKPSIQIVIDDLLKQGVLTPQNSTMNTPVYPVPKPDGRWRMVLDYREVNKTIPLTAAQNQHSAGILATIVRQKYKTTLDLANGFWAHPITPESYWLTAFTWQGKQYCWTRLPQGFLNSPALFTADVVDLLKEIPNVQVYVDDIYLSHDDPKEHVQQLEKVFQILLQAGYVVSLKKSEIGQKTVEFLGFNITKEGRGLTDTFKTKLLNITPPKDLKQLQSILGLLNFARNFIPNFAELVQPLYNLIASAKGKYIEWSEENTKQLNMVIEALNTASNLEERLPEQRLVIKVNTSPSAGYVRYYNETGKKPIMYLNYVFSKAELKFSMLEKLLTTMHKALIKAMDLAMGQEILVYSPIVSMTKIQKTPLPERKALPIRWITWMTYLEDPRIQFHYDKTLPELKHIPDVYTSSQSPVKHPSQYEGVFYTDGSAIKSPDPTKSNNAGMGIVHATYKPEYQVLNQWSIPLGNHTAQMAEIAAVEFACKKALKIPGPVLVITDSFYVAESANKELPYWKSNGFVNNKKKPLKHISKWKSIAECLSMKPDITIQHEKGISLQIPVFILKGNALADKLATQGSYVVNAGKRTADGSEFEKRTADGSEFESPKKKAKVE

SEQ ID NO: 7326 - protein, 2094 aa, synthetic construct
MPAAKRVKLDGGDKKYSIGLDIGTNSVGWAVITDEYKVPSKKFKVLGNTDRHSIKKNLIGALLFDSGETAEATRLKRTARRRYTRRKNRICYLQEIFSNEMAKVDDSFFHRLEESFLVEEDKKHERHPIFGNIVDEVAYHEKYPTIYHLRKKLVDSTDKADLRLIYLALAHMIKFRGHFLIEGDLNPDNSDVDKLFIQLVQTYNQLFEENPINASGVDAKAILSARLSKSRRLENLIAQLPGEKKNGLFGNLIALSLGLTPNFKSNFDLAEDAKLQLSKDTYDDDLDNLLAQIGDQYADLFLAAKNLSDAILLSDILRVNTEITKAPLSASMIKRYDEHHQDLTLLKALVRQQLPEKYKEIFFDQSKNGYAGYIDGGASQEEFYKFIKPILEKMDGTEELLVKLNREDLLRKQRTFDNGSIPHQIHLGELHAILRRQEDFYPFLKDNREKIEKILTFRIPYYVGPLARGNSRFAWMTRKSEETITPWNFEEVVDKGASAQSFIERMTNFDKNLPNEKVLPKHSLLYEYFTVYNELTKVKYVTEGMRKPAFLSGEQKKAIVDLLFKTNRKVTVKQLKEDYFKKIECFDSVEISGVEDRFNASLGTYHDLLKIIKDKDFLDNEENEDILEDIVLTLTLFEDREMIEERLKTYAHLFDDKVMKQLKRRRYTGWGRLSRKLINGIRDKQSGKTILDFLKSDGFANRNFMQLIHDDSLTFKEDIQKAQVSGQGDSLHEHIANLAGSPAIKKGILQTVKVVDELVKVMGRHKPENIVIEMARENQTTQKGQKNSRERMKRIEEGIKELGSQILKEHPVENTQLQNEKLYLYYLQNGRDMYVDQELDINRLSDYDVDHIVPQSFLKDDSIDNKVLTRSDKARGKSDNVPSEEVVKKMKNYWRQLLNAKLITQRKFDNLTKAERGGLSELDKAGFIKRQLVETRQITKHVAQILDSRMNTKYDENDKLIREVKVITLKSKLVSDFRKDFQFYKVREINNYHHAHDAYLNAVVGTALIKKYPKLESEFVYGDYKVYDVRKMIAKSEQEIGKATAKYFFYSNIMNFFKTEITLANGEIRKRPLIETNGETGEIVWDKGRDFATVRKVLSMPQVNIVKKTEVQTGGFSKESILPKRNSDKLIARKKDWDPKKYGGFDSPTVAYSVLVVAKVEKGKSKKLKSVKELLGITIMERSSFEKNPIDFLEAKGYKEVKKDLIIKLPKYSLFELENGRKRMLASAGELQKGNELALPSKYVNFLYLASHYEKLKGSPEDNEQKQLFVEQHKHYLDEIIEQISEFSKRVILADANLDKVLSAYNKHRDKPIREQAENIIHLFTLTNLGAPAAFKYFDTTIDRKRYTSTKEVLDATLIHQSITGLYETRIDLSQLGGDGGEAAAKGGGGSSGGVLNLEEEYRLHEKPVPSSIDPSWLQLFPTVWAERAGMGLANQVPPVVVELRSGASPVAVRQYPMSKEAREGIRPHIQKFLDLGVLVPCRSPWNTPLLPVKKPGTNDYRPVQDLREINKRVQDIHPTVPNPYNLLSSLPPSYTWYSVLDLKDAFFCLRLHPNSQPLFAFEWKDPEKGNTGQLTWTRLPQGFKNSPTLFNEALHRDLAPFRALNPQVVLLQYVDDLLVAAPTYEDCKKGTQKLLQELSKLGYRVSAKKAQLCQREVTYLGYLLKEGKRWLTPARKATVMKIPVPTTPRQVREFLGTAGFCRLWIPGFASLAAPLYPLTKPSIPFIWTEEHQQAFDHIKKALLSAPALALPDLTKPFTLYIDERAGVARGVLTQTLGPWRRPVAYLSKKLDPVASGWPTCLKAVAAVALLLKDADKLTLGQNVTVIASHSLESIVRQPPDRWMTNARMTHYQSLLLNERVSFAPPAVLNPATLLPVESEATPVHRCSEILAEETGTRRDLEDQPLPGVPTWYTDGSSFITEGKRRAGAPIVDGKRTVWASSLPEGTSAQKAELVALTQALRLAEGKNINIYTDSRYAFATAHIHGAIYKQRGWLTSAGKDIKNKEEILALLEAIHLPRRVAIIHCPGHQRGSNPVATGNRRADEAAKQAALSTRVLAGTTKPAGKRTADGSEFEKRTADGSEFESPKKKAKVE

SEQ ID NO: 7327 - protein, 2218 aa, synthetic construct
MPAAKRVKLDGGDKKYSIGLDIGTNSVGWAVITDEYKVPSKKFKVLGNTDRHSIKKNLIGALLFDSGETAEATRLKRTARRRYTRRKNRICYLQEIFSNEMAKVDDSFFHRLEESFLVEEDKKHERHPIFGNIVDEVAYHEKYPTIYHLRKKLVDSTDKADLRLIYLALAHMIKFRGHFLIEGDLNPDNSDVDKLFIQLVQTYNQLFEENPINASGVDAKAILSARLSKSRRLENLIAQLPGEKKNGLFGNLIALSLGLTPNFKSNFDLAEDAKLQLSKDTYDDDLDNLLAQIGDQYADLFLAAKNLSDAILLSDILRVNTEITKAPLSASMIKRYDEHHQDLTLLKALVRQQLPEKYKEIFFDQSKNGYAGYIDGGASQEEFYKFIKPILEKMDGTEELLVKLNREDLLRKQRTFDNGSIPHQIHLGELHAILRRQEDFYPFLKDNREKIEKILTFRIPYYVGPLARGNSRFAWMTRKSEETITPWNFEEVVDKGASAQSFIERMTNFDKNLPNEKVLPKHSLLYEYFTVYNELTKVKYVTEGMRKPAFLSGEQKKAIVDLLFKTNRKVTVKQLKEDYFKKIECFDSVEISGVEDRFNASLGTYHDLLKIIKDKDFLDNEENEDILEDIVLTLTLFEDREMIEERLKTYAHLFDDKVMKQLKRRRYTGWGRLSRKLINGIRDKQSGKTILDFLKSDGFANRNFMQLIHDDSLTFKEDIQKAQVSGQGDSLHEHIANLAGSPAIKKGILQTVKVVDELVKVMGRHKPENIVIEMARENQTTQKGQKNSRERMKRIEEGIKELGSQILKEHPVENTQLQNEKLYLYYLQNGRDMYVDQELDINRLSDYDVDHIVPQSFLKDDSIDNKVLTRSDKARGKSDNVPSEEVVKKMKNYWRQLLNAKLITQRKFDNLTKAERGGLSELDKAGFIKRQLVETRQITKHVAQILDSRMNTKYDENDKLIREVKVITLKSKLVSDFRKDFQFYKVREINNYHHAHDAYLNAVVGTALIKKYPKLESEFVYGDYKVYDVRKMIAKSEQEIGKATAKYFFYSNIMNFFKTEITLANGEIRKRPLIETNGETGEIVWDKGRDFATVRKVLSMPQVNIVKKTEVQTGGFSKESILPKRNSDKLIARKKDWDPKKYGGFDSPTVAYSVLVVAKVEKGKSKKLKSVKELLGITIMERSSFEKNPIDFLEAKGYKEVKKDLIIKLPKYSLFELENGRKRMLASAGELQKGNELALPSKYVNFLYLASHYEKLKGSPEDNEQKQLFVEQHKHYLDEIIEQISEFSKRVILADANLDKVLSAYNKHRDKPIREQAENIIHLFTLTNLGAPAAFKYFDTTIDRKRYTSTKEVLDATLIHQSITGLYETRIDLSQLGGDGGEAAAKGGGGSSGGTLGDQGSRGSDPLPEPRVTLTVEGIPTEFLVNTGAEHSVLTKPMGKMGSKRTVVAGATGSKVYPWTTKRLLKIGQKQVTHSFLVIPECPAPLLGRDLLTKLKAQIQFSTEGPQVTWEDRPAMCLVLNLEEEYRLHEKPVPPSIDPSWLQLFPMVWAEKAGMGLANQVPPVVVELKSDASPVAVRQYPMSKEAREGIRPHIQRFLDLGILVPCQSPWNTPLLPVKKPGTNDYRPVQDLREVNKRVQDIHPTVPNPYNLLSSLPPSHTWYSVLDLKDAFFCLKLHPNSQPLFAFEWRDPEKGNTGQLTWTRLPQGFKNSPTLFNEALHRDLASFRALNPQVVMLQYVDDLLVAAPTYRDCKEGTRRLLQELSKLGYRVSAKKAQLCREEVTYLGYLLKGGKRWLTPARKATVMKIPTPTTPRQVREFLGTAGFCRLWIPGFASLAAPLYPLTRPKVPFTWTEAHQEAFGRIKEALLSAPALALPDLTKPFALYVDEKEGVARGVLTQTLGPWRRPVAYLSKKLDPVASGWPTCLKAIAAVALLLKDADKLTLGQNVLVIAPHNLESIVRQPPDRWMTNARMTHYQSLLLNERVSFAPPAILNPATLLPVESDDTPIHICSEILAEETGTRPDLRDQPLPGVPAWYTDGSSFIMDGRRQAGAAIVDNKRTVWASNLPEGTSAQKAELIALTQALRLAEGKSINIYTDSRYAFATAHVHGAIYKQRGWLTSAGKDIKNKEEILALLEAIHLPKRVAIIHCPGHQRGTDPVATGNRKADEAAKQAAQSTRILTETTKNAGKRTADGSEFEKRTADGSEFESPKKKAKVE

SEQ ID NO: 7328 - protein, 2096 aa, synthetic construct
MPAAKRVKLDGGDKKYSIGLDIGTNSVGWAVITDEYKVPSKKFKVLGNTDRHSIKKNLIGALLFDSGETAEATRLKRTARRRYTRRKNRICYLQEIFSNEMAKVDDSFFHRLEESFLVEEDKKHERHPIFGNIVDEVAYHEKYPTIYHLRKKLVDSTDKADLRLIYLALAHMIKFRGHFLIEGDLNPDNSDVDKLFIQLVQTYNQLFEENPINASGVDAKAILSARLSKSRRLENLIAQLPGEKKNGLFGNLIALSLGLTPNFKSNFDLAEDAKLQLSKDTYDDDLDNLLAQIGDQYADLFLAAKNLSDAILLSDILRVNTEITKAPLSASMIKRYDEHHQDLTLLKALVRQQLPEKYKEIFFDQSKNGYAGYIDGGASQEEFYKFIKPILEKMDGTEELLVKLNREDLLRKQRTFDNGSIPHQIHLGELHAILRRQEDFYPFLKDNREKIEKILTFRIPYYVGPLARGNSRFAWMTRKSEETITPWNFEEVVDKGASAQSFIERMTNFDKNLPNEKVLPKHSLLYEYFTVYNELTKVKYVTEGMRKPAFLSGEQKKAIVDLLFKTNRKVTVKQLKEDYFKKIECFDSVEISGVEDRFNASLGTYHDLLKIIKDKDFLDNEENEDILEDIVLTLTLFEDREMIEERLKTYAHLFDDKVMKQLKRRRYTGWGRLSRKLINGIRDKQSGKTILDFLKSDGFANRNFMQLIHDDSLTFKEDIQKAQVSGQGDSLHEHIANLAGSPAIKKGILQTVKVVDELVKVMGRHKPENIVIEMARENQTTQKGQKNSRERMKRIEEGIKELGSQILKEHPVENTQLQNEKLYLYYLQNGRDMYVDQELDINRLSDYDVDHIVPQSFLKDDSIDNKVLTRSDKARGKSDNVPSEEVVKKMKNYWRQLLNAKLITQRKFDNLTKAERGGLSELDKAGFIKRQLVETRQITKHVAQILDSRMNTKYDENDKLIREVKVITLKSKLVSDFRKDFQFYKVREINNYHHAHDAYLNAVVGTALIKKYPKLESEFVYGDYKVYDVRKMIAKSEQEIGKATAKYFFYSNIMNFFKTEITLANGEIRKRPLIETNGETGEIVWDKGRDFATVRKVLSMPQVNIVKKTEVQTGGFSKESILPKRNSDKLIARKKDWDPKKYGGFDSPTVAYSVLVVAKVEKGKSKKLKSVKELLGITIMERSSFEKNPIDFLEAKGYKEVKKDLIIKLPKYSLFELENGRKRMLASAGELQKGNELALPSKYVNFLYLASHYEKLKGSPEDNEQKQLFVEQHKHYLDEIIEQISEFSKRVILADANLDKVLSAYNKHRDKPIREQAENIIHLFTLTNLGAPAAFKYFDTTIDRKRYTSTKEVLDATLIHQSITGLYETRIDLSQLGGDGGEAAAKGGGGSSGGTLGIEDEYRLHETSTEPDVSLGSTWLSDFPQAWAETGGMGLAVRQAPLIIPLKATSTPVSIQQYPMSHEARLGIKPHIQRLLDQGILVPCQSPWNTPLLPVKKPGTNDYRPVQDLREVNKRVEDIHPTVPNPYNLLSGLPPSHQWYTVLDLKDAFFCLRLHPTSQPLFAFEWRDPGMGISGQLTWTRLPQGFKNSPTLFNEALHRDLADFRIQHPDLILLQYVDDILLAATSELDCQQGTRALLQTLGDLGYRASAKKAQICQKQVKYLGYLLREGQRWLTEARKETVMGQPVPKTPRQLREFLGTAGFCRLWIPGFAEMAAPLYPLTKPGTLFSWGPDQQKAYQEIKQALLTAPALGLPDLTKPFELFVDEKQGYAKGVLTQKLGPWRRPVAYLSKKLDPVAAGWPPCLRMVAAIAVLTKDAGKLTMGQPLVILAPHAVEALVKQPPDRWLSNARMTHYQAMLLDTDRVQFGPVVALNPATLLPLPEEGAPHDCLEILAETHGTRPDLTDQPIPDADHTWYTDGSSFLQEGQRKAGAAVTTETEVIWAGALPAGTSAQRAELIALTQALKMAEGKRLNVYTDSRYAFATAHIHGEIYRRRGWLTSEGREIKNKSEILALLKALFLPKRLSIIHCLGHQKGDSAEARGNRLADQAAREAAIKTPPDTSTLLAGKRTADGSEFEKRTADGSEFESPKKKAKVE

SEQ ID NO: 7329 - protein, 2096 aa, synthetic construct
MPAAKRVKLDGGDKKYSIGLDIGTNSVGWAVITDEYKVPSKKFKVLGNTDRHSIKKNLIGALLFDSGETAEATRLKRTARRRYTRRKNRICYLQEIFSNEMAKVDDSFFHRLEESFLVEEDKKHERHPIFGNIVDEVAYHEKYPTIYHLRKKLVDSTDKADLRLIYLALAHMIKFRGHFLIEGDLNPDNSDVDKLFIQLVQTYNQLFEENPINASGVDAKAILSARLSKSRRLENLIAQLPGEKKNGLFGNLIALSLGLTPNFKSNFDLAEDAKLQLSKDTYDDDLDNLLAQIGDQYADLFLAAKNLSDAILLSDILRVNTEITKAPLSASMIKRYDEHHQDLTLLKALVRQQLPEKYKEIFFDQSKNGYAGYIDGGASQEEFYKFIKPILEKMDGTEELLVKLNREDLLRKQRTFDNGSIPHQIHLGELHAILRRQEDFYPFLKDNREKIEKILTFRIPYYVGPLARGNSRFAWMTRKSEETITPWNFEEVVDKGASAQSFIERMTNFDKNLPNEKVLPKHSLLYEYFTVYNELTKVKYVTEGMRKPAFLSGEQKKAIVDLLFKTNRKVTVKQLKEDYFKKIECFDSVEISGVEDRFNASLGTYHDLLKIIKDKDFLDNEENEDILEDIVLTLTLFEDREMIEERLKTYAHLFDDKVMKQLKRRRYTGWGRLSRKLINGIRDKQSGKTILDFLKSDGFANRNFMQLIHDDSLTFKEDIQKAQVSGQGDSLHEHIANLAGSPAIKKGILQTVKVVDELVKVMGRHKPENIVIEMARENQTTQKGQKNSRERMKRIEEGIKELGSQILKEHPVENTQLQNEKLYLYYLQNGRDMYVDQELDINRLSDYDVDHIVPQSFLKDDSIDNKVLTRSDKARGKSDNVPSEEVVKKMKNYWRQLLNAKLITQRKFDNLTKAERGGLSELDKAGFIKRQLVETRQITKHVAQILDSRMNTKYDENDKLIREVKVITLKSKLVSDFRKDFQFYKVREINNYHHAHDAYLNAVVGTALIKKYPKLESEFVYGDYKVYDVRKMIAKSEQEIGKATAKYFFYSNIMNFFKTEITLANGEIRKRPLIETNGETGEIVWDKGRDFATVRKVLSMPQVNIVKKTEVQTGGFSKESILPKRNSDKLIARKKDWDPKKYGGFDSPTVAYSVLVVAKVEKGKSKKLKSVKELLGITIMERSSFEKNPIDFLEAKGYKEVKKDLIIKLPKYSLFELENGRKRMLASAGELQKGNELALPSKYVNFLYLASHYEKLKGSPEDNEQKQLFVEQHKHYLDEIIEQISEFSKRVILADANLDKVLSAYNKHRDKPIREQAENIIHLFTLTNLGAPAAFKYFDTTIDRKRYTSTKEVLDATLIHQSITGLYETRIDLSQLGGDGGEAAAKGGGGSSGGTLNIEDEYRLHETSKGPDVPLGSTWLSDFPQAWAETGGMGLAVRQAPLIIPLKATSTPVSIKQYPMSQEARLGIKPHIQRLLDQGILVPCQSPWNTPLLPVKKPGTNDYRPVQDLREVNKRVEDIHPTVPNPYNLLSGLPPSHQWYTVLDLKDAFFCLRLHPTSQSLFAFEWRDPEMGISGQLTWTRLPQGFKNSPTLFNEALHRDLADFRIQHPDLILLQYVDDLLLAATSELDCQQGTRALLQTLGDLGYRASAKKAQICQKQVKYLGYLLKEGQRWLTEARKETVMGQPTPKTPRQLREFLGKAGFCRLFIPGFAEMAAPLYPLTKPGTLFEWGPDQQKAYQEIKQALLTAPALGLPDLTKPFELFVDEKQGYAKGVLTQKLGPWRRPVAYLSKKLDPVAAGWPPCLRMVAAIAVLTKDAGKLTMGQPLVILAPHAVEALVKQPPDRWLSNARMTHYQALLLDTDRVQFGPIVALNPATLLPLPEEGLQHDCLDILAEAHGTRPDLTDQPLPDADHTWYTDGSSFLQEGQRKAGAAVTTETEVVWAKALPAGTSAQRAELIALTQALKMAEGKKLNVYTDSRYAFATAHIHGEIYRRRGWLTSEGKEIKNKDEILALLKALFLPKRLSIIHCPGHQKGNRAEARGNRMADQAAREVATRETPETSTLLAGKRTADGSEFEKRTADGSEFESPKKKAKVE

SEQ ID NO: 7330 - protein, 2096 aa, synthetic construct
MPAAKRVKLDGGDKKYSIGLDIGTNSVGWAVITDEYKVPSKKFKVLGNTDRHSIKKNLIGALLFDSGETAEATRLKRTARRRYTRRKNRICYLQEIFSNEMAKVDDSFFHRLEESFLVEEDKKHERHPIFGNIVDEVAYHEKYPTIYHLRKKLVDSTDKADLRLIYLALAHMIKFRGHFLIEGDLNPDNSDVDKLFIQLVQTYNQLFEENPINASGVDAKAILSARLSKSRRLENLIAQLPGEKKNGLFGNLIALSLGLTPNFKSNFDLAEDAKLQLSKDTYDDDLDNLLAQIGDQYADLFLAAKNLSDAILLSDILRVNTEITKAPLSASMIKRYDEHHQDLTLLKALVRQQLPEKYKEIFFDQSKNGYAGYIDGGASQEEFYKFIKPILEKMDGTEELLVKLNREDLLRKQRTFDNGSIPHQIHLGELHAILRRQEDFYPFLKDNREKIEKILTFRIPYYVGPLARGNSRFAWMTRKSEETITPWNFEEVVDKGASAQSFIERMTNFDKNLPNEKVLPKHSLLYEYFTVYNELTKVKYVTEGMRKPAFLSGEQKKAIVDLLFKTNRKVTVKQLKEDYFKKIECFDSVEISGVEDRFNASLGTYHDLLKIIKDKDFLDNEENEDILEDIVLTLTLFEDREMIEERLKTYAHLFDDKVMKQLKRRRYTGWGRLSRKLINGIRDKQSGKTILDFLKSDGFANRNFMQLIHDDSLTFKEDIQKAQVSGQGDSLHEHIANLAGSPAIKKGILQTVKVVDELVKVMGRHKPENIVIEMARENQTTQKGQKNSRERMKRIEEGIKELGSQILKEHPVENTQLQNEKLYLYYLQNGRDMYVDQELDINRLSDYDVDHIVPQSFLKDDSIDNKVLTRSDKARGKSDNVPSEEVVKKMKNYWRQLLNAKLITQRKFDNLTKAERGGLSELDKAGFIKRQLVETRQITKHVAQILDSRMNTKYDENDKLIREVKVITLKSKLVSDFRKDFQFYKVREINNYHHAHDAYLNAVVGTALIKKYPKLESEFVYGDYKVYDVRKMIAKSEQEIGKATAKYFFYSNIMNFFKTEITLANGEIRKRPLIETNGETGEIVWDKGRDFATVRKVLSMPQVNIVKKTEVQTGGFSKESILPKRNSDKLIARKKDWDPKKYGGFDSPTVAYSVLVVAKVEKGKSKKLKSVKELLGITIMERSSFEKNPIDFLEAKGYKEVKKDLIIKLPKYSLFELENGRKRMLASAGELQKGNELALPSKYVNFLYLASHYEKLKGSPEDNEQKQLFVEQHKHYLDEIIEQISEFSKRVILADANLDKVLSAYNKHRDKPIREQAENIIHLFTLTNLGAPAAFKYFDTTIDRKRYTSTKEVLDATLIHQSITGLYETRIDLSQLGGDGGEAAAKGGGGSSGGTLNIEDEHRLHETSKEPDVSLGSTWLSDFPQAWAETGGMGLAVRQAPLIIPLKATSTPVSIKQYPMSQEARLGIKPHIQRLLDQGILVPCQSPWNTPLLPVKKPGTNDYRPVQDLREVNKRVEDIHPTVPNPYNLLSGLPPSHQWYTVLDLKDAFFCLRLHPTSQPLFAFEWRDPEMGISGQLTWTRLPQGFKNSPTLFDEALHRDLADFRIQHPDLILLQYVDDLLLAATSELDCQQGTRALLQTLGNLGYRASAKKAQICQKQVKYLGYLLKEGQRWLTEARKETVMGQPTPKTPRQLREFLGTAGFCRLWIPGFAEMAAPLYPLTKTGTLFNWGPDQQKAYQEIKQALLTAPALGLPDLTKPFELFVDEKQGYAKGVLTQKLGPWRRPVAYLSKKLDPVAAGWPPCLRMVAAIAVLTKDAGKLTMGQPLVILAPHAVEALVKQPPDRWLSNARMTHYQALLLDTDRVQFGPVVALNPATLLPLPEEGLQHNCLDILAEAHGTRPDLTDQPLPDADHTWYTDGSSLLQEGQRKAGAAVTTETEVIWAKALPAGTSAQRAELIALTQALKMAEGKKLNVYTDSRYAFATAHIHGEIYRRRGLLTSEGKEIKNKDEILALLKALFLPKRLSIIHCPGHQKGHSAEARGNRMADQAARKAAITETPDTSTLLAGKRTADGSEFEKRTADGSEFESPKKKAKVE

SEQ ID NO: 7331 - protein, 2096 aa, synthetic construct
MPAAKRVKLDGGDKKYSIGLDIGTNSVGWAVITDEYKVPSKKFKVLGNTDRHSIKKNLIGALLFDSGETAEATRLKRTARRRYTRRKNRICYLQEIFSNEMAKVDDSFFHRLEESFLVEEDKKHERHPIFGNIVDEVAYHEKYPTIYHLRKKLVDSTDKADLRLIYLALAHMIKFRGHFLIEGDLNPDNSDVDKLFIQLVQTYNQLFEENPINASGVDAKAILSARLSKSRRLENLIAQLPGEKKNGLFGNLIALSLGLTPNFKSNFDLAEDAKLQLSKDTYDDDLDNLLAQIGDQYADLFLAAKNLSDAILLSDILRVNTEITKAPLSASMIKRYDEHHQDLTLLKALVRQQLPEKYKEIFFDQSKNGYAGYIDGGASQEEFYKFIKPILEKMDGTEELLVKLNREDLLRKQRTFDNGSIPHQIHLGELHAILRRQEDFYPFLKDNREKIEKILTFRIPYYVGPLARGNSRFAWMTRKSEETITPWNFEEVVDKGASAQSFIERMTNFDKNLPNEKVLPKHSLLYEYFTVYNELTKVKYVTEGMRKPAFLSGEQKKAIVDLLFKTNRKVTVKQLKEDYFKKIECFDSVEISGVEDRFNASLGTYHDLLKIIKDKDFLDNEENEDILEDIVLTLTLFEDREMIEERLKTYAHLFDDKVMKQLKRRRYTGWGRLSRKLINGIRDKQSGKTILDFLKSDGFANRNFMQLIHDDSLTFKEDIQKAQVSGQGDSLHEHIANLAGSPAIKKGILQTVKVVDELVKVMGRHKPENIVIEMARENQTTQKGQKNSRERMKRIEEGIKELGSQILKEHPVENTQLQNEKLYLYYLQNGRDMYVDQELDINRLSDYDVDHIVPQSFLKDDSIDNKVLTRSDKARGKSDNVPSEEVVKKMKNYWRQLLNAKLITQRKFDNLTKAERGGLSELDKAGFIKRQLVETRQITKHVAQILDSRMNTKYDENDKLIREVKVITLKSKLVSDFRKDFQFYKVREINNYHHAHDAYLNAVVGTALIKKYPKLESEFVYGDYKVYDVRKMIAKSEQEIGKATAKYFFYSNIMNFFKTEITLANGEIRKRPLIETNGETGEIVWDKGRDFATVRKVLSMPQVNIVKKTEVQTGGFSKESILPKRNSDKLIARKKDWDPKKYGGFDSPTVAYSVLVVAKVEKGKSKKLKSVKELLGITIMERSSFEKNPIDFLEAKGYKEVKKDLIIKLPKYSLFELENGRKRMLASAGELQKGNELALPSKYVNFLYLASHYEKLKGSPEDNEQKQLFVEQHKHYLDEIIEQISEFSKRVILADANLDKVLSAYNKHRDKPIREQAENIIHLFTLTNLGAPAAFKYFDTTIDRKRYTSTKEVLDATLIHQSITGLYETRIDLSQLGGDGGEAAAKGGGGSSGGTLNIEDEYRLHEISTEPDVSPGSTWLSDFPQAWAETGGMGLAVRQAPLIIPLKATSTPVSIKQYPMSQEAKLGIKPHIQRLLDQGILVPCQSPWNTPLLPVKKPGTNDYRPVQGLREVNKRVEDIHPTVPNPYNLLSGLPTSHRWYTVLDLKDAFFCLRLHPTSQPLFASEWRDPGMGISGQLTWTRLPQGFKNSPTLFNEALHRGLADFRIQHPDLILLQYVDDLLLAATSELDCQQGTRALLKTLGNLGYRASAKKAQICQKQVKYLGYLLREGQRWLTEARKETVMGQPTPKTPRQLREFLGTAGFCRLWIPRFAEMAAPLYPLTKPGTLFNWGPDQQKAYHEIKQALLTAPALGLPDLTKPFELFVDEKQGYAKGVLTQKLGPWRRPVAYLSKKLDPVAAGWPPCLRMVAAIAVLTKDAGKLTMGQPLVILAPHAVEALVKQPPDRWLSNARMTHYQAMLLDTDRVQFGPVVALNPATLLPLPEEGAPHDCLEILAETHGTEPDLTDQPIPDADHTWYTDGSSFLQEGQRKAGAAVTTETEVIWARALPAGTSAQRAELIALTQALKMAEGKRLNVYTDSRYAFATAHIHGEIYKRRGWLTSEGREIKNKSEILALLKALFLPKRLSIIHCLGHQKGDSAEARGNRLADQAAREAAIKTPPDTSTLLAGKRTADGSEFEKRTADGSEFESPKKKAKVE

SEQ ID NO: 7332 - protein, 2087 aa, synthetic construct
MPAAKRVKLDGGDKKYSIGLDIGTNSVGWAVITDEYKVPSKKFKVLGNTDRHSIKKNLIGALLFDSGETAEATRLKRTARRRYTRRKNRICYLQEIFSNEMAKVDDSFFHRLEESFLVEEDKKHERHPIFGNIVDEVAYHEKYPTIYHLRKKLVDSTDKADLRLIYLALAHMIKFRGHFLIEGDLNPDNSDVDKLFIQLVQTYNQLFEENPINASGVDAKAILSARLSKSRRLENLIAQLPGEKKNGLFGNLIALSLGLTPNFKSNFDLAEDAKLQLSKDTYDDDLDNLLAQIGDQYADLFLAAKNLSDAILLSDILRVNTEITKAPLSASMIKRYDEHHQDLTLLKALVRQQLPEKYKEIFFDQSKNGYAGYIDGGASQEEFYKFIKPILEKMDGTEELLVKLNREDLLRKQRTFDNGSIPHQIHLGELHAILRRQEDFYPFLKDNREKIEKILTFRIPYYVGPLARGNSRFAWMTRKSEETITPWNFEEVVDKGASAQSFIERMTNFDKNLPNEKVLPKHSLLYEYFTVYNELTKVKYVTEGMRKPAFLSGEQKKAIVDLLFKTNRKVTVKQLKEDYFKKIECFDSVEISGVEDRFNASLGTYHDLLKIIKDKDFLDNEENEDILEDIVLTLTLFEDREMIEERLKTYAHLFDDKVMKQLKRRRYTGWGRLSRKLINGIRDKQSGKTILDFLKSDGFANRNFMQLIHDDSLTFKEDIQKAQVSGQGDSLHEHIANLAGSPAIKKGILQTVKVVDELVKVMGRHKPENIVIEMARENQTTQKGQKNSRERMKRIEEGIKELGSQILKEHPVENTQLQNEKLYLYYLQNGRDMYVDQELDINRLSDYDVDHIVPQSFLKDDSIDNKVLTRSDKARGKSDNVPSEEVVKKMKNYWRQLLNAKLITQRKFDNLTKAERGGLSELDKAGFIKRQLVETRQITKHVAQILDSRMNTKYDENDKLIREVKVITLKSKLVSDFRKDFQFYKVREINNYHHAHDAYLNAVVGTALIKKYPKLESEFVYGDYKVYDVRKMIAKSEQEIGKATAKYFFYSNIMNFFKTEITLANGEIRKRPLIETNGETGEIVWDKGRDFATVRKVLSMPQVNIVKKTEVQTGGFSKESILPKRNSDKLIARKKDWDPKKYGGFDSPTVAYSVLVVAKVEKGKSKKLKSVKELLGITIMERSSFEKNPIDFLEAKGYKEVKKDLIIKLPKYSLFELENGRKRMLASAGELQKGNELALPSKYVNFLYLASHYEKLKGSPEDNEQKQLFVEQHKHYLDEIIEQISEFSKRVILADANLDKVLSAYNKHRDKPIREQAENIIHLFTLTNLGAPAAFKYFDTTIDRKRYTSTKEVLDATLIHQSITGLYETRIDLSQLGGDGGEAAAKGGGGSSGGIPWLMKKPLQLTTLVPLQEYEERLLKQTMLTGSYKEKLQSLFLKYDALWQHWENQVGHRRIKPHHIATGTVNPRPQKQYPINPKAKASIQTVINDLLKQGVLIQQNSIMNTPVYPVPKPDGKWRMVLDYREVNKTIPLIAAQNQHSAGILSSIFRGKYKTTLDLSNGFWAHSITPESYWLTAFTWLGQQYCWTRLPQGFLNSPALFNADVVDLLKEVPNVQVYVDDIYISHDDPREHLEQLEKVFSLLLNAGYVVSLKKSEIAQHEVEFLGFNITKEGRGLTETFKQKLLNITPPRDLKQLQSILGLLNFARNFIPNFSELVKPLYNIIATAPGKYITWTTDNSQQLQNIISMLNSAENLEERNPEVRLIMKVNTSPSAGYIRFYNEFAKRPIMYLNYVYTKAEVKFTNTEKLLTTIHKGLIKALDLGMGQEILVYSPIVSMTKIQKTPLPERKALPIRWITWMSYLEDPRIQFHYDKTLPELQQVPTVTDDIIAKIKHPSEFSMVFYTDGSAIKHPNVNKSHNAGMGIAQVQFKPEFTVINTWSIPLGDHTAQLAEVAAVEFACKKALKIDGPVLIVTDSFYVAESVNKELPYWQSNGFFNNKKKPLKHVSKWKSIADCIQLKPDIIIIHEKGHQPTASTFHTEGNNLADKLATQGSYVVNAGKRTADGSEFEKRTADGSEFESPKKKAKVE

SEQ ID NO: 7333 - protein, 2176 aa, synthetic construct
MPAAKRVKLDGGDKKYSIGLDIGTNSVGWAVITDEYKVPSKKFKVLGNTDRHSIKKNLIGALLFDSGETAEATRLKRTARRRYTRRKNRICYLQEIFSNEMAKVDDSFFHRLEESFLVEEDKKHERHPIFGNIVDEVAYHEKYPTIYHLRKKLVDSTDKADLRLIYLALAHMIKFRGHFLIEGDLNPDNSDVDKLFIQLVQTYNQLFEENPINASGVDAKAILSARLSKSRRLENLIAQLPGEKKNGLFGNLIALSLGLTPNFKSNFDLAEDAKLQLSKDTYDDDLDNLLAQIGDQYADLFLAAKNLSDAILLSDILRVNTEITKAPLSASMIKRYDEHHQDLTLLKALVRQQLPEKYKEIFFDQSKNGYAGYIDGGASQEEFYKFIKPILEKMDGTEELLVKLNREDLLRKQRTFDNGSIPHQIHLGELHAILRRQEDFYPFLKDNREKIEKILTFRIPYYVGPLARGNSRFAWMTRKSEETITPWNFEEVVDKGASAQSFIERMTNFDKNLPNEKVLPKHSLLYEYFTVYNELTKVKYVTEGMRKPAFLSGEQKKAIVDLLFKTNRKVTVKQLKEDYFKKIECFDSVEISGVEDRFNASLGTYHDLLKIIKDKDFLDNEENEDILEDIVLTLTLFEDREMIEERLKTYAHLFDDKVMKQLKRRRYTGWGRLSRKLINGIRDKQSGKTILDFLKSDGFANRNFMQLIHDDSLTFKEDIQKAQVSGQGDSLHEHIANLAGSPAIKKGILQTVKVVDELVKVMGRHKPENIVIEMARENQTTQKGQKNSRERMKRIEEGIKELGSQILKEHPVENTQLQNEKLYLYYLQNGRDMYVDQELDINRLSDYDVDHIVPQSFLKDDSIDNKVLTRSDKARGKSDNVPSEEVVKKMKNYWRQLLNAKLITQRKFDNLTKAERGGLSELDKAGFIKRQLVETRQITKHVAQILDSRMNTKYDENDKLIREVKVITLKSKLVSDFRKDFQFYKVREINNYHHAHDAYLNAVVGTALIKKYPKLESEFVYGDYKVYDVRKMIAKSEQEIGKATAKYFFYSNIMNFFKTEITLANGEIRKRPLIETNGETGEIVWDKGRDFATVRKVLSMPQVNIVKKTEVQTGGFSKESILPKRNSDKLIARKKDWDPKKYGGFDSPTVAYSVLVVAKVEKGKSKKLKSVKELLGITIMERSSFEKNPIDFLEAKGYKEVKKDLIIKLPKYSLFELENGRKRMLASAGELQKGNELALPSKYVNFLYLASHYEKLKGSPEDNEQKQLFVEQHKHYLDEIIEQISEFSKRVILADANLDKVLSAYNKHRDKPIREQAENIIHLFTLTNLGAPAAFKYFDTTIDRKRYTSTKEVLDATLIHQSITGLYETRIDLSQLGGDGGEAAAKGGGGSSGGMDPLQLLQPLEAEIKGTKLKAHWNSGATITCVPQAFLEEEVPIKNIWIKTIHGEKEQPVYYLTFKIQGRKVEAEVISSPYDYILVSPSDIPWLMKKPLQLTTLVPLQEYEERLLKQTMLTGSYKEKLQSLFLKYDALWQHWENQVGHRRIKPHHIATGTVNPRPQKQYPINPKAKASIQTVINDLLKQGVLIQQNSIMNTPVYPVPKPDGKWRMVLDYREVNKTIPLIAAQNQHSAGILSSIFRGKYKTTLDLSNGFWAHSITPESYWLTAFTWLGQQYCWTRLPQGFLNSPALFNADVVDLLKEVPNVQVYVDDIYISHDDPREHLEQLEKVFSLLLNAGYVVSLKKSEIAQHEVEFLGFNITKEGRGLTETFKQKLLNITPPRDLKQLQSILGKLNFARNFIPNFSELVKPLYNIIATAPGKYITWTTDNSQQLQNIISMLNSAENLEERNPEVRLIMKVNTSPSAGYIRFYNEFAKRPIMYLNYVYTKAEVKFTNTEKLLTTIHKGLIKALDLGMGQEILVYSPIVSMTKIQKTPLPERKALPIRWITWMSYLEDPRIQFHYDKTLPELQQVPTVTDDIIAKIKHPSEFSMVFYTDGSAIKHPNVNKSHNAGMGIAQVQFKPEFTVINTWSIPLGDHTAQLAEVAAVEFACKKALKIDGPVLIVTDSFYVAESVNKELPYWQSNGFFNNKKKPLKHVSKWKSIADCIQLKPDIIIIHEKGHQPTASTFHTEGNNLADKLATQGSYVVNAGKRTADGSEFEKRTADGSEFESPKKKAKVE

SEQ ID NO: 7334 - protein, 2087 aa, synthetic construct
MPAAKRVKLDGGDKKYSIGLDIGTNSVGWAVITDEYKVPSKKFKVLGNTDRHSIKKNLIGALLFDSGETAEATRLKRTARRRYTRRKNRICYLQEIFSNEMAKVDDSFFHRLEESFLVEEDKKHERHPIFGNIVDEVAYHEKYPTIYHLRKKLVDSTDKADLRLIYLALAHMIKFRGHFLIEGDLNPDNSDVDKLFIQLVQTYNQLFEENPINASGVDAKAILSARLSKSRRLENLIAQLPGEKKNGLFGNLIALSLGLTPNFKSNFDLAEDAKLQLSKDTYDDDLDNLLAQIGDQYADLFLAAKNLSDAILLSDILRVNTEITKAPLSASMIKRYDEHHQDLTLLKALVRQQLPEKYKEIFFDQSKNGYAGYIDGGASQEEFYKFIKPILEKMDGTEELLVKLNREDLLRKQRTFDNGSIPHQIHLGELHAILRRQEDFYPFLKDNREKIEKILTFRIPYYVGPLARGNSRFAWMTRKSEETITPWNFEEVVDKGASAQSFIERMTNFDKNLPNEKVLPKHSLLYEYFTVYNELTKVKYVTEGMRKPAFLSGEQKKAIVDLLFKTNRKVTVKQLKEDYFKKIECFDSVEISGVEDRFNASLGTYHDLLKIIKDKDFLDNEENEDILEDIVLTLTLFEDREMIEERLKTYAHLFDDKVMKQLKRRRYTGWGRLSRKLINGIRDKQSGKTILDFLKSDGFANRNFMQLIHDDSLTFKEDIQKAQVSGQGDSLHEHIANLAGSPAIKKGILQTVKVVDELVKVMGRHKPENIVIEMARENQTTQKGQKNSRERMKRIEEGIKELGSQILKEHPVENTQLQNEKLYLYYLQNGRDMYVDQELDINRLSDYDVDHIVPQSFLKDDSIDNKVLTRSDKARGKSDNVPSEEVVKKMKNYWRQLLNAKLITQRKFDNLTKAERGGLSELDKAGFIKRQLVETRQITKHVAQILDSRMNTKYDENDKLIREVKVITLKSKLVSDFRKDFQFYKVREINNYHHAHDAYLNAVVGTALIKKYPKLESEFVYGDYKVYDVRKMIAKSEQEIGKATAKYFFYSNIMNFFKTEITLANGEIRKRPLIETNGETGEIVWDKGRDFATVRKVLSMPQVNIVKKTEVQTGGFSKESILPKRNSDKLIARKKDWDPKKYGGFDSPTVAYSVLVVAKVEKGKSKKLKSVKELLGITIMERSSFEKNPIDFLEAKGYKEVKKDLIIKLPKYSLFELENGRKRMLASAGELQKGNELALPSKYVNFLYLASHYEKLKGSPEDNEQKQLFVEQHKHYLDEIIEQISEFSKRVILADANLDKVLSAYNKHRDKPIREQAENIIHLFTLTNLGAPAAFKYFDTTIDRKRYTSTKEVLDATLIHQSITGLYETRIDLSQLGGDGGEAAAKGGGGSSGGVPWLTQQPLQLTILVPLQEYQDRILNKTALPEEQKQQLKALFTKYDNLWQHWENQVGHRKIRPHNIATGDYPPRPQKQYPINPKAKPSIQIVIDDLLKQGVLTPQNSTMNTPVYPVPKPDGRWRMVLDYREVNKTIPLTAAQNQHSAGILATIVRQKYKTTLDLANGFWAHPITPDSYWLTAFTWQGKQYCWTRLPQGFLNSPALFNADAVDLLKEVPNVQVYVDDIYLSHDNPHEHIQQLEKVFQILLQAGYVVSLKKSEIGQRTVEFLGFNITKEGRGLTDTFKTKLLNVTPPKDLKQLQSILGKLNFARNFIPNFAELVQTLYNLIASSPGKYIEWTEDNTKQLNKVIEALNTASNLEERLPDQRLVIKVNTSPSAGYVRYYNESGKKPIMYLNYVFSKAELKFSMLEKLLTTMHKALIKAMDLAMGQEILVYSPIVSMTKIQKTPLPERKALPIRWITWMTYLEDPRIQFHYDKTLPELKHIPDVYTSSIPPLKHPSQYEGVFCTDGSAIKSPDPTKSNNAGMGIVHAIYNPEYKILNQWSIPLGHHTAQMAEIAAVEFACKKALKVPGPVLVITDSFYVAESANKELPYWKSNGFVNNKKEPLKHISKWKSIAECLSIKPDITIQHEKGHQPINTSIHTEGNALADKLATQGSYVVNAGKRTADGSEFEKRTADGSEFESPKKKAKVE

SEQ ID NO: 7335 - protein, 2094 aa, synthetic construct; identical to SEQ ID NO: 4531

SEQ ID NO: 7336 - protein, 2098 aa, synthetic construct
MPAAKRVKLDGGDKKYSIGLDIGTNSVGWAVITDEYKVPSKKFKVLGNTDRHSIKKNLIGALLFDSGETAEATRLKRTARRRYTRRKNRICYLQEIFSNEMAKVDDSFFHRLEESFLVEEDKKHERHPIFGNIVDEVAYHEKYPTIYHLRKKLVDSTDKADLRLIYLALAHMIKFRGHFLIEGDLNPDNSDVDKLFIQLVQTYNQLFEENPINASGVDAKAILSARLSKSRRLENLIAQLPGEKKNGLFGNLIALSLGLTPNFKSNFDLAEDAKLQLSKDTYDDDLDNLLAQIGDQYADLFLAAKNLSDAILLSDILRVNTEITKAPLSASMIKRYDEHHQDLTLLKALVRQQLPEKYKEIFFDQSKNGYAGYIDGGASQEEFYKFIKPILEKMDGTEELLVKLNREDLLRKQRTFDNGSIPHQIHLGELHAILRRQEDFYPFLKDNREKIEKILTFRIPYYVGPLARGNSRFAWMTRKSEETITPWNFEEVVDKGASAQSFIERMTNFDKNLPNEKVLPKHSLLYEYFTVYNELTKVKYVTEGMRKPAFLSGEQKKAIVDLLFKTNRKVTVKQLKEDYFKKIECFDSVEISGVEDRFNASLGTYHDLLKIIKDKDFLDNEENEDILEDIVLTLTLFEDREMIEERLKTYAHLFDDKVMKQLKRRRYTGWGRLSRKLINGIRDKQSGKTILDFLKSDGFANRNFMQLIHDDSLTFKEDIQKAQVSGQGDSLHEHIANLAGSPAIKKGILQTVKVVDELVKVMGRHKPENIVIEMARENQTTQKGQKNSRERMKRIEEGIKELGSQILKEHPVENTQLQNEKLYLYYLQNGRDMYVDQELDINRLSDYDVDHIVPQSFLKDDSIDNKVLTRSDKARGKSDNVPSEEVVKKMKNYWRQLLNAKLITQRKFDNLTKAERGGLSELDKAGFIKRQLVETRQITKHVAQILDSRMNTKYDENDKLIREVKVITLKSKLVSDFRKDFQFYKVREINNYHHAHDAYLNAVVGTALIKKYPKLESEFVYGDYKVYDVRKMIAKSEQEIGKATAKYFFYSNIMNFFKTEITLANGEIRKRPLIETNGETGEIVWDKGRDFATVRKVLSMPQVNIVKKTEVQTGGFSKESILPKRNSDKLIARKKDWDPKKYGGFDSPTVAYSVLVVAKVEKGKSKKLKSVKELLGITIMERSSFEKNPIDFLEAKGYKEVKKDLIIKLPKYSLFELENGRKRMLASAGELQKGNELALPSKYVNFLYLASHYEKLKGSPEDNEQKQLFVEQHKHYLDEIIEQISEFSKRVILADANLDKVLSAYNKHRDKPIREQAENIIHLFTLTNLGAPAAFKYFDTTIDRKRYTSTKEVLDATLIHQSITGLYETRIDLSQLGGDGGEAAAKGSSGGGGGTAPLEEEYRLFLEAPIQNVTLLEQWKREIPKVWAEINPPGLASTQAPIHVQLLSTALPVRVRQYPITLEAKRSLRETIRKFRAAGILRPVHSPWNTPLLPVRKSGTSEYRMVQDLREVNKRVETIHPTVPNPYTLLSLLPPDRIWYSVLDLKDAFFCIPLAPESQLIFAFEWADAEEGESGQLTWTRLPQGFKNSPTLFNEALNRDLQGFRLDHPSVSLLQYVDDLLIAADTQAACLSATRDLLMTLAELGYRVSGKKAQLCQEEVTYLGFKIHKGSRSLSNSRTQAILQIPVPKTKRQVREFLGTIGYCRLWIPGFAELAQPLYAATRPGNDPLVWGEKEEEAFQSLKLALTQPPALALPSLDKPFQLFVEETSGAAKGVLTQALGPWKRPVAYLSKRLDPVAAGWPRCLRAIAAAALLTREASKLTFGQDIEITSSHNLESLLRSPPDKWLTNARITQYQVLLLDPPRVRFKQTAALNPATLLPETDDTLPIHHCLDTLDSLTSTRPDLTDQPLAQAEATLFTDGSSYIRDGKRYAGAAVVTLDSVIWAEPLPIGTSAQKAELIALTKALEWSKDKSVNIYTDSRYAFATLHVHGMIYRERGWLTAGGKAIKNAPEILALLTAVWLPKRVAVMHCKGHQKDDAPTSTGNRRADEVAREVAIRPLSTQATISAGKRTADGSEFEKRTADGSEFESPKKKAKVE

SEQ ID NO: 7337 - protein, 2173 aa, synthetic construct
MPAAKRVKLDGGDKKYSIGLDIGTNSVGWAVITDEYKVPSKKFKVLGNTDRHSIKKNLIGALLFDSGETAEATRLKRTARRRYTRRKNRICYLQEIFSNEMAKVDDSFFHRLEESFLVEEDKKHERHPIFGNIVDEVAYHEKYPTIYHLRKKLVDSTDKADLRLIYLALAHMIKFRGHFLIEGDLNPDNSDVDKLFIQLVQTYNQLFEENPINASGVDAKAILSARLSKSRRLENLIAQLPGEKKNGLFGNLIALSLGLTPNFKSNFDLAEDAKLQLSKDTYDDDLDNLLAQIGDQYADLFLAAKNLSDAILLSDILRVNTEITKAPLSASMIKRYDEHHQDLTLLKALVRQQLPEKYKEIFFDQSKNGYAGYIDGGASQEEFYKFIKPILEKMDGTEELLVKLNREDLLRKQRTFDNGSIPHQIHLGELHAILRRQEDFYPFLKDNREKIEKILTFRIPYYVGPLARGNSRFAWMTRKSEETITPWNFEEVVDKGASAQSFIERMTNFDKNLPNEKVLPKHSLLYEYFTVYNELTKVKYVTEGMRKPAFLSGEQKKAIVDLLFKTNRKVTVKQLKEDYFKKIECFDSVEISGVEDRFNASLGTYHDLLKIIKDKDFLDNEENEDILEDIVLTLTLFEDREMIEERLKTYAHLFDDKVMKQLKRRRYTGWGRLSRKLINGIRDKQSGKTILDFLKSDGFANRNFMQLIHDDSLTFKEDIQKAQVSGQGDSLHEHIANLAGSPAIKKGILQTVKVVDELVKVMGRHKPENIVIEMARENQTTQKGQKNSRERMKRIEEGIKELGSQILKEHPVENTQLQNEKLYLYYLQNGRDMYVDQELDINRLSDYDVDHIVPQSFLKDDSIDNKVLTRSDKARGKSDNVPSEEVVKKMKNYWRQLLNAKLITQRKFDNLTKAERGGLSELDKAGFIKRQLVETRQITKHVAQILDSRMNTKYDENDKLIREVKVITLKSKLVSDFRKDFQFYKVREINNYHHAHDAYLNAVVGTALIKKYPKLESEFVYGDYKVYDVRKMIAKSEQEIGKATAKYFFYSNIMNFFKTEITLANGEIRKRPLIETNGETGEIVWDKGRDFATVRKVLSMPQVNIVKKTEVQTGGFSKESILPKRNSDKLIARKKDWDPKKYGGFDSPTVAYSVLVVAKVEKGKSKKLKSVKELLGITIMERSSFEKNPIDFLEAKGYKEVKKDLIIKLPKYSLFELENGRKRMLASAGELQKGNELALPSKYVNFLYLASHYEKLKGSPEDNEQKQLFVEQHKHYLDEIIEQISEFSKRVILADANLDKVLSAYNKHRDKPIREQAENIIHLFTLTNLGAPAAFKYFDTTIDRKRYTSTKEVLDATLIHQSITGLYETRIDLSQLGGDGGEAAAKGSSGGGGGMDLLKPLTVERKGVKIKGYWNSQADITCVPKDLLQGEEPVRQQNVTTIHGTQEGDVYYVNLKIDGRRINTEVIGTTLDYAIITPGDVPWILKKPLELTIKLDLEEQQGTLLNNSILSKKGKEELKQLFEKYSALWQSWENQVGHRRIRPHKIATGTVKPTPQKQYHINPKAKPDIQIVINDLLKQGVLIQKESTMNTPVYPVPKPNGRWRMVLDYRAVNKVTPLIAVQNQHSYGILGSLFKGRYKTTIDLSNGFWAHPIVPEDYWITAFTWQGKQYCWTVLPQGFLNSPGLFTGDVVDLLQGIPNVEVYVDDVYISHDSEKEHLEYLDILFNRLKEAGYIISLKKSNIANSIVDFLGFQITNEGRGLTDTFKEKLENITAPTTLKQLQSILGLLNFARNFIPDFTELIAPLYALIPKSTKNYVPWQIEHSTTLETLITKLNGAEYLQGRKGDKTLIMKVNASYTTGYIRYYNEGEKKPISYVSIVFSKTELKFTELEKLLTTVHKGLLKALDLSMGQNIHVYSPIVSMQNIQKTPQTAKKALASRWLSWLSYLEDPRIRFFYDPQMPALKDLPAVDTGKDNKKHPSNFQHIFYTDGSAITSPTKEGHLNAGMGIVYFINKDGNLQKQQEWSISLGNHTAQFAEIAAFEFALKKCLPLGGNILVVTDSNYVAKAYNEELDVWASNGFVNNRKKPLKHISKWKSVADLKRLRPDVVVTHEPGHQKLDSSPHAYGNNLADQLATQASFKVHAGKRTADGSEFEKRTADGSEFESPKKKAKVE

SEQ ID NO: 7338 - protein, 2127 aa, synthetic construct
MPAAKRVKLDGGDKKYSIGLDIGTNSVGWAVITDEYKVPSKKFKVLGNTDRHSIKKNLIGALLFDSGETAEATRLKRTARRRYTRRKNRICYLQEIFSNEMAKVDDSFFHRLEESFLVEEDKKHERHPIFGNIVDEVAYHEKYPTIYHLRKKLVDSTDKADLRLIYLALAHMIKFRGHFLIEGDLNPDNSDVDKLFIQLVQTYNQLFEENPINASGVDAKAILSARLSKSRRLENLIAQLPGEKKNGLFGNLIALSLGLTPNFKSNFDLAEDAKLQLSKDTYDDDLDNLLAQIGDQYADLFLAAKNLSDAILLSDILRVNTEITKAPLSASMIKRYDEHHQDLTLLKALVRQQLPEKYKEIFFDQSKNGYAGYIDGGASQEEFYKFIKPILEKMDGTEELLVKLNREDLLRKQRTFDNGSIPHQIHLGELHAILRRQEDFYPFLKDNREKIEKILTFRIPYYVGPLARGNSRFAWMTRKSEETITPWNFEEVVDKGASAQSFIERMTNFDKNLPNEKVLPKHSLLYEYFTVYNELTKVKYVTEGMRKPAFLSGEQKKAIVDLLFKTNRKVTVKQLKEDYFKKIECFDSVEISGVEDRFNASLGTYHDLLKIIKDKDFLDNEENEDILEDIVLTLTLFEDREMIEERLKTYAHLFDDKVMKQLKRRRYTGWGRLSRKLINGIRDKQSGKTILDFLKSDGFANRNFMQLIHDDSLTFKEDIQKAQVSGQGDSLHEHIANLAGSPAIKKGILQTVKVVDELVKVMGRHKPENIVIEMARENQTTQKGQKNSRERMKRIEEGIKELGSQILKEHPVENTQLQNEKLYLYYLQNGRDMYVDQELDINRLSDYDVDHIVPQSFLKDDSIDNKVLTRSDKARGKSDNVPSEEVVKKMKNYWRQLLNAKLITQRKFDNLTKAERGGLSELDKAGFIKRQLVETRQITKHVAQILDSRMNTKYDENDKLIREVKVITLKSKLVSDFRKDFQFYKVREINNYHHAHDAYLNAVVGTALIKKYPKLESEFVYGDYKVYDVRKMIAKSEQEIGKATAKYFFYSNIMNFFKTEITLANGEIRKRPLIETNGETGEIVWDKGRDFATVRKVLSMPQVNIVKKTEVQTGGFSKESILPKRNSDKLIARKKDWDPKKYGGFDSPTVAYSVLVVAKVEKGKSKKLKSVKELLGITIMERSSFEKNPIDFLEAKGYKEVKKDLIIKLPKYSLFELENGRKRMLASAGELQKGNELALPSKYVNFLYLASHYEKLKGSPEDNEQKQLFVEQHKHYLDEIIEQISEFSKRVILADANLDKVLSAYNKHRDKPIREQAENIIHLFTLTNLGAPAAFKYFDTTIDRKRYTSTKEVLDATLIHQSITGLYETRIDLSQLGGDGGEAAAKGSSGGGGGLLGRDLLTKLKAQIQFSTEGPQVTWEDRPAMCLVLNLEEEYRLHEKPVPPSIDPSWLQLFPMVWAEKAGMGLANQVPPVVVELKSDASPVAVRQYPMSKEAREGIRPHIQRFLDLGILVPCQSPWNTPLLPVKKPGTNDYRPVQDLREVNKRVQDIHPTVPNPYNLLSSLPPSHTWYSVLDLKDAFFCLKLHPNSQPLFAFEWRDPEKGNTGQLTWTRLPQGFKNSPTLFNEALHRDLASFRALNPQVVMLQYVDDLLVAAPTYRDCKEGTRRLLQELSKLGYRVSAKKAQLCREEVTYLGYLLKGGKRWLTPARKATVMKIPTPTTPRQVREFLGTAGFCRLWIPGFASLAAPLYPLTRPKVPFTWTEAHQEAFGRIKEALLSAPALALPDLTKPFALYVDEKEGVARGVLTQTLGPWRRPVAYLSKKLDPVASGWPTCLKAIAAVALLLKDADKLTLGQNVLVIAPHNLESIVRQPPDRWMTNARMTHYQSLLLNERVSFAPPAILNPATLLPVESDDTPIHICSEILAEETGTRPDLRDQPLPGVPAWYTDGSSFIMDGRRQAGAAIVDNKRTVWASNLPEGTSAQKAELIALTQALRLAEGKSINIYTDSRYAFATAHVHGAIYKQRGWLTSAGKDIKNKEEILALLEAIHLPKRVAIIHCPGHQRGTDPVATGNRKADEAAKQAAQSTRILTETTKNAGKRTADGSEFEKRTADGSEFESPKKKAKVE

SEQ ID NO: 7339 - protein, 2218 aa, synthetic construct
MPAAKRVKLDGGDKKYSIGLDIGTNSVGWAVITDEYKVPSKKFKVLGNTDRHSIKKNLIGALLFDSGETAEATRLKRTARRRYTRRKNRICYLQEIFSNEMAKVDDSFFHRLEESFLVEEDKKHERHPIFGNIVDEVAYHEKYPTIYHLRKKLVDSTDKADLRLIYLALAHMIKFRGHFLIEGDLNPDNSDVDKLFIQLVQTYNQLFEENPINASGVDAKAILSARLSKSRRLENLIAQLPGEKKNGLFGNLIALSLGLTPNFKSNFDLAEDAKLQLSKDTYDDDLDNLLAQIGDQYADLFLAAKNLSDAILLSDILRVNTEITKAPLSASMIKRYDEHHQDLTLLKALVRQQLPEKYKEIFFDQSKNGYAGYIDGGASQEEFYKFIKPILEKMDGTEELLVKLNREDLLRKQRTFDNGSIPHQIHLGELHAILRRQEDFYPFLKDNREKIEKILTFRIPYYVGPLARGNSRFAWMTRKSEETITPWNFEEVVDKGASAQSFIERMTNFDKNLPNEKVLPKHSLLYEYFTVYNELTKVKYVTEGMRKPAFLSGEQKKAIVDLLFKTNRKVTVKQLKEDYFKKIECFDSVEISGVEDRFNASLGTYHDLLKIIKDKDFLDNEENEDILEDIVLTLTLFEDREMIEERLKTYAHLFDDKVMKQLKRRRYTGWGRLSRKLINGIRDKQSGKTILDFLKSDGFANRNFMQLIHDDSLTFKEDIQKAQVSGQGDSLHEHIANLAGSPAIKKGILQTVKVVDELVKVMGRHKPENIVIEMARENQTTQKGQKNSRERMKRIEEGIKELGSQILKEHPVENTQLQNEKLYLYYLQNGRDMYVDQELDINRLSDYDVDHIVPQSFLKDDSIDNKVLTRSDKARGKSDNVPSEEVVKKMKNYWRQLLNAKLITQRKFDNLTKAERGGLSELDKAGFIKRQLVETRQITKHVAQILDSRMNTKYDENDKLIREVKVITLKSKLVSDFRKDFQFYKVREINNYHHAHDAYLNAVVGTALIKKYPKLESEFVYGDYKVYDVRKMIAKSEQEIGKATAKYFFYSNIMNFFKTEITLANGEIRKRPLIETNGETGEIVWDKGRDFATVRKVLSMPQVNIVKKTEVQTGGFSKESILPKRNSDKLIARKKDWDPKKYGGFDSPTVAYSVLVVAKVEKGKSKKLKSVKELLGITIMERSSFEKNPIDFLEAKGYKEVKKDLIIKLPKYSLFELENGRKRMLASAGELQKGNELALPSKYVNFLYLASHYEKLKGSPEDNEQKQLFVEQHKHYLDEIIEQISEFSKRVILADANLDKVLSAYNKHRDKPIREQAENIIHLFTLTNLGAPAAFKYFDTTIDRKRYTSTKEVLDATLIHQSITGLYETRIDLSQLGGDGGEAAAKGSSGGGGGTLGDQGSRGSDPLPEPRVTLTVEGIPTEFLVNTGAEHSVLTKPMGKMGSKRTVVAGATGSKVYPWTTKRLLKIGQKQVTHSFLVIPECPAPLLGRDLLTKLKAQIQFSTEGPQVTWEDRPAMCLVLNLEEEYRLHEKPVPPSIDPSWLQLFPMVWAEKAGMGLANQVPPVVVELKSDASPVAVRQYPMSKEAREGIRPHIQRFLDLGILVPCQSPWNTPLLPVKKPGTNDYRPVQDLREVNKRVQDIHPTVPNPYNLLSSLPPSHTWYSVLDLKDAFFCLKLHPNSQPLFAFEWRDPEKGNTGQLTWTRLPQGFKNSPTLFNEALHRDLASFRALNPQVVMLQYVDDLLVAAPTYRDCKEGTRRLLQELSKLGYRVSAKKAQLCREEVTYLGYLLKGGKRWLTPARKATVMKIPTPTTPRQVREFLGKAGFCRLFIPGFASLAAPLYPLTRPKVPFTWTEAHQEAFGRIKEALLSAPALALPDLTKPFALYVDEKEGVARGVLTQTLGPWRRPVAYLSKKLDPVASGWPTCLKAIAAVALLLKDADKLTLGQNVLVIAPHNLESIVRQPPDRWMTNARMTHYQSLLLNERVSFAPPAILNPATLLPVESDDTPIHICSEILAEETGTRPDLRDQPLPGVPAWYTDGSSFIMDGRRQAGAAIVDNKRTVWASNLPEGTSAQKAELIALTQALRLAEGKSINIYTDSRYAFATAHVHGAIYKQRGWLTSAGKDIKNKEEILALLEAIHLPKRVAIIHCPGHQRGTDPVATGNRKADEAAKQAAQSTRILTETTKNAGKRTADGSEFEKRTADGSEFESPKKKAKVE

SEQ ID NO: 7340 - protein, 2096 aa, synthetic construct
MPAAKRVKLDGGDKKYSIGLDIGTNSVGWAVITDEYKVPSKKFKVLGNTDRHSIKKNLIGALLFDSGETAEATRLKRTARRRYTRRKNRICYLQEIFSNEMAKVDDSFFHRLEESFLVEEDKKHERHPIFGNIVDEVAYHEKYPTIYHLRKKLVDSTDKADLRLIYLALAHMIKFRGHFLIEGDLNPDNSDVDKLFIQLVQTYNQLFEENPINASGVDAKAILSARLSKSRRLENLIAQLPGEKKNGLFGNLIALSLGLTPNFKSNFDLAEDAKLQLSKDTYDDDLDNLLAQIGDQYADLFLAAKNLSDAILLSDILRVNTEITKAPLSASMIKRYDEHHQDLTLLKALVRQQLPEKYKEIFFDQSKNGYAGYIDGGASQEEFYKFIKPILEKMDGTEELLVKLNREDLLRKQRTFDNGSIPHQIHLGELHAILRRQEDFYPFLKDNREKIEKILTFRIPYYVGPLARGNSRFAWMTRKSEETITPWNFEEVVDKGASAQSFIERMTNFDKNLPNEKVLPKHSLLYEYFTVYNELTKVKYVTEGMRKPAFLSGEQKKAIVDLLFKTNRKVTVKQLKEDYFKKIECFDSVEISGVEDRFNASLGTYHDLLKIIKDKDFLDNEENEDILEDIVLTLTLFEDREMIEERLKTYAHLFDDKVMKQLKRRRYTGWGRLSRKLINGIRDKQSGKTILDFLKSDGFANRNFMQLIHDDSLTFKEDIQKAQVSGQGDSLHEHIANLAGSPAIKKGILQTVKVVDELVKVMGRHKPENIVIEMARENQTTQKGQKNSRERMKRIEEGIKELGSQILKEHPVENTQLQNEKLYLYYLQNGRDMYVDQELDINRLSDYDVDHIVPQSFLKDDSIDNKVLTRSDKARGKSDNVPSEEVVKKMKNYWRQLLNAKLITQRKFDNLTKAERGGLSELDKAGFIKRQLVETRQITKHVAQILDSRMNTKYDENDKLIREVKVITLKSKLVSDFRKDFQFYKVREINNYHHAHDAYLNAVVGTALIKKYPKLESEFVYGDYKVYDVRKMIAKSEQEIGKATAKYFFYSNIMNFFKTEITLANGEIRKRPLIETNGETGEIVWDKGRDFATVRKVLSMPQVNIVKKTEVQTGGFSKESILPKRNSDKLIARKKDWDPKKYGGFDSPTVAYSVLVVAKVEKGKSKKLKSVKELLGITIMERSSFEKNPIDFLEAKGYKEVKKDLIIKLPKYSLFELENGRKRMLASAGELQKGNELALPSKYVNFLYLASHYEKLKGSPEDNEQKQLFVEQHKHYLDEIIEQISEFSKRVILADANLDKVLSAYNKHRDKPIREQAENIIHLFTLTNLGAPAAFKYFDTTIDRKRYTSTKEVLDATLIHQSITGLYETRIDLSQLGGDGGEAAAKGSSGGGGGTLGIEDEYRLHETSTEPDVSLGSTWLSDFPQAWAETGGMGLAVRQAPLIIPLKATSTPVSIQQYPMSHEARLGIKPHIQRLLDQGILVPCQSPWNTPLLPVKKPGTNDYRPVQDLREVNKRVEDIHPTVPNPYNLLSGLPPSHQWYTVLDLKDAFFCLRLHPTSQPLFAFEWRDPGMGISGQLTWTRLPQGFKNSPTLFNEALHRDLADFRIQHPDLILLQYVDDILLAATSELDCQQGTRALLQTLGDLGYRASAKKAQICQKQVKYLGYLLREGQRWLTEARKETVMGQPVPKTPRQLREFLGTAGFCRLWIPGFAEMAAPLYPLTKPGTLFSWGPDQQKAYQEIKQALLTAPALGLPDLTKPFELFVDEKQGYAKGVLTQKLGPWRRPVAYLSKKLDPVAAGWPPCLRMVAAIAVLTKDAGKLTMGQPLVILAPHAVEALVKQPPDRWLSNARMTHYQAMLLDTDRVQFGPVVALNPATLLPLPEEGAPHDCLEILAETHGTRPDLTDQPIPDADHTWYTDGSSFLQEGQRKAGAAVTTETEVIWAGALPAGTSAQRAELIALTQALKMAEGKRLNVYTDSRYAFATAHIHGEIYRRRGWLTSEGREIKNKSEILALLKALFLPKRLSIIHCLGHQKGDSAEARGNRLADQAAREAAIKTPPDTSTLLAGKRTADGSEFEKRTADGSEFESPKKKAKVE

SEQ ID NO: 7341 - protein, 2096 aa, synthetic construct
MPAAKRVKLDGGDKKYSIGLDIGTNSVGWAVITDEYKVPSKKFKVLGNTDRHSIKKNLIGALLFDSGETAEATRLKRTARRRYTRRKNRICYLQEIFSNEMAKVDDSFFHRLEESFLVEEDKKHERHPIFGNIVDEVAYHEKYPTIYHLRKKLVDSTDKADLRLIYLALAHMIKFRGHFLIEGDLNPDNSDVDKLFIQLVQTYNQLFEENPINASGVDAKAILSARLSKSRRLENLIAQLPGEKKNGLFGNLIALSLGLTPNFKSNFDLAEDAKLQLSKDTYDDDLDNLLAQIGDQYADLFLAAKNLSDAILLSDILRVNTEITKAPLSASMIKRYDEHHQDLTLLKALVRQQLPEKYKEIFFDQSKNGYAGYIDGGASQEEFYKFIKPILEKMDGTEELLVKLNREDLLRKQRTFDNGSIPHQIHLGELHAILRRQEDFYPFLKDNREKIEKILTFRIPYYVGPLARGNSRFAWMTRKSEETITPWNFEEVVDKGASAQSFIERMTNFDKNLPNEKVLPKHSLLYEYFTVYNELTKVKYVTEGMRKPAFLSGEQKKAIVDLLFKTNRKVTVKQLKEDYFKKIECFDSVEISGVEDRFNASLGTYHDLLKIIKDKDFLDNEENEDILEDIVLTLTLFEDREMIEERLKTYAHLFDDKVMKQLKRRRYTGWGRLSRKLINGIRDKQSGKTILDFLKSDGFANRNFMQLIHDDSLTFKEDIQKAQVSGQGDSLHEHIANLAGSPAIKKGILQTVKVVDELVKVMGRHKPENIVIEMARENQTTQKGQKNSRERMKRIEEGIKELGSQILKEHPVENTQLQNEKLYLYYLQNGRDMYVDQELDINRLSDYDVDHIVPQSFLKDDSIDNKVLTRSDKARGKSDNVPSEEVVKKMKNYWRQLLNAKLITQRKFDNLTKAERGGLSELDKAGFIKRQLVETRQITKHVAQILDSRMNTKYDENDKLIREVKVITLKSKLVSDFRKDFQFYKVREINNYHHAHDAYLNAVVGTALIKKYPKLESEFVYGDYKVYDVRKMIAKSEQEIGKATAKYFFYSNIMNFFKTEITLANGEIRKRPLIETNGETGEIVWDKGRDFATVRKVLSMPQVNIVKKTEVQTGGFSKESILPKRNSDKLIARKKDWDPKKYGGFDSPTVAYSVLVVAKVEKGKSKKLKSVKELLGITIMERSSFEKNPIDFLEAKGYKEVKKDLIIKLPKYSLFELENGRKRMLASAGELQKGNELALPSKYVNFLYLASHYEKLKGSPEDNEQKQLFVEQHKHYLDEIIEQISEFSKRVILADANLDKVLSAYNKHRDKPIREQAENIIHLFTLTNLGAPAAFKYFDTTIDRKRYTSTKEVLDATLIHQSITGLYETRIDLSQLGGDGGEAAAKGSSGGGGGTLGIEDEYRLHETSTEPDVSLGSTWLSDFPQAWAETGGMGLAVRQAPLIIPLKATSTPVSIQQYPMSHEARLGIKPHIQRLLDQGILVPCQSPWNTPLLPVKKPGTNDYRPVQDLREVNKRVEDIHPTVPNPYNLLSGLPPSHQWYTVLDLKDAFFCLRLHPTSQPLFAFEWRDPGMGISGQLTWTRLPQGFKNSPTLFDEALHRDLADFRIQHPDLILLQYVDDILLAATSELDCQQGTRALLQTLGDLGYRASAKKAQICQKQVKYLGYLLREGQRWLTEARKETVMGQPVPKTPRQLREFLGTAGFCRLWIPGFAEMAAPLYPLTKTGTLFSWGPDQQKAYQEIKQALLTAPALGLPDLTKPFELFVDEKQGYAKGVLTQKLGPWRRPVAYLSKKLDPVAAGWPPCLRMVAAIAVLTKDAGKLTMGQPLVILAPHAVEALVKQPPDRWLSNARMTHYQAMLLDTDRVQFGPVVALNPATLLPLPEEGAPHDCLEILAETHGTRPDLTDQPIPDADHTWYTDGSSFLQEGQRKAGAAVTTETEVIWAGALPAGTSAQRAELIALTQALKMAEGKRLNVYTDSRYAFATAHIHGEIYRRRGLLTSEGREIKNKSEILALLKALFLPKRLSIIHCLGHQKGDSAEARGNRLADQAAREAAIKTPPDTSTLLAGKRTADGSEFEKRTADGSEFESPKKKAKVE

SEQ ID NO: 7342 - protein, 2096 aa, synthetic construct
MPAAKRVKLDGGDKKYSIGLDIGTNSVGWAVITDEYKVPSKKFKVLGNTDRHSIKKNLIGALLFDSGETAEATRLKRTARRRYTRRKNRICYLQEIFSNEMAKVDDSFFHRLEESFLVEEDKKHERHPIFGNIVDEVAYHEKYPTIYHLRKKLVDSTDKADLRLIYLALAHMIKFRGHFLIEGDLNPDNSDVDKLFIQLVQTYNQLFEENPINASGVDAKAILSARLSKSRRLENLIAQLPGEKKNGLFGNLIALSLGLTPNFKSNFDLAEDAKLQLSKDTYDDDLDNLLAQIGDQYADLFLAAKNLSDAILLSDILRVNTEITKAPLSASMIKRYDEHHQDLTLLKALVRQQLPEKYKEIFFDQSKNGYAGYIDGGASQEEFYKFIKPILEKMDGTEELLVKLNREDLLRKQRTFDNGSIPHQIHLGELHAILRRQEDFYPFLKDNREKIEKILTFRIPYYVGPLARGNSRFAWMTRKSEETITPWNFEEVVDKGASAQSFIERMTNFDKNLPNEKVLPKHSLLYEYFTVYNELTKVKYVTEGMRKPAFLSGEQKKAIVDLLFKTNRKVTVKQLKEDYFKKIECFDSVEISGVEDRFNASLGTYHDLLKIIKDKDFLDNEENEDILEDIVLTLTLFEDREMIEERLKTYAHLFDDKVMKQLKRRRYTGWGRLSRKLINGIRDKQSGKTILDFLKSDGFANRNFMQLIHDDSLTFKEDIQKAQVSGQGDSLHEHIANLAGSPAIKKGILQTVKVVDELVKVMGRHKPENIVIEMARENQTTQKGQKNSRERMKRIEEGIKELGSQILKEHPVENTQLQNEKLYLYYLQNGRDMYVDQELDINRLSDYDVDHIVPQSFLKDDSIDNKVLTRSDKARGKSDNVPSEEVVKKMKNYWRQLLNAKLITQRKFDNLTKAERGGLSELDKAGFIKRQLVETRQITKHVAQILDSRMNTKYDENDKLIREVKVITLKSKLVSDFRKDFQFYKVREINNYHHAHDAYLNAVVGTALIKKYPKLESEFVYGDYKVYDVRKMIAKSEQEIGKATAKYFFYSNIMNFFKTEITLANGEIRKRPLIETNGETGEIVWDKGRDFATVRKVLSMPQVNIVKKTEVQTGGFSKESILPKRNSDKLIARKKDWDPKKYGGFDSPTVAYSVLVVAKVEKGKSKKLKSVKELLGITIMERSSFEKNPIDFLEAKGYKEVKKDLIIKLPKYSLFELENGRKRMLASAGELQKGNELALPSKYVNFLYLASHYEKLKGSPEDNEQKQLFVEQHKHYLDEIIEQISEFSKRVILADANLDKVLSAYNKHRDKPIREQAENIIHLFTLTNLGAPAAFKYFDTTIDRKRYTSTKEVLDATLIHQSITGLYETRIDLSQLGGDGGEAAAKGSSGGGGGTLNIEDEYRLHETSKEPDVSLGSTWLSDFPQAWAETGGMGLAVRQAPLIIPLKATSTPVSIKQYPMSQEARLGIKPHIQRLLDQGILVPCQSPWNTPLLPVKKPGTNDYRPVQDLREVNKRVEDIHPTVPNPYNLLSGLPPSHQWYTVLDLKDAFFCLRLHPTSQPLFAFEWRDPEMGISGQLTWTRLPQGFKNSPTLFNEALHRDLAGFRIQHPDLILLQYVDDLLLAATSELDCQQGTRALLQTLGDLGYRASAKKAQICQKQVKYLGYLLKEGQRWLTEARKETVMGQPIPKTPRQLREFLGTAGFCRLWIPGFAEMAAPLYPLTKPGTLFNWGPDQQKAFQEIKQALLTAPALGLPDLTKPFELFVDEKQGYAKGVLTQKLGPWRRPVAYLSKKLDPVAAGWPPCLRMVAAIAVLTKDAGKLTMGQPLVILAPHAVEALVKQPPDRWLSNARMTHYQALLLDTDRVQFGPVVALNPATLLPLPEEGLQHDCLDILAEAHGTRSDLMDQPLPDADHTWYTDGSSFLQEGQRKAGAAVTTETEVIWARALPAGTSAQRAELIALTQALKMAEGKKLNVYTDSRYAFATAHIHGEIYRRRGWLTSEGKEIKNKDEILALLKALFLPKRLSIIHCPGHQKGNSAEARGNRMADQAAREVATRETPETSTLLAGKRTADGSEFEKRTADGSEFESPKKKAKVE

SEQ ID NO: 7343 - protein, 2096 aa, synthetic construct
MPAAKRVKLDGGDKKYSIGLDIGTNSVGWAVITDEYKVPSKKFKVLGNTDRHSIKKNLIGALLFDSGETAEATRLKRTARRRYTRRKNRICYLQEIFSNEMAKVDDSFFHRLEESFLVEEDKKHERHPIFGNIVDEVAYHEKYPTIYHLRKKLVDSTDKADLRLIYLALAHMIKFRGHFLIEGDLNPDNSDVDKLFIQLVQTYNQLFEENPINASGVDAKAILSARLSKSRRLENLIAQLPGEKKNGLFGNLIALSLGLTPNFKSNFDLAEDAKLQLSKDTYDDDLDNLLAQIGDQYADLFLAAKNLSDAILLSDILRVNTEITKAPLSASMIKRYDEHHQDLTLLKALVRQQLPEKYKEIFFDQSKNGYAGYIDGGASQEEFYKFIKPILEKMDGTEELLVKLNREDLLRKQRTFDNGSIPHQIHLGELHAILRRQEDFYPFLKDNREKIEKILTFRIPYYVGPLARGNSRFAWMTRKSEETITPWNFEEVVDKGASAQSFIERMTNFDKNLPNEKVLPKHSLLYEYFTVYNELTKVKYVTEGMRKPAFLSGEQKKAIVDLLFKTNRKVTVKQLKEDYFKKIECFDSVEISGVEDRFNASLGTYHDLLKIIKDKDFLDNEENEDILEDIVLTLTLFEDREMIEERLKTYAHLFDDKVMKQLKRRRYTGWGRLSRKLINGIRDKQSGKTILDFLKSDGFANRNFMQLIHDDSLTFKEDIQKAQVSGQGDSLHEHIANLAGSPAIKKGILQTVKVVDELVKVMGRHKPENIVIEMARENQTTQKGQKNSRERMKRIEEGIKELGSQILKEHPVENTQLQNEKLYLYYLQNGRDMYVDQELDINRLSDYDVDHIVPQSFLKDDSIDNKVLTRSDKARGKSDNVPSEEVVKKMKNYWRQLLNAKLITQRKFDNLTKAERGGLSELDKAGFIKRQLVETRQITKHVAQILDSRMNTKYDENDKLIREVKVITLKSKLVSDFRKDFQFYKVREINNYHHAHDAYLNAVVGTALIKKYPKLESEFVYGDYKVYDVRKMIAKSEQEIGKATAKYFFYSNIMNFFKTEITLANGEIRKRPLIETNGETGEIVWDKGRDFATVRKVLSMPQVNIVKKTEVQTGGFSKESILPKRNSDKLIARKKDWDPKKYGGFDSPTVAYSVLVVAKVEKGKSKKLKSVKELLGITIMERSSFEKNPIDFLEAKGYKEVKKDLIIKLPKYSLFELENGRKRMLASAGELQKGNELALPSKYVNFLYLASHYEKLKGSPEDNEQKQLFVEQHKHYLDEIIEQISEFSKRVILADANLDKVLSAYNKHRDKPIREQAENIIHLFTLTNLGAPAAFKYFDTTIDRKRYTSTKEVLDATLIHQSITGLYETRIDLSQLGGDGGEAAAKGSSGGGGGTLNIEDEHRLHETSKEPDVSLGSTWLSDFPQAWAETGGMGLAVRQAPLIIPLKATSTPVSIKQYPMSQEARLGIKPHIQRLLDQGILVPCQSPWNTPLLPVKKPGTNDYRPVQDLREVNKRVEDIHPTVPNPYNLLSGLPPSHQWYTVLDLKDAFFCLRLHPTSQPLFAFEWRDPEMGISGQLTWTRLPQGFKNSPTLFNEALHRDLADFRIQHPDLILLQYVDDLLLAATSELDCQQGTRALLQTLGNLGYRASAKKAQICQKQVKYLGYLLKEGQRWLTEARKETVMGQPTPKTPRQLREFLGTAGFCRLWIPGFAEMAAPLYPLTKPGTLFNWGPDQQKAYQEIKQALLTAPALGLPDLTKPFELFVDEKQGYAKGVLTQKLGPWRRPVAYLSKKLDPVAAGWPPCLRMVAAIAVLTKDAGKLTMGQPLVILAPHAVEALVKQPPDRWLSNARMTHYQALLLDTDRVQFGPVVALNPATLLPLPEEGLQHNCLDILAEAHGTRPDLTDQPLPDADHTWYTDGSSLLQEGQRKAGAAVTTETEVIWAKALPAGTSAQRAELIALTQALKMAEGKKLNVYTDSRYAFATAHIHGEIYRRRGWLTSEGKEIKNKDEILALLKALFLPKRLSIIHCPGHQKGHSAEARGNRMADQAARKAAITETPDTSTLLAGKRTADGSEFEKRTADGSEFESPKKKAKVE

SEQ ID NO: 7344 - protein, 2116 aa, synthetic construct
MPAAKRVKLDGGDKKYSIGLDIGTNSVGWAVITDEYKVPSKKFKVLGNTDRHSIKKNLIGALLFDSGETAEATRLKRTARRRYTRRKNRICYLQEIFSNEMAKVDDSFFHRLEESFLVEEDKKHERHPIFGNIVDEVAYHEKYPTIYHLRKKLVDSTDKADLRLIYLALAHMIKFRGHFLIEGDLNPDNSDVDKLFIQLVQTYNQLFEENPINASGVDAKAILSARLSKSRRLENLIAQLPGEKKNGLFGNLIALSLGLTPNFKSNFDLAEDAKLQLSKDTYDDDLDNLLAQIGDQYADLFLAAKNLSDAILLSDILRVNTEITKAPLSASMIKRYDEHHQDLTLLKALVRQQLPEKYKEIFFDQSKNGYAGYIDGGASQEEFYKFIKPILEKMDGTEELLVKLNREDLLRKQRTFDNGSIPHQIHLGELHAILRRQEDFYPFLKDNREKIEKILTFRIPYYVGPLARGNSRFAWMTRKSEETITPWNFEEVVDKGASAQSFIERMTNFDKNLPNEKVLPKHSLLYEYFTVYNELTKVKYVTEGMRKPAFLSGEQKKAIVDLLFKTNRKVTVKQLKEDYFKKIECFDSVEISGVEDRFNASLGTYHDLLKIIKDKDFLDNEENEDILEDIVLTLTLFEDREMIEERLKTYAHLFDDKVMKQLKRRRYTGWGRLSRKLINGIRDKQSGKTILDFLKSDGFANRNFMQLIHDDSLTFKEDIQKAQVSGQGDSLHEHIANLAGSPAIKKGILQTVKVVDELVKVMGRHKPENIVIEMARENQTTQKGQKNSRERMKRIEEGIKELGSQILKEHPVENTQLQNEKLYLYYLQNGRDMYVDQELDINRLSDYDVDHIVPQSFLKDDSIDNKVLTRSDKARGKSDNVPSEEVVKKMKNYWRQLLNAKLITQRKFDNLTKAERGGLSELDKAGFIKRQLVETRQITKHVAQILDSRMNTKYDENDKLIREVKVITLKSKLVSDFRKDFQFYKVREINNYHHAHDAYLNAVVGTALIKKYPKLESEFVYGDYKVYDVRKMIAKSEQEIGKATAKYFFYSNIMNFFKTEITLANGEIRKRPLIETNGETGEIVWDKGRDFATVRKVLSMPQVNIVKKTEVQTGGFSKESILPKRNSDKLIARKKDWDPKKYGGFDSPTVAYSVLVVAKVEKGKSKKLKSVKELLGITIMERSSFEKNPIDFLEAKGYKEVKKDLIIKLPKYSLFELENGRKRMLASAGELQKGNELALPSKYVNFLYLASHYEKLKGSPEDNEQKQLFVEQHKHYLDEIIEQISEFSKRVILADANLDKVLSAYNKHRDKPIREQAENIIHLFTLTNLGAPAAFKYFDTTIDRKRYTSTKEVLDATLIHQSITGLYETRIDLSQLGGDGGEAAAKGSSGGGGGVQEISDSRPMLHIYLNGRRFLGLLDTGADKTCIAGRDWPANWPIHQTESSLQGLGMACGVARSSQPLRWQHEDKSGIIHPFVIPTLPFTLWGRDIMKDIKVRLMTDSPDDSQDLMIGAIESNLFADQISWKSDQPVWLNQWPLKQEKLQALQQLVTEQLQLGHLEESNSPWNTPVFVIKKKSGKWRLLQDLRAVNATMHDMGALQPGLPSPVAVPKGWEIIIIDLQDCFFNIKLHPEDCKRFAFSVPSPNFKRPYQRFQWKVLPQGMKNSPTLCQKFVDKAILTVRDKYQDSYIVHYMDDILLAHPSRSIVDEILTSMIQALNKHGLVVSTEKIQKYDNLKYLGTHIQGDSVSYQKLQIRTDKLRTLNDFQKLLGNINWIRPFLKLTTGELKPLFEILNGDSNPISTRKLTPEACKALQLMNERLSTARVKRLDLSQPWSLCILKTEYTPTACLWQDGVVEWIHLPHISPKVITPYDIFCTQLIIKGRHRSKELFSKDPDYIVVPYTKVQFDLLLQEKEDWPISLLGFLGEVHFHLPKDPLLTFTLQTAIIFPHMTSTTPLEKGIVIFTDGSANGRSVTYIQGREPIIKENTQNTAQQAEIVAVITAFEEVSQPFNLYTDSKYVTGLFPEIETATLSPRTKIYTELKHLQRLIHKRQEKFYIGHIRGHTGLPGPLAQGNAYADSLTRILTAAGKRTADGSEFEKRTADGSEFESPKKKAKVE

SEQ ID NO: 7345 - protein, 2088 aa, synthetic construct
MPAAKRVKLDGGDKKYSIGLDIGTNSVGWAVITDEYKVPSKKFKVLGNTDRHSIKKNLIGALLFDSGETAEATRLKRTARRRYTRRKNRICYLQEIFSNEMAKVDDSFFHRLEESFLVEEDKKHERHPIFGNIVDEVAYHEKYPTIYHLRKKLVDSTDKADLRLIYLALAHMIKFRGHFLIEGDLNPDNSDVDKLFIQLVQTYNQLFEENPINASGVDAKAILSARLSKSRRLENLIAQLPGEKKNGLFGNLIALSLGLTPNFKSNFDLAEDAKLQLSKDTYDDDLDNLLAQIGDQYADLFLAAKNLSDAILLSDILRVNTEITKAPLSASMIKRYDEHHQDLTLLKALVRQQLPEKYKEIFFDQSKNGYAGYIDGGASQEEFYKFIKPILEKMDGTEELLVKLNREDLLRKQRTFDNGSIPHQIHLGELHAILRRQEDFYPFLKDNREKIEKILTFRIPYYVGPLARGNSRFAWMTRKSEETITPWNFEEVVDKGASAQSFIERMTNFDKNLPNEKVLPKHSLLYEYFTVYNELTKVKYVTEGMRKPAFLSGEQKKAIVDLLFKTNRKVTVKQLKEDYFKKIECFDSVEISGVEDRFNASLGTYHDLLKIIKDKDFLDNEENEDILEDIVLTLTLFEDREMIEERLKTYAHLFDDKVMKQLKRRRYTGWGRLSRKLINGIRDKQSGKTILDFLKSDGFANRNFMQLIHDDSLTFKEDIQKAQVSGQGDSLHEHIANLAGSPAIKKGILQTVKVVDELVKVMGRHKPENIVIEMARENQTTQKGQKNSRERMKRIEEGIKELGSQILKEHPVENTQLQNEKLYLYYLQNGRDMYVDQELDINRLSDYDVDHIVPQSFLKDDSIDNKVLTRSDKARGKSDNVPSEEVVKKMKNYWRQLLNAKLITQRKFDNLTKAERGGLSELDKAGFIKRQLVETRQITKHVAQILDSRMNTKYDENDKLIREVKVITLKSKLVSDFRKDFQFYKVREINNYHHAHDAYLNAVVGTALIKKYPKLESEFVYGDYKVYDVRKMIAKSEQEIGKATAKYFFYSNIMNFFKTEITLANGEIRKRPLIETNGETGEIVWDKGRDFATVRKVLSMPQVNIVKKTEVQTGGFSKESILPKRNSDKLIARKKDWDPKKYGGFDSPTVAYSVLVVAKVEKGKSKKLKSVKELLGITIMERSSFEKNPIDFLEAKGYKEVKKDLIIKLPKYSLFELENGRKRMLASAGELQKGNELALPSKYVNFLYLASHYEKLKGSPEDNEQKQLFVEQHKHYLDEIIEQISEFSKRVILADANLDKVLSAYNKHRDKPIREQAENIIHLFTLTNLGAPAAFKYFDTTIDRKRYTSTKEVLDATLIHQSITGLYETRIDLSQLGGDGGEAAAKGSSGGGGGLDDEYRLYSPLVKPDQNIQFWLEQFPQAWAETAGMGLAKQVPPQVIQLKASATPVSVRQYPLSKEAQEGIRPHVQRLIQQGILVPVQSPWNTPLLPVRKPGTNDYRPVQDLREVNKRVQDIHPTVPNPYNLLCALPPQRSWYTVLDLKDAFFCLRLHPTSQPLFAFEWRDPGTGRTGQLTWTRLPQGFKNSPTIFNEALHRDLANFRIQHPQVTLLQYVDDLLLAGATKQDCLEGTKALLLELSDLGYRASAKKAQICRREVTYLGYSLRDGQRWLTEARKKTVVQIPAPTTAKQVREFLGKAGFCRLFIPGFATLAAPLYPLTKPKGEFSWAPEHQKAFDAIKKALLSAPALALPDVTKPFTLYVDERKGVARGVLTQTLGPWRRPVAYLSKKLDPVASGWPVCLKAIAAVAILVKDADKLTLGQNITVIAPHALENIVRQPPDRWMTNARMTHYQSLLLTERVTFAPPAALNPATLLPEETDEPVTHDCHQLLIEETGVRKDLTDIPLTGEVLTWFTDGSSYVVEGKRMAGAAVVDGTRTIWASSLPEGTSAQKAELMALTQALRLAEGKSINIYTDSRYAFATAHVHGAIYKQRGWLTSAGREIKNKEEILSLLEALHLPKRLAIIHCPGHQKAKDPISRGNQMADRVAKQAAQGVNLLPAGKRTADGSEFEKRTADGSEFESPKKKAKVE

SEQ ID NO: 7346 - protein, 2088 aa, synthetic construct; identical to SEQ ID NO: 7345

SEQ ID NO: 7347 - protein, 2087 aa, synthetic construct
MPAAKRVKLDGGDKKYSIGLDIGTNSVGWAVITDEYKVPSKKFKVLGNTDRHSIKKNLIGALLFDSGETAEATRLKRTARRRYTRRKNRICYLQEIFSNEMAKVDDSFFHRLEESFLVEEDKKHERHPIFGNIVDEVAYHEKYPTIYHLRKKLVDSTDKADLRLIYLALAHMIKFRGHFLIEGDLNPDNSDVDKLFIQLVQTYNQLFEENPINASGVDAKAILSARLSKSRRLENLIAQLPGEKKNGLFGNLIALSLGLTPNFKSNFDLAEDAKLQLSKDTYDDDLDNLLAQIGDQYADLFLAAKNLSDAILLSDILRVNTEITKAPLSASMIKRYDEHHQDLTLLKALVRQQLPEKYKEIFFDQSKNGYAGYIDGGASQEEFYKFIKPILEKMDGTEELLVKLNREDLLRKQRTFDNGSIPHQIHLGELHAILRRQEDFYPFLKDNREKIEKILTFRIPYYVGPLARGNSRFAWMTRKSEETITPWNFEEVVDKGASAQSFIERMTNFDKNLPNEKVLPKHSLLYEYFTVYNELTKVKYVTEGMRKPAFLSGEQKKAIVDLLFKTNRKVTVKQLKEDYFKKIECFDSVEISGVEDRFNASLGTYHDLLKIIKDKDFLDNEENEDILEDIVLTLTLFEDREMIEERLKTYAHLFDDKVMKQLKRRRYTGWGRLSRKLINGIRDKQSGKTILDFLKSDGFANRNFMQLIHDDSLTFKEDIQKAQVSGQGDSLHEHIANLAGSPAIKKGILQTVKVVDELVKVMGRHKPENIVIEMARENQTTQKGQKNSRERMKRIEEGIKELGSQILKEHPVENTQLQNEKLYLYYLQNGRDMYVDQELDINRLSDYDVDHIVPQSFLKDDSIDNKVLTRSDKARGKSDNVPSEEVVKKMKNYWRQLLNAKLITQRKFDNLTKAERGGLSELDKAGFIKRQLVETRQITKHVAQILDSRMNTKYDENDKLIREVKVITLKSKLVSDFRKDFQFYKVREINNYHHAHDAYLNAVVGTALIKKYPKLESEFVYGDYKVYDVRKMIAKSEQEIGKATAKYFFYSNIMNFFKTEITLANGEIRKRPLIETNGETGEIVWDKGRDFATVRKVLSMPQVNIVKKTEVQTGGFSKESILPKRNSDKLIARKKDWDPKKYGGFDSPTVAYSVLVVAKVEKGKSKKLKSVKELLGITIMERSSFEKNPIDFLEAKGYKEVKKDLIIKLPKYSLFELENGRKRMLASAGELQKGNELALPSKYVNFLYLASHYEKLKGSPEDNEQKQLFVEQHKHYLDEIIEQISEFSKRVILADANLDKVLSAYNKHRDKPIREQAENIIHLFTLTNLGAPAAFKYFDTTIDRKRYTSTKEVLDATLIHQSITGLYETRIDLSQLGGDGGEAAAKGSSGGGGGIPWLMKKPLQLTTLVPLQEYEERLLKQTMLTGSYKEKLQSLFLKYDALWQHWENQVGHRRIKPHHIATGTVNPRPQKQYPINPKAKASIQTVINDLLKQGVLIQQNSIMNTPVYPVPKPDGKWRMVLDYREVNKTIPLIAAQNQHSAGILSSIFRGKYKTTLDLSNGFWAHSITPESYWLTAFTWLGQQYCWTRLPQGFLNSPALFNADVVDLLKEVPNVQVYVDDIYISHDDPREHLEQLEKVFSLLLNAGYVVSLKKSEIAQHEVEFLGFNITKEGRGLTETFKQKLLNITPPRDLKQLQSILGKLNFARNFIPNFSELVKPLYNIIATAPGKYITWTTDNSQQLQNIISMLNSAENLEERNPEVRLIMKVNTSPSAGYIRFYNEFAKRPIMYLNYVYTKAEVKFTNTEKLLTTIHKGLIKALDLGMGQEILVYSPIVSMTKIQKTPLPERKALPIRWITWMSYLEDPRIQFHYDKTLPELQQVPTVTDDIIAKIKHPSEFSMVFYTDGSAIKHPNVNKSHNAGMGIAQVQFKPEFTVINTWSIPLGDHTAQLAEVAAVEFACKKALKIDGPVLIVTDSFYVAESVNKELPYWQSNGFFNNKKKPLKHVSKWKSIADCIQLKPDIIIIHEKGHQPTASTFHTEGNNLADKLATQGSYVVNAGKRTADGSEFEKRTADGSEFESPKKKAKVE

SEQ ID NO: 7348 - protein, 2094 aa, synthetic construct
MPAAKRVKLDGGDKKYSIGLDIGTNSVGWAVITDEYKVPSKKFKVLGNTDRHSIKKNLIGALLFDSGETAEATRLKRTARRRYTRRKNRICYLQEIFSNEMAKVDDSFFHRLEESFLVEEDKKHERHPIFGNIVDEVAYHEKYPTIYHLRKKLVDSTDKADLRLIYLALAHMIKFRGHFLIEGDLNPDNSDVDKLFIQLVQTYNQLFEENPINASGVDAKAILSARLSKSRRLENLIAQLPGEKKNGLFGNLIALSLGLTPNFKSNFDLAEDAKLQLSKDTYDDDLDNLLAQIGDQYADLFLAAKNLSDAILLSDILRVNTEITKAPLSASMIKRYDEHHQDLTLLKALVRQQLPEKYKEIFFDQSKNGYAGYIDGGASQEEFYKFIKPILEKMDGTEELLVKLNREDLLRKQRTFDNGSIPHQIHLGELHAILRRQEDFYPFLKDNREKIEKILTFRIPYYVGPLARGNSRFAWMTRKSEETITPWNFEEVVDKGASAQSFIERMTNFDKNLPNEKVLPKHSLLYEYFTVYNELTKVKYVTEGMRKPAFLSGEQKKAIVDLLFKTNRKVTVKQLKEDYFKKIECFDSVEISGVEDRFNASLGTYHDLLKIIKDKDFLDNEENEDILEDIVLTLTLFEDREMIEERLKTYAHLFDDKVMKQLKRRRYTGWGRLSRKLINGIRDKQSGKTILDFLKSDGFANRNFMQLIHDDSLTFKEDIQKAQVSGQGDSLHEHIANLAGSPAIKKGILQTVKVVDELVKVMGRHKPENIVIEMARENQTTQKGQKNSRERMKRIEEGIKELGSQILKEHPVENTQLQNEKLYLYYLQNGRDMYVDQELDINRLSDYDVDHIVPQSFLKDDSIDNKVLTRSDKARGKSDNVPSEEVVKKMKNYWRQLLNAKLITQRKFDNLTKAERGGLSELDKAGFIKRQLVETRQITKHVAQILDSRMNTKYDENDKLIREVKVITLKSKLVSDFRKDFQFYKVREINNYHHAHDAYLNAVVGTALIKKYPKLESEFVYGDYKVYDVRKMIAKSEQEIGKATAKYFFYSNIMNFFKTEITLANGEIRKRPLIETNGETGEIVWDKGRDFATVRKVLSMPQVNIVKKTEVQTGGFSKESILPKRNSDKLIARKKDWDPKKYGGFDSPTVAYSVLVVAKVEKGKSKKLKSVKELLGITIMERSSFEKNPIDFLEAKGYKEVKKDLIIKLPKYSLFELENGRKRMLASAGELQKGNELALPSKYVNFLYLASHYEKLKGSPEDNEQKQLFVEQHKHYLDEIIEQISEFSKRVILADANLDKVLSAYNKHRDKPIREQAENIIHLFTLTNLGAPAAFKYFDTTIDRKRYTSTKEVLDATLIHQSITGLYETRIDLSQLGGDGGEAAAKGSSGGGGGVLNLEEEYRLHEKPVPSSIDPSWLQLFPTVWAERAGMGLANQVPPVVVELRSGASPVAVRQYPMSKEAREGIRPHIQRFLDLGVLVPCQSPWNTPLLPVKKPGTNDYRPVQDLREINKRVQDIHPTVPNPYNLLSSLPPSHTWYSVLDLKDAFFCLKLHPNSQPLFAFEWRDPEKGNTGQLTWTRLPQGFKNSPTLFDEALHRDLAPFRALNPQVVLLQYVDDLLVAAPTYRDCKEGTQKLLQELSKLGYRVSAKKAQLCQKEVTYLGYLLKEGKRWLTPARKATVMKIPPPTTPRQVREFLGTAGFCRLWIPGFASLAAPLYPLTKESIPFIWTEEHQKAFDRIKEALLSAPALALPDLTKPFTLYVDERAGVARGVLTQTLGPWRRPVAYLSKKLDPVASGWPTCLKAVAAVALLLKDADKLTLGQNVTVIASHSLESIVRQPPDRWMTNARMTHYQSLLLNERVSFAPPAVLNPATLLPVESEATPVHRCSEILAEETGTRRDLKDQPLPGVPAWYTDGSSFIAEGKRRAGAAIVDGKRTVWASSLPEGTSAQKAELVALTQALRLAEGKDINIYTDSRYAFATAHIHGAIYKQRGLLTSAGKDIKNKEEILALLEAIHLPKRVAIIHCPGHQKGNDPVATGNRRADEAAKQAALSTRVLAETTKPAGKRTADGSEFEKRTADGSEFESPKKKAKVE

SEQ ID NO: 7349 - protein, 2094 aa, synthetic construct
MPAAKRVKLDGGDKKYSIGLDIGTNSVGWAVITDEYKVPSKKFKVLGNTDRHSIKKNLIGALLFDSGETAEATRLKRTARRRYTRRKNRICYLQEIFSNEMAKVDDSFFHRLEESFLVEEDKKHERHPIFGNIVDEVAYHEKYPTIYHLRKKLVDSTDKADLRLIYLALAHMIKFRGHFLIEGDLNPDNSDVDKLFIQLVQTYNQLFEENPINASGVDAKAILSARLSKSRRLENLIAQLPGEKKNGLFGNLIALSLGLTPNFKSNFDLAEDAKLQLSKDTYDDDLDNLLAQIGDQYADLFLAAKNLSDAILLSDILRVNTEITKAPLSASMIKRYDEHHQDLTLLKALVRQQLPEKYKEIFFDQSKNGYAGYIDGGASQEEFYKFIKPILEKMDGTEELLVKLNREDLLRKQRTFDNGSIPHQIHLGELHAILRRQEDFYPFLKDNREKIEKILTFRIPYYVGPLARGNSRFAWMTRKSEETITPWNFEEVVDKGASAQSFIERMTNFDKNLPNEKVLPKHSLLYEYFTVYNELTKVKYVTEGMRKPAFLSGEQKKAIVDLLFKTNRKVTVKQLKEDYFKKIECFDSVEISGVEDRFNASLGTYHDLLKIIKDKDFLDNEENEDILEDIVLTLTLFEDREMIEERLKTYAHLFDDKVMKQLKRRRYTGWGRLSRKLINGIRDKQSGKTILDFLKSDGFANRNFMQLIHDDSLTFKEDIQKAQVSGQGDSLHEHIANLAGSPAIKKGILQTVKVVDELVKVMGRHKPENIVIEMARENQTTQKGQKNSRERMKRIEEGIKELGSQILKEHPVENTQLQNEKLYLYYLQNGRDMYVDQELDINRLSDYDVDHIVPQSFLKDDSIDNKVLTRSDKARGKSDNVPSEEVVKKMKNYWRQLLNAKLITQRKFDNLTKAERGGLSELDKAGFIKRQLVETRQITKHVAQILDSRMNTKYDENDKLIREVKVITLKSKLVSDFRKDFQFYKVREINNYHHAHDAYLNAVVGTALIKKYPKLESEFVYGDYKVYDVRKMIAKSEQEIGKATAKYFFYSNIMNFFKTEITLANGEIRKRPLIETNGETGEIVWDKGRDFATVRKVLSMPQVNIVKKTEVQTGGFSKESILPKRNSDKLIARKKDWDPKKYGGFDSPTVAYSVLVVAKVEKGKSKKLKSVKELLGITIMERSSFEKNPIDFLEAKGYKEVKKDLIIKLPKYSLFELENGRKRMLASAGELQKGNELALPSKYVNFLYLASHYEKLKGSPEDNEQKQLFVEQHKHYLDEIIEQISEFSKRVILADANLDKVLSAYNKHRDKPIREQAENIIHLFTLTNLGAPAAFKYFDTTIDRKRYTSTKEVLDATLIHQSITGLYETRIDLSQLGGDGGEAAAKGSSGGGGGVLNLEEEYRLHEKPVPSSIDPSWLQLFPTVWAERAGMGLANQVPPVVVELRSGASPVAVRQYPMSKEAREGIRPHIQRFLDLGVLVPCQSPWNTPLLPVKKPGTNDYRPVQDLREINKRVQDIHPTVPNPYNLLSSLPPSHTWYSVLDLKDAFFCLKLHPNSQPLFAFEWRDPEKGNTGQLTWTRLPQGFKNSPTLFNEALHRDLAPFRALNPQVVLLQYVDDLLVAAPTYRDCKEGTQKLLQELSKLGYRVSAKKAQLCQKEVTYLGYLLKEGKRWLTPARKATVMKIPPPTTPRQVREFLGTAGFCRLWIPGFASLAAPLYPLTKPSIPFIWTEEHQKAFDRIKEALLSAPALALPDLTKPFTLYVDERAGVARGVLTQTLGPWRRPVAYLSKKLDPVASGWPTCLKAVAAVALLLKDADKLTLGQNVTVIASHSLESIVRQPPDRWMTNARMTHYQSLLLNERVSFAPPAVLNPATLLPVESEATPVHRCSEILAEETGTRRDLKDQPLPGVPAWYTDGSSFIAEGKRRAGAAIVDGKRTVWASSLPEGTSAQKAELVALTQALRLAEGKDINIYTDSRYAFATAHIHGAIYKQRGWLTSAGKDIKNKEEILALLEAIHLPKRVAIIHCPGHQKGNDPVATGNRRADEAAKQAALSTRVLAETTKPAGKRTADGSEFEKRTADGSEFESPKKKAKVE

SEQ ID NO: 7350 - protein, 2096 aa, synthetic construct
MPAAKRVKLDGGDKKYSIGLDIGTNSVGWAVITDEYKVPSKKFKVLGNTDRHSIKKNLIGALLFDSGETAEATRLKRTARRRYTRRKNRICYLQEIFSNEMAKVDDSFFHRLEESFLVEEDKKHERHPIFGNIVDEVAYHEKYPTIYHLRKKLVDSTDKADLRLIYLALAHMIKFRGHFLIEGDLNPDNSDVDKLFIQLVQTYNQLFEENPINASGVDAKAILSARLSKSRRLENLIAQLPGEKKNGLFGNLIALSLGLTPNFKSNFDLAEDAKLQLSKDTYDDDLDNLLAQIGDQYADLFLAAKNLSDAILLSDILRVNTEITKAPLSASMIKRYDEHHQDLTLLKALVRQQLPEKYKEIFFDQSKNGYAGYIDGGASQEEFYKFIKPILEKMDGTEELLVKLNREDLLRKQRTFDNGSIPHQIHLGELHAILRRQEDFYPFLKDNREKIEKILTFRIPYYVGPLARGNSRFAWMTRKSEETITPWNFEEVVDKGASAQSFIERMTNFDKNLPNEKVLPKHSLLYEYFTVYNELTKVKYVTEGMRKPAFLSGEQKKAIVDLLFKTNRKVTVKQLKEDYFKKIECFDSVEISGVEDRFNASLGTYHDLLKIIKDKDFLDNEENEDILEDIVLTLTLFEDREMIEERLKTYAHLFDDKVMKQLKRRRYTGWGRLSRKLINGIRDKQSGKTILDFLKSDGFANRNFMQLIHDDSLTFKEDIQKAQVSGQGDSLHEHIANLAGSPAIKKGILQTVKVVDELVKVMGRHKPENIVIEMARENQTTQKGQKNSRERMKRIEEGIKELGSQILKEHPVENTQLQNEKLYLYYLQNGRDMYVDQELDINRLSDYDVDHIVPQSFLKDDSIDNKVLTRSDKARGKSDNVPSEEVVKKMKNYWRQLLNAKLITQRKFDNLTKAERGGLSELDKAGFIKRQLVETRQITKHVAQILDSRMNTKYDENDKLIREVKVITLKSKLVSDFRKDFQFYKVREINNYHHAHDAYLNAVVGTALIKKYPKLESEFVYGDYKVYDVRKMIAKSEQEIGKATAKYFFYSNIMNFFKTEITLANGEIRKRPLIETNGETGEIVWDKGRDFATVRKVLSMPQVNIVKKTEVQTGGFSKESILPKRNSDKLIARKKDWDPKKYGGFDSPTVAYSVLVVAKVEKGKSKKLKSVKELLGITIMERSSFEKNPIDFLEAKGYKEVKKDLIIKLPKYSLFELENGRKRMLASAGELQKGNELALPSKYVNFLYLASHYEKLKGSPEDNEQKQLFVEQHKHYLDEIIEQISEFSKRVILADANLDKVLSAYNKHRDKPIREQAENIIHLFTLTNLGAPAAFKYFDTTIDRKRYTSTKEVLDATLIHQSITGLYETRIDLSQLGGDGGEAAAKGSSGGGGGTLNIEDEYRLHETSKEPDVPLGSTWLSDFPQAWAETGGMGLAVRQAPLIIPLKATSTPVSIKQYPMSQEARLGIKPHIQRLLDQGILVPCQSPWNTPLLPVKKPGTNDYRPVQDLREVNKRVEDIHPTVPNPYNLLSGLPPSHQWYTVLDLKDAFFCLRLHPTSQPLFAFEWRDPEMGISGQLTWTRLPQGFKNSPTLFNEALHRDLADFRIQHPDLILLQYVDDLLLAATSEQDCQRGTRALLQTLGNLGYRASAKKAQICQKQVKYLGYLLKEGQRWLTEARKETVMGQPTPKTPRQLREFLGTAGFCRLWIPGFAEMAAPLYPLTKPGTLFNWGPDQQKAYQEIKQALLTAPALGLPDLTKPFELFVDEKQGYAKGVLTQKLGPWRRPVAYLSKKLDPVAAGWPPCLRMVAAIAVLTKDAGKLTMGQPLVILAPHAVEALVKQPPDRWLSNARMTHYQAMLLDTDRVQFGPVVALNPATLLPLPEKEAPHDCLEILAETHGTRPDLTDQPIPDADYTWYTDGSSFLQEGQRRAGAAVTTETEVIWARALPAGTSAQRAELIALTQALKMAEGKKLNVYTDSRYAFATAHVHGEIYRRRGWLTSEGREIKNKNEILALLKALFLPKRLSIIHCPGHQKGNSAEARGNRMADQAAREAAMKAVLETSTLLAGKRTADGSEFEKRTADGSEFESPKKKAKVE

SEQ ID NO: 7351 - protein, 2096 aa, synthetic construct
MPAAKRVKLDGGDKKYSIGLDIGTNSVGWAVITDEYKVPSKKFKVLGNTDRHSIKKNLIGALLFDSGETAEATRLKRTARRRYTRRKNRICYLQEIFSNEMAKVDDSFFHRLEESFLVEEDKKHERHPIFGNIVDEVAYHEKYPTIYHLRKKLVDSTDKADLRLIYLALAHMIKFRGHFLIEGDLNPDNSDVDKLFIQLVQTYNQLFEENPINASGVDAKAILSARLSKSRRLENLIAQLPGEKKNGLFGNLIALSLGLTPNFKSNFDLAEDAKLQLSKDTYDDDLDNLLAQIGDQYADLFLAAKNLSDAILLSDILRVNTEITKAPLSASMIKRYDEHHQDLTLLKALVRQQLPEKYKEIFFDQSKNGYAGYIDGGASQEEFYKFIKPILEKMDGTEELLVKLNREDLLRKQRTFDNGSIPHQIHLGELHAILRRQEDFYPFLKDNREKIEKILTFRIPYYVGPLARGNSRFAWMTRKSEETITPWNFEEVVDKGASAQSFIERMTNFDKNLPNEKVLPKHSLLYEYFTVYNELTKVKYVTEGMRKPAFLSGEQKKAIVDLLFKTNRKVTVKQLKEDYFKKIECFDSVEISGVEDRFNASLGTYHDLLKIIKDKDFLDNEENEDILEDIVLTLTLFEDREMIEERLKTYAHLFDDKVMKQLKRRRYTGWGRLSRKLINGIRDKQSGKTILDFLKSDGFANRNFMQLIHDDSLTFKEDIQKAQVSGQGDSLHEHIANLAGSPAIKKGILQTVKVVDELVKVMGRHKPENIVIEMARENQTTQKGQKNSRERMKRIEEGIKELGSQILKEHPVENTQLQNEKLYLYYLQNGRDMYVDQELDINRLSDYDVDHIVPQSFLKDDSIDNKVLTRSDKARGKSDNVPSEEVVKKMKNYWRQLLNAKLITQRKFDNLTKAERGGLSELDKAGFIKRQLVETRQITKHVAQILDSRMNTKYDENDKLIREVKVITLKSKLVSDFRKDFQFYKVREINNYHHAHDAYLNAVVGTALIKKYPKLESEFVYGDYKVYDVRKMIAKSEQEIGKATAKYFFYSNIMNFFKTEITLANGEIRKRPLIETNGETGEIVWDKGRDFATVRKVLSMPQVNIVKKTEVQTGGFSKESILPKRNSDKLIARKKDWDPKKYGGFDSPTVAYSVLVVAKVEKGKSKKLKSVKELLGITIMERSSFEKNPIDFLEAKGYKEVKKDLIIKLPKYSLFELENGRKRMLASAGELQKGNELALPSKYVNFLYLASHYEKLKGSPEDNEQKQLFVEQHKHYLDEIIEQISEFSKRVILADANLDKVLSAYNKHRDKPIREQAENIIHLFTLTNLGAPAAFKYFDTTIDRKRYTSTKEVLDATLIHQSITGLYETRIDLSQLGGDGGGGGGSSPAPGGTAPLEEEYRLFLEAPIQNVTLLEQWKREIPKVWAEINPPGLASTQAPIHVQLLSTALPVRVRQYPITLEAKRSLRETIRKFRAAGILRPVHSPWNTPLLPVRKSGTSEYRMVQDLREVNKRVETIHPTVPNPYTLLSLLPPDRIWYSVLDLKDAFFCIPLAPESQLIFAFEWADAEEGESGQLTWTRLPQGFKNSPTLFNEALNRDLQGFRLDHPSVSLLQYVDDLLIAADTQAACLSATRDLLMTLAELGYRVSGKKAQLCQEEVTYLGFKIHKGSRSLSNSRTQAILQIPVPKTKRQVREFLGKIGYCRLFIPGFAELAQPLYAATRPGNDPLVWGEKEEEAFQSLKLALTQPPALALPSLDKPFQLFVEETSGAAKGVLTQALGPWKRPVAYLSKRLDPVAAGWPRCLRAIAAAALLTREASKLTFGQDIEITSSHNLESLLRSPPDKWLTNARITQYQVLLLDPPRVRFKQTAALNPATLLPETDDTLPIHHCLDTLDSLTSTRPDLTDQPLAQAEATLFTDGSSYIRDGKRYAGAAVVTLDSVIWAEPLPIGTSAQKAELIALTKALEWSKDKSVNIYTDSRYAFATLHVHGMIYRERGWLTAGGKAIKNAPEILALLTAVWLPKRVAVMHCKGHQKDDAPTSTGNRRADEVAREVAIRPLSTQATISAGKRTADGSEFEKRTADGSEFESPKKKAKVE

SEQ ID NO: 7352 - protein, 2093 aa, synthetic construct
MPAAKRVKLDGGDKKYSIGLDIGTNSVGWAVITDEYKVPSKKFKVLGNTDRHSIKKNLIGALLFDSGETAEATRLKRTARRRYTRRKNRICYLQEIFSNEMAKVDDSFFHRLEESFLVEEDKKHERHPIFGNIVDEVAYHEKYPTIYHLRKKLVDSTDKADLRLIYLALAHMIKFRGHFLIEGDLNPDNSDVDKLFIQLVQTYNQLFEENPINASGVDAKAILSARLSKSRRLENLIAQLPGEKKNGLFGNLIALSLGLTPNFKSNFDLAEDAKLQLSKDTYDDDLDNLLAQIGDQYADLFLAAKNLSDAILLSDILRVNTEITKAPLSASMIKRYDEHHQDLTLLKALVRQQLPEKYKEIFFDQSKNGYAGYIDGGASQEEFYKFIKPILEKMDGTEELLVKLNREDLLRKQRTFDNGSIPHQIHLGELHAILRRQEDFYPFLKDNREKIEKILTFRIPYYVGPLARGNSRFAWMTRKSEETITPWNFEEVVDKGASAQSFIERMTNFDKNLPNEKVLPKHSLLYEYFTVYNELTKVKYVTEGMRKPAFLSGEQKKAIVDLLFKTNRKVTVKQLKEDYFKKIECFDSVEISGVEDRFNASLGTYHDLLKIIKDKDFLDNEENEDILEDIVLTLTLFEDREMIEERLKTYAHLFDDKVMKQLKRRRYTGWGRLSRKLINGIRDKQSGKTILDFLKSDGFANRNFMQLIHDDSLTFKEDIQKAQVSGQGDSLHEHIANLAGSPAIKKGILQTVKVVDELVKVMGRHKPENIVIEMARENQTTQKGQKNSRERMKRIEEGIKELGSQILKEHPVENTQLQNEKLYLYYLQNGRDMYVDQELDINRLSDYDVDHIVPQSFLKDDSIDNKVLTRSDKARGKSDNVPSEEVVKKMKNYWRQLLNAKLITQRKFDNLTKAERGGLSELDKAGFIKRQLVETRQITKHVAQILDSRMNTKYDENDKLIREVKVITLKSKLVSDFRKDFQFYKVREINNYHHAHDAYLNAVVGTALIKKYPKLESEFVYGDYKVYDVRKMIAKSEQEIGKATAKYFFYSNIMNFFKTEITLANGEIRKRPLIETNGETGEIVWDKGRDFATVRKVLSMPQVNIVKKTEVQTGGFSKESILPKRNSDKLIARKKDWDPKKYGGFDSPTVAYSVLVVAKVEKGKSKKLKSVKELLGITIMERSSFEKNPIDFLEAKGYKEVKKDLIIKLPKYSLFELENGRKRMLASAGELQKGNELALPSKYVNFLYLASHYEKLKGSPEDNEQKQLFVEQHKHYLDEIIEQISEFSKRVILADANLDKVLSAYNKHRDKPIREQAENIIHLFTLTNLGAPAAFKYFDTTIDRKRYTSTKEVLDATLIHQSITGLYETRIDLSQLGGDGGGGGGSSPAPGGTLQLEEEYRLFEPESTQKQEMDIWLKNFPQAWAETGGMGTAHCQAPVLIQLKATATPISIRQYPMPHEAYQGIKPHIRRMLDQGILKPCQSPWNTPLLPVKKPGTEDYRPVQDLREVNKRVEDIHPTVPNPYNLLSTLPPSHPWYTVLDLKDAFFCLRLHSESQLLFAFEWRDPEIGLSGQLTWTRLPQGFKNSPTLFNEALHSDLADFRVRYPALVLLQYVDDLLLAAATRTECLEGTKALLETLGNKGYRASAKKAQICLQEVTYLGYSLKDGQRWLTKARKEAILSIPVPKNSRQVREFLGKAGYCRLFIPGFAELAAPLYPLTRPGTLFQWGTEQQLAFEDIKKALLSSPALGLPDITKPFELFIDENSGFAKGVLVQKLGPWKRPVAYLSKKLDTVASGWPPCLRMVAAIAILVKDAGKLTLGQPLTILTSHPVEALVRQPPNKWLSNARMTHYQAMLLDAERVHFGPTVSLNPATLLPLPSGGNHHDCLQILAETHGTRPDLTDQPLPDADLTWYTDGSSFIRNGEREAGAAVTTESEVIWAAPLPPGTSAQRAELIALTQALKMAEGKKLTVYTDSRYAFATTHVHGEIYRRRGWLTSEGKEIKNKNEILALLEALFLPKRLSIIHCPGHQKGDSPQAKGNRLADDTAKKAATETHSSLTVLPAGKRTADGSEFEKRTADGSEFESPKKKAKVE

SEQ ID NO: 7353 - protein, 2216 aa, synthetic construct
MPAAKRVKLDGGDKKYSIGLDIGTNSVGWAVITDEYKVPSKKFKVLGNTDRHSIKKNLIGALLFDSGETAEATRLKRTARRRYTRRKNRICYLQEIFSNEMAKVDDSFFHRLEESFLVEEDKKHERHPIFGNIVDEVAYHEKYPTIYHLRKKLVDSTDKADLRLIYLALAHMIKFRGHFLIEGDLNPDNSDVDKLFIQLVQTYNQLFEENPINASGVDAKAILSARLSKSRRLENLIAQLPGEKKNGLFGNLIALSLGLTPNFKSNFDLAEDAKLQLSKDTYDDDLDNLLAQIGDQYADLFLAAKNLSDAILLSDILRVNTEITKAPLSASMIKRYDEHHQDLTLLKALVRQQLPEKYKEIFFDQSKNGYAGYIDGGASQEEFYKFIKPILEKMDGTEELLVKLNREDLLRKQRTFDNGSIPHQIHLGELHAILRRQEDFYPFLKDNREKIEKILTFRIPYYVGPLARGNSRFAWMTRKSEETITPWNFEEVVDKGASAQSFIERMTNFDKNLPNEKVLPKHSLLYEYFTVYNELTKVKYVTEGMRKPAFLSGEQKKAIVDLLFKTNRKVTVKQLKEDYFKKIECFDSVEISGVEDRFNASLGTYHDLLKIIKDKDFLDNEENEDILEDIVLTLTLFEDREMIEERLKTYAHLFDDKVMKQLKRRRYTGWGRLSRKLINGIRDKQSGKTILDFLKSDGFANRNFMQLIHDDSLTFKEDIQKAQVSGQGDSLHEHIANLAGSPAIKKGILQTVKVVDELVKVMGRHKPENIVIEMARENQTTQKGQKNSRERMKRIEEGIKELGSQILKEHPVENTQLQNEKLYLYYLQNGRDMYVDQELDINRLSDYDVDHIVPQSFLKDDSIDNKVLTRSDKARGKSDNVPSEEVVKKMKNYWRQLLNAKLITQRKFDNLTKAERGGLSELDKAGFIKRQLVETRQITKHVAQILDSRMNTKYDENDKLIREVKVITLKSKLVSDFRKDFQFYKVREINNYHHAHDAYLNAVVGTALIKKYPKLESEFVYGDYKVYDVRKMIAKSEQEIGKATAKYFFYSNIMNFFKTEITLANGEIRKRPLIETNGETGEIVWDKGRDFATVRKVLSMPQVNIVKKTEVQTGGFSKESILPKRNSDKLIARKKDWDPKKYGGFDSPTVAYSVLVVAKVEKGKSKKLKSVKELLGITIMERSSFEKNPIDFLEAKGYKEVKKDLIIKLPKYSLFELENGRKRMLASAGELQKGNELALPSKYVNFLYLASHYEKLKGSPEDNEQKQLFVEQHKHYLDEIIEQISEFSKRVILADANLDKVLSAYNKHRDKPIREQAENIIHLFTLTNLGAPAAFKYFDTTIDRKRYTSTKEVLDATLIHQSITGLYETRIDLSQLGGDGGGGGGSSPAPGGTLGDQGSRGSDPLPEPRVTLTVEGIPTEFLVNTGAEHSVLTKPMGKMGSKRTVVAGATGSKVYPWTTKRLLKIGQKQVTHSFLVIPECPAPLLGRDLLTKLKAQIQFSTEGPQVTWEDRPAMCLVLNLEEEYRLHEKPVPPSIDPSWLQLFPMVWAEKAGMGLANQVPPVVVELKSDASPVAVRQYPMSKEAREGIRPHIQRFLDLGILVPCQSPWNTPLLPVKKPGTNDYRPVQDLREVNKRVQDIHPTVPNPYNLLSSLPPSHTWYSVLDLKDAFFCLKLHPNSQPLFAFEWRDPEKGNTGQLTWTRLPQGFKNSPTLFDEALHRDLASFRALNPQVVMLQYVDDLLVAAPTYRDCKEGTRRLLQELSKLGYRVSAKKAQLCREEVTYLGYLLKGGKRWLTPARKATVMKIPTPTTPRQVREFLGTAGFCRLWIPGFASLAAPLYPLTREKVPFTWTEAHQEAFGRIKEALLSAPALALPDLTKPFALYVDEKEGVARGVLTQTLGPWRRPVAYLSKKLDPVASGWPTCLKAIAAVALLLKDADKLTLGQNVLVIAPHNLESIVRQPPDRWMTNARMTHYQSLLLNERVSFAPPAILNPATLLPVESDDTPIHICSEILAEETGTRPDLRDQPLPGVPAWYTDGSSFIMDGRRQAGAAIVDNKRTVWASNLPEGTSAQKAELIALTQALRLAEGKSINIYTDSRYAFATAHVHGAIYKQRGLLTSAGKDIKNKEEILALLEAIHLPKRVAIIHCPGHQRGTDPVATGNRKADEAAKQAAQSTRILTETTKNAGKRTADGSEFEKRTADGSEFESPKKKAKVE

SEQ ID NO: 7354 - protein, 2125 aa, synthetic construct
MPAAKRVKLDGGDKKYSIGLDIGTNSVGWAVITDEYKVPSKKFKVLGNTDRHSIKKNLIGALLFDSGETAEATRLKRTARRRYTRRKNRICYLQEIFSNEMAKVDDSFFHRLEESFLVEEDKKHERHPIFGNIVDEVAYHEKYPTIYHLRKKLVDSTDKADLRLIYLALAHMIKFRGHFLIEGDLNPDNSDVDKLFIQLVQTYNQLFEENPINASGVDAKAILSARLSKSRRLENLIAQLPGEKKNGLFGNLIALSLGLTPNFKSNFDLAEDAKLQLSKDTYDDDLDNLLAQIGDQYADLFLAAKNLSDAILLSDILRVNTEITKAPLSASMIKRYDEHHQDLTLLKALVRQQLPEKYKEIFFDQSKNGYAGYIDGGASQEEFYKFIKPILEKMDGTEELLVKLNREDLLRKQRTFDNGSIPHQIHLGELHAILRRQEDFYPFLKDNREKIEKILTFRIPYYVGPLARGNSRFAWMTRKSEETITPWNFEEVVDKGASAQSFIERMTNFDKNLPNEKVLPKHSLLYEYFTVYNELTKVKYVTEGMRKPAFLSGEQKKAIVDLLFKTNRKVTVKQLKEDYFKKIECFDSVEISGVEDRFNASLGTYHDLLKIIKDKDFLDNEENEDILEDIVLTLTLFEDREMIEERLKTYAHLFDDKVMKQLKRRRYTGWGRLSRKLINGIRDKQSGKTILDFLKSDGFANRNFMQLIHDDSLTFKEDIQKAQVSGQGDSLHEHIANLAGSPAIKKGILQTVKVVDELVKVMGRHKPENIVIEMARENQTTQKGQKNSRERMKRIEEGIKELGSQILKEHPVENTQLQNEKLYLYYLQNGRDMYVDQELDINRLSDYDVDHIVPQSFLKDDSIDNKVLTRSDKARGKSDNVPSEEVVKKMKNYWRQLLNAKLITQRKFDNLTKAERGGLSELDKAGFIKRQLVETRQITKHVAQILDSRMNTKYDENDKLIREVKVITLKSKLVSDFRKDFQFYKVREINNYHHAHDAYLNAVVGTALIKKYPKLESEFVYGDYKVYDVRKMIAKSEQEIGKATAKYFFYSNIMNFFKTEITLANGEIRKRPLIETNGETGEIVWDKGRDFATVRKVLSMPQVNIVKKTEVQTGGFSKESILPKRNSDKLIARKKDWDPKKYGGFDSPTVAYSVLVVAKVEKGKSKKLKSVKELLGITIMERSSFEKNPIDFLEAKGYKEVKKDLIIKLPKYSLFELENGRKRMLASAGELQKGNELALPSKYVNFLYLASHYEKLKGSPEDNEQKQLFVEQHKHYLDEIIEQISEFSKRVILADANLDKVLSAYNKHRDKPIREQAENIIHLFTLTNLGAPAAFKYFDTTIDRKRYTSTKEVLDATLIHQSITGLYETRIDLSQLGGDGGGGGGSSPAPGGLLGRDLLTKLKAQIQFSTEGPQVTWEDRPAMCLVLNLEEEYRLHEKPVPPSIDPSWLQLFPMVWAEKAGMGLANQVPPVVVELKSDASPVAVRQYPMSKEAREGIRPHIQRFLDLGILVPCQSPWNTPLLPVKKPGTNDYRPVQDLREVNKRVQDIHPTVPNPYNLLSSLPPSHTWYSVLDLKDAFFCLKLHPNSQPLFAFEWRDPEKGNTGQLTWTRLPQGFKNSPTLFNEALHRDLASFRALNPQVVMLQYVDDLLVAAPTYRDCKEGTRRLLQELSKLGYRVSAKKAQLCREEVTYLGYLLKGGKRWLTPARKATVMKIPTPTTPRQVREFLGTAGFCRLWIPGFASLAAPLYPLTRPKVPFTWTEAHQEAFGRIKEALLSAPALALPDLTKPFALYVDEKEGVARGVLTQTLGPWRRPVAYLSKKLDPVASGWPTCLKAIAAVALLLKDADKLTLGQNVLVIAPHNLESIVRQPPDRWMTNARMTHYQSLLLNERVSFAPPAILNPATLLPVESDDTPIHICSEILAEETGTRPDLRDQPLPGVPAWYTDGSSFIMDGRRQAGAAIVDNKRTVWASNLPEGTSAQKAELIALTQALRLAEGKSINIYTDSRYAFATAHVHGAIYKQRGWLTSAGKDIKNKEEILALLEAIHLPKRVAIIHCPGHQRGTDPVATGNRKADEAAKQAAQSTRILTETTKNAGKRTADGSEFEKRTADGSEFESPKKKAKVE

SEQ ID NO: 7355 - protein, 2216 aa, synthetic construct
MPAAKRVKLDGGDKKYSIGLDIGTNSVGWAVITDEYKVPSKKFKVLGNTDRHSIKKNLIGALLFDSGETAEATRLKRTARRRYTRRKNRICYLQEIFSNEMAKVDDSFFHRLEESFLVEEDKKHERHPIFGNIVDEVAYHEKYPTIYHLRKKLVDSTDKADLRLIYLALAHMIKFRGHFLIEGDLNPDNSDVDKLFIQLVQTYNQLFEENPINASGVDAKAILSARLSKSRRLENLIAQLPGEKKNGLFGNLIALSLGLTPNFKSNFDLAEDAKLQLSKDTYDDDLDNLLAQIGDQYADLFLAAKNLSDAILLSDILRVNTEITKAPLSASMIKRYDEHHQDLTLLKALVRQQLPEKYKEIFFDQSKNGYAGYIDGGASQEEFYKFIKPILEKMDGTEELLVKLNREDLLRKQRTFDNGSIPHQIHLGELHAILRRQEDFYPFLKDNREKIEKILTFRIPYYVGPLARGNSRFAWMTRKSEETITPWNFEEVVDKGASAQSFIERMTNFDKNLPNEKVLPKHSLLYEYFTVYNELTKVKYVTEGMRKPAFLSGEQKKAIVDLLFKTNRKVTVKQLKEDYFKKIECFDSVEISGVEDRFNASLGTYHDLLKIIKDKDFLDNEENEDILEDIVLTLTLFEDREMIEERLKTYAHLFDDKVMKQLKRRRYTGWGRLSRKLINGIRDKQSGKTILDFLKSDGFANRNFMQLIHDDSLTFKEDIQKAQVSGQGDSLHEHIANLAGSPAIKKGILQTVKVVDELVKVMGRHKPENIVIEMARENQTTQKGQKNSRERMKRIEEGIKELGSQILKEHPVENTQLQNEKLYLYYLQNGRDMYVDQELDINRLSDYDVDHIVPQSFLKDDSIDNKVLTRSDKARGKSDNVPSEEVVKKMKNYWRQLLNAKLITQRKFDNLTKAERGGLSELDKAGFIKRQLVETRQITKHVAQILDSRMNTKYDENDKLIREVKVITLKSKLVSDFRKDFQFYKVREINNYHHAHDAYLNAVVGTALIKKYPKLESEFVYGDYKVYDVRKMIAKSEQEIGKATAKYFFYSNIMNFFKTEITLANGEIRKRPLIETNGETGEIVWDKGRDFATVRKVLSMPQVNIVKKTEVQTGGFSKESILPKRNSDKLIARKKDWDPKKYGGFDSPTVAYSVLVVAKVEKGKSKKLKSVKELLGITIMERSSFEKNPIDFLEAKGYKEVKKDLIIKLPKYSLFELENGRKRMLASAGELQKGNELALPSKYVNFLYLASHYEKLKGSPEDNEQKQLFVEQHKHYLDEIIEQISEFSKRVILADANLDKVLSAYNKHRDKPIREQAENIIHLFTLTNLGAPAAFKYFDTTIDRKRYTSTKEVLDATLIHQSITGLYETRIDLSQLGGDGGGGGGSSPAPGGTLGDQGSRGSDPLPEPRVTLTVEGIPTEFLVNTGAEHSVLTKPMGKMGSKRTVVAGATGSKVYPWTTKRLLKIGQKQVTHSFLVIPECPAPLLGRDLLTKLKAQIQFSTEGPQVTWEDRPAMCLVLNLEEEYRLHEKPVPPSIDPSWLQLFPMVWAEKAGMGLANQVPPVVVELKSDASPVAVRQYPMSKEAREGIRPHIQRFLDLGILVPCQSPWNTPLLPVKKPGTNDYRPVQDLREVNKRVQDIHPTVPNPYNLLSSLPPSHTWYSVLDLKDAFFCLKLHPNSQPLFAFEWRDPEKGNTGQLTWTRLPQGFKNSPTLFNEALHRDLASFRALNPQVVMLQYVDDLLVAAPTYRDCKEGTRRLLQELSKLGYRVSAKKAQLCREEVTYLGYLLKGGKRWLTPARKATVMKIPTPTTPRQVREFLGTAGFCRLWIPGFASLAAPLYPLTRPKVPFTWTEAHQEAFGRIKEALLSAPALALPDLTKPFALYVDEKEGVARGVLTQTLGPWRRPVAYLSKKLDPVASGWPTCLKAIAAVALLLKDADKLTLGQNVLVIAPHNLESIVRQPPDRWMTNARMTHYQSLLLNERVSFAPPAILNPATLLPVESDDTPIHICSEILAEETGTRPDLRDQPLPGVPAWYTDGSSFIMDGRRQAGAAIVDNKRTVWASNLPEGTSAQKAELIALTQALRLAEGKSINIYTDSRYAFATAHVHGAIYKQRGWLTSAGKDIKNKEEILALLEAIHLPKRVAIIHCPGHQRGTDPVATGNRKADEAAKQAAQSTRILTETTKNAGKRTADGSEFEKRTADGSEFESPKKKAKVE

SEQ ID NO: 7356 - protein, 2094 aa, synthetic construct
MPAAKRVKLDGGDKKYSIGLDIGTNSVGWAVITDEYKVPSKKFKVLGNTDRHSIKKNLIGALLFDSGETAEATRLKRTARRRYTRRKNRICYLQEIFSNEMAKVDDSFFHRLEESFLVEEDKKHERHPIFGNIVDEVAYHEKYPTIYHLRKKLVDSTDKADLRLIYLALAHMIKFRGHFLIEGDLNPDNSDVDKLFIQLVQTYNQLFEENPINASGVDAKAILSARLSKSRRLENLIAQLPGEKKNGLFGNLIALSLGLTPNFKSNFDLAEDAKLQLSKDTYDDDLDNLLAQIGDQYADLFLAAKNLSDAILLSDILRVNTEITKAPLSASMIKRYDEHHQDLTLLKALVRQQLPEKYKEIFFDQSKNGYAGYIDGGASQEEFYKFIKPILEKMDGTEELLVKLNREDLLRKQRTFDNGSIPHQIHLGELHAILRRQEDFYPFLKDNREKIEKILTFRIPYYVGPLARGNSRFAWMTRKSEETITPWNFEEVVDKGASAQSFIERMTNFDKNLPNEKVLPKHSLLYEYFTVYNELTKVKYVTEGMRKPAFLSGEQKKAIVDLLFKTNRKVTVKQLKEDYFKKIECFDSVEISGVEDRFNASLGTYHDLLKIIKDKDFLDNEENEDILEDIVLTLTLFEDREMIEERLKTYAHLFDDKVMKQLKRRRYTGWGRLSRKLINGIRDKQSGKTILDFLKSDGFANRNFMQLIHDDSLTFKEDIQKAQVSGQGDSLHEHIANLAGSPAIKKGILQTVKVVDELVKVMGRHKPENIVIEMARENQTTQKGQKNSRERMKRIEEGIKELGSQILKEHPVENTQLQNEKLYLYYLQNGRDMYVDQELDINRLSDYDVDHIVPQSFLKDDSIDNKVLTRSDKARGKSDNVPSEEVVKKMKNYWRQLLNAKLITQRKFDNLTKAERGGLSELDKAGFIKRQLVETRQITKHVAQILDSRMNTKYDENDKLIREVKVITLKSKLVSDFRKDFQFYKVREINNYHHAHDAYLNAVVGTALIKKYPKLESEFVYGDYKVYDVRKMIAKSEQEIGKATAKYFFYSNIMNFFKTEITLANGEIRKRPLIETNGETGEIVWDKGRDFATVRKVLSMPQVNIVKKTEVQTGGFSKESILPKRNSDKLIARKKDWDPKKYGGFDSPTVAYSVLVVAKVEKGKSKKLKSVKELLGITIMERSSFEKNPIDFLEAKGYKEVKKDLIIKLPKYSLFELENGRKRMLASAGELQKGNELALPSKYVNFLYLASHYEKLKGSPEDNEQKQLFVEQHKHYLDEIIEQISEFSKRVILADANLDKVLSAYNKHRDKPIREQAENIIHLFTLTNLGAPAAFKYFDTTIDRKRYTSTKEVLDATLIHQSITGLYETRIDLSQLGGDGGGGGGSSPAPGGTLNLEDEYRLYETSAEPEVSPGSTWLSDFPQAWAETGGMGLAVRQAPLIIPLKATSTPVSIKQYPMSQEAKLGIKPHIQRLLDQGILVPCQSPWNTPLLPVKKPGTNDYRPVQDLREVNKRVEDIHPTVPNPYNLLSGLPPSHRWYTVLDLKDAFFCLRLHPTSQPLFAFEWRDPGMGISGQLTWTRLPQGFKNSPTLFNEALHRDLADFRIQHPDLILLQYVDDILLAATSELDCQQGTRALLLTLGNLGYRASAKKAQLCQKQVKYLGYLLKEGQRWLTEARKETVMGQPTPKTPRQLREFLGTAGFCRLWIPGFAEMAAPLYPLTKPGTLFNWGPDQQKAYQEIKQALLTAPALGLPDLTKPFELFVDEKQGYAKGVLTQKLGPWRRPVAYLSKKLDPVAAGWPPCLRMVAAIAVLRKDAGKLTMGQPLVILAPHAVEALVKQPPDRWLSNARMTHYQAMLLDTDRVQFGPVVALNPATLLPLPEEGAPHDCLEILAETHGTRPDLTDQPIPDADHTWYTDGSSFLQEGQRKAGAAVTTETEVIWARALPAGTSAQRAELIALTQALKMAEGKRLNVYTDSRYAFATAHIHGEIYRRRGWLTSEGREIKNKSEILALLKALFLPKRLSIIHCLGHQKGDSAEARGNRLADQAAREAAIKTPPDTSTLLAGKRTADGSEFEKRTADGSEFESPKKKAKVE

SEQ ID NO: 7357 - protein, 2094 aa, synthetic construct
MPAAKRVKLDGGDKKYSIGLDIGTNSVGWAVITDEYKVPSKKFKVLGNTDRHSIKKNLIGALLFDSGETAEATRLKRTARRRYTRRKNRICYLQEIFSNEMAKVDDSFFHRLEESFLVEEDKKHERHPIFGNIVDEVAYHEKYPTIYHLRKKLVDSTDKADLRLIYLALAHMIKFRGHFLIEGDLNPDNSDVDKLFIQLVQTYNQLFEENPINASGVDAKAILSARLSKSRRLENLIAQLPGEKKNGLFGNLIALSLGLTPNFKSNFDLAEDAKLQLSKDTYDDDLDNLLAQIGDQYADLFLAAKNLSDAILLSDILRVNTEITKAPLSASMIKRYDEHHQDLTLLKALVRQQLPEKYKEIFFDQSKNGYAGYIDGGASQEEFYKFIKPILEKMDGTEELLVKLNREDLLRKQRTFDNGSIPHQIHLGELHAILRRQEDFYPFLKDNREKIEKILTFRIPYYVGPLARGNSRFAWMTRKSEETITPWNFEEVVDKGASAQSFIERMTNFDKNLPNEKVLPKHSLLYEYFTVYNELTKVKYVTEGMRKPAFLSGEQKKAIVDLLFKTNRKVTVKQLKEDYFKKIECFDSVEISGVEDRFNASLGTYHDLLKIIKDKDFLDNEENEDILEDIVLTLTLFEDREMIEERLKTYAHLFDDKVMKQLKRRRYTGWGRLSRKLINGIRDKQSGKTILDFLKSDGFANRNFMQLIHDDSLTFKEDIQKAQVSGQGDSLHEHIANLAGSPAIKKGILQTVKVVDELVKVMGRHKPENIVIEMARENQTTQKGQKNSRERMKRIEEGIKELGSQILKEHPVENTQLQNEKLYLYYLQNGRDMYVDQELDINRLSDYDVDHIVPQSFLKDDSIDNKVLTRSDKARGKSDNVPSEEVVKKMKNYWRQLLNAKLITQRKFDNLTKAERGGLSELDKAGFIKRQLVETRQITKHVAQILDSRMNTKYDENDKLIREVKVITLKSKLVSDFRKDFQFYKVREINNYHHAHDAYLNAVVGTALIKKYPKLESEFVYGDYKVYDVRKMIAKSEQEIGKATAKYFFYSNIMNFFKTEITLANGEIRKRPLIETNGETGEIVWDKGRDFATVRKVLSMPQVNIVKKTEVQTGGFSKESILPKRNSDKLIARKKDWDPKKYGGFDSPTVAYSVLVVAKVEKGKSKKLKSVKELLGITIMERSSFEKNPIDFLEAKGYKEVKKDLIIKLPKYSLFELENGRKRMLASAGELQKGNELALPSKYVNFLYLASHYEKLKGSPEDNEQKQLFVEQHKHYLDEIIEQISEFSKRVILADANLDKVLSAYNKHRDKPIREQAENIIHLFTLTNLGAPAAFKYFDTTIDRKRYTSTKEVLDATLIHQSITGLYETRIDLSQLGGDGGGGGGSSPAPGGLGIEDEYRLHETSTEPDVSLGSTWLSDFPQAWAETGGMGLAVRQAPLIIPLKATSTPVSIQQYPMSHEARLGIKPHIQRLLDQGILVPCQSPWNTPLLPVKKPGTNDYRPVQDLREVNKRVEDIHPTVPNPYNLLSGLPPSHQWYTVLDLKDAFFCLRLHPTSQPLFAFEWRDPGMGISGQLTWTRLPQGFKNSPTLFNEALHRDLADFRIQHPDLILLQYVDDILLAATSELDCQQGTRALLQTLGDLGYRASAKKAQICQKQVKYLGYLLREGQRWLTEARKETVMGQPVPKTPRQLREFLGKAGFCRLFIPGFAEMAAPLYPLTKPGTLFSWGPDQQKAYQEIKQALLTAPALGLPDLTKPFELFVDEKQGYAKGVLTQKLGPWRRPVAYLSKKLDPVAAGWPPCLRMVAAIAVLTKDAGKLTMGQPLVILAPHAVEALVKQPPDRWLSNARMTHYQAMLLDTDRVQFGPVVALNPATLLPLPEEGAPHDCLEILAETHGTRPDLTDQPIPDADHTWYTDGSSFLQEGQRKAGAAVTTETEVIWAGALPAGTSAQRAELIALTQALKMAEGKRLNVYTDSRYAFATAHIHGEIYRRRGWLTSEGREIKNKSEILALLKALFLPKRLSIIHCLGHQKGDSAEARGNRLADQAAREAAIKTPPDTSTLLIAGKRTADGSEFEKRTADGSEFESPKKKAKVE

SEQ ID NO: 7358 - protein, 2094 aa, synthetic construct; identical to SEQ ID NO: 7357

SEQ ID NO: 7359 - protein, 2094 aa, synthetic construct
MPAAKRVKLDGGDKKYSIGLDIGTNSVGWAVITDEYKVPSKKFKVLGNTDRHSIKKNLIGALLFDSGETAEATRLKRTARRRYTRRKNRICYLQEIFSNEMAKVDDSFFHRLEESFLVEEDKKHERHPIFGNIVDEVAYHEKYPTIYHLRKKLVDSTDKADLRLIYLALAHMIKFRGHFLIEGDLNPDNSDVDKLFIQLVQTYNQLFEENPINASGVDAKAILSARLSKSRRLENLIAQLPGEKKNGLFGNLIALSLGLTPNFKSNFDLAEDAKLQLSKDTYDDDLDNLLAQIGDQYADLFLAAKNLSDAILLSDILRVNTEITKAPLSASMIKRYDEHHQDLTLLKALVRQQLPEKYKEIFFDQSKNGYAGYIDGGASQEEFYKFIKPILEKMDGTEELLVKLNREDLLRKQRTFDNGSIPHQIHLGELHAILRRQEDFYPFLKDNREKIEKILTFRIPYYVGPLARGNSRFAWMTRKSEETITPWNFEEVVDKGASAQSFIERMTNFDKNLPNEKVLPKHSLLYEYFTVYNELTKVKYVTEGMRKPAFLSGEQKKAIVDLLFKTNRKVTVKQLKEDYFKKIECFDSVEISGVEDRFNASLGTYHDLLKIIKDKDFLDNEENEDILEDIVLTLTLFEDREMIEERLKTYAHLFDDKVMKQLKRRRYTGWGRLSRKLINGIRDKQSGKTILDFLKSDGFANRNFMQLIHDDSLTFKEDIQKAQVSGQGDSLHEHIANLAGSPAIKKGILQTVKVVDELVKVMGRHKPENIVIEMARENQTTQKGQKNSRERMKRIEEGIKELGSQILKEHPVENTQLQNEKLYLYYLQNGRDMYVDQELDINRLSDYDVDHIVPQSFLKDDSIDNKVLTRSDKARGKSDNVPSEEVVKKMKNYWRQLLNAKLITQRKFDNLTKAERGGLSELDKAGFIKRQLVETRQITKHVAQILDSRMNTKYDENDKLIREVKVITLKSKLVSDFRKDFQFYKVREINNYHHAHDAYLNAVVGTALIKKYPKLESEFVYGDYKVYDVRKMIAKSEQEIGKATAKYFFYSNIMNFFKTEITLANGEIRKRPLIETNGETGEIVWDKGRDFATVRKVLSMPQVNIVKKTEVQTGGFSKESILPKRNSDKLIARKKDWDPKKYGGFDSPTVAYSVLVVAKVEKGKSKKLKSVKELLGITIMERSSFEKNPIDFLEAKGYKEVKKDLIIKLPKYSLFELENGRKRMLASAGELQKGNELALPSKYVNFLYLASHYEKLKGSPEDNEQKQLFVEQHKHYLDEIIEQISEFSKRVILADANLDKVLSAYNKHRDKPIREQAENIIHLFTLTNLGAPAAFKYFDTTIDRKRYTSTKEVLDATLIHQSITGLYETRIDLSQLGGDGGGGGGSSPAPGGTLNIEDEYRLHETSKEPDVSLGSTWLSDFPQAWAETGGMGLAVRQAPLIIPLKATSTPVSIKQYPMSQEARLGIKPHIQRLLDQGILVPCQSPWNTPLLPVKKPGTNDYRPVQDLREVNKRVEDIHPTVPNPYNLLSGLPPSHQWYTVLDLKDAFFCLRLHPTSQPLFAFEWRDPEMGISGQLTWTRLPQGFKNSPTLFNEALHRDLAGFRIQHPDLILLQYVDDLLLAATSELDCQQGTRALLQTLGDLGYRASAKKAQICQKQVKYLGYLLKEGQRWLTEARKETVMGQPIPKTPRQLREFLGTAGFCRLWIPGFAEMAAPLYPLTKPGTLFNWGPDQQKAFQEIKQALLTAPALGLPDLTKPFELFVDEKQGYAKGVLTQKLGPWRRPVAYLSKKLDPVAAGWPPCLRMVAAIAVLTKDAGKLTMGQPLVILAPHAVEALVKQPPDRWLSNARMTHYQALLLDTDRVQFGPVVALNPATLLPLPEEGLQHDCLDILAEAHGTRSDLMDQPLPDADHTWYTDGSSFLQEGQRKAGAAVTTETEVIWARALPAGTSAQRAELIALTQALKMAEGKKLNVYTDSRYAFATAHIHGEIYRRRGWLTSEGKEIKNKDEILALLKALFLPKRLSIIHCPGHQKGNSAEARGNRMADQAAREVATRETPETSTLLAGKRTADGSEFEKRTADGSEFESPKKKAKVE

SEQ ID NO: 7360 - protein, 2094 aa, synthetic construct
MPAAKRVKLDGGDKKYSIGLDIGTNSVGWAVITDEYKVPSKKFKVLGNTDRHSIKKNLIGALLFDSGETAEATRLKRTARRRYTRRKNRICYLQEIFSNEMAKVDDSFFHRLEESFLVEEDKKHERHPIFGNIVDEVAYHEKYPTIYHLRKKLVDSTDKADLRLIYLALAHMIKFRGHFLIEGDLNPDNSDVDKLFIQLVQTYNQLFEENPINASGVDAKAILSARLSKSRRLENLIAQLPGEKKNGLFGNLIALSLGLTPNFKSNFDLAEDAKLQLSKDTYDDDLDNLLAQIGDQYADLFLAAKNLSDAILLSDILRVNTEITKAPLSASMIKRYDEHHQDLTLLKALVRQQLPEKYKEIFFDQSKNGYAGYIDGGASQEEFYKFIKPILEKMDGTEELLVKLNREDLLRKQRTFDNGSIPHQIHLGELHAILRRQEDFYPFLKDNREKIEKILTFRIPYYVGPLARGNSRFAWMTRKSEETITPWNFEEVVDKGASAQSFIERMTNFDKNLPNEKVLPKHSLLYEYFTVYNELTKVKYVTEGMRKPAFLSGEQKKAIVDLLFKTNRKVTVKQLKEDYFKKIECFDSVEISGVEDRFNASLGTYHDLLKIIKDKDFLDNEENEDILEDIVLTLTLFEDREMIEERLKTYAHLFDDKVMKQLKRRRYTGWGRLSRKLINGIRDKQSGKTILDFLKSDGFANRNFMQLIHDDSLTFKEDIQKAQVSGQGDSLHEHIANLAGSPAIKKGILQTVKVVDELVKVMGRHKPENIVIEMARENQTTQKGQKNSRERMKRIEEGIKELGSQILKEHPVENTQLQNEKLYLYYLQNGRDMYVDQELDINRLSDYDVDHIVPQSFLKDDSIDNKVLTRSDKARGKSDNVPSEEVVKKMKNYWRQLLNAKLITQRKFDNLTKAERGGLSELDKAGFIKRQLVETRQITKHVAQILDSRMNTKYDENDKLIREVKVITLKSKLVSDFRKDFQFYKVREINNYHHAHDAYLNAVVGTALIKKYPKLESEFVYGDYKVYDVRKMIAKSEQEIGKATAKYFFYSNIMNFFKTEITLANGEIRKRPLIETNGETGEIVWDKGRDFATVRKVLSMPQVNIVKKTEVQTGGFSKESILPKRNSDKLIARKKDWDPKKYGGFDSPTVAYSVLVVAKVEKGKSKKLKSVKELLGITIMERSSFEKNPIDFLEAKGYKEVKKDLIIKLPKYSLFELENGRKRMLASAGELQKGNELALPSKYVNFLYLASHYEKLKGSPEDNEQKQLFVEQHKHYLDEIIEQISEFSKRVILADANLDKVLSAYNKHRDKPIREQAENIIHLFTLTNLGAPAAFKYFDTTIDRKRYTSTKEVLDATLIHQSITGLYETRIDLSQLGGDGGGGGGSSPAPGGTLNIEDEYRLHETSKGPDVPLGSTWLSDFPQAWAETGGMGLAVRQAPLIIPLKATSTPVSIKQYPMSQEARLGIKPHIQRLLDQGILVPCQSPWNTPLLPVKKPGTNDYRPVQDLREVNKRVEDIHPTVPNPYNLLSGLPPSHQWYTVLDLKDAFFCLRLHPTSQSLFAFEWRDPEMGISGQLTWTRLPQGFKNSPTLFNEALHRDLADFRIQHPDLILLQYVDDLLLAATSELDCQQGTRALLQTLGDLGYRASAKKAQICQKQVKYLGYLLKEGQRWLTEARKETVMGQPTPKTPRQLREFLGTAGFCRLWIPGFAEMAAPLYPLTKPGTLFEWGPDQQKAYQEIKQALLTAPALGLPDLTKPFELFVDEKQGYAKGVLTQKLGPWRRPVAYLSKKLDPVAAGWPPCLRMVAAIAVLTKDAGKLTMGQPLVILAPHAVEALVKQPPDRWLSNARMTHYQALLLDTDRVQFGPIVALNPATLLPLPEEGLQHDCLDILAEAHGTRPDLTDQPLPDADHTWYTDGSSFLQEGQRKAGAAVTTETEVVWAKALPAGTSAQRAELIALTQALKMAEGKKLNVYTDSRYAFATAHIHGEIYRRRGWLTSEGKEIKNKDEILALLKALFLPKRLSIIHCPGHQKGNRAEARGNRMADQAAREVATRETPETSTLLAGKRTADGSEFEKRTADGSEFESPKKKAKVE

SEQ ID NO: 7361 - protein, 2088 aa, synthetic construct
MPAAKRVKLDGGDKKYSIGLDIGTNSVGWAVITDEYKVPSKKFKVLGNTDRHSIKKNLIGALLFDSGETAEATRLKRTARRRYTRRKNRICYLQEIFSNEMAKVDDSFFHRLEESFLVEEDKKHERHPIFGNIVDEVAYHEKYPTIYHLRKKLVDSTDKADLRLIYLALAHMIKFRGHFLIEGDLNPDNSDVDKLFIQLVQTYNQLFEENPINASGVDAKAILSARLSKSRRLENLIAQLPGEKKNGLFGNLIALSLGLTPNFKSNFDLAEDAKLQLSKDTYDDDLDNLLAQIGDQYADLFLAAKNLSDAILLSDILRVNTEITKAPLSASMIKRYDEHHQDLTLLKALVRQQLPEKYKEIFFDQSKNGYAGYIDGGASQEEFYKFIKPILEKMDGTEELLVKLNREDLLRKQRTFDNGSIPHQIHLGELHAILRRQEDFYPFLKDNREKIEKILTFRIPYYVGPLARGNSRFAWMTRKSEETITPWNFEEVVDKGASAQSFIERMTNFDKNLPNEKVLPKHSLLYEYFTVYNELTKVKYVTEGMRKPAFLSGEQKKAIVDLLFKTNRKVTVKQLKEDYFKKIECFDSVEISGVEDRFNASLGTYHDLLKIIKDKDFLDNEENEDILEDIVLTLTLFEDREMIEERLKTYAHLFDDKVMKQLKRRRYTGWGRLSRKLINGIRDKQSGKTILDFLKSDGFANRNFMQLIHDDSLTFKEDIQKAQVSGQGDSLHEHIANLAGSPAIKKGILQTVKVVDELVKVMGRHKPENIVIEMARENQTTQKGQKNSRERMKRIEEGIKELGSQILKEHPVENTQLQNEKLYLYYLQNGRDMYVDQELDINRLSDYDVDHIVPQSFLKDDSIDNKVLTRSDKARGKSDNVPSEEVVKKMKNYWRQLLNAKLITQRKFDNLTKAERGGLSELDKAGFIKRQLVETRQITKHVAQILDSRMNTKYDENDKLIREVKVITLKSKLVSDFRKDFQFYKVREINNYHHAHDAYLNAVVGTALIKKYPKLESEFVYGDYKVYDVRKMIAKSEQEIGKATAKYFFYSNIMNFFKTEITLANGEIRKRPLIETNGETGEIVWDKGRDFATVRKVLSMPQVNIVKKTEVQTGGFSKESILPKRNSDKLIARKKDWDPKKYGGFDSPTVAYSVLVVAKVEKGKSKKLKSVKELLGITIMERSSFEKNPIDFLEAKGYKEVKKDLIIKLPKYSLFELENGRKRMLASAGELQKGNELALPSKYVNFLYLASHYEKLKGSPEDNEQKQLFVEQHKHYLDEIIEQISEFSKRVILADANLDKVLSAYNKHRDKPIREQAENIIHLFTLTNLGAPAAFKYFDTTIDRKRYTSTKEVLDATLIHQSITGLYETRIDLSQLGGDGGGGGGSSPAPGGTLQLDDEYRLYSPLVKPDQNIQFWLEQFPQAWAETAGMGLAKQVPPQVIQLKASATPVSVRQYPLSKEAQEGIRPHVQRLIQQGILVPVQSPWNTPLLPVRKPGTNDYRPVQDLREVNKRVQDIHPTVPNPYNLLCALPPQRSWYTVLDLKDAFFCLRLHPTSQPLFAFEWRDPGTGRTGQLTWTRLPQGFKNSPTIFDEALHRDLANFRIQHPQVTLLQYVDDLLLAGATKQDCLEGTKALLLELSDLGYRASAKKAQICRREVTYLGYSLRDGQRWLTEARKKTVVQIPAPTTAKQVREFLGTAGFCRLWIPGFATLAAPLYPLTKEKGEFSWAPEHQKAFDAIKKALLSAPALALPDVTKPFTLYVDERKGVARGVLTQTLGPWRRPVAYLSKKLDPVASGWPVCLKAIAAVAILVKDADKLTLGQNITVIAPHALENIVRQPPDRWMTNARMTHYQSLLLTERVTFAPPAALNPATLLPEETDEPVTHDCHQLLIEETGVRKDLTDIPLTGEVLTWFTDGSSYVVEGKRMAGAAVVDGTRTIWASSLPEGTSAQKAELMALTQALRLAEGKSINIYTDSRYAFATAHVHGAIYKQRGLLTSAGREIKNKEEILSLLEALHLPKRLAIIHCPGHQKAKDPISRGNQMADRVAKQAAQGVNLLAGKRTADGSEFEKRTADGSEFESPKKKAKVE

SEQ ID NO: 7362 - protein, 2085 aa, synthetic construct
MPAAKRVKLDGGDKKYSIGLDIGTNSVGWAVITDEYKVPSKKFKVLGNTDRHSIKKNLIGALLFDSGETAEATRLKRTARRRYTRRKNRICYLQEIFSNEMAKVDDSFFHRLEESFLVEEDKKHERHPIFGNIVDEVAYHEKYPTIYHLRKKLVDSTDKADLRLIYLALAHMIKFRGHFLIEGDLNPDNSDVDKLFIQLVQTYNQLFEENPINASGVDAKAILSARLSKSRRLENLIAQLPGEKKNGLFGNLIALSLGLTPNFKSNFDLAEDAKLQLSKDTYDDDLDNLLAQIGDQYADLFLAAKNLSDAILLSDILRVNTEITKAPLSASMIKRYDEHHQDLTLLKALVRQQLPEKYKEIFFDQSKNGYAGYIDGGASQEEFYKFIKPILEKMDGTEELLVKLNREDLLRKQRTFDNGSIPHQIHLGELHAILRRQEDFYPFLKDNREKIEKILTFRIPYYVGPLARGNSRFAWMTRKSEETITPWNFEEVVDKGASAQSFIERMTNFDKNLPNEKVLPKHSLLYEYFTVYNELTKVKYVTEGMRKPAFLSGEQKKAIVDLLFKTNRKVTVKQLKEDYFKKIECFDSVEISGVEDRFNASLGTYHDLLKIIKDKDFLDNEENEDILEDIVLTLTLFEDREMIEERLKTYAHLFDDKVMKQLKRRRYTGWGRLSRKLINGIRDKQSGKTILDFLKSDGFANRNFMQLIHDDSLTFKEDIQKAQVSGQGDSLHEHIANLAGSPAIKKGILQTVKVVDELVKVMGRHKPENIVIEMARENQTTQKGQKNSRERMKRIEEGIKELGSQILKEHPVENTQLQNEKLYLYYLQNGRDMYVDQELDINRLSDYDVDHIVPQSFLKDDSIDNKVLTRSDKARGKSDNVPSEEVVKKMKNYWRQLLNAKLITQRKFDNLTKAERGGLSELDKAGFIKRQLVETRQITKHVAQILDSRMNTKYDENDKLIREVKVITLKSKLVSDFRKDFQFYKVREINNYHHAHDAYLNAVVGTALIKKYPKLESEFVYGDYKVYDVRKMIAKSEQEIGKATAKYFFYSNIMNFFKTEITLANGEIRKRPLIETNGETGEIVWDKGRDFATVRKVLSMPQVNIVKKTEVQTGGFSKESILPKRNSDKLIARKKDWDPKKYGGFDSPTVAYSVLVVAKVEKGKSKKLKSVKELLGITIMERSSFEKNPIDFLEAKGYKEVKKDLIIKLPKYSLFELENGRKRMLASAGELQKGNELALPSKYVNFLYLASHYEKLKGSPEDNEQKQLFVEQHKHYLDEIIEQISEFSKRVILADANLDKVLSAYNKHRDKPIREQAENIIHLFTLTNLGAPAAFKYFDTTIDRKRYTSTKEVLDATLIHQSITGLYETRIDLSQLGGDGGGGGGSSPAPGGIPWLMKKPLQLTTLVPLQEYEERLLKQTMLTGSYKEKLQSLFLKYDALWQHWENQVGHRRIKPHHIATGTVNPRPQKQYPINPKAKASIQTVINDLLKQGVLIQQNSIMNTPVYPVPKPDGKWRMVLDYREVNKTIPLIAAQNQHSAGILSSIFRGKYKTTLDLSNGFWAHSITPESYWLTAFTWLGQQYCWTRLPQGFLNSPALFNADVVDLLKEVPNVQVYVDDIYISHDDPREHLEQLEKVFSLLLNAGYVVSLKKSEIAQHEVEFLGFNITKEGRGLTETFKQKLLNITPPRDLKQLQSILGKLNFARNFIPNFSELVKPLYNIIATAPGKYITWTTDNSQQLQNIISMLNSAENLEERNPEVRLIMKVNTSPSAGYIRFYNEFAKRPIMYLNYVYTKAEVKFTNTEKLLTTIHKGLIKALDLGMGQEILVYSPIVSMTKIQKTPLPERKALPIRWITWMSYLEDPRIQFHYDKTLPELQQVPTVTDDIIAKIKHPSEFSMVFYTDGSAIKHPNVNKSHNAGMGIAQVQFKPEFTVINTWSIPLGDHTAQLAEVAAVEFACKKALKIDGPVLIVTDSFYVAESVNKELPYWQSNGFFNNKKKPLKHVSKWKSIADCIQLKPDIIIIHEKGHQPTASTFHTEGNNLADKLATQGSYVVNAGKRTADGSEFEKRTADGSEFESPKKKAKVE

SEQ ID NO: 7363 - protein, 2174 aa, synthetic construct
MPAAKRVKLDGGDKKYSIGLDIGTNSVGWAVITDEYKVPSKKFKVLGNTDRHSIKKNLIGALLFDSGETAEATRLKRTARRRYTRRKNRICYLQEIFSNEMAKVDDSFFHRLEESFLVEEDKKHERHPIFGNIVDEVAYHEKYPTIYHLRKKLVDSTDKADLRLIYLALAHMIKFRGHFLIEGDLNPDNSDVDKLFIQLVQTYNQLFEENPINASGVDAKAILSARLSKSRRLENLIAQLPGEKKNGLFGNLIALSLGLTPNFKSNFDLAEDAKLQLSKDTYDDDLDNLLAQIGDQYADLFLAAKNLSDAILLSDILRVNTEITKAPLSASMIKRYDEHHQDLTLLKALVRQQLPEKYKEIFFDQSKNGYAGYIDGGASQEEFYKFIKPILEKMDGTEELLVKLNREDLLRKQRTFDNGSIPHQIHLGELHAILRRQEDFYPFLKDNREKIEKILTFRIPYYVGPLARGNSRFAWMTRKSEETITPWNFEEVVDKGASAQSFIERMTNFDKNLPNEKVLPKHSLLYEYFTVYNELTKVKYVTEGMRKPAFLSGEQKKAIVDLLFKTNRKVTVKQLKEDYFKKIECFDSVEISGVEDRFNASLGTYHDLLKIIKDKDFLDNEENEDILEDIVLTLTLFEDREMIEERLKTYAHLFDDKVMKQLKRRRYTGWGRLSRKLINGIRDKQSGKTILDFLKSDGFANRNFMQLIHDDSLTFKEDIQKAQVSGQGDSLHEHIANLAGSPAIKKGILQTVKVVDELVKVMGRHKPENIVIEMARENQTTQKGQKNSRERMKRIEEGIKELGSQILKEHPVENTQLQNEKLYLYYLQNGRDMYVDQELDINRLSDYDVDHIVPQSFLKDDSIDNKVLTRSDKARGKSDNVPSEEVVKKMKNYWRQLLNAKLITQRKFDNLTKAERGGLSELDKAGFIKRQLVETRQITKHVAQILDSRMNTKYDENDKLIREVKVITLKSKLVSDFRKDFQFYKVREINNYHHAHDAYLNAVVGTALIKKYPKLESEFVYGDYKVYDVRKMIAKSEQEIGKATAKYFFYSNIMNFFKTEITLANGEIRKRPLIETNGETGEIVWDKGRDFATVRKVLSMPQVNIVKKTEVQTGGFSKESILPKRNSDKLIARKKDWDPKKYGGFDSPTVAYSVLVVAKVEKGKSKKLKSVKELLGITIMERSSFEKNPIDFLEAKGYKEVKKDLIIKLPKYSLFELENGRKRMLASAGELQKGNELALPSKYVNFLYLASHYEKLKGSPEDNEQKQLFVEQHKHYLDEIIEQISEFSKRVILADANLDKVLSAYNKHRDKPIREQAENIIHLFTLTNLGAPAAFKYFDTTIDRKRYTSTKEVLDATLIHQSITGLYETRIDLSQLGGDGGGGGGSSPAPGGMNPLQLLQPLPAEVKGTKLLAHWNSGATITCIPESFLEDEQPIKQTLIKTIHGEKQQNVYYLTFKVKGRKVEAEVIASPYEYILLSPTDVPWLTQQPLQLTILVPLQEYQDRILNKTALPEEQKQQLKALFTKYDNLWQHWENQVGHRKIRPHNIATGDYPPRPQKQYPINPKAKPSIQIVIDDLLKQGVLTPQNSTMNTPVYPVPKPDGRWRMVLDYREVNKTIPLTAAQNQHSAGILATIVRQKYKTTLDLANGFWAHPITPDSYWLTAFTWQGKQYCWTRLPQGFLNSPALFTADAVDLLKEVPNVQVYVDDIYLSHDNPHEHIQQLEKVFQILLQAGYVVSLKKSEIGQRTVEFLGFNITKEGRGLTDTFKTKLLNVTPPKDLKQLQSILGLLNFARNFIPNFAELVQTLYNLIASSKGKYIEWTEDNTKQLNKVIEALNTASNLEERLPDQRLVIKVNTSPSAGYVRYYNESGKKPIMYLNYVFSKAELKFSMLEKLLTTMHKALIKAMDLAMGQEILVYSPIVSMTKIQKTPLPERKALPIRWITWMTYLEDPRIQFHYDKTLPELKHIPDVYTSSIPPLKHPSQYEGVFCTDGSAIKSPDPTKSNNAGMGIVHAIYNPEYKILNQWSIPLGHHTAQMAEIAAVEFACKKALKVPGPVLVITDSFYVAESANKELPYWKSNGFVNNKKEPLKHISKWKSIAECLSIKPDITIQHEKGHQPINTSIHTEGNALADKLATQGSYVVNAGKRTADGSEFEKRTADGSEFESPKKKAKVE

SEQ ID NO: 7364 - protein, 2093 aa, synthetic construct
MPAAKRVKLDGGDKKYSIGLDIGTNSVGWAVITDEYKVPSKKFKVLGNTDRHSIKKNLIGALLFDSGETAEATRLKRTARRRYTRRKNRICYLQEIFSNEMAKVDDSFFHRLEESFLVEEDKKHERHPIFGNIVDEVAYHEKYPTIYHLRKKLVDSTDKADLRLIYLALAHMIKFRGHFLIEGDLNPDNSDVDKLFIQLVQTYNQLFEENPINASGVDAKAILSARLSKSRRLENLIAQLPGEKKNGLFGNLIALSLGLTPNFKSNFDLAEDAKLQLSKDTYDDDLDNLLAQIGDQYADLFLAAKNLSDAILLSDILRVNTEITKAPLSASMIKRYDEHHQDLTLLKALVRQQLPEKYKEIFFDQSKNGYAGYIDGGASQEEFYKFIKPILEKMDGTEELLVKLNREDLLRKQRTFDNGSIPHQIHLGELHAILRRQEDFYPFLKDNREKIEKILTFRIPYYVGPLARGNSRFAWMTRKSEETITPWNFEEVVDKGASAQSFIERMTNFDKNLPNEKVLPKHSLLYEYFTVYNELTKVKYVTEGMRKPAFLSGEQKKAIVDLLFKTNRKVTVKQLKEDYFKKIECFDSVEISGVEDRFNASLGTYHDLLKIIKDKDFLDNEENEDILEDIVLTLTLFEDREMIEERLKTYAHLFDDKVMKQLKRRRYTGWGRLSRKLINGIRDKQSGKTILDFLKSDGFANRNFMQLIHDDSLTFKEDIQKAQVSGQGDSLHEHIANLAGSPAIKKGILQTVKVVDELVKVMGRHKPENIVIEMARENQTTQKGQKNSRERMKRIEEGIKELGSQILKEHPVENTQLQNEKLYLYYLQNGRDMYVDQELDINRLSDYDVDHIVPQSFLKDDSIDNKVLTRSDKARGKSDNVPSEEVVKKMKNYWRQLLNAKLITQRKFDNLTKAERGGLSELDKAGFIKRQLVETRQITKHVAQILDSRMNTKYDENDKLIREVKVITLKSKLVSDFRKDFQFYKVREINNYHHAHDAYLNAVVGTALIKKYPKLESEFVYGDYKVYDVRKMIAKSEQEIGKATAKYFFYSNIMNFFKTEITLANGEIRKRPLIETNGETGEIVWDKGRDFATVRKVLSMPQVNIVKKTEVQTGGFSKESILPKRNSDKLIARKKDWDPKKYGGFDSPTVAYSVLVVAKVEKGKSKKLKSVKELLGITIMERSSFEKNPIDFLEAKGYKEVKKDLIIKLPKYSLFELENGRKRMLASAGELQKGNELALPSKYVNFLYLASHYEKLKGSPEDNEQKQLFVEQHKHYLDEIIEQISEFSKRVILADANLDKVLSAYNKHRDKPIREQAENIIHLFTLTNLGAPAAFKYFDTTIDRKRYTSTKEVLDATLIHQSITGLYETRIDLSQLGGDGGGGGPAPGSSGGTLQLEEEYRLFEPESTQKQEMDIWLKNFPQAWAETGGMGTAHCQAPVLIQLKATATPISIRQYPMPHEAYQGIKPHIRRMLDQGILKPCQSPWNTPLLPVKKPGTEDYRPVQDLREVNKRVEDIHPTVPNPYNLLSTLPPSHPWYTVLDLKDAFFCLRLHSESQLLFAFEWRDPEIGLSGQLTWTRLPQGFKNSPTLFNEALHSDLADFRVRYPALVLLQYVDDLLLAAATRTECLEGTKALLETLGNKGYRASAKKAQICLQEVTYLGYSLKDGQRWLTKARKEAILSIPVPKNSRQVREFLGTAGYCRLWIPGFAELAAPLYPLTRPGTLFQWGTEQQLAFEDIKKALLSSPALGLPDITKPFELFIDENSGFAKGVLVQKLGPWKRPVAYLSKKLDTVASGWPPCLRMVAAIAILVKDAGKLTLGQPLTILTSHPVEALVRQPPNKWLSNARMTHYQAMLLDAERVHFGPTVSLNPATLLPLPSGGNHHDCLQILAETHGTRPDLTDQPLPDADLTWYTDGSSFIRNGEREAGAAVTTESEVIWAAPLPPGTSAQRAELIALTQALKMAEGKKLTVYTDSRYAFATTHVHGEIYRRRGWLTSEGKEIKNKNEILALLEALFLPKRLSIIHCPGHQKGDSPQAKGNRLADDTAKKAATETHSSLTVLPAGKRTADGSEFEKRTADGSEFESPKKKAKVE

SEQ ID NO: 7365 - protein, 2093 aa, synthetic construct
MPAAKRVKLDGGDKKYSIGLDIGTNSVGWAVITDEYKVPSKKFKVLGNTDRHSIKKNLIGALLFDSGETAEATRLKRTARRRYTRRKNRICYLQEIFSNEMAKVDDSFFHRLEESFLVEEDKKHERHPIFGNIVDEVAYHEKYPTIYHLRKKLVDSTDKADLRLIYLALAHMIKFRGHFLIEGDLNPDNSDVDKLFIQLVQTYNQLFEENPINASGVDAKAILSARLSKSRRLENLIAQLPGEKKNGLFGNLIALSLGLTPNFKSNFDLAEDAKLQLSKDTYDDDLDNLLAQIGDQYADLFLAAKNLSDAILLSDILRVNTEITKAPLSASMIKRYDEHHQDLTLLKALVRQQLPEKYKEIFFDQSKNGYAGYIDGGASQEEFYKFIKPILEKMDGTEELLVKLNREDLLRKQRTFDNGSIPHQIHLGELHAILRRQEDFYPFLKDNREKIEKILTFRIPYYVGPLARGNSRFAWMTRKSEETITPWNFEEVVDKGASAQSFIERMTNFDKNLPNEKVLPKHSLLYEYFTVYNELTKVKYVTEGMRKPAFLSGEQKKAIVDLLFKTNRKVTVKQLKEDYFKKIECFDSVEISGVEDRFNASLGTYHDLLKIIKDKDFLDNEENEDILEDIVLTLTLFEDREMIEERLKTYAHLFDDKVMKQLKRRRYTGWGRLSRKLINGIRDKQSGKTILDFLKSDGFANRNFMQLIHDDSLTFKEDIQKAQVSGQGDSLHEHIANLAGSPAIKKGILQTVKVVDELVKVMGRHKPENIVIEMARENQTTQKGQKNSRERMKRIEEGIKELGSQILKEHPVENTQLQNEKLYLYYLQNGRDMYVDQELDINRLSDYDVDHIVPQSFLKDDSIDNKVLTRSDKARGKSDNVPSEEVVKKMKNYWRQLLNAKLITQRKFDNLTKAERGGLSELDKAGFIKRQLVETRQITKHVAQILDSRMNTKYDENDKLIREVKVITLKSKLVSDFRKDFQFYKVREINNYHHAHDAYLNAVVGTALIKKYPKLESEFVYGDYKVYDVRKMIAKSEQEIGKATAKYFFYSNIMNFFKTEITLANGEIRKRPLIETNGETGEIVWDKGRDFATVRKVLSMPQVNIVKKTEVQTGGFSKESILPKRNSDKLIARKKDWDPKKYGGFDSPTVAYSVLVVAKVEKGKSKKLKSVKELLGITIMERSSFEKNPIDFLEAKGYKEVKKDLIIKLPKYSLFELENGRKRMLASAGELQKGNELALPSKYVNFLYLASHYEKLKGSPEDNEQKQLFVEQHKHYLDEIIEQISEFSKRVILADANLDKVLSAYNKHRDKPIREQAENIIHLFTLTNLGAPAAFKYFDTTIDRKRYTSTKEVLDATLIHQSITGLYETRIDLSQLGGDGGGGGPAPGSSGGTLQLEEEYRLFEPESTQKQEMDIWLKNFPQAWAETGGMGTAHCQAPVLIQLKATATPISIRQYPMPHEAYQGIKPHIRRMLDQGILKPCQSPWNTPLLPVKKPGTEDYRPVQDLREVNKRVEDIHPTVPNPYNLLSTLPPSHPWYTVLDLKDAFFCLRLHSESQLLFAFEWRDPEIGLSGQLTWTRLPQGFKNSPTLFNEALHSDLADFRVRYPALVLLQYVDDLLLAAATRTECLEGTKALLETLGNKGYRASAKKAQICLQEVTYLGYSLKDGQRWLTKARKEAILSIPVPKNSRQVREFLGKAGYCRLFIPGFAELAAPLYPLTRPGTLFQWGTEQQLAFEDIKKALLSSPALGLPDITKPFELFIDENSGFAKGVLVQKLGPWKRPVAYLSKKLDTVASGWPPCLRMVAAIAILVKDAGKLTLGQPLTILTSHPVEALVRQPPNKWLSNARMTHYQAMLLDAERVHFGPTVSLNPATLLPLPSGGNHHDCLQILAETHGTRPDLTDQPLPDADLTWYTDGSSFIRNGEREAGAAVTTESEVIWAAPLPPGTSAQRAELIALTQALKMAEGKKLTVYTDSRYAFATTHVHGEIYRRRGWLTSEGKEIKNKNEILALLEALFLPKRLSIIHCPGHQKGDSPQAKGNRLADDTAKKAATETHSSLTVLPAGKRTADGSEFEKRTADGSEFESPKKKAKVE

SEQ ID NO: 7366 - protein, 2174 aa, synthetic construct
MPAAKRVKLDGGDKKYSIGLDIGTNSVGWAVITDEYKVPSKKFKVLGNTDRHSIKKNLIGALLFDSGETAEATRLKRTARRRYTRRKNRICYLQEIFSNEMAKVDDSFFHRLEESFLVEEDKKHERHPIFGNIVDEVAYHEKYPTIYHLRKKLVDSTDKADLRLIYLALAHMIKFRGHFLIEGDLNPDNSDVDKLFIQLVQTYNQLFEENPINASGVDAKAILSARLSKSRRLENLIAQLPGEKKNGLFGNLIALSLGLTPNFKSNFDLAEDAKLQLSKDTYDDDLDNLLAQIGDQYADLFLAAKNLSDAILLSDILRVNTEITKAPLSASMIKRYDEHHQDLTLLKALVRQQLPEKYKEIFFDQSKNGYAGYIDGGASQEEFYKFIKPILEKMDGTEELLVKLNREDLLRKQRTFDNGSIPHQIHLGELHAILRRQEDFYPFLKDNREKIEKILTFRIPYYVGPLARGNSRFAWMTRKSEETITPWNFEEVVDKGASAQSFIERMTNFDKNLPNEKVLPKHSLLYEYFTVYNELTKVKYVTEGMRKPAFLSGEQKKAIVDLLFKTNRKVTVKQLKEDYFKKIECFDSVEISGVEDRFNASLGTYHDLLKIIKDKDFLDNEENEDILEDIVLTLTLFEDREMIEERLKTYAHLFDDKVMKQLKRRRYTGWGRLSRKLINGIRDKQSGKTILDFLKSDGFANRNFMQLIHDDSLTFKEDIQKAQVSGQGDSLHEHIANLAGSPAIKKGILQTVKVVDELVKVMGRHKPENIVIEMARENQTTQKGQKNSRERMKRIEEGIKELGSQILKEHPVENTQLQNEKLYLYYLQNGRDMYVDQELDINRLSDYDVDHIVPQSFLKDDSIDNKVLTRSDKARGKSDNVPSEEVVKKMKNYWRQLLNAKLITQRKFDNLTKAERGGLSELDKAGFIKRQLVETRQITKHVAQILDSRMNTKYDENDKLIREVKVITLKSKLVSDFRKDFQFYKVREINNYHHAHDAYLNAVVGTALIKKYPKLESEFVYGDYKVYDVRKMIAKSEQEIGKATAKYFFYSNIMNFFKTEITLANGEIRKRPLIETNGETGEIVWDKGRDFATVRKVLSMPQVNIVKKTEVQTGGFSKESILPKRNSDKLIARKKDWDPKKYGGFDSPTVAYSVLVVAKVEKGKSKKLKSVKELLGITIMERSSFEKNPIDFLEAKGYKEVKKDLIIKLPKYSLFELENGRKRMLASAGELQKGNELALPSKYVNFLYLASHYEKLKGSPEDNEQKQLFVEQHKHYLDEIIEQISEFSKRVILADANLDKVLSAYNKHRDKPIREQAENIIHLFTLTNLGAPAAFKYFDTTIDRKRYTSTKEVLDATLIHQSITGLYETRIDLSQLGGDGGGGGPAPGSSGGMNPLQLLQPLPAEIKGTKLLAHWNSGATITCIPESFLEDEQPIKKTLIKTIHGEKQQNVYYVTFKVKGRKVEAEVIASPYEYILLSPTDVPWLTQQPLQLTILVPLQEYQEKILSKTALPEDQKQQLKTLFVKYDNLWQHWENQVGHRKIRPHNIATGDYPPRPQKQYPINPKAKPSIQIVIDDLLKQGVLTPQNSTMNTPVYPVPKPDGRWRMVLDYREVNKTIPLTAAQNQHSAGILATIVRQKYKTTLDLANGFWAHPITPESYWLTAFTWQGKQYCWTRLPQGFLNSPALFNADVVDLLKEIPNVQVYVDDIYLSHDDPKEHVQQLEKVFQILLQAGYVVSLKKSEIGQKTVEFLGFNITKEGRGLTDTFKTKLLNITPPKDLKQLQSILGLLNFARNFIPNFAELVQPLYNLIAPAKGKYIEWSEENTKQLNMVIEALNTASNLEERLPEQRLVIKVNTSPSAGYVRYYNETGKKPIMYLNYVFSKAELKFSMLEKLLTTMHKALIKAMDLAMGQEILVYSPIVSMTKIQKTPLPERKALPIRWITWMTYLEDPRIQFHYDKTLPELKHIPDVYTSSQSPVKHPSQYEGVFYTDGSAIKSPDPTKSNNAGMGIVHATYKPEYQVLNQWSIPLGNHTAQMAEIAAVEFACKKALKIPGPVLVITDSFYVAESANKELPYWKSNGFVNNKKKPLKHISKWKSIAECLSMKPDITIQHEKGISLQIPVFILKGNALADKLATQGSYVVNAGKRTADGSEFEKRTADGSEFESPKKKAKVE

SEQ ID NO: 7367 - protein, 2007 aa, synthetic construct
MPAAKRVKLDGGDKKYSIGLDIGTNSVGWAVITDEYKVPSKKFKVLGNTDRHSIKKNLIGALLFDSGETAEATRLKRTARRRYTRRKNRICYLQEIFSNEMAKVDDSFFHRLEESFLVEEDKKHERHPIFGNIVDEVAYHEKYPTIYHLRKKLVDSTDKADLRLIYLALAHMIKFRGHFLIEGDLNPDNSDVDKLFIQLVQTYNQLFEENPINASGVDAKAILSARLSKSRRLENLIAQLPGEKKNGLFGNLIALSLGLTPNFKSNFDLAEDAKLQLSKDTYDDDLDNLLAQIGDQYADLFLAAKNLSDAILLSDILRVNTEITKAPLSASMIKRYDEHHQDLTLLKALVRQQLPEKYKEIFFDQSKNGYAGYIDGGASQEEFYKFIKPILEKMDGTEELLVKLNREDLLRKQRTFDNGSIPHQIHLGELHAILRRQEDFYPFLKDNREKIEKILTFRIPYYVGPLARGNSRFAWMTRKSEETITPWNFEEVVDKGASAQSFIERMTNFDKNLPNEKVLPKHSLLYEYFTVYNELTKVKYVTEGMRKPAFLSGEQKKAIVDLLFKTNRKVTVKQLKEDYFKKIECFDSVEISGVEDRFNASLGTYHDLLKIIKDKDFLDNEENEDILEDIVLTLTLFEDREMIEERLKTYAHLFDDKVMKQLKRRRYTGWGRLSRKLINGIRDKQSGKTILDFLKSDGFANRNFMQLIHDDSLTFKEDIQKAQVSGQGDSLHEHIANLAGSPAIKKGILQTVKVVDELVKVMGRHKPENIVIEMARENQTTQKGQKNSRERMKRIEEGIKELGSQILKEHPVENTQLQNEKLYLYYLQNGRDMYVDQELDINRLSDYDVDHIVPQSFLKDDSIDNKVLTRSDKARGKSDNVPSEEVVKKMKNYWRQLLNAKLITQRKFDNLTKAERGGLSELDKAGFIKRQLVETRQITKHVAQILDSRMNTKYDENDKLIREVKVITLKSKLVSDFRKDFQFYKVREINNYHHAHDAYLNAVVGTALIKKYPKLESEFVYGDYKVYDVRKMIAKSEQEIGKATAKYFFYSNIMNFFKTEITLANGEIRKRPLIETNGETGEIVWDKGRDFATVRKVLSMPQVNIVKKTEVQTGGFSKESILPKRNSDKLIARKKDWDPKKYGGFDSPTVAYSVLVVAKVEKGKSKKLKSVKELLGITIMERSSFEKNPIDFLEAKGYKEVKKDLIIKLPKYSLFELENGRKRMLASAGELQKGNELALPSKYVNFLYLASHYEKLKGSPEDNEQKQLFVEQHKHYLDEIIEQISEFSKRVILADANLDKVLSAYNKHRDKPIREQAENIIHLFTLTNLGAPAAFKYFDTTIDRKRYTSTKEVLDATLIHQSITGLYETRIDLSQLGGDGGGGGPAPGSSGGGLEHLPPPPEVSQFPLNPERLQALTDLVSRALEAKHIEPYQGPGNNPIFPVKKPNGKWRFIHDLRATNSLTRDLASPSPGPPDLTSLPQDLPHLRTIDLTDAFFQIPLPAVFQPYFAFTLPQPNNHGPGTRYSWRVLPQGFKNSPTLFQQQLSHILAPVRKAFPNSLIIQYMDDILLASPALRELTALTDKVTNALTKEGLPMSLEKTQATPGSIHFLGQVISPDCITYETLPSIHVKSIWSLAELQSMLGELQWVSKGTPVLRSSLHQLYLALRGHRDPRDTIELTSTQVQALKTIQKALALNCRSRLVSQLPILALIILRPTGTTAVLFQTKQKWPLVWLHTPHPATSLRPWGQLLANAIITLDKYSLQHYGQICKSFHHNISNQALTYYLHTSDQSSVAILLQHSHRFHNLGAQPSGPWRSLLQVPQIFQNIDVLRPPFIISPVVIDHAPCLFSDGATSKAAFILWDKQVIHQQVLPLPSTCSAQAGELFGLLAGLQKSKPWPALNIFLDSKFLIGHLRRMAWGAFLGPSTQCDLHARLFPLLQGKTVYVHHVRSHTLLQDPISRLNEATDALMLAPLLPLAGKRTADGSEFEKRTADGSEFESPKKKAKVE

SEQ ID NO: 7368 - protein, 2125 aa, synthetic construct
MPAAKRVKLDGGDKKYSIGLDIGTNSVGWAVITDEYKVPSKKFKVLGNTDRHSIKKNLIGALLFDSGETAEATRLKRTARRRYTRRKNRICYLQEIFSNEMAKVDDSFFHRLEESFLVEEDKKHERHPIFGNIVDEVAYHEKYPTIYHLRKKLVDSTDKADLRLIYLALAHMIKFRGHFLIEGDLNPDNSDVDKLFIQLVQTYNQLFEENPINASGVDAKAILSARLSKSRRLENLIAQLPGEKKNGLFGNLIALSLGLTPNFKSNFDLAEDAKLQLSKDTYDDDLDNLLAQIGDQYADLFLAAKNLSDAILLSDILRVNTEITKAPLSASMIKRYDEHHQDLTLLKALVRQQLPEKYKEIFFDQSKNGYAGYIDGGASQEEFYKFIKPILEKMDGTEELLVKLNREDLLRKQRTFDNGSIPHQIHLGELHAILRRQEDFYPFLKDNREKIEKILTFRIPYYVGPLARGNSRFAWMTRKSEETITPWNFEEVVDKGASAQSFIERMTNFDKNLPNEKVLPKHSLLYEYFTVYNELTKVKYVTEGMRKPAFLSGEQKKAIVDLLFKTNRKVTVKQLKEDYFKKIECFDSVEISGVEDRFNASLGTYHDLLKIIKDKDFLDNEENEDILEDIVLTLTLFEDREMIEERLKTYAHLFDDKVMKQLKRRRYTGWGRLSRKLINGIRDKQSGKTILDFLKSDGFANRNFMQLIHDDSLTFKEDIQKAQVSGQGDSLHEHIANLAGSPAIKKGILQTVKVVDELVKVMGRHKPENIVIEMARENQTTQKGQKNSRERMKRIEEGIKELGSQILKEHPVENTQLQNEKLYLYYLQNGRDMYVDQELDINRLSDYDVDHIVPQSFLKDDSIDNKVLTRSDKARGKSDNVPSEEVVKKMKNYWRQLLNAKLITQRKFDNLTKAERGGLSELDKAGFIKRQLVETRQITKHVAQILDSRMNTKYDENDKLIREVKVITLKSKLVSDFRKDFQFYKVREINNYHHAHDAYLNAVVGTALIKKYPKLESEFVYGDYKVYDVRKMIAKSEQEIGKATAKYFFYSNIMNFFKTEITLANGEIRKRPLIETNGETGEIVWDKGRDFATVRKVLSMPQVNIVKKTEVQTGGFSKESILPKRNSDKLIARKKDWDPKKYGGFDSPTVAYSVLVVAKVEKGKSKKLKSVKELLGITIMERSSFEKNPIDFLEAKGYKEVKKDLIIKLPKYSLFELENGRKRMLASAGELQKGNELALPSKYVNFLYLASHYEKLKGSPEDNEQKQLFVEQHKHYLDEIIEQISEFSKRVILADANLDKVLSAYNKHRDKPIREQAENIIHLFTLTNLGAPAAFKYFDTTIDRKRYTSTKEVLDATLIHQSITGLYETRIDLSQLGGDGGGGGPAPGSSGGLLGRDLLTKLKAQIQFSTEGPQVTWEDRPAMCLVLNLEEEYRLHEKPVPPSIDPSWLQLFPMVWAEKAGMGLANQVPPVVVELKSDASPVAVRQYPMSKEAREGIRPHIQRFLDLGILVPCQSPWNTPLLPVKKPGTNDYRPVQDLREVNKRVQDIHPTVPNPYNLLSSLPPSHTWYSVLDLKDAFFCLKLHPNSQPLFAFEWRDPEKGNTGQLTWTRLPQGFKNSPTLFNEALHRDLASFRALNPQVVMLQYVDDLLVAAPTYRDCKEGTRRLLQELSKLGYRVSAKKAQLCREEVTYLGYLLKGGKRWLTPARKATVMKIPTPTTPRQVREFLGTAGFCRLWIPGFASLAAPLYPLTRPKVPFTWTEAHQEAFGRIKEALLSAPALALPDLTKPFALYVDEKEGVARGVLTQTLGPWRRPVAYLSKKLDPVASGWPTCLKAIAAVALLLKDADKLTLGQNVLVIAPHNLESIVRQPPDRWMTNARMTHYQSLLLNERVSFAPPAILNPATLLPVESDDTPIHICSEILAEETGTRPDLRDQPLPGVPAWYTDGSSFIMDGRRQAGAAIVDNKRTVWASNLPEGTSAQKAELIALTQALRLAEGKSINIYTDSRYAFATAHVHGAIYKQRGWLTSAGKDIKNKEEILALLEAIHLPKRVAIIHCPGHQRGTDPVATGNRKADEAAKQAAQSTRILTETTKNAGKRTADGSEFEKRTADGSEFESPKKKAKVE

SEQ ID NO: 7369 - protein, 2125 aa, synthetic construct
MPAAKRVKLDGGDKKYSIGLDIGTNSVGWAVITDEYKVPSKKFKVLGNTDRHSIKKNLIGALLFDSGETAEATRLKRTARRRYTRRKNRICYLQEIFSNEMAKVDDSFFHRLEESFLVEEDKKHERHPIFGNIVDEVAYHEKYPTIYHLRKKLVDSTDKADLRLIYLALAHMIKFRGHFLIEGDLNPDNSDVDKLFIQLVQTYNQLFEENPINASGVDAKAILSARLSKSRRLENLIAQLPGEKKNGLFGNLIALSLGLTPNFKSNFDLAEDAKLQLSKDTYDDDLDNLLAQIGDQYADLFLAAKNLSDAILLSDILRVNTEITKAPLSASMIKRYDEHHQDLTLLKALVRQQLPEKYKEIFFDQSKNGYAGYIDGGASQEEFYKFIKPILEKMDGTEELLVKLNREDLLRKQRTFDNGSIPHQIHLGELHAILRRQEDFYPFLKDNREKIEKILTFRIPYYVGPLARGNSRFAWMTRKSEETITPWNFEEVVDKGASAQSFIERMTNFDKNLPNEKVLPKHSLLYEYFTVYNELTKVKYVTEGMRKPAFLSGEQKKAIVDLLFKTNRKVTVKQLKEDYFKKIECFDSVEISGVEDRFNASLGTYHDLLKIIKDKDFLDNEENEDILEDIVLTLTLFEDREMIEERLKTYAHLFDDKVMKQLKRRRYTGWGRLSRKLINGIRDKQSGKTILDFLKSDGFANRNFMQLIHDDSLTFKEDIQKAQVSGQGDSLHEHIANLAGSPAIKKGILQTVKVVDELVKVMGRHKPENIVIEMARENQTTQKGQKNSRERMKRIEEGIKELGSQILKEHPVENTQLQNEKLYLYYLQNGRDMYVDQELDINRLSDYDVDHIVPQSFLKDDSIDNKVLTRSDKARGKSDNVPSEEVVKKMKNYWRQLLNAKLITQRKFDNLTKAERGGLSELDKAGFIKRQLVETRQITKHVAQILDSRMNTKYDENDKLIREVKVITLKSKLVSDFRKDFQFYKVREINNYHHAHDAYLNAVVGTALIKKYPKLESEFVYGDYKVYDVRKMIAKSEQEIGKATAKYFFYSNIMNFFKTEITLANGEIRKRPLIETNGETGEIVWDKGRDFATVRKVLSMPQVNIVKKTEVQTGGFSKESILPKRNSDKLIARKKDWDPKKYGGFDSPTVAYSVLVVAKVEKGKSKKLKSVKELLGITIMERSSFEKNPIDFLEAKGYKEVKKDLIIKLPKYSLFELENGRKRMLASAGELQKGNELALPSKYVNFLYLASHYEKLKGSPEDNEQKQLFVEQHKHYLDEIIEQISEFSKRVILADANLDKVLSAYNKHRDKPIREQAENIIHLFTLTNLGAPAAFKYFDTTIDRKRYTSTKEVLDATLIHQSITGLYETRIDLSQLGGDGGGGGPAPGSSGGLLGRDLLTKLKAQIQFSTEGPQVTWEDRPAMCLVLNLEEEYRLHEKPVPPSIDPSWLQLFPMVWAEKAGMGLANQVPPVVVELKSDASPVAVRQYPMSKEAREGIRPHIQRFLDLGILVPCQSPWNTPLLPVKKPGTNDYRPVQDLREVNKRVQDIHPTVPNPYNLLSSLPPSHTWYSVLDLKDAFFCLKLHPNSQPLFAFEWRDPEKGNTGQLTWTRLPQGFKNSPTLFNEALHRDLASFRALNPQVVMLQYVDDLLVAAPTYRDCKEGTRRLLQELSKLGYRVSAKKAQLCREEVTYLGYLLKGGKRWLTPARKATVMKIPTPTTPRQVREFLGKAGFCRLFIPGFASLAAPLYPLTRPKVPFTWTEAHQEAFGRIKEALLSAPALALPDLTKPFALYVDEKEGVARGVLTQTLGPWRRPVAYLSKKLDPVASGWPTCLKAIAAVALLLKDADKLTLGQNVLVIAPHNLESIVRQPPDRWMTNARMTHYQSLLLNERVSFAPPAILNPATLLPVESDDTPIHICSEILAEETGTRPDLRDQPLPGVPAWYTDGSSFIMDGRRQAGAAIVDNKRTVWASNLPEGTSAQKAELIALTQALRLAEGKSINIYTDSRYAFATAHVHGAIYKQRGWLTSAGKDIKNKEEILALLEAIHLPKRVAIIHCPGHQRGTDPVATGNRKADEAAKQAAQSTRILTETTKNAGKRTADGSEFEKRTADGSEFESPKKKAKVE

SEQ ID NO: 7370 - protein, 2216 aa, synthetic construct
MPAAKRVKLDGGDKKYSIGLDIGTNSVGWAVITDEYKVPSKKFKVLGNTDRHSIKKNLIGALLFDSGETAEATRLKRTARRRYTRRKNRICYLQEIFSNEMAKVDDSFFHRLEESFLVEEDKKHERHPIFGNIVDEVAYHEKYPTIYHLRKKLVDSTDKADLRLIYLALAHMIKFRGHFLIEGDLNPDNSDVDKLFIQLVQTYNQLFEENPINASGVDAKAILSARLSKSRRLENLIAQLPGEKKNGLFGNLIALSLGLTPNFKSNFDLAEDAKLQLSKDTYDDDLDNLLAQIGDQYADLFLAAKNLSDAILLSDILRVNTEITKAPLSASMIKRYDEHHQDLTLLKALVRQQLPEKYKEIFFDQSKNGYAGYIDGGASQEEFYKFIKPILEKMDGTEELLVKLNREDLLRKQRTFDNGSIPHQIHLGELHAILRRQEDFYPFLKDNREKIEKILTFRIPYYVGPLARGNSRFAWMTRKSEETITPWNFEEVVDKGASAQSFIERMTNFDKNLPNEKVLPKHSLLYEYFTVYNELTKVKYVTEGMRKPAFLSGEQKKAIVDLLFKTNRKVTVKQLKEDYFKKIECFDSVEISGVEDRFNASLGTYHDLLKIIKDKDFLDNEENEDILEDIVLTLTLFEDREMIEERLKTYAHLFDDKVMKQLKRRRYTGWGRLSRKLINGIRDKQSGKTILDFLKSDGFANRNFMQLIHDDSLTFKEDIQKAQVSGQGDSLHEHIANLAGSPAIKKGILQTVKVVDELVKVMGRHKPENIVIEMARENQTTQKGQKNSRERMKRIEEGIKELGSQILKEHPVENTQLQNEKLYLYYLQNGRDMYVDQELDINRLSDYDVDHIVPQSFLKDDSIDNKVLTRSDKARGKSDNVPSEEVVKKMKNYWRQLLNAKLITQRKFDNLTKAERGGLSELDKAGFIKRQLVETRQITKHVAQILDSRMNTKYDENDKLIREVKVITLKSKLVSDFRKDFQFYKVREINNYHHAHDAYLNAVVGTALIKKYPKLESEFVYGDYKVYDVRKMIAKSEQEIGKATAKYFFYSNIMNFFKTEITLANGEIRKRPLIETNGETGEIVWDKGRDFATVRKVLSMPQVNIVKKTEVQTGGFSKESILPKRNSDKLIARKKDWDPKKYGGFDSPTVAYSVLVVAKVEKGKSKKLKSVKELLGITIMERSSFEKNPIDFLEAKGYKEVKKDLIIKLPKYSLFELENGRKRMLASAGELQKGNELALPSKYVNFLYLASHYEKLKGSPEDNEQKQLFVEQHKHYLDEIIEQISEFSKRVILADANLDKVLSAYNKHRDKPIREQAENIIHLFTLTNLGAPAAFKYFDTTIDRKRYTSTKEVLDATLIHQSITGLYETRIDLSQLGGDGGGGGPAPGSSGGTLGDQGSRGSDPLPEPRVTLTVEGIPTEFLVNTGAEHSVLTKPMGKMGSKRTVVAGATGSKVYPWTTKRLLKIGQKQVTHSFLVIPECPAPLLGRDLLTKLKAQIQFSTEGPQVTWEDRPAMCLVLNLEEEYRLHEKPVPPSIDPSWLQLFPMVWAEKAGMGLANQVPPVVVELKSDASPVAVRQYPMSKEAREGIRPHIQRFLDLGILVPCQSPWNTPLLPVKKPGTNDYRPVQDLREVNKRVQDIHPTVPNPYNLLSSLPPSHTWYSVLDLKDAFFCLKLHPNSQPLFAFEWRDPEKGNTGQLTWTRLPQGFKNSPTLFNEALHRDLASFRALNPQVVMLQYVDDLLVAAPTYRDCKEGTRRLLQELSKLGYRVSAKKAQLCREEVTYLGYLLKGGKRWLTPARKATVMKIPTPTTPRQVREFLGTAGFCRLWIPGFASLAAPLYPLTRPKVPFTWTEAHQEAFGRIKEALLSAPALALPDLTKPFALYVDEKEGVARGVLTQTLGPWRRPVAYLSKKLDPVASGWPTCLKAIAAVALLLKDADKLTLGQNVLVIAPHNLESIVRQPPDRWMTNARMTHYQSLLLNERVSFAPPAILNPATLLPVESDDTPIHICSEILAEETGTRPDLRDQPLPGVPAWYTDGSSFIMDGRRQAGAAIVDNKRTVWASNLPEGTSAQKAELIALTQALRLAEGKSINIYTDSRYAFATAHVHGAIYKQRGWLTSAGKDIKNKEEILALLEAIHLPKRVAIIHCPGHQRGTDPVATGNRKADEAAKQAAQSTRILTETTKNAGKRTADGSEFEKRTADGSEFESPKKKAKVE

SEQ ID NO: 7371 - protein, 2216 aa, synthetic construct
MPAAKRVKLDGGDKKYSIGLDIGTNSVGWAVITDEYKVPSKKFKVLGNTDRHSIKKNLIGALLFDSGETAEATRLKRTARRRYTRRKNRICYLQEIFSNEMAKVDDSFFHRLEESFLVEEDKKHERHPIFGNIVDEVAYHEKYPTIYHLRKKLVDSTDKADLRLIYLALAHMIKFRGHFLIEGDLNPDNSDVDKLFIQLVQTYNQLFEENPINASGVDAKAILSARLSKSRRLENLIAQLPGEKKNGLFGNLIALSLGLTPNFKSNFDLAEDAKLQLSKDTYDDDLDNLLAQIGDQYADLFLAAKNLSDAILLSDILRVNTEITKAPLSASMIKRYDEHHQDLTLLKALVRQQLPEKYKEIFFDQSKNGYAGYIDGGASQEEFYKFIKPILEKMDGTEELLVKLNREDLLRKQRTFDNGSIPHQIHLGELHAILRRQEDFYPFLKDNREKIEKILTFRIPYYVGPLARGNSRFAWMTRKSEETITPWNFEEVVDKGASAQSFIERMTNFDKNLPNEKVLPKHSLLYEYFTVYNELTKVKYVTEGMRKPAFLSGEQKKAIVDLLFKTNRKVTVKQLKEDYFKKIECFDSVEISGVEDRFNASLGTYHDLLKIIKDKDFLDNEENEDILEDIVLTLTLFEDREMIEERLKTYAHLFDDKVMKQLKRRRYTGWGRLSRKLINGIRDKQSGKTILDFLKSDGFANRNFMQLIHDDSLTFKEDIQKAQVSGQGDSLHEHIANLAGSPAIKKGILQTVKVVDELVKVMGRHKPENIVIEMARENQTTQKGQKNSRERMKRIEEGIKELGSQILKEHPVENTQLQNEKLYLYYLQNGRDMYVDQELDINRLSDYDVDHIVPQSFLKDDSIDNKVLTRSDKARGKSDNVPSEEVVKKMKNYWRQLLNAKLITQRKFDNLTKAERGGLSELDKAGFIKRQLVETRQITKHVAQILDSRMNTKYDENDKLIREVKVITLKSKLVSDFRKDFQFYKVREINNYHHAHDAYLNAVVGTALIKKYPKLESEFVYGDYKVYDVRKMIAKSEQEIGKATAKYFFYSNIMNFFKTEITLANGEIRKRPLIETNGETGEIVWDKGRDFATVRKVLSMPQVNIVKKTEVQTGGFSKESILPKRNSDKLIARKKDWDPKKYGGFDSPTVAYSVLVVAKVEKGKSKKLKSVKELLGITIMERSSFEKNPIDFLEAKGYKEVKKDLIIKLPKYSLFELENGRKRMLASAGELQKGNELALPSKYVNFLYLASHYEKLKGSPEDNEQKQLFVEQHKHYLDEIIEQISEFSKRVILADANLDKVLSAYNKHRDKPIREQAENIIHLFTLTNLGAPAAFKYFDTTIDRKRYTSTKEVLDATLIHQSITGLYETRIDLSQLGGDGGGGGPAPGSSGGTLGDQGSRGSDPLPEPRVTLTVEGIPTEFLVNTGAEHSVLTKPMGKMGSKRTVVAGATGSKVYPWTTKRLLKIGQKQVTHSFLVIPECPAPLLGRDLLTKLKAQIQFSTEGPQVTWEDRPAMCLVLNLEEEYRLHEKPVPPSIDPSWLQLFPMVWAEKAGMGLANQVPPVVVELKSDASPVAVRQYPMSKEAREGIRPHIQRFLDLGILVPCQSPWNTPLLPVKKPGTNDYRPVQDLREVNKRVQDIHPTVPNPYNLLSSLPPSHTWYSVLDLKDAFFCLKLHPNSQPLFAFEWRDPEKGNTGQLTWTRLPQGFKNSPTLFNEALHRDLASFRALNPQVVMLQYVDDLLVAAPTYRDCKEGTRRLLQELSKLGYRVSAKKAQLCREEVTYLGYLLKGGKRWLTPARKATVMKIPTPTTPRQVREFLGKAGFCRLFIPGFASLAAPLYPLTRPKVPFTWTEAHQEAFGRIKEALLSAPALALPDLTKPFALYVDEKEGVARGVLTQTLGPWRRPVAYLSKKLDPVASGWPTCLKAIAAVALLLKDADKLTLGQNVLVIAPHNLESIVRQPPDRWMTNARMTHYQSLLLNERVSFAPPAILNPATLLPVESDDTPIHICSEILAEETGTRPDLRDQPLPGVPAWYTDGSSFIMDGRRQAGAAIVDNKRTVWASNLPEGTSAQKAELIALTQALRLAEGKSINIYTDSRYAFATAHVHGAIYKQRGWLTSAGKDIKNKEEILALLEAIHLPKRVAIIHCPGHQRGTDPVATGNRKADEAAKQAAQSTRILTETTKNAGKRTADGSEFEKRTADGSEFESPKKKAKVE

SEQ ID NO: 7372 - protein, 2094 aa, synthetic construct
MPAAKRVKLDGGDKKYSIGLDIGTNSVGWAVITDEYKVPSKKFKVLGNTDRHSIKKNLIGALLFDSGETAEATRLKRTARRRYTRRKNRICYLQEIFSNEMAKVDDSFFHRLEESFLVEEDKKHERHPIFGNIVDEVAYHEKYPTIYHLRKKLVDSTDKADLRLIYLALAHMIKFRGHFLIEGDLNPDNSDVDKLFIQLVQTYNQLFEENPINASGVDAKAILSARLSKSRRLENLIAQLPGEKKNGLFGNLIALSLGLTPNFKSNFDLAEDAKLQLSKDTYDDDLDNLLAQIGDQYADLFLAAKNLSDAILLSDILRVNTEITKAPLSASMIKRYDEHHQDLTLLKALVRQQLPEKYKEIFFDQSKNGYAGYIDGGASQEEFYKFIKPILEKMDGTEELLVKLNREDLLRKQRTFDNGSIPHQIHLGELHAILRRQEDFYPFLKDNREKIEKILTFRIPYYVGPLARGNSRFAWMTRKSEETITPWNFEEVVDKGASAQSFIERMTNFDKNLPNEKVLPKHSLLYEYFTVYNELTKVKYVTEGMRKPAFLSGEQKKAIVDLLFKTNRKVTVKQLKEDYFKKIECFDSVEISGVEDRFNASLGTYHDLLKIIKDKDFLDNEENEDILEDIVLTLTLFEDREMIEERLKTYAHLFDDKVMKQLKRRRYTGWGRLSRKLINGIRDKQSGKTILDFLKSDGFANRNFMQLIHDDSLTFKEDIQKAQVSGQGDSLHEHIANLAGSPAIKKGILQTVKVVDELVKVMGRHKPENIVIEMARENQTTQKGQKNSRERMKRIEEGIKELGSQILKEHPVENTQLQNEKLYLYYLQNGRDMYVDQELDINRLSDYDVDHIVPQSFLKDDSIDNKVLTRSDKARGKSDNVPSEEVVKKMKNYWRQLLNAKLITQRKFDNLTKAERGGLSELDKAGFIKRQLVETRQITKHVAQILDSRMNTKYDENDKLIREVKVITLKSKLVSDFRKDFQFYKVREINNYHHAHDAYLNAVVGTALIKKYPKLESEFVYGDYKVYDVRKMIAKSEQEIGKATAKYFFYSNIMNFFKTEITLANGEIRKRPLIETNGETGEIVWDKGRDFATVRKVLSMPQVNIVKKTEVQTGGFSKESILPKRNSDKLIARKKDWDPKKYGGFDSPTVAYSVLVVAKVEKGKSKKLKSVKELLGITIMERSSFEKNPIDFLEAKGYKEVKKDLIIKLPKYSLFELENGRKRMLASAGELQKGNELALPSKYVNFLYLASHYEKLKGSPEDNEQKQLFVEQHKHYLDEIIEQISEFSKRVILADANLDKVLSAYNKHRDKPIREQAENIIHLFTLTNLGAPAAFKYFDTTIDRKRYTSTKEVLDATLIHQSITGLYETRIDLSQLGGDGGGGGPAPGSSGGTLNIEDEYRLHETSKEPDVSLGSTWLSDFPQAWAETGGMGLAVRQAPLIIPLKATSTPVSIKQYPMSQEARLGIKPHIQRLLDQGILVPCQSPWNTPLLPVKKPGTNDYRPVQDLREVNKRVEDIHPTVPNPYNLLSGLPPSHQWYTVLDLKDAFFCLRLHPTSQPLFAFEWRDPEMGISGQLTWTRLPQGFKNSPTLFNEALHRDLAGFRIQHPDLILLQYVDDLLLAATSELDCQQGTRALLQTLGDLGYRASAKKAQICQKQVKYLGYLLKEGQRWLTEARKETVMGQPIPKTPRQLREFLGKAGFCRLFIPGFAEMAAPLYPLTKPGTLFNWGPDQQKAFQEIKQALLTAPALGLPDLTKPFELFVDEKQGYAKGVLTQKLGPWRRPVAYLSKKLDPVAAGWPPCLRMVAAIAVLTKDAGKLTMGQPLVILAPHAVEALVKQPPDRWLSNARMTHYQALLLDTDRVQFGPVVALNPATLLPLPEEGLQHDCLDILAEAHGTRSDLMDQPLPDADHTWYTDGSSFLQEGQRKAGAAVTTETEVIWARALPAGTSAQRAELIALTQALKMAEGKKLNVYTDSRYAFATAHIHGEIYRRRGWLTSEGKEIKNKDEILALLKALFLPKRLSIIHCPGHQKGNSAEARGNRMADQAAREVATRETPETSTLLAGKRTADGSEFEKRTADGSEFESPKKKAKVE

SEQ ID NO: 7373 - protein, 2094 aa, synthetic construct
MPAAKRVKLDGGDKKYSIGLDIGTNSVGWAVITDEYKVPSKKFKVLGNTDRHSIKKNLIGALLFDSGETAEATRLKRTARRRYTRRKNRICYLQEIFSNEMAKVDDSFFHRLEESFLVEEDKKHERHPIFGNIVDEVAYHEKYPTIYHLRKKLVDSTDKADLRLIYLALAHMIKFRGHFLIEGDLNPDNSDVDKLFIQLVQTYNQLFEENPINASGVDAKAILSARLSKSRRLENLIAQLPGEKKNGLFGNLIALSLGLTPNFKSNFDLAEDAKLQLSKDTYDDDLDNLLAQIGDQYADLFLAAKNLSDAILLSDILRVNTEITKAPLSASMIKRYDEHHQDLTLLKALVRQQLPEKYKEIFFDQSKNGYAGYIDGGASQEEFYKFIKPILEKMDGTEELLVKLNREDLLRKQRTFDNGSIPHQIHLGELHAILRRQEDFYPFLKDNREKIEKILTFRIPYYVGPLARGNSRFAWMTRKSEETITPWNFEEVVDKGASAQSFIERMTNFDKNLPNEKVLPKHSLLYEYFTVYNELTKVKYVTEGMRKPAFLSGEQKKAIVDLLFKTNRKVTVKQLKEDYFKKIECFDSVEISGVEDRFNASLGTYHDLLKIIKDKDFLDNEENEDILEDIVLTLTLFEDREMIEERLKTYAHLFDDKVMKQLKRRRYTGWGRLSRKLINGIRDKQSGKTILDFLKSDGFANRNFMQLIHDDSLTFKEDIQKAQVSGQGDSLHEHIANLAGSPAIKKGILQTVKVVDELVKVMGRHKPENIVIEMARENQTTQKGQKNSRERMKRIEEGIKELGSQILKEHPVENTQLQNEKLYLYYLQNGRDMYVDQELDINRLSDYDVDHIVPQSFLKDDSIDNKVLTRSDKARGKSDNVPSEEVVKKMKNYWRQLLNAKLITQRKFDNLTKAERGGLSELDKAGFIKRQLVETRQITKHVAQILDSRMNTKYDENDKLIREVKVITLKSKLVSDFRKDFQFYKVREINNYHHAHDAYLNAVVGTALIKKYPKLESEFVYGDYKVYDVRKMIAKSEQEIGKATAKYFFYSNIMNFFKTEITLANGEIRKRPLIETNGETGEIVWDKGRDFATVRKVLSMPQVNIVKKTEVQTGGFSKESILPKRNSDKLIARKKDWDPKKYGGFDSPTVAYSVLVVAKVEKGKSKKLKSVKELLGITIMERSSFEKNPIDFLEAKGYKEVKKDLIIKLPKYSLFELENGRKRMLASAGELQKGNELALPSKYVNFLYLASHYEKLKGSPEDNEQKQLFVEQHKHYLDEIIEQISEFSKRVILADANLDKVLSAYNKHRDKPIREQAENIIHLFTLTNLGAPAAFKYFDTTIDRKRYTSTKEVLDATLIHQSITGLYETRIDLSQLGGDGGGGGPAPGSSGGTLNIEDEYRLHETSKGPDVPLGSTWLSDFPQAWAETGGMGLAFRQAPLIISLKATSTPVSIKQYPMSQEARLGIKPHIQRLLDQGILVPCQSPWNTPLLPVKKPGTNDYRPVQDLREVNKRVEDIHPTVPNPYNLLSGLPPSHQWYTVLDLKDAFFCLRLHPTSQSLFAFEWKDPEMGISGQLTWTRLPQGFKNSPTLFNEALHRDLADFRIQHPDLILLQYVDDLLLAATSELDCQQGTRALLQTLGDLGYRASAKKAQICQKQVKYLGYLLKEGQRWLTEARKETVMGQPTPKTPRQLREFLGKAGLCRLFIPGFAEMAAPLYPLTKPGTLFKWGPDQQKAYQEIKQALLTAPALGLPDLTKPFELFVDEKQGYAKGVLTQKLGPWRRPVAYLSKKLDPVAAGWPPCLRMVAAIAVLTKDVGKLTMGQPLVILAPHAVEALVKQPPDRWLSNARMTHYQALLLDTDRVQFGPIVALNPATLLPLPEEGLQHDCLDILAEAHGTRPDLTDQPLPDADHTWYTDGSSFLQEGQRRAGAAVTTETEVIWAKALPAGTSAQRAELIALTQALKMAAGKKLNVYTDSRYAFATAHIHGEIYRRRGWLTSEGKEIKNKDEILALLKALFLPKRLSIIHCPGHQKGNHAEARGNRMADQAAREVATRETPETSTLLAGKRTADGSEFEKRTADGSEFESPKKKAKVE

SEQ ID NO: 7374 - protein, 2094 aa, synthetic construct
MPAAKRVKLDGGDKKYSIGLDIGTNSVGWAVITDEYKVPSKKFKVLGNTDRHSIKKNLIGALLFDSGETAEATRLKRTARRRYTRRKNRICYLQEIFSNEMAKVDDSFFHRLEESFLVEEDKKHERHPIFGNIVDEVAYHEKYPTIYHLRKKLVDSTDKADLRLIYLALAHMIKFRGHFLIEGDLNPDNSDVDKLFIQLVQTYNQLFEENPINASGVDAKAILSARLSKSRRLENLIAQLPGEKKNGLFGNLIALSLGLTPNFKSNFDLAEDAKLQLSKDTYDDDLDNLLAQIGDQYADLFLAAKNLSDAILLSDILRVNTEITKAPLSASMIKRYDEHHQDLTLLKALVRQQLPEKYKEIFFDQSKNGYAGYIDGGASQEEFYKFIKPILEKMDGTEELLVKLNREDLLRKQRTFDNGSIPHQIHLGELHAILRRQEDFYPFLKDNREKIEKILTFRIPYYVGPLARGNSRFAWMTRKSEETITPWNFEEVVDKGASAQSFIERMTNFDKNLPNEKVLPKHSLLYEYFTVYNELTKVKYVTEGMRKPAFLSGEQKKAIVDLLFKTNRKVTVKQLKEDYFKKIECFDSVEISGVEDRFNASLGTYHDLLKIIKDKDFLDNEENEDILEDIVLTLTLFEDREMIEERLKTYAHLFDDKVMKQLKRRRYTGWGRLSRKLINGIRDKQSGKTILDFLKSDGFANRNFMQLIHDDSLTFKEDIQKAQVSGQGDSLHEHIANLAGSPAIKKGILQTVKVVDELVKVMGRHKPENIVIEMARENQTTQKGQKNSRERMKRIEEGIKELGSQILKEHPVENTQLQNEKLYLYYLQNGRDMYVDQELDINRLSDYDVDHIVPQSFLKDDSIDNKVLTRSDKARGKSDNVPSEEVVKKMKNYWRQLLNAKLITQRKFDNLTKAERGGLSELDKAGFIKRQLVETRQITKHVAQILDSRMNTKYDENDKLIREVKVITLKSKLVSDFRKDFQFYKVREINNYHHAHDAYLNAVVGTALIKKYPKLESEFVYGDYKVYDVRKMIAKSEQEIGKATAKYFFYSNIMNFFKTEITLANGEIRKRPLIETNGETGEIVWDKGRDFATVRKVLSMPQVNIVKKTEVQTGGFSKESILPKRNSDKLIARKKDWDPKKYGGFDSPTVAYSVLVVAKVEKGKSKKLKSVKELLGITIMERSSFEKNPIDFLEAKGYKEVKKDLIIKLPKYSLFELENGRKRMLASAGELQKGNELALPSKYVNFLYLASHYEKLKGSPEDNEQKQLFVEQHKHYLDEIIEQISEFSKRVILADANLDKVLSAYNKHRDKPIREQAENIIHLFTLTNLGAPAAFKYFDTTIDRKRYTSTKEVLDATLIHQSITGLYETRIDLSQLGGDGGGGGPAPGSSGGTLNIEDEYRLHETSKGPDVPLGSTWLSDFPQAWAETGGMGLAVRQAPLIIPLKATSTPVSIKQYPMSQEARLGIKPHIQRLLDQGILVPCQSPWNTPLLPVKKPGTNDYRPVQDLREVNKRVEDIHPTVPNPYNLLSGLPPSHQWYTVLDLKDAFFCLRLHPTSQSLFAFEWRDPEMGISGQLTWTRLPQGFKNSPTLFNEALHRDLADFRIQHPDLILLQYVDDLLLAATSELDCQQGTRALLQTLGDLGYRASAKKAQICQKQVKYLGYLLKEGQRWLTEARKETVMGQPTPKTPRQLREFLGTAGFCRLWIPGFAEMAAPLYPLTKPGTLFEWGPDQQKAYQEIKQALLTAPALGLPDLTKPFELFVDEKQGYAKGVLTQKLGPWRRPVAYLSKKLDPVAAGWPPCLRMVAAIAVLTKDAGKLTMGQPLVILAPHAVEALVKQPPDRWLSNARMTHYQALLLDTDRVQFGPIVALNPATLLPLPEEGLQHDCLDILAEAHGTRPDLTDQPLPDADHTWYTDGSSFLQEGQRKAGAAVTTETEVVWAKALPAGTSAQRAELIALTQALKMAEGKKLNVYTDSRYAFATAHIHGEIYRRRGWLTSEGKEIKNKDEILALLKALFLPKRLSIIHCPGHQKGNRAEARGNRMADQAAREVATRETPETSTLLAGKRTADGSEFEKRTADGSEFESPKKKAKVE

SEQ ID NO: 7375 - protein, 2094 aa, synthetic construct
MPAAKRVKLDGGDKKYSIGLDIGTNSVGWAVITDEYKVPSKKFKVLGNTDRHSIKKNLIGALLFDSGETAEATRLKRTARRRYTRRKNRICYLQEIFSNEMAKVDDSFFHRLEESFLVEEDKKHERHPIFGNIVDEVAYHEKYPTIYHLRKKLVDSTDKADLRLIYLALAHMIKFRGHFLIEGDLNPDNSDVDKLFIQLVQTYNQLFEENPINASGVDAKAILSARLSKSRRLENLIAQLPGEKKNGLFGNLIALSLGLTPNFKSNFDLAEDAKLQLSKDTYDDDLDNLLAQIGDQYADLFLAAKNLSDAILLSDILRVNTEITKAPLSASMIKRYDEHHQDLTLLKALVRQQLPEKYKEIFFDQSKNGYAGYIDGGASQEEFYKFIKPILEKMDGTEELLVKLNREDLLRKQRTFDNGSIPHQIHLGELHAILRRQEDFYPFLKDNREKIEKILTFRIPYYVGPLARGNSRFAWMTRKSEETITPWNFEEVVDKGASAQSFIERMTNFDKNLPNEKVLPKHSLLYEYFTVYNELTKVKYVTEGMRKPAFLSGEQKKAIVDLLFKTNRKVTVKQLKEDYFKKIECFDSVEISGVEDRFNASLGTYHDLLKIIKDKDFLDNEENEDILEDIVLTLTLFEDREMIEERLKTYAHLFDDKVMKQLKRRRYTGWGRLSRKLINGIRDKQSGKTILDFLKSDGFANRNFMQLIHDDSLTFKEDIQKAQVSGQGDSLHEHIANLAGSPAIKKGILQTVKVVDELVKVMGRHKPENIVIEMARENQTTQKGQKNSRERMKRIEEGIKELGSQILKEHPVENTQLQNEKLYLYYLQNGRDMYVDQELDINRLSDYDVDHIVPQSFLKDDSIDNKVLTRSDKARGKSDNVPSEEVVKKMKNYWRQLLNAKLITQRKFDNLTKAERGGLSELDKAGFIKRQLVETRQITKHVAQILDSRMNTKYDENDKLIREVKVITLKSKLVSDFRKDFQFYKVREINNYHHAHDAYLNAVVGTALIKKYPKLESEFVYGDYKVYDVRKMIAKSEQEIGKATAKYFFYSNIMNFFKTEITLANGEIRKRPLIETNGETGEIVWDKGRDFATVRKVLSMPQVNIVKKTEVQTGGFSKESILPKRNSDKLIARKKDWDPKKYGGFDSPTVAYSVLVVAKVEKGKSKKLKSVKELLGITIMERSSFEKNPIDFLEAKGYKEVKKDLIIKLPKYSLFELENGRKRMLASAGELQKGNELALPSKYVNFLYLASHYEKLKGSPEDNEQKQLFVEQHKHYLDEIIEQISEFSKRVILADANLDKVLSAYNKHRDKPIREQAENIIHLFTLTNLGAPAAFKYFDTTIDRKRYTSTKEVLDATLIHQSITGLYETRIDLSQLGGDGGGGGPAPGSSGGTLNIEDEYRLHEISTEPDVSPGSTWLSDFPQAWAETGGMGLAVRQAPLIIPLKATSTPVSIKQYPMSQEAKLGIKPHIQRLLDQGILVPCQSPWNTPLLPVKKPGTNDYRPVQGLREVNKRVEDIHPTVPNPYNLLSGLPTSHRWYTVLDLKDAFFCLRLHPTSQPLFASEWRDPGMGISGQLTWTRLPQGFKNSPTLFDEALHRGLADFRIQHPDLILLQYVDDLLLAATSELDCQQGTRALLKTLGNLGYRASAKKAQICQKQVKYLGYLLREGQRWLTEARKETVMGQPTPKTPRQLREFLGTAGFCRLWIPRFAEMAAPLYPLTKTGTLFNWGPDQQKAYHEIKQALLTAPALGLPDLTKPFELFVDEKQGYAKGVLTQKLGPWRRPVAYLSKKLDPVAAGWPPCLRMVAAIAVLTKDAGKLTMGQPLVILAPHAVEALVKQPPDRWLSNARMTHYQAMLLDTDRVQFGPVVALNPATLLPLPEEGAPHDCLEILAETHGTEPDLTDQPIPDADHTWYTDGSSFLQEGQRKAGAAVTTETEVIWARALPAGTSAQRAELIALTQALKMAEGKRLNVYTDSRYAFATAHIHGEIYKRRGLLTSEGREIKNKSEILALLKALFLPKRLSIIHCLGHQKGDSAEARGNRLADQAAREAAIKTPPDTSTLLAGKRTADGSEFEKRTADGSEFESPKKKAKVE

SEQ ID NO: 7376 - protein, 2114 aa, synthetic construct
MPAAKRVKLDGGDKKYSIGLDIGTNSVGWAVITDEYKVPSKKFKVLGNTDRHSIKKNLIGALLFDSGETAEATRLKRTARRRYTRRKNRICYLQEIFSNEMAKVDDSFFHRLEESFLVEEDKKHERHPIFGNIVDEVAYHEKYPTIYHLRKKLVDSTDKADLRLIYLALAHMIKFRGHFLIEGDLNPDNSDVDKLFIQLVQTYNQLFEENPINASGVDAKAILSARLSKSRRLENLIAQLPGEKKNGLFGNLIALSLGLTPNFKSNFDLAEDAKLQLSKDTYDDDLDNLLAQIGDQYADLFLAAKNLSDAILLSDILRVNTEITKAPLSASMIKRYDEHHQDLTLLKALVRQQLPEKYKEIFFDQSKNGYAGYIDGGASQEEFYKFIKPILEKMDGTEELLVKLNREDLLRKQRTFDNGSIPHQIHLGELHAILRRQEDFYPFLKDNREKIEKILTFRIPYYVGPLARGNSRFAWMTRKSEETITPWNFEEVVDKGASAQSFIERMTNFDKNLPNEKVLPKHSLLYEYFTVYNELTKVKYVTEGMRKPAFLSGEQKKAIVDLLFKTNRKVTVKQLKEDYFKKIECFDSVEISGVEDRFNASLGTYHDLLKIIKDKDFLDNEENEDILEDIVLTLTLFEDREMIEERLKTYAHLFDDKVMKQLKRRRYTGWGRLSRKLINGIRDKQSGKTILDFLKSDGFANRNFMQLIHDDSLTFKEDIQKAQVSGQGDSLHEHIANLAGSPAIKKGILQTVKVVDELVKVMGRHKPENIVIEMARENQTTQKGQKNSRERMKRIEEGIKELGSQILKEHPVENTQLQNEKLYLYYLQNGRDMYVDQELDINRLSDYDVDHIVPQSFLKDDSIDNKVLTRSDKARGKSDNVPSEEVVKKMKNYWRQLLNAKLITQRKFDNLTKAERGGLSELDKAGFIKRQLVETRQITKHVAQILDSRMNTKYDENDKLIREVKVITLKSKLVSDFRKDFQFYKVREINNYHHAHDAYLNAVVGTALIKKYPKLESEFVYGDYKVYDVRKMIAKSEQEIGKATAKYFFYSNIMNFFKTEITLANGEIRKRPLIETNGETGEIVWDKGRDFATVRKVLSMPQVNIVKKTEVQTGGFSKESILPKRNSDKLIARKKDWDPKKYGGFDSPTVAYSVLVVAKVEKGKSKKLKSVKELLGITIMERSSFEKNPIDFLEAKGYKEVKKDLIIKLPKYSLFELENGRKRMLASAGELQKGNELALPSKYVNFLYLASHYEKLKGSPEDNEQKQLFVEQHKHYLDEIIEQISEFSKRVILADANLDKVLSAYNKHRDKPIREQAENIIHLFTLTNLGAPAAFKYFDTTIDRKRYTSTKEVLDATLIHQSITGLYETRIDLSQLGGDGGGGGPAPGSSGGWVQEISDSRPMLHIYLNGRRFLGLLNTGADKTCIAGRDWPANWPIHQTESSLQGLGMACGVARSSQPLRWQHEDKSGIIHPFVIPTLPFTLWGRDIMKDIKVRLMTDSPDDSQDLMIGAIESNLFADQISWKSDQPVWLNQWPLKQEKLQALQQLVTEQLQLGHLEESNSPWNTPVFVIKKKSGKWRLLQDLRAVNATMHDMGALQPGLPSPVAPPKGWEIIIIDLQDCFFNIKLHPEDCKRFAFSVPSPNFKRPYQRFQWKVLPQGMKNSPTLCQKFVDKAILTVRDKYQDSYIVHYMDDILLAHPSRSIVDEILTSMIQALNKHGLVVSTEKIQKYDNLKYLGTHIQGDSVSYQKLQIRTDKLRTLNDFQKLLGNINWIRPFLKLTTGELKPLFEILNPDSNPISTRKLTPEACKALQLMNERLSTARVKRLDLSQPWSLCILKTEYTPTACLWQDGVVEWIHLPHISPKVITPYDIFCTQLIIKGRHRSKELFSKDPDYIVVPYTKVQFDLLLQEKEDWPISLLGFLGEVHFHLPKDPLLTFTLQTAIIFPHMTSTTPLEKGIVIFTDGSANGRSVTYIQGREPIIKENTQNTAQQAEIVAVITAFEEVSQPFNLYTDSKYVTGLFPEIETATLSPRTKIYTELKHLQRLIHKRQEKFYIGHIRGHTGLPGPLAQGNAYADSLTRILTAGKRTADGSEFEKRTADGSEFESPKKKAKVE

SEQ ID NO: 7377 - protein, 2085 aa, synthetic construct
MPAAKRVKLDGGDKKYSIGLDIGTNSVGWAVITDEYKVPSKKFKVLGNTDRHSIKKNLIGALLFDSGETAEATRLKRTARRRYTRRKNRICYLQEIFSNEMAKVDDSFFHRLEESFLVEEDKKHERHPIFGNIVDEVAYHEKYPTIYHLRKKLVDSTDKADLRLIYLALAHMIKFRGHFLIEGDLNPDNSDVDKLFIQLVQTYNQLFEENPINASGVDAKAILSARLSKSRRLENLIAQLPGEKKNGLFGNLIALSLGLTPNFKSNFDLAEDAKLQLSKDTYDDDLDNLLAQIGDQYADLFLAAKNLSDAILLSDILRVNTEITKAPLSASMIKRYDEHHQDLTLLKALVRQQLPEKYKEIFFDQSKNGYAGYIDGGASQEEFYKFIKPILEKMDGTEELLVKLNREDLLRKQRTFDNGSIPHQIHLGELHAILRRQEDFYPFLKDNREKIEKILTFRIPYYVGPLARGNSRFAWMTRKSEETITPWNFEEVVDKGASAQSFIERMTNFDKNLPNEKVLPKHSLLYEYFTVYNELTKVKYVTEGMRKPAFLSGEQKKAIVDLLFKTNRKVTVKQLKEDYFKKIECFDSVEISGVEDRFNASLGTYHDLLKIIKDKDFLDNEENEDILEDIVLTLTLFEDREMIEERLKTYAHLFDDKVMKQLKRRRYTGWGRLSRKLINGIRDKQSGKTILDFLKSDGFANRNFMQLIHDDSLTFKEDIQKAQVSGQGDSLHEHIANLAGSPAIKKGILQTVKVVDELVKVMGRHKPENIVIEMARENQTTQKGQKNSRERMKRIEEGIKELGSQILKEHPVENTQLQNEKLYLYYLQNGRDMYVDQELDINRLSDYDVDHIVPQSFLKDDSIDNKVLTRSDKARGKSDNVPSEEVVKKMKNYWRQLLNAKLITQRKFDNLTKAERGGLSELDKAGFIKRQLVETRQITKHVAQILDSRMNTKYDENDKLIREVKVITLKSKLVSDFRKDFQFYKVREINNYHHAHDAYLNAVVGTALIKKYPKLESEFVYGDYKVYDVRKMIAKSEQEIGKATAKYFFYSNIMNFFKTEITLANGEIRKRPLIETNGETGEIVWDKGRDFATVRKVLSMPQVNIVKKTEVQTGGFSKESILPKRNSDKLIARKKDWDPKKYGGFDSPTVAYSVLVVAKVEKGKSKKLKSVKELLGITIMERSSFEKNPIDFLEAKGYKEVKKDLIIKLPKYSLFELENGRKRMLASAGELQKGNELALPSKYVNFLYLASHYEKLKGSPEDNEQKQLFVEQHKHYLDEIIEQISEFSKRVILADANLDKVLSAYNKHRDKPIREQAENIIHLFTLTNLGAPAAFKYFDTTIDRKRYTSTKEVLDATLIHQSITGLYETRIDLSQLGGDGGGGGPAPGSSGGIPWLMKKPLQLTTLVPLQEYEERLLKQTMLTGSYKEKLQSLFLKYDALWQHWENQVGHRRIKPHHIATGTVNPRPQKQYPINPKAKASIQTVINDLLKQGVLIQQNSIMNTPVYPVPKPDGKWRMVLDYREVNKTIPLIAAQNQHSAGILSSIFRGKYKTTLDLSNGFWAHSITPESYWLTAFTWLGQQYCWTRLPQGFLNSPALFNADVVDLLKEVPNVQVYVDDIYISHDDPREHLEQLEKVFSLLLNAGYVVSLKKSEIAQHEVEFLGFNITKEGRGLTETFKQKLLNITPPRDLKQLQSILGLLNFARNFIPNFSELVKPLYNIIATAPGKYITWTTDNSQQLQNIISMLNSAENLEERNPEVRLIMKVNTSPSAGYIRFYNEFAKRPIMYLNYVYTKAEVKFTNTEKLLTTIHKGLIKALDLGMGQEILVYSPIVSMTKIQKTPLPERKALPIRWITWMSYLEDPRIQFHYDKTLPELQQVPTVTDDIIAKIKHPSEFSMVFYTDGSAIKHPNVNKSHNAGMGIAQVQFKPEFTVINTWSIPLGDHTAQLAEVAAVEFACKKALKIDGPVLIVTDSFYVAESVNKELPYWQSNGFFNNKKKPLKHVSKWKSIADCIQLKPDIIIIHEKGHQPTASTFHTEGNNLADKLATQGSYVVNAGKRTADGSEFEKRTADGSEFESPKKKAKVE

SEQ ID NO: 7378 - protein, 2092 aa, synthetic construct
MPAAKRVKLDGGDKKYSIGLDIGTNSVGWAVITDEYKVPSKKFKVLGNTDRHSIKKNLIGALLFDSGETAEATRLKRTARRRYTRRKNRICYLQEIFSNEMAKVDDSFFHRLEESFLVEEDKKHERHPIFGNIVDEVAYHEKYPTIYHLRKKLVDSTDKADLRLIYLALAHMIKFRGHFLIEGDLNPDNSDVDKLFIQLVQTYNQLFEENPINASGVDAKAILSARLSKSRRLENLIAQLPGEKKNGLFGNLIALSLGLTPNFKSNFDLAEDAKLQLSKDTYDDDLDNLLAQIGDQYADLFLAAKNLSDAILLSDILRVNTEITKAPLSASMIKRYDEHHQDLTLLKALVRQQLPEKYKEIFFDQSKNGYAGYIDGGASQEEFYKFIKPILEKMDGTEELLVKLNREDLLRKQRTFDNGSIPHQIHLGELHAILRRQEDFYPFLKDNREKIEKILTFRIPYYVGPLARGNSRFAWMTRKSEETITPWNFEEVVDKGASAQSFIERMTNFDKNLPNEKVLPKHSLLYEYFTVYNELTKVKYVTEGMRKPAFLSGEQKKAIVDLLFKTNRKVTVKQLKEDYFKKIECFDSVEISGVEDRFNASLGTYHDLLKIIKDKDFLDNEENEDILEDIVLTLTLFEDREMIEERLKTYAHLFDDKVMKQLKRRRYTGWGRLSRKLINGIRDKQSGKTILDFLKSDGFANRNFMQLIHDDSLTFKEDIQKAQVSGQGDSLHEHIANLAGSPAIKKGILQTVKVVDELVKVMGRHKPENIVIEMARENQTTQKGQKNSRERMKRIEEGIKELGSQILKEHPVENTQLQNEKLYLYYLQNGRDMYVDQELDINRLSDYDVDHIVPQSFLKDDSIDNKVLTRSDKARGKSDNVPSEEVVKKMKNYWRQLLNAKLITQRKFDNLTKAERGGLSELDKAGFIKRQLVETRQITKHVAQILDSRMNTKYDENDKLIREVKVITLKSKLVSDFRKDFQFYKVREINNYHHAHDAYLNAVVGTALIKKYPKLESEFVYGDYKVYDVRKMIAKSEQEIGKATAKYFFYSNIMNFFKTEITLANGEIRKRPLIETNGETGEIVWDKGRDFATVRKVLSMPQVNIVKKTEVQTGGFSKESILPKRNSDKLIARKKDWDPKKYGGFDSPTVAYSVLVVAKVEKGKSKKLKSVKELLGITIMERSSFEKNPIDFLEAKGYKEVKKDLIIKLPKYSLFELENGRKRMLASAGELQKGNELALPSKYVNFLYLASHYEKLKGSPEDNEQKQLFVEQHKHYLDEIIEQISEFSKRVILADANLDKVLSAYNKHRDKPIREQAENIIHLFTLTNLGAPAAFKYFDTTIDRKRYTSTKEVLDATLIHQSITGLYETRIDLSQLGGDGGGGGPAPGSSGGVLNLEEEYRLHEKPVPSSIDPSWLQLFPTVWAERAGMGLANQVPPVVVELRSGASPVAVRQYPMSKEAREGIRPHIQRFLDLGVLVPCQSPWNTPLLPVKKPGTNDYRPVQDLREINKRVQDIHPTVPNPYNLLSSLPPSHTWYSVLDLKDAFFCLKLHPNSQPLFAFEWRDPEKGNTGQLTWTRLPQGFKNSPTLFNEALHRDLAPFRALNPQVVLLQYVDDLLVAAPTYRDCKEGTQKLLQELSKLGYRVSAKKAQLCQKEVTYLGYLLKEGKRWLTPARKATVMKIPPPTTPRQVREFLGTAGFCRLWIPGFASLAAPLYPLTKPSIPFIWTEEHQKAFDRIKEALLSAPALALPDLTKPFTLYVDERAGVARGVLTQTLGPWRRPVAYLSKKLDPVASGWPTCLKAVAAVALLLKDADKLTLGQNVTVIASHSLESIVRQPPDRWMTNARMTHYQSLLLNERVSFAPPAVLNPATLLPVESEATPVHRCSEILAEETGTRRDLKDQPLPGVPAWYTDGSSFIAEGKRRAGAAIVDGKRTVWASSLPEGTSAQKAELVALTQALRLAEGKDINIYTDSRYAFATAHIHGAIYKQRGWLTSAGKDIKNKEEILALLEAIHLPKRVAIIHCPGHQKGNDPVATGNRRADEAAKQAALSTRVLAETTKPAGKRTADGSEFEKRTADGSEFESPKKKAKVE

SEQ ID NO: 7379 - protein, 2096 aa, synthetic construct
MPAAKRVKLDGGDKKYSIGLDIGTNSVGWAVITDEYKVPSKKFKVLGNTDRHSIKKNLIGALLFDSGETAEATRLKRTARRRYTRRKNRICYLQEIFSNEMAKVDDSFFHRLEESFLVEEDKKHERHPIFGNIVDEVAYHEKYPTIYHLRKKLVDSTDKADLRLIYLALAHMIKFRGHFLIEGDLNPDNSDVDKLFIQLVQTYNQLFEENPINASGVDAKAILSARLSKSRRLENLIAQLPGEKKNGLFGNLIALSLGLTPNFKSNFDLAEDAKLQLSKDTYDDDLDNLLAQIGDQYADLFLAAKNLSDAILLSDILRVNTEITKAPLSASMIKRYDEHHQDLTLLKALVRQQLPEKYKEIFFDQSKNGYAGYIDGGASQEEFYKFIKPILEKMDGTEELLVKLNREDLLRKQRTFDNGSIPHQIHLGELHAILRRQEDFYPFLKDNREKIEKILTFRIPYYVGPLARGNSRFAWMTRKSEETITPWNFEEVVDKGASAQSFIERMTNFDKNLPNEKVLPKHSLLYEYFTVYNELTKVKYVTEGMRKPAFLSGEQKKAIVDLLFKTNRKVTVKQLKEDYFKKIECFDSVEISGVEDRFNASLGTYHDLLKIIKDKDFLDNEENEDILEDIVLTLTLFEDREMIEERLKTYAHLFDDKVMKQLKRRRYTGWGRLSRKLINGIRDKQSGKTILDFLKSDGFANRNFMQLIHDDSLTFKEDIQKAQVSGQGDSLHEHIANLAGSPAIKKGILQTVKVVDELVKVMGRHKPENIVIEMARENQTTQKGQKNSRERMKRIEEGIKELGSQILKEHPVENTQLQNEKLYLYYLQNGRDMYVDQELDINRLSDYDVDHIVPQSFLKDDSIDNKVLTRSDKARGKSDNVPSEEVVKKMKNYWRQLLNAKLITQRKFDNLTKAERGGLSELDKAGFIKRQLVETRQITKHVAQILDSRMNTKYDENDKLIREVKVITLKSKLVSDFRKDFQFYKVREINNYHHAHDAYLNAVVGTALIKKYPKLESEFVYGDYKVYDVRKMIAKSEQEIGKATAKYFFYSNIMNFFKTEITLANGEIRKRPLIETNGETGEIVWDKGRDFATVRKVLSMPQVNIVKKTEVQTGGFSKESILPKRNSDKLIARKKDWDPKKYGGFDSPTVAYSVLVVAKVEKGKSKKLKSVKELLGITIMERSSFEKNPIDFLEAKGYKEVKKDLIIKLPKYSLFELENGRKRMLASAGELQKGNELALPSKYVNFLYLASHYEKLKGSPEDNEQKQLFVEQHKHYLDEIIEQISEFSKRVILADANLDKVLSAYNKHRDKPIREQAENIIHLFTLTNLGAPAAFKYFDTTIDRKRYTSTKEVLDATLIHQSITGLYETRIDLSQLGGDGGGSSGGGPAPGGTAPLEEEYRLFLEAPIQNVTLLEQWKREIPKVWAEINPPGLASTQAPIHVQLLSTALPVRVRQYPITLEAKRSLRETIRKFRAAGILRPVHSPWNTPLLPVRKSGTSEYRMVQDLREVNKRVETIHPTVPNPYTLLSLLPPDRIWYSVLDLKDAFFCIPLAPESQLIFAFEWADAEEGESGQLTWTRLPQGFKNSPTLFDEALNRDLQGFRLDHPSVSLLQYVDDLLIAADTQAACLSATRDLLMTLAELGYRVSGKKAQLCQEEVTYLGFKIHKGSRSLSNSRTQAILQIPVPKTKRQVREFLGTIGYCRLWIPGFAELAQPLYAATRGGNDPLVWGEKEEEAFQSLKLALTQPPALALPSLDKPFQLFVEETSGAAKGVLTQALGPWKRPVAYLSKRLDPVAAGWPRCLRAIAAAALLTREASKLTFGQDIEITSSHNLESLLRSPPDKWLTNARITQYQVLLLDPPRVRFKQTAALNPATLLPETDDTLPIHHCLDTLDSLTSTRPDLTDQPLAQAEATLFTDGSSYIRDGKRYAGAAVVTLDSVIWAEPLPIGTSAQKAELIALTKALEWSKDKSVNIYTDSRYAFATLHVHGMIYRERGLLTAGGKAIKNAPEILALLTAVWLPKRVAVMHCKGHQKDDAPTSTGNRRADEVAREVAIRPLSTQATISAGKRTADGSEFEKRTADGSEFESPKKKAKVE

SEQ ID NO: 7380 - protein, 2096 aa, synthetic construct
MPAAKRVKLDGGDKKYSIGLDIGTNSVGWAVITDEYKVPSKKFKVLGNTDRHSIKKNLIGALLFDSGETAEATRLKRTARRRYTRRKNRICYLQEIFSNEMAKVDDSFFHRLEESFLVEEDKKHERHPIFGNIVDEVAYHEKYPTIYHLRKKLVDSTDKADLRLIYLALAHMIKFRGHFLIEGDLNPDNSDVDKLFIQLVQTYNQLFEENPINASGVDAKAILSARLSKSRRLENLIAQLPGEKKNGLFGNLIALSLGLTPNFKSNFDLAEDAKLQLSKDTYDDDLDNLLAQIGDQYADLFLAAKNLSDAILLSDILRVNTEITKAPLSASMIKRYDEHHQDLTLLKALVRQQLPEKYKEIFFDQSKNGYAGYIDGGASQEEFYKFIKPILEKMDGTEELLVKLNREDLLRKQRTFDNGSIPHQIHLGELHAILRRQEDFYPFLKDNREKIEKILTFRIPYYVGPLARGNSRFAWMTRKSEETITPWNFEEVVDKGASAQSFIERMTNFDKNLPNEKVLPKHSLLYEYFTVYNELTKVKYVTEGMRKPAFLSGEQKKAIVDLLFKTNRKVTVKQLKEDYFKKIECFDSVEISGVEDRFNASLGTYHDLLKIIKDKDFLDNEENEDILEDIVLTLTLFEDREMIEERLKTYAHLFDDKVMKQLKRRRYTGWGRLSRKLINGIRDKQSGKTILDFLKSDGFANRNFMQLIHDDSLTFKEDIQKAQVSGQGDSLHEHIANLAGSPAIKKGILQTVKVVDELVKVMGRHKPENIVIEMARENQTTQKGQKNSRERMKRIEEGIKELGSQILKEHPVENTQLQNEKLYLYYLQNGRDMYVDQELDINRLSDYDVDHIVPQSFLKDDSIDNKVLTRSDKARGKSDNVPSEEVVKKMKNYWRQLLNAKLITQRKFDNLTKAERGGLSELDKAGFIKRQLVETRQITKHVAQILDSRMNTKYDENDKLIREVKVITLKSKLVSDFRKDFQFYKVREINNYHHAHDAYLNAVVGTALIKKYPKLESEFVYGDYKVYDVRKMIAKSEQEIGKATAKYFFYSNIMNFFKTEITLANGEIRKRPLIETNGETGEIVWDKGRDFATVRKVLSMPQVNIVKKTEVQTGGFSKESILPKRNSDKLIARKKDWDPKKYGGFDSPTVAYSVLVVAKVEKGKSKKLKSVKELLGITIMERSSFEKNPIDFLEAKGYKEVKKDLIIKLPKYSLFELENGRKRMLASAGELQKGNELALPSKYVNFLYLASHYEKLKGSPEDNEQKQLFVEQHKHYLDEIIEQISEFSKRVILADANLDKVLSAYNKHRDKPIREQAENIIHLFTLTNLGAPAAFKYFDTTIDRKRYTSTKEVLDATLIHQSITGLYETRIDLSQLGGDGGGSSGGGPAPGGTAPLEEEYRLFLEAPIQNVTLLEQWKREIPKVWAEINPPGLASTQAPIHVQLLSTALPVRVRQYPITLEAKRSLRETIRKFRAAGILRPVHSPWNTPLLPVRKSGTSEYRMVQDLREVNKRVETIHPTVPNPYTLLSLLPPDRIWYSVLDLKDAFFCIPLAPESQLIFAFEWADAEEGESGQLTWTRLPQGFKNSPTLFNEALNRDLQGFRLDHPSVSLLQYVDDLLIAADTQAACLSATRDLLMTLAELGYRVSGKKAQLCQEEVTYLGFKIHKGSRSLSNSRTQAILQIPVPKTKRQVREFLGTIGYCRLWIPGFAELAQPLYAATRPGNDPLVWGEKEEEAFQSLKLALTQPPALALPSLDKPFQLFVEETSGAAKGVLTQALGPWKRPVAYLSKRLDPVAAGWPRCLRAIAAAALLTREASKLTFGQDIEITSSHNLESLLRSPPDKWLTNARITQYQVLLLDPPRVRFKQTAALNPATLLPETDDTLPIHHCLDTLDSLTSTRPDLTDQPLAQAEATLFTDGSSYIRDGKRYAGAAVVTLDSVIWAEPLPIGTSAQKAELIALTKALEWSKDKSVNIYTDSRYAFATLHVHGMIYRERGWLTAGGKAIKNAPEILALLTAVWLPKRVAVMHCKGHQKDDAPTSTGNRRADEVAREVAIRPLSTQATISAGKRTADGSEFEKRTADGSEFESPKKKAKVE

SEQ ID NO: 7381 - protein, 2096 aa, synthetic construct
MPAAKRVKLDGGDKKYSIGLDIGTNSVGWAVITDEYKVPSKKFKVLGNTDRHSIKKNLIGALLFDSGETAEATRLKRTARRRYTRRKNRICYLQEIFSNEMAKVDDSFFHRLEESFLVEEDKKHERHPIFGNIVDEVAYHEKYPTIYHLRKKLVDSTDKADLRLIYLALAHMIKFRGHFLIEGDLNPDNSDVDKLFIQLVQTYNQLFEENPINASGVDAKAILSARLSKSRRLENLIAQLPGEKKNGLFGNLIALSLGLTPNFKSNFDLAEDAKLQLSKDTYDDDLDNLLAQIGDQYADLFLAAKNLSDAILLSDILRVNTEITKAPLSASMIKRYDEHHQDLTLLKALVRQQLPEKYKEIFFDQSKNGYAGYIDGGASQEEFYKFIKPILEKMDGTEELLVKLNREDLLRKQRTFDNGSIPHQIHLGELHAILRRQEDFYPFLKDNREKIEKILTFRIPYYVGPLARGNSRFAWMTRKSEETITPWNFEEVVDKGASAQSFIERMTNFDKNLPNEKVLPKHSLLYEYFTVYNELTKVKYVTEGMRKPAFLSGEQKKAIVDLLFKTNRKVTVKQLKEDYFKKIECFDSVEISGVEDRFNASLGTYHDLLKIIKDKDFLDNEENEDILEDIVLTLTLFEDREMIEERLKTYAHLFDDKVMKQLKRRRYTGWGRLSRKLINGIRDKQSGKTILDFLKSDGFANRNFMQLIHDDSLTFKEDIQKAQVSGQGDSLHEHIANLAGSPAIKKGILQTVKVVDELVKVMGRHKPENIVIEMARENQTTQKGQKNSRERMKRIEEGIKELGSQILKEHPVENTQLQNEKLYLYYLQNGRDMYVDQELDINRLSDYDVDHIVPQSFLKDDSIDNKVLTRSDKARGKSDNVPSEEVVKKMKNYWRQLLNAKLITQRKFDNLTKAERGGLSELDKAGFIKRQLVETRQITKHVAQILDSRMNTKYDENDKLIREVKVITLKSKLVSDFRKDFQFYKVREINNYHHAHDAYLNAVVGTALIKKYPKLESEFVYGDYKVYDVRKMIAKSEQEIGKATAKYFFYSNIMNFFKTEITLANGEIRKRPLIETNGETGEIVWDKGRDFATVRKVLSMPQVNIVKKTEVQTGGFSKESILPKRNSDKLIARKKDWDPKKYGGFDSPTVAYSVLVVAKVEKGKSKKLKSVKELLGITIMERSSFEKNPIDFLEAKGYKEVKKDLIIKLPKYSLFELENGRKRMLASAGELQKGNELALPSKYVNFLYLASHYEKLKGSPEDNEQKQLFVEQHKHYLDEIIEQISEFSKRVILADANLDKVLSAYNKHRDKPIREQAENIIHLFTLTNLGAPAAFKYFDTTIDRKRYTSTKEVLDATLIHQSITGLYETRIDLSQLGGDGGGSSGGGPAPGGTAPLEEEYRLFLEAPIQNVTLLEQWKREIPKVWAEINPPGLASTQAPIHVQLLSTALPVRVRQYPITLEAKRSLRETIRKFRAAGILRPVHSPWNTPLLPVRKSGTSEYRMVQDLREVNKRVETIHPTVPNPYTLLSLLPPDRIWYSVLDLKDAFFCIPLAPESQLIFAFEWADAEEGESGQLTWTRLPQGFKNSPTLFNEALNRDLQGFRLDHPSVSLLQYVDDLLIAADTQAACLSATRDLLMTLAELGYRVSGKKAQLCQEEVTYLGFKIHKGSRSLSNSRTQAILQIPVPKTKRQVREFLGKIGYCRLFIPGFAELAQPLYAATRPGNDPLVWGEKEEEAFQSLKLALTQPPALALPSLDKPFQLFVEETSGAAKGVLTQALGPWKRPVAYLSKRLDPVAAGWPRCLRAIAAAALLTREASKLTFGQDIEITSSHNLESLLRSPPDKWLTNARITQYQVLLLDPPRVRFKQTAALNPATLLPETDDTLPIHHCLDTLDSLTSTRPDLTDQPLAQAEATLFTDGSSYIRDGKRYAGAAVVTLDSVIWAEPLPIGTSAQKAELIALTKALEWSKDKSVNIYTDSRYAFATLHVHGMIYRERGWLTAGGKAIKNAPEILALLTAVWLPKRVAVMHCKGHQKDDAPTSTGNRRADEVAREVAIRPLSTQATISAGKRTADGSEFEKRTADGSEFESPKKKAKVE

SEQ ID NO: 7382 - protein, 2100 aa, synthetic construct
MPAAKRVKLDGGDKKYSIGLDIGTNSVGWAVITDEYKVPSKKFKVLGNTDRHSIKKNLIGALLFDSGETAEATRLKRTARRRYTRRKNRICYLQEIFSNEMAKVDDSFFHRLEESFLVEEDKKHERHPIFGNIVDEVAYHEKYPTIYHLRKKLVDSTDKADLRLIYLALAHMIKFRGHFLIEGDLNPDNSDVDKLFIQLVQTYNQLFEENPINASGVDAKAILSARLSKSRRLENLIAQLPGEKKNGLFGNLIALSLGLTPNFKSNFDLAEDAKLQLSKDTYDDDLDNLLAQIGDQYADLFLAAKNLSDAILLSDILRVNTEITKAPLSASMIKRYDEHHQDLTLLKALVRQQLPEKYKEIFFDQSKNGYAGYIDGGASQEEFYKFIKPILEKMDGTEELLVKLNREDLLRKQRTFDNGSIPHQIHLGELHAILRRQEDFYPFLKDNREKIEKILTFRIPYYVGPLARGNSRFAWMTRKSEETITPWNFEEVVDKGASAQSFIERMTNFDKNLPNEKVLPKHSLLYEYFTVYNELTKVKYVTEGMRKPAFLSGEQKKAIVDLLFKTNRKVTVKQLKEDYFKKIECFDSVEISGVEDRFNASLGTYHDLLKIIKDKDFLDNEENEDILEDIVLTLTLFEDREMIEERLKTYAHLFDDKVMKQLKRRRYTGWGRLSRKLINGIRDKQSGKTILDFLKSDGFANRNFMQLIHDDSLTFKEDIQKAQVSGQGDSLHEHIANLAGSPAIKKGILQTVKVVDELVKVMGRHKPENIVIEMARENQTTQKGQKNSRERMKRIEEGIKELGSQILKEHPVENTQLQNEKLYLYYLQNGRDMYVDQELDINRLSDYDVDHIVPQSFLKDDSIDNKVLTRSDKARGKSDNVPSEEVVKKMKNYWRQLLNAKLITQRKFDNLTKAERGGLSELDKAGFIKRQLVETRQITKHVAQILDSRMNTKYDENDKLIREVKVITLKSKLVSDFRKDFQFYKVREINNYHHAHDAYLNAVVGTALIKKYPKLESEFVYGDYKVYDVRKMIAKSEQEIGKATAKYFFYSNIMNFFKTEITLANGEIRKRPLIETNGETGEIVWDKGRDFATVRKVLSMPQVNIVKKTEVQTGGFSKESILPKRNSDKLIARKKDWDPKKYGGFDSPTVAYSVLVVAKVEKGKSKKLKSVKELLGITIMERSSFEKNPIDFLEAKGYKEVKKDLIIKLPKYSLFELENGRKRMLASAGELQKGNELALPSKYVNFLYLASHYEKLKGSPEDNEQKQLFVEQHKHYLDEIIEQISEFSKRVILADANLDKVLSAYNKHRDKPIREQAENIIHLFTLTNLGAPAAFKYFDTTIDRKRYTSTKEVLDATLIHQSITGLYETRIDLSQLGGDGGGSSGGGPAPGGTVSLQDEHRLFDIPVTTSLPDVWLQDFPQAWAETGGLGRAKCQAPIIIDLKPTAVPVSIKQYPMSLEAHMGIRQHIIKFLELGVLRPCRSPWNTPLLPVKKPGTQDYRPVQDLREINKRTVDIHPTVPNPYNLLSTLKPDYSWYTVLDLKDAFFCLPLAPQSQELFAFEWKDPERGISGQLTWTRLPQGFKNSPTLFNEALHRDLTDFRTQHPEVTLLQYVDDLLLAAPTKKACTQGTRHLLQELGEKGYRASAKKAQICQTKVTYLGYILSEGKRWLTPGRIETVARIPPPRNPREVREFLGTAGFCRLWIPGFAELAAPLYALTKPSTPFTWQTEHQLAFEALKKALLSAPALGLPDTSKPFTLFLDERQGIAKGVLTQKLGPWKRPVAYLSKKLDPVAAGWPPCLRIMAATAMLVKDSAKLTLGQPLTVITPHTLEAIVRQPPDRWITNARLTHYQALLLDTDRVQFGPPVTLNPATLLPVPENQPSPHDCRQVLAETHGTREDLKDQELPDADHTWYTDGSSYLDSGTRRAGAAVVDGHNTIWAQSLPPGTSAQKAELIALTKALELSKGKKANIYTDSRYAFATAHTHGSIYERRGWLTSEGKEIKNKAEIIALLKALFLPQEVAIIHCPGHQKGQDPVAVGNRQADRVARQAAMAEVLTLATEPDNTSHITAGKRTADGSEFEKRTADGSEFESPKKKAKVE

SEQ ID NO: 7383 - protein, 2085 aa, synthetic construct
MPAAKRVKLDGGDKKYSIGLDIGTNSVGWAVITDEYKVPSKKFKVLGNTDRHSIKKNLIGALLFDSGETAEATRLKRTARRRYTRRKNRICYLQEIFSNEMAKVDDSFFHRLEESFLVEEDKKHERHPIFGNIVDEVAYHEKYPTIYHLRKKLVDSTDKADLRLIYLALAHMIKFRGHFLIEGDLNPDNSDVDKLFIQLVQTYNQLFEENPINASGVDAKAILSARLSKSRRLENLIAQLPGEKKNGLFGNLIALSLGLTPNFKSNFDLAEDAKLQLSKDTYDDDLDNLLAQIGDQYADLFLAAKNLSDAILLSDILRVNTEITKAPLSASMIKRYDEHHQDLTLLKALVRQQLPEKYKEIFFDQSKNGYAGYIDGGASQEEFYKFIKPILEKMDGTEELLVKLNREDLLRKQRTFDNGSIPHQIHLGELHAILRRQEDFYPFLKDNREKIEKILTFRIPYYVGPLARGNSRFAWMTRKSEETITPWNFEEVVDKGASAQSFIERMTNFDKNLPNEKVLPKHSLLYEYFTVYNELTKVKYVTEGMRKPAFLSGEQKKAIVDLLFKTNRKVTVKQLKEDYFKKIECFDSVEISGVEDRFNASLGTYHDLLKIIKDKDFLDNEENEDILEDIVLTLTLFEDREMIEERLKTYAHLFDDKVMKQLKRRRYTGWGRLSRKLINGIRDKQSGKTILDFLKSDGFANRNFMQLIHDDSLTFKEDIQKAQVSGQGDSLHEHIANLAGSPAIKKGILQTVKVVDELVKVMGRHKPENIVIEMARENQTTQKGQKNSRERMKRIEEGIKELGSQILKEHPVENTQLQNEKLYLYYLQNGRDMYVDQELDINRLSDYDVDHIVPQSFLKDDSIDNKVLTRSDKARGKSDNVPSEEVVKKMKNYWRQLLNAKLITQRKFDNLTKAERGGLSELDKAGFIKRQLVETRQITKHVAQILDSRMNTKYDENDKLIREVKVITLKSKLVSDFRKDFQFYKVREINNYHHAHDAYLNAVVGTALIKKYPKLESEFVYGDYKVYDVRKMIAKSEQEIGKATAKYFFYSNIMNFFKTEITLANGEIRKRPLIETNGETGEIVWDKGRDFATVRKVLSMPQVNIVKKTEVQTGGFSKESILPKRNSDKLIARKKDWDPKKYGGFDSPTVAYSVLVVAKVEKGKSKKLKSVKELLGITIMERSSFEKNPIDFLEAKGYKEVKKDLIIKLPKYSLFELENGRKRMLASAGELQKGNELALPSKYVNFLYLASHYEKLKGSPEDNEQKQLFVEQHKHYLDEIIEQISEFSKRVILADANLDKVLSAYNKHRDKPIREQAENIIHLFTLTNLGAPAAFKYFDTTIDRKRYTSTKEVLDATLIHQSITGLYETRIDLSQLGGDGGGSSGGGPAPGGVPWILKKPLELTIKLDLEEQQGTLLNNSILSKKGKEELKQLFEKYSALWQSWENQVGHRRIRPHKIATGTVKPTPQKQYHINPKAKPDIQIVINDLLKQGVLIQKESTMNTPVYPVPKPNGRWRMVLDYRAVNKVTPLIAVQNQHSYGILGSLFKGRYKTTIDLSNGFWAHPIVPEDYWITAFTWQGKQYCWTVLPQGFLNSPGLFTGDVVDLLQGIPNVEVYVDDVYISHDSEKEHLEYLDILFNRLKEAGYIISLKKSNIANSIVDFLGFQITNEGRGLTDTFKEKLENITAPTTLKQLQSILGLLNFARNFIPDFTELIAPLYALIPKSTKNYVPWQIEHSTTLETLITKLNGAEYLQGRKGDKTLIMKVNASYTTGYIRYYNEGEKKPISYVSIVFSKTELKFTELEKLLTTVHKGLLKALDLSMGQNIHVYSPIVSMQNIQKTPQTAKKALASRWLSWLSYLEDPRIRFFYDPQMPALKDLPAVDTGKDNKKHPSNFQHIFYTDGSAITSPTKEGHLNAGMGIVYFINKDGNLQKQQEWSISLGNHTAQFAEIAAFEFALKKCLPLGGNILVVTDSNYVAKAYNEELDVWASNGFVNNRKKPLKHISKWKSVADLKRLRPDVVVTHEPGHQKLDSSPHAYGNNLADQLATQASFKVHAGKRTADGSEFEKRTADGSEFESPKKKAKVE

SEQ ID NO: 7384 - protein, 2093 aa, synthetic construct
MPAAKRVKLDGGDKKYSIGLDIGTNSVGWAVITDEYKVPSKKFKVLGNTDRHSIKKNLIGALLFDSGETAEATRLKRTARRRYTRRKNRICYLQEIFSNEMAKVDDSFFHRLEESFLVEEDKKHERHPIFGNIVDEVAYHEKYPTIYHLRKKLVDSTDKADLRLIYLALAHMIKFRGHFLIEGDLNPDNSDVDKLFIQLVQTYNQLFEENPINASGVDAKAILSARLSKSRRLENLIAQLPGEKKNGLFGNLIALSLGLTPNFKSNFDLAEDAKLQLSKDTYDDDLDNLLAQIGDQYADLFLAAKNLSDAILLSDILRVNTEITKAPLSASMIKRYDEHHQDLTLLKALVRQQLPEKYKEIFFDQSKNGYAGYIDGGASQEEFYKFIKPILEKMDGTEELLVKLNREDLLRKQRTFDNGSIPHQIHLGELHAILRRQEDFYPFLKDNREKIEKILTFRIPYYVGPLARGNSRFAWMTRKSEETITPWNFEEVVDKGASAQSFIERMTNFDKNLPNEKVLPKHSLLYEYFTVYNELTKVKYVTEGMRKPAFLSGEQKKAIVDLLFKTNRKVTVKQLKEDYFKKIECFDSVEISGVEDRFNASLGTYHDLLKIIKDKDFLDNEENEDILEDIVLTLTLFEDREMIEERLKTYAHLFDDKVMKQLKRRRYTGWGRLSRKLINGIRDKQSGKTILDFLKSDGFANRNFMQLIHDDSLTFKEDIQKAQVSGQGDSLHEHIANLAGSPAIKKGILQTVKVVDELVKVMGRHKPENIVIEMARENQTTQKGQKNSRERMKRIEEGIKELGSQILKEHPVENTQLQNEKLYLYYLQNGRDMYVDQELDINRLSDYDVDHIVPQSFLKDDSIDNKVLTRSDKARGKSDNVPSEEVVKKMKNYWRQLLNAKLITQRKFDNLTKAERGGLSELDKAGFIKRQLVETRQITKHVAQILDSRMNTKYDENDKLIREVKVITLKSKLVSDFRKDFQFYKVREINNYHHAHDAYLNAVVGTALIKKYPKLESEFVYGDYKVYDVRKMIAKSEQEIGKATAKYFFYSNIMNFFKTEITLANGEIRKRPLIETNGETGEIVWDKGRDFATVRKVLSMPQVNIVKKTEVQTGGFSKESILPKRNSDKLIARKKDWDPKKYGGFDSPTVAYSVLVVAKVEKGKSKKLKSVKELLGITIMERSSFEKNPIDFLEAKGYKEVKKDLIIKLPKYSLFELENGRKRMLASAGELQKGNELALPSKYVNFLYLASHYEKLKGSPEDNEQKQLFVEQHKHYLDEIIEQISEFSKRVILADANLDKVLSAYNKHRDKPIREQAENIIHLFTLTNLGAPAAFKYFDTTIDRKRYTSTKEVLDATLIHQSITGLYETRIDLSQLGGDGGGSSGGGPAPGGTLQLEEEYRLFEPESTQKQEMDIWLKNFPQAWAETGGMGTAHCQAPVLIQLKATATPISIRQYPMPHEAYQGIKPHIRRMLDQGILKPCQSPWNTPLLPVKKPGTEDYRPVQDLREVNKRVEDIHPTVPNPYNLLSTLPPSHPWYTVLDLKDAFFCLRLHSESQLLFAFEWRDPEIGLSGQLTWTRLPQGFKNSPTLFNEALHSDLADFRVRYPALVLLQYVDDLLLAAATRTECLEGTKALLETLGNKGYRASAKKAQICLQEVTYLGYSLKDGQRWLTKARKEAILSIPVPKNSRQVREFLGTAGYCRLWIPGFAELAAPLYPLTRPGTLFQWGTEQQLAFEDIKKALLSSPALGLPDITKPFELFIDENSGFAKGVLVQKLGPWKRPVAYLSKKLDTVASGWPPCLRMVAAIAILVKDAGKLTLGQPLTILTSHPVEALVRQPPNKWLSNARMTHYQAMLLDAERVHFGPTVSLNPATLLPLPSGGNHHDCLQILAETHGTRPDLTDQPLPDADLTWYTDGSSFIRNGEREAGAAVTTESEVIWAAPLPPGTSAQRAELIALTQALKMAEGKKLTVYTDSRYAFATTHVHGEIYRRRGWLTSEGKEIKNKNEILALLEALFLPKRLSIIHCPGHQKGDSPQAKGNRLADDTAKKAATETHSSLTVLPAGKRTADGSEFEKRTADGSEFESPKKKAKVE

SEQ ID NO: 7385 - protein, 2174 aa, synthetic construct
MPAAKRVKLDGGDKKYSIGLDIGTNSVGWAVITDEYKVPSKKFKVLGNTDRHSIKKNLIGALLFDSGETAEATRLKRTARRRYTRRKNRICYLQEIFSNEMAKVDDSFFHRLEESFLVEEDKKHERHPIFGNIVDEVAYHEKYPTIYHLRKKLVDSTDKADLRLIYLALAHMIKFRGHFLIEGDLNPDNSDVDKLFIQLVQTYNQLFEENPINASGVDAKAILSARLSKSRRLENLIAQLPGEKKNGLFGNLIALSLGLTPNFKSNFDLAEDAKLQLSKDTYDDDLDNLLAQIGDQYADLFLAAKNLSDAILLSDILRVNTEITKAPLSASMIKRYDEHHQDLTLLKALVRQQLPEKYKEIFFDQSKNGYAGYIDGGASQEEFYKFIKPILEKMDGTEELLVKLNREDLLRKQRTFDNGSIPHQIHLGELHAILRRQEDFYPFLKDNREKIEKILTFRIPYYVGPLARGNSRFAWMTRKSEETITPWNFEEVVDKGASAQSFIERMTNFDKNLPNEKVLPKHSLLYEYFTVYNELTKVKYVTEGMRKPAFLSGEQKKAIVDLLFKTNRKVTVKQLKEDYFKKIECFDSVEISGVEDRFNASLGTYHDLLKIIKDKDFLDNEENEDILEDIVLTLTLFEDREMIEERLKTYAHLFDDKVMKQLKRRRYTGWGRLSRKLINGIRDKQSGKTILDFLKSDGFANRNFMQLIHDDSLTFKEDIQKAQVSGQGDSLHEHIANLAGSPAIKKGILQTVKVVDELVKVMGRHKPENIVIEMARENQTTQKGQKNSRERMKRIEEGIKELGSQILKEHPVENTQLQNEKLYLYYLQNGRDMYVDQELDINRLSDYDVDHIVPQSFLKDDSIDNKVLTRSDKARGKSDNVPSEEVVKKMKNYWRQLLNAKLITQRKFDNLTKAERGGLSELDKAGFIKRQLVETRQITKHVAQILDSRMNTKYDENDKLIREVKVITLKSKLVSDFRKDFQFYKVREINNYHHAHDAYLNAVVGTALIKKYPKLESEFVYGDYKVYDVRKMIAKSEQEIGKATAKYFFYSNIMNFFKTEITLANGEIRKRPLIETNGETGEIVWDKGRDFATVRKVLSMPQVNIVKKTEVQTGGFSKESILPKRNSDKLIARKKDWDPKKYGGFDSPTVAYSVLVVAKVEKGKSKKLKSVKELLGITIMERSSFEKNPIDFLEAKGYKEVKKDLIIKLPKYSLFELENGRKRMLASAGELQKGNELALPSKYVNFLYLASHYEKLKGSPEDNEQKQLFVEQHKHYLDEIIEQISEFSKRVILADANLDKVLSAYNKHRDKPIREQAENIIHLFTLTNLGAPAAFKYFDTTIDRKRYTSTKEVLDATLIHQSITGLYETRIDLSQLGGDGGGSSGGGPAPGGMNPLQLLQPLPAEIKGTKLLAHWNSGATITCIPESFLEDEQPIKKTLIKTIHGEKQQNVYYVTFKVKGRKVEAEVIASPYEYILLSPTDVPWLTQQPLQLTILVPLQEYQEKILSKTALPEDQKQQLKTLFVKYDNLWQHWENQVGHRKIRPHNIATGDYPPRPQKQYPINPKAKPSIQIVIDDLLKQGVLTPQNSTMNTPVYPVPKPDGRWRMVLDYREVNKTIPLTAAQNQHSAGILATIVRQKYKTTLDLANGFWAHPITPESYWLTAFTWQGKQYCWTRLPQGFLNSPALFNADVVDLLKEIPNVQVYVDDIYLSHDDPKEHVQQLEKVFQILLQAGYVVSLKKSEIGQKTVEFLGFNITKEGRGLTDTFKTKLLNITPPKDLKQLQSILGLLNFARNFIPNFAELVQPLYNLIAPAKGKYIEWSEENTKQLNMVIEALNTASNLEERLPEQRLVIKVNTSPSAGYVRYYNETGKKPIMYLNYVFSKAELKFSMLEKLLTTMHKALIKAMDLAMGQEILVYSPIVSMTKIQKTPLPERKALPIRWITWMTYLEDPRIQFHYDKTLPELKHIPDVYTSSQSPVKHPSQYEGVFYTDGSAIKSPDPTKSNNAGMGIVHATYKPEYQVLNQWSIPLGNHTAQMAEIAAVEFACKKALKIPGPVLVITDSFYVAESANKELPYWKSNGFVNNKKKPLKHISKWKSIAECLSMKPDITIQHEKGISLQIPVFILKGNALADKLATQGSYVVNAGKRTADGSEFEKRTADGSEFESPKKKAKVE

SEQ ID NO: 7386 - protein, 2125 aa, synthetic construct
MPAAKRVKLDGGDKKYSIGLDIGTNSVGWAVITDEYKVPSKKFKVLGNTDRHSIKKNLIGALLFDSGETAEATRLKRTARRRYTRRKNRICYLQEIFSNEMAKVDDSFFHRLEESFLVEEDKKHERHPIFGNIVDEVAYHEKYPTIYHLRKKLVDSTDKADLRLIYLALAHMIKFRGHFLIEGDLNPDNSDVDKLFIQLVQTYNQLFEENPINASGVDAKAILSARLSKSRRLENLIAQLPGEKKNGLFGNLIALSLGLTPNFKSNFDLAEDAKLQLSKDTYDDDLDNLLAQIGDQYADLFLAAKNLSDAILLSDILRVNTEITKAPLSASMIKRYDEHHQDLTLLKALVRQQLPEKYKEIFFDQSKNGYAGYIDGGASQEEFYKFIKPILEKMDGTEELLVKLNREDLLRKQRTFDNGSIPHQIHLGELHAILRRQEDFYPFLKDNREKIEKILTFRIPYYVGPLARGNSRFAWMTRKSEETITPWNFEEVVDKGASAQSFIERMTNFDKNLPNEKVLPKHSLLYEYFTVYNELTKVKYVTEGMRKPAFLSGEQKKAIVDLLFKTNRKVTVKQLKEDYFKKIECFDSVEISGVEDRFNASLGTYHDLLKIIKDKDFLDNEENEDILEDIVLTLTLFEDREMIEERLKTYAHLFDDKVMKQLKRRRYTGWGRLSRKLINGIRDKQSGKTILDFLKSDGFANRNFMQLIHDDSLTFKEDIQKAQVSGQGDSLHEHIANLAGSPAIKKGILQTVKVVDELVKVMGRHKPENIVIEMARENQTTQKGQKNSRERMKRIEEGIKELGSQILKEHPVENTQLQNEKLYLYYLQNGRDMYVDQELDINRLSDYDVDHIVPQSFLKDDSIDNKVLTRSDKARGKSDNVPSEEVVKKMKNYWRQLLNAKLITQRKFDNLTKAERGGLSELDKAGFIKRQLVETRQITKHVAQILDSRMNTKYDENDKLIREVKVITLKSKLVSDFRKDFQFYKVREINNYHHAHDAYLNAVVGTALIKKYPKLESEFVYGDYKVYDVRKMIAKSEQEIGKATAKYFFYSNIMNFFKTEITLANGEIRKRPLIETNGETGEIVWDKGRDFATVRKVLSMPQVNIVKKTEVQTGGFSKESILPKRNSDKLIARKKDWDPKKYGGFDSPTVAYSVLVVAKVEKGKSKKLKSVKELLGITIMERSSFEKNPIDFLEAKGYKEVKKDLIIKLPKYSLFELENGRKRMLASAGELQKGNELALPSKYVNFLYLASHYEKLKGSPEDNEQKQLFVEQHKHYLDEIIEQISEFSKRVILADANLDKVLSAYNKHRDKPIREQAENIIHLFTLTNLGAPAAFKYFDTTIDRKRYTSTKEVLDATLIHQSITGLYETRIDLSQLGGDGGGSSGGGPAPGGLLGRDLLTKLKAQIQFSTEGPQVTWEDRPAMCLVLNLEEEYRLHEKPVPPSIDPSWLQLFPMVWAEKAGMGLANQVPPVVVELKSDASPVAVRQYPMSKEAREGIRPHIQRFLDLGILVPCQSPWNTPLLPVKKPGTNDYRPVQDLREVNKRVQDIHPTVPNPYNLLSSLPPSHTWYSVLDLKDAFFCLKLHPNSQPLFAFEWRDPEKGNTGQLTWTRLPQGFKNSPTLFNEALHRDLASFRALNPQVVMLQYVDDLLVAAPTYRDCKEGTRRLLQELSKLGYRVSAKKAQLCREEVTYLGYLLKGGKRWLTPARKATVMKIPTPTTPRQVREFLGTAGFCRLWIPGFASLAAPLYPLTRPKVPFTWTEAHQEAFGRIKEALLSAPALALPDLTKPFALYVDEKEGVARGVLTQTLGPWRRPVAYLSKKLDPVASGWPTCLKAIAAVALLLKDADKLTLGQNVLVIAPHNLESIVRQPPDRWMTNARMTHYQSLLLNERVSFAPPAILNPATLLPVESDDTPIHICSEILAEETGTRPDLRDQPLPGVPAWYTDGSSFIMDGRRQAGAAIVDNKRTVWASNLPEGTSAQKAELIALTQALRLAEGKSINIYTDSRYAFATAHVHGAIYKQRGWLTSAGKDIKNKEEILALLEAIHLPKRVAIIHCPGHQRGTDPVATGNRKADEAAKQAAQSTRILTETTKNAGKRTADGSEFEKRTADGSEFESPKKKAKVE

SEQ ID NO: 7387 - protein, 2216 aa, synthetic construct
MPAAKRVKLDGGDKKYSIGLDIGTNSVGWAVITDEYKVPSKKFKVLGNTDRHSIKKNLIGALLFDSGETAEATRLKRTARRRYTRRKNRICYLQEIFSNEMAKVDDSFFHRLEESFLVEEDKKHERHPIFGNIVDEVAYHEKYPTIYHLRKKLVDSTDKADLRLIYLALAHMIKFRGHFLIEGDLNPDNSDVDKLFIQLVQTYNQLFEENPINASGVDAKAILSARLSKSRRLENLIAQLPGEKKNGLFGNLIALSLGLTPNFKSNFDLAEDAKLQLSKDTYDDDLDNLLAQIGDQYADLFLAAKNLSDAILLSDILRVNTEITKAPLSASMIKRYDEHHQDLTLLKALVRQQLPEKYKEIFFDQSKNGYAGYIDGGASQEEFYKFIKPILEKMDGTEELLVKLNREDLLRKQRTFDNGSIPHQIHLGELHAILRRQEDFYPFLKDNREKIEKILTFRIPYYVGPLARGNSRFAWMTRKSEETITPWNFEEVVDKGASAQSFIERMTNFDKNLPNEKVLPKHSLLYEYFTVYNELTKVKYVTEGMRKPAFLSGEQKKAIVDLLFKTNRKVTVKQLKEDYFKKIECFDSVEISGVEDRFNASLGTYHDLLKIIKDKDFLDNEENEDILEDIVLTLTLFEDREMIEERLKTYAHLFDDKVMKQLKRRRYTGWGRLSRKLINGIRDKQSGKTILDFLKSDGFANRNFMQLIHDDSLTFKEDIQKAQVSGQGDSLHEHIANLAGSPAIKKGILQTVKVVDELVKVMGRHKPENIVIEMARENQTTQKGQKNSRERMKRIEEGIKELGSQILKEHPVENTQLQNEKLYLYYLQNGRDMYVDQELDINRLSDYDVDHIVPQSFLKDDSIDNKVLTRSDKARGKSDNVPSEEVVKKMKNYWRQLLNAKLITQRKFDNLTKAERGGLSELDKAGFIKRQLVETRQITKHVAQILDSRMNTKYDENDKLIREVKVITLKSKLVSDFRKDFQFYKVREINNYHHAHDAYLNAVVGTALIKKYPKLESEFVYGDYKVYDVRKMIAKSEQEIGKATAKYFFYSNIMNFFKTEITLANGEIRKRPLIETNGETGEIVWDKGRDFATVRKVLSMPQVNIVKKTEVQTGGFSKESILPKRNSDKLIARKKDWDPKKYGGFDSPTVAYSVLVVAKVEKGKSKKLKSVKELLGITIMERSSFEKNPIDFLEAKGYKEVKKDLIIKLPKYSLFELENGRKRMLASAGELQKGNELALPSKYVNFLYLASHYEKLKGSPEDNEQKQLFVEQHKHYLDEIIEQISEFSKRVILADANLDKVLSAYNKHRDKPIREQAENIIHLFTLTNLGAPAAFKYFDTTIDRKRYTSTKEVLDATLIHQSITGLYETRIDLSQLGGDGGGSSGGGPAPGGTLGDQGSRGSDPLPEPRVTLTVEGIPTEFLVNTGAEHSVLTKPMGKMGSKRTVVAGATGSKVYPWTTKRLLKIGQKQVTHSFLVIPECPAPLLGRDLLTKLKAQIQFSTEGPQVTWEDRPAMCLVLNLEEEYRLHEKPVPPSIDPSWLQLFPMVWAEKAGMGLANQVPPVVVELKSDASPVAVRQYPMSKEAREGIRPHIQRFLDLGILVPCQSPWNTPLLPVKKPGTNDYRPVQDLREVNKRVQDIHPTVPNPYNLLSSLPPSHTWYSVLDLKDAFFCLKLHPNSQPLFAFEWRDPEKGNTGQLTWTRLPQGFKNSPTLFNEALHRDLASFRALNPQVVMLQYVDDLLVAAPTYRDCKEGTRRLLQELSKLGYRVSAKKAQLCREEVTYLGYLLKGGKRWLTPARKATVMKIPTPTTPRQVREFLGTAGFCRLWIPGFASLAAPLYPLTRPKVPFTWTEAHQEAFGRIKEALLSAPALALPDLTKPFALYVDEKEGVARGVLTQTLGPWRRPVAYLSKKLDPVASGWPTCLKAIAAVALLLKDADKLTLGQNVLVIAPHNLESIVRQPPDRWMTNARMTHYQSLLLNERVSFAPPAILNPATLLPVESDDTPIHICSEILAEETGTRPDLRDQPLPGVPAWYTDGSSFIMDGRRQAGAAIVDNKRTVWASNLPEGTSAQKAELIALTQALRLAEGKSINIYTDSRYAFATAHVHGAIYKQRGWLTSAGKDIKNKEEILALLEAIHLPKRVAIIHCPGHQRGTDPVATGNRKADEAAKQAAQSTRILTETTKNAGKRTADGSEFEKRTADGSEFESPKKKAKVE

SEQ ID NO: 7388 - protein, 2216 aa, synthetic construct
MPAAKRVKLDGGDKKYSIGLDIGTNSVGWAVITDEYKVPSKKFKVLGNTDRHSIKKNLIGALLFDSGETAEATRLKRTARRRYTRRKNRICYLQEIFSNEMAKVDDSFFHRLEESFLVEEDKKHERHPIFGNIVDEVAYHEKYPTIYHLRKKLVDSTDKADLRLIYLALAHMIKFRGHFLIEGDLNPDNSDVDKLFIQLVQTYNQLFEENPINASGVDAKAILSARLSKSRRLENLIAQLPGEKKNGLFGNLIALSLGLTPNFKSNFDLAEDAKLQLSKDTYDDDLDNLLAQIGDQYADLFLAAKNLSDAILLSDILRVNTEITKAPLSASMIKRYDEHHQDLTLLKALVRQQLPEKYKEIFFDQSKNGYAGYIDGGASQEEFYKFIKPILEKMDGTEELLVKLNREDLLRKQRTFDNGSIPHQIHLGELHAILRRQEDFYPFLKDNREKIEKILTFRIPYYVGPLARGNSRFAWMTRKSEETITPWNFEEVVDKGASAQSFIERMTNFDKNLPNEKVLPKHSLLYEYFTVYNELTKVKYVTEGMRKPAFLSGEQKKAIVDLLFKTNRKVTVKQLKEDYFKKIECFDSVEISGVEDRFNASLGTYHDLLKIIKDKDFLDNEENEDILEDIVLTLTLFEDREMIEERLKTYAHLFDDKVMKQLKRRRYTGWGRLSRKLINGIRDKQSGKTILDFLKSDGFANRNFMQLIHDDSLTFKEDIQKAQVSGQGDSLHEHIANLAGSPAIKKGILQTVKVVDELVKVMGRHKPENIVIEMARENQTTQKGQKNSRERMKRIEEGIKELGSQILKEHPVENTQLQNEKLYLYYLQNGRDMYVDQELDINRLSDYDVDHIVPQSFLKDDSIDNKVLTRSDKARGKSDNVPSEEVVKKMKNYWRQLLNAKLITQRKFDNLTKAERGGLSELDKAGFIKRQLVETRQITKHVAQILDSRMNTKYDENDKLIREVKVITLKSKLVSDFRKDFQFYKVREINNYHHAHDAYLNAVVGTALIKKYPKLESEFVYGDYKVYDVRKMIAKSEQEIGKATAKYFFYSNIMNFFKTEITLANGEIRKRPLIETNGETGEIVWDKGRDFATVRKVLSMPQVNIVKKTEVQTGGFSKESILPKRNSDKLIARKKDWDPKKYGGFDSPTVAYSVLVVAKVEKGKSKKLKSVKELLGITIMERSSFEKNPIDFLEAKGYKEVKKDLIIKLPKYSLFELENGRKRMLASAGELQKGNELALPSKYVNFLYLASHYEKLKGSPEDNEQKQLFVEQHKHYLDEIIEQISEFSKRVILADANLDKVLSAYNKHRDKPIREQAENIIHLFTLTNLGAPAAFKYFDTTIDRKRYTSTKEVLDATLIHQSITGLYETRIDLSQLGGDGGGSSGGGPAPGGTLGDQGSRGSDPLPEPRVTLTVEGIPTEFLVNTGAEHSVLTKPMGKMGSKRTVVAGATGSKVYPWTTKRLLKIGQKQVTHSFLVIPECPAPLLGRDLLTKLKAQIQFSTEGPQVTWEDRPAMCLVLNLEEEYRLHEKPVPPSIDPSWLQLFPMVWAEKAGMGLANQVPPVVVELKSDASPVAVRQYPMSKEAREGIRPHIQRFLDLGILVPCQSPWNTPLLPVKKPGTNDYRPVQDLREVNKRVQDIHPTVPNPYNLLSSLPPSHTWYSVLDLKDAFFCLKLHPNSQPLFAFEWRDPEKGNTGQLTWTRLPQGFKNSPTLFNEALHRDLASFRALNPQVVMLQYVDDLLVAAPTYRDCKEGTRRLLQELSKLGYRVSAKKAQLCREEVTYLGYLLKGGKRWLTPARKATVMKIPTPTTPRQVREFLGKAGFCRLFIPGFASLAAPLYPLTRPKVPFTWTEAHQEAFGRIKEALLSAPALALPDLTKPFALYVDEKEGVARGVLTQTLGPWRRPVAYLSKKLDPVASGWPTCLKAIAAVALLLKDADKLTLGQNVLVIAPHNLESIVRQPPDRWMTNARMTHYQSLLLNERVSFAPPAILNPATLLPVESDDTPIHICSEILAEETGTRPDLRDQPLPGVPAWYTDGSSFIMDGRRQAGAAIVDNKRTVWASNLPEGTSAQKAELIALTQALRLAEGKSINIYTDSRYAFATAHVHGAIYKQRGWLTSAGKDIKNKEEILALLEAIHLPKRVAIIHCPGHQRGTDPVATGNRKADEAAKQAAQSTRILTETTKNAGKRTADGSEFEKRTADGSEFESPKKKAKVE

SEQ ID NO: 7389 - protein, 2094 aa, synthetic construct
MPAAKRVKLDGGDKKYSIGLDIGTNSVGWAVITDEYKVPSKKFKVLGNTDRHSIKKNLIGALLFDSGETAEATRLKRTARRRYTRRKNRICYLQEIFSNEMAKVDDSFFHRLEESFLVEEDKKHERHPIFGNIVDEVAYHEKYPTIYHLRKKLVDSTDKADLRLIYLALAHMIKFRGHFLIEGDLNPDNSDVDKLFIQLVQTYNQLFEENPINASGVDAKAILSARLSKSRRLENLIAQLPGEKKNGLFGNLIALSLGLTPNFKSNFDLAEDAKLQLSKDTYDDDLDNLLAQIGDQYADLFLAAKNLSDAILLSDILRVNTEITKAPLSASMIKRYDEHHQDLTLLKALVRQQLPEKYKEIFFDQSKNGYAGYIDGGASQEEFYKFIKPILEKMDGTEELLVKLNREDLLRKQRTFDNGSIPHQIHLGELHAILRRQEDFYPFLKDNREKIEKILTFRIPYYVGPLARGNSRFAWMTRKSEETITPWNFEEVVDKGASAQSFIERMTNFDKNLPNEKVLPKHSLLYEYFTVYNELTKVKYVTEGMRKPAFLSGEQKKAIVDLLFKTNRKVTVKQLKEDYFKKIECFDSVEISGVEDRFNASLGTYHDLLKIIKDKDFLDNEENEDILEDIVLTLTLFEDREMIEERLKTYAHLFDDKVMKQLKRRRYTGWGRLSRKLINGIRDKQSGKTILDFLKSDGFANRNFMQLIHDDSLTFKEDIQKAQVSGQGDSLHEHIANLAGSPAIKKGILQTVKVVDELVKVMGRHKPENIVIEMARENQTTQKGQKNSRERMKRIEEGIKELGSQILKEHPVENTQLQNEKLYLYYLQNGRDMYVDQELDINRLSDYDVDHIVPQSFLKDDSIDNKVLTRSDKARGKSDNVPSEEVVKKMKNYWRQLLNAKLITQRKFDNLTKAERGGLSELDKAGFIKRQLVETRQITKHVAQILDSRMNTKYDENDKLIREVKVITLKSKLVSDFRKDFQFYKVREINNYHHAHDAYLNAVVGTALIKKYPKLESEFVYGDYKVYDVRKMIAKSEQEIGKATAKYFFYSNIMNFFKTEITLANGEIRKRPLIETNGETGEIVWDKGRDFATVRKVLSMPQVNIVKKTEVQTGGFSKESILPKRNSDKLIARKKDWDPKKYGGFDSPTVAYSVLVVAKVEKGKSKKLKSVKELLGITIMERSSFEKNPIDFLEAKGYKEVKKDLIIKLPKYSLFELENGRKRMLASAGELQKGNELALPSKYVNFLYLASHYEKLKGSPEDNEQKQLFVEQHKHYLDEIIEQISEFSKRVILADANLDKVLSAYNKHRDKPIREQAENIIHLFTLTNLGAPAAFKYFDTTIDRKRYTSTKEVLDATLIHQSITGLYETRIDLSQLGGDGGGSSGGGPAPGGTLNLEDEYRLYETSAEPEVSPGSTWLSDFPQAWAETGGMGLAVRQAPLIIPLKATSTPVSIKQYPMSQEAKLGIKPHIQRLLDQGILVPCQSPWNTPLLPVKKPGTNDYRPVQDLREVNKRVEDIHPTVPNPYNLLSGLPPSHRWYTVLDLKDAFFCLRLHPTSQPLFAFEWRDPGMGISGQLTWTRLPQGFKNSPTLFNEALHRDLADFRIQHPDLILLQYVDDILLAATSELDCQQGTRALLLTLGNLGYRASAKKAQLCQKQVKYLGYLLKEGQRWLTEARKETVMGQPTPKTPRQLREFLGKAGFCRLFIPGFAEMAAPLYPLTKPGTLFNWGPDQQKAYQEIKQALLTAPALGLPDLTKPFELFVDEKQGYAKGVLTQKLGPWRRPVAYLSKKLDPVAAGWPPCLRMVAAIAVLRKDAGKLTMGQPLVILAPHAVEALVKQPPDRWLSNARMTHYQAMLLDTDRVQFGPVVALNPATLLPLPEEGAPHDCLEILAETHGTRPDLTDQPIPDADHTWYTDGSSFLQEGQRKAGAAVTTETEVIWARALPAGTSAQRAELIALTQALKMAEGKRLNVYTDSRYAFATAHIHGEIYRRRGWLTSEGREIKNKSEILALLKALFLPKRLSIIHCLGHQKGDSAEARGNRLADQAAREAAIKTPPDTSTLLAGKRTADGSEFEKRTADGSEFESPKKKAKVE

SEQ ID NO: 7390 - protein, 2094 aa, synthetic construct
MPAAKRVKLDGGDKKYSIGLDIGTNSVGWAVITDEYKVPSKKFKVLGNTDRHSIKKNLIGALLFDSGETAEATRLKRTARRRYTRRKNRICYLQEIFSNEMAKVDDSFFHRLEESFLVEEDKKHERHPIFGNIVDEVAYHEKYPTIYHLRKKLVDSTDKADLRLIYLALAHMIKFRGHFLIEGDLNPDNSDVDKLFIQLVQTYNQLFEENPINASGVDAKAILSARLSKSRRLENLIAQLPGEKKNGLFGNLIALSLGLTPNFKSNFDLAEDAKLQLSKDTYDDDLDNLLAQIGDQYADLFLAAKNLSDAILLSDILRVNTEITKAPLSASMIKRYDEHHQDLTLLKALVRQQLPEKYKEIFFDQSKNGYAGYIDGGASQEEFYKFIKPILEKMDGTEELLVKLNREDLLRKQRTFDNGSIPHQIHLGELHAILRRQEDFYPFLKDNREKIEKILTFRIPYYVGPLARGNSRFAWMTRKSEETITPWNFEEVVDKGASAQSFIERMTNFDKNLPNEKVLPKHSLLYEYFTVYNELTKVKYVTEGMRKPAFLSGEQKKAIVDLLFKTNRKVTVKQLKEDYFKKIECFDSVEISGVEDRFNASLGTYHDLLKIIKDKDFLDNEENEDILEDIVLTLTLFEDREMIEERLKTYAHLFDDKVMKQLKRRRYTGWGRLSRKLINGIRDKQSGKTILDFLKSDGFANRNFMQLIHDDSLTFKEDIQKAQVSGQGDSLHEHIANLAGSPAIKKGILQTVKVVDELVKVMGRHKPENIVIEMARENQTTQKGQKNSRERMKRIEEGIKELGSQILKEHPVENTQLQNEKLYLYYLQNGRDMYVDQELDINRLSDYDVDHIVPQSFLKDDSIDNKVLTRSDKARGKSDNVPSEEVVKKMKNYWRQLLNAKLITQRKFDNLTKAERGGLSELDKAGFIKRQLVETRQITKHVAQILDSRMNTKYDENDKLIREVKVITLKSKLVSDFRKDFQFYKVREINNYHHAHDAYLNAVVGTALIKKYPKLESEFVYGDYKVYDVRKMIAKSEQEIGKATAKYFFYSNIMNFFKTEITLANGEIRKRPLIETNGETGEIVWDKGRDFATVRKVLSMPQVNIVKKTEVQTGGFSKESILPKRNSDKLIARKKDWDPKKYGGFDSPTVAYSVLVVAKVEKGKSKKLKSVKELLGITIMERSSFEKNPIDFLEAKGYKEVKKDLIIKLPKYSLFELENGRKRMLASAGELQKGNELALPSKYVNFLYLASHYEKLKGSPEDNEQKQLFVEQHKHYLDEIIEQISEFSKRVILADANLDKVLSAYNKHRDKPIREQAENIIHLFTLTNLGAPAAFKYFDTTIDRKRYTSTKEVLDATLIHQSITGLYETRIDLSQLGGDGGGSSGGGPAPGGLGIEDEYRLHETSTEPDVSLGSTWLSDFPQAWAETGGMGLAVRQAPLIIPLKATSTPVSIQQYPMSHEARLGIKPHIQRLLDQGILVPCQSPWNTPLLPVKKPGTNDYRPVQDLREVNKRVEDIHPTVPNPYNLLSGLPPSHQWYTVLDLKDAFFCLRLHPTSQPLFAFEWRDPGMGISGQLTWTRLPQGFKNSPTLFNEALHRDLADFRIQHPDLILLQYVDDILLAATSELDCQQGTRALLQTLGDLGYRASAKKAQICQKQVKYLGYLLREGQRWLTEARKETVMGQPVPKTPRQLREFLGKAGFCRLFIPGFAEMAAPLYPLTKPGTLFSWGPDQQKAYQEIKQALLTAPALGLPDLTKPFELFVDEKQGYAKGVLTQKLGPWRRPVAYLSKKLDPVAAGWPPCLRMVAAIAVLTKDAGKLTMGQPLVILAPHAVEALVKQPPDRWLSNARMTHYQAMLLDTDRVQFGPVVALNPATLLPLPEEGAPHDCLEILAETHGTRPDLTDQPIPDADHTWYTDGSSFLQEGQRKAGAAVTTETEVIWAGALPAGTSAQRAELIALTQALKMAEGKRLNVYTDSRYAFATAHIHGEIYRRRGWLTSEGREIKNKSEILALLKALFLPKRLSIIHCLGHQKGDSAEARGNRLADQAAREAAIKTPPDTSTLLIAGKRTADGSEFEKRTADGSEFESPKKKAKVE

SEQ ID NO: 7391 - protein, 2094 aa, synthetic construct; identical to SEQ ID NO: 7390

SEQ ID NO: 7392 - protein, 2094 aa, synthetic construct
MPAAKRVKLDGGDKKYSIGLDIGTNSVGWAVITDEYKVPSKKFKVLGNTDRHSIKKNLIGALLFDSGETAEATRLKRTARRRYTRRKNRICYLQEIFSNEMAKVDDSFFHRLEESFLVEEDKKHERHPIFGNIVDEVAYHEKYPTIYHLRKKLVDSTDKADLRLIYLALAHMIKFRGHFLIEGDLNPDNSDVDKLFIQLVQTYNQLFEENPINASGVDAKAILSARLSKSRRLENLIAQLPGEKKNGLFGNLIALSLGLTPNFKSNFDLAEDAKLQLSKDTYDDDLDNLLAQIGDQYADLFLAAKNLSDAILLSDILRVNTEITKAPLSASMIKRYDEHHQDLTLLKALVRQQLPEKYKEIFFDQSKNGYAGYIDGGASQEEFYKFIKPILEKMDGTEELLVKLNREDLLRKQRTFDNGSIPHQIHLGELHAILRRQEDFYPFLKDNREKIEKILTFRIPYYVGPLARGNSRFAWMTRKSEETITPWNFEEVVDKGASAQSFIERMTNFDKNLPNEKVLPKHSLLYEYFTVYNELTKVKYVTEGMRKPAFLSGEQKKAIVDLLFKTNRKVTVKQLKEDYFKKIECFDSVEISGVEDRFNASLGTYHDLLKIIKDKDFLDNEENEDILEDIVLTLTLFEDREMIEERLKTYAHLFDDKVMKQLKRRRYTGWGRLSRKLINGIRDKQSGKTILDFLKSDGFANRNFMQLIHDDSLTFKEDIQKAQVSGQGDSLHEHIANLAGSPAIKKGILQTVKVVDELVKVMGRHKPENIVIEMARENQTTQKGQKNSRERMKRIEEGIKELGSQILKEHPVENTQLQNEKLYLYYLQNGRDMYVDQELDINRLSDYDVDHIVPQSFLKDDSIDNKVLTRSDKARGKSDNVPSEEVVKKMKNYWRQLLNAKLITQRKFDNLTKAERGGLSELDKAGFIKRQLVETRQITKHVAQILDSRMNTKYDENDKLIREVKVITLKSKLVSDFRKDFQFYKVREINNYHHAHDAYLNAVVGTALIKKYPKLESEFVYGDYKVYDVRKMIAKSEQEIGKATAKYFFYSNIMNFFKTEITLANGEIRKRPLIETNGETGEIVWDKGRDFATVRKVLSMPQVNIVKKTEVQTGGFSKESILPKRNSDKLIARKKDWDPKKYGGFDSPTVAYSVLVVAKVEKGKSKKLKSVKELLGITIMERSSFEKNPIDFLEAKGYKEVKKDLIIKLPKYSLFELENGRKRMLASAGELQKGNELALPSKYVNFLYLASHYEKLKGSPEDNEQKQLFVEQHKHYLDEIIEQISEFSKRVILADANLDKVLSAYNKHRDKPIREQAENIIHLFTLTNLGAPAAFKYFDTTIDRKRYTSTKEVLDATLIHQSITGLYETRIDLSQLGGDGGGSSGGGPAPGGTLNIEDEYRLHETSKGPDVPLGSTWLSDFPQAWAETGGMGLAFRQAPLIISLKATSTPVSIKQYPMSQEARLGIKPHIQRLLDQGILVPCQSPWNTPLLPVKKPGTNDYRPVQDLREVNKRVEDIHPTVPNPYNLLSGLPPSHQWYTVLDLKDAFFCLRLHPTSQSLFAFEWKDPEMGISGQLTWTRLPQGFKNSPTLFNEALHRDLADFRIQHPDLILLQYVDDLLLAATSELDCQQGTRALLQTLGDLGYRASAKKAQICQKQVKYLGYLLKEGQRWLTEARKETVMGQPTPKTPRQLREFLGKAGLCRLFIPGFAEMAAPLYPLTKPGTLFKWGPDQQKAYQEIKQALLTAPALGLPDLTKPFELFVDEKQGYAKGVLTQKLGPWRRPVAYLSKKLDPVAAGWPPCLRMVAAIAVLTKDVGKLTMGQPLVILAPHAVEALVKQPPDRWLSNARMTHYQALLLDTDRVQFGPIVALNPATLLPLPEEGLQHDCLDILAEAHGTRPDLTDQPLPDADHTWYTDGSSFLQEGQRRAGAAVTTETEVIWAKALPAGTSAQRAELIALTQALKMAAGKKLNVYTDSRYAFATAHIHGEIYRRRGWLTSEGKEIKNKDEILALLKALFLPKRLSIIHCPGHQKGNHAEARGNRMADQAAREVATRETPETSTLLAGKRTADGSEFEKRTADGSEFESPKKKAKVE

SEQ ID NO: 7393 - protein, 2094 aa, synthetic construct
MPAAKRVKLDGGDKKYSIGLDIGTNSVGWAVITDEYKVPSKKFKVLGNTDRHSIKKNLIGALLFDSGETAEATRLKRTARRRYTRRKNRICYLQEIFSNEMAKVDDSFFHRLEESFLVEEDKKHERHPIFGNIVDEVAYHEKYPTIYHLRKKLVDSTDKADLRLIYLALAHMIKFRGHFLIEGDLNPDNSDVDKLFIQLVQTYNQLFEENPINASGVDAKAILSARLSKSRRLENLIAQLPGEKKNGLFGNLIALSLGLTPNFKSNFDLAEDAKLQLSKDTYDDDLDNLLAQIGDQYADLFLAAKNLSDAILLSDILRVNTEITKAPLSASMIKRYDEHHQDLTLLKALVRQQLPEKYKEIFFDQSKNGYAGYIDGGASQEEFYKFIKPILEKMDGTEELLVKLNREDLLRKQRTFDNGSIPHQIHLGELHAILRRQEDFYPFLKDNREKIEKILTFRIPYYVGPLARGNSRFAWMTRKSEETITPWNFEEVVDKGASAQSFIERMTNFDKNLPNEKVLPKHSLLYEYFTVYNELTKVKYVTEGMRKPAFLSGEQKKAIVDLLFKTNRKVTVKQLKEDYFKKIECFDSVEISGVEDRFNASLGTYHDLLKIIKDKDFLDNEENEDILEDIVLTLTLFEDREMIEERLKTYAHLFDDKVMKQLKRRRYTGWGRLSRKLINGIRDKQSGKTILDFLKSDGFANRNFMQLIHDDSLTFKEDIQKAQVSGQGDSLHEHIANLAGSPAIKKGILQTVKVVDELVKVMGRHKPENIVIEMARENQTTQKGQKNSRERMKRIEEGIKELGSQILKEHPVENTQLQNEKLYLYYLQNGRDMYVDQELDINRLSDYDVDHIVPQSFLKDDSIDNKVLTRSDKARGKSDNVPSEEVVKKMKNYWRQLLNAKLITQRKFDNLTKAERGGLSELDKAGFIKRQLVETRQITKHVAQILDSRMNTKYDENDKLIREVKVITLKSKLVSDFRKDFQFYKVREINNYHHAHDAYLNAVVGTALIKKYPKLESEFVYGDYKVYDVRKMIAKSEQEIGKATAKYFFYSNIMNFFKTEITLANGEIRKRPLIETNGETGEIVWDKGRDFATVRKVLSMPQVNIVKKTEVQTGGFSKESILPKRNSDKLIARKKDWDPKKYGGFDSPTVAYSVLVVAKVEKGKSKKLKSVKELLGITIMERSSFEKNPIDFLEAKGYKEVKKDLIIKLPKYSLFELENGRKRMLASAGELQKGNELALPSKYVNFLYLASHYEKLKGSPEDNEQKQLFVEQHKHYLDEIIEQISEFSKRVILADANLDKVLSAYNKHRDKPIREQAENIIHLFTLTNLGAPAAFKYFDTTIDRKRYTSTKEVLDATLIHQSITGLYETRIDLSQLGGDGGGSSGGGPAPGGTLNIEDEHRLHETSKEPDVSLGSTWLSDFPQAWAETGGMGLAVRQAPLIIPLKATSTPVSIKQYPMSQEARLGIKPHIQRLLDQGILVPCQSPWNTPLLPVKKPGTNDYRPVQDLREVNKRVEDIHPTVPNPYNLLSGLPPSHQWYTVLDLKDAFFCLRLHPTSQPLFAFEWRDPEMGISGQLTWTRLPQGFKNSPTLFNEALHRDLADFRIQHPDLILLQYVDDLLLAATSELDCQQGTRALLQTLGNLGYRASAKKAQICQKQVKYLGYLLKEGQRWLTEARKETVMGQPTPKTPRQLREFLGTAGFCRLWIPGFAEMAAPLYPLTKPGTLFNWGPDQQKAYQEIKQALLTAPALGLPDLTKPFELFVDEKQGYAKGVLTQKLGPWRRPVAYLSKKLDPVAAGWPPCLRMVAAIAVLTKDAGKLTMGQPLVILAPHAVEALVKQPPDRWLSNARMTHYQALLLDTDRVQFGPVVALNPATLLPLPEEGLQHNCLDILAEAHGTRPDLTDQPLPDADHTWYTDGSSLLQEGQRKAGAAVTTETEVIWAKALPAGTSAQRAELIALTQALKMAEGKKLNVYTDSRYAFATAHIHGEIYRRRGWLTSEGKEIKNKDEILALLKALFLPKRLSIIHCPGHQKGHSAEARGNRMADQAARKAAITETPDTSTLLAGKRTADGSEFEKRTADGSEFESPKKKAKVE

SEQ ID NO: 7394 - protein, 2094 aa, synthetic construct; identical to SEQ ID NO: 7393

SEQ ID NO: 7395 - protein, 2088 aa, synthetic construct; identical to SEQ ID NO: 4532

SEQ ID NO: 7396 - protein, 2088 aa, synthetic construct
MPAAKRVKLDGGDKKYSIGLDIGTNSVGWAVITDEYKVPSKKFKVLGNTDRHSIKKNLIGALLFDSGETAEATRLKRTARRRYTRRKNRICYLQEIFSNEMAKVDDSFFHRLEESFLVEEDKKHERHPIFGNIVDEVAYHEKYPTIYHLRKKLVDSTDKADLRLIYLALAHMIKFRGHFLIEGDLNPDNSDVDKLFIQLVQTYNQLFEENPINASGVDAKAILSARLSKSRRLENLIAQLPGEKKNGLFGNLIALSLGLTPNFKSNFDLAEDAKLQLSKDTYDDDLDNLLAQIGDQYADLFLAAKNLSDAILLSDILRVNTEITKAPLSASMIKRYDEHHQDLTLLKALVRQQLPEKYKEIFFDQSKNGYAGYIDGGASQEEFYKFIKPILEKMDGTEELLVKLNREDLLRKQRTFDNGSIPHQIHLGELHAILRRQEDFYPFLKDNREKIEKILTFRIPYYVGPLARGNSRFAWMTRKSEETITPWNFEEVVDKGASAQSFIERMTNFDKNLPNEKVLPKHSLLYEYFTVYNELTKVKYVTEGMRKPAFLSGEQKKAIVDLLFKTNRKVTVKQLKEDYFKKIECFDSVEISGVEDRFNASLGTYHDLLKIIKDKDFLDNEENEDILEDIVLTLTLFEDREMIEERLKTYAHLFDDKVMKQLKRRRYTGWGRLSRKLINGIRDKQSGKTILDFLKSDGFANRNFMQLIHDDSLTFKEDIQKAQVSGQGDSLHEHIANLAGSPAIKKGILQTVKVVDELVKVMGRHKPENIVIEMARENQTTQKGQKNSRERMKRIEEGIKELGSQILKEHPVENTQLQNEKLYLYYLQNGRDMYVDQELDINRLSDYDVDHIVPQSFLKDDSIDNKVLTRSDKARGKSDNVPSEEVVKKMKNYWRQLLNAKLITQRKFDNLTKAERGGLSELDKAGFIKRQLVETRQITKHVAQILDSRMNTKYDENDKLIREVKVITLKSKLVSDFRKDFQFYKVREINNYHHAHDAYLNAVVGTALIKKYPKLESEFVYGDYKVYDVRKMIAKSEQEIGKATAKYFFYSNIMNFFKTEITLANGEIRKRPLIETNGETGEIVWDKGRDFATVRKVLSMPQVNIVKKTEVQTGGFSKESILPKRNSDKLIARKKDWDPKKYGGFDSPTVAYSVLVVAKVEKGKSKKLKSVKELLGITIMERSSFEKNPIDFLEAKGYKEVKKDLIIKLPKYSLFELENGRKRMLASAGELQKGNELALPSKYVNFLYLASHYEKLKGSPEDNEQKQLFVEQHKHYLDEIIEQISEFSKRVILADANLDKVLSAYNKHRDKPIREQAENIIHLFTLTNLGAPAAFKYFDTTIDRKRYTSTKEVLDATLIHQSITGLYETRIDLSQLGGDGGGSSGGGPAPGGTLQLDDEYRLYSPLVKPDQNIQFWLEQFPQAWAETAGMGLAKQVPPQVIQLKASATPVSVRQYPLSKEAQEGIRPHVQRLIQQGILVPVQSPWNTPLLPVRKPGTNDYRPVQDLREVNKRVQDIHPTVPNPYNLLCALPPQRSWYTVLDLKDAFFCLRLHPTSQPLFAFEWRDPGTGRTGQLTWTRLPQGFKNSPTIFDEALHRDLANFRIQHPQVTLLQYVDDLLLAGATKQDCLEGTKALLLELSDLGYRASAKKAQICRREVTYLGYSLRDGQRWLTEARKKTVVQIPAPTTAKQVREFLGTAGFCRLWIPGFATLAAPLYPLTKEKGEFSWAPEHQKAFDAIKKALLSAPALALPDVTKPFTLYVDERKGVARGVLTQTLGPWRRPVAYLSKKLDPVASGWPVCLKAIAAVAILVKDADKLTLGQNITVIAPHALENIVRQPPDRWMTNARMTHYQSLLLTERVTFAPPAALNPATLLPEETDEPVTHDCHQLLIEETGVRKDLTDIPLTGEVLTWFTDGSSYVVEGKRMAGAAVVDGTRTIWASSLPEGTSAQKAELMALTQALRLAEGKSINIYTDSRYAFATAHVHGAIYKQRGLLTSAGREIKNKEEILSLLEALHLPKRLAIIHCPGHQKAKDPISRGNQMADRVAKQAAQGVNLLAGKRTADGSEFEKRTADGSEFESPKKKAKVE

SEQ ID NO: 7397 - protein, 2088 aa, synthetic construct; identical to SEQ ID NO: 4532

SEQ ID NO: 7398 - protein, 2085 aa, synthetic construct
MPAAKRVKLDGGDKKYSIGLDIGTNSVGWAVITDEYKVPSKKFKVLGNTDRHSIKKNLIGALLFDSGETAEATRLKRTARRRYTRRKNRICYLQEIFSNEMAKVDDSFFHRLEESFLVEEDKKHERHPIFGNIVDEVAYHEKYPTIYHLRKKLVDSTDKADLRLIYLALAHMIKFRGHFLIEGDLNPDNSDVDKLFIQLVQTYNQLFEENPINASGVDAKAILSARLSKSRRLENLIAQLPGEKKNGLFGNLIALSLGLTPNFKSNFDLAEDAKLQLSKDTYDDDLDNLLAQIGDQYADLFLAAKNLSDAILLSDILRVNTEITKAPLSASMIKRYDEHHQDLTLLKALVRQQLPEKYKEIFFDQSKNGYAGYIDGGASQEEFYKFIKPILEKMDGTEELLVKLNREDLLRKQRTFDNGSIPHQIHLGELHAILRRQEDFYPFLKDNREKIEKILTFRIPYYVGPLARGNSRFAWMTRKSEETITPWNFEEVVDKGASAQSFIERMTNFDKNLPNEKVLPKHSLLYEYFTVYNELTKVKYVTEGMRKPAFLSGEQKKAIVDLLFKTNRKVTVKQLKEDYFKKIECFDSVEISGVEDRFNASLGTYHDLLKIIKDKDFLDNEENEDILEDIVLTLTLFEDREMIEERLKTYAHLFDDKVMKQLKRRRYTGWGRLSRKLINGIRDKQSGKTILDFLKSDGFANRNFMQLIHDDSLTFKEDIQKAQVSGQGDSLHEHIANLAGSPAIKKGILQTVKVVDELVKVMGRHKPENIVIEMARENQTTQKGQKNSRERMKRIEEGIKELGSQILKEHPVENTQLQNEKLYLYYLQNGRDMYVDQELDINRLSDYDVDHIVPQSFLKDDSIDNKVLTRSDKARGKSDNVPSEEVVKKMKNYWRQLLNAKLITQRKFDNLTKAERGGLSELDKAGFIKRQLVETRQITKHVAQILDSRMNTKYDENDKLIREVKVITLKSKLVSDFRKDFQFYKVREINNYHHAHDAYLNAVVGTALIKKYPKLESEFVYGDYKVYDVRKMIAKSEQEIGKATAKYFFYSNIMNFFKTEITLANGEIRKRPLIETNGETGEIVWDKGRDFATVRKVLSMPQVNIVKKTEVQTGGFSKESILPKRNSDKLIARKKDWDPKKYGGFDSPTVAYSVLVVAKVEKGKSKKLKSVKELLGITIMERSSFEKNPIDFLEAKGYKEVKKDLIIKLPKYSLFELENGRKRMLASAGELQKGNELALPSKYVNFLYLASHYEKLKGSPEDNEQKQLFVEQHKHYLDEIIEQISEFSKRVILADANLDKVLSAYNKHRDKPIREQAENIIHLFTLTNLGAPAAFKYFDTTIDRKRYTSTKEVLDATLIHQSITGLYETRIDLSQLGGDGGGSSGGGPAPGGIPWLMKKPLQLTTLVPLQEYEERLLKQTMLTGSYKEKLQSLFLKYDALWQHWENQVGHRRIKPHHIATGTVNPRPQKQYPINPKAKASIQTVINDLLKQGVLIQQNSIMNTPVYPVPKPDGKWRMVLDYREVNKTIPLIAAQNQHSAGILSSIFRGKYKTTLDLSNGFWAHSITPESYWLTAFTWLGQQYCWTRLPQGFLNSPALFNADVVDLLKEVPNVQVYVDDIYISHDDPREHLEQLEKVFSLLLNAGYVVSLKKSEIAQHEVEFLGFNITKEGRGLTETFKQKLLNITPPRDLKQLQSILGKLNFARNFIPNFSELVKPLYNIIATAPGKYITWTTDNSQQLQNIISMLNSAENLEERNPEVRLIMKVNTSPSAGYIRFYNEFAKRPIMYLNYVYTKAEVKFTNTEKLLTTIHKGLIKALDLGMGQEILVYSPIVSMTKIQKTPLPERKALPIRWITWMSYLEDPRIQFHYDKTLPELQQVPTVTDDIIAKIKHPSEFSMVFYTDGSAIKHPNVNKSHNAGMGIAQVQFKPEFTVINTWSIPLGDHTAQLAEVAAVEFACKKALKIDGPVLIVTDSFYVAESVNKELPYWQSNGFFNNKKKPLKHVSKWKSIADCIQLKPDIIIIHEKGHQPTASTFHTEGNNLADKLATQGSYVVNAGKRTADGSEFEKRTADGSEFESPKKKAKVE

SEQ ID NO: 7399 - protein, 2174 aa, synthetic construct
MPAAKRVKLDGGDKKYSIGLDIGTNSVGWAVITDEYKVPSKKFKVLGNTDRHSIKKNLIGALLFDSGETAEATRLKRTARRRYTRRKNRICYLQEIFSNEMAKVDDSFFHRLEESFLVEEDKKHERHPIFGNIVDEVAYHEKYPTIYHLRKKLVDSTDKADLRLIYLALAHMIKFRGHFLIEGDLNPDNSDVDKLFIQLVQTYNQLFEENPINASGVDAKAILSARLSKSRRLENLIAQLPGEKKNGLFGNLIALSLGLTPNFKSNFDLAEDAKLQLSKDTYDDDLDNLLAQIGDQYADLFLAAKNLSDAILLSDILRVNTEITKAPLSASMIKRYDEHHQDLTLLKALVRQQLPEKYKEIFFDQSKNGYAGYIDGGASQEEFYKFIKPILEKMDGTEELLVKLNREDLLRKQRTFDNGSIPHQIHLGELHAILRRQEDFYPFLKDNREKIEKILTFRIPYYVGPLARGNSRFAWMTRKSEETITPWNFEEVVDKGASAQSFIERMTNFDKNLPNEKVLPKHSLLYEYFTVYNELTKVKYVTEGMRKPAFLSGEQKKAIVDLLFKTNRKVTVKQLKEDYFKKIECFDSVEISGVEDRFNASLGTYHDLLKIIKDKDFLDNEENEDILEDIVLTLTLFEDREMIEERLKTYAHLFDDKVMKQLKRRRYTGWGRLSRKLINGIRDKQSGKTILDFLKSDGFANRNFMQLIHDDSLTFKEDIQKAQVSGQGDSLHEHIANLAGSPAIKKGILQTVKVVDELVKVMGRHKPENIVIEMARENQTTQKGQKNSRERMKRIEEGIKELGSQILKEHPVENTQLQNEKLYLYYLQNGRDMYVDQELDINRLSDYDVDHIVPQSFLKDDSIDNKVLTRSDKARGKSDNVPSEEVVKKMKNYWRQLLNAKLITQRKFDNLTKAERGGLSELDKAGFIKRQLVETRQITKHVAQILDSRMNTKYDENDKLIREVKVITLKSKLVSDFRKDFQFYKVREINNYHHAHDAYLNAVVGTALIKKYPKLESEFVYGDYKVYDVRKMIAKSEQEIGKATAKYFFYSNIMNFFKTEITLANGEIRKRPLIETNGETGEIVWDKGRDFATVRKVLSMPQVNIVKKTEVQTGGFSKESILPKRNSDKLIARKKDWDPKKYGGFDSPTVAYSVLVVAKVEKGKSKKLKSVKELLGITIMERSSFEKNPIDFLEAKGYKEVKKDLIIKLPKYSLFELENGRKRMLASAGELQKGNELALPSKYVNFLYLASHYEKLKGSPEDNEQKQLFVEQHKHYLDEIIEQISEFSKRVILADANLDKVLSAYNKHRDKPIREQAENIIHLFTLTNLGAPAAFKYFDTTIDRKRYTSTKEVLDATLIHQSITGLYETRIDLSQLGGDGGGSSGGGPAPGGMDPLQLLQPLEAEIKGTKLKAHWNSGATITCVPQAFLEEEVPIKNIWIKTIHGEKEQPVYYLTFKIQGRKVEAEVISSPYDYILVSPSDIPWLMKKPLQLTTLVPLQEYEERLLKQTMLTGSYKEKLQSLFLKYDALWQHWENQVGHRRIKPHHIATGTVNPRPQKQYPINPKAKASIQTVINDLLKQGVLIQQNSIMNTPVYPVPKPDGKWRMVLDYREVNKTIPLIAAQNQHSAGILSSIFRGKYKTTLDLSNGFWAHSITPESYWLTAFTWLGQQYCWTRLPQGFLNSPALFNADVVDLLKEVPNVQVYVDDIYISHDDPREHLEQLEKVFSLLLNAGYVVSLKKSEIAQHEVEFLGFNITKEGRGLTETFKQKLLNITPPRDLKQLQSILGLLNFARNFIPNFSELVKPLYNIIATAPGKYITWTTDNSQQLQNIISMLNSAENLEERNPEVRLIMKVNTSPSAGYIRFYNEFAKRPIMYLNYVYTKAEVKFTNTEKLLTTIHKGLIKALDLGMGQEILVYSPIVSMTKIQKTPLPERKALPIRWITWMSYLEDPRIQFHYDKTLPELQQVPTVTDDIIAKIKHPSEFSMVFYTDGSAIKHPNVNKSHNAGMGIAQVQFKPEFTVINTWSIPLGDHTAQLAEVAAVEFACKKALKIDGPVLIVTDSFYVAESVNKELPYWQSNGFFNNKKKPLKHVSKWKSIADCIQLKPDIIIIHEKGHQPTASTFHTEGNNLADKLATQGSYVVNAGKRTADGSEFEKRTADGSEFESPKKKAKVE

SEQ ID NO: 7400 - protein, 2092 aa, synthetic construct
MPAAKRVKLDGGDKKYSIGLDIGTNSVGWAVITDEYKVPSKKFKVLGNTDRHSIKKNLIGALLFDSGETAEATRLKRTARRRYTRRKNRICYLQEIFSNEMAKVDDSFFHRLEESFLVEEDKKHERHPIFGNIVDEVAYHEKYPTIYHLRKKLVDSTDKADLRLIYLALAHMIKFRGHFLIEGDLNPDNSDVDKLFIQLVQTYNQLFEENPINASGVDAKAILSARLSKSRRLENLIAQLPGEKKNGLFGNLIALSLGLTPNFKSNFDLAEDAKLQLSKDTYDDDLDNLLAQIGDQYADLFLAAKNLSDAILLSDILRVNTEITKAPLSASMIKRYDEHHQDLTLLKALVRQQLPEKYKEIFFDQSKNGYAGYIDGGASQEEFYKFIKPILEKMDGTEELLVKLNREDLLRKQRTFDNGSIPHQIHLGELHAILRRQEDFYPFLKDNREKIEKILTFRIPYYVGPLARGNSRFAWMTRKSEETITPWNFEEVVDKGASAQSFIERMTNFDKNLPNEKVLPKHSLLYEYFTVYNELTKVKYVTEGMRKPAFLSGEQKKAIVDLLFKTNRKVTVKQLKEDYFKKIECFDSVEISGVEDRFNASLGTYHDLLKIIKDKDFLDNEENEDILEDIVLTLTLFEDREMIEERLKTYAHLFDDKVMKQLKRRRYTGWGRLSRKLINGIRDKQSGKTILDFLKSDGFANRNFMQLIHDDSLTFKEDIQKAQVSGQGDSLHEHIANLAGSPAIKKGILQTVKVVDELVKVMGRHKPENIVIEMARENQTTQKGQKNSRERMKRIEEGIKELGSQILKEHPVENTQLQNEKLYLYYLQNGRDMYVDQELDINRLSDYDVDHIVPQSFLKDDSIDNKVLTRSDKARGKSDNVPSEEVVKKMKNYWRQLLNAKLITQRKFDNLTKAERGGLSELDKAGFIKRQLVETRQITKHVAQILDSRMNTKYDENDKLIREVKVITLKSKLVSDFRKDFQFYKVREINNYHHAHDAYLNAVVGTALIKKYPKLESEFVYGDYKVYDVRKMIAKSEQEIGKATAKYFFYSNIMNFFKTEITLANGEIRKRPLIETNGETGEIVWDKGRDFATVRKVLSMPQVNIVKKTEVQTGGFSKESILPKRNSDKLIARKKDWDPKKYGGFDSPTVAYSVLVVAKVEKGKSKKLKSVKELLGITIMERSSFEKNPIDFLEAKGYKEVKKDLIIKLPKYSLFELENGRKRMLASAGELQKGNELALPSKYVNFLYLASHYEKLKGSPEDNEQKQLFVEQHKHYLDEIIEQISEFSKRVILADANLDKVLSAYNKHRDKPIREQAENIIHLFTLTNLGAPAAFKYFDTTIDRKRYTSTKEVLDATLIHQSITGLYETRIDLSQLGGDGGGSSGGGPAPGGVLNLEEEYRLHEKPVPSSIDPSWLQLFPTVWAERAGMGLANQVPPVVVELRSGASPVAVRQYPMSKEAREGIRPHIQRFLDLGVLVPCQSPWNTPLLPVKKPGTNDYRPVQDLREINKRVQDIHPTVPNPYNLLSSLPPSHTWYSVLDLKDAFFCLKLHPNSQPLFAFEWRDPEKGNTGQLTWTRLPQGFKNSPTLFNEALHRDLAPFRALNPQVVLLQYVDDLLVAAPTYRDCKEGTQKLLQELSKLGYRVSAKKAQLCQKEVTYLGYLLKEGKRWLTPARKATVMKIPPPTTPRQVREFLGKAGFCRLFIPGFASLAAPLYPLTKPSIPFIWTEEHQKAFDRIKEALLSAPALALPDLTKPFTLYVDERAGVARGVLTQTLGPWRRPVAYLSKKLDPVASGWPTCLKAVAAVALLLKDADKLTLGQNVTVIASHSLESIVRQPPDRWMTNARMTHYQSLLLNERVSFAPPAVLNPATLLPVESEATPVHRCSEILAEETGTRRDLKDQPLPGVPAWYTDGSSFIAEGKRRAGAAIVDGKRTVWASSLPEGTSAQKAELVALTQALRLAEGKDINIYTDSRYAFATAHIHGAIYKQRGWLTSAGKDIKNKEEILALLEAIHLPKRVAIIHCPGHQKGNDPVATGNRRADEAAKQAALSTRVLAETTKPAGKRTADGSEFEKRTADGSEFESPKKKAKVE

SEQ ID NO: 7401 - protein, 2094 aa, synthetic construct
MPAAKRVKLDGGDKKYSIGLDIGTNSVGWAVITDEYKVPSKKFKVLGNTDRHSIKKNLIGALLFDSGETAEATRLKRTARRRYTRRKNRICYLQEIFSNEMAKVDDSFFHRLEESFLVEEDKKHERHPIFGNIVDEVAYHEKYPTIYHLRKKLVDSTDKADLRLIYLALAHMIKFRGHFLIEGDLNPDNSDVDKLFIQLVQTYNQLFEENPINASGVDAKAILSARLSKSRRLENLIAQLPGEKKNGLFGNLIALSLGLTPNFKSNFDLAEDAKLQLSKDTYDDDLDNLLAQIGDQYADLFLAAKNLSDAILLSDILRVNTEITKAPLSASMIKRYDEHHQDLTLLKALVRQQLPEKYKEIFFDQSKNGYAGYIDGGASQEEFYKFIKPILEKMDGTEELLVKLNREDLLRKQRTFDNGSIPHQIHLGELHAILRRQEDFYPFLKDNREKIEKILTFRIPYYVGPLARGNSRFAWMTRKSEETITPWNFEEVVDKGASAQSFIERMTNFDKNLPNEKVLPKHSLLYEYFTVYNELTKVKYVTEGMRKPAFLSGEQKKAIVDLLFKTNRKVTVKQLKEDYFKKIECFDSVEISGVEDRFNASLGTYHDLLKIIKDKDFLDNEENEDILEDIVLTLTLFEDREMIEERLKTYAHLFDDKVMKQLKRRRYTGWGRLSRKLINGIRDKQSGKTILDFLKSDGFANRNFMQLIHDDSLTFKEDIQKAQVSGQGDSLHEHIANLAGSPAIKKGILQTVKVVDELVKVMGRHKPENIVIEMARENQTTQKGQKNSRERMKRIEEGIKELGSQILKEHPVENTQLQNEKLYLYYLQNGRDMYVDQELDINRLSDYDVDHIVPQSFLKDDSIDNKVLTRSDKARGKSDNVPSEEVVKKMKNYWRQLLNAKLITQRKFDNLTKAERGGLSELDKAGFIKRQLVETRQITKHVAQILDSRMNTKYDENDKLIREVKVITLKSKLVSDFRKDFQFYKVREINNYHHAHDAYLNAVVGTALIKKYPKLESEFVYGDYKVYDVRKMIAKSEQEIGKATAKYFFYSNIMNFFKTEITLANGEIRKRPLIETNGETGEIVWDKGRDFATVRKVLSMPQVNIVKKTEVQTGGFSKESILPKRNSDKLIARKKDWDPKKYGGFDSPTVAYSVLVVAKVEKGKSKKLKSVKELLGITIMERSSFEKNPIDFLEAKGYKEVKKDLIIKLPKYSLFELENGRKRMLASAGELQKGNELALPSKYVNFLYLASHYEKLKGSPEDNEQKQLFVEQHKHYLDEIIEQISEFSKRVILADANLDKVLSAYNKHRDKPIREQAENIIHLFTLTNLGAPAAFKYFDTTIDRKRYTSTKEVLDATLIHQSITGLYETRIDLSQLGGDGGGSSGGGPAPGGTLNIEDEYRLHETSKEPDVPLGSTWLSDFPQAWAETGGMGLAVRQAPLIIPLKATSTPVSIKQYPMSQEARLGIKPHIQRLLDQGILVPCQSPWNTPLLPVKKPGTNDYRPVQDLREVNKRVEDIHPTVPNPYNLLSGLPPSHQWYTVLDLKDAFFCLRLHPTSQPLFAFEWRDPEMGISGQLTWTRLPQGFKNSPTLFNEALHRDLADFRIQHPDLILLQYVDDLLLAATSEQDCQRGTRALLQTLGNLGYRASAKKAQICQKQVKYLGYLLKEGQRWLTEARKETVMGQPTPKTPRQLREFLGTAGFCRLWIPGFAEMAAPLYPLTKPGTLFNWGPDQQKAYQEIKQALLTAPALGLPDLTKPFELFVDEKQGYAKGVLTQKLGPWRRPVAYLSKKLDPVAAGWPPCLRMVAAIAVLTKDAGKLTMGQPLVILAPHAVEALVKQPPDRWLSNARMTHYQAMLLDTDRVQFGPVVALNPATLLPLPEKEAPHDCLEILAETHGTRPDLTDQPIPDADYTWYTDGSSFLQEGQRRAGAAVTTETEVIWARALPAGTSAQRAELIALTQALKMAEGKKLNVYTDSRYAFATAHVHGEIYRRRGWLTSEGREIKNKNEILALLKALFLPKRLSIIHCPGHQKGNSAEARGNRMADQAAREAAMKAVLETSTLLAGKRTADGSEFEKRTADGSEFESPKKKAKVE

SEQ ID NO: 7402 - protein, 2096 aa, synthetic construct
MPAAKRVKLDGGDKKYSIGLDIGTNSVGWAVITDEYKVPSKKFKVLGNTDRHSIKKNLIGALLFDSGETAEATRLKRTARRRYTRRKNRICYLQEIFSNEMAKVDDSFFHRLEESFLVEEDKKHERHPIFGNIVDEVAYHEKYPTIYHLRKKLVDSTDKADLRLIYLALAHMIKFRGHFLIEGDLNPDNSDVDKLFIQLVQTYNQLFEENPINASGVDAKAILSARLSKSRRLENLIAQLPGEKKNGLFGNLIALSLGLTPNFKSNFDLAEDAKLQLSKDTYDDDLDNLLAQIGDQYADLFLAAKNLSDAILLSDILRVNTEITKAPLSASMIKRYDEHHQDLTLLKALVRQQLPEKYKEIFFDQSKNGYAGYIDGGASQEEFYKFIKPILEKMDGTEELLVKLNREDLLRKQRTFDNGSIPHQIHLGELHAILRRQEDFYPFLKDNREKIEKILTFRIPYYVGPLARGNSRFAWMTRKSEETITPWNFEEVVDKGASAQSFIERMTNFDKNLPNEKVLPKHSLLYEYFTVYNELTKVKYVTEGMRKPAFLSGEQKKAIVDLLFKTNRKVTVKQLKEDYFKKIECFDSVEISGVEDRFNASLGTYHDLLKIIKDKDFLDNEENEDILEDIVLTLTLFEDREMIEERLKTYAHLFDDKVMKQLKRRRYTGWGRLSRKLINGIRDKQSGKTILDFLKSDGFANRNFMQLIHDDSLTFKEDIQKAQVSGQGDSLHEHIANLAGSPAIKKGILQTVKVVDELVKVMGRHKPENIVIEMARENQTTQKGQKNSRERMKRIEEGIKELGSQILKEHPVENTQLQNEKLYLYYLQNGRDMYVDQELDINRLSDYDVDHIVPQSFLKDDSIDNKVLTRSDKARGKSDNVPSEEVVKKMKNYWRQLLNAKLITQRKFDNLTKAERGGLSELDKAGFIKRQLVETRQITKHVAQILDSRMNTKYDENDKLIREVKVITLKSKLVSDFRKDFQFYKVREINNYHHAHDAYLNAVVGTALIKKYPKLESEFVYGDYKVYDVRKMIAKSEQEIGKATAKYFFYSNIMNFFKTEITLANGEIRKRPLIETNGETGEIVWDKGRDFATVRKVLSMPQVNIVKKTEVQTGGFSKESILPKRNSDKLIARKKDWDPKKYGGFDSPTVAYSVLVVAKVEKGKSKKLKSVKELLGITIMERSSFEKNPIDFLEAKGYKEVKKDLIIKLPKYSLFELENGRKRMLASAGELQKGNELALPSKYVNFLYLASHYEKLKGSPEDNEQKQLFVEQHKHYLDEIIEQISEFSKRVILADANLDKVLSAYNKHRDKPIREQAENIIHLFTLTNLGAPAAFKYFDTTIDRKRYTSTKEVLDATLIHQSITGLYETRIDLSQLGGDGGGSSPAPGGGGGTAPLEEEYRLFLEAPIQNVTLLEQWKREIPKVWAEINPPGLASTQAPIHVQLLSTALPVRVRQYPITLEAKRSLRETIRKFRAAGILRPVHSPWNTPLLPVRKSGTSEYRMVQDLREVNKRVETIHPTVPNPYTLLSLLPPDRIWYSVLDLKDAFFCIPLAPESQLIFAFEWADAEEGESGQLTWTRLPQGFKNSPTLFNEALNRDLQGFRLDHPSVSLLQYVDDLLIAADTQAACLSATRDLLMTLAELGYRVSGKKAQLCQEEVTYLGFKIHKGSRSLSNSRTQAILQIPVPKTKRQVREFLGTIGYCRLWIPGFAELAQPLYAATRPGNDPLVWGEKEEEAFQSLKLALTQPPALALPSLDKPFQLFVEETSGAAKGVLTQALGPWKRPVAYLSKRLDPVAAGWPRCLRAIAAAALLTREASKLTFGQDIEITSSHNLESLLRSPPDKWLTNARITQYQVLLLDPPRVRFKQTAALNPATLLPETDDTLPIHHCLDTLDSLTSTRPDLTDQPLAQAEATLFTDGSSYIRDGKRYAGAAVVTLDSVIWAEPLPIGTSAQKAELIALTKALEWSKDKSVNIYTDSRYAFATLHVHGMIYRERGWLTAGGKAIKNAPEILALLTAVWLPKRVAVMHCKGHQKDDAPTSTGNRRADEVAREVAIRPLSTQATISAGKRTADGSEFEKRTADGSEFESPKKKAKVE

SEQ ID NO: 7403 - protein, 2096 aa, synthetic construct
MPAAKRVKLDGGDKKYSIGLDIGTNSVGWAVITDEYKVPSKKFKVLGNTDRHSIKKNLIGALLFDSGETAEATRLKRTARRRYTRRKNRICYLQEIFSNEMAKVDDSFFHRLEESFLVEEDKKHERHPIFGNIVDEVAYHEKYPTIYHLRKKLVDSTDKADLRLIYLALAHMIKFRGHFLIEGDLNPDNSDVDKLFIQLVQTYNQLFEENPINASGVDAKAILSARLSKSRRLENLIAQLPGEKKNGLFGNLIALSLGLTPNFKSNFDLAEDAKLQLSKDTYDDDLDNLLAQIGDQYADLFLAAKNLSDAILLSDILRVNTEITKAPLSASMIKRYDEHHQDLTLLKALVRQQLPEKYKEIFFDQSKNGYAGYIDGGASQEEFYKFIKPILEKMDGTEELLVKLNREDLLRKQRTFDNGSIPHQIHLGELHAILRRQEDFYPFLKDNREKIEKILTFRIPYYVGPLARGNSRFAWMTRKSEETITPWNFEEVVDKGASAQSFIERMTNFDKNLPNEKVLPKHSLLYEYFTVYNELTKVKYVTEGMRKPAFLSGEQKKAIVDLLFKTNRKVTVKQLKEDYFKKIECFDSVEISGVEDRFNASLGTYHDLLKIIKDKDFLDNEENEDILEDIVLTLTLFEDREMIEERLKTYAHLFDDKVMKQLKRRRYTGWGRLSRKLINGIRDKQSGKTILDFLKSDGFANRNFMQLIHDDSLTFKEDIQKAQVSGQGDSLHEHIANLAGSPAIKKGILQTVKVVDELVKVMGRHKPENIVIEMARENQTTQKGQKNSRERMKRIEEGIKELGSQILKEHPVENTQLQNEKLYLYYLQNGRDMYVDQELDINRLSDYDVDHIVPQSFLKDDSIDNKVLTRSDKARGKSDNVPSEEVVKKMKNYWRQLLNAKLITQRKFDNLTKAERGGLSELDKAGFIKRQLVETRQITKHVAQILDSRMNTKYDENDKLIREVKVITLKSKLVSDFRKDFQFYKVREINNYHHAHDAYLNAVVGTALIKKYPKLESEFVYGDYKVYDVRKMIAKSEQEIGKATAKYFFYSNIMNFFKTEITLANGEIRKRPLIETNGETGEIVWDKGRDFATVRKVLSMPQVNIVKKTEVQTGGFSKESILPKRNSDKLIARKKDWDPKKYGGFDSPTVAYSVLVVAKVEKGKSKKLKSVKELLGITIMERSSFEKNPIDFLEAKGYKEVKKDLIIKLPKYSLFELENGRKRMLASAGELQKGNELALPSKYVNFLYLASHYEKLKGSPEDNEQKQLFVEQHKHYLDEIIEQISEFSKRVILADANLDKVLSAYNKHRDKPIREQAENIIHLFTLTNLGAPAAFKYFDTTIDRKRYTSTKEVLDATLIHQSITGLYETRIDLSQLGGDGGGSSPAPGGGGGTAPLEEEYRLFLEAPIQNVTLLEQWKREIPKVWAEINPPGLASTQAPIHVQLLSTALPVRVRQYPITLEAKRSLRETIRKFRAAGILRPVHSPWNTPLLPVRKSGTSEYRMVQDLREVNKRVETIHPTVPNPYTLLSLLPPDRIWYSVLDLKDAFFCIPLAPESQLIFAFEWADAEEGESGQLTWTRLPQGFKNSPTLFNEALNRDLQGFRLDHPSVSLLQYVDDLLIAADTQAACLSATRDLLMTLAELGYRVSGKKAQLCQEEVTYLGFKIHKGSRSLSNSRTQAILQIPVPKTKRQVREFLGKIGYCRLFIPGFAELAQPLYAATRPGNDPLVWGEKEEEAFQSLKLALTQPPALALPSLDKPFQLFVEETSGAAKGVLTQALGPWKRPVAYLSKRLDPVAAGWPRCLRAIAAAALLTREASKLTFGQDIEITSSHNLESLLRSPPDKWLTNARITQYQVLLLDPPRVRFKQTAALNPATLLPETDDTLPIHHCLDTLDSLTSTRPDLTDQPLAQAEATLFTDGSSYIRDGKRYAGAAVVTLDSVIWAEPLPIGTSAQKAELIALTKALEWSKDKSVNIYTDSRYAFATLHVHGMIYRERGWLTAGGKAIKNAPEILALLTAVWLPKRVAVMHCKGHQKDDAPTSTGNRRADEVAREVAIRPLSTQATISAGKRTADGSEFEKRTADGSEFESPKKKAKVE

SEQ ID NO: 7404 - protein, 2092 aa, synthetic construct
MPAAKRVKLDGGDKKYSIGLDIGTNSVGWAVITDEYKVPSKKFKVLGNTDRHSIKKNLIGALLFDSGETAEATRLKRTARRRYTRRKNRICYLQEIFSNEMAKVDDSFFHRLEESFLVEEDKKHERHPIFGNIVDEVAYHEKYPTIYHLRKKLVDSTDKADLRLIYLALAHMIKFRGHFLIEGDLNPDNSDVDKLFIQLVQTYNQLFEENPINASGVDAKAILSARLSKSRRLENLIAQLPGEKKNGLFGNLIALSLGLTPNFKSNFDLAEDAKLQLSKDTYDDDLDNLLAQIGDQYADLFLAAKNLSDAILLSDILRVNTEITKAPLSASMIKRYDEHHQDLTLLKALVRQQLPEKYKEIFFDQSKNGYAGYIDGGASQEEFYKFIKPILEKMDGTEELLVKLNREDLLRKQRTFDNGSIPHQIHLGELHAILRRQEDFYPFLKDNREKIEKILTFRIPYYVGPLARGNSRFAWMTRKSEETITPWNFEEVVDKGASAQSFIERMTNFDKNLPNEKVLPKHSLLYEYFTVYNELTKVKYVTEGMRKPAFLSGEQKKAIVDLLFKTNRKVTVKQLKEDYFKKIECFDSVEISGVEDRFNASLGTYHDLLKIIKDKDFLDNEENEDILEDIVLTLTLFEDREMIEERLKTYAHLFDDKVMKQLKRRRYTGWGRLSRKLINGIRDKQSGKTILDFLKSDGFANRNFMQLIHDDSLTFKEDIQKAQVSGQGDSLHEHIANLAGSPAIKKGILQTVKVVDELVKVMGRHKPENIVIEMARENQTTQKGQKNSRERMKRIEEGIKELGSQILKEHPVENTQLQNEKLYLYYLQNGRDMYVDQELDINRLSDYDVDHIVPQSFLKDDSIDNKVLTRSDKARGKSDNVPSEEVVKKMKNYWRQLLNAKLITQRKFDNLTKAERGGLSELDKAGFIKRQLVETRQITKHVAQILDSRMNTKYDENDKLIREVKVITLKSKLVSDFRKDFQFYKVREINNYHHAHDAYLNAVVGTALIKKYPKLESEFVYGDYKVYDVRKMIAKSEQEIGKATAKYFFYSNIMNFFKTEITLANGEIRKRPLIETNGETGEIVWDKGRDFATVRKVLSMPQVNIVKKTEVQTGGFSKESILPKRNSDKLIARKKDWDPKKYGGFDSPTVAYSVLVVAKVEKGKSKKLKSVKELLGITIMERSSFEKNPIDFLEAKGYKEVKKDLIIKLPKYSLFELENGRKRMLASAGELQKGNELALPSKYVNFLYLASHYEKLKGSPEDNEQKQLFVEQHKHYLDEIIEQISEFSKRVILADANLDKVLSAYNKHRDKPIREQAENIIHLFTLTNLGAPAAFKYFDTTIDRKRYTSTKEVLDATLIHQSITGLYETRIDLSQLGGDGGGSSPAPGGGGGVLNLEEEYRLHEKPVPSSIDPSWLQLFPTVWAERAGMGLANQVPPVVVELRSGASPVAVRQYPMSKEAREGIRPHIQKFLDLGVLVPCRSPWNTPLLPVKKPGTNDYRPVQDLREINKRVQDIHPTVPNPYNLLSSLPPSYTWYSVLDLKDAFFCLRLHPNSQPLFAFEWKDPEKGNTGQLTWTRLPQGFKNSPTLFNEALHRDLAPFRALNPQVVLLQYVDDLLVAAPTYEDCKKGTQKLLQELSKLGYRVSAKKAQLCQREVTYLGYLLKEGKRWLTPARKATVMKIPVPTTPRQVREFLGKAGFCRLFIPGFASLAAPLYPLTKPSIPFIWTEEHQQAFDHIKKALLSAPALALPDLTKPFTLYIDERAGVARGVLTQTLGPWRRPVAYLSKKLDPVASGWPTCLKAVAAVALLLKDADKLTLGQNVTVIASHSLESIVRQPPDRWMTNARMTHYQSLLLNERVSFAPPAVLNPATLLPVESEATPVHRCSEILAEETGTRRDLEDQPLPGVPTWYTDGSSFITEGKRRAGAPIVDGKRTVWASSLPEGTSAQKAELVALTQALRLAEGKNINIYTDSRYAFATAHIHGAIYKQRGWLTSAGKDIKNKEEILALLEAIHLPRRVAIIHCPGHQRGSNPVATGNRRADEAAKQAALSTRVLAGTTKPAGKRTADGSEFEKRTADGSEFESPKKKAKVE

SEQ ID NO: 7405 - protein, 2125 aa, synthetic construct
MPAAKRVKLDGGDKKYSIGLDIGTNSVGWAVITDEYKVPSKKFKVLGNTDRHSIKKNLIGALLFDSGETAEATRLKRTARRRYTRRKNRICYLQEIFSNEMAKVDDSFFHRLEESFLVEEDKKHERHPIFGNIVDEVAYHEKYPTIYHLRKKLVDSTDKADLRLIYLALAHMIKFRGHFLIEGDLNPDNSDVDKLFIQLVQTYNQLFEENPINASGVDAKAILSARLSKSRRLENLIAQLPGEKKNGLFGNLIALSLGLTPNFKSNFDLAEDAKLQLSKDTYDDDLDNLLAQIGDQYADLFLAAKNLSDAILLSDILRVNTEITKAPLSASMIKRYDEHHQDLTLLKALVRQQLPEKYKEIFFDQSKNGYAGYIDGGASQEEFYKFIKPILEKMDGTEELLVKLNREDLLRKQRTFDNGSIPHQIHLGELHAILRRQEDFYPFLKDNREKIEKILTFRIPYYVGPLARGNSRFAWMTRKSEETITPWNFEEVVDKGASAQSFIERMTNFDKNLPNEKVLPKHSLLYEYFTVYNELTKVKYVTEGMRKPAFLSGEQKKAIVDLLFKTNRKVTVKQLKEDYFKKIECFDSVEISGVEDRFNASLGTYHDLLKIIKDKDFLDNEENEDILEDIVLTLTLFEDREMIEERLKTYAHLFDDKVMKQLKRRRYTGWGRLSRKLINGIRDKQSGKTILDFLKSDGFANRNFMQLIHDDSLTFKEDIQKAQVSGQGDSLHEHIANLAGSPAIKKGILQTVKVVDELVKVMGRHKPENIVIEMARENQTTQKGQKNSRERMKRIEEGIKELGSQILKEHPVENTQLQNEKLYLYYLQNGRDMYVDQELDINRLSDYDVDHIVPQSFLKDDSIDNKVLTRSDKARGKSDNVPSEEVVKKMKNYWRQLLNAKLITQRKFDNLTKAERGGLSELDKAGFIKRQLVETRQITKHVAQILDSRMNTKYDENDKLIREVKVITLKSKLVSDFRKDFQFYKVREINNYHHAHDAYLNAVVGTALIKKYPKLESEFVYGDYKVYDVRKMIAKSEQEIGKATAKYFFYSNIMNFFKTEITLANGEIRKRPLIETNGETGEIVWDKGRDFATVRKVLSMPQVNIVKKTEVQTGGFSKESILPKRNSDKLIARKKDWDPKKYGGFDSPTVAYSVLVVAKVEKGKSKKLKSVKELLGITIMERSSFEKNPIDFLEAKGYKEVKKDLIIKLPKYSLFELENGRKRMLASAGELQKGNELALPSKYVNFLYLASHYEKLKGSPEDNEQKQLFVEQHKHYLDEIIEQISEFSKRVILADANLDKVLSAYNKHRDKPIREQAENIIHLFTLTNLGAPAAFKYFDTTIDRKRYTSTKEVLDATLIHQSITGLYETRIDLSQLGGDGGGSSPAPGGGGGLLGRDLLTKLKAQIQFSTEGPQVTWEDRPAMCLVLNLEEEYRLHEKPVPPSIDPSWLQLFPMVWAEKAGMGLANQVPPVVVELKSDASPVAVRQYPMSKEAREGIRPHIQRFLDLGILVPCQSPWNTPLLPVKKPGTNDYRPVQDLREVNKRVQDIHPTVPNPYNLLSSLPPSHTWYSVLDLKDAFFCLKLHPNSQPLFAFEWRDPEKGNTGQLTWTRLPQGFKNSPTLFDEALHRDLASFRALNPQVVMLQYVDDLLVAAPTYRDCKEGTRRLLQELSKLGYRVSAKKAQLCREEVTYLGYLLKGGKRWLTPARKATVMKIPTPTTPRQVREFLGTAGFCRLWIPGFASLAAPLYPLTREKVPFTWTEAHQEAFGRIKEALLSAPALALPDLTKPFALYVDEKEGVARGVLTQTLGPWRRPVAYLSKKLDPVASGWPTCLKAIAAVALLLKDADKLTLGQNVLVIAPHNLESIVRQPPDRWMTNARMTHYQSLLLNERVSFAPPAILNPATLLPVESDDTPIHICSEILAEETGTRPDLRDQPLPGVPAWYTDGSSFIMDGRRQAGAAIVDNKRTVWASNLPEGTSAQKAELIALTQALRLAEGKSINIYTDSRYAFATAHVHGAIYKQRGLLTSAGKDIKNKEEILALLEAIHLPKRVAIIHCPGHQRGTDPVATGNRKADEAAKQAAQSTRILTETTKNAGKRTADGSEFEKRTADGSEFESPKKKAKVE

SEQ ID NO: 7406 - protein, 2216 aa, synthetic construct
MPAAKRVKLDGGDKKYSIGLDIGTNSVGWAVITDEYKVPSKKFKVLGNTDRHSIKKNLIGALLFDSGETAEATRLKRTARRRYTRRKNRICYLQEIFSNEMAKVDDSFFHRLEESFLVEEDKKHERHPIFGNIVDEVAYHEKYPTIYHLRKKLVDSTDKADLRLIYLALAHMIKFRGHFLIEGDLNPDNSDVDKLFIQLVQTYNQLFEENPINASGVDAKAILSARLSKSRRLENLIAQLPGEKKNGLFGNLIALSLGLTPNFKSNFDLAEDAKLQLSKDTYDDDLDNLLAQIGDQYADLFLAAKNLSDAILLSDILRVNTEITKAPLSASMIKRYDEHHQDLTLLKALVRQQLPEKYKEIFFDQSKNGYAGYIDGGASQEEFYKFIKPILEKMDGTEELLVKLNREDLLRKQRTFDNGSIPHQIHLGELHAILRRQEDFYPFLKDNREKIEKILTFRIPYYVGPLARGNSRFAWMTRKSEETITPWNFEEVVDKGASAQSFIERMTNFDKNLPNEKVLPKHSLLYEYFTVYNELTKVKYVTEGMRKPAFLSGEQKKAIVDLLFKTNRKVTVKQLKEDYFKKIECFDSVEISGVEDRFNASLGTYHDLLKIIKDKDFLDNEENEDILEDIVLTLTLFEDREMIEERLKTYAHLFDDKVMKQLKRRRYTGWGRLSRKLINGIRDKQSGKTILDFLKSDGFANRNFMQLIHDDSLTFKEDIQKAQVSGQGDSLHEHIANLAGSPAIKKGILQTVKVVDELVKVMGRHKPENIVIEMARENQTTQKGQKNSRERMKRIEEGIKELGSQILKEHPVENTQLQNEKLYLYYLQNGRDMYVDQELDINRLSDYDVDHIVPQSFLKDDSIDNKVLTRSDKARGKSDNVPSEEVVKKMKNYWRQLLNAKLITQRKFDNLTKAERGGLSELDKAGFIKRQLVETRQITKHVAQILDSRMNTKYDENDKLIREVKVITLKSKLVSDFRKDFQFYKVREINNYHHAHDAYLNAVVGTALIKKYPKLESEFVYGDYKVYDVRKMIAKSEQEIGKATAKYFFYSNIMNFFKTEITLANGEIRKRPLIETNGETGEIVWDKGRDFATVRKVLSMPQVNIVKKTEVQTGGFSKESILPKRNSDKLIARKKDWDPKKYGGFDSPTVAYSVLVVAKVEKGKSKKLKSVKELLGITIMERSSFEKNPIDFLEAKGYKEVKKDLIIKLPKYSLFELENGRKRMLASAGELQKGNELALPSKYVNFLYLASHYEKLKGSPEDNEQKQLFVEQHKHYLDEIIEQISEFSKRVILADANLDKVLSAYNKHRDKPIREQAENIIHLFTLTNLGAPAAFKYFDTTIDRKRYTSTKEVLDATLIHQSITGLYETRIDLSQLGGDGGGSSPAPGGGGGTLGDQGSRGSDPLPEPRVTLTVEGIPTEFLVNTGAEHSVLTKPMGKMGSKRTVVAGATGSKVYPWTTKRLLKIGQKQVTHSFLVIPECPAPLLGRDLLTKLKAQIQFSTEGPQVTWEDRPAMCLVLNLEEEYRLHEKPVPPSIDPSWLQLFPMVWAEKAGMGLANQVPPVVVELKSDASPVAVRQYPMSKEAREGIRPHIQRFLDLGILVPCQSPWNTPLLPVKKPGTNDYRPVQDLREVNKRVQDIHPTVPNPYNLLSSLPPSHTWYSVLDLKDAFFCLKLHPNSQPLFAFEWRDPEKGNTGQLTWTRLPQGFKNSPTLFNEALHRDLASFRALNPQVVMLQYVDDLLVAAPTYRDCKEGTRRLLQELSKLGYRVSAKKAQLCREEVTYLGYLLKGGKRWLTPARKATVMKIPTPTTPRQVREFLGTAGFCRLWIPGFASLAAPLYPLTRPKVPFTWTEAHQEAFGRIKEALLSAPALALPDLTKPFALYVDEKEGVARGVLTQTLGPWRRPVAYLSKKLDPVASGWPTCLKAIAAVALLLKDADKLTLGQNVLVIAPHNLESIVRQPPDRWMTNARMTHYQSLLLNERVSFAPPAILNPATLLPVESDDTPIHICSEILAEETGTRPDLRDQPLPGVPAWYTDGSSFIMDGRRQAGAAIVDNKRTVWASNLPEGTSAQKAELIALTQALRLAEGKSINIYTDSRYAFATAHVHGAIYKQRGWLTSAGKDIKNKEEILALLEAIHLPKRVAIIHCPGHQRGTDPVATGNRKADEAAKQAAQSTRILTETTKNAGKRTADGSEFEKRTADGSEFESPKKKAKVE

SEQ ID NO: 7407 - protein, 2216 aa, synthetic construct
MPAAKRVKLDGGDKKYSIGLDIGTNSVGWAVITDEYKVPSKKFKVLGNTDRHSIKKNLIGALLFDSGETAEATRLKRTARRRYTRRKNRICYLQEIFSNEMAKVDDSFFHRLEESFLVEEDKKHERHPIFGNIVDEVAYHEKYPTIYHLRKKLVDSTDKADLRLIYLALAHMIKFRGHFLIEGDLNPDNSDVDKLFIQLVQTYNQLFEENPINASGVDAKAILSARLSKSRRLENLIAQLPGEKKNGLFGNLIALSLGLTPNFKSNFDLAEDAKLQLSKDTYDDDLDNLLAQIGDQYADLFLAAKNLSDAILLSDILRVNTEITKAPLSASMIKRYDEHHQDLTLLKALVRQQLPEKYKEIFFDQSKNGYAGYIDGGASQEEFYKFIKPILEKMDGTEELLVKLNREDLLRKQRTFDNGSIPHQIHLGELHAILRRQEDFYPFLKDNREKIEKILTFRIPYYVGPLARGNSRFAWMTRKSEETITPWNFEEVVDKGASAQSFIERMTNFDKNLPNEKVLPKHSLLYEYFTVYNELTKVKYVTEGMRKPAFLSGEQKKAIVDLLFKTNRKVTVKQLKEDYFKKIECFDSVEISGVEDRFNASLGTYHDLLKIIKDKDFLDNEENEDILEDIVLTLTLFEDREMIEERLKTYAHLFDDKVMKQLKRRRYTGWGRLSRKLINGIRDKQSGKTILDFLKSDGFANRNFMQLIHDDSLTFKEDIQKAQVSGQGDSLHEHIANLAGSPAIKKGILQTVKVVDELVKVMGRHKPENIVIEMARENQTTQKGQKNSRERMKRIEEGIKELGSQILKEHPVENTQLQNEKLYLYYLQNGRDMYVDQELDINRLSDYDVDHIVPQSFLKDDSIDNKVLTRSDKARGKSDNVPSEEVVKKMKNYWRQLLNAKLITQRKFDNLTKAERGGLSELDKAGFIKRQLVETRQITKHVAQILDSRMNTKYDENDKLIREVKVITLKSKLVSDFRKDFQFYKVREINNYHHAHDAYLNAVVGTALIKKYPKLESEFVYGDYKVYDVRKMIAKSEQEIGKATAKYFFYSNIMNFFKTEITLANGEIRKRPLIETNGETGEIVWDKGRDFATVRKVLSMPQVNIVKKTEVQTGGFSKESILPKRNSDKLIARKKDWDPKKYGGFDSPTVAYSVLVVAKVEKGKSKKLKSVKELLGITIMERSSFEKNPIDFLEAKGYKEVKKDLIIKLPKYSLFELENGRKRMLASAGELQKGNELALPSKYVNFLYLASHYEKLKGSPEDNEQKQLFVEQHKHYLDEIIEQISEFSKRVILADANLDKVLSAYNKHRDKPIREQAENIIHLFTLTNLGAPAAFKYFDTTIDRKRYTSTKEVLDATLIHQSITGLYETRIDLSQLGGDGGGSSPAPGGGGGTLGDQGSRGSDPLPEPRVTLTVEGIPTEFLVNTGAEHSVLTKPMGKMGSKRTVVAGATGSKVYPWTTKRLLKIGQKQVTHSFLVIPECPAPLLGRDLLTKLKAQIQFSTEGPQVTWEDRPAMCLVLNLEEEYRLHEKPVPPSIDPSWLQLFPMVWAEKAGMGLANQVPPVVVELKSDASPVAVRQYPMSKEAREGIRPHIQRFLDLGILVPCQSPWNTPLLPVKKPGTNDYRPVQDLREVNKRVQDIHPTVPNPYNLLSSLPPSHTWYSVLDLKDAFFCLKLHPNSQPLFAFEWRDPEKGNTGQLTWTRLPQGFKNSPTLFNEALHRDLASFRALNPQVVMLQYVDDLLVAAPTYRDCKEGTRRLLQELSKLGYRVSAKKAQLCREEVTYLGYLLKGGKRWLTPARKATVMKIPTPTTPRQVREFLGKAGFCRLFIPGFASLAAPLYPLTRPKVPFTWTEAHQEAFGRIKEALLSAPALALPDLTKPFALYVDEKEGVARGVLTQTLGPWRRPVAYLSKKLDPVASGWPTCLKAIAAVALLLKDADKLTLGQNVLVIAPHNLESIVRQPPDRWMTNARMTHYQSLLLNERVSFAPPAILNPATLLPVESDDTPIHICSEILAEETGTRPDLRDQPLPGVPAWYTDGSSFIMDGRRQAGAAIVDNKRTVWASNLPEGTSAQKAELIALTQALRLAEGKSINIYTDSRYAFATAHVHGAIYKQRGWLTSAGKDIKNKEEILALLEAIHLPKRVAIIHCPGHQRGTDPVATGNRKADEAAKQAAQSTRILTETTKNAGKRTADGSEFEKRTADGSEFESPKKKAKVE

SEQ ID NO: 7408 - protein, 2094 aa, synthetic construct
MPAAKRVKLDGGDKKYSIGLDIGTNSVGWAVITDEYKVPSKKFKVLGNTDRHSIKKNLIGALLFDSGETAEATRLKRTARRRYTRRKNRICYLQEIFSNEMAKVDDSFFHRLEESFLVEEDKKHERHPIFGNIVDEVAYHEKYPTIYHLRKKLVDSTDKADLRLIYLALAHMIKFRGHFLIEGDLNPDNSDVDKLFIQLVQTYNQLFEENPINASGVDAKAILSARLSKSRRLENLIAQLPGEKKNGLFGNLIALSLGLTPNFKSNFDLAEDAKLQLSKDTYDDDLDNLLAQIGDQYADLFLAAKNLSDAILLSDILRVNTEITKAPLSASMIKRYDEHHQDLTLLKALVRQQLPEKYKEIFFDQSKNGYAGYIDGGASQEEFYKFIKPILEKMDGTEELLVKLNREDLLRKQRTFDNGSIPHQIHLGELHAILRRQEDFYPFLKDNREKIEKILTFRIPYYVGPLARGNSRFAWMTRKSEETITPWNFEEVVDKGASAQSFIERMTNFDKNLPNEKVLPKHSLLYEYFTVYNELTKVKYVTEGMRKPAFLSGEQKKAIVDLLFKTNRKVTVKQLKEDYFKKIECFDSVEISGVEDRFNASLGTYHDLLKIIKDKDFLDNEENEDILEDIVLTLTLFEDREMIEERLKTYAHLFDDKVMKQLKRRRYTGWGRLSRKLINGIRDKQSGKTILDFLKSDGFANRNFMQLIHDDSLTFKEDIQKAQVSGQGDSLHEHIANLAGSPAIKKGILQTVKVVDELVKVMGRHKPENIVIEMARENQTTQKGQKNSRERMKRIEEGIKELGSQILKEHPVENTQLQNEKLYLYYLQNGRDMYVDQELDINRLSDYDVDHIVPQSFLKDDSIDNKVLTRSDKARGKSDNVPSEEVVKKMKNYWRQLLNAKLITQRKFDNLTKAERGGLSELDKAGFIKRQLVETRQITKHVAQILDSRMNTKYDENDKLIREVKVITLKSKLVSDFRKDFQFYKVREINNYHHAHDAYLNAVVGTALIKKYPKLESEFVYGDYKVYDVRKMIAKSEQEIGKATAKYFFYSNIMNFFKTEITLANGEIRKRPLIETNGETGEIVWDKGRDFATVRKVLSMPQVNIVKKTEVQTGGFSKESILPKRNSDKLIARKKDWDPKKYGGFDSPTVAYSVLVVAKVEKGKSKKLKSVKELLGITIMERSSFEKNPIDFLEAKGYKEVKKDLIIKLPKYSLFELENGRKRMLASAGELQKGNELALPSKYVNFLYLASHYEKLKGSPEDNEQKQLFVEQHKHYLDEIIEQISEFSKRVILADANLDKVLSAYNKHRDKPIREQAENIIHLFTLTNLGAPAAFKYFDTTIDRKRYTSTKEVLDATLIHQSITGLYETRIDLSQLGGDGGGSSPAPGGGGGTLNLEDEYRLYETSAEPEVSPGSTWLSDFPQAWAETGGMGLAVRQAPLIIPLKATSTPVSIKQYPMSQEAKLGIKPHIQRLLDQGILVPCQSPWNTPLLPVKKPGTNDYRPVQDLREVNKRVEDIHPTVPNPYNLLSGLPPSHRWYTVLDLKDAFFCLRLHPTSQPLFAFEWRDPGMGISGQLTWTRLPQGFKNSPTLFNEALHRDLADFRIQHPDLILLQYVDDILLAATSELDCQQGTRALLLTLGNLGYRASAKKAQLCQKQVKYLGYLLKEGQRWLTEARKETVMGQPTPKTPRQLREFLGTAGFCRLWIPGFAEMAAPLYPLTKPGTLFNWGPDQQKAYQEIKQALLTAPALGLPDLTKPFELFVDEKQGYAKGVLTQKLGPWRRPVAYLSKKLDPVAAGWPPCLRMVAAIAVLRKDAGKLTMGQPLVILAPHAVEALVKQPPDRWLSNARMTHYQAMLLDTDRVQFGPVVALNPATLLPLPEEGAPHDCLEILAETHGTRPDLTDQPIPDADHTWYTDGSSFLQEGQRKAGAAVTTETEVIWARALPAGTSAQRAELIALTQALKMAEGKRLNVYTDSRYAFATAHIHGEIYRRRGWLTSEGREIKNKSEILALLKALFLPKRLSIIHCLGHQKGDSAEARGNRLADQAAREAAIKTPPDTSTLLAGKRTADGSEFEKRTADGSEFESPKKKAKVE

SEQ ID NO: 7409 - protein, 2094 aa, synthetic construct
MPAAKRVKLDGGDKKYSIGLDIGTNSVGWAVITDEYKVPSKKFKVLGNTDRHSIKKNLIGALLFDSGETAEATRLKRTARRRYTRRKNRICYLQEIFSNEMAKVDDSFFHRLEESFLVEEDKKHERHPIFGNIVDEVAYHEKYPTIYHLRKKLVDSTDKADLRLIYLALAHMIKFRGHFLIEGDLNPDNSDVDKLFIQLVQTYNQLFEENPINASGVDAKAILSARLSKSRRLENLIAQLPGEKKNGLFGNLIALSLGLTPNFKSNFDLAEDAKLQLSKDTYDDDLDNLLAQIGDQYADLFLAAKNLSDAILLSDILRVNTEITKAPLSASMIKRYDEHHQDLTLLKALVRQQLPEKYKEIFFDQSKNGYAGYIDGGASQEEFYKFIKPILEKMDGTEELLVKLNREDLLRKQRTFDNGSIPHQIHLGELHAILRRQEDFYPFLKDNREKIEKILTFRIPYYVGPLARGNSRFAWMTRKSEETITPWNFEEVVDKGASAQSFIERMTNFDKNLPNEKVLPKHSLLYEYFTVYNELTKVKYVTEGMRKPAFLSGEQKKAIVDLLFKTNRKVTVKQLKEDYFKKIECFDSVEISGVEDRFNASLGTYHDLLKIIKDKDFLDNEENEDILEDIVLTLTLFEDREMIEERLKTYAHLFDDKVMKQLKRRRYTGWGRLSRKLINGIRDKQSGKTILDFLKSDGFANRNFMQLIHDDSLTFKEDIQKAQVSGQGDSLHEHIANLAGSPAIKKGILQTVKVVDELVKVMGRHKPENIVIEMARENQTTQKGQKNSRERMKRIEEGIKELGSQILKEHPVENTQLQNEKLYLYYLQNGRDMYVDQELDINRLSDYDVDHIVPQSFLKDDSIDNKVLTRSDKARGKSDNVPSEEVVKKMKNYWRQLLNAKLITQRKFDNLTKAERGGLSELDKAGFIKRQLVETRQITKHVAQILDSRMNTKYDENDKLIREVKVITLKSKLVSDFRKDFQFYKVREINNYHHAHDAYLNAVVGTALIKKYPKLESEFVYGDYKVYDVRKMIAKSEQEIGKATAKYFFYSNIMNFFKTEITLANGEIRKRPLIETNGETGEIVWDKGRDFATVRKVLSMPQVNIVKKTEVQTGGFSKESILPKRNSDKLIARKKDWDPKKYGGFDSPTVAYSVLVVAKVEKGKSKKLKSVKELLGITIMERSSFEKNPIDFLEAKGYKEVKKDLIIKLPKYSLFELENGRKRMLASAGELQKGNELALPSKYVNFLYLASHYEKLKGSPEDNEQKQLFVEQHKHYLDEIIEQISEFSKRVILADANLDKVLSAYNKHRDKPIREQAENIIHLFTLTNLGAPAAFKYFDTTIDRKRYTSTKEVLDATLIHQSITGLYETRIDLSQLGGDGGGSSPAPGGGGGTLNIEDEYRLHETSKGPDVPLGSTWLSDFPQAWAETGGMGLAFRQAPLIISLKATSTPVSIKQYPMSQEARLGIKPHIQRLLDQGILVPCQSPWNTPLLPVKKPGTNDYRPVQDLREVNKRVEDIHPTVPNPYNLLSGLPPSHQWYTVLDLKDAFFCLRLHPTSQSLFAFEWKDPEMGISGQLTWTRLPQGFKNSPTLFNEALHRDLADFRIQHPDLILLQYVDDLLLAATSELDCQQGTRALLQTLGDLGYRASAKKAQICQKQVKYLGYLLKEGQRWLTEARKETVMGQPTPKTPRQLREFLGTAGLCRLWIPGFAEMAAPLYPLTKPGTLFKWGPDQQKAYQEIKQALLTAPALGLPDLTKPFELFVDEKQGYAKGVLTQKLGPWRRPVAYLSKKLDPVAAGWPPCLRMVAAIAVLTKDVGKLTMGQPLVILAPHAVEALVKQPPDRWLSNARMTHYQALLLDTDRVQFGPIVALNPATLLPLPEEGLQHDCLDILAEAHGTRPDLTDQPLPDADHTWYTDGSSFLQEGQRRAGAAVTTETEVIWAKALPAGTSAQRAELIALTQALKMAAGKKLNVYTDSRYAFATAHIHGEIYRRRGWLTSEGKEIKNKDEILALLKALFLPKRLSIIHCPGHQKGNHAEARGNRMADQAAREVATRETPETSTLLAGKRTADGSEFEKRTADGSEFESPKKKAKVE

SEQ ID NO: 7410 - protein, 2094 aa, synthetic construct
MPAAKRVKLDGGDKKYSIGLDIGTNSVGWAVITDEYKVPSKKFKVLGNTDRHSIKKNLIGALLFDSGETAEATRLKRTARRRYTRRKNRICYLQEIFSNEMAKVDDSFFHRLEESFLVEEDKKHERHPIFGNIVDEVAYHEKYPTIYHLRKKLVDSTDKADLRLIYLALAHMIKFRGHFLIEGDLNPDNSDVDKLFIQLVQTYNQLFEENPINASGVDAKAILSARLSKSRRLENLIAQLPGEKKNGLFGNLIALSLGLTPNFKSNFDLAEDAKLQLSKDTYDDDLDNLLAQIGDQYADLFLAAKNLSDAILLSDILRVNTEITKAPLSASMIKRYDEHHQDLTLLKALVRQQLPEKYKEIFFDQSKNGYAGYIDGGASQEEFYKFIKPILEKMDGTEELLVKLNREDLLRKQRTFDNGSIPHQIHLGELHAILRRQEDFYPFLKDNREKIEKILTFRIPYYVGPLARGNSRFAWMTRKSEETITPWNFEEVVDKGASAQSFIERMTNFDKNLPNEKVLPKHSLLYEYFTVYNELTKVKYVTEGMRKPAFLSGEQKKAIVDLLFKTNRKVTVKQLKEDYFKKIECFDSVEISGVEDRFNASLGTYHDLLKIIKDKDFLDNEENEDILEDIVLTLTLFEDREMIEERLKTYAHLFDDKVMKQLKRRRYTGWGRLSRKLINGIRDKQSGKTILDFLKSDGFANRNFMQLIHDDSLTFKEDIQKAQVSGQGDSLHEHIANLAGSPAIKKGILQTVKVVDELVKVMGRHKPENIVIEMARENQTTQKGQKNSRERMKRIEEGIKELGSQILKEHPVENTQLQNEKLYLYYLQNGRDMYVDQELDINRLSDYDVDHIVPQSFLKDDSIDNKVLTRSDKARGKSDNVPSEEVVKKMKNYWRQLLNAKLITQRKFDNLTKAERGGLSELDKAGFIKRQLVETRQITKHVAQILDSRMNTKYDENDKLIREVKVITLKSKLVSDFRKDFQFYKVREINNYHHAHDAYLNAVVGTALIKKYPKLESEFVYGDYKVYDVRKMIAKSEQEIGKATAKYFFYSNIMNFFKTEITLANGEIRKRPLIETNGETGEIVWDKGRDFATVRKVLSMPQVNIVKKTEVQTGGFSKESILPKRNSDKLIARKKDWDPKKYGGFDSPTVAYSVLVVAKVEKGKSKKLKSVKELLGITIMERSSFEKNPIDFLEAKGYKEVKKDLIIKLPKYSLFELENGRKRMLASAGELQKGNELALPSKYVNFLYLASHYEKLKGSPEDNEQKQLFVEQHKHYLDEIIEQISEFSKRVILADANLDKVLSAYNKHRDKPIREQAENIIHLFTLTNLGAPAAFKYFDTTIDRKRYTSTKEVLDATLIHQSITGLYETRIDLSQLGGDGGGSSPAPGGGGGTLNIEDEYRLHETSKGPDVPLGSTWLSDFPQAWAETGGMGLAVRQAPLIIPLKATSTPVSIKQYPMSQEARLGIKPHIQRLLDQGILVPCQSPWNTPLLPVKKPGTNDYRPVQDLREVNKRVEDIHPTVPNPYNLLSGLPPSHQWYTVLDLKDAFFCLRLHPTSQSLFAFEWRDPEMGISGQLTWTRLPQGFKNSPTLFNEALHRDLADFRIQHPDLILLQYVDDLLLAATSELDCQQGTRALLQTLGDLGYRASAKKAQICQKQVKYLGYLLKEGQRWLTEARKETVMGQPTPKTPRQLREFLGTAGFCRLWIPGFAEMAAPLYPLTKPGTLFEWGPDQQKAYQEIKQALLTAPALGLPDLTKPFELFVDEKQGYAKGVLTQKLGPWRRPVAYLSKKLDPVAAGWPPCLRMVAAIAVLTKDAGKLTMGQPLVILAPHAVEALVKQPPDRWLSNARMTHYQALLLDTDRVQFGPIVALNPATLLPLPEEGLQHDCLDILAEAHGTRPDLTDQPLPDADHTWYTDGSSFLQEGQRKAGAAVTTETEVVWAKALPAGTSAQRAELIALTQALKMAEGKKLNVYTDSRYAFATAHIHGEIYRRRGWLTSEGKEIKNKDEILALLKALFLPKRLSIIHCPGHQKGNRAEARGNRMADQAAREVATRETPETSTLLAGKRTADGSEFEKRTADGSEFESPKKKAKVE

SEQ ID NO: 7411 - protein, 2094 aa, synthetic construct
MPAAKRVKLDGGDKKYSIGLDIGTNSVGWAVITDEYKVPSKKFKVLGNTDRHSIKKNLIGALLFDSGETAEATRLKRTARRRYTRRKNRICYLQEIFSNEMAKVDDSFFHRLEESFLVEEDKKHERHPIFGNIVDEVAYHEKYPTIYHLRKKLVDSTDKADLRLIYLALAHMIKFRGHFLIEGDLNPDNSDVDKLFIQLVQTYNQLFEENPINASGVDAKAILSARLSKSRRLENLIAQLPGEKKNGLFGNLIALSLGLTPNFKSNFDLAEDAKLQLSKDTYDDDLDNLLAQIGDQYADLFLAAKNLSDAILLSDILRVNTEITKAPLSASMIKRYDEHHQDLTLLKALVRQQLPEKYKEIFFDQSKNGYAGYIDGGASQEEFYKFIKPILEKMDGTEELLVKLNREDLLRKQRTFDNGSIPHQIHLGELHAILRRQEDFYPFLKDNREKIEKILTFRIPYYVGPLARGNSRFAWMTRKSEETITPWNFEEVVDKGASAQSFIERMTNFDKNLPNEKVLPKHSLLYEYFTVYNELTKVKYVTEGMRKPAFLSGEQKKAIVDLLFKTNRKVTVKQLKEDYFKKIECFDSVEISGVEDRFNASLGTYHDLLKIIKDKDFLDNEENEDILEDIVLTLTLFEDREMIEERLKTYAHLFDDKVMKQLKRRRYTGWGRLSRKLINGIRDKQSGKTILDFLKSDGFANRNFMQLIHDDSLTFKEDIQKAQVSGQGDSLHEHIANLAGSPAIKKGILQTVKVVDELVKVMGRHKPENIVIEMARENQTTQKGQKNSRERMKRIEEGIKELGSQILKEHPVENTQLQNEKLYLYYLQNGRDMYVDQELDINRLSDYDVDHIVPQSFLKDDSIDNKVLTRSDKARGKSDNVPSEEVVKKMKNYWRQLLNAKLITQRKFDNLTKAERGGLSELDKAGFIKRQLVETRQITKHVAQILDSRMNTKYDENDKLIREVKVITLKSKLVSDFRKDFQFYKVREINNYHHAHDAYLNAVVGTALIKKYPKLESEFVYGDYKVYDVRKMIAKSEQEIGKATAKYFFYSNIMNFFKTEITLANGEIRKRPLIETNGETGEIVWDKGRDFATVRKVLSMPQVNIVKKTEVQTGGFSKESILPKRNSDKLIARKKDWDPKKYGGFDSPTVAYSVLVVAKVEKGKSKKLKSVKELLGITIMERSSFEKNPIDFLEAKGYKEVKKDLIIKLPKYSLFELENGRKRMLASAGELQKGNELALPSKYVNFLYLASHYEKLKGSPEDNEQKQLFVEQHKHYLDEIIEQISEFSKRVILADANLDKVLSAYNKHRDKPIREQAENIIHLFTLTNLGAPAAFKYFDTTIDRKRYTSTKEVLDATLIHQSITGLYETRIDLSQLGGDGGGSSPAPGGGGGTLNIEDEHRLHETSKEPDVSLGSTWLSDFPQAWAETGGMGLAVRQAPLIIPLKATSTPVSIKQYPMSQEARLGIKPHIQRLLDQGILVPCQSPWNTPLLPVKKPGTNDYRPVQDLREVNKRVEDIHPTVPNPYNLLSGLPPSHQWYTVLDLKDAFFCLRLHPTSQPLFAFEWRDPEMGISGQLTWTRLPQGFKNSPTLFDEALHRDLADFRIQHPDLILLQYVDDLLLAATSELDCQQGTRALLQTLGNLGYRASAKKAQICQKQVKYLGYLLKEGQRWLTEARKETVMGQPTPKTPRQLREFLGTAGFCRLWIPGFAEMAAPLYPLTKTGTLFNWGPDQQKAYQEIKQALLTAPALGLPDLTKPFELFVDEKQGYAKGVLTQKLGPWRRPVAYLSKKLDPVAAGWPPCLRMVAAIAVLTKDAGKLTMGQPLVILAPHAVEALVKQPPDRWLSNARMTHYQALLLDTDRVQFGPVVALNPATLLPLPEEGLQHNCLDILAEAHGTRPDLTDQPLPDADHTWYTDGSSLLQEGQRKAGAAVTTETEVIWAKALPAGTSAQRAELIALTQALKMAEGKKLNVYTDSRYAFATAHIHGEIYRRRGLLTSEGKEIKNKDEILALLKALFLPKRLSIIHCPGHQKGHSAEARGNRMADQAARKAAITETPDTSTLLAGKRTADGSEFEKRTADGSEFESPKKKAKVE

SEQ ID NO: 7412 - protein, 2100 aa, synthetic construct
MPAAKRVKLDGGDKKYSIGLDIGTNSVGWAVITDEYKVPSKKFKVLGNTDRHSIKKNLIGALLFDSGETAEATRLKRTARRRYTRRKNRICYLQEIFSNEMAKVDDSFFHRLEESFLVEEDKKHERHPIFGNIVDEVAYHEKYPTIYHLRKKLVDSTDKADLRLIYLALAHMIKFRGHFLIEGDLNPDNSDVDKLFIQLVQTYNQLFEENPINASGVDAKAILSARLSKSRRLENLIAQLPGEKKNGLFGNLIALSLGLTPNFKSNFDLAEDAKLQLSKDTYDDDLDNLLAQIGDQYADLFLAAKNLSDAILLSDILRVNTEITKAPLSASMIKRYDEHHQDLTLLKALVRQQLPEKYKEIFFDQSKNGYAGYIDGGASQEEFYKFIKPILEKMDGTEELLVKLNREDLLRKQRTFDNGSIPHQIHLGELHAILRRQEDFYPFLKDNREKIEKILTFRIPYYVGPLARGNSRFAWMTRKSEETITPWNFEEVVDKGASAQSFIERMTNFDKNLPNEKVLPKHSLLYEYFTVYNELTKVKYVTEGMRKPAFLSGEQKKAIVDLLFKTNRKVTVKQLKEDYFKKIECFDSVEISGVEDRFNASLGTYHDLLKIIKDKDFLDNEENEDILEDIVLTLTLFEDREMIEERLKTYAHLFDDKVMKQLKRRRYTGWGRLSRKLINGIRDKQSGKTILDFLKSDGFANRNFMQLIHDDSLTFKEDIQKAQVSGQGDSLHEHIANLAGSPAIKKGILQTVKVVDELVKVMGRHKPENIVIEMARENQTTQKGQKNSRERMKRIEEGIKELGSQILKEHPVENTQLQNEKLYLYYLQNGRDMYVDQELDINRLSDYDVDHIVPQSFLKDDSIDNKVLTRSDKARGKSDNVPSEEVVKKMKNYWRQLLNAKLITQRKFDNLTKAERGGLSELDKAGFIKRQLVETRQITKHVAQILDSRMNTKYDENDKLIREVKVITLKSKLVSDFRKDFQFYKVREINNYHHAHDAYLNAVVGTALIKKYPKLESEFVYGDYKVYDVRKMIAKSEQEIGKATAKYFFYSNIMNFFKTEITLANGEIRKRPLIETNGETGEIVWDKGRDFATVRKVLSMPQVNIVKKTEVQTGGFSKESILPKRNSDKLIARKKDWDPKKYGGFDSPTVAYSVLVVAKVEKGKSKKLKSVKELLGITIMERSSFEKNPIDFLEAKGYKEVKKDLIIKLPKYSLFELENGRKRMLASAGELQKGNELALPSKYVNFLYLASHYEKLKGSPEDNEQKQLFVEQHKHYLDEIIEQISEFSKRVILADANLDKVLSAYNKHRDKPIREQAENIIHLFTLTNLGAPAAFKYFDTTIDRKRYTSTKEVLDATLIHQSITGLYETRIDLSQLGGDGGPAPGGGGSSGGTVSLQDEHRLFDIPVTTSLPDVWLQDFPQAWAETGGLGRAKCQAPIIIDLKPTAVPVSIKQYPMSLEAHMGIRQHIIKFLELGVLRPCRSPWNTPLLPVKKPGTQDYRPVQDLREINKRTVDIHPTVPNPYNLLSTLKPDYSWYTVLDLKDAFFCLPLAPQSQELFAFEWKDPERGISGQLTWTRLPQGFKNSPTLFNEALHRDLTDFRTQHPEVTLLQYVDDLLLAAPTKKACTQGTRHLLQELGEKGYRASAKKAQICQTKVTYLGYILSEGKRWLTPGRIETVARIPPPRNPREVREFLGTAGFCRLWIPGFAELAAPLYALTKPSTPFTWQTEHQLAFEALKKALLSAPALGLPDTSKPFTLFLDERQGIAKGVLTQKLGPWKRPVAYLSKKLDPVAAGWPPCLRIMAATAMLVKDSAKLTLGQPLTVITPHTLEAIVRQPPDRWITNARLTHYQALLLDTDRVQFGPPVTLNPATLLPVPENQPSPHDCRQVLAETHGTREDLKDQELPDADHTWYTDGSSYLDSGTRRAGAAVVDGHNTIWAQSLPPGTSAQKAELIALTKALELSKGKKANIYTDSRYAFATAHTHGSIYERRGWLTSEGKEIKNKAEIIALLKALFLPQEVAIIHCPGHQKGQDPVAVGNRQADRVARQAAMAEVLTLATEPDNTSHITAGKRTADGSEFEKRTADGSEFESPKKKAKVE

SEQ ID NO: 7413 - protein, 1999 aa, synthetic construct
MPAAKRVKLDGGDKKYSIGLDIGTNSVGWAVITDEYKVPSKKFKVLGNTDRHSIKKNLIGALLFDSGETAEATRLKRTARRRYTRRKNRICYLQEIFSNEMAKVDDSFFHRLEESFLVEEDKKHERHPIFGNIVDEVAYHEKYPTIYHLRKKLVDSTDKADLRLIYLALAHMIKFRGHFLIEGDLNPDNSDVDKLFIQLVQTYNQLFEENPINASGVDAKAILSARLSKSRRLENLIAQLPGEKKNGLFGNLIALSLGLTPNFKSNFDLAEDAKLQLSKDTYDDDLDNLLAQIGDQYADLFLAAKNLSDAILLSDILRVNTEITKAPLSASMIKRYDEHHQDLTLLKALVRQQLPEKYKEIFFDQSKNGYAGYIDGGASQEEFYKFIKPILEKMDGTEELLVKLNREDLLRKQRTFDNGSIPHQIHLGELHAILRRQEDFYPFLKDNREKIEKILTFRIPYYVGPLARGNSRFAWMTRKSEETITPWNFEEVVDKGASAQSFIERMTNFDKNLPNEKVLPKHSLLYEYFTVYNELTKVKYVTEGMRKPAFLSGEQKKAIVDLLFKTNRKVTVKQLKEDYFKKIECFDSVEISGVEDRFNASLGTYHDLLKIIKDKDFLDNEENEDILEDIVLTLTLFEDREMIEERLKTYAHLFDDKVMKQLKRRRYTGWGRLSRKLINGIRDKQSGKTILDFLKSDGFANRNFMQLIHDDSLTFKEDIQKAQVSGQGDSLHEHIANLAGSPAIKKGILQTVKVVDELVKVMGRHKPENIVIEMARENQTTQKGQKNSRERMKRIEEGIKELGSQILKEHPVENTQLQNEKLYLYYLQNGRDMYVDQELDINRLSDYDVDHIVPQSFLKDDSIDNKVLTRSDKARGKSDNVPSEEVVKKMKNYWRQLLNAKLITQRKFDNLTKAERGGLSELDKAGFIKRQLVETRQITKHVAQILDSRMNTKYDENDKLIREVKVITLKSKLVSDFRKDFQFYKVREINNYHHAHDAYLNAVVGTALIKKYPKLESEFVYGDYKVYDVRKMIAKSEQEIGKATAKYFFYSNIMNFFKTEITLANGEIRKRPLIETNGETGEIVWDKGRDFATVRKVLSMPQVNIVKKTEVQTGGFSKESILPKRNSDKLIARKKDWDPKKYGGFDSPTVAYSVLVVAKVEKGKSKKLKSVKELLGITIMERSSFEKNPIDFLEAKGYKEVKKDLIIKLPKYSLFELENGRKRMLASAGELQKGNELALPSKYVNFLYLASHYEKLKGSPEDNEQKQLFVEQHKHYLDEIIEQISEFSKRVILADANLDKVLSAYNKHRDKPIREQAENIIHLFTLTNLGAPAAFKYFDTTIDRKRYTSTKEVLDATLIHQSITGLYETRIDLSQLGGDGGPAPGGGGSSGGGVLDTPPSHIGLEHLPPPPEVPQFPLNLERLQALQDLVHRSLEAGYISPWDGPGNNPVFPVRKPNGAWRFVHDLRATNALTKPIPALSPGPPDLTAPPTHPPHIICLDLKDAFFQIPVEDRFRFYLSFTLPSPGGLQPHRRFAWRVLPQGFINSPALFQRALQEPLRQVSAAFSQSLLVSYMDDILYASPTEEQRSQCYQALAARLRDLGFQVASEKTSQTPSPVPFLGQMVHEQIVTYQSLPTLQISSPISLHQLQAVLGDLQWVSRGTPTTRRPLQLLYSSLKRHHDPRAIIQLSPEQLQGIAELRQALSHNARSRYNEQEPLLAYVHLTRAGSTLVLFQKGAQFPLAYFQTPLTDNQASPWGLLLLLGCQYLQTQALSSYAKPILKYYHNLPKTSLDNWIQSSEDPRVQELLQLWPQISSQGIQPPGPWKTLITRAEVFLTPQFSPDPIPAALCLFSDGATGRGAYCLWKDHLLDFQAVPAPESAQKGELAGLLAGLAAAPPEPVNIWVDSKYLYSLLRTWVLGAWLQPDPVPSYALLYKSLLRHPAIVVGHVRSHSSASHPIASLNNYVDQLAGKRTADGSEFEKRTADGSEFESPKKKAKVE

SEQ ID NO: 7414 - protein, 2171 aa, synthetic construct
MPAAKRVKLDGGDKKYSIGLDIGTNSVGWAVITDEYKVPSKKFKVLGNTDRHSIKKNLIGALLFDSGETAEATRLKRTARRRYTRRKNRICYLQEIFSNEMAKVDDSFFHRLEESFLVEEDKKHERHPIFGNIVDEVAYHEKYPTIYHLRKKLVDSTDKADLRLIYLALAHMIKFRGHFLIEGDLNPDNSDVDKLFIQLVQTYNQLFEENPINASGVDAKAILSARLSKSRRLENLIAQLPGEKKNGLFGNLIALSLGLTPNFKSNFDLAEDAKLQLSKDTYDDDLDNLLAQIGDQYADLFLAAKNLSDAILLSDILRVNTEITKAPLSASMIKRYDEHHQDLTLLKALVRQQLPEKYKEIFFDQSKNGYAGYIDGGASQEEFYKFIKPILEKMDGTEELLVKLNREDLLRKQRTFDNGSIPHQIHLGELHAILRRQEDFYPFLKDNREKIEKILTFRIPYYVGPLARGNSRFAWMTRKSEETITPWNFEEVVDKGASAQSFIERMTNFDKNLPNEKVLPKHSLLYEYFTVYNELTKVKYVTEGMRKPAFLSGEQKKAIVDLLFKTNRKVTVKQLKEDYFKKIECFDSVEISGVEDRFNASLGTYHDLLKIIKDKDFLDNEENEDILEDIVLTLTLFEDREMIEERLKTYAHLFDDKVMKQLKRRRYTGWGRLSRKLINGIRDKQSGKTILDFLKSDGFANRNFMQLIHDDSLTFKEDIQKAQVSGQGDSLHEHIANLAGSPAIKKGILQTVKVVDELVKVMGRHKPENIVIEMARENQTTQKGQKNSRERMKRIEEGIKELGSQILKEHPVENTQLQNEKLYLYYLQNGRDMYVDQELDINRLSDYDVDHIVPQSFLKDDSIDNKVLTRSDKARGKSDNVPSEEVVKKMKNYWRQLLNAKLITQRKFDNLTKAERGGLSELDKAGFIKRQLVETRQITKHVAQILDSRMNTKYDENDKLIREVKVITLKSKLVSDFRKDFQFYKVREINNYHHAHDAYLNAVVGTALIKKYPKLESEFVYGDYKVYDVRKMIAKSEQEIGKATAKYFFYSNIMNFFKTEITLANGEIRKRPLIETNGETGEIVWDKGRDFATVRKVLSMPQVNIVKKTEVQTGGFSKESILPKRNSDKLIARKKDWDPKKYGGFDSPTVAYSVLVVAKVEKGKSKKLKSVKELLGITIMERSSFEKNPIDFLEAKGYKEVKKDLIIKLPKYSLFELENGRKRMLASAGELQKGNELALPSKYVNFLYLASHYEKLKGSPEDNEQKQLFVEQHKHYLDEIIEQISEFSKRVILADANLDKVLSAYNKHRDKPIREQAENIIHLFTLTNLGAPAAFKYFDTTIDRKRYTSTKEVLDATLIHQSITGLYETRIDLSQLGGDGGPAPGGGGSSGGMDLLKPLTVERKGVKIKGYWNSQADITCVPKDLLQGEEPVRQQNVTTIHGTQEGDVYYVNLKIDGRRINTEVIGTTLDYAIITPGDVPWILKKPLELTIKLDLEEQQGTLLNNSILSKKGKEELKQLFEKYSALWQSWENQVGHRRIRPHKIATGTVKPTPQKQYHINPKAKPDIQIVINDLLKQGVLIQKESTMNTPVYPVPKPNGRWRMVLDYRAVNKVTPLIAVQNQHSYGILGSLFKGRYKTTIDLSNGFWAHPIVPEDYWITAFTWQGKQYCWTVLPQGFLNSPGLFTGDVVDLLQGIPNVEVYVDDVYISHDSEKEHLEYLDILFNRLKEAGYIISLKKSNIANSIVDFLGFQITNEGRGLTDTFKEKLENITAPTTLKQLQSILGLLNFARNFIPDFTELIAPLYALIPKSTKNYVPWQIEHSTTLETLITKLNGAEYLQGRKGDKTLIMKVNASYTTGYIRYYNEGEKKPISYVSIVFSKTELKFTELEKLLTTVHKGLLKALDLSMGQNIHVYSPIVSMQNIQKTPQTAKKALASRWLSWLSYLEDPRIRFFYDPQMPALKDLPAVDTGKDNKKHPSNFQHIFYTDGSAITSPTKEGHLNAGMGIVYFINKDGNLQKQQEWSISLGNHTAQFAEIAAFEFALKKCLPLGGNILVVTDSNYVAKAYNEELDVWASNGFVNNRKKPLKHISKWKSVADLKRLRPDVVVTHEPGHQKLDSSPHAYGNNLADQLATQASFKVHAGKRTADGSEFEKRTADGSEFESPKKKAKVE

SEQ ID NO: 7415 - protein, 2093 aa, synthetic construct
MPAAKRVKLDGGDKKYSIGLDIGTNSVGWAVITDEYKVPSKKFKVLGNTDRHSIKKNLIGALLFDSGETAEATRLKRTARRRYTRRKNRICYLQEIFSNEMAKVDDSFFHRLEESFLVEEDKKHERHPIFGNIVDEVAYHEKYPTIYHLRKKLVDSTDKADLRLIYLALAHMIKFRGHFLIEGDLNPDNSDVDKLFIQLVQTYNQLFEENPINASGVDAKAILSARLSKSRRLENLIAQLPGEKKNGLFGNLIALSLGLTPNFKSNFDLAEDAKLQLSKDTYDDDLDNLLAQIGDQYADLFLAAKNLSDAILLSDILRVNTEITKAPLSASMIKRYDEHHQDLTLLKALVRQQLPEKYKEIFFDQSKNGYAGYIDGGASQEEFYKFIKPILEKMDGTEELLVKLNREDLLRKQRTFDNGSIPHQIHLGELHAILRRQEDFYPFLKDNREKIEKILTFRIPYYVGPLARGNSRFAWMTRKSEETITPWNFEEVVDKGASAQSFIERMTNFDKNLPNEKVLPKHSLLYEYFTVYNELTKVKYVTEGMRKPAFLSGEQKKAIVDLLFKTNRKVTVKQLKEDYFKKIECFDSVEISGVEDRFNASLGTYHDLLKIIKDKDFLDNEENEDILEDIVLTLTLFEDREMIEERLKTYAHLFDDKVMKQLKRRRYTGWGRLSRKLINGIRDKQSGKTILDFLKSDGFANRNFMQLIHDDSLTFKEDIQKAQVSGQGDSLHEHIANLAGSPAIKKGILQTVKVVDELVKVMGRHKPENIVIEMARENQTTQKGQKNSRERMKRIEEGIKELGSQILKEHPVENTQLQNEKLYLYYLQNGRDMYVDQELDINRLSDYDVDHIVPQSFLKDDSIDNKVLTRSDKARGKSDNVPSEEVVKKMKNYWRQLLNAKLITQRKFDNLTKAERGGLSELDKAGFIKRQLVETRQITKHVAQILDSRMNTKYDENDKLIREVKVITLKSKLVSDFRKDFQFYKVREINNYHHAHDAYLNAVVGTALIKKYPKLESEFVYGDYKVYDVRKMIAKSEQEIGKATAKYFFYSNIMNFFKTEITLANGEIRKRPLIETNGETGEIVWDKGRDFATVRKVLSMPQVNIVKKTEVQTGGFSKESILPKRNSDKLIARKKDWDPKKYGGFDSPTVAYSVLVVAKVEKGKSKKLKSVKELLGITIMERSSFEKNPIDFLEAKGYKEVKKDLIIKLPKYSLFELENGRKRMLASAGELQKGNELALPSKYVNFLYLASHYEKLKGSPEDNEQKQLFVEQHKHYLDEIIEQISEFSKRVILADANLDKVLSAYNKHRDKPIREQAENIIHLFTLTNLGAPAAFKYFDTTIDRKRYTSTKEVLDATLIHQSITGLYETRIDLSQLGGDGGPAPGGGGSSGGTLQLEEEYRLFEPESTQKQEMDIWLKNFPQAWAETGGMGTAHCQAPVLIQLKATATPISIRQYPMPHEAYQGIKPHIRRMLDQGILKPCQSPWNTPLLPVKKPGTEDYRPVQDLREVNKRVEDIHPTVPNPYNLLSTLPPSHPWYTVLDLKDAFFCLRLHSESQLLFAFEWRDPEIGLSGQLTWTRLPQGFKNSPTLFNEALHSDLADFRVRYPALVLLQYVDDLLLAAATRTECLEGTKALLETLGNKGYRASAKKAQICLQEVTYLGYSLKDGQRWLTKARKEAILSIPVPKNSRQVREFLGTAGYCRLWIPGFAELAAPLYPLTRPGTLFQWGTEQQLAFEDIKKALLSSPALGLPDITKPFELFIDENSGFAKGVLVQKLGPWKRPVAYLSKKLDTVASGWPPCLRMVAAIAILVKDAGKLTLGQPLTILTSHPVEALVRQPPNKWLSNARMTHYQAMLLDAERVHFGPTVSLNPATLLPLPSGGNHHDCLQILAETHGTRPDLTDQPLPDADLTWYTDGSSFIRNGEREAGAAVTTESEVIWAAPLPPGTSAQRAELIALTQALKMAEGKKLTVYTDSRYAFATTHVHGEIYRRRGWLTSEGKEIKNKNEILALLEALFLPKRLSIIHCPGHQKGDSPQAKGNRLADDTAKKAATETHSSLTVLPAGKRTADGSEFEKRTADGSEFESPKKKAKVE

SEQ ID NO: 7416 - protein, 2216 aa, synthetic construct
MPAAKRVKLDGGDKKYSIGLDIGTNSVGWAVITDEYKVPSKKFKVLGNTDRHSIKKNLIGALLFDSGETAEATRLKRTARRRYTRRKNRICYLQEIFSNEMAKVDDSFFHRLEESFLVEEDKKHERHPIFGNIVDEVAYHEKYPTIYHLRKKLVDSTDKADLRLIYLALAHMIKFRGHFLIEGDLNPDNSDVDKLFIQLVQTYNQLFEENPINASGVDAKAILSARLSKSRRLENLIAQLPGEKKNGLFGNLIALSLGLTPNFKSNFDLAEDAKLQLSKDTYDDDLDNLLAQIGDQYADLFLAAKNLSDAILLSDILRVNTEITKAPLSASMIKRYDEHHQDLTLLKALVRQQLPEKYKEIFFDQSKNGYAGYIDGGASQEEFYKFIKPILEKMDGTEELLVKLNREDLLRKQRTFDNGSIPHQIHLGELHAILRRQEDFYPFLKDNREKIEKILTFRIPYYVGPLARGNSRFAWMTRKSEETITPWNFEEVVDKGASAQSFIERMTNFDKNLPNEKVLPKHSLLYEYFTVYNELTKVKYVTEGMRKPAFLSGEQKKAIVDLLFKTNRKVTVKQLKEDYFKKIECFDSVEISGVEDRFNASLGTYHDLLKIIKDKDFLDNEENEDILEDIVLTLTLFEDREMIEERLKTYAHLFDDKVMKQLKRRRYTGWGRLSRKLINGIRDKQSGKTILDFLKSDGFANRNFMQLIHDDSLTFKEDIQKAQVSGQGDSLHEHIANLAGSPAIKKGILQTVKVVDELVKVMGRHKPENIVIEMARENQTTQKGQKNSRERMKRIEEGIKELGSQILKEHPVENTQLQNEKLYLYYLQNGRDMYVDQELDINRLSDYDVDHIVPQSFLKDDSIDNKVLTRSDKARGKSDNVPSEEVVKKMKNYWRQLLNAKLITQRKFDNLTKAERGGLSELDKAGFIKRQLVETRQITKHVAQILDSRMNTKYDENDKLIREVKVITLKSKLVSDFRKDFQFYKVREINNYHHAHDAYLNAVVGTALIKKYPKLESEFVYGDYKVYDVRKMIAKSEQEIGKATAKYFFYSNIMNFFKTEITLANGEIRKRPLIETNGETGEIVWDKGRDFATVRKVLSMPQVNIVKKTEVQTGGFSKESILPKRNSDKLIARKKDWDPKKYGGFDSPTVAYSVLVVAKVEKGKSKKLKSVKELLGITIMERSSFEKNPIDFLEAKGYKEVKKDLIIKLPKYSLFELENGRKRMLASAGELQKGNELALPSKYVNFLYLASHYEKLKGSPEDNEQKQLFVEQHKHYLDEIIEQISEFSKRVILADANLDKVLSAYNKHRDKPIREQAENIIHLFTLTNLGAPAAFKYFDTTIDRKRYTSTKEVLDATLIHQSITGLYETRIDLSQLGGDGGPAPGGGGSSGGTLGDQGSRGSDPLPEPRVTLTVEGIPTEFLVNTGAEHSVLTKPMGKMGSKRTVVAGATGSKVYPWTTKRLLKIGQKQVTHSFLVIPECPAPLLGRDLLTKLKAQIQFSTEGPQVTWEDRPAMCLVLNLEEEYRLHEKPVPPSIDPSWLQLFPMVWAEKAGMGLANQVPPVVVELKSDASPVAVRQYPMSKEAREGIRPHIQRFLDLGILVPCQSPWNTPLLPVKKPGTNDYRPVQDLREVNKRVQDIHPTVPNPYNLLSSLPPSHTWYSVLDLKDAFFCLKLHPNSQPLFAFEWRDPEKGNTGQLTWTRLPQGFKNSPTLFDEALHRDLASFRALNPQVVMLQYVDDLLVAAPTYRDCKEGTRRLLQELSKLGYRVSAKKAQLCREEVTYLGYLLKGGKRWLTPARKATVMKIPTPTTPRQVREFLGTAGFCRLWIPGFASLAAPLYPLTREKVPFTWTEAHQEAFGRIKEALLSAPALALPDLTKPFALYVDEKEGVARGVLTQTLGPWRRPVAYLSKKLDPVASGWPTCLKAIAAVALLLKDADKLTLGQNVLVIAPHNLESIVRQPPDRWMTNARMTHYQSLLLNERVSFAPPAILNPATLLPVESDDTPIHICSEILAEETGTRPDLRDQPLPGVPAWYTDGSSFIMDGRRQAGAAIVDNKRTVWASNLPEGTSAQKAELIALTQALRLAEGKSINIYTDSRYAFATAHVHGAIYKQRGLLTSAGKDIKNKEEILALLEAIHLPKRVAIIHCPGHQRGTDPVATGNRKADEAAKQAAQSTRILTETTKNAGKRTADGSEFEKRTADGSEFESPKKKAKVE

SEQ ID NO: 7417 - protein, 2125 aa, synthetic construct
MPAAKRVKLDGGDKKYSIGLDIGTNSVGWAVITDEYKVPSKKFKVLGNTDRHSIKKNLIGALLFDSGETAEATRLKRTARRRYTRRKNRICYLQEIFSNEMAKVDDSFFHRLEESFLVEEDKKHERHPIFGNIVDEVAYHEKYPTIYHLRKKLVDSTDKADLRLIYLALAHMIKFRGHFLIEGDLNPDNSDVDKLFIQLVQTYNQLFEENPINASGVDAKAILSARLSKSRRLENLIAQLPGEKKNGLFGNLIALSLGLTPNFKSNFDLAEDAKLQLSKDTYDDDLDNLLAQIGDQYADLFLAAKNLSDAILLSDILRVNTEITKAPLSASMIKRYDEHHQDLTLLKALVRQQLPEKYKEIFFDQSKNGYAGYIDGGASQEEFYKFIKPILEKMDGTEELLVKLNREDLLRKQRTFDNGSIPHQIHLGELHAILRRQEDFYPFLKDNREKIEKILTFRIPYYVGPLARGNSRFAWMTRKSEETITPWNFEEVVDKGASAQSFIERMTNFDKNLPNEKVLPKHSLLYEYFTVYNELTKVKYVTEGMRKPAFLSGEQKKAIVDLLFKTNRKVTVKQLKEDYFKKIECFDSVEISGVEDRFNASLGTYHDLLKIIKDKDFLDNEENEDILEDIVLTLTLFEDREMIEERLKTYAHLFDDKVMKQLKRRRYTGWGRLSRKLINGIRDKQSGKTILDFLKSDGFANRNFMQLIHDDSLTFKEDIQKAQVSGQGDSLHEHIANLAGSPAIKKGILQTVKVVDELVKVMGRHKPENIVIEMARENQTTQKGQKNSRERMKRIEEGIKELGSQILKEHPVENTQLQNEKLYLYYLQNGRDMYVDQELDINRLSDYDVDHIVPQSFLKDDSIDNKVLTRSDKARGKSDNVPSEEVVKKMKNYWRQLLNAKLITQRKFDNLTKAERGGLSELDKAGFIKRQLVETRQITKHVAQILDSRMNTKYDENDKLIREVKVITLKSKLVSDFRKDFQFYKVREINNYHHAHDAYLNAVVGTALIKKYPKLESEFVYGDYKVYDVRKMIAKSEQEIGKATAKYFFYSNIMNFFKTEITLANGEIRKRPLIETNGETGEIVWDKGRDFATVRKVLSMPQVNIVKKTEVQTGGFSKESILPKRNSDKLIARKKDWDPKKYGGFDSPTVAYSVLVVAKVEKGKSKKLKSVKELLGITIMERSSFEKNPIDFLEAKGYKEVKKDLIIKLPKYSLFELENGRKRMLASAGELQKGNELALPSKYVNFLYLASHYEKLKGSPEDNEQKQLFVEQHKHYLDEIIEQISEFSKRVILADANLDKVLSAYNKHRDKPIREQAENIIHLFTLTNLGAPAAFKYFDTTIDRKRYTSTKEVLDATLIHQSITGLYETRIDLSQLGGDGGPAPGGGGSSGGLLGRDLLTKLKAQIQFSTEGPQVTWEDRPAMCLVLNLEEEYRLHEKPVPPSIDPSWLQLFPMVWAEKAGMGLANQVPPVVVELKSDASPVAVRQYPMSKEAREGIRPHIQRFLDLGILVPCQSPWNTPLLPVKKPGTNDYRPVQDLREVNKRVQDIHPTVPNPYNLLSSLPPSHTWYSVLDLKDAFFCLKLHPNSQPLFAFEWRDPEKGNTGQLTWTRLPQGFKNSPTLFNEALHRDLASFRALNPQVVMLQYVDDLLVAAPTYRDCKEGTRRLLQELSKLGYRVSAKKAQLCREEVTYLGYLLKGGKRWLTPARKATVMKIPTPTTPRQVREFLGTAGFCRLWIPGFASLAAPLYPLTRPKVPFTWTEAHQEAFGRIKEALLSAPALALPDLTKPFALYVDEKEGVARGVLTQTLGPWRRPVAYLSKKLDPVASGWPTCLKAIAAVALLLKDADKLTLGQNVLVIAPHNLESIVRQPPDRWMTNARMTHYQSLLLNERVSFAPPAILNPATLLPVESDDTPIHICSEILAEETGTRPDLRDQPLPGVPAWYTDGSSFIMDGRRQAGAAIVDNKRTVWASNLPEGTSAQKAELIALTQALRLAEGKSINIYTDSRYAFATAHVHGAIYKQRGWLTSAGKDIKNKEEILALLEAIHLPKRVAIIHCPGHQRGTDPVATGNRKADEAAKQAAQSTRILTETTKNAGKRTADGSEFEKRTADGSEFESPKKKAKVE

SEQ ID NO: 7418 - protein, 2216 aa, synthetic construct
MPAAKRVKLDGGDKKYSIGLDIGTNSVGWAVITDEYKVPSKKFKVLGNTDRHSIKKNLIGALLFDSGETAEATRLKRTARRRYTRRKNRICYLQEIFSNEMAKVDDSFFHRLEESFLVEEDKKHERHPIFGNIVDEVAYHEKYPTIYHLRKKLVDSTDKADLRLIYLALAHMIKFRGHFLIEGDLNPDNSDVDKLFIQLVQTYNQLFEENPINASGVDAKAILSARLSKSRRLENLIAQLPGEKKNGLFGNLIALSLGLTPNFKSNFDLAEDAKLQLSKDTYDDDLDNLLAQIGDQYADLFLAAKNLSDAILLSDILRVNTEITKAPLSASMIKRYDEHHQDLTLLKALVRQQLPEKYKEIFFDQSKNGYAGYIDGGASQEEFYKFIKPILEKMDGTEELLVKLNREDLLRKQRTFDNGSIPHQIHLGELHAILRRQEDFYPFLKDNREKIEKILTFRIPYYVGPLARGNSRFAWMTRKSEETITPWNFEEVVDKGASAQSFIERMTNFDKNLPNEKVLPKHSLLYEYFTVYNELTKVKYVTEGMRKPAFLSGEQKKAIVDLLFKTNRKVTVKQLKEDYFKKIECFDSVEISGVEDRFNASLGTYHDLLKIIKDKDFLDNEENEDILEDIVLTLTLFEDREMIEERLKTYAHLFDDKVMKQLKRRRYTGWGRLSRKLINGIRDKQSGKTILDFLKSDGFANRNFMQLIHDDSLTFKEDIQKAQVSGQGDSLHEHIANLAGSPAIKKGILQTVKVVDELVKVMGRHKPENIVIEMARENQTTQKGQKNSRERMKRIEEGIKELGSQILKEHPVENTQLQNEKLYLYYLQNGRDMYVDQELDINRLSDYDVDHIVPQSFLKDDSIDNKVLTRSDKARGKSDNVPSEEVVKKMKNYWRQLLNAKLITQRKFDNLTKAERGGLSELDKAGFIKRQLVETRQITKHVAQILDSRMNTKYDENDKLIREVKVITLKSKLVSDFRKDFQFYKVREINNYHHAHDAYLNAVVGTALIKKYPKLESEFVYGDYKVYDVRKMIAKSEQEIGKATAKYFFYSNIMNFFKTEITLANGEIRKRPLIETNGETGEIVWDKGRDFATVRKVLSMPQVNIVKKTEVQTGGFSKESILPKRNSDKLIARKKDWDPKKYGGFDSPTVAYSVLVVAKVEKGKSKKLKSVKELLGITIMERSSFEKNPIDFLEAKGYKEVKKDLIIKLPKYSLFELENGRKRMLASAGELQKGNELALPSKYVNFLYLASHYEKLKGSPEDNEQKQLFVEQHKHYLDEIIEQISEFSKRVILADANLDKVLSAYNKHRDKPIREQAENIIHLFTLTNLGAPAAFKYFDTTIDRKRYTSTKEVLDATLIHQSITGLYETRIDLSQLGGDGGPAPGGGGSSGGTLGDQGSRGSDPLPEPRVTLTVEGIPTEFLVNTGAEHSVLTKPMGKMGSKRTVVAGATGSKVYPWTTKRLLKIGQKQVTHSFLVIPECPAPLLGRDLLTKLKAQIQFSTEGPQVTWEDRPAMCLVLNLEEEYRLHEKPVPPSIDPSWLQLFPMVWAEKAGMGLANQVPPVVVELKSDASPVAVRQYPMSKEAREGIRPHIQRFLDLGILVPCQSPWNTPLLPVKKPGTNDYRPVQDLREVNKRVQDIHPTVPNPYNLLSSLPPSHTWYSVLDLKDAFFCLKLHPNSQPLFAFEWRDPEKGNTGQLTWTRLPQGFKNSPTLFNEALHRDLASFRALNPQVVMLQYVDDLLVAAPTYRDCKEGTRRLLQELSKLGYRVSAKKAQLCREEVTYLGYLLKGGKRWLTPARKATVMKIPTPTTPRQVREFLGTAGFCRLWIPGFASLAAPLYPLTRPKVPFTWTEAHQEAFGRIKEALLSAPALALPDLTKPFALYVDEKEGVARGVLTQTLGPWRRPVAYLSKKLDPVASGWPTCLKAIAAVALLLKDADKLTLGQNVLVIAPHNLESIVRQPPDRWMTNARMTHYQSLLLNERVSFAPPAILNPATLLPVESDDTPIHICSEILAEETGTRPDLRDQPLPGVPAWYTDGSSFIMDGRRQAGAAIVDNKRTVWASNLPEGTSAQKAELIALTQALRLAEGKSINIYTDSRYAFATAHVHGAIYKQRGWLTSAGKDIKNKEEILALLEAIHLPKRVAIIHCPGHQRGTDPVATGNRKADEAAKQAAQSTRILTETTKNAGKRTADGSEFEKRTADGSEFESPKKKAKVE

SEQ ID NO: 7419 - protein, 2094 aa, synthetic construct
MPAAKRVKLDGGDKKYSIGLDIGTNSVGWAVITDEYKVPSKKFKVLGNTDRHSIKKNLIGALLFDSGETAEATRLKRTARRRYTRRKNRICYLQEIFSNEMAKVDDSFFHRLEESFLVEEDKKHERHPIFGNIVDEVAYHEKYPTIYHLRKKLVDSTDKADLRLIYLALAHMIKFRGHFLIEGDLNPDNSDVDKLFIQLVQTYNQLFEENPINASGVDAKAILSARLSKSRRLENLIAQLPGEKKNGLFGNLIALSLGLTPNFKSNFDLAEDAKLQLSKDTYDDDLDNLLAQIGDQYADLFLAAKNLSDAILLSDILRVNTEITKAPLSASMIKRYDEHHQDLTLLKALVRQQLPEKYKEIFFDQSKNGYAGYIDGGASQEEFYKFIKPILEKMDGTEELLVKLNREDLLRKQRTFDNGSIPHQIHLGELHAILRRQEDFYPFLKDNREKIEKILTFRIPYYVGPLARGNSRFAWMTRKSEETITPWNFEEVVDKGASAQSFIERMTNFDKNLPNEKVLPKHSLLYEYFTVYNELTKVKYVTEGMRKPAFLSGEQKKAIVDLLFKTNRKVTVKQLKEDYFKKIECFDSVEISGVEDRFNASLGTYHDLLKIIKDKDFLDNEENEDILEDIVLTLTLFEDREMIEERLKTYAHLFDDKVMKQLKRRRYTGWGRLSRKLINGIRDKQSGKTILDFLKSDGFANRNFMQLIHDDSLTFKEDIQKAQVSGQGDSLHEHIANLAGSPAIKKGILQTVKVVDELVKVMGRHKPENIVIEMARENQTTQKGQKNSRERMKRIEEGIKELGSQILKEHPVENTQLQNEKLYLYYLQNGRDMYVDQELDINRLSDYDVDHIVPQSFLKDDSIDNKVLTRSDKARGKSDNVPSEEVVKKMKNYWRQLLNAKLITQRKFDNLTKAERGGLSELDKAGFIKRQLVETRQITKHVAQILDSRMNTKYDENDKLIREVKVITLKSKLVSDFRKDFQFYKVREINNYHHAHDAYLNAVVGTALIKKYPKLESEFVYGDYKVYDVRKMIAKSEQEIGKATAKYFFYSNIMNFFKTEITLANGEIRKRPLIETNGETGEIVWDKGRDFATVRKVLSMPQVNIVKKTEVQTGGFSKESILPKRNSDKLIARKKDWDPKKYGGFDSPTVAYSVLVVAKVEKGKSKKLKSVKELLGITIMERSSFEKNPIDFLEAKGYKEVKKDLIIKLPKYSLFELENGRKRMLASAGELQKGNELALPSKYVNFLYLASHYEKLKGSPEDNEQKQLFVEQHKHYLDEIIEQISEFSKRVILADANLDKVLSAYNKHRDKPIREQAENIIHLFTLTNLGAPAAFKYFDTTIDRKRYTSTKEVLDATLIHQSITGLYETRIDLSQLGGDGGPAPGGGGSSGGTLNLEDEYRLYETSAEPEVSPGSTWLSDFPQAWAETGGMGLAVRQAPLIIPLKATSTPVSIKQYPMSQEAKLGIKPHIQRLLDQGILVPCQSPWNTPLLPVKKPGTNDYRPVQDLREVNKRVEDIHPTVPNPYNLLSGLPPSHRWYTVLDLKDAFFCLRLHPTSQPLFAFEWRDPGMGISGQLTWTRLPQGFKNSPTLFNEALHRDLADFRIQHPDLILLQYVDDILLAATSELDCQQGTRALLLTLGNLGYRASAKKAQLCQKQVKYLGYLLKEGQRWLTEARKETVMGQPTPKTPRQLREFLGTAGFCRLWIPGFAEMAAPLYPLTKPGTLFNWGPDQQKAYQEIKQALLTAPALGLPDLTKPFELFVDEKQGYAKGVLTQKLGPWRRPVAYLSKKLDPVAAGWPPCLRMVAAIAVLRKDAGKLTMGQPLVILAPHAVEALVKQPPDRWLSNARMTHYQAMLLDTDRVQFGPVVALNPATLLPLPEEGAPHDCLEILAETHGTRPDLTDQPIPDADHTWYTDGSSFLQEGQRKAGAAVTTETEVIWARALPAGTSAQRAELIALTQALKMAEGKRLNVYTDSRYAFATAHIHGEIYRRRGWLTSEGREIKNKSEILALLKALFLPKRLSIIHCLGHQKGDSAEARGNRLADQAAREAAIKTPPDTSTLLAGKRTADGSEFEKRTADGSEFESPKKKAKVE

SEQ ID NO: 7420 - protein, 2094 aa, synthetic construct
MPAAKRVKLDGGDKKYSIGLDIGTNSVGWAVITDEYKVPSKKFKVLGNTDRHSIKKNLIGALLFDSGETAEATRLKRTARRRYTRRKNRICYLQEIFSNEMAKVDDSFFHRLEESFLVEEDKKHERHPIFGNIVDEVAYHEKYPTIYHLRKKLVDSTDKADLRLIYLALAHMIKFRGHFLIEGDLNPDNSDVDKLFIQLVQTYNQLFEENPINASGVDAKAILSARLSKSRRLENLIAQLPGEKKNGLFGNLIALSLGLTPNFKSNFDLAEDAKLQLSKDTYDDDLDNLLAQIGDQYADLFLAAKNLSDAILLSDILRVNTEITKAPLSASMIKRYDEHHQDLTLLKALVRQQLPEKYKEIFFDQSKNGYAGYIDGGASQEEFYKFIKPILEKMDGTEELLVKLNREDLLRKQRTFDNGSIPHQIHLGELHAILRRQEDFYPFLKDNREKIEKILTFRIPYYVGPLARGNSRFAWMTRKSEETITPWNFEEVVDKGASAQSFIERMTNFDKNLPNEKVLPKHSLLYEYFTVYNELTKVKYVTEGMRKPAFLSGEQKKAIVDLLFKTNRKVTVKQLKEDYFKKIECFDSVEISGVEDRFNASLGTYHDLLKIIKDKDFLDNEENEDILEDIVLTLTLFEDREMIEERLKTYAHLFDDKVMKQLKRRRYTGWGRLSRKLINGIRDKQSGKTILDFLKSDGFANRNFMQLIHDDSLTFKEDIQKAQVSGQGDSLHEHIANLAGSPAIKKGILQTVKVVDELVKVMGRHKPENIVIEMARENQTTQKGQKNSRERMKRIEEGIKELGSQILKEHPVENTQLQNEKLYLYYLQNGRDMYVDQELDINRLSDYDVDHIVPQSFLKDDSIDNKVLTRSDKARGKSDNVPSEEVVKKMKNYWRQLLNAKLITQRKFDNLTKAERGGLSELDKAGFIKRQLVETRQITKHVAQILDSRMNTKYDENDKLIREVKVITLKSKLVSDFRKDFQFYKVREINNYHHAHDAYLNAVVGTALIKKYPKLESEFVYGDYKVYDVRKMIAKSEQEIGKATAKYFFYSNIMNFFKTEITLANGEIRKRPLIETNGETGEIVWDKGRDFATVRKVLSMPQVNIVKKTEVQTGGFSKESILPKRNSDKLIARKKDWDPKKYGGFDSPTVAYSVLVVAKVEKGKSKKLKSVKELLGITIMERSSFEKNPIDFLEAKGYKEVKKDLIIKLPKYSLFELENGRKRMLASAGELQKGNELALPSKYVNFLYLASHYEKLKGSPEDNEQKQLFVEQHKHYLDEIIEQISEFSKRVILADANLDKVLSAYNKHRDKPIREQAENIIHLFTLTNLGAPAAFKYFDTTIDRKRYTSTKEVLDATLIHQSITGLYETRIDLSQLGGDGGPAPGGGGSSGGTLGIEDEYRLHETSTEPDVSLGSTWLSDFPQAWAETGGMGLAVRQAPLIIPLKATSTPVSIQQYPMSHEARLGIKPHIQRLLDQGILVPCQSPWNTPLLPVKKPGTNDYRPVQDLREVNKRVEDIHPTVPNPYNLLSGLPPSHQWYTVLDLKDAFFCLRLHPTSQPLFAFEWRDPGMGISGQLTWTRLPQGFKNSPTLFDEALHRDLADFRIQHPDLILLQYVDDILLAATSELDCQQGTRALLQTLGDLGYRASAKKAQICQKQVKYLGYLLREGQRWLTEARKETVMGQPVPKTPRQLREFLGTAGFCRLWIPGFAEMAAPLYPLTKTGTLFSWGPDQQKAYQEIKQALLTAPALGLPDLTKPFELFVDEKQGYAKGVLTQKLGPWRRPVAYLSKKLDPVAAGWPPCLRMVAAIAVLTKDAGKLTMGQPLVILAPHAVEALVKQPPDRWLSNARMTHYQAMLLDTDRVQFGPVVALNPATLLPLPEEGAPHDCLEILAETHGTRPDLTDQPIPDADHTWYTDGSSFLQEGQRKAGAAVTTETEVIWAGALPAGTSAQRAELIALTQALKMAEGKRLNVYTDSRYAFATAHIHGEIYRRRGLLTSEGREIKNKSEILALLKALFLPKRLSIIHCLGHQKGDSAEARGNRLADQAAREAAIKTPPDTSTLLAGKRTADGSEFEKRTADGSEFESPKKKAKVE

SEQ ID NO: 7421 - protein, 2094 aa, synthetic construct
MPAAKRVKLDGGDKKYSIGLDIGTNSVGWAVITDEYKVPSKKFKVLGNTDRHSIKKNLIGALLFDSGETAEATRLKRTARRRYTRRKNRICYLQEIFSNEMAKVDDSFFHRLEESFLVEEDKKHERHPIFGNIVDEVAYHEKYPTIYHLRKKLVDSTDKADLRLIYLALAHMIKFRGHFLIEGDLNPDNSDVDKLFIQLVQTYNQLFEENPINASGVDAKAILSARLSKSRRLENLIAQLPGEKKNGLFGNLIALSLGLTPNFKSNFDLAEDAKLQLSKDTYDDDLDNLLAQIGDQYADLFLAAKNLSDAILLSDILRVNTEITKAPLSASMIKRYDEHHQDLTLLKALVRQQLPEKYKEIFFDQSKNGYAGYIDGGASQEEFYKFIKPILEKMDGTEELLVKLNREDLLRKQRTFDNGSIPHQIHLGELHAILRRQEDFYPFLKDNREKIEKILTFRIPYYVGPLARGNSRFAWMTRKSEETITPWNFEEVVDKGASAQSFIERMTNFDKNLPNEKVLPKHSLLYEYFTVYNELTKVKYVTEGMRKPAFLSGEQKKAIVDLLFKTNRKVTVKQLKEDYFKKIECFDSVEISGVEDRFNASLGTYHDLLKIIKDKDFLDNEENEDILEDIVLTLTLFEDREMIEERLKTYAHLFDDKVMKQLKRRRYTGWGRLSRKLINGIRDKQSGKTILDFLKSDGFANRNFMQLIHDDSLTFKEDIQKAQVSGQGDSLHEHIANLAGSPAIKKGILQTVKVVDELVKVMGRHKPENIVIEMARENQTTQKGQKNSRERMKRIEEGIKELGSQILKEHPVENTQLQNEKLYLYYLQNGRDMYVDQELDINRLSDYDVDHIVPQSFLKDDSIDNKVLTRSDKARGKSDNVPSEEVVKKMKNYWRQLLNAKLITQRKFDNLTKAERGGLSELDKAGFIKRQLVETRQITKHVAQILDSRMNTKYDENDKLIREVKVITLKSKLVSDFRKDFQFYKVREINNYHHAHDAYLNAVVGTALIKKYPKLESEFVYGDYKVYDVRKMIAKSEQEIGKATAKYFFYSNIMNFFKTEITLANGEIRKRPLIETNGETGEIVWDKGRDFATVRKVLSMPQVNIVKKTEVQTGGFSKESILPKRNSDKLIARKKDWDPKKYGGFDSPTVAYSVLVVAKVEKGKSKKLKSVKELLGITIMERSSFEKNPIDFLEAKGYKEVKKDLIIKLPKYSLFELENGRKRMLASAGELQKGNELALPSKYVNFLYLASHYEKLKGSPEDNEQKQLFVEQHKHYLDEIIEQISEFSKRVILADANLDKVLSAYNKHRDKPIREQAENIIHLFTLTNLGAPAAFKYFDTTIDRKRYTSTKEVLDATLIHQSITGLYETRIDLSQLGGDGGPAPGGGGSSGGTLGIEDEYRLHETSTEPDVSLGSTWLSDFPQAWAETGGMGLAVRQAPLIIPLKATSTPVSIQQYPMSHEARLGIKPHIQRLLDQGILVPCQSPWNTPLLPVKKPGTNDYRPVQDLREVNKRVEDIHPTVPNPYNLLSGLPPSHQWYTVLDLKDAFFCLRLHPTSQPLFAFEWRDPGMGISGQLTWTRLPQGFKNSPTLFNEALHRDLADFRIQHPDLILLQYVDDILLAATSELDCQQGTRALLQTLGDLGYRASAKKAQICQKQVKYLGYLLREGQRWLTEARKETVMGQPVPKTPRQLREFLGTAGFCRLWIPGFAEMAAPLYPLTKPGTLFSWGPDQQKAYQEIKQALLTAPALGLPDLTKPFELFVDEKQGYAKGVLTQKLGPWRRPVAYLSKKLDPVAAGWPPCLRMVAAIAVLTKDAGKLTMGQPLVILAPHAVEALVKQPPDRWLSNARMTHYQAMLLDTDRVQFGPVVALNPATLLPLPEEGAPHDCLEILAETHGTRPDLTDQPIPDADHTWYTDGSSFLQEGQRKAGAAVTTETEVIWAGALPAGTSAQRAELIALTQALKMAEGKRLNVYTDSRYAFATAHIHGEIYRRRGWLTSEGREIKNKSEILALLKALFLPKRLSIIHCLGHQKGDSAEARGNRLADQAAREAAIKTPPDTSTLLAGKRTADGSEFEKRTADGSEFESPKKKAKVE

SEQ ID NO: 7422 - protein, 2094 aa, synthetic construct; identical to SEQ ID NO: 7421

SEQ ID NO: 7423 - protein, 2094 aa, synthetic construct
MPAAKRVKLDGGDKKYSIGLDIGTNSVGWAVITDEYKVPSKKFKVLGNTDRHSIKKNLIGALLFDSGETAEATRLKRTARRRYTRRKNRICYLQEIFSNEMAKVDDSFFHRLEESFLVEEDKKHERHPIFGNIVDEVAYHEKYPTIYHLRKKLVDSTDKADLRLIYLALAHMIKFRGHFLIEGDLNPDNSDVDKLFIQLVQTYNQLFEENPINASGVDAKAILSARLSKSRRLENLIAQLPGEKKNGLFGNLIALSLGLTPNFKSNFDLAEDAKLQLSKDTYDDDLDNLLAQIGDQYADLFLAAKNLSDAILLSDILRVNTEITKAPLSASMIKRYDEHHQDLTLLKALVRQQLPEKYKEIFFDQSKNGYAGYIDGGASQEEFYKFIKPILEKMDGTEELLVKLNREDLLRKQRTFDNGSIPHQIHLGELHAILRRQEDFYPFLKDNREKIEKILTFRIPYYVGPLARGNSRFAWMTRKSEETITPWNFEEVVDKGASAQSFIERMTNFDKNLPNEKVLPKHSLLYEYFTVYNELTKVKYVTEGMRKPAFLSGEQKKAIVDLLFKTNRKVTVKQLKEDYFKKIECFDSVEISGVEDRFNASLGTYHDLLKIIKDKDFLDNEENEDILEDIVLTLTLFEDREMIEERLKTYAHLFDDKVMKQLKRRRYTGWGRLSRKLINGIRDKQSGKTILDFLKSDGFANRNFMQLIHDDSLTFKEDIQKAQVSGQGDSLHEHIANLAGSPAIKKGILQTVKVVDELVKVMGRHKPENIVIEMARENQTTQKGQKNSRERMKRIEEGIKELGSQILKEHPVENTQLQNEKLYLYYLQNGRDMYVDQELDINRLSDYDVDHIVPQSFLKDDSIDNKVLTRSDKARGKSDNVPSEEVVKKMKNYWRQLLNAKLITQRKFDNLTKAERGGLSELDKAGFIKRQLVETRQITKHVAQILDSRMNTKYDENDKLIREVKVITLKSKLVSDFRKDFQFYKVREINNYHHAHDAYLNAVVGTALIKKYPKLESEFVYGDYKVYDVRKMIAKSEQEIGKATAKYFFYSNIMNFFKTEITLANGEIRKRPLIETNGETGEIVWDKGRDFATVRKVLSMPQVNIVKKTEVQTGGFSKESILPKRNSDKLIARKKDWDPKKYGGFDSPTVAYSVLVVAKVEKGKSKKLKSVKELLGITIMERSSFEKNPIDFLEAKGYKEVKKDLIIKLPKYSLFELENGRKRMLASAGELQKGNELALPSKYVNFLYLASHYEKLKGSPEDNEQKQLFVEQHKHYLDEIIEQISEFSKRVILADANLDKVLSAYNKHRDKPIREQAENIIHLFTLTNLGAPAAFKYFDTTIDRKRYTSTKEVLDATLIHQSITGLYETRIDLSQLGGDGGPAPGGGGSSGGTLNIEDEYRLHETSKEPDVSLGSTWLSDFPQAWAETGGMGLAVRQAPLIIPLKATSTPVSIKQYPMSQEARLGIKPHIQRLLDQGILVPCQSPWNTPLLPVKKPGTNDYRPVQDLREVNKRVEDIHPTVPNPYNLLSGLPPSHQWYTVLDLKDAFFCLRLHPTSQPLFAFEWRDPEMGISGQLTWTRLPQGFKNSPTLFDEALHRDLAGFRIQHPDLILLQYVDDLLLAATSELDCQQGTRALLQTLGDLGYRASAKKAQICQKQVKYLGYLLKEGQRWLTEARKETVMGQPIPKTPRQLREFLGTAGFCRLWIPGFAEMAAPLYPLTKTGTLFNWGPDQQKAFQEIKQALLTAPALGLPDLTKPFELFVDEKQGYAKGVLTQKLGPWRRPVAYLSKKLDPVAAGWPPCLRMVAAIAVLTKDAGKLTMGQPLVILAPHAVEALVKQPPDRWLSNARMTHYQALLLDTDRVQFGPVVALNPATLLPLPEEGLQHDCLDILAEAHGTRSDLMDQPLPDADHTWYTDGSSFLQEGQRKAGAAVTTETEVIWARALPAGTSAQRAELIALTQALKMAEGKKLNVYTDSRYAFATAHIHGEIYRRRGLLTSEGKEIKNKDEILALLKALFLPKRLSIIHCPGHQKGNSAEARGNRMADQAAREVATRETPETSTLLAGKRTADGSEFEKRTADGSEFESPKKKAKVE

SEQ ID NO: 7424 - protein, 2094 aa, synthetic construct
MPAAKRVKLDGGDKKYSIGLDIGTNSVGWAVITDEYKVPSKKFKVLGNTDRHSIKKNLIGALLFDSGETAEATRLKRTARRRYTRRKNRICYLQEIFSNEMAKVDDSFFHRLEESFLVEEDKKHERHPIFGNIVDEVAYHEKYPTIYHLRKKLVDSTDKADLRLIYLALAHMIKFRGHFLIEGDLNPDNSDVDKLFIQLVQTYNQLFEENPINASGVDAKAILSARLSKSRRLENLIAQLPGEKKNGLFGNLIALSLGLTPNFKSNFDLAEDAKLQLSKDTYDDDLDNLLAQIGDQYADLFLAAKNLSDAILLSDILRVNTEITKAPLSASMIKRYDEHHQDLTLLKALVRQQLPEKYKEIFFDQSKNGYAGYIDGGASQEEFYKFIKPILEKMDGTEELLVKLNREDLLRKQRTFDNGSIPHQIHLGELHAILRRQEDFYPFLKDNREKIEKILTFRIPYYVGPLARGNSRFAWMTRKSEETITPWNFEEVVDKGASAQSFIERMTNFDKNLPNEKVLPKHSLLYEYFTVYNELTKVKYVTEGMRKPAFLSGEQKKAIVDLLFKTNRKVTVKQLKEDYFKKIECFDSVEISGVEDRFNASLGTYHDLLKIIKDKDFLDNEENEDILEDIVLTLTLFEDREMIEERLKTYAHLFDDKVMKQLKRRRYTGWGRLSRKLINGIRDKQSGKTILDFLKSDGFANRNFMQLIHDDSLTFKEDIQKAQVSGQGDSLHEHIANLAGSPAIKKGILQTVKVVDELVKVMGRHKPENIVIEMARENQTTQKGQKNSRERMKRIEEGIKELGSQILKEHPVENTQLQNEKLYLYYLQNGRDMYVDQELDINRLSDYDVDHIVPQSFLKDDSIDNKVLTRSDKARGKSDNVPSEEVVKKMKNYWRQLLNAKLITQRKFDNLTKAERGGLSELDKAGFIKRQLVETRQITKHVAQILDSRMNTKYDENDKLIREVKVITLKSKLVSDFRKDFQFYKVREINNYHHAHDAYLNAVVGTALIKKYPKLESEFVYGDYKVYDVRKMIAKSEQEIGKATAKYFFYSNIMNFFKTEITLANGEIRKRPLIETNGETGEIVWDKGRDFATVRKVLSMPQVNIVKKTEVQTGGFSKESILPKRNSDKLIARKKDWDPKKYGGFDSPTVAYSVLVVAKVEKGKSKKLKSVKELLGITIMERSSFEKNPIDFLEAKGYKEVKKDLIIKLPKYSLFELENGRKRMLASAGELQKGNELALPSKYVNFLYLASHYEKLKGSPEDNEQKQLFVEQHKHYLDEIIEQISEFSKRVILADANLDKVLSAYNKHRDKPIREQAENIIHLFTLTNLGAPAAFKYFDTTIDRKRYTSTKEVLDATLIHQSITGLYETRIDLSQLGGDGGPAPGGGGSSGGTLNIEDEYRLHETSKGPDVPLGSTWLSDFPQAWAETGGMGLAVRQAPLIIPLKATSTPVSIKQYPMSQEARLGIKPHIQRLLDQGILVPCQSPWNTPLLPVKKPGTNDYRPVQDLREVNKRVEDIHPTVPNPYNLLSGLPPSHQWYTVLDLKDAFFCLRLHPTSQSLFAFEWRDPEMGISGQLTWTRLPQGFKNSPTLFNEALHRDLADFRIQHPDLILLQYVDDLLLAATSELDCQQGTRALLQTLGDLGYRASAKKAQICQKQVKYLGYLLKEGQRWLTEARKETVMGQPTPKTPRQLREFLGKAGFCRLFIPGFAEMAAPLYPLTKPGTLFEWGPDQQKAYQEIKQALLTAPALGLPDLTKPFELFVDEKQGYAKGVLTQKLGPWRRPVAYLSKKLDPVAAGWPPCLRMVAAIAVLTKDAGKLTMGQPLVILAPHAVEALVKQPPDRWLSNARMTHYQALLLDTDRVQFGPIVALNPATLLPLPEEGLQHDCLDILAEAHGTRPDLTDQPLPDADHTWYTDGSSFLQEGQRKAGAAVTTETEVVWAKALPAGTSAQRAELIALTQALKMAEGKKLNVYTDSRYAFATAHIHGEIYRRRGWLTSEGKEIKNKDEILALLKALFLPKRLSIIHCPGHQKGNRAEARGNRMADQAAREVATRETPETSTLLAGKRTADGSEFEKRTADGSEFESPKKKAKVE

SEQ ID NO: 7425 - protein, 2094 aa, synthetic construct
MPAAKRVKLDGGDKKYSIGLDIGTNSVGWAVITDEYKVPSKKFKVLGNTDRHSIKKNLIGALLFDSGETAEATRLKRTARRRYTRRKNRICYLQEIFSNEMAKVDDSFFHRLEESFLVEEDKKHERHPIFGNIVDEVAYHEKYPTIYHLRKKLVDSTDKADLRLIYLALAHMIKFRGHFLIEGDLNPDNSDVDKLFIQLVQTYNQLFEENPINASGVDAKAILSARLSKSRRLENLIAQLPGEKKNGLFGNLIALSLGLTPNFKSNFDLAEDAKLQLSKDTYDDDLDNLLAQIGDQYADLFLAAKNLSDAILLSDILRVNTEITKAPLSASMIKRYDEHHQDLTLLKALVRQQLPEKYKEIFFDQSKNGYAGYIDGGASQEEFYKFIKPILEKMDGTEELLVKLNREDLLRKQRTFDNGSIPHQIHLGELHAILRRQEDFYPFLKDNREKIEKILTFRIPYYVGPLARGNSRFAWMTRKSEETITPWNFEEVVDKGASAQSFIERMTNFDKNLPNEKVLPKHSLLYEYFTVYNELTKVKYVTEGMRKPAFLSGEQKKAIVDLLFKTNRKVTVKQLKEDYFKKIECFDSVEISGVEDRFNASLGTYHDLLKIIKDKDFLDNEENEDILEDIVLTLTLFEDREMIEERLKTYAHLFDDKVMKQLKRRRYTGWGRLSRKLINGIRDKQSGKTILDFLKSDGFANRNFMQLIHDDSLTFKEDIQKAQVSGQGDSLHEHIANLAGSPAIKKGILQTVKVVDELVKVMGRHKPENIVIEMARENQTTQKGQKNSRERMKRIEEGIKELGSQILKEHPVENTQLQNEKLYLYYLQNGRDMYVDQELDINRLSDYDVDHIVPQSFLKDDSIDNKVLTRSDKARGKSDNVPSEEVVKKMKNYWRQLLNAKLITQRKFDNLTKAERGGLSELDKAGFIKRQLVETRQITKHVAQILDSRMNTKYDENDKLIREVKVITLKSKLVSDFRKDFQFYKVREINNYHHAHDAYLNAVVGTALIKKYPKLESEFVYGDYKVYDVRKMIAKSEQEIGKATAKYFFYSNIMNFFKTEITLANGEIRKRPLIETNGETGEIVWDKGRDFATVRKVLSMPQVNIVKKTEVQTGGFSKESILPKRNSDKLIARKKDWDPKKYGGFDSPTVAYSVLVVAKVEKGKSKKLKSVKELLGITIMERSSFEKNPIDFLEAKGYKEVKKDLIIKLPKYSLFELENGRKRMLASAGELQKGNELALPSKYVNFLYLASHYEKLKGSPEDNEQKQLFVEQHKHYLDEIIEQISEFSKRVILADANLDKVLSAYNKHRDKPIREQAENIIHLFTLTNLGAPAAFKYFDTTIDRKRYTSTKEVLDATLIHQSITGLYETRIDLSQLGGDGGPAPGGGGSSGGTLNIEDEHRLHETSKEPDVSLGSTWLSDFPQAWAETGGMGLAVRQAPLIIPLKATSTPVSIKQYPMSQEARLGIKPHIQRLLDQGILVPCQSPWNTPLLPVKKPGTNDYRPVQDLREVNKRVEDIHPTVPNPYNLLSGLPPSHQWYTVLDLKDAFFCLRLHPTSQPLFAFEWRDPEMGISGQLTWTRLPQGFKNSPTLFNEALHRDLADFRIQHPDLILLQYVDDLLLAATSELDCQQGTRALLQTLGNLGYRASAKKAQICQKQVKYLGYLLKEGQRWLTEARKETVMGQPTPKTPRQLREFLGTAGFCRLWIPGFAEMAAPLYPLTKPGTLFNWGPDQQKAYQEIKQALLTAPALGLPDLTKPFELFVDEKQGYAKGVLTQKLGPWRRPVAYLSKKLDPVAAGWPPCLRMVAAIAVLTKDAGKLTMGQPLVILAPHAVEALVKQPPDRWLSNARMTHYQALLLDTDRVQFGPVVALNPATLLPLPEEGLQHNCLDILAEAHGTRPDLTDQPLPDADHTWYTDGSSLLQEGQRKAGAAVTTETEVIWAKALPAGTSAQRAELIALTQALKMAEGKKLNVYTDSRYAFATAHIHGEIYRRRGWLTSEGKEIKNKDEILALLKALFLPKRLSIIHCPGHQKGHSAEARGNRMADQAARKAAITETPDTSTLLAGKRTADGSEFEKRTADGSEFESPKKKAKVE

SEQ ID NO: 7426 - protein, 2094 aa, synthetic construct; identical to SEQ ID NO: 7425

SEQ ID NO: 7427 - protein, 2114 aa, synthetic construct
MPAAKRVKLDGGDKKYSIGLDIGTNSVGWAVITDEYKVPSKKFKVLGNTDRHSIKKNLIGALLFDSGETAEATRLKRTARRRYTRRKNRICYLQEIFSNEMAKVDDSFFHRLEESFLVEEDKKHERHPIFGNIVDEVAYHEKYPTIYHLRKKLVDSTDKADLRLIYLALAHMIKFRGHFLIEGDLNPDNSDVDKLFIQLVQTYNQLFEENPINASGVDAKAILSARLSKSRRLENLIAQLPGEKKNGLFGNLIALSLGLTPNFKSNFDLAEDAKLQLSKDTYDDDLDNLLAQIGDQYADLFLAAKNLSDAILLSDILRVNTEITKAPLSASMIKRYDEHHQDLTLLKALVRQQLPEKYKEIFFDQSKNGYAGYIDGGASQEEFYKFIKPILEKMDGTEELLVKLNREDLLRKQRTFDNGSIPHQIHLGELHAILRRQEDFYPFLKDNREKIEKILTFRIPYYVGPLARGNSRFAWMTRKSEETITPWNFEEVVDKGASAQSFIERMTNFDKNLPNEKVLPKHSLLYEYFTVYNELTKVKYVTEGMRKPAFLSGEQKKAIVDLLFKTNRKVTVKQLKEDYFKKIECFDSVEISGVEDRFNASLGTYHDLLKIIKDKDFLDNEENEDILEDIVLTLTLFEDREMIEERLKTYAHLFDDKVMKQLKRRRYTGWGRLSRKLINGIRDKQSGKTILDFLKSDGFANRNFMQLIHDDSLTFKEDIQKAQVSGQGDSLHEHIANLAGSPAIKKGILQTVKVVDELVKVMGRHKPENIVIEMARENQTTQKGQKNSRERMKRIEEGIKELGSQILKEHPVENTQLQNEKLYLYYLQNGRDMYVDQELDINRLSDYDVDHIVPQSFLKDDSIDNKVLTRSDKARGKSDNVPSEEVVKKMKNYWRQLLNAKLITQRKFDNLTKAERGGLSELDKAGFIKRQLVETRQITKHVAQILDSRMNTKYDENDKLIREVKVITLKSKLVSDFRKDFQFYKVREINNYHHAHDAYLNAVVGTALIKKYPKLESEFVYGDYKVYDVRKMIAKSEQEIGKATAKYFFYSNIMNFFKTEITLANGEIRKRPLIETNGETGEIVWDKGRDFATVRKVLSMPQVNIVKKTEVQTGGFSKESILPKRNSDKLIARKKDWDPKKYGGFDSPTVAYSVLVVAKVEKGKSKKLKSVKELLGITIMERSSFEKNPIDFLEAKGYKEVKKDLIIKLPKYSLFELENGRKRMLASAGELQKGNELALPSKYVNFLYLASHYEKLKGSPEDNEQKQLFVEQHKHYLDEIIEQISEFSKRVILADANLDKVLSAYNKHRDKPIREQAENIIHLFTLTNLGAPAAFKYFDTTIDRKRYTSTKEVLDATLIHQSITGLYETRIDLSQLGGDGGPAPGGGGSSGGVQEISDSRPMLHIYLNGRRFLGLLDTGADKTCIAGRDWPANWPIHQTESSLQGLGMACGVARSSQPLRWQHEDKSGIIHPFVIPTLPFTLWGRDIMKDIKVRLMTDSPDDSQDLMIGAIESNLFADQISWKSDQPVWLNQWPLKQEKLQALQQLVTEQLQLGHLEESNSPWNTPVFVIKKKSGKWRLLQDLRAVNATMHDMGALQPGLPSPVAVPKGWEIIIIDLQDCFFNIKLHPEDCKRFAFSVPSPNFKRPYQRFQWKVLPQGMKNSPTLCQKFVDKAILTVRDKYQDSYIVHYMDDILLAHPSRSIVDEILTSMIQALNKHGLVVSTEKIQKYDNLKYLGTHIQGDSVSYQKLQIRTDKLRTLNDFQKLLGNINWIRPFLKLTTGELKPLFEILNPDSNPISTRKLTPEACKALQLMNERLSTARVKRLDLSQPWSLCILKTEYTPTACLWQDGVVEWIHLPHISPKVITPYDIFCTQLIIKGRHRSKELFSKDPDYIVVPYTKVQFDLLLQEKEDWPISLLGFLGEVHFHLPKDPLLTFTLQTAIIFPHMTSTTPLEKGIVIFTDGSANGRSVTYIQGREPIIKENTQNTAQQAEIVAVITAFEEVSQPFNLYTDSKYVTGLFPEIETATLSPRTKIYTELKHLQRLIHKRQEKFYIGHIRGHTGLPGPLAQGNAYADSLTRILTAAGKRTADGSEFEKRTADGSEFESPKKKAKVE

SEQ ID NO: 7428 - protein, 2114 aa, synthetic construct
MPAAKRVKLDGGDKKYSIGLDIGTNSVGWAVITDEYKVPSKKFKVLGNTDRHSIKKNLIGALLFDSGETAEATRLKRTARRRYTRRKNRICYLQEIFSNEMAKVDDSFFHRLEESFLVEEDKKHERHPIFGNIVDEVAYHEKYPTIYHLRKKLVDSTDKADLRLIYLALAHMIKFRGHFLIEGDLNPDNSDVDKLFIQLVQTYNQLFEENPINASGVDAKAILSARLSKSRRLENLIAQLPGEKKNGLFGNLIALSLGLTPNFKSNFDLAEDAKLQLSKDTYDDDLDNLLAQIGDQYADLFLAAKNLSDAILLSDILRVNTEITKAPLSASMIKRYDEHHQDLTLLKALVRQQLPEKYKEIFFDQSKNGYAGYIDGGASQEEFYKFIKPILEKMDGTEELLVKLNREDLLRKQRTFDNGSIPHQIHLGELHAILRRQEDFYPFLKDNREKIEKILTFRIPYYVGPLARGNSRFAWMTRKSEETITPWNFEEVVDKGASAQSFIERMTNFDKNLPNEKVLPKHSLLYEYFTVYNELTKVKYVTEGMRKPAFLSGEQKKAIVDLLFKTNRKVTVKQLKEDYFKKIECFDSVEISGVEDRFNASLGTYHDLLKIIKDKDFLDNEENEDILEDIVLTLTLFEDREMIEERLKTYAHLFDDKVMKQLKRRRYTGWGRLSRKLINGIRDKQSGKTILDFLKSDGFANRNFMQLIHDDSLTFKEDIQKAQVSGQGDSLHEHIANLAGSPAIKKGILQTVKVVDELVKVMGRHKPENIVIEMARENQTTQKGQKNSRERMKRIEEGIKELGSQILKEHPVENTQLQNEKLYLYYLQNGRDMYVDQELDINRLSDYDVDHIVPQSFLKDDSIDNKVLTRSDKARGKSDNVPSEEVVKKMKNYWRQLLNAKLITQRKFDNLTKAERGGLSELDKAGFIKRQLVETRQITKHVAQILDSRMNTKYDENDKLIREVKVITLKSKLVSDFRKDFQFYKVREINNYHHAHDAYLNAVVGTALIKKYPKLESEFVYGDYKVYDVRKMIAKSEQEIGKATAKYFFYSNIMNFFKTEITLANGEIRKRPLIETNGETGEIVWDKGRDFATVRKVLSMPQVNIVKKTEVQTGGFSKESILPKRNSDKLIARKKDWDPKKYGGFDSPTVAYSVLVVAKVEKGKSKKLKSVKELLGITIMERSSFEKNPIDFLEAKGYKEVKKDLIIKLPKYSLFELENGRKRMLASAGELQKGNELALPSKYVNFLYLASHYEKLKGSPEDNEQKQLFVEQHKHYLDEIIEQISEFSKRVILADANLDKVLSAYNKHRDKPIREQAENIIHLFTLTNLGAPAAFKYFDTTIDRKRYTSTKEVLDATLIHQSITGLYETRIDLSQLGGDGGPAPGGGGSSGGVQEISDSRPMLHIYLNGRRFLGLLDTGADKTCIAGRDWPANWPIHQTESSLQGLGMACGVARSSQPLRWQHEDKSGIIHPFVIPTLPFTLWGRDIMKDIKVRLMTDSPDDSQDLMIGAIESNLFADQISWKSDQPVWLNQWPLKQEKLQALQQLVTEQLQLGHLEESNSPWNTPVFVIKKKSGKWRLLQDLRAVNATMHDMGALQPGLPSPVAVPKGWEIIIIDLQDCFFNIKLHPEDCKRFAFSVPSPNFKRPYQRFQWKVLPQGMKNSPTLCQKFVDKAILTVRDKYQDSYIVHYMDDILLAHPSRSIVDEILTSMIQALNKHGLVVSTEKIQKYDNLKYLGTHIQGDSVSYQKLQIRTDKLRTLNDFQKLLGNINWIRPFLKLTTGELKPLFEILNGDSNPISTRKLTPEACKALQLMNERLSTARVKRLDLSQPWSLCILKTEYTPTACLWQDGVVEWIHLPHISPKVITPYDIFCTQLIIKGRHRSKELFSKDPDYIVVPYTKVQFDLLLQEKEDWPISLLGFLGEVHFHLPKDPLLTFTLQTAIIFPHMTSTTPLEKGIVIFTDGSANGRSVTYIQGREPIIKENTQNTAQQAEIVAVITAFEEVSQPFNLYTDSKYVTGLFPEIETATLSPRTKIYTELKHLQRLIHKRQEKFYIGHIRGHTGLPGPLAQGNAYADSLTRILTAAGKRTADGSEFEKRTADGSEFESPKKKAKVE

SEQ ID NO: 7429 - protein, 2086 aa, synthetic construct
MPAAKRVKLDGGDKKYSIGLDIGTNSVGWAVITDEYKVPSKKFKVLGNTDRHSIKKNLIGALLFDSGETAEATRLKRTARRRYTRRKNRICYLQEIFSNEMAKVDDSFFHRLEESFLVEEDKKHERHPIFGNIVDEVAYHEKYPTIYHLRKKLVDSTDKADLRLIYLALAHMIKFRGHFLIEGDLNPDNSDVDKLFIQLVQTYNQLFEENPINASGVDAKAILSARLSKSRRLENLIAQLPGEKKNGLFGNLIALSLGLTPNFKSNFDLAEDAKLQLSKDTYDDDLDNLLAQIGDQYADLFLAAKNLSDAILLSDILRVNTEITKAPLSASMIKRYDEHHQDLTLLKALVRQQLPEKYKEIFFDQSKNGYAGYIDGGASQEEFYKFIKPILEKMDGTEELLVKLNREDLLRKQRTFDNGSIPHQIHLGELHAILRRQEDFYPFLKDNREKIEKILTFRIPYYVGPLARGNSRFAWMTRKSEETITPWNFEEVVDKGASAQSFIERMTNFDKNLPNEKVLPKHSLLYEYFTVYNELTKVKYVTEGMRKPAFLSGEQKKAIVDLLFKTNRKVTVKQLKEDYFKKIECFDSVEISGVEDRFNASLGTYHDLLKIIKDKDFLDNEENEDILEDIVLTLTLFEDREMIEERLKTYAHLFDDKVMKQLKRRRYTGWGRLSRKLINGIRDKQSGKTILDFLKSDGFANRNFMQLIHDDSLTFKEDIQKAQVSGQGDSLHEHIANLAGSPAIKKGILQTVKVVDELVKVMGRHKPENIVIEMARENQTTQKGQKNSRERMKRIEEGIKELGSQILKEHPVENTQLQNEKLYLYYLQNGRDMYVDQELDINRLSDYDVDHIVPQSFLKDDSIDNKVLTRSDKARGKSDNVPSEEVVKKMKNYWRQLLNAKLITQRKFDNLTKAERGGLSELDKAGFIKRQLVETRQITKHVAQILDSRMNTKYDENDKLIREVKVITLKSKLVSDFRKDFQFYKVREINNYHHAHDAYLNAVVGTALIKKYPKLESEFVYGDYKVYDVRKMIAKSEQEIGKATAKYFFYSNIMNFFKTEITLANGEIRKRPLIETNGETGEIVWDKGRDFATVRKVLSMPQVNIVKKTEVQTGGFSKESILPKRNSDKLIARKKDWDPKKYGGFDSPTVAYSVLVVAKVEKGKSKKLKSVKELLGITIMERSSFEKNPIDFLEAKGYKEVKKDLIIKLPKYSLFELENGRKRMLASAGELQKGNELALPSKYVNFLYLASHYEKLKGSPEDNEQKQLFVEQHKHYLDEIIEQISEFSKRVILADANLDKVLSAYNKHRDKPIREQAENIIHLFTLTNLGAPAAFKYFDTTIDRKRYTSTKEVLDATLIHQSITGLYETRIDLSQLGGDGGPAPGGGGSSGGLDDEYRLYSPLVKPDQNIQFWLEQFPQAWAETAGMGLAKQVPPQVIQLKASATPVSVRQYPLSKEAQEGIRPHVQRLIQQGILVPVQSPWNTPLLPVRKPGTNDYRPVQDLREVNKRVQDIHPTVPNPYNLLCALPPQRSWYTVLDLKDAFFCLRLHPTSQPLFAFEWRDPGTGRTGQLTWTRLPQGFKNSPTIFNEALHRDLANFRIQHPQVTLLQYVDDLLLAGATKQDCLEGTKALLLELSDLGYRASAKKAQICRREVTYLGYSLRDGQRWLTEARKKTVVQIPAPTTAKQVREFLGKAGFCRLFIPGFATLAAPLYPLTKPKGEFSWAPEHQKAFDAIKKALLSAPALALPDVTKPFTLYVDERKGVARGVLTQTLGPWRRPVAYLSKKLDPVASGWPVCLKAIAAVAILVKDADKLTLGQNITVIAPHALENIVRQPPDRWMTNARMTHYQSLLLTERVTFAPPAALNPATLLPEETDEPVTHDCHQLLIEETGVRKDLTDIPLTGEVLTWFTDGSSYVVEGKRMAGAAVVDGTRTIWASSLPEGTSAQKAELMALTQALRLAEGKSINIYTDSRYAFATAHVHGAIYKQRGWLTSAGREIKNKEEILSLLEALHLPKRLAIIHCPGHQKAKDPISRGNQMADRVAKQAAQGVNLLPAGKRTADGSEFEKRTADGSEFESPKKKAKVE

SEQ ID NO: 7430 - protein, 2086 aa, synthetic construct; identical to SEQ ID NO: 7429

SEQ ID NO: 7431 - protein, 2085 aa, synthetic construct
MPAAKRVKLDGGDKKYSIGLDIGTNSVGWAVITDEYKVPSKKFKVLGNTDRHSIKKNLIGALLFDSGETAEATRLKRTARRRYTRRKNRICYLQEIFSNEMAKVDDSFFHRLEESFLVEEDKKHERHPIFGNIVDEVAYHEKYPTIYHLRKKLVDSTDKADLRLIYLALAHMIKFRGHFLIEGDLNPDNSDVDKLFIQLVQTYNQLFEENPINASGVDAKAILSARLSKSRRLENLIAQLPGEKKNGLFGNLIALSLGLTPNFKSNFDLAEDAKLQLSKDTYDDDLDNLLAQIGDQYADLFLAAKNLSDAILLSDILRVNTEITKAPLSASMIKRYDEHHQDLTLLKALVRQQLPEKYKEIFFDQSKNGYAGYIDGGASQEEFYKFIKPILEKMDGTEELLVKLNREDLLRKQRTFDNGSIPHQIHLGELHAILRRQEDFYPFLKDNREKIEKILTFRIPYYVGPLARGNSRFAWMTRKSEETITPWNFEEVVDKGASAQSFIERMTNFDKNLPNEKVLPKHSLLYEYFTVYNELTKVKYVTEGMRKPAFLSGEQKKAIVDLLFKTNRKVTVKQLKEDYFKKIECFDSVEISGVEDRFNASLGTYHDLLKIIKDKDFLDNEENEDILEDIVLTLTLFEDREMIEERLKTYAHLFDDKVMKQLKRRRYTGWGRLSRKLINGIRDKQSGKTILDFLKSDGFANRNFMQLIHDDSLTFKEDIQKAQVSGQGDSLHEHIANLAGSPAIKKGILQTVKVVDELVKVMGRHKPENIVIEMARENQTTQKGQKNSRERMKRIEEGIKELGSQILKEHPVENTQLQNEKLYLYYLQNGRDMYVDQELDINRLSDYDVDHIVPQSFLKDDSIDNKVLTRSDKARGKSDNVPSEEVVKKMKNYWRQLLNAKLITQRKFDNLTKAERGGLSELDKAGFIKRQLVETRQITKHVAQILDSRMNTKYDENDKLIREVKVITLKSKLVSDFRKDFQFYKVREINNYHHAHDAYLNAVVGTALIKKYPKLESEFVYGDYKVYDVRKMIAKSEQEIGKATAKYFFYSNIMNFFKTEITLANGEIRKRPLIETNGETGEIVWDKGRDFATVRKVLSMPQVNIVKKTEVQTGGFSKESILPKRNSDKLIARKKDWDPKKYGGFDSPTVAYSVLVVAKVEKGKSKKLKSVKELLGITIMERSSFEKNPIDFLEAKGYKEVKKDLIIKLPKYSLFELENGRKRMLASAGELQKGNELALPSKYVNFLYLASHYEKLKGSPEDNEQKQLFVEQHKHYLDEIIEQISEFSKRVILADANLDKVLSAYNKHRDKPIREQAENIIHLFTLTNLGAPAAFKYFDTTIDRKRYTSTKEVLDATLIHQSITGLYETRIDLSQLGGDGGPAPGGGGSSGGIPWLMKKPLQLTTLVPLQEYEERLLKQTMLTGSYKEKLQSLFLKYDALWQHWENQVGHRRIKPHHIATGTVNPRPQKQYPINPKAKASIQTVINDLLKQGVLIQQNSIMNTPVYPVPKPDGKWRMVLDYREVNKTIPLIAAQNQHSAGILSSIFRGKYKTTLDLSNGFWAHSITPESYWLTAFTWLGQQYCWTRLPQGFLNSPALFTADVVDLLKEVPNVQVYVDDIYISHDDPREHLEQLEKVFSLLLNAGYVVSLKKSEIAQHEVEFLGFNITKEGRGLTETFKQKLLNITPPRDLKQLQSILGLLNFARNFIPNFSELVKPLYNIIATANGKYITWTTDNSQQLQNIISMLNSAENLEERNPEVRLIMKVNTSPSAGYIRFYNEFAKRPIMYLNYVYTKAEVKFTNTEKLLTTIHKGLIKALDLGMGQEILVYSPIVSMTKIQKTPLPERKALPIRWITWMSYLEDPRIQFHYDKTLPELQQVPTVTDDIIAKIKHPSEFSMVFYTDGSAIKHPNVNKSHNAGMGIAQVQFKPEFTVINTWSIPLGDHTAQLAEVAAVEFACKKALKIDGPVLIVTDSFYVAESVNKELPYWQSNGFFNNKKKPLKHVSKWKSIADCIQLKPDIIIIHEKGHQPTASTFHTEGNNLADKLATQGSYVVNAGKRTADGSEFEKRTADGSEFESPKKKAKVE

SEQ ID NO: 7432 - protein, 2085 aa, synthetic construct
MPAAKRVKLDGGDKKYSIGLDIGTNSVGWAVITDEYKVPSKKFKVLGNTDRHSIKKNLIGALLFDSGETAEATRLKRTARRRYTRRKNRICYLQEIFSNEMAKVDDSFFHRLEESFLVEEDKKHERHPIFGNIVDEVAYHEKYPTIYHLRKKLVDSTDKADLRLIYLALAHMIKFRGHFLIEGDLNPDNSDVDKLFIQLVQTYNQLFEENPINASGVDAKAILSARLSKSRRLENLIAQLPGEKKNGLFGNLIALSLGLTPNFKSNFDLAEDAKLQLSKDTYDDDLDNLLAQIGDQYADLFLAAKNLSDAILLSDILRVNTEITKAPLSASMIKRYDEHHQDLTLLKALVRQQLPEKYKEIFFDQSKNGYAGYIDGGASQEEFYKFIKPILEKMDGTEELLVKLNREDLLRKQRTFDNGSIPHQIHLGELHAILRRQEDFYPFLKDNREKIEKILTFRIPYYVGPLARGNSRFAWMTRKSEETITPWNFEEVVDKGASAQSFIERMTNFDKNLPNEKVLPKHSLLYEYFTVYNELTKVKYVTEGMRKPAFLSGEQKKAIVDLLFKTNRKVTVKQLKEDYFKKIECFDSVEISGVEDRFNASLGTYHDLLKIIKDKDFLDNEENEDILEDIVLTLTLFEDREMIEERLKTYAHLFDDKVMKQLKRRRYTGWGRLSRKLINGIRDKQSGKTILDFLKSDGFANRNFMQLIHDDSLTFKEDIQKAQVSGQGDSLHEHIANLAGSPAIKKGILQTVKVVDELVKVMGRHKPENIVIEMARENQTTQKGQKNSRERMKRIEEGIKELGSQILKEHPVENTQLQNEKLYLYYLQNGRDMYVDQELDINRLSDYDVDHIVPQSFLKDDSIDNKVLTRSDKARGKSDNVPSEEVVKKMKNYWRQLLNAKLITQRKFDNLTKAERGGLSELDKAGFIKRQLVETRQITKHVAQILDSRMNTKYDENDKLIREVKVITLKSKLVSDFRKDFQFYKVREINNYHHAHDAYLNAVVGTALIKKYPKLESEFVYGDYKVYDVRKMIAKSEQEIGKATAKYFFYSNIMNFFKTEITLANGEIRKRPLIETNGETGEIVWDKGRDFATVRKVLSMPQVNIVKKTEVQTGGFSKESILPKRNSDKLIARKKDWDPKKYGGFDSPTVAYSVLVVAKVEKGKSKKLKSVKELLGITIMERSSFEKNPIDFLEAKGYKEVKKDLIIKLPKYSLFELENGRKRMLASAGELQKGNELALPSKYVNFLYLASHYEKLKGSPEDNEQKQLFVEQHKHYLDEIIEQISEFSKRVILADANLDKVLSAYNKHRDKPIREQAENIIHLFTLTNLGAPAAFKYFDTTIDRKRYTSTKEVLDATLIHQSITGLYETRIDLSQLGGDGGPAPGGGGSSGGIPWLMKKPLQLTTLVPLQEYEERLLKQTMLTGSYKEKLQSLFLKYDALWQHWENQVGHRRIKPHHIATGTVNPRPQKQYPINPKAKASIQTVINDLLKQGVLIQQNSIMNTPVYPVPKPDGKWRMVLDYREVNKTIPLIAAQNQHSAGILSSIFRGKYKTTLDLSNGFWAHSITPESYWLTAFTWLGQQYCWTRLPQGFLNSPALFNADVVDLLKEVPNVQVYVDDIYISHDDPREHLEQLEKVFSLLLNAGYVVSLKKSEIAQHEVEFLGFNITKEGRGLTETFKQKLLNITPPRDLKQLQSILGLLNFARNFIPNFSELVKPLYNIIATAPGKYITWTTDNSQQLQNIISMLNSAENLEERNPEVRLIMKVNTSPSAGYIRFYNEFAKRPIMYLNYVYTKAEVKFTNTEKLLTTIHKGLIKALDLGMGQEILVYSPIVSMTKIQKTPLPERKALPIRWITWMSYLEDPRIQFHYDKTLPELQQVPTVTDDIIAKIKHPSEFSMVFYTDGSAIKHPNVNKSHNAGMGIAQVQFKPEFTVINTWSIPLGDHTAQLAEVAAVEFACKKALKIDGPVLIVTDSFYVAESVNKELPYWQSNGFFNNKKKPLKHVSKWKSIADCIQLKPDIIIIHEKGHQPTASTFHTEGNNLADKLATQGSYVVNAGKRTADGSEFEKRTADGSEFESPKKKAKVE

SEQ ID NO: 7433 - protein, 2085 aa, synthetic construct
MPAAKRVKLDGGDKKYSIGLDIGTNSVGWAVITDEYKVPSKKFKVLGNTDRHSIKKNLIGALLFDSGETAEATRLKRTARRRYTRRKNRICYLQEIFSNEMAKVDDSFFHRLEESFLVEEDKKHERHPIFGNIVDEVAYHEKYPTIYHLRKKLVDSTDKADLRLIYLALAHMIKFRGHFLIEGDLNPDNSDVDKLFIQLVQTYNQLFEENPINASGVDAKAILSARLSKSRRLENLIAQLPGEKKNGLFGNLIALSLGLTPNFKSNFDLAEDAKLQLSKDTYDDDLDNLLAQIGDQYADLFLAAKNLSDAILLSDILRVNTEITKAPLSASMIKRYDEHHQDLTLLKALVRQQLPEKYKEIFFDQSKNGYAGYIDGGASQEEFYKFIKPILEKMDGTEELLVKLNREDLLRKQRTFDNGSIPHQIHLGELHAILRRQEDFYPFLKDNREKIEKILTFRIPYYVGPLARGNSRFAWMTRKSEETITPWNFEEVVDKGASAQSFIERMTNFDKNLPNEKVLPKHSLLYEYFTVYNELTKVKYVTEGMRKPAFLSGEQKKAIVDLLFKTNRKVTVKQLKEDYFKKIECFDSVEISGVEDRFNASLGTYHDLLKIIKDKDFLDNEENEDILEDIVLTLTLFEDREMIEERLKTYAHLFDDKVMKQLKRRRYTGWGRLSRKLINGIRDKQSGKTILDFLKSDGFANRNFMQLIHDDSLTFKEDIQKAQVSGQGDSLHEHIANLAGSPAIKKGILQTVKVVDELVKVMGRHKPENIVIEMARENQTTQKGQKNSRERMKRIEEGIKELGSQILKEHPVENTQLQNEKLYLYYLQNGRDMYVDQELDINRLSDYDVDHIVPQSFLKDDSIDNKVLTRSDKARGKSDNVPSEEVVKKMKNYWRQLLNAKLITQRKFDNLTKAERGGLSELDKAGFIKRQLVETRQITKHVAQILDSRMNTKYDENDKLIREVKVITLKSKLVSDFRKDFQFYKVREINNYHHAHDAYLNAVVGTALIKKYPKLESEFVYGDYKVYDVRKMIAKSEQEIGKATAKYFFYSNIMNFFKTEITLANGEIRKRPLIETNGETGEIVWDKGRDFATVRKVLSMPQVNIVKKTEVQTGGFSKESILPKRNSDKLIARKKDWDPKKYGGFDSPTVAYSVLVVAKVEKGKSKKLKSVKELLGITIMERSSFEKNPIDFLEAKGYKEVKKDLIIKLPKYSLFELENGRKRMLASAGELQKGNELALPSKYVNFLYLASHYEKLKGSPEDNEQKQLFVEQHKHYLDEIIEQISEFSKRVILADANLDKVLSAYNKHRDKPIREQAENIIHLFTLTNLGAPAAFKYFDTTIDRKRYTSTKEVLDATLIHQSITGLYETRIDLSQLGGDGGPAPGGGGSSGGIPWLMKKPLQLTTLVPLQEYEERLLKQTMLTGSYKEKLQSLFLKYDALWQHWENQVGHRRIKPHHIATGTVNPRPQKQYPINPKAKASIQTVINDLLKQGVLIQQNSIMNTPVYPVPKPDGKWRMVLDYREVNKTIPLIAAQNQHSAGILSSIFRGKYKTTLDLSNGFWAHSITPESYWLTAFTWLGQQYCWTRLPQGFLNSPALFNADVVDLLKEVPNVQVYVDDIYISHDDPREHLEQLEKVFSLLLNAGYVVSLKKSEIAQHEVEFLGFNITKEGRGLTETFKQKLLNITPPRDLKQLQSILGKLNFARNFIPNFSELVKPLYNIIATAPGKYITWTTDNSQQLQNIISMLNSAENLEERNPEVRLIMKVNTSPSAGYIRFYNEFAKRPIMYLNYVYTKAEVKFTNTEKLLTTIHKGLIKALDLGMGQEILVYSPIVSMTKIQKTPLPERKALPIRWITWMSYLEDPRIQFHYDKTLPELQQVPTVTDDIIAKIKHPSEFSMVFYTDGSAIKHPNVNKSHNAGMGIAQVQFKPEFTVINTWSIPLGDHTAQLAEVAAVEFACKKALKIDGPVLIVTDSFYVAESVNKELPYWQSNGFFNNKKKPLKHVSKWKSIADCIQLKPDIIIIHEKGHQPTASTFHTEGNNLADKLATQGSYVVNAGKRTADGSEFEKRTADGSEFESPKKKAKVE

SEQ ID NO: 7434 - protein, 2174 aa, synthetic construct
MPAAKRVKLDGGDKKYSIGLDIGTNSVGWAVITDEYKVPSKKFKVLGNTDRHSIKKNLIGALLFDSGETAEATRLKRTARRRYTRRKNRICYLQEIFSNEMAKVDDSFFHRLEESFLVEEDKKHERHPIFGNIVDEVAYHEKYPTIYHLRKKLVDSTDKADLRLIYLALAHMIKFRGHFLIEGDLNPDNSDVDKLFIQLVQTYNQLFEENPINASGVDAKAILSARLSKSRRLENLIAQLPGEKKNGLFGNLIALSLGLTPNFKSNFDLAEDAKLQLSKDTYDDDLDNLLAQIGDQYADLFLAAKNLSDAILLSDILRVNTEITKAPLSASMIKRYDEHHQDLTLLKALVRQQLPEKYKEIFFDQSKNGYAGYIDGGASQEEFYKFIKPILEKMDGTEELLVKLNREDLLRKQRTFDNGSIPHQIHLGELHAILRRQEDFYPFLKDNREKIEKILTFRIPYYVGPLARGNSRFAWMTRKSEETITPWNFEEVVDKGASAQSFIERMTNFDKNLPNEKVLPKHSLLYEYFTVYNELTKVKYVTEGMRKPAFLSGEQKKAIVDLLFKTNRKVTVKQLKEDYFKKIECFDSVEISGVEDRFNASLGTYHDLLKIIKDKDFLDNEENEDILEDIVLTLTLFEDREMIEERLKTYAHLFDDKVMKQLKRRRYTGWGRLSRKLINGIRDKQSGKTILDFLKSDGFANRNFMQLIHDDSLTFKEDIQKAQVSGQGDSLHEHIANLAGSPAIKKGILQTVKVVDELVKVMGRHKPENIVIEMARENQTTQKGQKNSRERMKRIEEGIKELGSQILKEHPVENTQLQNEKLYLYYLQNGRDMYVDQELDINRLSDYDVDHIVPQSFLKDDSIDNKVLTRSDKARGKSDNVPSEEVVKKMKNYWRQLLNAKLITQRKFDNLTKAERGGLSELDKAGFIKRQLVETRQITKHVAQILDSRMNTKYDENDKLIREVKVITLKSKLVSDFRKDFQFYKVREINNYHHAHDAYLNAVVGTALIKKYPKLESEFVYGDYKVYDVRKMIAKSEQEIGKATAKYFFYSNIMNFFKTEITLANGEIRKRPLIETNGETGEIVWDKGRDFATVRKVLSMPQVNIVKKTEVQTGGFSKESILPKRNSDKLIARKKDWDPKKYGGFDSPTVAYSVLVVAKVEKGKSKKLKSVKELLGITIMERSSFEKNPIDFLEAKGYKEVKKDLIIKLPKYSLFELENGRKRMLASAGELQKGNELALPSKYVNFLYLASHYEKLKGSPEDNEQKQLFVEQHKHYLDEIIEQISEFSKRVILADANLDKVLSAYNKHRDKPIREQAENIIHLFTLTNLGAPAAFKYFDTTIDRKRYTSTKEVLDATLIHQSITGLYETRIDLSQLGGDGGPAPGGGGSSGGMDPLQLLQPLEAEIKGTKLKAHWNSGATITCVPQAFLEEEVPIKNIWIKTIHGEKEQPVYYLTFKIQGRKVEAEVISSPYDYILVSPSDIPWLMKKPLQLTTLVPLQEYEERLLKQTMLTGSYKEKLQSLFLKYDALWQHWENQVGHRRIKPHHIATGTVNPRPQKQYPINPKAKASIQTVINDLLKQGVLIQQNSIMNTPVYPVPKPDGKWRMVLDYREVNKTIPLIAAQNQHSAGILSSIFRGKYKTTLDLSNGFWAHSITPESYWLTAFTWLGQQYCWTRLPQGFLNSPALFNADVVDLLKEVPNVQVYVDDIYISHDDPREHLEQLEKVFSLLLNAGYVVSLKKSEIAQHEVEFLGFNITKEGRGLTETFKQKLLNITPPRDLKQLQSILGKLNFARNFIPNFSELVKPLYNIIATAPGKYITWTTDNSQQLQNIISMLNSAENLEERNPEVRLIMKVNTSPSAGYIRFYNEFAKRPIMYLNYVYTKAEVKFTNTEKLLTTIHKGLIKALDLGMGQEILVYSPIVSMTKIQKTPLPERKALPIRWITWMSYLEDPRIQFHYDKTLPELQQVPTVTDDIIAKIKHPSEFSMVFYTDGSAIKHPNVNKSHNAGMGIAQVQFKPEFTVINTWSIPLGDHTAQLAEVAAVEFACKKALKIDGPVLIVTDSFYVAESVNKELPYWQSNGFFNNKKKPLKHVSKWKSIADCIQLKPDIIIIHEKGHQPTASTFHTEGNNLADKLATQGSYVVNAGKRTADGSEFEKRTADGSEFESPKKKAKVE

SEQ ID NO: 7435 - protein, 2092 aa, synthetic construct
MPAAKRVKLDGGDKKYSIGLDIGTNSVGWAVITDEYKVPSKKFKVLGNTDRHSIKKNLIGALLFDSGETAEATRLKRTARRRYTRRKNRICYLQEIFSNEMAKVDDSFFHRLEESFLVEEDKKHERHPIFGNIVDEVAYHEKYPTIYHLRKKLVDSTDKADLRLIYLALAHMIKFRGHFLIEGDLNPDNSDVDKLFIQLVQTYNQLFEENPINASGVDAKAILSARLSKSRRLENLIAQLPGEKKNGLFGNLIALSLGLTPNFKSNFDLAEDAKLQLSKDTYDDDLDNLLAQIGDQYADLFLAAKNLSDAILLSDILRVNTEITKAPLSASMIKRYDEHHQDLTLLKALVRQQLPEKYKEIFFDQSKNGYAGYIDGGASQEEFYKFIKPILEKMDGTEELLVKLNREDLLRKQRTFDNGSIPHQIHLGELHAILRRQEDFYPFLKDNREKIEKILTFRIPYYVGPLARGNSRFAWMTRKSEETITPWNFEEVVDKGASAQSFIERMTNFDKNLPNEKVLPKHSLLYEYFTVYNELTKVKYVTEGMRKPAFLSGEQKKAIVDLLFKTNRKVTVKQLKEDYFKKIECFDSVEISGVEDRFNASLGTYHDLLKIIKDKDFLDNEENEDILEDIVLTLTLFEDREMIEERLKTYAHLFDDKVMKQLKRRRYTGWGRLSRKLINGIRDKQSGKTILDFLKSDGFANRNFMQLIHDDSLTFKEDIQKAQVSGQGDSLHEHIANLAGSPAIKKGILQTVKVVDELVKVMGRHKPENIVIEMARENQTTQKGQKNSRERMKRIEEGIKELGSQILKEHPVENTQLQNEKLYLYYLQNGRDMYVDQELDINRLSDYDVDHIVPQSFLKDDSIDNKVLTRSDKARGKSDNVPSEEVVKKMKNYWRQLLNAKLITQRKFDNLTKAERGGLSELDKAGFIKRQLVETRQITKHVAQILDSRMNTKYDENDKLIREVKVITLKSKLVSDFRKDFQFYKVREINNYHHAHDAYLNAVVGTALIKKYPKLESEFVYGDYKVYDVRKMIAKSEQEIGKATAKYFFYSNIMNFFKTEITLANGEIRKRPLIETNGETGEIVWDKGRDFATVRKVLSMPQVNIVKKTEVQTGGFSKESILPKRNSDKLIARKKDWDPKKYGGFDSPTVAYSVLVVAKVEKGKSKKLKSVKELLGITIMERSSFEKNPIDFLEAKGYKEVKKDLIIKLPKYSLFELENGRKRMLASAGELQKGNELALPSKYVNFLYLASHYEKLKGSPEDNEQKQLFVEQHKHYLDEIIEQISEFSKRVILADANLDKVLSAYNKHRDKPIREQAENIIHLFTLTNLGAPAAFKYFDTTIDRKRYTSTKEVLDATLIHQSITGLYETRIDLSQLGGDGGPAPGGGGSSGGVLNLEEEYRLHEKPVPSSIDPSWLQLFPTVWAERAGMGLANQVPPVVVELRSGASPVAVRQYPMSKEAREGIRPHIQRFLDLGVLVPCQSPWNTPLLPVKKPGTNDYRPVQDLREINKRVQDIHPTVPNPYNLLSSLPPSHTWYSVLDLKDAFFCLKLHPNSQPLFAFEWRDPEKGNTGQLTWTRLPQGFKNSPTLFNEALHRDLAPFRALNPQVVLLQYVDDLLVAAPTYRDCKEGTQKLLQELSKLGYRVSAKKAQLCQKEVTYLGYLLKEGKRWLTPARKATVMKIPPPTTPRQVREFLGTAGFCRLWIPGFASLAAPLYPLTKPSIPFIWTEEHQKAFDRIKEALLSAPALALPDLTKPFTLYVDERAGVARGVLTQTLGPWRRPVAYLSKKLDPVASGWPTCLKAVAAVALLLKDADKLTLGQNVTVIASHSLESIVRQPPDRWMTNARMTHYQSLLLNERVSFAPPAVLNPATLLPVESEATPVHRCSEILAEETGTRRDLKDQPLPGVPAWYTDGSSFIAEGKRRAGAAIVDGKRTVWASSLPEGTSAQKAELVALTQALRLAEGKDINIYTDSRYAFATAHIHGAIYKQRGWLTSAGKDIKNKEEILALLEAIHLPKRVAIIHCPGHQKGNDPVATGNRRADEAAKQAALSTRVLAETTKPAGKRTADGSEFEKRTADGSEFESPKKKAKVE

SEQ ID NO: 7436 - protein, 2094 aa, synthetic construct
MPAAKRVKLDGGDKKYSIGLDIGTNSVGWAVITDEYKVPSKKFKVLGNTDRHSIKKNLIGALLFDSGETAEATRLKRTARRRYTRRKNRICYLQEIFSNEMAKVDDSFFHRLEESFLVEEDKKHERHPIFGNIVDEVAYHEKYPTIYHLRKKLVDSTDKADLRLIYLALAHMIKFRGHFLIEGDLNPDNSDVDKLFIQLVQTYNQLFEENPINASGVDAKAILSARLSKSRRLENLIAQLPGEKKNGLFGNLIALSLGLTPNFKSNFDLAEDAKLQLSKDTYDDDLDNLLAQIGDQYADLFLAAKNLSDAILLSDILRVNTEITKAPLSASMIKRYDEHHQDLTLLKALVRQQLPEKYKEIFFDQSKNGYAGYIDGGASQEEFYKFIKPILEKMDGTEELLVKLNREDLLRKQRTFDNGSIPHQIHLGELHAILRRQEDFYPFLKDNREKIEKILTFRIPYYVGPLARGNSRFAWMTRKSEETITPWNFEEVVDKGASAQSFIERMTNFDKNLPNEKVLPKHSLLYEYFTVYNELTKVKYVTEGMRKPAFLSGEQKKAIVDLLFKTNRKVTVKQLKEDYFKKIECFDSVEISGVEDRFNASLGTYHDLLKIIKDKDFLDNEENEDILEDIVLTLTLFEDREMIEERLKTYAHLFDDKVMKQLKRRRYTGWGRLSRKLINGIRDKQSGKTILDFLKSDGFANRNFMQLIHDDSLTFKEDIQKAQVSGQGDSLHEHIANLAGSPAIKKGILQTVKVVDELVKVMGRHKPENIVIEMARENQTTQKGQKNSRERMKRIEEGIKELGSQILKEHPVENTQLQNEKLYLYYLQNGRDMYVDQELDINRLSDYDVDHIVPQSFLKDDSIDNKVLTRSDKARGKSDNVPSEEVVKKMKNYWRQLLNAKLITQRKFDNLTKAERGGLSELDKAGFIKRQLVETRQITKHVAQILDSRMNTKYDENDKLIREVKVITLKSKLVSDFRKDFQFYKVREINNYHHAHDAYLNAVVGTALIKKYPKLESEFVYGDYKVYDVRKMIAKSEQEIGKATAKYFFYSNIMNFFKTEITLANGEIRKRPLIETNGETGEIVWDKGRDFATVRKVLSMPQVNIVKKTEVQTGGFSKESILPKRNSDKLIARKKDWDPKKYGGFDSPTVAYSVLVVAKVEKGKSKKLKSVKELLGITIMERSSFEKNPIDFLEAKGYKEVKKDLIIKLPKYSLFELENGRKRMLASAGELQKGNELALPSKYVNFLYLASHYEKLKGSPEDNEQKQLFVEQHKHYLDEIIEQISEFSKRVILADANLDKVLSAYNKHRDKPIREQAENIIHLFTLTNLGAPAAFKYFDTTIDRKRYTSTKEVLDATLIHQSITGLYETRIDLSQLGGDGGPAPGGGGSSGGTLNIEDEYRLHETSKEPDVPLGSTWLSDFPQAWAETGGMGLAVRQAPLIIPLKATSTPVSIKQYPMSQEARLGIKPHIQRLLDQGILVPCQSPWNTPLLPVKKPGTNDYRPVQDLREVNKRVEDIHPTVPNPYNLLSGLPPSHQWYTVLDLKDAFFCLRLHPTSQPLFAFEWRDPEMGISGQLTWTRLPQGFKNSPTLFNEALHRDLADFRIQHPDLILLQYVDDLLLAATSEQDCQRGTRALLQTLGNLGYRASAKKAQICQKQVKYLGYLLKEGQRWLTEARKETVMGQPTPKTPRQLREFLGTAGFCRLWIPGFAEMAAPLYPLTKPGTLFNWGPDQQKAYQEIKQALLTAPALGLPDLTKPFELFVDEKQGYAKGVLTQKLGPWRRPVAYLSKKLDPVAAGWPPCLRMVAAIAVLTKDAGKLTMGQPLVILAPHAVEALVKQPPDRWLSNARMTHYQAMLLDTDRVQFGPVVALNPATLLPLPEKEAPHDCLEILAETHGTRPDLTDQPIPDADYTWYTDGSSFLQEGQRRAGAAVTTETEVIWARALPAGTSAQRAELIALTQALKMAEGKKLNVYTDSRYAFATAHVHGEIYRRRGWLTSEGREIKNKNEILALLKALFLPKRLSIIHCPGHQKGNSAEARGNRMADQAAREAAMKAVLETSTLLAGKRTADGSEFEKRTADGSEFESPKKKAKVE

SEQ ID NO: 7437 - protein, 2094 aa, synthetic construct
MPAAKRVKLDGGDKKYSIGLDIGTNSVGWAVITDEYKVPSKKFKVLGNTDRHSIKKNLIGALLFDSGETAEATRLKRTARRRYTRRKNRICYLQEIFSNEMAKVDDSFFHRLEESFLVEEDKKHERHPIFGNIVDEVAYHEKYPTIYHLRKKLVDSTDKADLRLIYLALAHMIKFRGHFLIEGDLNPDNSDVDKLFIQLVQTYNQLFEENPINASGVDAKAILSARLSKSRRLENLIAQLPGEKKNGLFGNLIALSLGLTPNFKSNFDLAEDAKLQLSKDTYDDDLDNLLAQIGDQYADLFLAAKNLSDAILLSDILRVNTEITKAPLSASMIKRYDEHHQDLTLLKALVRQQLPEKYKEIFFDQSKNGYAGYIDGGASQEEFYKFIKPILEKMDGTEELLVKLNREDLLRKQRTFDNGSIPHQIHLGELHAILRRQEDFYPFLKDNREKIEKILTFRIPYYVGPLARGNSRFAWMTRKSEETITPWNFEEVVDKGASAQSFIERMTNFDKNLPNEKVLPKHSLLYEYFTVYNELTKVKYVTEGMRKPAFLSGEQKKAIVDLLFKTNRKVTVKQLKEDYFKKIECFDSVEISGVEDRFNASLGTYHDLLKIIKDKDFLDNEENEDILEDIVLTLTLFEDREMIEERLKTYAHLFDDKVMKQLKRRRYTGWGRLSRKLINGIRDKQSGKTILDFLKSDGFANRNFMQLIHDDSLTFKEDIQKAQVSGQGDSLHEHIANLAGSPAIKKGILQTVKVVDELVKVMGRHKPENIVIEMARENQTTQKGQKNSRERMKRIEEGIKELGSQILKEHPVENTQLQNEKLYLYYLQNGRDMYVDQELDINRLSDYDVDHIVPQSFLKDDSIDNKVLTRSDKARGKSDNVPSEEVVKKMKNYWRQLLNAKLITQRKFDNLTKAERGGLSELDKAGFIKRQLVETRQITKHVAQILDSRMNTKYDENDKLIREVKVITLKSKLVSDFRKDFQFYKVREINNYHHAHDAYLNAVVGTALIKKYPKLESEFVYGDYKVYDVRKMIAKSEQEIGKATAKYFFYSNIMNFFKTEITLANGEIRKRPLIETNGETGEIVWDKGRDFATVRKVLSMPQVNIVKKTEVQTGGFSKESILPKRNSDKLIARKKDWDPKKYGGFDSPTVAYSVLVVAKVEKGKSKKLKSVKELLGITIMERSSFEKNPIDFLEAKGYKEVKKDLIIKLPKYSLFELENGRKRMLASAGELQKGNELALPSKYVNFLYLASHYEKLKGSPEDNEQKQLFVEQHKHYLDEIIEQISEFSKRVILADANLDKVLSAYNKHRDKPIREQAENIIHLFTLTNLGAPAAFKYFDTTIDRKRYTSTKEVLDATLIHQSITGLYETRIDLSQLGGDGGPAPGGGGSSGGTLNIEDEYRLHETSKEPDVPLGSTWLSDFPQAWAETGGMGLAVRQAPLIIPLKATSTPVSIKQYPMSQEARLGIKPHIQRLLDQGILVPCQSPWNTPLLPVKKPGTNDYRPVQDLREVNKRVEDIHPTVPNPYNLLSGLPPSHQWYTVLDLKDAFFCLRLHPTSQPLFAFEWRDPEMGISGQLTWTRLPQGFKNSPTLFNEALHRDLADFRIQHPDLILLQYVDDLLLAATSEQDCQRGTRALLQTLGNLGYRASAKKAQICQKQVKYLGYLLKEGQRWLTEARKETVMGQPTPKTPRQLREFLGKAGFCRLFIPGFAEMAAPLYPLTKPGTLFNWGPDQQKAYQEIKQALLTAPALGLPDLTKPFELFVDEKQGYAKGVLTQKLGPWRRPVAYLSKKLDPVAAGWPPCLRMVAAIAVLTKDAGKLTMGQPLVILAPHAVEALVKQPPDRWLSNARMTHYQAMLLDTDRVQFGPVVALNPATLLPLPEKEAPHDCLEILAETHGTRPDLTDQPIPDADYTWYTDGSSFLQEGQRRAGAAVTTETEVIWARALPAGTSAQRAELIALTQALKMAEGKKLNVYTDSRYAFATAHVHGEIYRRRGWLTSEGREIKNKNEILALLKALFLPKRLSIIHCPGHQKGNSAEARGNRMADQAAREAAMKAVLETSTLLAGKRTADGSEFEKRTADGSEFESPKKKAKVE

SEQ ID NO: 7438 - protein, 2096 aa, synthetic construct
MPAAKRVKLDGGDKKYSIGLDIGTNSVGWAVITDEYKVPSKKFKVLGNTDRHSIKKNLIGALLFDSGETAEATRLKRTARRRYTRRKNRICYLQEIFSNEMAKVDDSFFHRLEESFLVEEDKKHERHPIFGNIVDEVAYHEKYPTIYHLRKKLVDSTDKADLRLIYLALAHMIKFRGHFLIEGDLNPDNSDVDKLFIQLVQTYNQLFEENPINASGVDAKAILSARLSKSRRLENLIAQLPGEKKNGLFGNLIALSLGLTPNFKSNFDLAEDAKLQLSKDTYDDDLDNLLAQIGDQYADLFLAAKNLSDAILLSDILRVNTEITKAPLSASMIKRYDEHHQDLTLLKALVRQQLPEKYKEIFFDQSKNGYAGYIDGGASQEEFYKFIKPILEKMDGTEELLVKLNREDLLRKQRTFDNGSIPHQIHLGELHAILRRQEDFYPFLKDNREKIEKILTFRIPYYVGPLARGNSRFAWMTRKSEETITPWNFEEVVDKGASAQSFIERMTNFDKNLPNEKVLPKHSLLYEYFTVYNELTKVKYVTEGMRKPAFLSGEQKKAIVDLLFKTNRKVTVKQLKEDYFKKIECFDSVEISGVEDRFNASLGTYHDLLKIIKDKDFLDNEENEDILEDIVLTLTLFEDREMIEERLKTYAHLFDDKVMKQLKRRRYTGWGRLSRKLINGIRDKQSGKTILDFLKSDGFANRNFMQLIHDDSLTFKEDIQKAQVSGQGDSLHEHIANLAGSPAIKKGILQTVKVVDELVKVMGRHKPENIVIEMARENQTTQKGQKNSRERMKRIEEGIKELGSQILKEHPVENTQLQNEKLYLYYLQNGRDMYVDQELDINRLSDYDVDHIVPQSFLKDDSIDNKVLTRSDKARGKSDNVPSEEVVKKMKNYWRQLLNAKLITQRKFDNLTKAERGGLSELDKAGFIKRQLVETRQITKHVAQILDSRMNTKYDENDKLIREVKVITLKSKLVSDFRKDFQFYKVREINNYHHAHDAYLNAVVGTALIKKYPKLESEFVYGDYKVYDVRKMIAKSEQEIGKATAKYFFYSNIMNFFKTEITLANGEIRKRPLIETNGETGEIVWDKGRDFATVRKVLSMPQVNIVKKTEVQTGGFSKESILPKRNSDKLIARKKDWDPKKYGGFDSPTVAYSVLVVAKVEKGKSKKLKSVKELLGITIMERSSFEKNPIDFLEAKGYKEVKKDLIIKLPKYSLFELENGRKRMLASAGELQKGNELALPSKYVNFLYLASHYEKLKGSPEDNEQKQLFVEQHKHYLDEIIEQISEFSKRVILADANLDKVLSAYNKHRDKPIREQAENIIHLFTLTNLGAPAAFKYFDTTIDRKRYTSTKEVLDATLIHQSITGLYETRIDLSQLGGDGGPAPGSSGGGGGTAPLEEEYRLFLEAPIQNVTLLEQWKREIPKVWAEINPPGLASTQAPIHVQLLSTALPVRVRQYPITLEAKRSLRETIRKFRAAGILRPVHSPWNTPLLPVRKSGTSEYRMVQDLREVNKRVETIHPTVPNPYTLLSLLPPDRIWYSVLDLKDAFFCIPLAPESQLIFAFEWADAEEGESGQLTWTRLPQGFKNSPTLFNEALNRDLQGFRLDHPSVSLLQYVDDLLIAADTQAACLSATRDLLMTLAELGYRVSGKKAQLCQEEVTYLGFKIHKGSRSLSNSRTQAILQIPVPKTKRQVREFLGKIGYCRLFIPGFAELAQPLYAATRPGNDPLVWGEKEEEAFQSLKLALTQPPALALPSLDKPFQLFVEETSGAAKGVLTQALGPWKRPVAYLSKRLDPVAAGWPRCLRAIAAAALLTREASKLTFGQDIEITSSHNLESLLRSPPDKWLTNARITQYQVLLLDPPRVRFKQTAALNPATLLPETDDTLPIHHCLDTLDSLTSTRPDLTDQPLAQAEATLFTDGSSYIRDGKRYAGAAVVTLDSVIWAEPLPIGTSAQKAELIALTKALEWSKDKSVNIYTDSRYAFATLHVHGMIYRERGWLTAGGKAIKNAPEILALLTAVWLPKRVAVMHCKGHQKDDAPTSTGNRRADEVAREVAIRPLSTQATISAGKRTADGSEFEKRTADGSEFESPKKKAKVE

SEQ ID NO: 7439 - protein, 2171 aa, synthetic construct
MPAAKRVKLDGGDKKYSIGLDIGTNSVGWAVITDEYKVPSKKFKVLGNTDRHSIKKNLIGALLFDSGETAEATRLKRTARRRYTRRKNRICYLQEIFSNEMAKVDDSFFHRLEESFLVEEDKKHERHPIFGNIVDEVAYHEKYPTIYHLRKKLVDSTDKADLRLIYLALAHMIKFRGHFLIEGDLNPDNSDVDKLFIQLVQTYNQLFEENPINASGVDAKAILSARLSKSRRLENLIAQLPGEKKNGLFGNLIALSLGLTPNFKSNFDLAEDAKLQLSKDTYDDDLDNLLAQIGDQYADLFLAAKNLSDAILLSDILRVNTEITKAPLSASMIKRYDEHHQDLTLLKALVRQQLPEKYKEIFFDQSKNGYAGYIDGGASQEEFYKFIKPILEKMDGTEELLVKLNREDLLRKQRTFDNGSIPHQIHLGELHAILRRQEDFYPFLKDNREKIEKILTFRIPYYVGPLARGNSRFAWMTRKSEETITPWNFEEVVDKGASAQSFIERMTNFDKNLPNEKVLPKHSLLYEYFTVYNELTKVKYVTEGMRKPAFLSGEQKKAIVDLLFKTNRKVTVKQLKEDYFKKIECFDSVEISGVEDRFNASLGTYHDLLKIIKDKDFLDNEENEDILEDIVLTLTLFEDREMIEERLKTYAHLFDDKVMKQLKRRRYTGWGRLSRKLINGIRDKQSGKTILDFLKSDGFANRNFMQLIHDDSLTFKEDIQKAQVSGQGDSLHEHIANLAGSPAIKKGILQTVKVVDELVKVMGRHKPENIVIEMARENQTTQKGQKNSRERMKRIEEGIKELGSQILKEHPVENTQLQNEKLYLYYLQNGRDMYVDQELDINRLSDYDVDHIVPQSFLKDDSIDNKVLTRSDKARGKSDNVPSEEVVKKMKNYWRQLLNAKLITQRKFDNLTKAERGGLSELDKAGFIKRQLVETRQITKHVAQILDSRMNTKYDENDKLIREVKVITLKSKLVSDFRKDFQFYKVREINNYHHAHDAYLNAVVGTALIKKYPKLESEFVYGDYKVYDVRKMIAKSEQEIGKATAKYFFYSNIMNFFKTEITLANGEIRKRPLIETNGETGEIVWDKGRDFATVRKVLSMPQVNIVKKTEVQTGGFSKESILPKRNSDKLIARKKDWDPKKYGGFDSPTVAYSVLVVAKVEKGKSKKLKSVKELLGITIMERSSFEKNPIDFLEAKGYKEVKKDLIIKLPKYSLFELENGRKRMLASAGELQKGNELALPSKYVNFLYLASHYEKLKGSPEDNEQKQLFVEQHKHYLDEIIEQISEFSKRVILADANLDKVLSAYNKHRDKPIREQAENIIHLFTLTNLGAPAAFKYFDTTIDRKRYTSTKEVLDATLIHQSITGLYETRIDLSQLGGDGGPAPGSSGGGGGMDLLKPLTVERKGVKIKGYWNSQADITCVPKDLLQGEEPVRQQNVTTIHGTQEGDVYYVNLKIDGRRINTEVIGTTLDYAIITPGDVPWILKKPLELTIKLDLEEQQGTLLNNSILSKKGKEELKQLFEKYSALWQSWENQVGHRRIRPHKIATGTVKPTPQKQYHINPKAKPDIQIVINDLLKQGVLIQKESTMNTPVYPVPKPNGRWRMVLDYRAVNKVTPLIAVQNQHSYGILGSLFKGRYKTTIDLSNGFWAHPIVPEDYWITAFTWQGKQYCWTVLPQGFLNSPGLFTGDVVDLLQGIPNVEVYVDDVYISHDSEKEHLEYLDILFNRLKEAGYIISLKKSNIANSIVDFLGFQITNEGRGLTDTFKEKLENITAPTTLKQLQSILGLLNFARNFIPDFTELIAPLYALIPKSTKNYVPWQIEHSTTLETLITKLNGAEYLQGRKGDKTLIMKVNASYTTGYIRYYNEGEKKPISYVSIVFSKTELKFTELEKLLTTVHKGLLKALDLSMGQNIHVYSPIVSMQNIQKTPQTAKKALASRWLSWLSYLEDPRIRFFYDPQMPALKDLPAVDTGKDNKKHPSNFQHIFYTDGSAITSPTKEGHLNAGMGIVYFINKDGNLQKQQEWSISLGNHTAQFAEIAAFEFALKKCLPLGGNILVVTDSNYVAKAYNEELDVWASNGFVNNRKKPLKHISKWKSVADLKRLRPDVVVTHEPGHQKLDSSPHAYGNNLADQLATQASFKVHAGKRTADGSEFEKRTADGSEFESPKKKAKVE

SEQ ID NO: 7440 - protein, 2174 aa, synthetic construct
MPAAKRVKLDGGDKKYSIGLDIGTNSVGWAVITDEYKVPSKKFKVLGNTDRHSIKKNLIGALLFDSGETAEATRLKRTARRRYTRRKNRICYLQEIFSNEMAKVDDSFFHRLEESFLVEEDKKHERHPIFGNIVDEVAYHEKYPTIYHLRKKLVDSTDKADLRLIYLALAHMIKFRGHFLIEGDLNPDNSDVDKLFIQLVQTYNQLFEENPINASGVDAKAILSARLSKSRRLENLIAQLPGEKKNGLFGNLIALSLGLTPNFKSNFDLAEDAKLQLSKDTYDDDLDNLLAQIGDQYADLFLAAKNLSDAILLSDILRVNTEITKAPLSASMIKRYDEHHQDLTLLKALVRQQLPEKYKEIFFDQSKNGYAGYIDGGASQEEFYKFIKPILEKMDGTEELLVKLNREDLLRKQRTFDNGSIPHQIHLGELHAILRRQEDFYPFLKDNREKIEKILTFRIPYYVGPLARGNSRFAWMTRKSEETITPWNFEEVVDKGASAQSFIERMTNFDKNLPNEKVLPKHSLLYEYFTVYNELTKVKYVTEGMRKPAFLSGEQKKAIVDLLFKTNRKVTVKQLKEDYFKKIECFDSVEISGVEDRFNASLGTYHDLLKIIKDKDFLDNEENEDILEDIVLTLTLFEDREMIEERLKTYAHLFDDKVMKQLKRRRYTGWGRLSRKLINGIRDKQSGKTILDFLKSDGFANRNFMQLIHDDSLTFKEDIQKAQVSGQGDSLHEHIANLAGSPAIKKGILQTVKVVDELVKVMGRHKPENIVIEMARENQTTQKGQKNSRERMKRIEEGIKELGSQILKEHPVENTQLQNEKLYLYYLQNGRDMYVDQELDINRLSDYDVDHIVPQSFLKDDSIDNKVLTRSDKARGKSDNVPSEEVVKKMKNYWRQLLNAKLITQRKFDNLTKAERGGLSELDKAGFIKRQLVETRQITKHVAQILDSRMNTKYDENDKLIREVKVITLKSKLVSDFRKDFQFYKVREINNYHHAHDAYLNAVVGTALIKKYPKLESEFVYGDYKVYDVRKMIAKSEQEIGKATAKYFFYSNIMNFFKTEITLANGEIRKRPLIETNGETGEIVWDKGRDFATVRKVLSMPQVNIVKKTEVQTGGFSKESILPKRNSDKLIARKKDWDPKKYGGFDSPTVAYSVLVVAKVEKGKSKKLKSVKELLGITIMERSSFEKNPIDFLEAKGYKEVKKDLIIKLPKYSLFELENGRKRMLASAGELQKGNELALPSKYVNFLYLASHYEKLKGSPEDNEQKQLFVEQHKHYLDEIIEQISEFSKRVILADANLDKVLSAYNKHRDKPIREQAENIIHLFTLTNLGAPAAFKYFDTTIDRKRYTSTKEVLDATLIHQSITGLYETRIDLSQLGGDGGPAPGSSGGGGGMNPLQLLQPLPAEIKGTKLLAHWNSGATITCIPESFLEDEQPIKKTLIKTIHGEKQQNVYYVTFKVKGRKVEAEVIASPYEYILLSPTDVPWLTQQPLQLTILVPLQEYQEKILSKTALPEDQKQQLKTLFVKYDNLWQHWENQVGHRKIRPHNIATGDYPPRPQKQYPINPKAKPSIQIVIDDLLKQGVLTPQNSTMNTPVYPVPKPDGRWRMVLDYREVNKTIPLTAAQNQHSAGILATIVRQKYKTTLDLANGFWAHPITPESYWLTAFTWQGKQYCWTRLPQGFLNSPALFNADVVDLLKEIPNVQVYVDDIYLSHDDPKEHVQQLEKVFQILLQAGYVVSLKKSEIGQKTVEFLGFNITKEGRGLTDTFKTKLLNITPPKDLKQLQSILGKLNFARNFIPNFAELVQPLYNLIAPAKGKYIEWSEENTKQLNMVIEALNTASNLEERLPEQRLVIKVNTSPSAGYVRYYNETGKKPIMYLNYVFSKAELKFSMLEKLLTTMHKALIKAMDLAMGQEILVYSPIVSMTKIQKTPLPERKALPIRWITWMTYLEDPRIQFHYDKTLPELKHIPDVYTSSQSPVKHPSQYEGVFYTDGSAIKSPDPTKSNNAGMGIVHATYKPEYQVLNQWSIPLGNHTAQMAEIAAVEFACKKALKIPGPVLVITDSFYVAESANKELPYWKSNGFVNNKKKPLKHISKWKSIAECLSMKPDITIQHEKGISLQIPVFILKGNALADKLATQGSYVVNAGKRTADGSEFEKRTADGSEFESPKKKAKVE

SEQ ID NO: 7441 - protein, 2125 aa, synthetic construct
MPAAKRVKLDGGDKKYSIGLDIGTNSVGWAVITDEYKVPSKKFKVLGNTDRHSIKKNLIGALLFDSGETAEATRLKRTARRRYTRRKNRICYLQEIFSNEMAKVDDSFFHRLEESFLVEEDKKHERHPIFGNIVDEVAYHEKYPTIYHLRKKLVDSTDKADLRLIYLALAHMIKFRGHFLIEGDLNPDNSDVDKLFIQLVQTYNQLFEENPINASGVDAKAILSARLSKSRRLENLIAQLPGEKKNGLFGNLIALSLGLTPNFKSNFDLAEDAKLQLSKDTYDDDLDNLLAQIGDQYADLFLAAKNLSDAILLSDILRVNTEITKAPLSASMIKRYDEHHQDLTLLKALVRQQLPEKYKEIFFDQSKNGYAGYIDGGASQEEFYKFIKPILEKMDGTEELLVKLNREDLLRKQRTFDNGSIPHQIHLGELHAILRRQEDFYPFLKDNREKIEKILTFRIPYYVGPLARGNSRFAWMTRKSEETITPWNFEEVVDKGASAQSFIERMTNFDKNLPNEKVLPKHSLLYEYFTVYNELTKVKYVTEGMRKPAFLSGEQKKAIVDLLFKTNRKVTVKQLKEDYFKKIECFDSVEISGVEDRFNASLGTYHDLLKIIKDKDFLDNEENEDILEDIVLTLTLFEDREMIEERLKTYAHLFDDKVMKQLKRRRYTGWGRLSRKLINGIRDKQSGKTILDFLKSDGFANRNFMQLIHDDSLTFKEDIQKAQVSGQGDSLHEHIANLAGSPAIKKGILQTVKVVDELVKVMGRHKPENIVIEMARENQTTQKGQKNSRERMKRIEEGIKELGSQILKEHPVENTQLQNEKLYLYYLQNGRDMYVDQELDINRLSDYDVDHIVPQSFLKDDSIDNKVLTRSDKARGKSDNVPSEEVVKKMKNYWRQLLNAKLITQRKFDNLTKAERGGLSELDKAGFIKRQLVETRQITKHVAQILDSRMNTKYDENDKLIREVKVITLKSKLVSDFRKDFQFYKVREINNYHHAHDAYLNAVVGTALIKKYPKLESEFVYGDYKVYDVRKMIAKSEQEIGKATAKYFFYSNIMNFFKTEITLANGEIRKRPLIETNGETGEIVWDKGRDFATVRKVLSMPQVNIVKKTEVQTGGFSKESILPKRNSDKLIARKKDWDPKKYGGFDSPTVAYSVLVVAKVEKGKSKKLKSVKELLGITIMERSSFEKNPIDFLEAKGYKEVKKDLIIKLPKYSLFELENGRKRMLASAGELQKGNELALPSKYVNFLYLASHYEKLKGSPEDNEQKQLFVEQHKHYLDEIIEQISEFSKRVILADANLDKVLSAYNKHRDKPIREQAENIIHLFTLTNLGAPAAFKYFDTTIDRKRYTSTKEVLDATLIHQSITGLYETRIDLSQLGGDGGPAPGSSGGGGGLLGRDLLTKLKAQIQFSTEGPQVTWEDRPAMCLVLNLEEEYRLHEKPVPPSIDPSWLQLFPMVWAEKAGMGLANQVPPVVVELKSDASPVAVRQYPMSKEAREGIRPHIQRFLDLGILVPCQSPWNTPLLPVKKPGTNDYRPVQDLREVNKRVQDIHPTVPNPYNLLSSLPPSHTWYSVLDLKDAFFCLKLHPNSQPLFAFEWRDPEKGNTGQLTWTRLPQGFKNSPTLFNEALHRDLASFRALNPQVVMLQYVDDLLVAAPTYRDCKEGTRRLLQELSKLGYRVSAKKAQLCREEVTYLGYLLKGGKRWLTPARKATVMKIPTPTTPRQVREFLGTAGFCRLWIPGFASLAAPLYPLTRPKVPFTWTEAHQEAFGRIKEALLSAPALALPDLTKPFALYVDEKEGVARGVLTQTLGPWRRPVAYLSKKLDPVASGWPTCLKAIAAVALLLKDADKLTLGQNVLVIAPHNLESIVRQPPDRWMTNARMTHYQSLLLNERVSFAPPAILNPATLLPVESDDTPIHICSEILAEETGTRPDLRDQPLPGVPAWYTDGSSFIMDGRRQAGAAIVDNKRTVWASNLPEGTSAQKAELIALTQALRLAEGKSINIYTDSRYAFATAHVHGAIYKQRGWLTSAGKDIKNKEEILALLEAIHLPKRVAIIHCPGHQRGTDPVATGNRKADEAAKQAAQSTRILTETTKNAGKRTADGSEFEKRTADGSEFESPKKKAKVE

SEQ ID NO: 7442 - protein, 2094 aa, synthetic construct
MPAAKRVKLDGGDKKYSIGLDIGTNSVGWAVITDEYKVPSKKFKVLGNTDRHSIKKNLIGALLFDSGETAEATRLKRTARRRYTRRKNRICYLQEIFSNEMAKVDDSFFHRLEESFLVEEDKKHERHPIFGNIVDEVAYHEKYPTIYHLRKKLVDSTDKADLRLIYLALAHMIKFRGHFLIEGDLNPDNSDVDKLFIQLVQTYNQLFEENPINASGVDAKAILSARLSKSRRLENLIAQLPGEKKNGLFGNLIALSLGLTPNFKSNFDLAEDAKLQLSKDTYDDDLDNLLAQIGDQYADLFLAAKNLSDAILLSDILRVNTEITKAPLSASMIKRYDEHHQDLTLLKALVRQQLPEKYKEIFFDQSKNGYAGYIDGGASQEEFYKFIKPILEKMDGTEELLVKLNREDLLRKQRTFDNGSIPHQIHLGELHAILRRQEDFYPFLKDNREKIEKILTFRIPYYVGPLARGNSRFAWMTRKSEETITPWNFEEVVDKGASAQSFIERMTNFDKNLPNEKVLPKHSLLYEYFTVYNELTKVKYVTEGMRKPAFLSGEQKKAIVDLLFKTNRKVTVKQLKEDYFKKIECFDSVEISGVEDRFNASLGTYHDLLKIIKDKDFLDNEENEDILEDIVLTLTLFEDREMIEERLKTYAHLFDDKVMKQLKRRRYTGWGRLSRKLINGIRDKQSGKTILDFLKSDGFANRNFMQLIHDDSLTFKEDIQKAQVSGQGDSLHEHIANLAGSPAIKKGILQTVKVVDELVKVMGRHKPENIVIEMARENQTTQKGQKNSRERMKRIEEGIKELGSQILKEHPVENTQLQNEKLYLYYLQNGRDMYVDQELDINRLSDYDVDHIVPQSFLKDDSIDNKVLTRSDKARGKSDNVPSEEVVKKMKNYWRQLLNAKLITQRKFDNLTKAERGGLSELDKAGFIKRQLVETRQITKHVAQILDSRMNTKYDENDKLIREVKVITLKSKLVSDFRKDFQFYKVREINNYHHAHDAYLNAVVGTALIKKYPKLESEFVYGDYKVYDVRKMIAKSEQEIGKATAKYFFYSNIMNFFKTEITLANGEIRKRPLIETNGETGEIVWDKGRDFATVRKVLSMPQVNIVKKTEVQTGGFSKESILPKRNSDKLIARKKDWDPKKYGGFDSPTVAYSVLVVAKVEKGKSKKLKSVKELLGITIMERSSFEKNPIDFLEAKGYKEVKKDLIIKLPKYSLFELENGRKRMLASAGELQKGNELALPSKYVNFLYLASHYEKLKGSPEDNEQKQLFVEQHKHYLDEIIEQISEFSKRVILADANLDKVLSAYNKHRDKPIREQAENIIHLFTLTNLGAPAAFKYFDTTIDRKRYTSTKEVLDATLIHQSITGLYETRIDLSQLGGDGGPAPGSSGGGGGTLNLEDEYRLYETSAEPEVSPGSTWLSDFPQAWAETGGMGLAVRQAPLIIPLKATSTPVSIKQYPMSQEAKLGIKPHIQRLLDQGILVPCQSPWNTPLLPVKKPGTNDYRPVQDLREVNKRVEDIHPTVPNPYNLLSGLPPSHRWYTVLDLKDAFFCLRLHPTSQPLFAFEWRDPGMGISGQLTWTRLPQGFKNSPTLFNEALHRDLADFRIQHPDLILLQYVDDILLAATSELDCQQGTRALLLTLGNLGYRASAKKAQLCQKQVKYLGYLLKEGQRWLTEARKETVMGQPTPKTPRQLREFLGTAGFCRLWIPGFAEMAAPLYPLTKPGTLFNWGPDQQKAYQEIKQALLTAPALGLPDLTKPFELFVDEKQGYAKGVLTQKLGPWRRPVAYLSKKLDPVAAGWPPCLRMVAAIAVLRKDAGKLTMGQPLVILAPHAVEALVKQPPDRWLSNARMTHYQAMLLDTDRVQFGPVVALNPATLLPLPEEGAPHDCLEILAETHGTRPDLTDQPIPDADHTWYTDGSSFLQEGQRKAGAAVTTETEVIWARALPAGTSAQRAELIALTQALKMAEGKRLNVYTDSRYAFATAHIHGEIYRRRGWLTSEGREIKNKSEILALLKALFLPKRLSIIHCLGHQKGDSAEARGNRLADQAAREAAIKTPPDTSTLLAGKRTADGSEFEKRTADGSEFESPKKKAKVE

SEQ ID NO: 7443 - protein, 2094 aa, synthetic construct; identical to SEQ ID NO: 4533

SEQ ID NO: 7444 - protein, 2094 aa, synthetic construct
MPAAKRVKLDGGDKKYSIGLDIGTNSVGWAVITDEYKVPSKKFKVLGNTDRHSIKKNLIGALLFDSGETAEATRLKRTARRRYTRRKNRICYLQEIFSNEMAKVDDSFFHRLEESFLVEEDKKHERHPIFGNIVDEVAYHEKYPTIYHLRKKLVDSTDKADLRLIYLALAHMIKFRGHFLIEGDLNPDNSDVDKLFIQLVQTYNQLFEENPINASGVDAKAILSARLSKSRRLENLIAQLPGEKKNGLFGNLIALSLGLTPNFKSNFDLAEDAKLQLSKDTYDDDLDNLLAQIGDQYADLFLAAKNLSDAILLSDILRVNTEITKAPLSASMIKRYDEHHQDLTLLKALVRQQLPEKYKEIFFDQSKNGYAGYIDGGASQEEFYKFIKPILEKMDGTEELLVKLNREDLLRKQRTFDNGSIPHQIHLGELHAILRRQEDFYPFLKDNREKIEKILTFRIPYYVGPLARGNSRFAWMTRKSEETITPWNFEEVVDKGASAQSFIERMTNFDKNLPNEKVLPKHSLLYEYFTVYNELTKVKYVTEGMRKPAFLSGEQKKAIVDLLFKTNRKVTVKQLKEDYFKKIECFDSVEISGVEDRFNASLGTYHDLLKIIKDKDFLDNEENEDILEDIVLTLTLFEDREMIEERLKTYAHLFDDKVMKQLKRRRYTGWGRLSRKLINGIRDKQSGKTILDFLKSDGFANRNFMQLIHDDSLTFKEDIQKAQVSGQGDSLHEHIANLAGSPAIKKGILQTVKVVDELVKVMGRHKPENIVIEMARENQTTQKGQKNSRERMKRIEEGIKELGSQILKEHPVENTQLQNEKLYLYYLQNGRDMYVDQELDINRLSDYDVDHIVPQSFLKDDSIDNKVLTRSDKARGKSDNVPSEEVVKKMKNYWRQLLNAKLITQRKFDNLTKAERGGLSELDKAGFIKRQLVETRQITKHVAQILDSRMNTKYDENDKLIREVKVITLKSKLVSDFRKDFQFYKVREINNYHHAHDAYLNAVVGTALIKKYPKLESEFVYGDYKVYDVRKMIAKSEQEIGKATAKYFFYSNIMNFFKTEITLANGEIRKRPLIETNGETGEIVWDKGRDFATVRKVLSMPQVNIVKKTEVQTGGFSKESILPKRNSDKLIARKKDWDPKKYGGFDSPTVAYSVLVVAKVEKGKSKKLKSVKELLGITIMERSSFEKNPIDFLEAKGYKEVKKDLIIKLPKYSLFELENGRKRMLASAGELQKGNELALPSKYVNFLYLASHYEKLKGSPEDNEQKQLFVEQHKHYLDEIIEQISEFSKRVILADANLDKVLSAYNKHRDKPIREQAENIIHLFTLTNLGAPAAFKYFDTTIDRKRYTSTKEVLDATLIHQSITGLYETRIDLSQLGGDGGPAPGSSGGGGGTLNIEDEHRLHETSKEPDVSLGSTWLSDFPQAWAETGGMGLAVRQAPLIIPLKATSTPVSIKQYPMSQEARLGIKPHIQRLLDQGILVPCQSPWNTPLLPVKKPGTNDYRPVQDLREVNKRVEDIHPTVPNPYNLLSGLPPSHQWYTVLDLKDAFFCLRLHPTSQPLFAFEWRDPEMGISGQLTWTRLPQGFKNSPTLFNEALHRDLADFRIQHPDLILLQYVDDLLLAATSELDCQQGTRALLQTLGNLGYRASAKKAQICQKQVKYLGYLLKEGQRWLTEARKETVMGQPTPKTPRQLREFLGTAGFCRLWIPGFAEMAAPLYPLTKPGTLFNWGPDQQKAYQEIKQALLTAPALGLPDLTKPFELFVDEKQGYAKGVLTQKLGPWRRPVAYLSKKLDPVAAGWPPCLRMVAAIAVLTKDAGKLTMGQPLVILAPHAVEALVKQPPDRWLSNARMTHYQALLLDTDRVQFGPVVALNPATLLPLPEEGLQHNCLDILAEAHGTRPDLTDQPLPDADHTWYTDGSSLLQEGQRKAGAAVTTETEVIWAKALPAGTSAQRAELIALTQALKMAEGKKLNVYTDSRYAFATAHIHGEIYRRRGWLTSEGKEIKNKDEILALLKALFLPKRLSIIHCPGHQKGHSAEARGNRMADQAARKAAITETPDTSTLLAGKRTADGSEFEKRTADGSEFESPKKKAKVE

SEQ ID NO: 7445 - protein, 2094 aa, synthetic construct; identical to SEQ ID NO: 7444

SEQ ID NO: 7446 - protein, 2174 aa, synthetic construct
MPAAKRVKLDGGDKKYSIGLDIGTNSVGWAVITDEYKVPSKKFKVLGNTDRHSIKKNLIGALLFDSGETAEATRLKRTARRRYTRRKNRICYLQEIFSNEMAKVDDSFFHRLEESFLVEEDKKHERHPIFGNIVDEVAYHEKYPTIYHLRKKLVDSTDKADLRLIYLALAHMIKFRGHFLIEGDLNPDNSDVDKLFIQLVQTYNQLFEENPINASGVDAKAILSARLSKSRRLENLIAQLPGEKKNGLFGNLIALSLGLTPNFKSNFDLAEDAKLQLSKDTYDDDLDNLLAQIGDQYADLFLAAKNLSDAILLSDILRVNTEITKAPLSASMIKRYDEHHQDLTLLKALVRQQLPEKYKEIFFDQSKNGYAGYIDGGASQEEFYKFIKPILEKMDGTEELLVKLNREDLLRKQRTFDNGSIPHQIHLGELHAILRRQEDFYPFLKDNREKIEKILTFRIPYYVGPLARGNSRFAWMTRKSEETITPWNFEEVVDKGASAQSFIERMTNFDKNLPNEKVLPKHSLLYEYFTVYNELTKVKYVTEGMRKPAFLSGEQKKAIVDLLFKTNRKVTVKQLKEDYFKKIECFDSVEISGVEDRFNASLGTYHDLLKIIKDKDFLDNEENEDILEDIVLTLTLFEDREMIEERLKTYAHLFDDKVMKQLKRRRYTGWGRLSRKLINGIRDKQSGKTILDFLKSDGFANRNFMQLIHDDSLTFKEDIQKAQVSGQGDSLHEHIANLAGSPAIKKGILQTVKVVDELVKVMGRHKPENIVIEMARENQTTQKGQKNSRERMKRIEEGIKELGSQILKEHPVENTQLQNEKLYLYYLQNGRDMYVDQELDINRLSDYDVDHIVPQSFLKDDSIDNKVLTRSDKARGKSDNVPSEEVVKKMKNYWRQLLNAKLITQRKFDNLTKAERGGLSELDKAGFIKRQLVETRQITKHVAQILDSRMNTKYDENDKLIREVKVITLKSKLVSDFRKDFQFYKVREINNYHHAHDAYLNAVVGTALIKKYPKLESEFVYGDYKVYDVRKMIAKSEQEIGKATAKYFFYSNIMNFFKTEITLANGEIRKRPLIETNGETGEIVWDKGRDFATVRKVLSMPQVNIVKKTEVQTGGFSKESILPKRNSDKLIARKKDWDPKKYGGFDSPTVAYSVLVVAKVEKGKSKKLKSVKELLGITIMERSSFEKNPIDFLEAKGYKEVKKDLIIKLPKYSLFELENGRKRMLASAGELQKGNELALPSKYVNFLYLASHYEKLKGSPEDNEQKQLFVEQHKHYLDEIIEQISEFSKRVILADANLDKVLSAYNKHRDKPIREQAENIIHLFTLTNLGAPAAFKYFDTTIDRKRYTSTKEVLDATLIHQSITGLYETRIDLSQLGGDGGPAPGSSGGGGGMDPLQLLQPLEAEIKGTKLKAHWNSGATITCVPQAFLEEEVPIKNIWIKTIHGEKEQPVYYLTFKIQGRKVEAEVISSPYDYILVSPSDIPWLMKKPLQLTTLVPLQEYEERLLKQTMLTGSYKEKLQSLFLKYDALWQHWENQVGHRRIKPHHIATGTVNPRPQKQYPINPKAKASIQTVINDLLKQGVLIQQNSIMNTPVYPVPKPDGKWRMVLDYREVNKTIPLIAAQNQHSAGILSSIFRGKYKTTLDLSNGFWAHSITPESYWLTAFTWLGQQYCWTRLPQGFLNSPALFNADVVDLLKEVPNVQVYVDDIYISHDDPREHLEQLEKVFSLLLNAGYVVSLKKSEIAQHEVEFLGFNITKEGRGLTETFKQKLLNITPPRDLKQLQSILGKLNFARNFIPNFSELVKPLYNIIATAPGKYITWTTDNSQQLQNIISMLNSAENLEERNPEVRLIMKVNTSPSAGYIRFYNEFAKRPIMYLNYVYTKAEVKFTNTEKLLTTIHKGLIKALDLGMGQEILVYSPIVSMTKIQKTPLPERKALPIRWITWMSYLEDPRIQFHYDKTLPELQQVPTVTDDIIAKIKHPSEFSMVFYTDGSAIKHPNVNKSHNAGMGIAQVQFKPEFTVINTWSIPLGDHTAQLAEVAAVEFACKKALKIDGPVLIVTDSFYVAESVNKELPYWQSNGFFNNKKKPLKHVSKWKSIADCIQLKPDIIIIHEKGHQPTASTFHTEGNNLADKLATQGSYVVNAGKRTADGSEFEKRTADGSEFESPKKKAKVE

SEQ ID NO: 7447 - protein, 2094 aa, synthetic construct
MPAAKRVKLDGGDKKYSIGLDIGTNSVGWAVITDEYKVPSKKFKVLGNTDRHSIKKNLIGALLFDSGETAEATRLKRTARRRYTRRKNRICYLQEIFSNEMAKVDDSFFHRLEESFLVEEDKKHERHPIFGNIVDEVAYHEKYPTIYHLRKKLVDSTDKADLRLIYLALAHMIKFRGHFLIEGDLNPDNSDVDKLFIQLVQTYNQLFEENPINASGVDAKAILSARLSKSRRLENLIAQLPGEKKNGLFGNLIALSLGLTPNFKSNFDLAEDAKLQLSKDTYDDDLDNLLAQIGDQYADLFLAAKNLSDAILLSDILRVNTEITKAPLSASMIKRYDEHHQDLTLLKALVRQQLPEKYKEIFFDQSKNGYAGYIDGGASQEEFYKFIKPILEKMDGTEELLVKLNREDLLRKQRTFDNGSIPHQIHLGELHAILRRQEDFYPFLKDNREKIEKILTFRIPYYVGPLARGNSRFAWMTRKSEETITPWNFEEVVDKGASAQSFIERMTNFDKNLPNEKVLPKHSLLYEYFTVYNELTKVKYVTEGMRKPAFLSGEQKKAIVDLLFKTNRKVTVKQLKEDYFKKIECFDSVEISGVEDRFNASLGTYHDLLKIIKDKDFLDNEENEDILEDIVLTLTLFEDREMIEERLKTYAHLFDDKVMKQLKRRRYTGWGRLSRKLINGIRDKQSGKTILDFLKSDGFANRNFMQLIHDDSLTFKEDIQKAQVSGQGDSLHEHIANLAGSPAIKKGILQTVKVVDELVKVMGRHKPENIVIEMARENQTTQKGQKNSRERMKRIEEGIKELGSQILKEHPVENTQLQNEKLYLYYLQNGRDMYVDQELDINRLSDYDVDHIVPQSFLKDDSIDNKVLTRSDKARGKSDNVPSEEVVKKMKNYWRQLLNAKLITQRKFDNLTKAERGGLSELDKAGFIKRQLVETRQITKHVAQILDSRMNTKYDENDKLIREVKVITLKSKLVSDFRKDFQFYKVREINNYHHAHDAYLNAVVGTALIKKYPKLESEFVYGDYKVYDVRKMIAKSEQEIGKATAKYFFYSNIMNFFKTEITLANGEIRKRPLIETNGETGEIVWDKGRDFATVRKVLSMPQVNIVKKTEVQTGGFSKESILPKRNSDKLIARKKDWDPKKYGGFDSPTVAYSVLVVAKVEKGKSKKLKSVKELLGITIMERSSFEKNPIDFLEAKGYKEVKKDLIIKLPKYSLFELENGRKRMLASAGELQKGNELALPSKYVNFLYLASHYEKLKGSPEDNEQKQLFVEQHKHYLDEIIEQISEFSKRVILADANLDKVLSAYNKHRDKPIREQAENIIHLFTLTNLGAPAAFKYFDTTIDRKRYTSTKEVLDATLIHQSITGLYETRIDLSQLGGDGGPAPGSSGGGGGTLNIEDEYRLHETSKEPDVPLGSTWLSDFPQAWAETGGMGLAVRQAPLIIPLKATSTPVSIKQYPMSQEARLGIKPHIQRLLDQGILVPCQSPWNTPLLPVKKPGTNDYRPVQDLREVNKRVEDIHPTVPNPYNLLSGLPPSHQWYTVLDLKDAFFCLRLHPTSQPLFAFEWRDPEMGISGQLTWTRLPQGFKNSPTLFNEALHRDLADFRIQHPDLILLQYVDDLLLAATSEQDCQRGTRALLQTLGNLGYRASAKKAQICQKQVKYLGYLLKEGQRWLTEARKETVMGQPTPKTPRQLREFLGTAGFCRLWIPGFAEMAAPLYPLTKPGTLFNWGPDQQKAYQEIKQALLTAPALGLPDLTKPFELFVDEKQGYAKGVLTQKLGPWRRPVAYLSKKLDPVAAGWPPCLRMVAAIAVLTKDAGKLTMGQPLVILAPHAVEALVKQPPDRWLSNARMTHYQAMLLDTDRVQFGPVVALNPATLLPLPEKEAPHDCLEILAETHGTRPDLTDQPIPDADYTWYTDGSSFLQEGQRRAGAAVTTETEVIWARALPAGTSAQRAELIALTQALKMAEGKKLNVYTDSRYAFATAHVHGEIYRRRGWLTSEGREIKNKNEILALLKALFLPKRLSIIHCPGHQKGNSAEARGNRMADQAAREAAMKAVLETSTLLAGKRTADGSEFEKRTADGSEFESPKKKAKVE

SEQ ID NO: 7448 - protein, 2087 aa, synthetic construct
MPAAKRVKLDGGDKKYSIGLDIGTNSVGWAVITDEYKVPSKKFKVLGNTDRHSIKKNLIGALLFDSGETAEATRLKRTARRRYTRRKNRICYLQEIFSNEMAKVDDSFFHRLEESFLVEEDKKHERHPIFGNIVDEVAYHEKYPTIYHLRKKLVDSTDKADLRLIYLALAHMIKFRGHFLIEGDLNPDNSDVDKLFIQLVQTYNQLFEENPINASGVDAKAILSARLSKSRRLENLIAQLPGEKKNGLFGNLIALSLGLTPNFKSNFDLAEDAKLQLSKDTYDDDLDNLLAQIGDQYADLFLAAKNLSDAILLSDILRVNTEITKAPLSASMIKRYDEHHQDLTLLKALVRQQLPEKYKEIFFDQSKNGYAGYIDGGASQEEFYKFIKPILEKMDGTEELLVKLNREDLLRKQRTFDNGSIPHQIHLGELHAILRRQEDFYPFLKDNREKIEKILTFRIPYYVGPLARGNSRFAWMTRKSEETITPWNFEEVVDKGASAQSFIERMTNFDKNLPNEKVLPKHSLLYEYFTVYNELTKVKYVTEGMRKPAFLSGEQKKAIVDLLFKTNRKVTVKQLKEDYFKKIECFDSVEISGVEDRFNASLGTYHDLLKIIKDKDFLDNEENEDILEDIVLTLTLFEDREMIEERLKTYAHLFDDKVMKQLKRRRYTGWGRLSRKLINGIRDKQSGKTILDFLKSDGFANRNFMQLIHDDSLTFKEDIQKAQVSGQGDSLHEHIANLAGSPAIKKGILQTVKVVDELVKVMGRHKPENIVIEMARENQTTQKGQKNSRERMKRIEEGIKELGSQILKEHPVENTQLQNEKLYLYYLQNGRDMYVDQELDINRLSDYDVDHIVPQSFLKDDSIDNKVLTRSDKARGKSDNVPSEEVVKKMKNYWRQLLNAKLITQRKFDNLTKAERGGLSELDKAGFIKRQLVETRQITKHVAQILDSRMNTKYDENDKLIREVKVITLKSKLVSDFRKDFQFYKVREINNYHHAHDAYLNAVVGTALIKKYPKLESEFVYGDYKVYDVRKMIAKSEQEIGKATAKYFFYSNIMNFFKTEITLANGEIRKRPLIETNGETGEIVWDKGRDFATVRKVLSMPQVNIVKKTEVQTGGFSKESILPKRNSDKLIARKKDWDPKKYGGFDSPTVAYSVLVVAKVEKGKSKKLKSVKELLGITIMERSSFEKNPIDFLEAKGYKEVKKDLIIKLPKYSLFELENGRKRMLASAGELQKGNELALPSKYVNFLYLASHYEKLKGSPEDNEQKQLFVEQHKHYLDEIIEQISEFSKRVILADANLDKVLSAYNKHRDKPIREQAENIIHLFTLTNLGAPAAFKYFDTTIDRKRYTSTKEVLDATLIHQSITGLYETRIDLSQLGGDGGGGGEAAAKPAPGGVPWILKKPLELTIKLDLEEQQGTLLNNSILSKKGKEELKQLFEKYSALWQSWENQVGHRRIRPHKIATGTVKPTPQKQYHINPKAKPDIQIVINDLLKQGVLIQKESTMNTPVYPVPKPNGRWRMVLDYRAVNKVTPLIAVQNQHSYGILGSLFKGRYKTTIDLSNGFWAHPIVPEDYWITAFTWQGKQYCWTVLPQGFLNSPGLFTGDVVDLLQGIPNVEVYVDDVYISHDSEKEHLEYLDILFNRLKEAGYIISLKKSNIANSIVDFLGFQITNEGRGLTDTFKEKLENITAPTTLKQLQSILGLLNFARNFIPDFTELIAPLYALIPKSTKNYVPWQIEHSTTLETLITKLNGAEYLQGRKGDKTLIMKVNASYTTGYIRYYNEGEKKPISYVSIVFSKTELKFTELEKLLTTVHKGLLKALDLSMGQNIHVYSPIVSMQNIQKTPQTAKKALASRWLSWLSYLEDPRIRFFYDPQMPALKDLPAVDTGKDNKKHPSNFQHIFYTDGSAITSPTKEGHLNAGMGIVYFINKDGNLQKQQEWSISLGNHTAQFAEIAAFEFALKKCLPLGGNILVVTDSNYVAKAYNEELDVWASNGFVNNRKKPLKHISKWKSVADLKRLRPDVVVTHEPGHQKLDSSPHAYGNNLADQLATQASFKVHAGKRTADGSEFEKRTADGSEFESPKKKAKVE

SEQ ID NO: 7449 - protein, 2087 aa, synthetic construct
MPAAKRVKLDGGDKKYSIGLDIGTNSVGWAVITDEYKVPSKKFKVLGNTDRHSIKKNLIGALLFDSGETAEATRLKRTARRRYTRRKNRICYLQEIFSNEMAKVDDSFFHRLEESFLVEEDKKHERHPIFGNIVDEVAYHEKYPTIYHLRKKLVDSTDKADLRLIYLALAHMIKFRGHFLIEGDLNPDNSDVDKLFIQLVQTYNQLFEENPINASGVDAKAILSARLSKSRRLENLIAQLPGEKKNGLFGNLIALSLGLTPNFKSNFDLAEDAKLQLSKDTYDDDLDNLLAQIGDQYADLFLAAKNLSDAILLSDILRVNTEITKAPLSASMIKRYDEHHQDLTLLKALVRQQLPEKYKEIFFDQSKNGYAGYIDGGASQEEFYKFIKPILEKMDGTEELLVKLNREDLLRKQRTFDNGSIPHQIHLGELHAILRRQEDFYPFLKDNREKIEKILTFRIPYYVGPLARGNSRFAWMTRKSEETITPWNFEEVVDKGASAQSFIERMTNFDKNLPNEKVLPKHSLLYEYFTVYNELTKVKYVTEGMRKPAFLSGEQKKAIVDLLFKTNRKVTVKQLKEDYFKKIECFDSVEISGVEDRFNASLGTYHDLLKIIKDKDFLDNEENEDILEDIVLTLTLFEDREMIEERLKTYAHLFDDKVMKQLKRRRYTGWGRLSRKLINGIRDKQSGKTILDFLKSDGFANRNFMQLIHDDSLTFKEDIQKAQVSGQGDSLHEHIANLAGSPAIKKGILQTVKVVDELVKVMGRHKPENIVIEMARENQTTQKGQKNSRERMKRIEEGIKELGSQILKEHPVENTQLQNEKLYLYYLQNGRDMYVDQELDINRLSDYDVDHIVPQSFLKDDSIDNKVLTRSDKARGKSDNVPSEEVVKKMKNYWRQLLNAKLITQRKFDNLTKAERGGLSELDKAGFIKRQLVETRQITKHVAQILDSRMNTKYDENDKLIREVKVITLKSKLVSDFRKDFQFYKVREINNYHHAHDAYLNAVVGTALIKKYPKLESEFVYGDYKVYDVRKMIAKSEQEIGKATAKYFFYSNIMNFFKTEITLANGEIRKRPLIETNGETGEIVWDKGRDFATVRKVLSMPQVNIVKKTEVQTGGFSKESILPKRNSDKLIARKKDWDPKKYGGFDSPTVAYSVLVVAKVEKGKSKKLKSVKELLGITIMERSSFEKNPIDFLEAKGYKEVKKDLIIKLPKYSLFELENGRKRMLASAGELQKGNELALPSKYVNFLYLASHYEKLKGSPEDNEQKQLFVEQHKHYLDEIIEQISEFSKRVILADANLDKVLSAYNKHRDKPIREQAENIIHLFTLTNLGAPAAFKYFDTTIDRKRYTSTKEVLDATLIHQSITGLYETRIDLSQLGGDGGGGGEAAAKPAPGGVPWILKKPLELTIKLDLEEQQGTLLNNSILSKKGKEELKQLFEKYSALWQSWENQVGHRRIRPHKIATGTVKPTPQKQYHINPKAKPDIQIVINDLLKQGVLIQKESTMNTPVYPVPKPNGRWRMVLDYRAVNKVTPLIAVQNQHSYGILGSLFKGRYKTTIDLSNGFWAHPIVPEDYWITAFTWQGKQYCWTVLPQGFLNSPGLFNGDVVDLLQGIPNVEVYVDDVYISHDSEKEHLEYLDILFNRLKEAGYIISLKKSNIANSIVDFLGFQITNEGRGLTDTFKEKLENITAPTTLKQLQSILGLLNFARNFIPDFTELIAPLYALIPKSPKNYVPWQIEHSTTLETLITKLNGAEYLQGRKGDKTLIMKVNASYTTGYIRYYNEGEKKPISYVSIVFSKTELKFTELEKLLTTVHKGLLKALDLSMGQNIHVYSPIVSMQNIQKTPQTAKKALASRWLSWLSYLEDPRIRFFYDPQMPALKDLPAVDTGKDNKKHPSNFQHIFYTDGSAITSPTKEGHLNAGMGIVYFINKDGNLQKQQEWSISLGNHTAQFAEIAAFEFALKKCLPLGGNILVVTDSNYVAKAYNEELDVWASNGFVNNRKKPLKHISKWKSVADLKRLRPDVVVTHEPGHQKLDSSPHAYGNNLADQLATQASFKVHAGKRTADGSEFEKRTADGSEFESPKKKAKVE

SEQ ID NO: 7450 - protein, 2176 aa, synthetic construct
MPAAKRVKLDGGDKKYSIGLDIGTNSVGWAVITDEYKVPSKKFKVLGNTDRHSIKKNLIGALLFDSGETAEATRLKRTARRRYTRRKNRICYLQEIFSNEMAKVDDSFFHRLEESFLVEEDKKHERHPIFGNIVDEVAYHEKYPTIYHLRKKLVDSTDKADLRLIYLALAHMIKFRGHFLIEGDLNPDNSDVDKLFIQLVQTYNQLFEENPINASGVDAKAILSARLSKSRRLENLIAQLPGEKKNGLFGNLIALSLGLTPNFKSNFDLAEDAKLQLSKDTYDDDLDNLLAQIGDQYADLFLAAKNLSDAILLSDILRVNTEITKAPLSASMIKRYDEHHQDLTLLKALVRQQLPEKYKEIFFDQSKNGYAGYIDGGASQEEFYKFIKPILEKMDGTEELLVKLNREDLLRKQRTFDNGSIPHQIHLGELHAILRRQEDFYPFLKDNREKIEKILTFRIPYYVGPLARGNSRFAWMTRKSEETITPWNFEEVVDKGASAQSFIERMTNFDKNLPNEKVLPKHSLLYEYFTVYNELTKVKYVTEGMRKPAFLSGEQKKAIVDLLFKTNRKVTVKQLKEDYFKKIECFDSVEISGVEDRFNASLGTYHDLLKIIKDKDFLDNEENEDILEDIVLTLTLFEDREMIEERLKTYAHLFDDKVMKQLKRRRYTGWGRLSRKLINGIRDKQSGKTILDFLKSDGFANRNFMQLIHDDSLTFKEDIQKAQVSGQGDSLHEHIANLAGSPAIKKGILQTVKVVDELVKVMGRHKPENIVIEMARENQTTQKGQKNSRERMKRIEEGIKELGSQILKEHPVENTQLQNEKLYLYYLQNGRDMYVDQELDINRLSDYDVDHIVPQSFLKDDSIDNKVLTRSDKARGKSDNVPSEEVVKKMKNYWRQLLNAKLITQRKFDNLTKAERGGLSELDKAGFIKRQLVETRQITKHVAQILDSRMNTKYDENDKLIREVKVITLKSKLVSDFRKDFQFYKVREINNYHHAHDAYLNAVVGTALIKKYPKLESEFVYGDYKVYDVRKMIAKSEQEIGKATAKYFFYSNIMNFFKTEITLANGEIRKRPLIETNGETGEIVWDKGRDFATVRKVLSMPQVNIVKKTEVQTGGFSKESILPKRNSDKLIARKKDWDPKKYGGFDSPTVAYSVLVVAKVEKGKSKKLKSVKELLGITIMERSSFEKNPIDFLEAKGYKEVKKDLIIKLPKYSLFELENGRKRMLASAGELQKGNELALPSKYVNFLYLASHYEKLKGSPEDNEQKQLFVEQHKHYLDEIIEQISEFSKRVILADANLDKVLSAYNKHRDKPIREQAENIIHLFTLTNLGAPAAFKYFDTTIDRKRYTSTKEVLDATLIHQSITGLYETRIDLSQLGGDGGGGGEAAAKPAPGGMNPLQLLQPLPAEIKGTKLLAHWNSGATITCIPESFLEDEQPIKKTLIKTIHGEKQQNVYYVTFKVKGRKVEAEVIASPYEYILLSPTDVPWLTQQPLQLTILVPLQEYQEKILSKTALPEDQKQQLKTLFVKYDNLWQHWENQVGHRKIRPHNIATGDYPPRPQKQYPINPKAKPSIQIVIDDLLKQGVLTPQNSTMNTPVYPVPKPDGRWRMVLDYREVNKTIPLTAAQNQHSAGILATIVRQKYKTTLDLANGFWAHPITPESYWLTAFTWQGKQYCWTRLPQGFLNSPALFNADVVDLLKEIPNVQVYVDDIYLSHDDPKEHVQQLEKVFQILLQAGYVVSLKKSEIGQKTVEFLGFNITKEGRGLTDTFKTKLLNITPPKDLKQLQSILGKLNFARNFIPNFAELVQPLYNLIAPAKGKYIEWSEENTKQLNMVIEALNTASNLEERLPEQRLVIKVNTSPSAGYVRYYNETGKKPIMYLNYVFSKAELKFSMLEKLLTTMHKALIKAMDLAMGQEILVYSPIVSMTKIQKTPLPERKALPIRWITWMTYLEDPRIQFHYDKTLPELKHIPDVYTSSQSPVKHPSQYEGVFYTDGSAIKSPDPTKSNNAGMGIVHATYKPEYQVLNQWSIPLGNHTAQMAEIAAVEFACKKALKIPGPVLVITDSFYVAESANKELPYWKSNGFVNNKKKPLKHISKWKSIAECLSMKPDITIQHEKGISLQIPVFILKGNALADKLATQGSYVVNAGKRTADGSEFEKRTADGSEFESPKKKAKVE

SEQ ID NO: 7451 - protein, 2127 aa, synthetic construct
MPAAKRVKLDGGDKKYSIGLDIGTNSVGWAVITDEYKVPSKKFKVLGNTDRHSIKKNLIGALLFDSGETAEATRLKRTARRRYTRRKNRICYLQEIFSNEMAKVDDSFFHRLEESFLVEEDKKHERHPIFGNIVDEVAYHEKYPTIYHLRKKLVDSTDKADLRLIYLALAHMIKFRGHFLIEGDLNPDNSDVDKLFIQLVQTYNQLFEENPINASGVDAKAILSARLSKSRRLENLIAQLPGEKKNGLFGNLIALSLGLTPNFKSNFDLAEDAKLQLSKDTYDDDLDNLLAQIGDQYADLFLAAKNLSDAILLSDILRVNTEITKAPLSASMIKRYDEHHQDLTLLKALVRQQLPEKYKEIFFDQSKNGYAGYIDGGASQEEFYKFIKPILEKMDGTEELLVKLNREDLLRKQRTFDNGSIPHQIHLGELHAILRRQEDFYPFLKDNREKIEKILTFRIPYYVGPLARGNSRFAWMTRKSEETITPWNFEEVVDKGASAQSFIERMTNFDKNLPNEKVLPKHSLLYEYFTVYNELTKVKYVTEGMRKPAFLSGEQKKAIVDLLFKTNRKVTVKQLKEDYFKKIECFDSVEISGVEDRFNASLGTYHDLLKIIKDKDFLDNEENEDILEDIVLTLTLFEDREMIEERLKTYAHLFDDKVMKQLKRRRYTGWGRLSRKLINGIRDKQSGKTILDFLKSDGFANRNFMQLIHDDSLTFKEDIQKAQVSGQGDSLHEHIANLAGSPAIKKGILQTVKVVDELVKVMGRHKPENIVIEMARENQTTQKGQKNSRERMKRIEEGIKELGSQILKEHPVENTQLQNEKLYLYYLQNGRDMYVDQELDINRLSDYDVDHIVPQSFLKDDSIDNKVLTRSDKARGKSDNVPSEEVVKKMKNYWRQLLNAKLITQRKFDNLTKAERGGLSELDKAGFIKRQLVETRQITKHVAQILDSRMNTKYDENDKLIREVKVITLKSKLVSDFRKDFQFYKVREINNYHHAHDAYLNAVVGTALIKKYPKLESEFVYGDYKVYDVRKMIAKSEQEIGKATAKYFFYSNIMNFFKTEITLANGEIRKRPLIETNGETGEIVWDKGRDFATVRKVLSMPQVNIVKKTEVQTGGFSKESILPKRNSDKLIARKKDWDPKKYGGFDSPTVAYSVLVVAKVEKGKSKKLKSVKELLGITIMERSSFEKNPIDFLEAKGYKEVKKDLIIKLPKYSLFELENGRKRMLASAGELQKGNELALPSKYVNFLYLASHYEKLKGSPEDNEQKQLFVEQHKHYLDEIIEQISEFSKRVILADANLDKVLSAYNKHRDKPIREQAENIIHLFTLTNLGAPAAFKYFDTTIDRKRYTSTKEVLDATLIHQSITGLYETRIDLSQLGGDGGGGGEAAAKPAPGGLLGRDLLTKLKAQIQFSTEGPQVTWEDRPAMCLVLNLEEEYRLHEKPVPPSIDPSWLQLFPMVWAEKAGMGLANQVPPVVVELKSDASPVAVRQYPMSKEAREGIRPHIQRFLDLGILVPCQSPWNTPLLPVKKPGTNDYRPVQDLREVNKRVQDIHPTVPNPYNLLSSLPPSHTWYSVLDLKDAFFCLKLHPNSQPLFAFEWRDPEKGNTGQLTWTRLPQGFKNSPTLFNEALHRDLASFRALNPQVVMLQYVDDLLVAAPTYRDCKEGTRRLLQELSKLGYRVSAKKAQLCREEVTYLGYLLKGGKRWLTPARKATVMKIPTPTTPRQVREFLGTAGFCRLWIPGFASLAAPLYPLTRPKVPFTWTEAHQEAFGRIKEALLSAPALALPDLTKPFALYVDEKEGVARGVLTQTLGPWRRPVAYLSKKLDPVASGWPTCLKAIAAVALLLKDADKLTLGQNVLVIAPHNLESIVRQPPDRWMTNARMTHYQSLLLNERVSFAPPAILNPATLLPVESDDTPIHICSEILAEETGTRPDLRDQPLPGVPAWYTDGSSFIMDGRRQAGAAIVDNKRTVWASNLPEGTSAQKAELIALTQALRLAEGKSINIYTDSRYAFATAHVHGAIYKQRGWLTSAGKDIKNKEEILALLEAIHLPKRVAIIHCPGHQRGTDPVATGNRKADEAAKQAAQSTRILTETTKNAGKRTADGSEFEKRTADGSEFESPKKKAKVE

SEQ ID NO: 7452 - protein, 2096 aa, synthetic construct
MPAAKRVKLDGGDKKYSIGLDIGTNSVGWAVITDEYKVPSKKFKVLGNTDRHSIKKNLIGALLFDSGETAEATRLKRTARRRYTRRKNRICYLQEIFSNEMAKVDDSFFHRLEESFLVEEDKKHERHPIFGNIVDEVAYHEKYPTIYHLRKKLVDSTDKADLRLIYLALAHMIKFRGHFLIEGDLNPDNSDVDKLFIQLVQTYNQLFEENPINASGVDAKAILSARLSKSRRLENLIAQLPGEKKNGLFGNLIALSLGLTPNFKSNFDLAEDAKLQLSKDTYDDDLDNLLAQIGDQYADLFLAAKNLSDAILLSDILRVNTEITKAPLSASMIKRYDEHHQDLTLLKALVRQQLPEKYKEIFFDQSKNGYAGYIDGGASQEEFYKFIKPILEKMDGTEELLVKLNREDLLRKQRTFDNGSIPHQIHLGELHAILRRQEDFYPFLKDNREKIEKILTFRIPYYVGPLARGNSRFAWMTRKSEETITPWNFEEVVDKGASAQSFIERMTNFDKNLPNEKVLPKHSLLYEYFTVYNELTKVKYVTEGMRKPAFLSGEQKKAIVDLLFKTNRKVTVKQLKEDYFKKIECFDSVEISGVEDRFNASLGTYHDLLKIIKDKDFLDNEENEDILEDIVLTLTLFEDREMIEERLKTYAHLFDDKVMKQLKRRRYTGWGRLSRKLINGIRDKQSGKTILDFLKSDGFANRNFMQLIHDDSLTFKEDIQKAQVSGQGDSLHEHIANLAGSPAIKKGILQTVKVVDELVKVMGRHKPENIVIEMARENQTTQKGQKNSRERMKRIEEGIKELGSQILKEHPVENTQLQNEKLYLYYLQNGRDMYVDQELDINRLSDYDVDHIVPQSFLKDDSIDNKVLTRSDKARGKSDNVPSEEVVKKMKNYWRQLLNAKLITQRKFDNLTKAERGGLSELDKAGFIKRQLVETRQITKHVAQILDSRMNTKYDENDKLIREVKVITLKSKLVSDFRKDFQFYKVREINNYHHAHDAYLNAVVGTALIKKYPKLESEFVYGDYKVYDVRKMIAKSEQEIGKATAKYFFYSNIMNFFKTEITLANGEIRKRPLIETNGETGEIVWDKGRDFATVRKVLSMPQVNIVKKTEVQTGGFSKESILPKRNSDKLIARKKDWDPKKYGGFDSPTVAYSVLVVAKVEKGKSKKLKSVKELLGITIMERSSFEKNPIDFLEAKGYKEVKKDLIIKLPKYSLFELENGRKRMLASAGELQKGNELALPSKYVNFLYLASHYEKLKGSPEDNEQKQLFVEQHKHYLDEIIEQISEFSKRVILADANLDKVLSAYNKHRDKPIREQAENIIHLFTLTNLGAPAAFKYFDTTIDRKRYTSTKEVLDATLIHQSITGLYETRIDLSQLGGDGGGGGEAAAKPAPGGTLGIEDEYRLHETSTEPDVSLGSTWLSDFPQAWAETGGMGLAVRQAPLIIPLKATSTPVSIQQYPMSHEARLGIKPHIQRLLDQGILVPCQSPWNTPLLPVKKPGTNDYRPVQDLREVNKRVEDIHPTVPNPYNLLSGLPPSHQWYTVLDLKDAFFCLRLHPTSQPLFAFEWRDPGMGISGQLTWTRLPQGFKNSPTLFDEALHRDLADFRIQHPDLILLQYVDDILLAATSELDCQQGTRALLQTLGDLGYRASAKKAQICQKQVKYLGYLLREGQRWLTEARKETVMGQPVPKTPRQLREFLGTAGFCRLWIPGFAEMAAPLYPLTKTGTLFSWGPDQQKAYQEIKQALLTAPALGLPDLTKPFELFVDEKQGYAKGVLTQKLGPWRRPVAYLSKKLDPVAAGWPPCLRMVAAIAVLTKDAGKLTMGQPLVILAPHAVEALVKQPPDRWLSNARMTHYQAMLLDTDRVQFGPVVALNPATLLPLPEEGAPHDCLEILAETHGTRPDLTDQPIPDADHTWYTDGSSFLQEGQRKAGAAVTTETEVIWAGALPAGTSAQRAELIALTQALKMAEGKRLNVYTDSRYAFATAHIHGEIYRRRGLLTSEGREIKNKSEILALLKALFLPKRLSIIHCLGHQKGDSAEARGNRLADQAAREAAIKTPPDTSTLLAGKRTADGSEFEKRTADGSEFESPKKKAKVE

SEQ ID NO: 7453 - protein, 2096 aa, synthetic construct
MPAAKRVKLDGGDKKYSIGLDIGTNSVGWAVITDEYKVPSKKFKVLGNTDRHSIKKNLIGALLFDSGETAEATRLKRTARRRYTRRKNRICYLQEIFSNEMAKVDDSFFHRLEESFLVEEDKKHERHPIFGNIVDEVAYHEKYPTIYHLRKKLVDSTDKADLRLIYLALAHMIKFRGHFLIEGDLNPDNSDVDKLFIQLVQTYNQLFEENPINASGVDAKAILSARLSKSRRLENLIAQLPGEKKNGLFGNLIALSLGLTPNFKSNFDLAEDAKLQLSKDTYDDDLDNLLAQIGDQYADLFLAAKNLSDAILLSDILRVNTEITKAPLSASMIKRYDEHHQDLTLLKALVRQQLPEKYKEIFFDQSKNGYAGYIDGGASQEEFYKFIKPILEKMDGTEELLVKLNREDLLRKQRTFDNGSIPHQIHLGELHAILRRQEDFYPFLKDNREKIEKILTFRIPYYVGPLARGNSRFAWMTRKSEETITPWNFEEVVDKGASAQSFIERMTNFDKNLPNEKVLPKHSLLYEYFTVYNELTKVKYVTEGMRKPAFLSGEQKKAIVDLLFKTNRKVTVKQLKEDYFKKIECFDSVEISGVEDRFNASLGTYHDLLKIIKDKDFLDNEENEDILEDIVLTLTLFEDREMIEERLKTYAHLFDDKVMKQLKRRRYTGWGRLSRKLINGIRDKQSGKTILDFLKSDGFANRNFMQLIHDDSLTFKEDIQKAQVSGQGDSLHEHIANLAGSPAIKKGILQTVKVVDELVKVMGRHKPENIVIEMARENQTTQKGQKNSRERMKRIEEGIKELGSQILKEHPVENTQLQNEKLYLYYLQNGRDMYVDQELDINRLSDYDVDHIVPQSFLKDDSIDNKVLTRSDKARGKSDNVPSEEVVKKMKNYWRQLLNAKLITQRKFDNLTKAERGGLSELDKAGFIKRQLVETRQITKHVAQILDSRMNTKYDENDKLIREVKVITLKSKLVSDFRKDFQFYKVREINNYHHAHDAYLNAVVGTALIKKYPKLESEFVYGDYKVYDVRKMIAKSEQEIGKATAKYFFYSNIMNFFKTEITLANGEIRKRPLIETNGETGEIVWDKGRDFATVRKVLSMPQVNIVKKTEVQTGGFSKESILPKRNSDKLIARKKDWDPKKYGGFDSPTVAYSVLVVAKVEKGKSKKLKSVKELLGITIMERSSFEKNPIDFLEAKGYKEVKKDLIIKLPKYSLFELENGRKRMLASAGELQKGNELALPSKYVNFLYLASHYEKLKGSPEDNEQKQLFVEQHKHYLDEIIEQISEFSKRVILADANLDKVLSAYNKHRDKPIREQAENIIHLFTLTNLGAPAAFKYFDTTIDRKRYTSTKEVLDATLIHQSITGLYETRIDLSQLGGDGGGGGEAAAKPAPGGTLGIEDEYRLHETSTEPDVSLGSTWLSDFPQAWAETGGMGLAVRQAPLIIPLKATSTPVSIQQYPMSHEARLGIKPHIQRLLDQGILVPCQSPWNTPLLPVKKPGTNDYRPVQDLREVNKRVEDIHPTVPNPYNLLSGLPPSHQWYTVLDLKDAFFCLRLHPTSQPLFAFEWRDPGMGISGQLTWTRLPQGFKNSPTLFNEALHRDLADFRIQHPDLILLQYVDDILLAATSELDCQQGTRALLQTLGDLGYRASAKKAQICQKQVKYLGYLLREGQRWLTEARKETVMGQPVPKTPRQLREFLGTAGFCRLWIPGFAEMAAPLYPLTKPGTLFSWGPDQQKAYQEIKQALLTAPALGLPDLTKPFELFVDEKQGYAKGVLTQKLGPWRRPVAYLSKKLDPVAAGWPPCLRMVAAIAVLTKDAGKLTMGQPLVILAPHAVEALVKQPPDRWLSNARMTHYQAMLLDTDRVQFGPVVALNPATLLPLPEEGAPHDCLEILAETHGTRPDLTDQPIPDADHTWYTDGSSFLQEGQRKAGAAVTTETEVIWAGALPAGTSAQRAELIALTQALKMAEGKRLNVYTDSRYAFATAHIHGEIYRRRGWLTSEGREIKNKSEILALLKALFLPKRLSIIHCLGHQKGDSAEARGNRLADQAAREAAIKTPPDTSTLLAGKRTADGSEFEKRTADGSEFESPKKKAKVE

SEQ ID NO: 7454 - protein, 2096 aa, synthetic construct
MPAAKRVKLDGGDKKYSIGLDIGTNSVGWAVITDEYKVPSKKFKVLGNTDRHSIKKNLIGALLFDSGETAEATRLKRTARRRYTRRKNRICYLQEIFSNEMAKVDDSFFHRLEESFLVEEDKKHERHPIFGNIVDEVAYHEKYPTIYHLRKKLVDSTDKADLRLIYLALAHMIKFRGHFLIEGDLNPDNSDVDKLFIQLVQTYNQLFEENPINASGVDAKAILSARLSKSRRLENLIAQLPGEKKNGLFGNLIALSLGLTPNFKSNFDLAEDAKLQLSKDTYDDDLDNLLAQIGDQYADLFLAAKNLSDAILLSDILRVNTEITKAPLSASMIKRYDEHHQDLTLLKALVRQQLPEKYKEIFFDQSKNGYAGYIDGGASQEEFYKFIKPILEKMDGTEELLVKLNREDLLRKQRTFDNGSIPHQIHLGELHAILRRQEDFYPFLKDNREKIEKILTFRIPYYVGPLARGNSRFAWMTRKSEETITPWNFEEVVDKGASAQSFIERMTNFDKNLPNEKVLPKHSLLYEYFTVYNELTKVKYVTEGMRKPAFLSGEQKKAIVDLLFKTNRKVTVKQLKEDYFKKIECFDSVEISGVEDRFNASLGTYHDLLKIIKDKDFLDNEENEDILEDIVLTLTLFEDREMIEERLKTYAHLFDDKVMKQLKRRRYTGWGRLSRKLINGIRDKQSGKTILDFLKSDGFANRNFMQLIHDDSLTFKEDIQKAQVSGQGDSLHEHIANLAGSPAIKKGILQTVKVVDELVKVMGRHKPENIVIEMARENQTTQKGQKNSRERMKRIEEGIKELGSQILKEHPVENTQLQNEKLYLYYLQNGRDMYVDQELDINRLSDYDVDHIVPQSFLKDDSIDNKVLTRSDKARGKSDNVPSEEVVKKMKNYWRQLLNAKLITQRKFDNLTKAERGGLSELDKAGFIKRQLVETRQITKHVAQILDSRMNTKYDENDKLIREVKVITLKSKLVSDFRKDFQFYKVREINNYHHAHDAYLNAVVGTALIKKYPKLESEFVYGDYKVYDVRKMIAKSEQEIGKATAKYFFYSNIMNFFKTEITLANGEIRKRPLIETNGETGEIVWDKGRDFATVRKVLSMPQVNIVKKTEVQTGGFSKESILPKRNSDKLIARKKDWDPKKYGGFDSPTVAYSVLVVAKVEKGKSKKLKSVKELLGITIMERSSFEKNPIDFLEAKGYKEVKKDLIIKLPKYSLFELENGRKRMLASAGELQKGNELALPSKYVNFLYLASHYEKLKGSPEDNEQKQLFVEQHKHYLDEIIEQISEFSKRVILADANLDKVLSAYNKHRDKPIREQAENIIHLFTLTNLGAPAAFKYFDTTIDRKRYTSTKEVLDATLIHQSITGLYETRIDLSQLGGDGGGGGEAAAKPAPGGTLNIEDEYRLHETSKGPDVPLGSTWLSDFPQAWAETGGMGLAVRQAPLIIPLKATSTPVSIKQYPMSQEARLGIKPHIQRLLDQGILVPCQSPWNTPLLPVKKPGTNDYRPVQDLREVNKRVEDIHPTVPNPYNLLSGLPPSHQWYTVLDLKDAFFCLRLHPTSQSLFAFEWRDPEMGISGQLTWTRLPQGFKNSPTLFNEALHRDLADFRIQHPDLILLQYVDDLLLAATSELDCQQGTRALLQTLGDLGYRASAKKAQICQKQVKYLGYLLKEGQRWLTEARKETVMGQPTPKTPRQLREFLGTAGFCRLWIPGFAEMAAPLYPLTKPGTLFEWGPDQQKAYQEIKQALLTAPALGLPDLTKPFELFVDEKQGYAKGVLTQKLGPWRRPVAYLSKKLDPVAAGWPPCLRMVAAIAVLTKDAGKLTMGQPLVILAPHAVEALVKQPPDRWLSNARMTHYQALLLDTDRVQFGPIVALNPATLLPLPEEGLQHDCLDILAEAHGTRPDLTDQPLPDADHTWYTDGSSFLQEGQRKAGAAVTTETEVVWAKALPAGTSAQRAELIALTQALKMAEGKKLNVYTDSRYAFATAHIHGEIYRRRGWLTSEGKEIKNKDEILALLKALFLPKRLSIIHCPGHQKGNRAEARGNRMADQAAREVATRETPETSTLLAGKRTADGSEFEKRTADGSEFESPKKKAKVE

SEQ ID NO: 7455 - protein, 2096 aa, synthetic construct
MPAAKRVKLDGGDKKYSIGLDIGTNSVGWAVITDEYKVPSKKFKVLGNTDRHSIKKNLIGALLFDSGETAEATRLKRTARRRYTRRKNRICYLQEIFSNEMAKVDDSFFHRLEESFLVEEDKKHERHPIFGNIVDEVAYHEKYPTIYHLRKKLVDSTDKADLRLIYLALAHMIKFRGHFLIEGDLNPDNSDVDKLFIQLVQTYNQLFEENPINASGVDAKAILSARLSKSRRLENLIAQLPGEKKNGLFGNLIALSLGLTPNFKSNFDLAEDAKLQLSKDTYDDDLDNLLAQIGDQYADLFLAAKNLSDAILLSDILRVNTEITKAPLSASMIKRYDEHHQDLTLLKALVRQQLPEKYKEIFFDQSKNGYAGYIDGGASQEEFYKFIKPILEKMDGTEELLVKLNREDLLRKQRTFDNGSIPHQIHLGELHAILRRQEDFYPFLKDNREKIEKILTFRIPYYVGPLARGNSRFAWMTRKSEETITPWNFEEVVDKGASAQSFIERMTNFDKNLPNEKVLPKHSLLYEYFTVYNELTKVKYVTEGMRKPAFLSGEQKKAIVDLLFKTNRKVTVKQLKEDYFKKIECFDSVEISGVEDRFNASLGTYHDLLKIIKDKDFLDNEENEDILEDIVLTLTLFEDREMIEERLKTYAHLFDDKVMKQLKRRRYTGWGRLSRKLINGIRDKQSGKTILDFLKSDGFANRNFMQLIHDDSLTFKEDIQKAQVSGQGDSLHEHIANLAGSPAIKKGILQTVKVVDELVKVMGRHKPENIVIEMARENQTTQKGQKNSRERMKRIEEGIKELGSQILKEHPVENTQLQNEKLYLYYLQNGRDMYVDQELDINRLSDYDVDHIVPQSFLKDDSIDNKVLTRSDKARGKSDNVPSEEVVKKMKNYWRQLLNAKLITQRKFDNLTKAERGGLSELDKAGFIKRQLVETRQITKHVAQILDSRMNTKYDENDKLIREVKVITLKSKLVSDFRKDFQFYKVREINNYHHAHDAYLNAVVGTALIKKYPKLESEFVYGDYKVYDVRKMIAKSEQEIGKATAKYFFYSNIMNFFKTEITLANGEIRKRPLIETNGETGEIVWDKGRDFATVRKVLSMPQVNIVKKTEVQTGGFSKESILPKRNSDKLIARKKDWDPKKYGGFDSPTVAYSVLVVAKVEKGKSKKLKSVKELLGITIMERSSFEKNPIDFLEAKGYKEVKKDLIIKLPKYSLFELENGRKRMLASAGELQKGNELALPSKYVNFLYLASHYEKLKGSPEDNEQKQLFVEQHKHYLDEIIEQISEFSKRVILADANLDKVLSAYNKHRDKPIREQAENIIHLFTLTNLGAPAAFKYFDTTIDRKRYTSTKEVLDATLIHQSITGLYETRIDLSQLGGDGGGGGEAAAKPAPGGTLNIEDEHRLHETSKEPDVSLGSTWLSDFPQAWAETGGMGLAVRQAPLIIPLKATSTPVSIKQYPMSQEARLGIKPHIQRLLDQGILVPCQSPWNTPLLPVKKPGTNDYRPVQDLREVNKRVEDIHPTVPNPYNLLSGLPPSHQWYTVLDLKDAFFCLRLHPTSQPLFAFEWRDPEMGISGQLTWTRLPQGFKNSPTLFDEALHRDLADFRIQHPDLILLQYVDDLLLAATSELDCQQGTRALLQTLGNLGYRASAKKAQICQKQVKYLGYLLKEGQRWLTEARKETVMGQPTPKTPRQLREFLGTAGFCRLWIPGFAEMAAPLYPLTKTGTLFNWGPDQQKAYQEIKQALLTAPALGLPDLTKPFELFVDEKQGYAKGVLTQKLGPWRRPVAYLSKKLDPVAAGWPPCLRMVAAIAVLTKDAGKLTMGQPLVILAPHAVEALVKQPPDRWLSNARMTHYQALLLDTDRVQFGPVVALNPATLLPLPEEGLQHNCLDILAEAHGTRPDLTDQPLPDADHTWYTDGSSLLQEGQRKAGAAVTTETEVIWAKALPAGTSAQRAELIALTQALKMAEGKKLNVYTDSRYAFATAHIHGEIYRRRGLLTSEGKEIKNKDEILALLKALFLPKRLSIIHCPGHQKGHSAEARGNRMADQAARKAAITETPDTSTLLAGKRTADGSEFEKRTADGSEFESPKKKAKVE

SEQ ID NO: 7456 - protein, 2087 aa, synthetic construct
MPAAKRVKLDGGDKKYSIGLDIGTNSVGWAVITDEYKVPSKKFKVLGNTDRHSIKKNLIGALLFDSGETAEATRLKRTARRRYTRRKNRICYLQEIFSNEMAKVDDSFFHRLEESFLVEEDKKHERHPIFGNIVDEVAYHEKYPTIYHLRKKLVDSTDKADLRLIYLALAHMIKFRGHFLIEGDLNPDNSDVDKLFIQLVQTYNQLFEENPINASGVDAKAILSARLSKSRRLENLIAQLPGEKKNGLFGNLIALSLGLTPNFKSNFDLAEDAKLQLSKDTYDDDLDNLLAQIGDQYADLFLAAKNLSDAILLSDILRVNTEITKAPLSASMIKRYDEHHQDLTLLKALVRQQLPEKYKEIFFDQSKNGYAGYIDGGASQEEFYKFIKPILEKMDGTEELLVKLNREDLLRKQRTFDNGSIPHQIHLGELHAILRRQEDFYPFLKDNREKIEKILTFRIPYYVGPLARGNSRFAWMTRKSEETITPWNFEEVVDKGASAQSFIERMTNFDKNLPNEKVLPKHSLLYEYFTVYNELTKVKYVTEGMRKPAFLSGEQKKAIVDLLFKTNRKVTVKQLKEDYFKKIECFDSVEISGVEDRFNASLGTYHDLLKIIKDKDFLDNEENEDILEDIVLTLTLFEDREMIEERLKTYAHLFDDKVMKQLKRRRYTGWGRLSRKLINGIRDKQSGKTILDFLKSDGFANRNFMQLIHDDSLTFKEDIQKAQVSGQGDSLHEHIANLAGSPAIKKGILQTVKVVDELVKVMGRHKPENIVIEMARENQTTQKGQKNSRERMKRIEEGIKELGSQILKEHPVENTQLQNEKLYLYYLQNGRDMYVDQELDINRLSDYDVDHIVPQSFLKDDSIDNKVLTRSDKARGKSDNVPSEEVVKKMKNYWRQLLNAKLITQRKFDNLTKAERGGLSELDKAGFIKRQLVETRQITKHVAQILDSRMNTKYDENDKLIREVKVITLKSKLVSDFRKDFQFYKVREINNYHHAHDAYLNAVVGTALIKKYPKLESEFVYGDYKVYDVRKMIAKSEQEIGKATAKYFFYSNIMNFFKTEITLANGEIRKRPLIETNGETGEIVWDKGRDFATVRKVLSMPQVNIVKKTEVQTGGFSKESILPKRNSDKLIARKKDWDPKKYGGFDSPTVAYSVLVVAKVEKGKSKKLKSVKELLGITIMERSSFEKNPIDFLEAKGYKEVKKDLIIKLPKYSLFELENGRKRMLASAGELQKGNELALPSKYVNFLYLASHYEKLKGSPEDNEQKQLFVEQHKHYLDEIIEQISEFSKRVILADANLDKVLSAYNKHRDKPIREQAENIIHLFTLTNLGAPAAFKYFDTTIDRKRYTSTKEVLDATLIHQSITGLYETRIDLSQLGGDGGGGGEAAAKPAPGGVPWLMKKPLQLTVLVPLHEYQERLLQQTALPKEQKELLQKLFLKYDALWQHWENQVGHRRIKPHNIATGTLAPRPQKQYPINPKAKPSIQIVIDDLLKQGVLIQQNSTMNTPVYPVPKPDGKWRMVLDYREVNKTIPLIAAQNQHSAGILSSIYRGKYKTTLDLTNGFWAHPITPESYWLTAFTWQGKQYCWTRLPQGFLNSPALFNADVVDLLKEIPNVQAYVDDIYISHDDPQEHLEQLEKIFSILLNAGYVVSLKKSEIAQREVEFLGFNITKEGRGLTDTFKQKLLNITPPKDLKQLQSILGKLNFARNFIPNYSELVKPLYTIVAPANGKFISWTEDNSNQLQHIISVLNQADNLEERNPETRLIIKVNSSPSAGYIRYYNEGSKRPIMYVNYIFSKAEAKFTQTEKLLTTMHKGLIKAMDLAMGQEILVYSPIVSMTKIQRTPLPERKALPVRWITWMTYLEDPRIQFHYDKSLPELQQIPNVTEDVIAKTKHPSEFAMVFYTDGSAIKHPDVNKSHSAGMGIAQVQFIPEYKIVHQWSIPLGDHTAQLAEIAAVEFACKKALKISGPVLIVTDSFYVAESANKELPYWKSNGFLNNKKKPLRHVSKWKSIAECLQLKPDIIIMHEKGHQQPMTTLHTEGNNLADKLATQGSYVVHAGKRTADGSEFEKRTADGSEFESPKKKAKVE

SEQ ID NO: 7457 - protein, 2087 aa, synthetic construct
MPAAKRVKLDGGDKKYSIGLDIGTNSVGWAVITDEYKVPSKKFKVLGNTDRHSIKKNLIGALLFDSGETAEATRLKRTARRRYTRRKNRICYLQEIFSNEMAKVDDSFFHRLEESFLVEEDKKHERHPIFGNIVDEVAYHEKYPTIYHLRKKLVDSTDKADLRLIYLALAHMIKFRGHFLIEGDLNPDNSDVDKLFIQLVQTYNQLFEENPINASGVDAKAILSARLSKSRRLENLIAQLPGEKKNGLFGNLIALSLGLTPNFKSNFDLAEDAKLQLSKDTYDDDLDNLLAQIGDQYADLFLAAKNLSDAILLSDILRVNTEITKAPLSASMIKRYDEHHQDLTLLKALVRQQLPEKYKEIFFDQSKNGYAGYIDGGASQEEFYKFIKPILEKMDGTEELLVKLNREDLLRKQRTFDNGSIPHQIHLGELHAILRRQEDFYPFLKDNREKIEKILTFRIPYYVGPLARGNSRFAWMTRKSEETITPWNFEEVVDKGASAQSFIERMTNFDKNLPNEKVLPKHSLLYEYFTVYNELTKVKYVTEGMRKPAFLSGEQKKAIVDLLFKTNRKVTVKQLKEDYFKKIECFDSVEISGVEDRFNASLGTYHDLLKIIKDKDFLDNEENEDILEDIVLTLTLFEDREMIEERLKTYAHLFDDKVMKQLKRRRYTGWGRLSRKLINGIRDKQSGKTILDFLKSDGFANRNFMQLIHDDSLTFKEDIQKAQVSGQGDSLHEHIANLAGSPAIKKGILQTVKVVDELVKVMGRHKPENIVIEMARENQTTQKGQKNSRERMKRIEEGIKELGSQILKEHPVENTQLQNEKLYLYYLQNGRDMYVDQELDINRLSDYDVDHIVPQSFLKDDSIDNKVLTRSDKARGKSDNVPSEEVVKKMKNYWRQLLNAKLITQRKFDNLTKAERGGLSELDKAGFIKRQLVETRQITKHVAQILDSRMNTKYDENDKLIREVKVITLKSKLVSDFRKDFQFYKVREINNYHHAHDAYLNAVVGTALIKKYPKLESEFVYGDYKVYDVRKMIAKSEQEIGKATAKYFFYSNIMNFFKTEITLANGEIRKRPLIETNGETGEIVWDKGRDFATVRKVLSMPQVNIVKKTEVQTGGFSKESILPKRNSDKLIARKKDWDPKKYGGFDSPTVAYSVLVVAKVEKGKSKKLKSVKELLGITIMERSSFEKNPIDFLEAKGYKEVKKDLIIKLPKYSLFELENGRKRMLASAGELQKGNELALPSKYVNFLYLASHYEKLKGSPEDNEQKQLFVEQHKHYLDEIIEQISEFSKRVILADANLDKVLSAYNKHRDKPIREQAENIIHLFTLTNLGAPAAFKYFDTTIDRKRYTSTKEVLDATLIHQSITGLYETRIDLSQLGGDGGGGGEAAAKPAPGGIPWLMKKPLQLTTLVPLQEYEERLLKQTMLTGSYKEKLQSLFLKYDALWQHWENQVGHRRIKPHHIATGTVNPRPQKQYPINPKAKASIQTVINDLLKQGVLIQQNSIMNTPVYPVPKPDGKWRMVLDYREVNKTIPLIAAQNQHSAGILSSIFRGKYKTTLDLSNGFWAHSITPESYWLTAFTWLGQQYCWTRLPQGFLNSPALFNADVVDLLKEVPNVQVYVDDIYISHDDPREHLEQLEKVFSLLLNAGYVVSLKKSEIAQHEVEFLGFNITKEGRGLTETFKQKLLNITPPRDLKQLQSILGLLNFARNFIPNFSELVKPLYNIIATAPGKYITWTTDNSQQLQNIISMLNSAENLEERNPEVRLIMKVNTSPSAGYIRFYNEFAKRPIMYLNYVYTKAEVKFTNTEKLLTTIHKGLIKALDLGMGQEILVYSPIVSMTKIQKTPLPERKALPIRWITWMSYLEDPRIQFHYDKTLPELQQVPTVTDDIIAKIKHPSEFSMVFYTDGSAIKHPNVNKSHNAGMGIAQVQFKPEFTVINTWSIPLGDHTAQLAEVAAVEFACKKALKIDGPVLIVTDSFYVAESVNKELPYWQSNGFFNNKKKPLKHVSKWKSIADCIQLKPDIIIIHEKGHQPTASTFHTEGNNLADKLATQGSYVVNAGKRTADGSEFEKRTADGSEFESPKKKAKVE

SEQ ID NO: 7458 - protein, 2176 aa, synthetic construct
MPAAKRVKLDGGDKKYSIGLDIGTNSVGWAVITDEYKVPSKKFKVLGNTDRHSIKKNLIGALLFDSGETAEATRLKRTARRRYTRRKNRICYLQEIFSNEMAKVDDSFFHRLEESFLVEEDKKHERHPIFGNIVDEVAYHEKYPTIYHLRKKLVDSTDKADLRLIYLALAHMIKFRGHFLIEGDLNPDNSDVDKLFIQLVQTYNQLFEENPINASGVDAKAILSARLSKSRRLENLIAQLPGEKKNGLFGNLIALSLGLTPNFKSNFDLAEDAKLQLSKDTYDDDLDNLLAQIGDQYADLFLAAKNLSDAILLSDILRVNTEITKAPLSASMIKRYDEHHQDLTLLKALVRQQLPEKYKEIFFDQSKNGYAGYIDGGASQEEFYKFIKPILEKMDGTEELLVKLNREDLLRKQRTFDNGSIPHQIHLGELHAILRRQEDFYPFLKDNREKIEKILTFRIPYYVGPLARGNSRFAWMTRKSEETITPWNFEEVVDKGASAQSFIERMTNFDKNLPNEKVLPKHSLLYEYFTVYNELTKVKYVTEGMRKPAFLSGEQKKAIVDLLFKTNRKVTVKQLKEDYFKKIECFDSVEISGVEDRFNASLGTYHDLLKIIKDKDFLDNEENEDILEDIVLTLTLFEDREMIEERLKTYAHLFDDKVMKQLKRRRYTGWGRLSRKLINGIRDKQSGKTILDFLKSDGFANRNFMQLIHDDSLTFKEDIQKAQVSGQGDSLHEHIANLAGSPAIKKGILQTVKVVDELVKVMGRHKPENIVIEMARENQTTQKGQKNSRERMKRIEEGIKELGSQILKEHPVENTQLQNEKLYLYYLQNGRDMYVDQELDINRLSDYDVDHIVPQSFLKDDSIDNKVLTRSDKARGKSDNVPSEEVVKKMKNYWRQLLNAKLITQRKFDNLTKAERGGLSELDKAGFIKRQLVETRQITKHVAQILDSRMNTKYDENDKLIREVKVITLKSKLVSDFRKDFQFYKVREINNYHHAHDAYLNAVVGTALIKKYPKLESEFVYGDYKVYDVRKMIAKSEQEIGKATAKYFFYSNIMNFFKTEITLANGEIRKRPLIETNGETGEIVWDKGRDFATVRKVLSMPQVNIVKKTEVQTGGFSKESILPKRNSDKLIARKKDWDPKKYGGFDSPTVAYSVLVVAKVEKGKSKKLKSVKELLGITIMERSSFEKNPIDFLEAKGYKEVKKDLIIKLPKYSLFELENGRKRMLASAGELQKGNELALPSKYVNFLYLASHYEKLKGSPEDNEQKQLFVEQHKHYLDEIIEQISEFSKRVILADANLDKVLSAYNKHRDKPIREQAENIIHLFTLTNLGAPAAFKYFDTTIDRKRYTSTKEVLDATLIHQSITGLYETRIDLSQLGGDGGGGGEAAAKPAPGGMDPLQLLQPLEAEIKGTKLKAHWNSGATITCVPQAFLEEEVPIKNIWIKTIHGEKEQPVYYLTFKIQGRKVEAEVISSPYDYILVSPSDIPWLMKKPLQLTTLVPLQEYEERLLKQTMLTGSYKEKLQSLFLKYDALWQHWENQVGHRRIKPHHIATGTVNPRPQKQYPINPKAKASIQTVINDLLKQGVLIQQNSIMNTPVYPVPKPDGKWRMVLDYREVNKTIPLIAAQNQHSAGILSSIFRGKYKTTLDLSNGFWAHSITPESYWLTAFTWLGQQYCWTRLPQGFLNSPALFNADVVDLLKEVPNVQVYVDDIYISHDDPREHLEQLEKVFSLLLNAGYVVSLKKSEIAQHEVEFLGFNITKEGRGLTETFKQKLLNITPPRDLKQLQSILGKLNFARNFIPNFSELVKPLYNIIATAPGKYITWTTDNSQQLQNIISMLNSAENLEERNPEVRLIMKVNTSPSAGYIRFYNEFAKRPIMYLNYVYTKAEVKFTNTEKLLTTIHKGLIKALDLGMGQEILVYSPIVSMTKIQKTPLPERKALPIRWITWMSYLEDPRIQFHYDKTLPELQQVPTVTDDIIAKIKHPSEFSMVFYTDGSAIKHPNVNKSHNAGMGIAQVQFKPEFTVINTWSIPLGDHTAQLAEVAAVEFACKKALKIDGPVLIVTDSFYVAESVNKELPYWQSNGFFNNKKKPLKHVSKWKSIADCIQLKPDIIIIHEKGHQPTASTFHTEGNNLADKLATQGSYVVNAGKRTADGSEFEKRTADGSEFESPKKKAKVE

SEQ ID NO: 7459 - protein, 2094 aa, synthetic construct
MPAAKRVKLDGGDKKYSIGLDIGTNSVGWAVITDEYKVPSKKFKVLGNTDRHSIKKNLIGALLFDSGETAEATRLKRTARRRYTRRKNRICYLQEIFSNEMAKVDDSFFHRLEESFLVEEDKKHERHPIFGNIVDEVAYHEKYPTIYHLRKKLVDSTDKADLRLIYLALAHMIKFRGHFLIEGDLNPDNSDVDKLFIQLVQTYNQLFEENPINASGVDAKAILSARLSKSRRLENLIAQLPGEKKNGLFGNLIALSLGLTPNFKSNFDLAEDAKLQLSKDTYDDDLDNLLAQIGDQYADLFLAAKNLSDAILLSDILRVNTEITKAPLSASMIKRYDEHHQDLTLLKALVRQQLPEKYKEIFFDQSKNGYAGYIDGGASQEEFYKFIKPILEKMDGTEELLVKLNREDLLRKQRTFDNGSIPHQIHLGELHAILRRQEDFYPFLKDNREKIEKILTFRIPYYVGPLARGNSRFAWMTRKSEETITPWNFEEVVDKGASAQSFIERMTNFDKNLPNEKVLPKHSLLYEYFTVYNELTKVKYVTEGMRKPAFLSGEQKKAIVDLLFKTNRKVTVKQLKEDYFKKIECFDSVEISGVEDRFNASLGTYHDLLKIIKDKDFLDNEENEDILEDIVLTLTLFEDREMIEERLKTYAHLFDDKVMKQLKRRRYTGWGRLSRKLINGIRDKQSGKTILDFLKSDGFANRNFMQLIHDDSLTFKEDIQKAQVSGQGDSLHEHIANLAGSPAIKKGILQTVKVVDELVKVMGRHKPENIVIEMARENQTTQKGQKNSRERMKRIEEGIKELGSQILKEHPVENTQLQNEKLYLYYLQNGRDMYVDQELDINRLSDYDVDHIVPQSFLKDDSIDNKVLTRSDKARGKSDNVPSEEVVKKMKNYWRQLLNAKLITQRKFDNLTKAERGGLSELDKAGFIKRQLVETRQITKHVAQILDSRMNTKYDENDKLIREVKVITLKSKLVSDFRKDFQFYKVREINNYHHAHDAYLNAVVGTALIKKYPKLESEFVYGDYKVYDVRKMIAKSEQEIGKATAKYFFYSNIMNFFKTEITLANGEIRKRPLIETNGETGEIVWDKGRDFATVRKVLSMPQVNIVKKTEVQTGGFSKESILPKRNSDKLIARKKDWDPKKYGGFDSPTVAYSVLVVAKVEKGKSKKLKSVKELLGITIMERSSFEKNPIDFLEAKGYKEVKKDLIIKLPKYSLFELENGRKRMLASAGELQKGNELALPSKYVNFLYLASHYEKLKGSPEDNEQKQLFVEQHKHYLDEIIEQISEFSKRVILADANLDKVLSAYNKHRDKPIREQAENIIHLFTLTNLGAPAAFKYFDTTIDRKRYTSTKEVLDATLIHQSITGLYETRIDLSQLGGDGGGGGEAAAKPAPGGVLNLEEEYRLHEKPVPSSIDPSWLQLFPTVWAERAGMGLANQVPPVVVELRSGASPVAVRQYPMSKEAREGIRPHIQRFLDLGVLVPCQSPWNTPLLPVKKPGTNDYRPVQDLREINKRVQDIHPTVPNPYNLLSSLPPSHTWYSVLDLKDAFFCLKLHPNSQPLFAFEWRDPEKGNTGQLTWTRLPQGFKNSPTLFNEALHRDLAPFRALNPQVVLLQYVDDLLVAAPTYRDCKEGTQKLLQELSKLGYRVSAKKAQLCQKEVTYLGYLLKEGKRWLTPARKATVMKIPPPTTPRQVREFLGTAGFCRLWIPGFASLAAPLYPLTKPSIPFIWTEEHQKAFDRIKEALLSAPALALPDLTKPFTLYVDERAGVARGVLTQTLGPWRRPVAYLSKKLDPVASGWPTCLKAVAAVALLLKDADKLTLGQNVTVIASHSLESIVRQPPDRWMTNARMTHYQSLLLNERVSFAPPAVLNPATLLPVESEATPVHRCSEILAEETGTRRDLKDQPLPGVPAWYTDGSSFIAEGKRRAGAAIVDGKRTVWASSLPEGTSAQKAELVALTQALRLAEGKDINIYTDSRYAFATAHIHGAIYKQRGWLTSAGKDIKNKEEILALLEAIHLPKRVAIIHCPGHQKGNDPVATGNRRADEAAKQAALSTRVLAETTKPAGKRTADGSEFEKRTADGSEFESPKKKAKVE

SEQ ID NO: 7460 - protein, 2096 aa, synthetic construct
MPAAKRVKLDGGDKKYSIGLDIGTNSVGWAVITDEYKVPSKKFKVLGNTDRHSIKKNLIGALLFDSGETAEATRLKRTARRRYTRRKNRICYLQEIFSNEMAKVDDSFFHRLEESFLVEEDKKHERHPIFGNIVDEVAYHEKYPTIYHLRKKLVDSTDKADLRLIYLALAHMIKFRGHFLIEGDLNPDNSDVDKLFIQLVQTYNQLFEENPINASGVDAKAILSARLSKSRRLENLIAQLPGEKKNGLFGNLIALSLGLTPNFKSNFDLAEDAKLQLSKDTYDDDLDNLLAQIGDQYADLFLAAKNLSDAILLSDILRVNTEITKAPLSASMIKRYDEHHQDLTLLKALVRQQLPEKYKEIFFDQSKNGYAGYIDGGASQEEFYKFIKPILEKMDGTEELLVKLNREDLLRKQRTFDNGSIPHQIHLGELHAILRRQEDFYPFLKDNREKIEKILTFRIPYYVGPLARGNSRFAWMTRKSEETITPWNFEEVVDKGASAQSFIERMTNFDKNLPNEKVLPKHSLLYEYFTVYNELTKVKYVTEGMRKPAFLSGEQKKAIVDLLFKTNRKVTVKQLKEDYFKKIECFDSVEISGVEDRFNASLGTYHDLLKIIKDKDFLDNEENEDILEDIVLTLTLFEDREMIEERLKTYAHLFDDKVMKQLKRRRYTGWGRLSRKLINGIRDKQSGKTILDFLKSDGFANRNFMQLIHDDSLTFKEDIQKAQVSGQGDSLHEHIANLAGSPAIKKGILQTVKVVDELVKVMGRHKPENIVIEMARENQTTQKGQKNSRERMKRIEEGIKELGSQILKEHPVENTQLQNEKLYLYYLQNGRDMYVDQELDINRLSDYDVDHIVPQSFLKDDSIDNKVLTRSDKARGKSDNVPSEEVVKKMKNYWRQLLNAKLITQRKFDNLTKAERGGLSELDKAGFIKRQLVETRQITKHVAQILDSRMNTKYDENDKLIREVKVITLKSKLVSDFRKDFQFYKVREINNYHHAHDAYLNAVVGTALIKKYPKLESEFVYGDYKVYDVRKMIAKSEQEIGKATAKYFFYSNIMNFFKTEITLANGEIRKRPLIETNGETGEIVWDKGRDFATVRKVLSMPQVNIVKKTEVQTGGFSKESILPKRNSDKLIARKKDWDPKKYGGFDSPTVAYSVLVVAKVEKGKSKKLKSVKELLGITIMERSSFEKNPIDFLEAKGYKEVKKDLIIKLPKYSLFELENGRKRMLASAGELQKGNELALPSKYVNFLYLASHYEKLKGSPEDNEQKQLFVEQHKHYLDEIIEQISEFSKRVILADANLDKVLSAYNKHRDKPIREQAENIIHLFTLTNLGAPAAFKYFDTTIDRKRYTSTKEVLDATLIHQSITGLYETRIDLSQLGGDGGGGGEAAAKPAPGGTLNIEDEYRLHETSKEPDVPLGSTWLSDFPQAWAETGGMGLAVRQAPLIIPLKATSTPVSIKQYPMSQEARLGIKPHIQRLLDQGILVPCQSPWNTPLLPVKKPGTNDYRPVQDLREVNKRVEDIHPTVPNPYNLLSGLPPSHQWYTVLDLKDAFFCLRLHPTSQPLFAFEWRDPEMGISGQLTWTRLPQGFKNSPTLFDEALHRDLADFRIQHPDLILLQYVDDLLLAATSEQDCQRGTRALLQTLGNLGYRASAKKAQICQKQVKYLGYLLKEGQRWLTEARKETVMGQPTPKTPRQLREFLGTAGFCRLWIPGFAEMAAPLYPLTKTGTLFNWGPDQQKAYQEIKQALLTAPALGLPDLTKPFELFVDEKQGYAKGVLTQKLGPWRRPVAYLSKKLDPVAAGWPPCLRMVAAIAVLTKDAGKLTMGQPLVILAPHAVEALVKQPPDRWLSNARMTHYQAMLLDTDRVQFGPVVALNPATLLPLPEKEAPHDCLEILAETHGTRPDLTDQPIPDADYTWYTDGSSFLQEGQRRAGAAVTTETEVIWARALPAGTSAQRAELIALTQALKMAEGKKLNVYTDSRYAFATAHVHGEIYRRRGLLTSEGREIKNKNEILALLKALFLPKRLSIIHCPGHQKGNSAEARGNRMADQAAREAAMKAVLETSTLLAGKRTADGSEFEKRTADGSEFESPKKKAKVE

SEQ ID NO: 7461 - protein, 2096 aa, synthetic construct
MPAAKRVKLDGGDKKYSIGLDIGTNSVGWAVITDEYKVPSKKFKVLGNTDRHSIKKNLIGALLFDSGETAEATRLKRTARRRYTRRKNRICYLQEIFSNEMAKVDDSFFHRLEESFLVEEDKKHERHPIFGNIVDEVAYHEKYPTIYHLRKKLVDSTDKADLRLIYLALAHMIKFRGHFLIEGDLNPDNSDVDKLFIQLVQTYNQLFEENPINASGVDAKAILSARLSKSRRLENLIAQLPGEKKNGLFGNLIALSLGLTPNFKSNFDLAEDAKLQLSKDTYDDDLDNLLAQIGDQYADLFLAAKNLSDAILLSDILRVNTEITKAPLSASMIKRYDEHHQDLTLLKALVRQQLPEKYKEIFFDQSKNGYAGYIDGGASQEEFYKFIKPILEKMDGTEELLVKLNREDLLRKQRTFDNGSIPHQIHLGELHAILRRQEDFYPFLKDNREKIEKILTFRIPYYVGPLARGNSRFAWMTRKSEETITPWNFEEVVDKGASAQSFIERMTNFDKNLPNEKVLPKHSLLYEYFTVYNELTKVKYVTEGMRKPAFLSGEQKKAIVDLLFKTNRKVTVKQLKEDYFKKIECFDSVEISGVEDRFNASLGTYHDLLKIIKDKDFLDNEENEDILEDIVLTLTLFEDREMIEERLKTYAHLFDDKVMKQLKRRRYTGWGRLSRKLINGIRDKQSGKTILDFLKSDGFANRNFMQLIHDDSLTFKEDIQKAQVSGQGDSLHEHIANLAGSPAIKKGILQTVKVVDELVKVMGRHKPENIVIEMARENQTTQKGQKNSRERMKRIEEGIKELGSQILKEHPVENTQLQNEKLYLYYLQNGRDMYVDQELDINRLSDYDVDHIVPQSFLKDDSIDNKVLTRSDKARGKSDNVPSEEVVKKMKNYWRQLLNAKLITQRKFDNLTKAERGGLSELDKAGFIKRQLVETRQITKHVAQILDSRMNTKYDENDKLIREVKVITLKSKLVSDFRKDFQFYKVREINNYHHAHDAYLNAVVGTALIKKYPKLESEFVYGDYKVYDVRKMIAKSEQEIGKATAKYFFYSNIMNFFKTEITLANGEIRKRPLIETNGETGEIVWDKGRDFATVRKVLSMPQVNIVKKTEVQTGGFSKESILPKRNSDKLIARKKDWDPKKYGGFDSPTVAYSVLVVAKVEKGKSKKLKSVKELLGITIMERSSFEKNPIDFLEAKGYKEVKKDLIIKLPKYSLFELENGRKRMLASAGELQKGNELALPSKYVNFLYLASHYEKLKGSPEDNEQKQLFVEQHKHYLDEIIEQISEFSKRVILADANLDKVLSAYNKHRDKPIREQAENIIHLFTLTNLGAPAAFKYFDTTIDRKRYTSTKEVLDATLIHQSITGLYETRIDLSQLGGDGGGGGEAAAKPAPGGTLNIEDEYRLHETSKEPDVPLGSTWLSDFPQAWAETGGMGLAVRQAPLIIPLKATSTPVSIKQYPMSQEARLGIKPHIQRLLDQGILVPCQSPWNTPLLPVKKPGTNDYRPVQDLREVNKRVEDIHPTVPNPYNLLSGLPPSHQWYTVLDLKDAFFCLRLHPTSQPLFAFEWRDPEMGISGQLTWTRLPQGFKNSPTLFNEALHRDLADFRIQHPDLILLQYVDDLLLAATSEQDCQRGTRALLQTLGNLGYRASAKKAQICQKQVKYLGYLLKEGQRWLTEARKETVMGQPTPKTPRQLREFLGKAGFCRLFIPGFAEMAAPLYPLTKPGTLFNWGPDQQKAYQEIKQALLTAPALGLPDLTKPFELFVDEKQGYAKGVLTQKLGPWRRPVAYLSKKLDPVAAGWPPCLRMVAAIAVLTKDAGKLTMGQPLVILAPHAVEALVKQPPDRWLSNARMTHYQAMLLDTDRVQFGPVVALNPATLLPLPEKEAPHDCLEILAETHGTRPDLTDQPIPDADYTWYTDGSSFLQEGQRRAGAAVTTETEVIWARALPAGTSAQRAELIALTQALKMAEGKKLNVYTDSRYAFATAHVHGEIYRRRGWLTSEGREIKNKNEILALLKALFLPKRLSIIHCPGHQKGNSAEARGNRMADQAAREAAMKAVLETSTLLAGKRTADGSEFEKRTADGSEFESPKKKAKVE

SEQ ID NO: 7462 - protein, 2098 aa, synthetic construct
MPAAKRVKLDGGDKKYSIGLDIGTNSVGWAVITDEYKVPSKKFKVLGNTDRHSIKKNLIGALLFDSGETAEATRLKRTARRRYTRRKNRICYLQEIFSNEMAKVDDSFFHRLEESFLVEEDKKHERHPIFGNIVDEVAYHEKYPTIYHLRKKLVDSTDKADLRLIYLALAHMIKFRGHFLIEGDLNPDNSDVDKLFIQLVQTYNQLFEENPINASGVDAKAILSARLSKSRRLENLIAQLPGEKKNGLFGNLIALSLGLTPNFKSNFDLAEDAKLQLSKDTYDDDLDNLLAQIGDQYADLFLAAKNLSDAILLSDILRVNTEITKAPLSASMIKRYDEHHQDLTLLKALVRQQLPEKYKEIFFDQSKNGYAGYIDGGASQEEFYKFIKPILEKMDGTEELLVKLNREDLLRKQRTFDNGSIPHQIHLGELHAILRRQEDFYPFLKDNREKIEKILTFRIPYYVGPLARGNSRFAWMTRKSEETITPWNFEEVVDKGASAQSFIERMTNFDKNLPNEKVLPKHSLLYEYFTVYNELTKVKYVTEGMRKPAFLSGEQKKAIVDLLFKTNRKVTVKQLKEDYFKKIECFDSVEISGVEDRFNASLGTYHDLLKIIKDKDFLDNEENEDILEDIVLTLTLFEDREMIEERLKTYAHLFDDKVMKQLKRRRYTGWGRLSRKLINGIRDKQSGKTILDFLKSDGFANRNFMQLIHDDSLTFKEDIQKAQVSGQGDSLHEHIANLAGSPAIKKGILQTVKVVDELVKVMGRHKPENIVIEMARENQTTQKGQKNSRERMKRIEEGIKELGSQILKEHPVENTQLQNEKLYLYYLQNGRDMYVDQELDINRLSDYDVDHIVPQSFLKDDSIDNKVLTRSDKARGKSDNVPSEEVVKKMKNYWRQLLNAKLITQRKFDNLTKAERGGLSELDKAGFIKRQLVETRQITKHVAQILDSRMNTKYDENDKLIREVKVITLKSKLVSDFRKDFQFYKVREINNYHHAHDAYLNAVVGTALIKKYPKLESEFVYGDYKVYDVRKMIAKSEQEIGKATAKYFFYSNIMNFFKTEITLANGEIRKRPLIETNGETGEIVWDKGRDFATVRKVLSMPQVNIVKKTEVQTGGFSKESILPKRNSDKLIARKKDWDPKKYGGFDSPTVAYSVLVVAKVEKGKSKKLKSVKELLGITIMERSSFEKNPIDFLEAKGYKEVKKDLIIKLPKYSLFELENGRKRMLASAGELQKGNELALPSKYVNFLYLASHYEKLKGSPEDNEQKQLFVEQHKHYLDEIIEQISEFSKRVILADANLDKVLSAYNKHRDKPIREQAENIIHLFTLTNLGAPAAFKYFDTTIDRKRYTSTKEVLDATLIHQSITGLYETRIDLSQLGGDGGGGGPAPEAAAKGGTAPLEEEYRLFLEAPIQNVTLLEQWKREIPKVWAEINPPGLASTQAPIHVQLLSTALPVRVRQYPITLEAKRSLRETIRKFRAAGILRPVHSPWNTPLLPVRKSGTSEYRMVQDLREVNKRVETIHPTVPNPYTLLSLLPPDRIWYSVLDLKDAFFCIPLAPESQLIFAFEWADAEEGESGQLTWTRLPQGFKNSPTLFNEALNRDLQGFRLDHPSVSLLQYVDDLLIAADTQAACLSATRDLLMTLAELGYRVSGKKAQLCQEEVTYLGFKIHKGSRSLSNSRTQAILQIPVPKTKRQVREFLGTIGYCRLWIPGFAELAQPLYAATRPGNDPLVWGEKEEEAFQSLKLALTQPPALALPSLDKPFQLFVEETSGAAKGVLTQALGPWKRPVAYLSKRLDPVAAGWPRCLRAIAAAALLTREASKLTFGQDIEITSSHNLESLLRSPPDKWLTNARITQYQVLLLDPPRVRFKQTAALNPATLLPETDDTLPIHHCLDTLDSLTSTRPDLTDQPLAQAEATLFTDGSSYIRDGKRYAGAAVVTLDSVIWAEPLPIGTSAQKAELIALTKALEWSKDKSVNIYTDSRYAFATLHVHGMIYRERGWLTAGGKAIKNAPEILALLTAVWLPKRVAVMHCKGHQKDDAPTSTGNRRADEVAREVAIRPLSTQATISAGKRTADGSEFEKRTADGSEFESPKKKAKVE

SEQ ID NO: 7463 - protein, 2102 aa, synthetic construct
MPAAKRVKLDGGDKKYSIGLDIGTNSVGWAVITDEYKVPSKKFKVLGNTDRHSIKKNLIGALLFDSGETAEATRLKRTARRRYTRRKNRICYLQEIFSNEMAKVDDSFFHRLEESFLVEEDKKHERHPIFGNIVDEVAYHEKYPTIYHLRKKLVDSTDKADLRLIYLALAHMIKFRGHFLIEGDLNPDNSDVDKLFIQLVQTYNQLFEENPINASGVDAKAILSARLSKSRRLENLIAQLPGEKKNGLFGNLIALSLGLTPNFKSNFDLAEDAKLQLSKDTYDDDLDNLLAQIGDQYADLFLAAKNLSDAILLSDILRVNTEITKAPLSASMIKRYDEHHQDLTLLKALVRQQLPEKYKEIFFDQSKNGYAGYIDGGASQEEFYKFIKPILEKMDGTEELLVKLNREDLLRKQRTFDNGSIPHQIHLGELHAILRRQEDFYPFLKDNREKIEKILTFRIPYYVGPLARGNSRFAWMTRKSEETITPWNFEEVVDKGASAQSFIERMTNFDKNLPNEKVLPKHSLLYEYFTVYNELTKVKYVTEGMRKPAFLSGEQKKAIVDLLFKTNRKVTVKQLKEDYFKKIECFDSVEISGVEDRFNASLGTYHDLLKIIKDKDFLDNEENEDILEDIVLTLTLFEDREMIEERLKTYAHLFDDKVMKQLKRRRYTGWGRLSRKLINGIRDKQSGKTILDFLKSDGFANRNFMQLIHDDSLTFKEDIQKAQVSGQGDSLHEHIANLAGSPAIKKGILQTVKVVDELVKVMGRHKPENIVIEMARENQTTQKGQKNSRERMKRIEEGIKELGSQILKEHPVENTQLQNEKLYLYYLQNGRDMYVDQELDINRLSDYDVDHIVPQSFLKDDSIDNKVLTRSDKARGKSDNVPSEEVVKKMKNYWRQLLNAKLITQRKFDNLTKAERGGLSELDKAGFIKRQLVETRQITKHVAQILDSRMNTKYDENDKLIREVKVITLKSKLVSDFRKDFQFYKVREINNYHHAHDAYLNAVVGTALIKKYPKLESEFVYGDYKVYDVRKMIAKSEQEIGKATAKYFFYSNIMNFFKTEITLANGEIRKRPLIETNGETGEIVWDKGRDFATVRKVLSMPQVNIVKKTEVQTGGFSKESILPKRNSDKLIARKKDWDPKKYGGFDSPTVAYSVLVVAKVEKGKSKKLKSVKELLGITIMERSSFEKNPIDFLEAKGYKEVKKDLIIKLPKYSLFELENGRKRMLASAGELQKGNELALPSKYVNFLYLASHYEKLKGSPEDNEQKQLFVEQHKHYLDEIIEQISEFSKRVILADANLDKVLSAYNKHRDKPIREQAENIIHLFTLTNLGAPAAFKYFDTTIDRKRYTSTKEVLDATLIHQSITGLYETRIDLSQLGGDGGGGGPAPEAAAKGGTVSLQDEHRLFDIPVTTSLPDVWLQDFPQAWAETGGLGRAKCQAPIIIDLKPTAVPVSIKQYPMSLEAHMGIRQHIIKFLELGVLRPCRSPWNTPLLPVKKPGTQDYRPVQDLREINKRTVDIHPTVPNPYNLLSTLKPDYSWYTVLDLKDAFFCLPLAPQSQELFAFEWKDPERGISGQLTWTRLPQGFKNSPTLFNEALHRDLTDFRTQHPEVTLLQYVDDLLLAAPTKKACTQGTRHLLQELGEKGYRASAKKAQICQTKVTYLGYILSEGKRWLTPGRIETVARIPPPRNPREVREFLGTAGFCRLWIPGFAELAAPLYALTKPSTPFTWQTEHQLAFEALKKALLSAPALGLPDTSKPFTLFLDERQGIAKGVLTQKLGPWKRPVAYLSKKLDPVAAGWPPCLRIMAATAMLVKDSAKLTLGQPLTVITPHTLEAIVRQPPDRWITNARLTHYQALLLDTDRVQFGPPVTLNPATLLPVPENQPSPHDCRQVLAETHGTREDLKDQELPDADHTWYTDGSSYLDSGTRRAGAAVVDGHNTIWAQSLPPGTSAQKAELIALTKALELSKGKKANIYTDSRYAFATAHTHGSIYERRGWLTSEGKEIKNKAEIIALLKALFLPQEVAIIHCPGHQKGQDPVAVGNRQADRVARQAAMAEVLTLATEPDNTSHITAGKRTADGSEFEKRTADGSEFESPKKKAKVE

SEQ ID NO: 7464 - protein, 2173 aa, synthetic construct
MPAAKRVKLDGGDKKYSIGLDIGTNSVGWAVITDEYKVPSKKFKVLGNTDRHSIKKNLIGALLFDSGETAEATRLKRTARRRYTRRKNRICYLQEIFSNEMAKVDDSFFHRLEESFLVEEDKKHERHPIFGNIVDEVAYHEKYPTIYHLRKKLVDSTDKADLRLIYLALAHMIKFRGHFLIEGDLNPDNSDVDKLFIQLVQTYNQLFEENPINASGVDAKAILSARLSKSRRLENLIAQLPGEKKNGLFGNLIALSLGLTPNFKSNFDLAEDAKLQLSKDTYDDDLDNLLAQIGDQYADLFLAAKNLSDAILLSDILRVNTEITKAPLSASMIKRYDEHHQDLTLLKALVRQQLPEKYKEIFFDQSKNGYAGYIDGGASQEEFYKFIKPILEKMDGTEELLVKLNREDLLRKQRTFDNGSIPHQIHLGELHAILRRQEDFYPFLKDNREKIEKILTFRIPYYVGPLARGNSRFAWMTRKSEETITPWNFEEVVDKGASAQSFIERMTNFDKNLPNEKVLPKHSLLYEYFTVYNELTKVKYVTEGMRKPAFLSGEQKKAIVDLLFKTNRKVTVKQLKEDYFKKIECFDSVEISGVEDRFNASLGTYHDLLKIIKDKDFLDNEENEDILEDIVLTLTLFEDREMIEERLKTYAHLFDDKVMKQLKRRRYTGWGRLSRKLINGIRDKQSGKTILDFLKSDGFANRNFMQLIHDDSLTFKEDIQKAQVSGQGDSLHEHIANLAGSPAIKKGILQTVKVVDELVKVMGRHKPENIVIEMARENQTTQKGQKNSRERMKRIEEGIKELGSQILKEHPVENTQLQNEKLYLYYLQNGRDMYVDQELDINRLSDYDVDHIVPQSFLKDDSIDNKVLTRSDKARGKSDNVPSEEVVKKMKNYWRQLLNAKLITQRKFDNLTKAERGGLSELDKAGFIKRQLVETRQITKHVAQILDSRMNTKYDENDKLIREVKVITLKSKLVSDFRKDFQFYKVREINNYHHAHDAYLNAVVGTALIKKYPKLESEFVYGDYKVYDVRKMIAKSEQEIGKATAKYFFYSNIMNFFKTEITLANGEIRKRPLIETNGETGEIVWDKGRDFATVRKVLSMPQVNIVKKTEVQTGGFSKESILPKRNSDKLIARKKDWDPKKYGGFDSPTVAYSVLVVAKVEKGKSKKLKSVKELLGITIMERSSFEKNPIDFLEAKGYKEVKKDLIIKLPKYSLFELENGRKRMLASAGELQKGNELALPSKYVNFLYLASHYEKLKGSPEDNEQKQLFVEQHKHYLDEIIEQISEFSKRVILADANLDKVLSAYNKHRDKPIREQAENIIHLFTLTNLGAPAAFKYFDTTIDRKRYTSTKEVLDATLIHQSITGLYETRIDLSQLGGDGGGGGPAPEAAAKGGMDLLKPLTVERKGVKIKGYWNSQADITCVPKDLLQGEEPVRQQNVTTIHGTQEGDVYYVNLKIDGRRINTEVIGTTLDYAIITPGDVPWILKKPLELTIKLDLEEQQGTLLNNSILSKKGKEELKQLFEKYSALWQSWENQVGHRRIRPHKIATGTVKPTPQKQYHINPKAKPDIQIVINDLLKQGVLIQKESTMNTPVYPVPKPNGRWRMVLDYRAVNKVTPLIAVQNQHSYGILGSLFKGRYKTTIDLSNGFWAHPIVPEDYWITAFTWQGKQYCWTVLPQGFLNSPGLFTGDVVDLLQGIPNVEVYVDDVYISHDSEKEHLEYLDILFNRLKEAGYIISLKKSNIANSIVDFLGFQITNEGRGLTDTFKEKLENITAPTTLKQLQSILGLLNFARNFIPDFTELIAPLYALIPKSTKNYVPWQIEHSTTLETLITKLNGAEYLQGRKGDKTLIMKVNASYTTGYIRYYNEGEKKPISYVSIVFSKTELKFTELEKLLTTVHKGLLKALDLSMGQNIHVYSPIVSMQNIQKTPQTAKKALASRWLSWLSYLEDPRIRFFYDPQMPALKDLPAVDTGKDNKKHPSNFQHIFYTDGSAITSPTKEGHLNAGMGIVYFINKDGNLQKQQEWSISLGNHTAQFAEIAAFEFALKKCLPLGGNILVVTDSNYVAKAYNEELDVWASNGFVNNRKKPLKHISKWKSVADLKRLRPDVVVTHEPGHQKLDSSPHAYGNNLADQLATQASFKVHAGKRTADGSEFEKRTADGSEFESPKKKAKVE

SEQ ID NO: 7465 - protein, 2087 aa, synthetic construct
MPAAKRVKLDGGDKKYSIGLDIGTNSVGWAVITDEYKVPSKKFKVLGNTDRHSIKKNLIGALLFDSGETAEATRLKRTARRRYTRRKNRICYLQEIFSNEMAKVDDSFFHRLEESFLVEEDKKHERHPIFGNIVDEVAYHEKYPTIYHLRKKLVDSTDKADLRLIYLALAHMIKFRGHFLIEGDLNPDNSDVDKLFIQLVQTYNQLFEENPINASGVDAKAILSARLSKSRRLENLIAQLPGEKKNGLFGNLIALSLGLTPNFKSNFDLAEDAKLQLSKDTYDDDLDNLLAQIGDQYADLFLAAKNLSDAILLSDILRVNTEITKAPLSASMIKRYDEHHQDLTLLKALVRQQLPEKYKEIFFDQSKNGYAGYIDGGASQEEFYKFIKPILEKMDGTEELLVKLNREDLLRKQRTFDNGSIPHQIHLGELHAILRRQEDFYPFLKDNREKIEKILTFRIPYYVGPLARGNSRFAWMTRKSEETITPWNFEEVVDKGASAQSFIERMTNFDKNLPNEKVLPKHSLLYEYFTVYNELTKVKYVTEGMRKPAFLSGEQKKAIVDLLFKTNRKVTVKQLKEDYFKKIECFDSVEISGVEDRFNASLGTYHDLLKIIKDKDFLDNEENEDILEDIVLTLTLFEDREMIEERLKTYAHLFDDKVMKQLKRRRYTGWGRLSRKLINGIRDKQSGKTILDFLKSDGFANRNFMQLIHDDSLTFKEDIQKAQVSGQGDSLHEHIANLAGSPAIKKGILQTVKVVDELVKVMGRHKPENIVIEMARENQTTQKGQKNSRERMKRIEEGIKELGSQILKEHPVENTQLQNEKLYLYYLQNGRDMYVDQELDINRLSDYDVDHIVPQSFLKDDSIDNKVLTRSDKARGKSDNVPSEEVVKKMKNYWRQLLNAKLITQRKFDNLTKAERGGLSELDKAGFIKRQLVETRQITKHVAQILDSRMNTKYDENDKLIREVKVITLKSKLVSDFRKDFQFYKVREINNYHHAHDAYLNAVVGTALIKKYPKLESEFVYGDYKVYDVRKMIAKSEQEIGKATAKYFFYSNIMNFFKTEITLANGEIRKRPLIETNGETGEIVWDKGRDFATVRKVLSMPQVNIVKKTEVQTGGFSKESILPKRNSDKLIARKKDWDPKKYGGFDSPTVAYSVLVVAKVEKGKSKKLKSVKELLGITIMERSSFEKNPIDFLEAKGYKEVKKDLIIKLPKYSLFELENGRKRMLASAGELQKGNELALPSKYVNFLYLASHYEKLKGSPEDNEQKQLFVEQHKHYLDEIIEQISEFSKRVILADANLDKVLSAYNKHRDKPIREQAENIIHLFTLTNLGAPAAFKYFDTTIDRKRYTSTKEVLDATLIHQSITGLYETRIDLSQLGGDGGGGGPAPEAAAKGGVPWILKKPLELTIKLDLEEQQGTLLNNSILSKKGKEELKQLFEKYSALWQSWENQVGHRRIRPHKIATGTVKPTPQKQYHINPKAKPDIQIVINDLLKQGVLIQKESTMNTPVYPVPKPNGRWRMVLDYRAVNKVTPLIAVQNQHSYGILGSLFKGRYKTTIDLSNGFWAHPIVPEDYWITAFTWQGKQYCWTVLPQGFLNSPGLFNGDVVDLLQGIPNVEVYVDDVYISHDSEKEHLEYLDILFNRLKEAGYIISLKKSNIANSIVDFLGFQITNEGRGLTDTFKEKLENITAPTTLKQLQSILGLLNFARNFIPDFTELIAPLYALIPKSPKNYVPWQIEHSTTLETLITKLNGAEYLQGRKGDKTLIMKVNASYTTGYIRYYNEGEKKPISYVSIVFSKTELKFTELEKLLTTVHKGLLKALDLSMGQNIHVYSPIVSMQNIQKTPQTAKKALASRWLSWLSYLEDPRIRFFYDPQMPALKDLPAVDTGKDNKKHPSNFQHIFYTDGSAITSPTKEGHLNAGMGIVYFINKDGNLQKQQEWSISLGNHTAQFAEIAAFEFALKKCLPLGGNILVVTDSNYVAKAYNEELDVWASNGFVNNRKKPLKHISKWKSVADLKRLRPDVVVTHEPGHQKLDSSPHAYGNNLADQLATQASFKVHAGKRTADGSEFEKRTADGSEFESPKKKAKVE

SEQ ID NO: 7466 - protein, 2173 aa, synthetic construct
MPAAKRVKLDGGDKKYSIGLDIGTNSVGWAVITDEYKVPSKKFKVLGNTDRHSIKKNLIGALLFDSGETAEATRLKRTARRRYTRRKNRICYLQEIFSNEMAKVDDSFFHRLEESFLVEEDKKHERHPIFGNIVDEVAYHEKYPTIYHLRKKLVDSTDKADLRLIYLALAHMIKFRGHFLIEGDLNPDNSDVDKLFIQLVQTYNQLFEENPINASGVDAKAILSARLSKSRRLENLIAQLPGEKKNGLFGNLIALSLGLTPNFKSNFDLAEDAKLQLSKDTYDDDLDNLLAQIGDQYADLFLAAKNLSDAILLSDILRVNTEITKAPLSASMIKRYDEHHQDLTLLKALVRQQLPEKYKEIFFDQSKNGYAGYIDGGASQEEFYKFIKPILEKMDGTEELLVKLNREDLLRKQRTFDNGSIPHQIHLGELHAILRRQEDFYPFLKDNREKIEKILTFRIPYYVGPLARGNSRFAWMTRKSEETITPWNFEEVVDKGASAQSFIERMTNFDKNLPNEKVLPKHSLLYEYFTVYNELTKVKYVTEGMRKPAFLSGEQKKAIVDLLFKTNRKVTVKQLKEDYFKKIECFDSVEISGVEDRFNASLGTYHDLLKIIKDKDFLDNEENEDILEDIVLTLTLFEDREMIEERLKTYAHLFDDKVMKQLKRRRYTGWGRLSRKLINGIRDKQSGKTILDFLKSDGFANRNFMQLIHDDSLTFKEDIQKAQVSGQGDSLHEHIANLAGSPAIKKGILQTVKVVDELVKVMGRHKPENIVIEMARENQTTQKGQKNSRERMKRIEEGIKELGSQILKEHPVENTQLQNEKLYLYYLQNGRDMYVDQELDINRLSDYDVDHIVPQSFLKDDSIDNKVLTRSDKARGKSDNVPSEEVVKKMKNYWRQLLNAKLITQRKFDNLTKAERGGLSELDKAGFIKRQLVETRQITKHVAQILDSRMNTKYDENDKLIREVKVITLKSKLVSDFRKDFQFYKVREINNYHHAHDAYLNAVVGTALIKKYPKLESEFVYGDYKVYDVRKMIAKSEQEIGKATAKYFFYSNIMNFFKTEITLANGEIRKRPLIETNGETGEIVWDKGRDFATVRKVLSMPQVNIVKKTEVQTGGFSKESILPKRNSDKLIARKKDWDPKKYGGFDSPTVAYSVLVVAKVEKGKSKKLKSVKELLGITIMERSSFEKNPIDFLEAKGYKEVKKDLIIKLPKYSLFELENGRKRMLASAGELQKGNELALPSKYVNFLYLASHYEKLKGSPEDNEQKQLFVEQHKHYLDEIIEQISEFSKRVILADANLDKVLSAYNKHRDKPIREQAENIIHLFTLTNLGAPAAFKYFDTTIDRKRYTSTKEVLDATLIHQSITGLYETRIDLSQLGGDGGGGGPAPEAAAKGGMDLLKPLTVERKGVKIKGYWNSQADITCVPKDLLQGEEPVRQQNVTTIHGTQEGDVYYVNLKIDGRRINTEVIGTTLDYAIITPGDVPWILKKPLELTIKLDLEEQQGTLLNNSILSKKGKEELKQLFEKYSALWQSWENQVGHRRIRPHKIATGTVKPTPQKQYHINPKAKPDIQIVINDLLKQGVLIQKESTMNTPVYPVPKPNGRWRMVLDYRAVNKVTPLIAVQNQHSYGILGSLFKGRYKTTIDLSNGFWAHPIVPEDYWITAFTWQGKQYCWTVLPQGFLNSPGLFNGDVVDLLQGIPNVEVYVDDVYISHDSEKEHLEYLDILFNRLKEAGYIISLKKSNIANSIVDFLGFQITNEGRGLTDTFKEKLENITAPTTLKQLQSILGLLNFARNFIPDFTELIAPLYALIPKSPKNYVPWQIEHSTTLETLITKLNGAEYLQGRKGDKTLIMKVNASYTTGYIRYYNEGEKKPISYVSIVFSKTELKFTELEKLLTTVHKGLLKALDLSMGQNIHVYSPIVSMQNIQKTPQTAKKALASRWLSWLSYLEDPRIRFFYDPQMPALKDLPAVDTGKDNKKHPSNFQHIFYTDGSAITSPTKEGHLNAGMGIVYFINKDGNLQKQQEWSISLGNHTAQFAEIAAFEFALKKCLPLGGNILVVTDSNYVAKAYNEELDVWASNGFVNNRKKPLKHISKWKSVADLKRLRPDVVVTHEPGHQKLDSSPHAYGNNLADQLATQASFKVHAGKRTADGSEFEKRTADGSEFESPKKKAKVE

SEQ ID NO: 7467 - protein, 2094 aa, synthetic construct
MPAAKRVKLDGGDKKYSIGLDIGTNSVGWAVITDEYKVPSKKFKVLGNTDRHSIKKNLIGALLFDSGETAEATRLKRTARRRYTRRKNRICYLQEIFSNEMAKVDDSFFHRLEESFLVEEDKKHERHPIFGNIVDEVAYHEKYPTIYHLRKKLVDSTDKADLRLIYLALAHMIKFRGHFLIEGDLNPDNSDVDKLFIQLVQTYNQLFEENPINASGVDAKAILSARLSKSRRLENLIAQLPGEKKNGLFGNLIALSLGLTPNFKSNFDLAEDAKLQLSKDTYDDDLDNLLAQIGDQYADLFLAAKNLSDAILLSDILRVNTEITKAPLSASMIKRYDEHHQDLTLLKALVRQQLPEKYKEIFFDQSKNGYAGYIDGGASQEEFYKFIKPILEKMDGTEELLVKLNREDLLRKQRTFDNGSIPHQIHLGELHAILRRQEDFYPFLKDNREKIEKILTFRIPYYVGPLARGNSRFAWMTRKSEETITPWNFEEVVDKGASAQSFIERMTNFDKNLPNEKVLPKHSLLYEYFTVYNELTKVKYVTEGMRKPAFLSGEQKKAIVDLLFKTNRKVTVKQLKEDYFKKIECFDSVEISGVEDRFNASLGTYHDLLKIIKDKDFLDNEENEDILEDIVLTLTLFEDREMIEERLKTYAHLFDDKVMKQLKRRRYTGWGRLSRKLINGIRDKQSGKTILDFLKSDGFANRNFMQLIHDDSLTFKEDIQKAQVSGQGDSLHEHIANLAGSPAIKKGILQTVKVVDELVKVMGRHKPENIVIEMARENQTTQKGQKNSRERMKRIEEGIKELGSQILKEHPVENTQLQNEKLYLYYLQNGRDMYVDQELDINRLSDYDVDHIVPQSFLKDDSIDNKVLTRSDKARGKSDNVPSEEVVKKMKNYWRQLLNAKLITQRKFDNLTKAERGGLSELDKAGFIKRQLVETRQITKHVAQILDSRMNTKYDENDKLIREVKVITLKSKLVSDFRKDFQFYKVREINNYHHAHDAYLNAVVGTALIKKYPKLESEFVYGDYKVYDVRKMIAKSEQEIGKATAKYFFYSNIMNFFKTEITLANGEIRKRPLIETNGETGEIVWDKGRDFATVRKVLSMPQVNIVKKTEVQTGGFSKESILPKRNSDKLIARKKDWDPKKYGGFDSPTVAYSVLVVAKVEKGKSKKLKSVKELLGITIMERSSFEKNPIDFLEAKGYKEVKKDLIIKLPKYSLFELENGRKRMLASAGELQKGNELALPSKYVNFLYLASHYEKLKGSPEDNEQKQLFVEQHKHYLDEIIEQISEFSKRVILADANLDKVLSAYNKHRDKPIREQAENIIHLFTLTNLGAPAAFKYFDTTIDRKRYTSTKEVLDATLIHQSITGLYETRIDLSQLGGDGGGGGPAPEAAAKGGVLNLEEEYRLHEKPVPSSIDPSWLQLFPTVWAERAGMGLANQVPPVVVELRSGASPVAVRQYPMSKEAREGIRPHIQKFLDLGVLVPCRSPWNTPLLPVKKPGTNDYRPVQDLREINKRVQDIHPTVPNPYNLLSSLPPSYTWYSVLDLKDAFFCLRLHPNSQPLFAFEWKDPEKGNTGQLTWTRLPQGFKNSPTLFNEALHRDLAPFRALNPQVVLLQYVDDLLVAAPTYEDCKKGTQKLLQELSKLGYRVSAKKAQLCQREVTYLGYLLKEGKRWLTPARKATVMKIPVPTTPRQVREFLGKAGFCRLFIPGFASLAAPLYPLTKPSIPFIWTEEHQQAFDHIKKALLSAPALALPDLTKPFTLYIDERAGVARGVLTQTLGPWRRPVAYLSKKLDPVASGWPTCLKAVAAVALLLKDADKLTLGQNVTVIASHSLESIVRQPPDRWMTNARMTHYQSLLLNERVSFAPPAVLNPATLLPVESEATPVHRCSEILAEETGTRRDLEDQPLPGVPTWYTDGSSFITEGKRRAGAPIVDGKRTVWASSLPEGTSAQKAELVALTQALRLAEGKNINIYTDSRYAFATAHIHGAIYKQRGWLTSAGKDIKNKEEILALLEAIHLPRRVAIIHCPGHQRGSNPVATGNRRADEAAKQAALSTRVLAGTTKPAGKRTADGSEFEKRTADGSEFESPKKKAKVE

SEQ ID NO: 7468 - protein, 2009 aa, synthetic construct
MPAAKRVKLDGGDKKYSIGLDIGTNSVGWAVITDEYKVPSKKFKVLGNTDRHSIKKNLIGALLFDSGETAEATRLKRTARRRYTRRKNRICYLQEIFSNEMAKVDDSFFHRLEESFLVEEDKKHERHPIFGNIVDEVAYHEKYPTIYHLRKKLVDSTDKADLRLIYLALAHMIKFRGHFLIEGDLNPDNSDVDKLFIQLVQTYNQLFEENPINASGVDAKAILSARLSKSRRLENLIAQLPGEKKNGLFGNLIALSLGLTPNFKSNFDLAEDAKLQLSKDTYDDDLDNLLAQIGDQYADLFLAAKNLSDAILLSDILRVNTEITKAPLSASMIKRYDEHHQDLTLLKALVRQQLPEKYKEIFFDQSKNGYAGYIDGGASQEEFYKFIKPILEKMDGTEELLVKLNREDLLRKQRTFDNGSIPHQIHLGELHAILRRQEDFYPFLKDNREKIEKILTFRIPYYVGPLARGNSRFAWMTRKSEETITPWNFEEVVDKGASAQSFIERMTNFDKNLPNEKVLPKHSLLYEYFTVYNELTKVKYVTEGMRKPAFLSGEQKKAIVDLLFKTNRKVTVKQLKEDYFKKIECFDSVEISGVEDRFNASLGTYHDLLKIIKDKDFLDNEENEDILEDIVLTLTLFEDREMIEERLKTYAHLFDDKVMKQLKRRRYTGWGRLSRKLINGIRDKQSGKTILDFLKSDGFANRNFMQLIHDDSLTFKEDIQKAQVSGQGDSLHEHIANLAGSPAIKKGILQTVKVVDELVKVMGRHKPENIVIEMARENQTTQKGQKNSRERMKRIEEGIKELGSQILKEHPVENTQLQNEKLYLYYLQNGRDMYVDQELDINRLSDYDVDHIVPQSFLKDDSIDNKVLTRSDKARGKSDNVPSEEVVKKMKNYWRQLLNAKLITQRKFDNLTKAERGGLSELDKAGFIKRQLVETRQITKHVAQILDSRMNTKYDENDKLIREVKVITLKSKLVSDFRKDFQFYKVREINNYHHAHDAYLNAVVGTALIKKYPKLESEFVYGDYKVYDVRKMIAKSEQEIGKATAKYFFYSNIMNFFKTEITLANGEIRKRPLIETNGETGEIVWDKGRDFATVRKVLSMPQVNIVKKTEVQTGGFSKESILPKRNSDKLIARKKDWDPKKYGGFDSPTVAYSVLVVAKVEKGKSKKLKSVKELLGITIMERSSFEKNPIDFLEAKGYKEVKKDLIIKLPKYSLFELENGRKRMLASAGELQKGNELALPSKYVNFLYLASHYEKLKGSPEDNEQKQLFVEQHKHYLDEIIEQISEFSKRVILADANLDKVLSAYNKHRDKPIREQAENIIHLFTLTNLGAPAAFKYFDTTIDRKRYTSTKEVLDATLIHQSITGLYETRIDLSQLGGDGGGGGPAPEAAAKGGHLPPPPQVDQFPLNLPERLQALNDLVSKALEAGHIEPYSGPGNNPVFPVKKPNGKWRFIHDLRATNAITTTLTSPSPGPPDLTSLPTALPHLQTIDLTDAFFQIPLPKQYQPYFAFTIPQPCNYGPGTRYAWTVLPQGFKNSPTLFQQQLAAVLNPMRKMFPTSTIVQYMDDILLASPTNEELQQLSQLTLQALTTHGLPISQEKTQQTPGQIRFLGQVISPNHITYESTPTIPIKSQWTLTELQVILGEIQWVSKGTPILRKHLQSLYSALHPYRDPRACITLTPQQLHALHAIQQALQHNCRGRLNPALPLLGLISLSTSGTTSVIFQPKQNWPLAWLHTPHPPTSLCPWGHLLACTILTLDKYTLQHYGQLCQSFHHNMSKQALCDFLRNSPHPSVGILIHHMGRFHNLGSQPSGPWKTLLHLPTLLQEPRLLRPIFTLSPVVLDTAPCLFSDGSPQKAAYVLWDQTILQQDITPLPSHETHSAQKGELLALICGLRAAKPWPSLNIFLDSKYLIKYLHSLAIGAFLGTSAHQTLQAALPPLLQGKTIYLHHVRSHTNLPDPISTFNEYTDSLILAPLVPLAGKRTADGSEFEKRTADGSEFESPKKKAKVE

SEQ ID NO: 7469 - protein, 2127 aa, synthetic construct
MPAAKRVKLDGGDKKYSIGLDIGTNSVGWAVITDEYKVPSKKFKVLGNTDRHSIKKNLIGALLFDSGETAEATRLKRTARRRYTRRKNRICYLQEIFSNEMAKVDDSFFHRLEESFLVEEDKKHERHPIFGNIVDEVAYHEKYPTIYHLRKKLVDSTDKADLRLIYLALAHMIKFRGHFLIEGDLNPDNSDVDKLFIQLVQTYNQLFEENPINASGVDAKAILSARLSKSRRLENLIAQLPGEKKNGLFGNLIALSLGLTPNFKSNFDLAEDAKLQLSKDTYDDDLDNLLAQIGDQYADLFLAAKNLSDAILLSDILRVNTEITKAPLSASMIKRYDEHHQDLTLLKALVRQQLPEKYKEIFFDQSKNGYAGYIDGGASQEEFYKFIKPILEKMDGTEELLVKLNREDLLRKQRTFDNGSIPHQIHLGELHAILRRQEDFYPFLKDNREKIEKILTFRIPYYVGPLARGNSRFAWMTRKSEETITPWNFEEVVDKGASAQSFIERMTNFDKNLPNEKVLPKHSLLYEYFTVYNELTKVKYVTEGMRKPAFLSGEQKKAIVDLLFKTNRKVTVKQLKEDYFKKIECFDSVEISGVEDRFNASLGTYHDLLKIIKDKDFLDNEENEDILEDIVLTLTLFEDREMIEERLKTYAHLFDDKVMKQLKRRRYTGWGRLSRKLINGIRDKQSGKTILDFLKSDGFANRNFMQLIHDDSLTFKEDIQKAQVSGQGDSLHEHIANLAGSPAIKKGILQTVKVVDELVKVMGRHKPENIVIEMARENQTTQKGQKNSRERMKRIEEGIKELGSQILKEHPVENTQLQNEKLYLYYLQNGRDMYVDQELDINRLSDYDVDHIVPQSFLKDDSIDNKVLTRSDKARGKSDNVPSEEVVKKMKNYWRQLLNAKLITQRKFDNLTKAERGGLSELDKAGFIKRQLVETRQITKHVAQILDSRMNTKYDENDKLIREVKVITLKSKLVSDFRKDFQFYKVREINNYHHAHDAYLNAVVGTALIKKYPKLESEFVYGDYKVYDVRKMIAKSEQEIGKATAKYFFYSNIMNFFKTEITLANGEIRKRPLIETNGETGEIVWDKGRDFATVRKVLSMPQVNIVKKTEVQTGGFSKESILPKRNSDKLIARKKDWDPKKYGGFDSPTVAYSVLVVAKVEKGKSKKLKSVKELLGITIMERSSFEKNPIDFLEAKGYKEVKKDLIIKLPKYSLFELENGRKRMLASAGELQKGNELALPSKYVNFLYLASHYEKLKGSPEDNEQKQLFVEQHKHYLDEIIEQISEFSKRVILADANLDKVLSAYNKHRDKPIREQAENIIHLFTLTNLGAPAAFKYFDTTIDRKRYTSTKEVLDATLIHQSITGLYETRIDLSQLGGDGGGGGPAPEAAAKGGLLGRDLLTKLKAQIQFSTEGPQVTWEDRPAMCLVLNLEEEYRLHEKPVPPSIDPSWLQLFPMVWAEKAGMGLANQVPPVVVELKSDASPVAVRQYPMSKEAREGIRPHIQRFLDLGILVPCQSPWNTPLLPVKKPGTNDYRPVQDLREVNKRVQDIHPTVPNPYNLLSSLPPSHTWYSVLDLKDAFFCLKLHPNSQPLFAFEWRDPEKGNTGQLTWTRLPQGFKNSPTLFNEALHRDLASFRALNPQVVMLQYVDDLLVAAPTYRDCKEGTRRLLQELSKLGYRVSAKKAQLCREEVTYLGYLLKGGKRWLTPARKATVMKIPTPTTPRQVREFLGTAGFCRLWIPGFASLAAPLYPLTRPKVPFTWTEAHQEAFGRIKEALLSAPALALPDLTKPFALYVDEKEGVARGVLTQTLGPWRRPVAYLSKKLDPVASGWPTCLKAIAAVALLLKDADKLTLGQNVLVIAPHNLESIVRQPPDRWMTNARMTHYQSLLLNERVSFAPPAILNPATLLPVESDDTPIHICSEILAEETGTRPDLRDQPLPGVPAWYTDGSSFIMDGRRQAGAAIVDNKRTVWASNLPEGTSAQKAELIALTQALRLAEGKSINIYTDSRYAFATAHVHGAIYKQRGWLTSAGKDIKNKEEILALLEAIHLPKRVAIIHCPGHQRGTDPVATGNRKADEAAKQAAQSTRILTETTKNAGKRTADGSEFEKRTADGSEFESPKKKAKVE

SEQ ID NO: 7470 - protein, 2127 aa, synthetic construct
MPAAKRVKLDGGDKKYSIGLDIGTNSVGWAVITDEYKVPSKKFKVLGNTDRHSIKKNLIGALLFDSGETAEATRLKRTARRRYTRRKNRICYLQEIFSNEMAKVDDSFFHRLEESFLVEEDKKHERHPIFGNIVDEVAYHEKYPTIYHLRKKLVDSTDKADLRLIYLALAHMIKFRGHFLIEGDLNPDNSDVDKLFIQLVQTYNQLFEENPINASGVDAKAILSARLSKSRRLENLIAQLPGEKKNGLFGNLIALSLGLTPNFKSNFDLAEDAKLQLSKDTYDDDLDNLLAQIGDQYADLFLAAKNLSDAILLSDILRVNTEITKAPLSASMIKRYDEHHQDLTLLKALVRQQLPEKYKEIFFDQSKNGYAGYIDGGASQEEFYKFIKPILEKMDGTEELLVKLNREDLLRKQRTFDNGSIPHQIHLGELHAILRRQEDFYPFLKDNREKIEKILTFRIPYYVGPLARGNSRFAWMTRKSEETITPWNFEEVVDKGASAQSFIERMTNFDKNLPNEKVLPKHSLLYEYFTVYNELTKVKYVTEGMRKPAFLSGEQKKAIVDLLFKTNRKVTVKQLKEDYFKKIECFDSVEISGVEDRFNASLGTYHDLLKIIKDKDFLDNEENEDILEDIVLTLTLFEDREMIEERLKTYAHLFDDKVMKQLKRRRYTGWGRLSRKLINGIRDKQSGKTILDFLKSDGFANRNFMQLIHDDSLTFKEDIQKAQVSGQGDSLHEHIANLAGSPAIKKGILQTVKVVDELVKVMGRHKPENIVIEMARENQTTQKGQKNSRERMKRIEEGIKELGSQILKEHPVENTQLQNEKLYLYYLQNGRDMYVDQELDINRLSDYDVDHIVPQSFLKDDSIDNKVLTRSDKARGKSDNVPSEEVVKKMKNYWRQLLNAKLITQRKFDNLTKAERGGLSELDKAGFIKRQLVETRQITKHVAQILDSRMNTKYDENDKLIREVKVITLKSKLVSDFRKDFQFYKVREINNYHHAHDAYLNAVVGTALIKKYPKLESEFVYGDYKVYDVRKMIAKSEQEIGKATAKYFFYSNIMNFFKTEITLANGEIRKRPLIETNGETGEIVWDKGRDFATVRKVLSMPQVNIVKKTEVQTGGFSKESILPKRNSDKLIARKKDWDPKKYGGFDSPTVAYSVLVVAKVEKGKSKKLKSVKELLGITIMERSSFEKNPIDFLEAKGYKEVKKDLIIKLPKYSLFELENGRKRMLASAGELQKGNELALPSKYVNFLYLASHYEKLKGSPEDNEQKQLFVEQHKHYLDEIIEQISEFSKRVILADANLDKVLSAYNKHRDKPIREQAENIIHLFTLTNLGAPAAFKYFDTTIDRKRYTSTKEVLDATLIHQSITGLYETRIDLSQLGGDGGGGGPAPEAAAKGGLLGRDLLTKLKAQIQFSTEGPQVTWEDRPAMCLVLNLEEEYRLHEKPVPPSIDPSWLQLFPMVWAEKAGMGLANQVPPVVVELKSDASPVAVRQYPMSKEAREGIRPHIQRFLDLGILVPCQSPWNTPLLPVKKPGTNDYRPVQDLREVNKRVQDIHPTVPNPYNLLSSLPPSHTWYSVLDLKDAFFCLKLHPNSQPLFAFEWRDPEKGNTGQLTWTRLPQGFKNSPTLFNEALHRDLASFRALNPQVVMLQYVDDLLVAAPTYRDCKEGTRRLLQELSKLGYRVSAKKAQLCREEVTYLGYLLKGGKRWLTPARKATVMKIPTPTTPRQVREFLGKAGFCRLFIPGFASLAAPLYPLTRPKVPFTWTEAHQEAFGRIKEALLSAPALALPDLTKPFALYVDEKEGVARGVLTQTLGPWRRPVAYLSKKLDPVASGWPTCLKAIAAVALLLKDADKLTLGQNVLVIAPHNLESIVRQPPDRWMTNARMTHYQSLLLNERVSFAPPAILNPATLLPVESDDTPIHICSEILAEETGTRPDLRDQPLPGVPAWYTDGSSFIMDGRRQAGAAIVDNKRTVWASNLPEGTSAQKAELIALTQALRLAEGKSINIYTDSRYAFATAHVHGAIYKQRGWLTSAGKDIKNKEEILALLEAIHLPKRVAIIHCPGHQRGTDPVATGNRKADEAAKQAAQSTRILTETTKNAGKRTADGSEFEKRTADGSEFESPKKKAKVE

SEQ ID NO: 7471 - protein, 2096 aa, synthetic construct
MPAAKRVKLDGGDKKYSIGLDIGTNSVGWAVITDEYKVPSKKFKVLGNTDRHSIKKNLIGALLFDSGETAEATRLKRTARRRYTRRKNRICYLQEIFSNEMAKVDDSFFHRLEESFLVEEDKKHERHPIFGNIVDEVAYHEKYPTIYHLRKKLVDSTDKADLRLIYLALAHMIKFRGHFLIEGDLNPDNSDVDKLFIQLVQTYNQLFEENPINASGVDAKAILSARLSKSRRLENLIAQLPGEKKNGLFGNLIALSLGLTPNFKSNFDLAEDAKLQLSKDTYDDDLDNLLAQIGDQYADLFLAAKNLSDAILLSDILRVNTEITKAPLSASMIKRYDEHHQDLTLLKALVRQQLPEKYKEIFFDQSKNGYAGYIDGGASQEEFYKFIKPILEKMDGTEELLVKLNREDLLRKQRTFDNGSIPHQIHLGELHAILRRQEDFYPFLKDNREKIEKILTFRIPYYVGPLARGNSRFAWMTRKSEETITPWNFEEVVDKGASAQSFIERMTNFDKNLPNEKVLPKHSLLYEYFTVYNELTKVKYVTEGMRKPAFLSGEQKKAIVDLLFKTNRKVTVKQLKEDYFKKIECFDSVEISGVEDRFNASLGTYHDLLKIIKDKDFLDNEENEDILEDIVLTLTLFEDREMIEERLKTYAHLFDDKVMKQLKRRRYTGWGRLSRKLINGIRDKQSGKTILDFLKSDGFANRNFMQLIHDDSLTFKEDIQKAQVSGQGDSLHEHIANLAGSPAIKKGILQTVKVVDELVKVMGRHKPENIVIEMARENQTTQKGQKNSRERMKRIEEGIKELGSQILKEHPVENTQLQNEKLYLYYLQNGRDMYVDQELDINRLSDYDVDHIVPQSFLKDDSIDNKVLTRSDKARGKSDNVPSEEVVKKMKNYWRQLLNAKLITQRKFDNLTKAERGGLSELDKAGFIKRQLVETRQITKHVAQILDSRMNTKYDENDKLIREVKVITLKSKLVSDFRKDFQFYKVREINNYHHAHDAYLNAVVGTALIKKYPKLESEFVYGDYKVYDVRKMIAKSEQEIGKATAKYFFYSNIMNFFKTEITLANGEIRKRPLIETNGETGEIVWDKGRDFATVRKVLSMPQVNIVKKTEVQTGGFSKESILPKRNSDKLIARKKDWDPKKYGGFDSPTVAYSVLVVAKVEKGKSKKLKSVKELLGITIMERSSFEKNPIDFLEAKGYKEVKKDLIIKLPKYSLFELENGRKRMLASAGELQKGNELALPSKYVNFLYLASHYEKLKGSPEDNEQKQLFVEQHKHYLDEIIEQISEFSKRVILADANLDKVLSAYNKHRDKPIREQAENIIHLFTLTNLGAPAAFKYFDTTIDRKRYTSTKEVLDATLIHQSITGLYETRIDLSQLGGDGGGGGPAPEAAAKGGLGIEDEYRLHETSTEPDVSLGSTWLSDFPQAWAETGGMGLAVRQAPLIIPLKATSTPVSIQQYPMSHEARLGIKPHIQRLLDQGILVPCQSPWNTPLLPVKKPGTNDYRPVQDLREVNKRVEDIHPTVPNPYNLLSGLPPSHQWYTVLDLKDAFFCLRLHPTSQPLFAFEWRDPGMGISGQLTWTRLPQGFKNSPTLFNEALHRDLADFRIQHPDLILLQYVDDILLAATSELDCQQGTRALLQTLGDLGYRASAKKAQICQKQVKYLGYLLREGQRWLTEARKETVMGQPVPKTPRQLREFLGKAGFCRLFIPGFAEMAAPLYPLTKPGTLFSWGPDQQKAYQEIKQALLTAPALGLPDLTKPFELFVDEKQGYAKGVLTQKLGPWRRPVAYLSKKLDPVAAGWPPCLRMVAAIAVLTKDAGKLTMGQPLVILAPHAVEALVKQPPDRWLSNARMTHYQAMLLDTDRVQFGPVVALNPATLLPLPEEGAPHDCLEILAETHGTRPDLTDQPIPDADHTWYTDGSSFLQEGQRKAGAAVTTETEVIWAGALPAGTSAQRAELIALTQALKMAEGKRLNVYTDSRYAFATAHIHGEIYRRRGWLTSEGREIKNKSEILALLKALFLPKRLSIIHCLGHQKGDSAEARGNRLADQAAREAAIKTPPDTSTLLIAGKRTADGSEFEKRTADGSEFESPKKKAKVE

SEQ ID NO: 7472 - protein, 2096 aa, synthetic construct
MPAAKRVKLDGGDKKYSIGLDIGTNSVGWAVITDEYKVPSKKFKVLGNTDRHSIKKNLIGALLFDSGETAEATRLKRTARRRYTRRKNRICYLQEIFSNEMAKVDDSFFHRLEESFLVEEDKKHERHPIFGNIVDEVAYHEKYPTIYHLRKKLVDSTDKADLRLIYLALAHMIKFRGHFLIEGDLNPDNSDVDKLFIQLVQTYNQLFEENPINASGVDAKAILSARLSKSRRLENLIAQLPGEKKNGLFGNLIALSLGLTPNFKSNFDLAEDAKLQLSKDTYDDDLDNLLAQIGDQYADLFLAAKNLSDAILLSDILRVNTEITKAPLSASMIKRYDEHHQDLTLLKALVRQQLPEKYKEIFFDQSKNGYAGYIDGGASQEEFYKFIKPILEKMDGTEELLVKLNREDLLRKQRTFDNGSIPHQIHLGELHAILRRQEDFYPFLKDNREKIEKILTFRIPYYVGPLARGNSRFAWMTRKSEETITPWNFEEVVDKGASAQSFIERMTNFDKNLPNEKVLPKHSLLYEYFTVYNELTKVKYVTEGMRKPAFLSGEQKKAIVDLLFKTNRKVTVKQLKEDYFKKIECFDSVEISGVEDRFNASLGTYHDLLKIIKDKDFLDNEENEDILEDIVLTLTLFEDREMIEERLKTYAHLFDDKVMKQLKRRRYTGWGRLSRKLINGIRDKQSGKTILDFLKSDGFANRNFMQLIHDDSLTFKEDIQKAQVSGQGDSLHEHIANLAGSPAIKKGILQTVKVVDELVKVMGRHKPENIVIEMARENQTTQKGQKNSRERMKRIEEGIKELGSQILKEHPVENTQLQNEKLYLYYLQNGRDMYVDQELDINRLSDYDVDHIVPQSFLKDDSIDNKVLTRSDKARGKSDNVPSEEVVKKMKNYWRQLLNAKLITQRKFDNLTKAERGGLSELDKAGFIKRQLVETRQITKHVAQILDSRMNTKYDENDKLIREVKVITLKSKLVSDFRKDFQFYKVREINNYHHAHDAYLNAVVGTALIKKYPKLESEFVYGDYKVYDVRKMIAKSEQEIGKATAKYFFYSNIMNFFKTEITLANGEIRKRPLIETNGETGEIVWDKGRDFATVRKVLSMPQVNIVKKTEVQTGGFSKESILPKRNSDKLIARKKDWDPKKYGGFDSPTVAYSVLVVAKVEKGKSKKLKSVKELLGITIMERSSFEKNPIDFLEAKGYKEVKKDLIIKLPKYSLFELENGRKRMLASAGELQKGNELALPSKYVNFLYLASHYEKLKGSPEDNEQKQLFVEQHKHYLDEIIEQISEFSKRVILADANLDKVLSAYNKHRDKPIREQAENIIHLFTLTNLGAPAAFKYFDTTIDRKRYTSTKEVLDATLIHQSITGLYETRIDLSQLGGDGGGGGPAPEAAAKGGTLGIEDEYRLHETSTEPDVSLGSTWLSDFPQAWAETGGMGLAVRQAPLIIPLKATSTPVSIQQYPMSHEARLGIKPHIQRLLDQGILVPCQSPWNTPLLPVKKPGTNDYRPVQDLREVNKRVEDIHPTVPNPYNLLSGLPPSHQWYTVLDLKDAFFCLRLHPTSQPLFAFEWRDPGMGISGQLTWTRLPQGFKNSPTLFNEALHRDLADFRIQHPDLILLQYVDDILLAATSELDCQQGTRALLQTLGDLGYRASAKKAQICQKQVKYLGYLLREGQRWLTEARKETVMGQPVPKTPRQLREFLGTAGFCRLWIPGFAEMAAPLYPLTKPGTLFSWGPDQQKAYQEIKQALLTAPALGLPDLTKPFELFVDEKQGYAKGVLTQKLGPWRRPVAYLSKKLDPVAAGWPPCLRMVAAIAVLTKDAGKLTMGQPLVILAPHAVEALVKQPPDRWLSNARMTHYQAMLLDTDRVQFGPVVALNPATLLPLPEEGAPHDCLEILAETHGTRPDLTDQPIPDADHTWYTDGSSFLQEGQRKAGAAVTTETEVIWAGALPAGTSAQRAELIALTQALKMAEGKRLNVYTDSRYAFATAHIHGEIYRRRGWLTSEGREIKNKSEILALLKALFLPKRLSIIHCLGHQKGDSAEARGNRLADQAAREAAIKTPPDTSTLLAGKRTADGSEFEKRTADGSEFESPKKKAKVE

SEQ ID NO: 7473 - protein, 2096 aa, synthetic construct; identical to SEQ ID NO: 7471

SEQ ID NO: 7474 - protein, 2096 aa, synthetic construct; identical to SEQ ID NO: 7472

SEQ ID NO: 7475 - protein, 2096 aa, synthetic construct
MPAAKRVKLDGGDKKYSIGLDIGTNSVGWAVITDEYKVPSKKFKVLGNTDRHSIKKNLIGALLFDSGETAEATRLKRTARRRYTRRKNRICYLQEIFSNEMAKVDDSFFHRLEESFLVEEDKKHERHPIFGNIVDEVAYHEKYPTIYHLRKKLVDSTDKADLRLIYLALAHMIKFRGHFLIEGDLNPDNSDVDKLFIQLVQTYNQLFEENPINASGVDAKAILSARLSKSRRLENLIAQLPGEKKNGLFGNLIALSLGLTPNFKSNFDLAEDAKLQLSKDTYDDDLDNLLAQIGDQYADLFLAAKNLSDAILLSDILRVNTEITKAPLSASMIKRYDEHHQDLTLLKALVRQQLPEKYKEIFFDQSKNGYAGYIDGGASQEEFYKFIKPILEKMDGTEELLVKLNREDLLRKQRTFDNGSIPHQIHLGELHAILRRQEDFYPFLKDNREKIEKILTFRIPYYVGPLARGNSRFAWMTRKSEETITPWNFEEVVDKGASAQSFIERMTNFDKNLPNEKVLPKHSLLYEYFTVYNELTKVKYVTEGMRKPAFLSGEQKKAIVDLLFKTNRKVTVKQLKEDYFKKIECFDSVEISGVEDRFNASLGTYHDLLKIIKDKDFLDNEENEDILEDIVLTLTLFEDREMIEERLKTYAHLFDDKVMKQLKRRRYTGWGRLSRKLINGIRDKQSGKTILDFLKSDGFANRNFMQLIHDDSLTFKEDIQKAQVSGQGDSLHEHIANLAGSPAIKKGILQTVKVVDELVKVMGRHKPENIVIEMARENQTTQKGQKNSRERMKRIEEGIKELGSQILKEHPVENTQLQNEKLYLYYLQNGRDMYVDQELDINRLSDYDVDHIVPQSFLKDDSIDNKVLTRSDKARGKSDNVPSEEVVKKMKNYWRQLLNAKLITQRKFDNLTKAERGGLSELDKAGFIKRQLVETRQITKHVAQILDSRMNTKYDENDKLIREVKVITLKSKLVSDFRKDFQFYKVREINNYHHAHDAYLNAVVGTALIKKYPKLESEFVYGDYKVYDVRKMIAKSEQEIGKATAKYFFYSNIMNFFKTEITLANGEIRKRPLIETNGETGEIVWDKGRDFATVRKVLSMPQVNIVKKTEVQTGGFSKESILPKRNSDKLIARKKDWDPKKYGGFDSPTVAYSVLVVAKVEKGKSKKLKSVKELLGITIMERSSFEKNPIDFLEAKGYKEVKKDLIIKLPKYSLFELENGRKRMLASAGELQKGNELALPSKYVNFLYLASHYEKLKGSPEDNEQKQLFVEQHKHYLDEIIEQISEFSKRVILADANLDKVLSAYNKHRDKPIREQAENIIHLFTLTNLGAPAAFKYFDTTIDRKRYTSTKEVLDATLIHQSITGLYETRIDLSQLGGDGGGGGPAPEAAAKGGTLNIEDEYRLHETSKEPDVSLGSTWLSDFPQAWAETGGMGLAVRQAPLIIPLKATSTPVSIKQYPMSQEARLGIKPHIQRLLDQGILVPCQSPWNTPLLPVKKPGTNDYRPVQDLREVNKRVEDIHPTVPNPYNLLSGLPPSHQWYTVLDLKDAFFCLRLHPTSQPLFAFEWRDPEMGISGQLTWTRLPQGFKNSPTLFNEALHRDLAGFRIQHPDLILLQYVDDLLLAATSELDCQQGTRALLQTLGDLGYRASAKKAQICQKQVKYLGYLLKEGQRWLTEARKETVMGQPIPKTPRQLREFLGTAGFCRLWIPGFAEMAAPLYPLTKPGTLFNWGPDQQKAFQEIKQALLTAPALGLPDLTKPFELFVDEKQGYAKGVLTQKLGPWRRPVAYLSKKLDPVAAGWPPCLRMVAAIAVLTKDAGKLTMGQPLVILAPHAVEALVKQPPDRWLSNARMTHYQALLLDTDRVQFGPVVALNPATLLPLPEEGLQHDCLDILAEAHGTRSDLMDQPLPDADHTWYTDGSSFLQEGQRKAGAAVTTETEVIWARALPAGTSAQRAELIALTQALKMAEGKKLNVYTDSRYAFATAHIHGEIYRRRGWLTSEGKEIKNKDEILALLKALFLPKRLSIIHCPGHQKGNSAEARGNRMADQAAREVATRETPETSTLLAGKRTADGSEFEKRTADGSEFESPKKKAKVE

SEQ ID NO: 7476 - protein, 2096 aa, synthetic construct; identical to SEQ ID NO: 4534

SEQ ID NO: 7477 - protein, 2096 aa, synthetic construct
MPAAKRVKLDGGDKKYSIGLDIGTNSVGWAVITDEYKVPSKKFKVLGNTDRHSIKKNLIGALLFDSGETAEATRLKRTARRRYTRRKNRICYLQEIFSNEMAKVDDSFFHRLEESFLVEEDKKHERHPIFGNIVDEVAYHEKYPTIYHLRKKLVDSTDKADLRLIYLALAHMIKFRGHFLIEGDLNPDNSDVDKLFIQLVQTYNQLFEENPINASGVDAKAILSARLSKSRRLENLIAQLPGEKKNGLFGNLIALSLGLTPNFKSNFDLAEDAKLQLSKDTYDDDLDNLLAQIGDQYADLFLAAKNLSDAILLSDILRVNTEITKAPLSASMIKRYDEHHQDLTLLKALVRQQLPEKYKEIFFDQSKNGYAGYIDGGASQEEFYKFIKPILEKMDGTEELLVKLNREDLLRKQRTFDNGSIPHQIHLGELHAILRRQEDFYPFLKDNREKIEKILTFRIPYYVGPLARGNSRFAWMTRKSEETITPWNFEEVVDKGASAQSFIERMTNFDKNLPNEKVLPKHSLLYEYFTVYNELTKVKYVTEGMRKPAFLSGEQKKAIVDLLFKTNRKVTVKQLKEDYFKKIECFDSVEISGVEDRFNASLGTYHDLLKIIKDKDFLDNEENEDILEDIVLTLTLFEDREMIEERLKTYAHLFDDKVMKQLKRRRYTGWGRLSRKLINGIRDKQSGKTILDFLKSDGFANRNFMQLIHDDSLTFKEDIQKAQVSGQGDSLHEHIANLAGSPAIKKGILQTVKVVDELVKVMGRHKPENIVIEMARENQTTQKGQKNSRERMKRIEEGIKELGSQILKEHPVENTQLQNEKLYLYYLQNGRDMYVDQELDINRLSDYDVDHIVPQSFLKDDSIDNKVLTRSDKARGKSDNVPSEEVVKKMKNYWRQLLNAKLITQRKFDNLTKAERGGLSELDKAGFIKRQLVETRQITKHVAQILDSRMNTKYDENDKLIREVKVITLKSKLVSDFRKDFQFYKVREINNYHHAHDAYLNAVVGTALIKKYPKLESEFVYGDYKVYDVRKMIAKSEQEIGKATAKYFFYSNIMNFFKTEITLANGEIRKRPLIETNGETGEIVWDKGRDFATVRKVLSMPQVNIVKKTEVQTGGFSKESILPKRNSDKLIARKKDWDPKKYGGFDSPTVAYSVLVVAKVEKGKSKKLKSVKELLGITIMERSSFEKNPIDFLEAKGYKEVKKDLIIKLPKYSLFELENGRKRMLASAGELQKGNELALPSKYVNFLYLASHYEKLKGSPEDNEQKQLFVEQHKHYLDEIIEQISEFSKRVILADANLDKVLSAYNKHRDKPIREQAENIIHLFTLTNLGAPAAFKYFDTTIDRKRYTSTKEVLDATLIHQSITGLYETRIDLSQLGGDGGGGGPAPEAAAKGGTLNIEDEHRLHETSKEPDVSLGSTWLSDFPQAWAETGGMGLAVRQAPLIIPLKATSTPVSIKQYPMSQEARLGIKPHIQRLLDQGILVPCQSPWNTPLLPVKKPGTNDYRPVQDLREVNKRVEDIHPTVPNPYNLLSGLPPSHQWYTVLDLKDAFFCLRLHPTSQPLFAFEWRDPEMGISGQLTWTRLPQGFKNSPTLFDEALHRDLADFRIQHPDLILLQYVDDLLLAATSELDCQQGTRALLQTLGNLGYRASAKKAQICQKQVKYLGYLLKEGQRWLTEARKETVMGQPTPKTPRQLREFLGTAGFCRLWIPGFAEMAAPLYPLTKTGTLFNWGPDQQKAYQEIKQALLTAPALGLPDLTKPFELFVDEKQGYAKGVLTQKLGPWRRPVAYLSKKLDPVAAGWPPCLRMVAAIAVLTKDAGKLTMGQPLVILAPHAVEALVKQPPDRWLSNARMTHYQALLLDTDRVQFGPVVALNPATLLPLPEEGLQHNCLDILAEAHGTRPDLTDQPLPDADHTWYTDGSSLLQEGQRKAGAAVTTETEVIWAKALPAGTSAQRAELIALTQALKMAEGKKLNVYTDSRYAFATAHIHGEIYRRRGLLTSEGKEIKNKDEILALLKALFLPKRLSIIHCPGHQKGHSAEARGNRMADQAARKAAITETPDTSTLLAGKRTADGSEFEKRTADGSEFESPKKKAKVE

SEQ ID NO: 7478 - protein, 2096 aa, synthetic construct; identical to SEQ ID NO: 4534

SEQ ID NO: 7479 - protein, 2088 aa, synthetic construct
MPAAKRVKLDGGDKKYSIGLDIGTNSVGWAVITDEYKVPSKKFKVLGNTDRHSIKKNLIGALLFDSGETAEATRLKRTARRRYTRRKNRICYLQEIFSNEMAKVDDSFFHRLEESFLVEEDKKHERHPIFGNIVDEVAYHEKYPTIYHLRKKLVDSTDKADLRLIYLALAHMIKFRGHFLIEGDLNPDNSDVDKLFIQLVQTYNQLFEENPINASGVDAKAILSARLSKSRRLENLIAQLPGEKKNGLFGNLIALSLGLTPNFKSNFDLAEDAKLQLSKDTYDDDLDNLLAQIGDQYADLFLAAKNLSDAILLSDILRVNTEITKAPLSASMIKRYDEHHQDLTLLKALVRQQLPEKYKEIFFDQSKNGYAGYIDGGASQEEFYKFIKPILEKMDGTEELLVKLNREDLLRKQRTFDNGSIPHQIHLGELHAILRRQEDFYPFLKDNREKIEKILTFRIPYYVGPLARGNSRFAWMTRKSEETITPWNFEEVVDKGASAQSFIERMTNFDKNLPNEKVLPKHSLLYEYFTVYNELTKVKYVTEGMRKPAFLSGEQKKAIVDLLFKTNRKVTVKQLKEDYFKKIECFDSVEISGVEDRFNASLGTYHDLLKIIKDKDFLDNEENEDILEDIVLTLTLFEDREMIEERLKTYAHLFDDKVMKQLKRRRYTGWGRLSRKLINGIRDKQSGKTILDFLKSDGFANRNFMQLIHDDSLTFKEDIQKAQVSGQGDSLHEHIANLAGSPAIKKGILQTVKVVDELVKVMGRHKPENIVIEMARENQTTQKGQKNSRERMKRIEEGIKELGSQILKEHPVENTQLQNEKLYLYYLQNGRDMYVDQELDINRLSDYDVDHIVPQSFLKDDSIDNKVLTRSDKARGKSDNVPSEEVVKKMKNYWRQLLNAKLITQRKFDNLTKAERGGLSELDKAGFIKRQLVETRQITKHVAQILDSRMNTKYDENDKLIREVKVITLKSKLVSDFRKDFQFYKVREINNYHHAHDAYLNAVVGTALIKKYPKLESEFVYGDYKVYDVRKMIAKSEQEIGKATAKYFFYSNIMNFFKTEITLANGEIRKRPLIETNGETGEIVWDKGRDFATVRKVLSMPQVNIVKKTEVQTGGFSKESILPKRNSDKLIARKKDWDPKKYGGFDSPTVAYSVLVVAKVEKGKSKKLKSVKELLGITIMERSSFEKNPIDFLEAKGYKEVKKDLIIKLPKYSLFELENGRKRMLASAGELQKGNELALPSKYVNFLYLASHYEKLKGSPEDNEQKQLFVEQHKHYLDEIIEQISEFSKRVILADANLDKVLSAYNKHRDKPIREQAENIIHLFTLTNLGAPAAFKYFDTTIDRKRYTSTKEVLDATLIHQSITGLYETRIDLSQLGGDGGGGGPAPEAAAKGGLDDEYRLYSPLVKPDQNIQFWLEQFPQAWAETAGMGLAKQVPPQVIQLKASATPVSVRQYPLSKEAQEGIRPHVQRLIQQGILVPVQSPWNTPLLPVRKPGTNDYRPVQDLREVNKRVQDIHPTVPNPYNLLCALPPQRSWYTVLDLKDAFFCLRLHPTSQPLFAFEWRDPGTGRTGQLTWTRLPQGFKNSPTIFNEALHRDLANFRIQHPQVTLLQYVDDLLLAGATKQDCLEGTKALLLELSDLGYRASAKKAQICRREVTYLGYSLRDGQRWLTEARKKTVVQIPAPTTAKQVREFLGKAGFCRLFIPGFATLAAPLYPLTKPKGEFSWAPEHQKAFDAIKKALLSAPALALPDVTKPFTLYVDERKGVARGVLTQTLGPWRRPVAYLSKKLDPVASGWPVCLKAIAAVAILVKDADKLTLGQNITVIAPHALENIVRQPPDRWMTNARMTHYQSLLLTERVTFAPPAALNPATLLPEETDEPVTHDCHQLLIEETGVRKDLTDIPLTGEVLTWFTDGSSYVVEGKRMAGAAVVDGTRTIWASSLPEGTSAQKAELMALTQALRLAEGKSINIYTDSRYAFATAHVHGAIYKQRGWLTSAGREIKNKEEILSLLEALHLPKRLAIIHCPGHQKAKDPISRGNQMADRVAKQAAQGVNLLPAGKRTADGSEFEKRTADGSEFESPKKKAKVE

SEQ ID NO: 7480 - protein, 2088 aa, synthetic construct; identical to SEQ ID NO: 7479

SEQ ID NO: 7481 - protein, 2090 aa, synthetic construct
MPAAKRVKLDGGDKKYSIGLDIGTNSVGWAVITDEYKVPSKKFKVLGNTDRHSIKKNLIGALLFDSGETAEATRLKRTARRRYTRRKNRICYLQEIFSNEMAKVDDSFFHRLEESFLVEEDKKHERHPIFGNIVDEVAYHEKYPTIYHLRKKLVDSTDKADLRLIYLALAHMIKFRGHFLIEGDLNPDNSDVDKLFIQLVQTYNQLFEENPINASGVDAKAILSARLSKSRRLENLIAQLPGEKKNGLFGNLIALSLGLTPNFKSNFDLAEDAKLQLSKDTYDDDLDNLLAQIGDQYADLFLAAKNLSDAILLSDILRVNTEITKAPLSASMIKRYDEHHQDLTLLKALVRQQLPEKYKEIFFDQSKNGYAGYIDGGASQEEFYKFIKPILEKMDGTEELLVKLNREDLLRKQRTFDNGSIPHQIHLGELHAILRRQEDFYPFLKDNREKIEKILTFRIPYYVGPLARGNSRFAWMTRKSEETITPWNFEEVVDKGASAQSFIERMTNFDKNLPNEKVLPKHSLLYEYFTVYNELTKVKYVTEGMRKPAFLSGEQKKAIVDLLFKTNRKVTVKQLKEDYFKKIECFDSVEISGVEDRFNASLGTYHDLLKIIKDKDFLDNEENEDILEDIVLTLTLFEDREMIEERLKTYAHLFDDKVMKQLKRRRYTGWGRLSRKLINGIRDKQSGKTILDFLKSDGFANRNFMQLIHDDSLTFKEDIQKAQVSGQGDSLHEHIANLAGSPAIKKGILQTVKVVDELVKVMGRHKPENIVIEMARENQTTQKGQKNSRERMKRIEEGIKELGSQILKEHPVENTQLQNEKLYLYYLQNGRDMYVDQELDINRLSDYDVDHIVPQSFLKDDSIDNKVLTRSDKARGKSDNVPSEEVVKKMKNYWRQLLNAKLITQRKFDNLTKAERGGLSELDKAGFIKRQLVETRQITKHVAQILDSRMNTKYDENDKLIREVKVITLKSKLVSDFRKDFQFYKVREINNYHHAHDAYLNAVVGTALIKKYPKLESEFVYGDYKVYDVRKMIAKSEQEIGKATAKYFFYSNIMNFFKTEITLANGEIRKRPLIETNGETGEIVWDKGRDFATVRKVLSMPQVNIVKKTEVQTGGFSKESILPKRNSDKLIARKKDWDPKKYGGFDSPTVAYSVLVVAKVEKGKSKKLKSVKELLGITIMERSSFEKNPIDFLEAKGYKEVKKDLIIKLPKYSLFELENGRKRMLASAGELQKGNELALPSKYVNFLYLASHYEKLKGSPEDNEQKQLFVEQHKHYLDEIIEQISEFSKRVILADANLDKVLSAYNKHRDKPIREQAENIIHLFTLTNLGAPAAFKYFDTTIDRKRYTSTKEVLDATLIHQSITGLYETRIDLSQLGGDGGGGGPAPEAAAKGGTLQLDDEYRLYSPLVKPDQNIQFWLEQFPQAWAETAGMGLAKQVPPQVIQLKASATPVSVRQYPLSKEAQEGIRPHVQRLIQQGILVPVQSPWNTPLLPVRKPGTNDYRPVQDLREVNKRVQDIHPTVPNPYNLLCALPPQRSWYTVLDLKDAFFCLRLHPTSQPLFAFEWRDPGTGRTGQLTWTRLPQGFKNSPTIFDEALHRDLANFRIQHPQVTLLQYVDDLLLAGATKQDCLEGTKALLLELSDLGYRASAKKAQICRREVTYLGYSLRDGQRWLTEARKKTVVQIPAPTTAKQVREFLGTAGFCRLWIPGFATLAAPLYPLTKEKGEFSWAPEHQKAFDAIKKALLSAPALALPDVTKPFTLYVDERKGVARGVLTQTLGPWRRPVAYLSKKLDPVASGWPVCLKAIAAVAILVKDADKLTLGQNITVIAPHALENIVRQPPDRWMTNARMTHYQSLLLTERVTFAPPAALNPATLLPEETDEPVTHDCHQLLIEETGVRKDLTDIPLTGEVLTWFTDGSSYVVEGKRMAGAAVVDGTRTIWASSLPEGTSAQKAELMALTQALRLAEGKSINIYTDSRYAFATAHVHGAIYKQRGLLTSAGREIKNKEEILSLLEALHLPKRLAIIHCPGHQKAKDPISRGNQMADRVAKQAAQGVNLLAGKRTADGSEFEKRTADGSEFESPKKKAKVE

SEQ ID NO: 7482 - protein, 2176 aa, synthetic construct
MPAAKRVKLDGGDKKYSIGLDIGTNSVGWAVITDEYKVPSKKFKVLGNTDRHSIKKNLIGALLFDSGETAEATRLKRTARRRYTRRKNRICYLQEIFSNEMAKVDDSFFHRLEESFLVEEDKKHERHPIFGNIVDEVAYHEKYPTIYHLRKKLVDSTDKADLRLIYLALAHMIKFRGHFLIEGDLNPDNSDVDKLFIQLVQTYNQLFEENPINASGVDAKAILSARLSKSRRLENLIAQLPGEKKNGLFGNLIALSLGLTPNFKSNFDLAEDAKLQLSKDTYDDDLDNLLAQIGDQYADLFLAAKNLSDAILLSDILRVNTEITKAPLSASMIKRYDEHHQDLTLLKALVRQQLPEKYKEIFFDQSKNGYAGYIDGGASQEEFYKFIKPILEKMDGTEELLVKLNREDLLRKQRTFDNGSIPHQIHLGELHAILRRQEDFYPFLKDNREKIEKILTFRIPYYVGPLARGNSRFAWMTRKSEETITPWNFEEVVDKGASAQSFIERMTNFDKNLPNEKVLPKHSLLYEYFTVYNELTKVKYVTEGMRKPAFLSGEQKKAIVDLLFKTNRKVTVKQLKEDYFKKIECFDSVEISGVEDRFNASLGTYHDLLKIIKDKDFLDNEENEDILEDIVLTLTLFEDREMIEERLKTYAHLFDDKVMKQLKRRRYTGWGRLSRKLINGIRDKQSGKTILDFLKSDGFANRNFMQLIHDDSLTFKEDIQKAQVSGQGDSLHEHIANLAGSPAIKKGILQTVKVVDELVKVMGRHKPENIVIEMARENQTTQKGQKNSRERMKRIEEGIKELGSQILKEHPVENTQLQNEKLYLYYLQNGRDMYVDQELDINRLSDYDVDHIVPQSFLKDDSIDNKVLTRSDKARGKSDNVPSEEVVKKMKNYWRQLLNAKLITQRKFDNLTKAERGGLSELDKAGFIKRQLVETRQITKHVAQILDSRMNTKYDENDKLIREVKVITLKSKLVSDFRKDFQFYKVREINNYHHAHDAYLNAVVGTALIKKYPKLESEFVYGDYKVYDVRKMIAKSEQEIGKATAKYFFYSNIMNFFKTEITLANGEIRKRPLIETNGETGEIVWDKGRDFATVRKVLSMPQVNIVKKTEVQTGGFSKESILPKRNSDKLIARKKDWDPKKYGGFDSPTVAYSVLVVAKVEKGKSKKLKSVKELLGITIMERSSFEKNPIDFLEAKGYKEVKKDLIIKLPKYSLFELENGRKRMLASAGELQKGNELALPSKYVNFLYLASHYEKLKGSPEDNEQKQLFVEQHKHYLDEIIEQISEFSKRVILADANLDKVLSAYNKHRDKPIREQAENIIHLFTLTNLGAPAAFKYFDTTIDRKRYTSTKEVLDATLIHQSITGLYETRIDLSQLGGDGGGGGPAPEAAAKGGMDPLQLLQPLEAEIKGTKLKAHWNSGATITCVPEAFLEDERPIQTMLIKTIHGEKQQDVYYLTFKVQGRKVEAEVLASPYDYILLNPSDVPWLMKKPLQLTVLVPLHEYQERLLQQTALPKEQKELLQKLFLKYDALWQHWENQVGHRRIKPHNIATGTLAPRPQKQYPINPKAKPSIQIVIDDLLKQGVLIQQNSTMNTPVYPVPKPDGKWRMVLDYREVNKTIPLIAAQNQHSAGILSSIYRGKYKTTLDLTNGFWAHPITPESYWLTAFTWQGKQYCWTRLPQGFLNSPALFNADVVDLLKEIPNVQAYVDDIYISHDDPQEHLEQLEKIFSILLNAGYVVSLKKSEIAQREVEFLGFNITKEGRGLTDTFKQKLLNITPPKDLKQLQSILGKLNFARNFIPNYSELVKPLYTIVAPANGKFISWTEDNSNQLQHIISVLNQADNLEERNPETRLIIKVNSSPSAGYIRYYNEGSKRPIMYVNYIFSKAEAKFTQTEKLLTTMHKGLIKAMDLAMGQEILVYSPIVSMTKIQRTPLPERKALPVRWITWMTYLEDPRIQFHYDKSLPELQQIPNVTEDVIAKTKHPSEFAMVFYTDGSAIKHPDVNKSHSAGMGIAQVQFIPEYKIVHQWSIPLGDHTAQLAEIAAVEFACKKALKISGPVLIVTDSFYVAESANKELPYWKSNGFLNNKKKPLRHVSKWKSIAECLQLKPDIIIMHEKGHQQPMTTLHTEGNNLADKLATQGSYVVHAGKRTADGSEFEKRTADGSEFESPKKKAKVE

SEQ ID NO: 7483 - protein, 2176 aa, synthetic construct
MPAAKRVKLDGGDKKYSIGLDIGTNSVGWAVITDEYKVPSKKFKVLGNTDRHSIKKNLIGALLFDSGETAEATRLKRTARRRYTRRKNRICYLQEIFSNEMAKVDDSFFHRLEESFLVEEDKKHERHPIFGNIVDEVAYHEKYPTIYHLRKKLVDSTDKADLRLIYLALAHMIKFRGHFLIEGDLNPDNSDVDKLFIQLVQTYNQLFEENPINASGVDAKAILSARLSKSRRLENLIAQLPGEKKNGLFGNLIALSLGLTPNFKSNFDLAEDAKLQLSKDTYDDDLDNLLAQIGDQYADLFLAAKNLSDAILLSDILRVNTEITKAPLSASMIKRYDEHHQDLTLLKALVRQQLPEKYKEIFFDQSKNGYAGYIDGGASQEEFYKFIKPILEKMDGTEELLVKLNREDLLRKQRTFDNGSIPHQIHLGELHAILRRQEDFYPFLKDNREKIEKILTFRIPYYVGPLARGNSRFAWMTRKSEETITPWNFEEVVDKGASAQSFIERMTNFDKNLPNEKVLPKHSLLYEYFTVYNELTKVKYVTEGMRKPAFLSGEQKKAIVDLLFKTNRKVTVKQLKEDYFKKIECFDSVEISGVEDRFNASLGTYHDLLKIIKDKDFLDNEENEDILEDIVLTLTLFEDREMIEERLKTYAHLFDDKVMKQLKRRRYTGWGRLSRKLINGIRDKQSGKTILDFLKSDGFANRNFMQLIHDDSLTFKEDIQKAQVSGQGDSLHEHIANLAGSPAIKKGILQTVKVVDELVKVMGRHKPENIVIEMARENQTTQKGQKNSRERMKRIEEGIKELGSQILKEHPVENTQLQNEKLYLYYLQNGRDMYVDQELDINRLSDYDVDHIVPQSFLKDDSIDNKVLTRSDKARGKSDNVPSEEVVKKMKNYWRQLLNAKLITQRKFDNLTKAERGGLSELDKAGFIKRQLVETRQITKHVAQILDSRMNTKYDENDKLIREVKVITLKSKLVSDFRKDFQFYKVREINNYHHAHDAYLNAVVGTALIKKYPKLESEFVYGDYKVYDVRKMIAKSEQEIGKATAKYFFYSNIMNFFKTEITLANGEIRKRPLIETNGETGEIVWDKGRDFATVRKVLSMPQVNIVKKTEVQTGGFSKESILPKRNSDKLIARKKDWDPKKYGGFDSPTVAYSVLVVAKVEKGKSKKLKSVKELLGITIMERSSFEKNPIDFLEAKGYKEVKKDLIIKLPKYSLFELENGRKRMLASAGELQKGNELALPSKYVNFLYLASHYEKLKGSPEDNEQKQLFVEQHKHYLDEIIEQISEFSKRVILADANLDKVLSAYNKHRDKPIREQAENIIHLFTLTNLGAPAAFKYFDTTIDRKRYTSTKEVLDATLIHQSITGLYETRIDLSQLGGDGGGGGPAPEAAAKGGMNPLQLLQPLPAEVKGTKLLAHWNSGATITCIPESFLEDEQPIKQTLIKTIHGEKQQNVYYLTFKVKGRKVEAEVIASPYEYILLSPTDVPWLTQQPLQLTILVPLQEYQDRILNKTALPEEQKQQLKALFTKYDNLWQHWENQVGHRKIRPHNIATGDYPPRPQKQYPINPKAKPSIQIVIDDLLKQGVLTPQNSTMNTPVYPVPKPDGRWRMVLDYREVNKTIPLTAAQNQHSAGILATIVRQKYKTTLDLANGFWAHPITPDSYWLTAFTWQGKQYCWTRLPQGFLNSPALFNADAVDLLKEVPNVQVYVDDIYLSHDNPHEHIQQLEKVFQILLQAGYVVSLKKSEIGQRTVEFLGFNITKEGRGLTDTFKTKLLNVTPPKDLKQLQSILGLLNFARNFIPNFAELVQTLYNLIASSPGKYIEWTEDNTKQLNKVIEALNTASNLEERLPDQRLVIKVNTSPSAGYVRYYNESGKKPIMYLNYVFSKAELKFSMLEKLLTTMHKALIKAMDLAMGQEILVYSPIVSMTKIQKTPLPERKALPIRWITWMTYLEDPRIQFHYDKTLPELKHIPDVYTSSIPPLKHPSQYEGVFCTDGSAIKSPDPTKSNNAGMGIVHAIYNPEYKILNQWSIPLGHHTAQMAEIAAVEFACKKALKVPGPVLVITDSFYVAESANKELPYWKSNGFVNNKKEPLKHISKWKSIAECLSIKPDITIQHEKGHQPINTSIHTEGNALADKLATQGSYVVNAGKRTADGSEFEKRTADGSEFESPKKKAKVE

SEQ ID NO: 7484 - protein, 2094 aa, synthetic construct
MPAAKRVKLDGGDKKYSIGLDIGTNSVGWAVITDEYKVPSKKFKVLGNTDRHSIKKNLIGALLFDSGETAEATRLKRTARRRYTRRKNRICYLQEIFSNEMAKVDDSFFHRLEESFLVEEDKKHERHPIFGNIVDEVAYHEKYPTIYHLRKKLVDSTDKADLRLIYLALAHMIKFRGHFLIEGDLNPDNSDVDKLFIQLVQTYNQLFEENPINASGVDAKAILSARLSKSRRLENLIAQLPGEKKNGLFGNLIALSLGLTPNFKSNFDLAEDAKLQLSKDTYDDDLDNLLAQIGDQYADLFLAAKNLSDAILLSDILRVNTEITKAPLSASMIKRYDEHHQDLTLLKALVRQQLPEKYKEIFFDQSKNGYAGYIDGGASQEEFYKFIKPILEKMDGTEELLVKLNREDLLRKQRTFDNGSIPHQIHLGELHAILRRQEDFYPFLKDNREKIEKILTFRIPYYVGPLARGNSRFAWMTRKSEETITPWNFEEVVDKGASAQSFIERMTNFDKNLPNEKVLPKHSLLYEYFTVYNELTKVKYVTEGMRKPAFLSGEQKKAIVDLLFKTNRKVTVKQLKEDYFKKIECFDSVEISGVEDRFNASLGTYHDLLKIIKDKDFLDNEENEDILEDIVLTLTLFEDREMIEERLKTYAHLFDDKVMKQLKRRRYTGWGRLSRKLINGIRDKQSGKTILDFLKSDGFANRNFMQLIHDDSLTFKEDIQKAQVSGQGDSLHEHIANLAGSPAIKKGILQTVKVVDELVKVMGRHKPENIVIEMARENQTTQKGQKNSRERMKRIEEGIKELGSQILKEHPVENTQLQNEKLYLYYLQNGRDMYVDQELDINRLSDYDVDHIVPQSFLKDDSIDNKVLTRSDKARGKSDNVPSEEVVKKMKNYWRQLLNAKLITQRKFDNLTKAERGGLSELDKAGFIKRQLVETRQITKHVAQILDSRMNTKYDENDKLIREVKVITLKSKLVSDFRKDFQFYKVREINNYHHAHDAYLNAVVGTALIKKYPKLESEFVYGDYKVYDVRKMIAKSEQEIGKATAKYFFYSNIMNFFKTEITLANGEIRKRPLIETNGETGEIVWDKGRDFATVRKVLSMPQVNIVKKTEVQTGGFSKESILPKRNSDKLIARKKDWDPKKYGGFDSPTVAYSVLVVAKVEKGKSKKLKSVKELLGITIMERSSFEKNPIDFLEAKGYKEVKKDLIIKLPKYSLFELENGRKRMLASAGELQKGNELALPSKYVNFLYLASHYEKLKGSPEDNEQKQLFVEQHKHYLDEIIEQISEFSKRVILADANLDKVLSAYNKHRDKPIREQAENIIHLFTLTNLGAPAAFKYFDTTIDRKRYTSTKEVLDATLIHQSITGLYETRIDLSQLGGDGGGGGPAPEAAAKGGVLNLEEEYRLHEKPVPSSIDPSWLQLFPTVWAERAGMGLANQVPPVVVELRSGASPVAVRQYPMSKEAREGIRPHIQRFLDLGVLVPCQSPWNTPLLPVKKPGTNDYRPVQDLREINKRVQDIHPTVPNPYNLLSSLPPSHTWYSVLDLKDAFFCLKLHPNSQPLFAFEWRDPEKGNTGQLTWTRLPQGFKNSPTLFNEALHRDLAPFRALNPQVVLLQYVDDLLVAAPTYRDCKEGTQKLLQELSKLGYRVSAKKAQLCQKEVTYLGYLLKEGKRWLTPARKATVMKIPPPTTPRQVREFLGKAGFCRLFIPGFASLAAPLYPLTKPSIPFIWTEEHQKAFDRIKEALLSAPALALPDLTKPFTLYVDERAGVARGVLTQTLGPWRRPVAYLSKKLDPVASGWPTCLKAVAAVALLLKDADKLTLGQNVTVIASHSLESIVRQPPDRWMTNARMTHYQSLLLNERVSFAPPAVLNPATLLPVESEATPVHRCSEILAEETGTRRDLKDQPLPGVPAWYTDGSSFIAEGKRRAGAAIVDGKRTVWASSLPEGTSAQKAELVALTQALRLAEGKDINIYTDSRYAFATAHIHGAIYKQRGWLTSAGKDIKNKEEILALLEAIHLPKRVAIIHCPGHQKGNDPVATGNRRADEAAKQAALSTRVLAETTKPAGKRTADGSEFEKRTADGSEFESPKKKAKVE

SEQ ID NO: 7485 - protein, 2096 aa, synthetic construct
MPAAKRVKLDGGDKKYSIGLDIGTNSVGWAVITDEYKVPSKKFKVLGNTDRHSIKKNLIGALLFDSGETAEATRLKRTARRRYTRRKNRICYLQEIFSNEMAKVDDSFFHRLEESFLVEEDKKHERHPIFGNIVDEVAYHEKYPTIYHLRKKLVDSTDKADLRLIYLALAHMIKFRGHFLIEGDLNPDNSDVDKLFIQLVQTYNQLFEENPINASGVDAKAILSARLSKSRRLENLIAQLPGEKKNGLFGNLIALSLGLTPNFKSNFDLAEDAKLQLSKDTYDDDLDNLLAQIGDQYADLFLAAKNLSDAILLSDILRVNTEITKAPLSASMIKRYDEHHQDLTLLKALVRQQLPEKYKEIFFDQSKNGYAGYIDGGASQEEFYKFIKPILEKMDGTEELLVKLNREDLLRKQRTFDNGSIPHQIHLGELHAILRRQEDFYPFLKDNREKIEKILTFRIPYYVGPLARGNSRFAWMTRKSEETITPWNFEEVVDKGASAQSFIERMTNFDKNLPNEKVLPKHSLLYEYFTVYNELTKVKYVTEGMRKPAFLSGEQKKAIVDLLFKTNRKVTVKQLKEDYFKKIECFDSVEISGVEDRFNASLGTYHDLLKIIKDKDFLDNEENEDILEDIVLTLTLFEDREMIEERLKTYAHLFDDKVMKQLKRRRYTGWGRLSRKLINGIRDKQSGKTILDFLKSDGFANRNFMQLIHDDSLTFKEDIQKAQVSGQGDSLHEHIANLAGSPAIKKGILQTVKVVDELVKVMGRHKPENIVIEMARENQTTQKGQKNSRERMKRIEEGIKELGSQILKEHPVENTQLQNEKLYLYYLQNGRDMYVDQELDINRLSDYDVDHIVPQSFLKDDSIDNKVLTRSDKARGKSDNVPSEEVVKKMKNYWRQLLNAKLITQRKFDNLTKAERGGLSELDKAGFIKRQLVETRQITKHVAQILDSRMNTKYDENDKLIREVKVITLKSKLVSDFRKDFQFYKVREINNYHHAHDAYLNAVVGTALIKKYPKLESEFVYGDYKVYDVRKMIAKSEQEIGKATAKYFFYSNIMNFFKTEITLANGEIRKRPLIETNGETGEIVWDKGRDFATVRKVLSMPQVNIVKKTEVQTGGFSKESILPKRNSDKLIARKKDWDPKKYGGFDSPTVAYSVLVVAKVEKGKSKKLKSVKELLGITIMERSSFEKNPIDFLEAKGYKEVKKDLIIKLPKYSLFELENGRKRMLASAGELQKGNELALPSKYVNFLYLASHYEKLKGSPEDNEQKQLFVEQHKHYLDEIIEQISEFSKRVILADANLDKVLSAYNKHRDKPIREQAENIIHLFTLTNLGAPAAFKYFDTTIDRKRYTSTKEVLDATLIHQSITGLYETRIDLSQLGGDGGGGGPAPEAAAKGGTLNIEDEYRLHETSKEPDVPLGSTWLSDFPQAWAETGGMGLAVRQAPLIIPLKATSTPVSIKQYPMSQEARLGIKPHIQRLLDQGILVPCQSPWNTPLLPVKKPGTNDYRPVQDLREVNKRVEDIHPTVPNPYNLLSGLPPSHQWYTVLDLKDAFFCLRLHPTSQPLFAFEWRDPEMGISGQLTWTRLPQGFKNSPTLFNEALHRDLADFRIQHPDLILLQYVDDLLLAATSEQDCQRGTRALLQTLGNLGYRASAKKAQICQKQVKYLGYLLKEGQRWLTEARKETVMGQPTPKTPRQLREFLGTAGFCRLWIPGFAEMAAPLYPLTKPGTLFNWGPDQQKAYQEIKQALLTAPALGLPDLTKPFELFVDEKQGYAKGVLTQKLGPWRRPVAYLSKKLDPVAAGWPPCLRMVAAIAVLTKDAGKLTMGQPLVILAPHAVEALVKQPPDRWLSNARMTHYQAMLLDTDRVQFGPVVALNPATLLPLPEKEAPHDCLEILAETHGTRPDLTDQPIPDADYTWYTDGSSFLQEGQRRAGAAVTTETEVIWARALPAGTSAQRAELIALTQALKMAEGKKLNVYTDSRYAFATAHVHGEIYRRRGWLTSEGREIKNKNEILALLKALFLPKRLSIIHCPGHQKGNSAEARGNRMADQAAREAAMKAVLETSTLLAGKRTADGSEFEKRTADGSEFESPKKKAKVE

SEQ ID NO: 7486 - protein, 2098 aa, synthetic construct
MPAAKRVKLDGGDKKYSIGLDIGTNSVGWAVITDEYKVPSKKFKVLGNTDRHSIKKNLIGALLFDSGETAEATRLKRTARRRYTRRKNRICYLQEIFSNEMAKVDDSFFHRLEESFLVEEDKKHERHPIFGNIVDEVAYHEKYPTIYHLRKKLVDSTDKADLRLIYLALAHMIKFRGHFLIEGDLNPDNSDVDKLFIQLVQTYNQLFEENPINASGVDAKAILSARLSKSRRLENLIAQLPGEKKNGLFGNLIALSLGLTPNFKSNFDLAEDAKLQLSKDTYDDDLDNLLAQIGDQYADLFLAAKNLSDAILLSDILRVNTEITKAPLSASMIKRYDEHHQDLTLLKALVRQQLPEKYKEIFFDQSKNGYAGYIDGGASQEEFYKFIKPILEKMDGTEELLVKLNREDLLRKQRTFDNGSIPHQIHLGELHAILRRQEDFYPFLKDNREKIEKILTFRIPYYVGPLARGNSRFAWMTRKSEETITPWNFEEVVDKGASAQSFIERMTNFDKNLPNEKVLPKHSLLYEYFTVYNELTKVKYVTEGMRKPAFLSGEQKKAIVDLLFKTNRKVTVKQLKEDYFKKIECFDSVEISGVEDRFNASLGTYHDLLKIIKDKDFLDNEENEDILEDIVLTLTLFEDREMIEERLKTYAHLFDDKVMKQLKRRRYTGWGRLSRKLINGIRDKQSGKTILDFLKSDGFANRNFMQLIHDDSLTFKEDIQKAQVSGQGDSLHEHIANLAGSPAIKKGILQTVKVVDELVKVMGRHKPENIVIEMARENQTTQKGQKNSRERMKRIEEGIKELGSQILKEHPVENTQLQNEKLYLYYLQNGRDMYVDQELDINRLSDYDVDHIVPQSFLKDDSIDNKVLTRSDKARGKSDNVPSEEVVKKMKNYWRQLLNAKLITQRKFDNLTKAERGGLSELDKAGFIKRQLVETRQITKHVAQILDSRMNTKYDENDKLIREVKVITLKSKLVSDFRKDFQFYKVREINNYHHAHDAYLNAVVGTALIKKYPKLESEFVYGDYKVYDVRKMIAKSEQEIGKATAKYFFYSNIMNFFKTEITLANGEIRKRPLIETNGETGEIVWDKGRDFATVRKVLSMPQVNIVKKTEVQTGGFSKESILPKRNSDKLIARKKDWDPKKYGGFDSPTVAYSVLVVAKVEKGKSKKLKSVKELLGITIMERSSFEKNPIDFLEAKGYKEVKKDLIIKLPKYSLFELENGRKRMLASAGELQKGNELALPSKYVNFLYLASHYEKLKGSPEDNEQKQLFVEQHKHYLDEIIEQISEFSKRVILADANLDKVLSAYNKHRDKPIREQAENIIHLFTLTNLGAPAAFKYFDTTIDRKRYTSTKEVLDATLIHQSITGLYETRIDLSQLGGDGGEAAAKGGGPAPGGTAPLEEEYRLFLEAPIQNVTLLEQWKREIPKVWAEINPPGLASTQAPIHVQLLSTALPVRVRQYPITLEAKRSLRETIRKFRAAGILRPVHSPWNTPLLPVRKSGTSEYRMVQDLREVNKRVETIHPTVPNPYTLLSLLPPDRIWYSVLDLKDAFFCIPLAPESQLIFAFEWADAEEGESGQLTWTRLPQGFKNSPTLFDEALNRDLQGFRLDHPSVSLLQYVDDLLIAADTQAACLSATRDLLMTLAELGYRVSGKKAQLCQEEVTYLGFKIHKGSRSLSNSRTQAILQIPVPKTKRQVREFLGTIGYCRLWIPGFAELAQPLYAATRGGNDPLVWGEKEEEAFQSLKLALTQPPALALPSLDKPFQLFVEETSGAAKGVLTQALGPWKRPVAYLSKRLDPVAAGWPRCLRAIAAAALLTREASKLTFGQDIEITSSHNLESLLRSPPDKWLTNARITQYQVLLLDPPRVRFKQTAALNPATLLPETDDTLPIHHCLDTLDSLTSTRPDLTDQPLAQAEATLFTDGSSYIRDGKRYAGAAVVTLDSVIWAEPLPIGTSAQKAELIALTKALEWSKDKSVNIYTDSRYAFATLHVHGMIYRERGLLTAGGKAIKNAPEILALLTAVWLPKRVAVMHCKGHQKDDAPTSTGNRRADEVAREVAIRPLSTQATISAGKRTADGSEFEKRTADGSEFESPKKKAKVE

SEQ ID NO: 7487 - protein, 2098 aa, synthetic construct
MPAAKRVKLDGGDKKYSIGLDIGTNSVGWAVITDEYKVPSKKFKVLGNTDRHSIKKNLIGALLFDSGETAEATRLKRTARRRYTRRKNRICYLQEIFSNEMAKVDDSFFHRLEESFLVEEDKKHERHPIFGNIVDEVAYHEKYPTIYHLRKKLVDSTDKADLRLIYLALAHMIKFRGHFLIEGDLNPDNSDVDKLFIQLVQTYNQLFEENPINASGVDAKAILSARLSKSRRLENLIAQLPGEKKNGLFGNLIALSLGLTPNFKSNFDLAEDAKLQLSKDTYDDDLDNLLAQIGDQYADLFLAAKNLSDAILLSDILRVNTEITKAPLSASMIKRYDEHHQDLTLLKALVRQQLPEKYKEIFFDQSKNGYAGYIDGGASQEEFYKFIKPILEKMDGTEELLVKLNREDLLRKQRTFDNGSIPHQIHLGELHAILRRQEDFYPFLKDNREKIEKILTFRIPYYVGPLARGNSRFAWMTRKSEETITPWNFEEVVDKGASAQSFIERMTNFDKNLPNEKVLPKHSLLYEYFTVYNELTKVKYVTEGMRKPAFLSGEQKKAIVDLLFKTNRKVTVKQLKEDYFKKIECFDSVEISGVEDRFNASLGTYHDLLKIIKDKDFLDNEENEDILEDIVLTLTLFEDREMIEERLKTYAHLFDDKVMKQLKRRRYTGWGRLSRKLINGIRDKQSGKTILDFLKSDGFANRNFMQLIHDDSLTFKEDIQKAQVSGQGDSLHEHIANLAGSPAIKKGILQTVKVVDELVKVMGRHKPENIVIEMARENQTTQKGQKNSRERMKRIEEGIKELGSQILKEHPVENTQLQNEKLYLYYLQNGRDMYVDQELDINRLSDYDVDHIVPQSFLKDDSIDNKVLTRSDKARGKSDNVPSEEVVKKMKNYWRQLLNAKLITQRKFDNLTKAERGGLSELDKAGFIKRQLVETRQITKHVAQILDSRMNTKYDENDKLIREVKVITLKSKLVSDFRKDFQFYKVREINNYHHAHDAYLNAVVGTALIKKYPKLESEFVYGDYKVYDVRKMIAKSEQEIGKATAKYFFYSNIMNFFKTEITLANGEIRKRPLIETNGETGEIVWDKGRDFATVRKVLSMPQVNIVKKTEVQTGGFSKESILPKRNSDKLIARKKDWDPKKYGGFDSPTVAYSVLVVAKVEKGKSKKLKSVKELLGITIMERSSFEKNPIDFLEAKGYKEVKKDLIIKLPKYSLFELENGRKRMLASAGELQKGNELALPSKYVNFLYLASHYEKLKGSPEDNEQKQLFVEQHKHYLDEIIEQISEFSKRVILADANLDKVLSAYNKHRDKPIREQAENIIHLFTLTNLGAPAAFKYFDTTIDRKRYTSTKEVLDATLIHQSITGLYETRIDLSQLGGDGGEAAAKGGGPAPGGTAPLEEEYRLFLEAPIQNVTLLEQWKREIPKVWAEINPPGLASTQAPIHVQLLSTALPVRVRQYPITLEAKRSLRETIRKFRAAGILRPVHSPWNTPLLPVRKSGTSEYRMVQDLREVNKRVETIHPTVPNPYTLLSLLPPDRIWYSVLDLKDAFFCIPLAPESQLIFAFEWADAEEGESGQLTWTRLPQGFKNSPTLFNEALNRDLQGFRLDHPSVSLLQYVDDLLIAADTQAACLSATRDLLMTLAELGYRVSGKKAQLCQEEVTYLGFKIHKGSRSLSNSRTQAILQIPVPKTKRQVREFLGTIGYCRLWIPGFAELAQPLYAATRPGNDPLVWGEKEEEAFQSLKLALTQPPALALPSLDKPFQLFVEETSGAAKGVLTQALGPWKRPVAYLSKRLDPVAAGWPRCLRAIAAAALLTREASKLTFGQDIEITSSHNLESLLRSPPDKWLTNARITQYQVLLLDPPRVRFKQTAALNPATLLPETDDTLPIHHCLDTLDSLTSTRPDLTDQPLAQAEATLFTDGSSYIRDGKRYAGAAVVTLDSVIWAEPLPIGTSAQKAELIALTKALEWSKDKSVNIYTDSRYAFATLHVHGMIYRERGWLTAGGKAIKNAPEILALLTAVWLPKRVAVMHCKGHQKDDAPTSTGNRRADEVAREVAIRPLSTQATISAGKRTADGSEFEKRTADGSEFESPKKKAKVE

SEQ ID NO: 7488 - protein, 2098 aa, synthetic construct
MPAAKRVKLDGGDKKYSIGLDIGTNSVGWAVITDEYKVPSKKFKVLGNTDRHSIKKNLIGALLFDSGETAEATRLKRTARRRYTRRKNRICYLQEIFSNEMAKVDDSFFHRLEESFLVEEDKKHERHPIFGNIVDEVAYHEKYPTIYHLRKKLVDSTDKADLRLIYLALAHMIKFRGHFLIEGDLNPDNSDVDKLFIQLVQTYNQLFEENPINASGVDAKAILSARLSKSRRLENLIAQLPGEKKNGLFGNLIALSLGLTPNFKSNFDLAEDAKLQLSKDTYDDDLDNLLAQIGDQYADLFLAAKNLSDAILLSDILRVNTEITKAPLSASMIKRYDEHHQDLTLLKALVRQQLPEKYKEIFFDQSKNGYAGYIDGGASQEEFYKFIKPILEKMDGTEELLVKLNREDLLRKQRTFDNGSIPHQIHLGELHAILRRQEDFYPFLKDNREKIEKILTFRIPYYVGPLARGNSRFAWMTRKSEETITPWNFEEVVDKGASAQSFIERMTNFDKNLPNEKVLPKHSLLYEYFTVYNELTKVKYVTEGMRKPAFLSGEQKKAIVDLLFKTNRKVTVKQLKEDYFKKIECFDSVEISGVEDRFNASLGTYHDLLKIIKDKDFLDNEENEDILEDIVLTLTLFEDREMIEERLKTYAHLFDDKVMKQLKRRRYTGWGRLSRKLINGIRDKQSGKTILDFLKSDGFANRNFMQLIHDDSLTFKEDIQKAQVSGQGDSLHEHIANLAGSPAIKKGILQTVKVVDELVKVMGRHKPENIVIEMARENQTTQKGQKNSRERMKRIEEGIKELGSQILKEHPVENTQLQNEKLYLYYLQNGRDMYVDQELDINRLSDYDVDHIVPQSFLKDDSIDNKVLTRSDKARGKSDNVPSEEVVKKMKNYWRQLLNAKLITQRKFDNLTKAERGGLSELDKAGFIKRQLVETRQITKHVAQILDSRMNTKYDENDKLIREVKVITLKSKLVSDFRKDFQFYKVREINNYHHAHDAYLNAVVGTALIKKYPKLESEFVYGDYKVYDVRKMIAKSEQEIGKATAKYFFYSNIMNFFKTEITLANGEIRKRPLIETNGETGEIVWDKGRDFATVRKVLSMPQVNIVKKTEVQTGGFSKESILPKRNSDKLIARKKDWDPKKYGGFDSPTVAYSVLVVAKVEKGKSKKLKSVKELLGITIMERSSFEKNPIDFLEAKGYKEVKKDLIIKLPKYSLFELENGRKRMLASAGELQKGNELALPSKYVNFLYLASHYEKLKGSPEDNEQKQLFVEQHKHYLDEIIEQISEFSKRVILADANLDKVLSAYNKHRDKPIREQAENIIHLFTLTNLGAPAAFKYFDTTIDRKRYTSTKEVLDATLIHQSITGLYETRIDLSQLGGDGGEAAAKGGGPAPGGTAPLEEEYRLFLEAPIQNVTLLEQWKREIPKVWAEINPPGLASTQAPIHVQLLSTALPVRVRQYPITLEAKRSLRETIRKFRAAGILRPVHSPWNTPLLPVRKSGTSEYRMVQDLREVNKRVETIHPTVPNPYTLLSLLPPDRIWYSVLDLKDAFFCIPLAPESQLIFAFEWADAEEGESGQLTWTRLPQGFKNSPTLFNEALNRDLQGFRLDHPSVSLLQYVDDLLIAADTQAACLSATRDLLMTLAELGYRVSGKKAQLCQEEVTYLGFKIHKGSRSLSNSRTQAILQIPVPKTKRQVREFLGKIGYCRLFIPGFAELAQPLYAATRPGNDPLVWGEKEEEAFQSLKLALTQPPALALPSLDKPFQLFVEETSGAAKGVLTQALGPWKRPVAYLSKRLDPVAAGWPRCLRAIAAAALLTREASKLTFGQDIEITSSHNLESLLRSPPDKWLTNARITQYQVLLLDPPRVRFKQTAALNPATLLPETDDTLPIHHCLDTLDSLTSTRPDLTDQPLAQAEATLFTDGSSYIRDGKRYAGAAVVTLDSVIWAEPLPIGTSAQKAELIALTKALEWSKDKSVNIYTDSRYAFATLHVHGMIYRERGWLTAGGKAIKNAPEILALLTAVWLPKRVAVMHCKGHQKDDAPTSTGNRRADEVAREVAIRPLSTQATISAGKRTADGSEFEKRTADGSEFESPKKKAKVE

SEQ ID NO: 7489 - protein, 2102 aa, synthetic construct
MPAAKRVKLDGGDKKYSIGLDIGTNSVGWAVITDEYKVPSKKFKVLGNTDRHSIKKNLIGALLFDSGETAEATRLKRTARRRYTRRKNRICYLQEIFSNEMAKVDDSFFHRLEESFLVEEDKKHERHPIFGNIVDEVAYHEKYPTIYHLRKKLVDSTDKADLRLIYLALAHMIKFRGHFLIEGDLNPDNSDVDKLFIQLVQTYNQLFEENPINASGVDAKAILSARLSKSRRLENLIAQLPGEKKNGLFGNLIALSLGLTPNFKSNFDLAEDAKLQLSKDTYDDDLDNLLAQIGDQYADLFLAAKNLSDAILLSDILRVNTEITKAPLSASMIKRYDEHHQDLTLLKALVRQQLPEKYKEIFFDQSKNGYAGYIDGGASQEEFYKFIKPILEKMDGTEELLVKLNREDLLRKQRTFDNGSIPHQIHLGELHAILRRQEDFYPFLKDNREKIEKILTFRIPYYVGPLARGNSRFAWMTRKSEETITPWNFEEVVDKGASAQSFIERMTNFDKNLPNEKVLPKHSLLYEYFTVYNELTKVKYVTEGMRKPAFLSGEQKKAIVDLLFKTNRKVTVKQLKEDYFKKIECFDSVEISGVEDRFNASLGTYHDLLKIIKDKDFLDNEENEDILEDIVLTLTLFEDREMIEERLKTYAHLFDDKVMKQLKRRRYTGWGRLSRKLINGIRDKQSGKTILDFLKSDGFANRNFMQLIHDDSLTFKEDIQKAQVSGQGDSLHEHIANLAGSPAIKKGILQTVKVVDELVKVMGRHKPENIVIEMARENQTTQKGQKNSRERMKRIEEGIKELGSQILKEHPVENTQLQNEKLYLYYLQNGRDMYVDQELDINRLSDYDVDHIVPQSFLKDDSIDNKVLTRSDKARGKSDNVPSEEVVKKMKNYWRQLLNAKLITQRKFDNLTKAERGGLSELDKAGFIKRQLVETRQITKHVAQILDSRMNTKYDENDKLIREVKVITLKSKLVSDFRKDFQFYKVREINNYHHAHDAYLNAVVGTALIKKYPKLESEFVYGDYKVYDVRKMIAKSEQEIGKATAKYFFYSNIMNFFKTEITLANGEIRKRPLIETNGETGEIVWDKGRDFATVRKVLSMPQVNIVKKTEVQTGGFSKESILPKRNSDKLIARKKDWDPKKYGGFDSPTVAYSVLVVAKVEKGKSKKLKSVKELLGITIMERSSFEKNPIDFLEAKGYKEVKKDLIIKLPKYSLFELENGRKRMLASAGELQKGNELALPSKYVNFLYLASHYEKLKGSPEDNEQKQLFVEQHKHYLDEIIEQISEFSKRVILADANLDKVLSAYNKHRDKPIREQAENIIHLFTLTNLGAPAAFKYFDTTIDRKRYTSTKEVLDATLIHQSITGLYETRIDLSQLGGDGGEAAAKGGGPAPGGTVSLQDEHRLFDIPVTTSLPDVWLQDFPQAWAETGGLGRAKCQAPIIIDLKPTAVPVSIKQYPMSLEAHMGIRQHIIKFLELGVLRPCRSPWNTPLLPVKKPGTQDYRPVQDLREINKRTVDIHPTVPNPYNLLSTLKPDYSWYTVLDLKDAFFCLPLAPQSQELFAFEWKDPERGISGQLTWTRLPQGFKNSPTLFDEALHRDLTDFRTQHPEVTLLQYVDDLLLAAPTKKACTQGTRHLLQELGEKGYRASAKKAQICQTKVTYLGYILSEGKRWLTPGRIETVARIPPPRNPREVREFLGTAGFCRLWIPGFAELAAPLYALTKESTPFTWQTEHQLAFEALKKALLSAPALGLPDTSKPFTLFLDERQGIAKGVLTQKLGPWKRPVAYLSKKLDPVAAGWPPCLRIMAATAMLVKDSAKLTLGQPLTVITPHTLEAIVRQPPDRWITNARLTHYQALLLDTDRVQFGPPVTLNPATLLPVPENQPSPHDCRQVLAETHGTREDLKDQELPDADHTWYTDGSSYLDSGTRRAGAAVVDGHNTIWAQSLPPGTSAQKAELIALTKALELSKGKKANIYTDSRYAFATAHTHGSIYERRGLLTSEGKEIKNKAEIIALLKALFLPQEVAIIHCPGHQKGQDPVAVGNRQADRVARQAAMAEVLTLATEPDNTSHITAGKRTADGSEFEKRTADGSEFESPKKKAKVE

SEQ ID NO: 7490 - protein, 2102 aa, synthetic construct
MPAAKRVKLDGGDKKYSIGLDIGTNSVGWAVITDEYKVPSKKFKVLGNTDRHSIKKNLIGALLFDSGETAEATRLKRTARRRYTRRKNRICYLQEIFSNEMAKVDDSFFHRLEESFLVEEDKKHERHPIFGNIVDEVAYHEKYPTIYHLRKKLVDSTDKADLRLIYLALAHMIKFRGHFLIEGDLNPDNSDVDKLFIQLVQTYNQLFEENPINASGVDAKAILSARLSKSRRLENLIAQLPGEKKNGLFGNLIALSLGLTPNFKSNFDLAEDAKLQLSKDTYDDDLDNLLAQIGDQYADLFLAAKNLSDAILLSDILRVNTEITKAPLSASMIKRYDEHHQDLTLLKALVRQQLPEKYKEIFFDQSKNGYAGYIDGGASQEEFYKFIKPILEKMDGTEELLVKLNREDLLRKQRTFDNGSIPHQIHLGELHAILRRQEDFYPFLKDNREKIEKILTFRIPYYVGPLARGNSRFAWMTRKSEETITPWNFEEVVDKGASAQSFIERMTNFDKNLPNEKVLPKHSLLYEYFTVYNELTKVKYVTEGMRKPAFLSGEQKKAIVDLLFKTNRKVTVKQLKEDYFKKIECFDSVEISGVEDRFNASLGTYHDLLKIIKDKDFLDNEENEDILEDIVLTLTLFEDREMIEERLKTYAHLFDDKVMKQLKRRRYTGWGRLSRKLINGIRDKQSGKTILDFLKSDGFANRNFMQLIHDDSLTFKEDIQKAQVSGQGDSLHEHIANLAGSPAIKKGILQTVKVVDELVKVMGRHKPENIVIEMARENQTTQKGQKNSRERMKRIEEGIKELGSQILKEHPVENTQLQNEKLYLYYLQNGRDMYVDQELDINRLSDYDVDHIVPQSFLKDDSIDNKVLTRSDKARGKSDNVPSEEVVKKMKNYWRQLLNAKLITQRKFDNLTKAERGGLSELDKAGFIKRQLVETRQITKHVAQILDSRMNTKYDENDKLIREVKVITLKSKLVSDFRKDFQFYKVREINNYHHAHDAYLNAVVGTALIKKYPKLESEFVYGDYKVYDVRKMIAKSEQEIGKATAKYFFYSNIMNFFKTEITLANGEIRKRPLIETNGETGEIVWDKGRDFATVRKVLSMPQVNIVKKTEVQTGGFSKESILPKRNSDKLIARKKDWDPKKYGGFDSPTVAYSVLVVAKVEKGKSKKLKSVKELLGITIMERSSFEKNPIDFLEAKGYKEVKKDLIIKLPKYSLFELENGRKRMLASAGELQKGNELALPSKYVNFLYLASHYEKLKGSPEDNEQKQLFVEQHKHYLDEIIEQISEFSKRVILADANLDKVLSAYNKHRDKPIREQAENIIHLFTLTNLGAPAAFKYFDTTIDRKRYTSTKEVLDATLIHQSITGLYETRIDLSQLGGDGGEAAAKGGGPAPGGTVSLQDEHRLFDIPVTTSLPDVWLQDFPQAWAETGGLGRAKCQAPIIIDLKPTAVPVSIKQYPMSLEAHMGIRQHIIKFLELGVLRPCRSPWNTPLLPVKKPGTQDYRPVQDLREINKRTVDIHPTVPNPYNLLSTLKPDYSWYTVLDLKDAFFCLPLAPQSQELFAFEWKDPERGISGQLTWTRLPQGFKNSPTLFNEALHRDLTDFRTQHPEVTLLQYVDDLLLAAPTKKACTQGTRHLLQELGEKGYRASAKKAQICQTKVTYLGYILSEGKRWLTPGRIETVARIPPPRNPREVREFLGTAGFCRLWIPGFAELAAPLYALTKPSTPFTWQTEHQLAFEALKKALLSAPALGLPDTSKPFTLFLDERQGIAKGVLTQKLGPWKRPVAYLSKKLDPVAAGWPPCLRIMAATAMLVKDSAKLTLGQPLTVITPHTLEAIVRQPPDRWITNARLTHYQALLLDTDRVQFGPPVTLNPATLLPVPENQPSPHDCRQVLAETHGTREDLKDQELPDADHTWYTDGSSYLDSGTRRAGAAVVDGHNTIWAQSLPPGTSAQKAELIALTKALELSKGKKANIYTDSRYAFATAHTHGSIYERRGWLTSEGKEIKNKAEIIALLKALFLPQEVAIIHCPGHQKGQDPVAVGNRQADRVARQAAMAEVLTLATEPDNTSHITAGKRTADGSEFEKRTADGSEFESPKKKAKVE

SEQ ID NO: 7491 - protein, 2173 aa, synthetic construct
MPAAKRVKLDGGDKKYSIGLDIGTNSVGWAVITDEYKVPSKKFKVLGNTDRHSIKKNLIGALLFDSGETAEATRLKRTARRRYTRRKNRICYLQEIFSNEMAKVDDSFFHRLEESFLVEEDKKHERHPIFGNIVDEVAYHEKYPTIYHLRKKLVDSTDKADLRLIYLALAHMIKFRGHFLIEGDLNPDNSDVDKLFIQLVQTYNQLFEENPINASGVDAKAILSARLSKSRRLENLIAQLPGEKKNGLFGNLIALSLGLTPNFKSNFDLAEDAKLQLSKDTYDDDLDNLLAQIGDQYADLFLAAKNLSDAILLSDILRVNTEITKAPLSASMIKRYDEHHQDLTLLKALVRQQLPEKYKEIFFDQSKNGYAGYIDGGASQEEFYKFIKPILEKMDGTEELLVKLNREDLLRKQRTFDNGSIPHQIHLGELHAILRRQEDFYPFLKDNREKIEKILTFRIPYYVGPLARGNSRFAWMTRKSEETITPWNFEEVVDKGASAQSFIERMTNFDKNLPNEKVLPKHSLLYEYFTVYNELTKVKYVTEGMRKPAFLSGEQKKAIVDLLFKTNRKVTVKQLKEDYFKKIECFDSVEISGVEDRFNASLGTYHDLLKIIKDKDFLDNEENEDILEDIVLTLTLFEDREMIEERLKTYAHLFDDKVMKQLKRRRYTGWGRLSRKLINGIRDKQSGKTILDFLKSDGFANRNFMQLIHDDSLTFKEDIQKAQVSGQGDSLHEHIANLAGSPAIKKGILQTVKVVDELVKVMGRHKPENIVIEMARENQTTQKGQKNSRERMKRIEEGIKELGSQILKEHPVENTQLQNEKLYLYYLQNGRDMYVDQELDINRLSDYDVDHIVPQSFLKDDSIDNKVLTRSDKARGKSDNVPSEEVVKKMKNYWRQLLNAKLITQRKFDNLTKAERGGLSELDKAGFIKRQLVETRQITKHVAQILDSRMNTKYDENDKLIREVKVITLKSKLVSDFRKDFQFYKVREINNYHHAHDAYLNAVVGTALIKKYPKLESEFVYGDYKVYDVRKMIAKSEQEIGKATAKYFFYSNIMNFFKTEITLANGEIRKRPLIETNGETGEIVWDKGRDFATVRKVLSMPQVNIVKKTEVQTGGFSKESILPKRNSDKLIARKKDWDPKKYGGFDSPTVAYSVLVVAKVEKGKSKKLKSVKELLGITIMERSSFEKNPIDFLEAKGYKEVKKDLIIKLPKYSLFELENGRKRMLASAGELQKGNELALPSKYVNFLYLASHYEKLKGSPEDNEQKQLFVEQHKHYLDEIIEQISEFSKRVILADANLDKVLSAYNKHRDKPIREQAENIIHLFTLTNLGAPAAFKYFDTTIDRKRYTSTKEVLDATLIHQSITGLYETRIDLSQLGGDGGEAAAKGGGPAPGGMDLLKPLTVERKGVKIKGYWNSQADITCVPKDLLQGEEPVRQQNVTTIHGTQEGDVYYVNLKIDGRRINTEVIGTTLDYAIITPGDVPWILKKPLELTIKLDLEEQQGTLLNNSILSKKGKEELKQLFEKYSALWQSWENQVGHRRIRPHKIATGTVKPTPQKQYHINPKAKPDIQIVINDLLKQGVLIQKESTMNTPVYPVPKPNGRWRMVLDYRAVNKVTPLIAVQNQHSYGILGSLFKGRYKTTIDLSNGFWAHPIVPEDYWITAFTWQGKQYCWTVLPQGFLNSPGLFTGDVVDLLQGIPNVEVYVDDVYISHDSEKEHLEYLDILFNRLKEAGYIISLKKSNIANSIVDFLGFQITNEGRGLTDTFKEKLENITAPTTLKQLQSILGLLNFARNFIPDFTELIAPLYALIPKSTKNYVPWQIEHSTTLETLITKLNGAEYLQGRKGDKTLIMKVNASYTTGYIRYYNEGEKKPISYVSIVFSKTELKFTELEKLLTTVHKGLLKALDLSMGQNIHVYSPIVSMQNIQKTPQTAKKALASRWLSWLSYLEDPRIRFFYDPQMPALKDLPAVDTGKDNKKHPSNFQHIFYTDGSAITSPTKEGHLNAGMGIVYFINKDGNLQKQQEWSISLGNHTAQFAEIAAFEFALKKCLPLGGNILVVTDSNYVAKAYNEELDVWASNGFVNNRKKPLKHISKWKSVADLKRLRPDVVVTHEPGHQKLDSSPHAYGNNLADQLATQASFKVHAGKRTADGSEFEKRTADGSEFESPKKKAKVE

SEQ ID NO: 7492 - protein, 2094 aa, synthetic construct
MPAAKRVKLDGGDKKYSIGLDIGTNSVGWAVITDEYKVPSKKFKVLGNTDRHSIKKNLIGALLFDSGETAEATRLKRTARRRYTRRKNRICYLQEIFSNEMAKVDDSFFHRLEESFLVEEDKKHERHPIFGNIVDEVAYHEKYPTIYHLRKKLVDSTDKADLRLIYLALAHMIKFRGHFLIEGDLNPDNSDVDKLFIQLVQTYNQLFEENPINASGVDAKAILSARLSKSRRLENLIAQLPGEKKNGLFGNLIALSLGLTPNFKSNFDLAEDAKLQLSKDTYDDDLDNLLAQIGDQYADLFLAAKNLSDAILLSDILRVNTEITKAPLSASMIKRYDEHHQDLTLLKALVRQQLPEKYKEIFFDQSKNGYAGYIDGGASQEEFYKFIKPILEKMDGTEELLVKLNREDLLRKQRTFDNGSIPHQIHLGELHAILRRQEDFYPFLKDNREKIEKILTFRIPYYVGPLARGNSRFAWMTRKSEETITPWNFEEVVDKGASAQSFIERMTNFDKNLPNEKVLPKHSLLYEYFTVYNELTKVKYVTEGMRKPAFLSGEQKKAIVDLLFKTNRKVTVKQLKEDYFKKIECFDSVEISGVEDRFNASLGTYHDLLKIIKDKDFLDNEENEDILEDIVLTLTLFEDREMIEERLKTYAHLFDDKVMKQLKRRRYTGWGRLSRKLINGIRDKQSGKTILDFLKSDGFANRNFMQLIHDDSLTFKEDIQKAQVSGQGDSLHEHIANLAGSPAIKKGILQTVKVVDELVKVMGRHKPENIVIEMARENQTTQKGQKNSRERMKRIEEGIKELGSQILKEHPVENTQLQNEKLYLYYLQNGRDMYVDQELDINRLSDYDVDHIVPQSFLKDDSIDNKVLTRSDKARGKSDNVPSEEVVKKMKNYWRQLLNAKLITQRKFDNLTKAERGGLSELDKAGFIKRQLVETRQITKHVAQILDSRMNTKYDENDKLIREVKVITLKSKLVSDFRKDFQFYKVREINNYHHAHDAYLNAVVGTALIKKYPKLESEFVYGDYKVYDVRKMIAKSEQEIGKATAKYFFYSNIMNFFKTEITLANGEIRKRPLIETNGETGEIVWDKGRDFATVRKVLSMPQVNIVKKTEVQTGGFSKESILPKRNSDKLIARKKDWDPKKYGGFDSPTVAYSVLVVAKVEKGKSKKLKSVKELLGITIMERSSFEKNPIDFLEAKGYKEVKKDLIIKLPKYSLFELENGRKRMLASAGELQKGNELALPSKYVNFLYLASHYEKLKGSPEDNEQKQLFVEQHKHYLDEIIEQISEFSKRVILADANLDKVLSAYNKHRDKPIREQAENIIHLFTLTNLGAPAAFKYFDTTIDRKRYTSTKEVLDATLIHQSITGLYETRIDLSQLGGDGGEAAAKGGGPAPGGVLNLEEEYRLHEKPVPSSIDPSWLQLFPTVWAERAGMGLANQVPPVVVELRSGASPVAVRQYPMSKEAREGIRPHIQKFLDLGVLVPCRSPWNTPLLPVKKPGTNDYRPVQDLREINKRVQDIHPTVPNPYNLLSSLPPSYTWYSVLDLKDAFFCLRLHPNSQPLFAFEWKDPEKGNTGQLTWTRLPQGFKNSPTLFDEALHRDLAPFRALNPQVVLLQYVDDLLVAAPTYEDCKKGTQKLLQELSKLGYRVSAKKAQLCQREVTYLGYLLKEGKRWLTPARKATVMKIPVPTTPRQVREFLGTAGFCRLWIPGFASLAAPLYPLTKESIPFIWTEEHQQAFDHIKKALLSAPALALPDLTKPFTLYIDERAGVARGVLTQTLGPWRRPVAYLSKKLDPVASGWPTCLKAVAAVALLLKDADKLTLGQNVTVIASHSLESIVRQPPDRWMTNARMTHYQSLLLNERVSFAPPAVLNPATLLPVESEATPVHRCSEILAEETGTRRDLEDQPLPGVPTWYTDGSSFITEGKRRAGAPIVDGKRTVWASSLPEGTSAQKAELVALTQALRLAEGKNINIYTDSRYAFATAHIHGAIYKQRGLLTSAGKDIKNKEEILALLEAIHLPRRVAIIHCPGHQRGSNPVATGNRRADEAAKQAALSTRVLAGTTKPAGKRTADGSEFEKRTADGSEFESPKKKAKVE

SEQ ID NO: 7493 - protein, 2218 aa, synthetic construct
MPAAKRVKLDGGDKKYSIGLDIGTNSVGWAVITDEYKVPSKKFKVLGNTDRHSIKKNLIGALLFDSGETAEATRLKRTARRRYTRRKNRICYLQEIFSNEMAKVDDSFFHRLEESFLVEEDKKHERHPIFGNIVDEVAYHEKYPTIYHLRKKLVDSTDKADLRLIYLALAHMIKFRGHFLIEGDLNPDNSDVDKLFIQLVQTYNQLFEENPINASGVDAKAILSARLSKSRRLENLIAQLPGEKKNGLFGNLIALSLGLTPNFKSNFDLAEDAKLQLSKDTYDDDLDNLLAQIGDQYADLFLAAKNLSDAILLSDILRVNTEITKAPLSASMIKRYDEHHQDLTLLKALVRQQLPEKYKEIFFDQSKNGYAGYIDGGASQEEFYKFIKPILEKMDGTEELLVKLNREDLLRKQRTFDNGSIPHQIHLGELHAILRRQEDFYPFLKDNREKIEKILTFRIPYYVGPLARGNSRFAWMTRKSEETITPWNFEEVVDKGASAQSFIERMTNFDKNLPNEKVLPKHSLLYEYFTVYNELTKVKYVTEGMRKPAFLSGEQKKAIVDLLFKTNRKVTVKQLKEDYFKKIECFDSVEISGVEDRFNASLGTYHDLLKIIKDKDFLDNEENEDILEDIVLTLTLFEDREMIEERLKTYAHLFDDKVMKQLKRRRYTGWGRLSRKLINGIRDKQSGKTILDFLKSDGFANRNFMQLIHDDSLTFKEDIQKAQVSGQGDSLHEHIANLAGSPAIKKGILQTVKVVDELVKVMGRHKPENIVIEMARENQTTQKGQKNSRERMKRIEEGIKELGSQILKEHPVENTQLQNEKLYLYYLQNGRDMYVDQELDINRLSDYDVDHIVPQSFLKDDSIDNKVLTRSDKARGKSDNVPSEEVVKKMKNYWRQLLNAKLITQRKFDNLTKAERGGLSELDKAGFIKRQLVETRQITKHVAQILDSRMNTKYDENDKLIREVKVITLKSKLVSDFRKDFQFYKVREINNYHHAHDAYLNAVVGTALIKKYPKLESEFVYGDYKVYDVRKMIAKSEQEIGKATAKYFFYSNIMNFFKTEITLANGEIRKRPLIETNGETGEIVWDKGRDFATVRKVLSMPQVNIVKKTEVQTGGFSKESILPKRNSDKLIARKKDWDPKKYGGFDSPTVAYSVLVVAKVEKGKSKKLKSVKELLGITIMERSSFEKNPIDFLEAKGYKEVKKDLIIKLPKYSLFELENGRKRMLASAGELQKGNELALPSKYVNFLYLASHYEKLKGSPEDNEQKQLFVEQHKHYLDEIIEQISEFSKRVILADANLDKVLSAYNKHRDKPIREQAENIIHLFTLTNLGAPAAFKYFDTTIDRKRYTSTKEVLDATLIHQSITGLYETRIDLSQLGGDGGEAAAKGGGPAPGGTLGDQGSRGSDPLPEPRVTLTVEGIPTEFLVNTGAEHSVLTKPMGKMGSKRTVVAGATGSKVYPWTTKRLLKIGQKQVTHSFLVIPECPAPLLGRDLLTKLKAQIQFSTEGPQVTWEDRPAMCLVLNLEEEYRLHEKPVPPSIDPSWLQLFPMVWAEKAGMGLANQVPPVVVELKSDASPVAVRQYPMSKEAREGIRPHIQRFLDLGILVPCQSPWNTPLLPVKKPGTNDYRPVQDLREVNKRVQDIHPTVPNPYNLLSSLPPSHTWYSVLDLKDAFFCLKLHPNSQPLFAFEWRDPEKGNTGQLTWTRLPQGFKNSPTLFDEALHRDLASFRALNPQVVMLQYVDDLLVAAPTYRDCKEGTRRLLQELSKLGYRVSAKKAQLCREEVTYLGYLLKGGKRWLTPARKATVMKIPTPTTPRQVREFLGTAGFCRLWIPGFASLAAPLYPLTREKVPFTWTEAHQEAFGRIKEALLSAPALALPDLTKPFALYVDEKEGVARGVLTQTLGPWRRPVAYLSKKLDPVASGWPTCLKAIAAVALLLKDADKLTLGQNVLVIAPHNLESIVRQPPDRWMTNARMTHYQSLLLNERVSFAPPAILNPATLLPVESDDTPIHICSEILAEETGTRPDLRDQPLPGVPAWYTDGSSFIMDGRRQAGAAIVDNKRTVWASNLPEGTSAQKAELIALTQALRLAEGKSINIYTDSRYAFATAHVHGAIYKQRGLLTSAGKDIKNKEEILALLEAIHLPKRVAIIHCPGHQRGTDPVATGNRKADEAAKQAAQSTRILTETTKNAGKRTADGSEFEKRTADGSEFESPKKKAKVE

SEQ ID NO: 7494 - protein, 2127 aa, synthetic construct
MPAAKRVKLDGGDKKYSIGLDIGTNSVGWAVITDEYKVPSKKFKVLGNTDRHSIKKNLIGALLFDSGETAEATRLKRTARRRYTRRKNRICYLQEIFSNEMAKVDDSFFHRLEESFLVEEDKKHERHPIFGNIVDEVAYHEKYPTIYHLRKKLVDSTDKADLRLIYLALAHMIKFRGHFLIEGDLNPDNSDVDKLFIQLVQTYNQLFEENPINASGVDAKAILSARLSKSRRLENLIAQLPGEKKNGLFGNLIALSLGLTPNFKSNFDLAEDAKLQLSKDTYDDDLDNLLAQIGDQYADLFLAAKNLSDAILLSDILRVNTEITKAPLSASMIKRYDEHHQDLTLLKALVRQQLPEKYKEIFFDQSKNGYAGYIDGGASQEEFYKFIKPILEKMDGTEELLVKLNREDLLRKQRTFDNGSIPHQIHLGELHAILRRQEDFYPFLKDNREKIEKILTFRIPYYVGPLARGNSRFAWMTRKSEETITPWNFEEVVDKGASAQSFIERMTNFDKNLPNEKVLPKHSLLYEYFTVYNELTKVKYVTEGMRKPAFLSGEQKKAIVDLLFKTNRKVTVKQLKEDYFKKIECFDSVEISGVEDRFNASLGTYHDLLKIIKDKDFLDNEENEDILEDIVLTLTLFEDREMIEERLKTYAHLFDDKVMKQLKRRRYTGWGRLSRKLINGIRDKQSGKTILDFLKSDGFANRNFMQLIHDDSLTFKEDIQKAQVSGQGDSLHEHIANLAGSPAIKKGILQTVKVVDELVKVMGRHKPENIVIEMARENQTTQKGQKNSRERMKRIEEGIKELGSQILKEHPVENTQLQNEKLYLYYLQNGRDMYVDQELDINRLSDYDVDHIVPQSFLKDDSIDNKVLTRSDKARGKSDNVPSEEVVKKMKNYWRQLLNAKLITQRKFDNLTKAERGGLSELDKAGFIKRQLVETRQITKHVAQILDSRMNTKYDENDKLIREVKVITLKSKLVSDFRKDFQFYKVREINNYHHAHDAYLNAVVGTALIKKYPKLESEFVYGDYKVYDVRKMIAKSEQEIGKATAKYFFYSNIMNFFKTEITLANGEIRKRPLIETNGETGEIVWDKGRDFATVRKVLSMPQVNIVKKTEVQTGGFSKESILPKRNSDKLIARKKDWDPKKYGGFDSPTVAYSVLVVAKVEKGKSKKLKSVKELLGITIMERSSFEKNPIDFLEAKGYKEVKKDLIIKLPKYSLFELENGRKRMLASAGELQKGNELALPSKYVNFLYLASHYEKLKGSPEDNEQKQLFVEQHKHYLDEIIEQISEFSKRVILADANLDKVLSAYNKHRDKPIREQAENIIHLFTLTNLGAPAAFKYFDTTIDRKRYTSTKEVLDATLIHQSITGLYETRIDLSQLGGDGGEAAAKGGGPAPGGLLGRDLLTKLKAQIQFSTEGPQVTWEDRPAMCLVLNLEEEYRLHEKPVPPSIDPSWLQLFPMVWAEKAGMGLANQVPPVVVELKSDASPVAVRQYPMSKEAREGIRPHIQRFLDLGILVPCQSPWNTPLLPVKKPGTNDYRPVQDLREVNKRVQDIHPTVPNPYNLLSSLPPSHTWYSVLDLKDAFFCLKLHPNSQPLFAFEWRDPEKGNTGQLTWTRLPQGFKNSPTLFNEALHRDLASFRALNPQVVMLQYVDDLLVAAPTYRDCKEGTRRLLQELSKLGYRVSAKKAQLCREEVTYLGYLLKGGKRWLTPARKATVMKIPTPTTPRQVREFLGKAGFCRLFIPGFASLAAPLYPLTRPKVPFTWTEAHQEAFGRIKEALLSAPALALPDLTKPFALYVDEKEGVARGVLTQTLGPWRRPVAYLSKKLDPVASGWPTCLKAIAAVALLLKDADKLTLGQNVLVIAPHNLESIVRQPPDRWMTNARMTHYQSLLLNERVSFAPPAILNPATLLPVESDDTPIHICSEILAEETGTRPDLRDQPLPGVPAWYTDGSSFIMDGRRQAGAAIVDNKRTVWASNLPEGTSAQKAELIALTQALRLAEGKSINIYTDSRYAFATAHVHGAIYKQRGWLTSAGKDIKNKEEILALLEAIHLPKRVAIIHCPGHQRGTDPVATGNRKADEAAKQAAQSTRILTETTKNAGKRTADGSEFEKRTADGSEFESPKKKAKVE

SEQ ID NO: 7495 - protein, 2096 aa, synthetic construct
MPAAKRVKLDGGDKKYSIGLDIGTNSVGWAVITDEYKVPSKKFKVLGNTDRHSIKKNLIGALLFDSGETAEATRLKRTARRRYTRRKNRICYLQEIFSNEMAKVDDSFFHRLEESFLVEEDKKHERHPIFGNIVDEVAYHEKYPTIYHLRKKLVDSTDKADLRLIYLALAHMIKFRGHFLIEGDLNPDNSDVDKLFIQLVQTYNQLFEENPINASGVDAKAILSARLSKSRRLENLIAQLPGEKKNGLFGNLIALSLGLTPNFKSNFDLAEDAKLQLSKDTYDDDLDNLLAQIGDQYADLFLAAKNLSDAILLSDILRVNTEITKAPLSASMIKRYDEHHQDLTLLKALVRQQLPEKYKEIFFDQSKNGYAGYIDGGASQEEFYKFIKPILEKMDGTEELLVKLNREDLLRKQRTFDNGSIPHQIHLGELHAILRRQEDFYPFLKDNREKIEKILTFRIPYYVGPLARGNSRFAWMTRKSEETITPWNFEEVVDKGASAQSFIERMTNFDKNLPNEKVLPKHSLLYEYFTVYNELTKVKYVTEGMRKPAFLSGEQKKAIVDLLFKTNRKVTVKQLKEDYFKKIECFDSVEISGVEDRFNASLGTYHDLLKIIKDKDFLDNEENEDILEDIVLTLTLFEDREMIEERLKTYAHLFDDKVMKQLKRRRYTGWGRLSRKLINGIRDKQSGKTILDFLKSDGFANRNFMQLIHDDSLTFKEDIQKAQVSGQGDSLHEHIANLAGSPAIKKGILQTVKVVDELVKVMGRHKPENIVIEMARENQTTQKGQKNSRERMKRIEEGIKELGSQILKEHPVENTQLQNEKLYLYYLQNGRDMYVDQELDINRLSDYDVDHIVPQSFLKDDSIDNKVLTRSDKARGKSDNVPSEEVVKKMKNYWRQLLNAKLITQRKFDNLTKAERGGLSELDKAGFIKRQLVETRQITKHVAQILDSRMNTKYDENDKLIREVKVITLKSKLVSDFRKDFQFYKVREINNYHHAHDAYLNAVVGTALIKKYPKLESEFVYGDYKVYDVRKMIAKSEQEIGKATAKYFFYSNIMNFFKTEITLANGEIRKRPLIETNGETGEIVWDKGRDFATVRKVLSMPQVNIVKKTEVQTGGFSKESILPKRNSDKLIARKKDWDPKKYGGFDSPTVAYSVLVVAKVEKGKSKKLKSVKELLGITIMERSSFEKNPIDFLEAKGYKEVKKDLIIKLPKYSLFELENGRKRMLASAGELQKGNELALPSKYVNFLYLASHYEKLKGSPEDNEQKQLFVEQHKHYLDEIIEQISEFSKRVILADANLDKVLSAYNKHRDKPIREQAENIIHLFTLTNLGAPAAFKYFDTTIDRKRYTSTKEVLDATLIHQSITGLYETRIDLSQLGGDGGEAAAKGGGPAPGGTLGIEDEYRLHETSTEPDVSLGSTWLSDFPQAWAETGGMGLAVRQAPLIIPLKATSTPVSIQQYPMSHEARLGIKPHIQRLLDQGILVPCQSPWNTPLLPVKKPGTNDYRPVQDLREVNKRVEDIHPTVPNPYNLLSGLPPSHQWYTVLDLKDAFFCLRLHPTSQPLFAFEWRDPGMGISGQLTWTRLPQGFKNSPTLFNEALHRDLADFRIQHPDLILLQYVDDILLAATSELDCQQGTRALLQTLGDLGYRASAKKAQICQKQVKYLGYLLREGQRWLTEARKETVMGQPVPKTPRQLREFLGTAGFCRLWIPGFAEMAAPLYPLTKPGTLFSWGPDQQKAYQEIKQALLTAPALGLPDLTKPFELFVDEKQGYAKGVLTQKLGPWRRPVAYLSKKLDPVAAGWPPCLRMVAAIAVLTKDAGKLTMGQPLVILAPHAVEALVKQPPDRWLSNARMTHYQAMLLDTDRVQFGPVVALNPATLLPLPEEGAPHDCLEILAETHGTRPDLTDQPIPDADHTWYTDGSSFLQEGQRKAGAAVTTETEVIWAGALPAGTSAQRAELIALTQALKMAEGKRLNVYTDSRYAFATAHIHGEIYRRRGWLTSEGREIKNKSEILALLKALFLPKRLSIIHCLGHQKGDSAEARGNRLADQAAREAAIKTPPDTSTLLAGKRTADGSEFEKRTADGSEFESPKKKAKVE

SEQ ID NO: 7496 - protein, 2096 aa, synthetic construct; identical to SEQ ID NO: 4535

SEQ ID NO: 7497 - protein, 2096 aa, synthetic construct; identical to SEQ ID NO: 4535

SEQ ID NO: 7498 - protein, 2176 aa, synthetic construct
MPAAKRVKLDGGDKKYSIGLDIGTNSVGWAVITDEYKVPSKKFKVLGNTDRHSIKKNLIGALLFDSGETAEATRLKRTARRRYTRRKNRICYLQEIFSNEMAKVDDSFFHRLEESFLVEEDKKHERHPIFGNIVDEVAYHEKYPTIYHLRKKLVDSTDKADLRLIYLALAHMIKFRGHFLIEGDLNPDNSDVDKLFIQLVQTYNQLFEENPINASGVDAKAILSARLSKSRRLENLIAQLPGEKKNGLFGNLIALSLGLTPNFKSNFDLAEDAKLQLSKDTYDDDLDNLLAQIGDQYADLFLAAKNLSDAILLSDILRVNTEITKAPLSASMIKRYDEHHQDLTLLKALVRQQLPEKYKEIFFDQSKNGYAGYIDGGASQEEFYKFIKPILEKMDGTEELLVKLNREDLLRKQRTFDNGSIPHQIHLGELHAILRRQEDFYPFLKDNREKIEKILTFRIPYYVGPLARGNSRFAWMTRKSEETITPWNFEEVVDKGASAQSFIERMTNFDKNLPNEKVLPKHSLLYEYFTVYNELTKVKYVTEGMRKPAFLSGEQKKAIVDLLFKTNRKVTVKQLKEDYFKKIECFDSVEISGVEDRFNASLGTYHDLLKIIKDKDFLDNEENEDILEDIVLTLTLFEDREMIEERLKTYAHLFDDKVMKQLKRRRYTGWGRLSRKLINGIRDKQSGKTILDFLKSDGFANRNFMQLIHDDSLTFKEDIQKAQVSGQGDSLHEHIANLAGSPAIKKGILQTVKVVDELVKVMGRHKPENIVIEMARENQTTQKGQKNSRERMKRIEEGIKELGSQILKEHPVENTQLQNEKLYLYYLQNGRDMYVDQELDINRLSDYDVDHIVPQSFLKDDSIDNKVLTRSDKARGKSDNVPSEEVVKKMKNYWRQLLNAKLITQRKFDNLTKAERGGLSELDKAGFIKRQLVETRQITKHVAQILDSRMNTKYDENDKLIREVKVITLKSKLVSDFRKDFQFYKVREINNYHHAHDAYLNAVVGTALIKKYPKLESEFVYGDYKVYDVRKMIAKSEQEIGKATAKYFFYSNIMNFFKTEITLANGEIRKRPLIETNGETGEIVWDKGRDFATVRKVLSMPQVNIVKKTEVQTGGFSKESILPKRNSDKLIARKKDWDPKKYGGFDSPTVAYSVLVVAKVEKGKSKKLKSVKELLGITIMERSSFEKNPIDFLEAKGYKEVKKDLIIKLPKYSLFELENGRKRMLASAGELQKGNELALPSKYVNFLYLASHYEKLKGSPEDNEQKQLFVEQHKHYLDEIIEQISEFSKRVILADANLDKVLSAYNKHRDKPIREQAENIIHLFTLTNLGAPAAFKYFDTTIDRKRYTSTKEVLDATLIHQSITGLYETRIDLSQLGGDGGEAAAKGGGPAPGGMNPLQLLQPLPAEVKGTKLLAHWNSGATITCIPESFLEDEQPIKQTLIKTIHGEKQQNVYYLTFKVKGRKVEAEVIASPYEYILLSPTDVPWLTQQPLQLTILVPLQEYQDRILNKTALPEEQKQQLKALFTKYDNLWQHWENQVGHRKIRPHNIATGDYPPRPQKQYPINPKAKPSIQIVIDDLLKQGVLTPQNSTMNTPVYPVPKPDGRWRMVLDYREVNKTIPLTAAQNQHSAGILATIVRQKYKTTLDLANGFWAHPITPDSYWLTAFTWQGKQYCWTRLPQGFLNSPALFTADAVDLLKEVPNVQVYVDDIYLSHDNPHEHIQQLEKVFQILLQAGYVVSLKKSEIGQRTVEFLGFNITKEGRGLTDTFKTKLLNVTPPKDLKQLQSILGLLNFARNFIPNFAELVQTLYNLIASSKGKYIEWTEDNTKQLNKVIEALNTASNLEERLPDQRLVIKVNTSPSAGYVRYYNESGKKPIMYLNYVFSKAELKFSMLEKLLTTMHKALIKAMDLAMGQEILVYSPIVSMTKIQKTPLPERKALPIRWITWMTYLEDPRIQFHYDKTLPELKHIPDVYTSSIPPLKHPSQYEGVFCTDGSAIKSPDPTKSNNAGMGIVHAIYNPEYKILNQWSIPLGHHTAQMAEIAAVEFACKKALKVPGPVLVITDSFYVAESANKELPYWKSNGFVNNKKEPLKHISKWKSIAECLSIKPDITIQHEKGHQPINTSIHTEGNALADKLATQGSYVVNAGKRTADGSEFEKRTADGSEFESPKKKAKVE

SEQ ID NO: 7499 - protein, 2094 aa, synthetic construct
MPAAKRVKLDGGDKKYSIGLDIGTNSVGWAVITDEYKVPSKKFKVLGNTDRHSIKKNLIGALLFDSGETAEATRLKRTARRRYTRRKNRICYLQEIFSNEMAKVDDSFFHRLEESFLVEEDKKHERHPIFGNIVDEVAYHEKYPTIYHLRKKLVDSTDKADLRLIYLALAHMIKFRGHFLIEGDLNPDNSDVDKLFIQLVQTYNQLFEENPINASGVDAKAILSARLSKSRRLENLIAQLPGEKKNGLFGNLIALSLGLTPNFKSNFDLAEDAKLQLSKDTYDDDLDNLLAQIGDQYADLFLAAKNLSDAILLSDILRVNTEITKAPLSASMIKRYDEHHQDLTLLKALVRQQLPEKYKEIFFDQSKNGYAGYIDGGASQEEFYKFIKPILEKMDGTEELLVKLNREDLLRKQRTFDNGSIPHQIHLGELHAILRRQEDFYPFLKDNREKIEKILTFRIPYYVGPLARGNSRFAWMTRKSEETITPWNFEEVVDKGASAQSFIERMTNFDKNLPNEKVLPKHSLLYEYFTVYNELTKVKYVTEGMRKPAFLSGEQKKAIVDLLFKTNRKVTVKQLKEDYFKKIECFDSVEISGVEDRFNASLGTYHDLLKIIKDKDFLDNEENEDILEDIVLTLTLFEDREMIEERLKTYAHLFDDKVMKQLKRRRYTGWGRLSRKLINGIRDKQSGKTILDFLKSDGFANRNFMQLIHDDSLTFKEDIQKAQVSGQGDSLHEHIANLAGSPAIKKGILQTVKVVDELVKVMGRHKPENIVIEMARENQTTQKGQKNSRERMKRIEEGIKELGSQILKEHPVENTQLQNEKLYLYYLQNGRDMYVDQELDINRLSDYDVDHIVPQSFLKDDSIDNKVLTRSDKARGKSDNVPSEEVVKKMKNYWRQLLNAKLITQRKFDNLTKAERGGLSELDKAGFIKRQLVETRQITKHVAQILDSRMNTKYDENDKLIREVKVITLKSKLVSDFRKDFQFYKVREINNYHHAHDAYLNAVVGTALIKKYPKLESEFVYGDYKVYDVRKMIAKSEQEIGKATAKYFFYSNIMNFFKTEITLANGEIRKRPLIETNGETGEIVWDKGRDFATVRKVLSMPQVNIVKKTEVQTGGFSKESILPKRNSDKLIARKKDWDPKKYGGFDSPTVAYSVLVVAKVEKGKSKKLKSVKELLGITIMERSSFEKNPIDFLEAKGYKEVKKDLIIKLPKYSLFELENGRKRMLASAGELQKGNELALPSKYVNFLYLASHYEKLKGSPEDNEQKQLFVEQHKHYLDEIIEQISEFSKRVILADANLDKVLSAYNKHRDKPIREQAENIIHLFTLTNLGAPAAFKYFDTTIDRKRYTSTKEVLDATLIHQSITGLYETRIDLSQLGGDGGEAAAKGGGPAPGGVLNLEEEYRLHEKPVPSSIDPSWLQLFPTVWAERAGMGLANQVPPVVVELRSGASPVAVRQYPMSKEAREGIRPHIQRFLDLGVLVPCQSPWNTPLLPVKKPGTNDYRPVQDLREINKRVQDIHPTVPNPYNLLSSLPPSHTWYSVLDLKDAFFCLKLHPNSQPLFAFEWRDPEKGNTGQLTWTRLPQGFKNSPTLFNEALHRDLAPFRALNPQVVLLQYVDDLLVAAPTYRDCKEGTQKLLQELSKLGYRVSAKKAQLCQKEVTYLGYLLKEGKRWLTPARKATVMKIPPPTTPRQVREFLGKAGFCRLFIPGFASLAAPLYPLTKPSIPFIWTEEHQKAFDRIKEALLSAPALALPDLTKPFTLYVDERAGVARGVLTQTLGPWRRPVAYLSKKLDPVASGWPTCLKAVAAVALLLKDADKLTLGQNVTVIASHSLESIVRQPPDRWMTNARMTHYQSLLLNERVSFAPPAVLNPATLLPVESEATPVHRCSEILAEETGTRRDLKDQPLPGVPAWYTDGSSFIAEGKRRAGAAIVDGKRTVWASSLPEGTSAQKAELVALTQALRLAEGKDINIYTDSRYAFATAHIHGAIYKQRGWLTSAGKDIKNKEEILALLEAIHLPKRVAIIHCPGHQKGNDPVATGNRRADEAAKQAALSTRVLAETTKPAGKRTADGSEFEKRTADGSEFESPKKKAKVE

SEQ ID NO: 7500 - protein, 2098 aa, synthetic construct
MPAAKRVKLDGGDKKYSIGLDIGTNSVGWAVITDEYKVPSKKFKVLGNTDRHSIKKNLIGALLFDSGETAEATRLKRTARRRYTRRKNRICYLQEIFSNEMAKVDDSFFHRLEESFLVEEDKKHERHPIFGNIVDEVAYHEKYPTIYHLRKKLVDSTDKADLRLIYLALAHMIKFRGHFLIEGDLNPDNSDVDKLFIQLVQTYNQLFEENPINASGVDAKAILSARLSKSRRLENLIAQLPGEKKNGLFGNLIALSLGLTPNFKSNFDLAEDAKLQLSKDTYDDDLDNLLAQIGDQYADLFLAAKNLSDAILLSDILRVNTEITKAPLSASMIKRYDEHHQDLTLLKALVRQQLPEKYKEIFFDQSKNGYAGYIDGGASQEEFYKFIKPILEKMDGTEELLVKLNREDLLRKQRTFDNGSIPHQIHLGELHAILRRQEDFYPFLKDNREKIEKILTFRIPYYVGPLARGNSRFAWMTRKSEETITPWNFEEVVDKGASAQSFIERMTNFDKNLPNEKVLPKHSLLYEYFTVYNELTKVKYVTEGMRKPAFLSGEQKKAIVDLLFKTNRKVTVKQLKEDYFKKIECFDSVEISGVEDRFNASLGTYHDLLKIIKDKDFLDNEENEDILEDIVLTLTLFEDREMIEERLKTYAHLFDDKVMKQLKRRRYTGWGRLSRKLINGIRDKQSGKTILDFLKSDGFANRNFMQLIHDDSLTFKEDIQKAQVSGQGDSLHEHIANLAGSPAIKKGILQTVKVVDELVKVMGRHKPENIVIEMARENQTTQKGQKNSRERMKRIEEGIKELGSQILKEHPVENTQLQNEKLYLYYLQNGRDMYVDQELDINRLSDYDVDHIVPQSFLKDDSIDNKVLTRSDKARGKSDNVPSEEVVKKMKNYWRQLLNAKLITQRKFDNLTKAERGGLSELDKAGFIKRQLVETRQITKHVAQILDSRMNTKYDENDKLIREVKVITLKSKLVSDFRKDFQFYKVREINNYHHAHDAYLNAVVGTALIKKYPKLESEFVYGDYKVYDVRKMIAKSEQEIGKATAKYFFYSNIMNFFKTEITLANGEIRKRPLIETNGETGEIVWDKGRDFATVRKVLSMPQVNIVKKTEVQTGGFSKESILPKRNSDKLIARKKDWDPKKYGGFDSPTVAYSVLVVAKVEKGKSKKLKSVKELLGITIMERSSFEKNPIDFLEAKGYKEVKKDLIIKLPKYSLFELENGRKRMLASAGELQKGNELALPSKYVNFLYLASHYEKLKGSPEDNEQKQLFVEQHKHYLDEIIEQISEFSKRVILADANLDKVLSAYNKHRDKPIREQAENIIHLFTLTNLGAPAAFKYFDTTIDRKRYTSTKEVLDATLIHQSITGLYETRIDLSQLGGDGGEAAAKPAPGGGGGTAPLEEEYRLFLEAPIQNVTLLEQWKREIPKVWAEINPPGLASTQAPIHVQLLSTALPVRVRQYPITLEAKRSLRETIRKFRAAGILRPVHSPWNTPLLPVRKSGTSEYRMVQDLREVNKRVETIHPTVPNPYTLLSLLPPDRIWYSVLDLKDAFFCIPLAPESQLIFAFEWADAEEGESGQLTWTRLPQGFKNSPTLFNEALNRDLQGFRLDHPSVSLLQYVDDLLIAADTQAACLSATRDLLMTLAELGYRVSGKKAQLCQEEVTYLGFKIHKGSRSLSNSRTQAILQIPVPKTKRQVREFLGKIGYCRLFIPGFAELAQPLYAATRPGNDPLVWGEKEEEAFQSLKLALTQPPALALPSLDKPFQLFVEETSGAAKGVLTQALGPWKRPVAYLSKRLDPVAAGWPRCLRAIAAAALLTREASKLTFGQDIEITSSHNLESLLRSPPDKWLTNARITQYQVLLLDPPRVRFKQTAALNPATLLPETDDTLPIHHCLDTLDSLTSTRPDLTDQPLAQAEATLFTDGSSYIRDGKRYAGAAVVTLDSVIWAEPLPIGTSAQKAELIALTKALEWSKDKSVNIYTDSRYAFATLHVHGMIYRERGWLTAGGKAIKNAPEILALLTAVWLPKRVAVMHCKGHQKDDAPTSTGNRRADEVAREVAIRPLSTQATISAGKRTADGSEFEKRTADGSEFESPKKKAKVE

SEQ ID NO: 7501 - protein, 2102 aa, synthetic construct
MPAAKRVKLDGGDKKYSIGLDIGTNSVGWAVITDEYKVPSKKFKVLGNTDRHSIKKNLIGALLFDSGETAEATRLKRTARRRYTRRKNRICYLQEIFSNEMAKVDDSFFHRLEESFLVEEDKKHERHPIFGNIVDEVAYHEKYPTIYHLRKKLVDSTDKADLRLIYLALAHMIKFRGHFLIEGDLNPDNSDVDKLFIQLVQTYNQLFEENPINASGVDAKAILSARLSKSRRLENLIAQLPGEKKNGLFGNLIALSLGLTPNFKSNFDLAEDAKLQLSKDTYDDDLDNLLAQIGDQYADLFLAAKNLSDAILLSDILRVNTEITKAPLSASMIKRYDEHHQDLTLLKALVRQQLPEKYKEIFFDQSKNGYAGYIDGGASQEEFYKFIKPILEKMDGTEELLVKLNREDLLRKQRTFDNGSIPHQIHLGELHAILRRQEDFYPFLKDNREKIEKILTFRIPYYVGPLARGNSRFAWMTRKSEETITPWNFEEVVDKGASAQSFIERMTNFDKNLPNEKVLPKHSLLYEYFTVYNELTKVKYVTEGMRKPAFLSGEQKKAIVDLLFKTNRKVTVKQLKEDYFKKIECFDSVEISGVEDRFNASLGTYHDLLKIIKDKDFLDNEENEDILEDIVLTLTLFEDREMIEERLKTYAHLFDDKVMKQLKRRRYTGWGRLSRKLINGIRDKQSGKTILDFLKSDGFANRNFMQLIHDDSLTFKEDIQKAQVSGQGDSLHEHIANLAGSPAIKKGILQTVKVVDELVKVMGRHKPENIVIEMARENQTTQKGQKNSRERMKRIEEGIKELGSQILKEHPVENTQLQNEKLYLYYLQNGRDMYVDQELDINRLSDYDVDHIVPQSFLKDDSIDNKVLTRSDKARGKSDNVPSEEVVKKMKNYWRQLLNAKLITQRKFDNLTKAERGGLSELDKAGFIKRQLVETRQITKHVAQILDSRMNTKYDENDKLIREVKVITLKSKLVSDFRKDFQFYKVREINNYHHAHDAYLNAVVGTALIKKYPKLESEFVYGDYKVYDVRKMIAKSEQEIGKATAKYFFYSNIMNFFKTEITLANGEIRKRPLIETNGETGEIVWDKGRDFATVRKVLSMPQVNIVKKTEVQTGGFSKESILPKRNSDKLIARKKDWDPKKYGGFDSPTVAYSVLVVAKVEKGKSKKLKSVKELLGITIMERSSFEKNPIDFLEAKGYKEVKKDLIIKLPKYSLFELENGRKRMLASAGELQKGNELALPSKYVNFLYLASHYEKLKGSPEDNEQKQLFVEQHKHYLDEIIEQISEFSKRVILADANLDKVLSAYNKHRDKPIREQAENIIHLFTLTNLGAPAAFKYFDTTIDRKRYTSTKEVLDATLIHQSITGLYETRIDLSQLGGDGGEAAAKPAPGGGGGTVSLQDEHRLFDIPVTTSLPDVWLQDFPQAWAETGGLGRAKCQAPIIIDLKPTAVPVSIKQYPMSLEAHMGIRQHIIKFLELGVLRPCRSPWNTPLLPVKKPGTQDYRPVQDLREINKRTVDIHPTVPNPYNLLSTLKPDYSWYTVLDLKDAFFCLPLAPQSQELFAFEWKDPERGISGQLTWTRLPQGFKNSPTLFNEALHRDLTDFRTQHPEVTLLQYVDDLLLAAPTKKACTQGTRHLLQELGEKGYRASAKKAQICQTKVTYLGYILSEGKRWLTPGRIETVARIPPPRNPREVREFLGKAGFCRLFIPGFAELAAPLYALTKPSTPFTWQTEHQLAFEALKKALLSAPALGLPDTSKPFTLFLDERQGIAKGVLTQKLGPWKRPVAYLSKKLDPVAAGWPPCLRIMAATAMLVKDSAKLTLGQPLTVITPHTLEAIVRQPPDRWITNARLTHYQALLLDTDRVQFGPPVTLNPATLLPVPENQPSPHDCRQVLAETHGTREDLKDQELPDADHTWYTDGSSYLDSGTRRAGAAVVDGHNTIWAQSLPPGTSAQKAELIALTKALELSKGKKANIYTDSRYAFATAHTHGSIYERRGWLTSEGKEIKNKAEIIALLKALFLPQEVAIIHCPGHQKGQDPVAVGNRQADRVARQAAMAEVLTLATEPDNTSHITAGKRTADGSEFEKRTADGSEFESPKKKAKVE

SEQ ID NO: 7502 - protein, 2095 aa, synthetic construct
MPAAKRVKLDGGDKKYSIGLDIGTNSVGWAVITDEYKVPSKKFKVLGNTDRHSIKKNLIGALLFDSGETAEATRLKRTARRRYTRRKNRICYLQEIFSNEMAKVDDSFFHRLEESFLVEEDKKHERHPIFGNIVDEVAYHEKYPTIYHLRKKLVDSTDKADLRLIYLALAHMIKFRGHFLIEGDLNPDNSDVDKLFIQLVQTYNQLFEENPINASGVDAKAILSARLSKSRRLENLIAQLPGEKKNGLFGNLIALSLGLTPNFKSNFDLAEDAKLQLSKDTYDDDLDNLLAQIGDQYADLFLAAKNLSDAILLSDILRVNTEITKAPLSASMIKRYDEHHQDLTLLKALVRQQLPEKYKEIFFDQSKNGYAGYIDGGASQEEFYKFIKPILEKMDGTEELLVKLNREDLLRKQRTFDNGSIPHQIHLGELHAILRRQEDFYPFLKDNREKIEKILTFRIPYYVGPLARGNSRFAWMTRKSEETITPWNFEEVVDKGASAQSFIERMTNFDKNLPNEKVLPKHSLLYEYFTVYNELTKVKYVTEGMRKPAFLSGEQKKAIVDLLFKTNRKVTVKQLKEDYFKKIECFDSVEISGVEDRFNASLGTYHDLLKIIKDKDFLDNEENEDILEDIVLTLTLFEDREMIEERLKTYAHLFDDKVMKQLKRRRYTGWGRLSRKLINGIRDKQSGKTILDFLKSDGFANRNFMQLIHDDSLTFKEDIQKAQVSGQGDSLHEHIANLAGSPAIKKGILQTVKVVDELVKVMGRHKPENIVIEMARENQTTQKGQKNSRERMKRIEEGIKELGSQILKEHPVENTQLQNEKLYLYYLQNGRDMYVDQELDINRLSDYDVDHIVPQSFLKDDSIDNKVLTRSDKARGKSDNVPSEEVVKKMKNYWRQLLNAKLITQRKFDNLTKAERGGLSELDKAGFIKRQLVETRQITKHVAQILDSRMNTKYDENDKLIREVKVITLKSKLVSDFRKDFQFYKVREINNYHHAHDAYLNAVVGTALIKKYPKLESEFVYGDYKVYDVRKMIAKSEQEIGKATAKYFFYSNIMNFFKTEITLANGEIRKRPLIETNGETGEIVWDKGRDFATVRKVLSMPQVNIVKKTEVQTGGFSKESILPKRNSDKLIARKKDWDPKKYGGFDSPTVAYSVLVVAKVEKGKSKKLKSVKELLGITIMERSSFEKNPIDFLEAKGYKEVKKDLIIKLPKYSLFELENGRKRMLASAGELQKGNELALPSKYVNFLYLASHYEKLKGSPEDNEQKQLFVEQHKHYLDEIIEQISEFSKRVILADANLDKVLSAYNKHRDKPIREQAENIIHLFTLTNLGAPAAFKYFDTTIDRKRYTSTKEVLDATLIHQSITGLYETRIDLSQLGGDGGEAAAKPAPGGGGGTLQLEEEYRLFEPESTQKQEMDIWLKNFPQAWAETGGMGTAHCQAPVLIQLKATATPISIRQYPMPHEAYQGIKPHIRRMLDQGILKPCQSPWNTPLLPVKKPGTEDYRPVQDLREVNKRVEDIHPTVPNPYNLLSTLPPSHPWYTVLDLKDAFFCLRLHSESQLLFAFEWRDPEIGLSGQLTWTRLPQGFKNSPTLFNEALHSDLADFRVRYPALVLLQYVDDLLLAAATRTECLEGTKALLETLGNKGYRASAKKAQICLQEVTYLGYSLKDGQRWLTKARKEAILSIPVPKNSRQVREFLGKAGYCRLFIPGFAELAAPLYPLTRPGTLFQWGTEQQLAFEDIKKALLSSPALGLPDITKPFELFIDENSGFAKGVLVQKLGPWKRPVAYLSKKLDTVASGWPPCLRMVAAIAILVKDAGKLTLGQPLTILTSHPVEALVRQPPNKWLSNARMTHYQAMLLDAERVHFGPTVSLNPATLLPLPSGGNHHDCLQILAETHGTRPDLTDQPLPDADLTWYTDGSSFIRNGEREAGAAVTTESEVIWAAPLPPGTSAQRAELIALTQALKMAEGKKLTVYTDSRYAFATTHVHGEIYRRRGWLTSEGKEIKNKNEILALLEALFLPKRLSIIHCPGHQKGDSPQAKGNRLADDTAKKAATETHSSLTVLPAGKRTADGSEFEKRTADGSEFESPKKKAKVE

SEQ ID NO: 7503 - protein, 2176 aa, synthetic construct
MPAAKRVKLDGGDKKYSIGLDIGTNSVGWAVITDEYKVPSKKFKVLGNTDRHSIKKNLIGALLFDSGETAEATRLKRTARRRYTRRKNRICYLQEIFSNEMAKVDDSFFHRLEESFLVEEDKKHERHPIFGNIVDEVAYHEKYPTIYHLRKKLVDSTDKADLRLIYLALAHMIKFRGHFLIEGDLNPDNSDVDKLFIQLVQTYNQLFEENPINASGVDAKAILSARLSKSRRLENLIAQLPGEKKNGLFGNLIALSLGLTPNFKSNFDLAEDAKLQLSKDTYDDDLDNLLAQIGDQYADLFLAAKNLSDAILLSDILRVNTEITKAPLSASMIKRYDEHHQDLTLLKALVRQQLPEKYKEIFFDQSKNGYAGYIDGGASQEEFYKFIKPILEKMDGTEELLVKLNREDLLRKQRTFDNGSIPHQIHLGELHAILRRQEDFYPFLKDNREKIEKILTFRIPYYVGPLARGNSRFAWMTRKSEETITPWNFEEVVDKGASAQSFIERMTNFDKNLPNEKVLPKHSLLYEYFTVYNELTKVKYVTEGMRKPAFLSGEQKKAIVDLLFKTNRKVTVKQLKEDYFKKIECFDSVEISGVEDRFNASLGTYHDLLKIIKDKDFLDNEENEDILEDIVLTLTLFEDREMIEERLKTYAHLFDDKVMKQLKRRRYTGWGRLSRKLINGIRDKQSGKTILDFLKSDGFANRNFMQLIHDDSLTFKEDIQKAQVSGQGDSLHEHIANLAGSPAIKKGILQTVKVVDELVKVMGRHKPENIVIEMARENQTTQKGQKNSRERMKRIEEGIKELGSQILKEHPVENTQLQNEKLYLYYLQNGRDMYVDQELDINRLSDYDVDHIVPQSFLKDDSIDNKVLTRSDKARGKSDNVPSEEVVKKMKNYWRQLLNAKLITQRKFDNLTKAERGGLSELDKAGFIKRQLVETRQITKHVAQILDSRMNTKYDENDKLIREVKVITLKSKLVSDFRKDFQFYKVREINNYHHAHDAYLNAVVGTALIKKYPKLESEFVYGDYKVYDVRKMIAKSEQEIGKATAKYFFYSNIMNFFKTEITLANGEIRKRPLIETNGETGEIVWDKGRDFATVRKVLSMPQVNIVKKTEVQTGGFSKESILPKRNSDKLIARKKDWDPKKYGGFDSPTVAYSVLVVAKVEKGKSKKLKSVKELLGITIMERSSFEKNPIDFLEAKGYKEVKKDLIIKLPKYSLFELENGRKRMLASAGELQKGNELALPSKYVNFLYLASHYEKLKGSPEDNEQKQLFVEQHKHYLDEIIEQISEFSKRVILADANLDKVLSAYNKHRDKPIREQAENIIHLFTLTNLGAPAAFKYFDTTIDRKRYTSTKEVLDATLIHQSITGLYETRIDLSQLGGDGGEAAAKPAPGGGGGMNPLQLLQPLPAEIKGTKLLAHWNSGATITCIPESFLEDEQPIKKTLIKTIHGEKQQNVYYVTFKVKGRKVEAEVIASPYEYILLSPTDVPWLTQQPLQLTILVPLQEYQEKILSKTALPEDQKQQLKTLFVKYDNLWQHWENQVGHRKIRPHNIATGDYPPRPQKQYPINPKAKPSIQIVIDDLLKQGVLTPQNSTMNTPVYPVPKPDGRWRMVLDYREVNKTIPLTAAQNQHSAGILATIVRQKYKTTLDLANGFWAHPITPESYWLTAFTWQGKQYCWTRLPQGFLNSPALFNADVVDLLKEIPNVQVYVDDIYLSHDDPKEHVQQLEKVFQILLQAGYVVSLKKSEIGQKTVEFLGFNITKEGRGLTDTFKTKLLNITPPKDLKQLQSILGLLNFARNFIPNFAELVQPLYNLIAPAKGKYIEWSEENTKQLNMVIEALNTASNLEERLPEQRLVIKVNTSPSAGYVRYYNETGKKPIMYLNYVFSKAELKFSMLEKLLTTMHKALIKAMDLAMGQEILVYSPIVSMTKIQKTPLPERKALPIRWITWMTYLEDPRIQFHYDKTLPELKHIPDVYTSSQSPVKHPSQYEGVFYTDGSAIKSPDPTKSNNAGMGIVHATYKPEYQVLNQWSIPLGNHTAQMAEIAAVEFACKKALKIPGPVLVITDSFYVAESANKELPYWKSNGFVNNKKKPLKHISKWKSIAECLSMKPDITIQHEKGISLQIPVFILKGNALADKLATQGSYVVNAGKRTADGSEFEKRTADGSEFESPKKKAKVE

SEQ ID NO: 7504 - protein, 2094 aa, synthetic construct
MPAAKRVKLDGGDKKYSIGLDIGTNSVGWAVITDEYKVPSKKFKVLGNTDRHSIKKNLIGALLFDSGETAEATRLKRTARRRYTRRKNRICYLQEIFSNEMAKVDDSFFHRLEESFLVEEDKKHERHPIFGNIVDEVAYHEKYPTIYHLRKKLVDSTDKADLRLIYLALAHMIKFRGHFLIEGDLNPDNSDVDKLFIQLVQTYNQLFEENPINASGVDAKAILSARLSKSRRLENLIAQLPGEKKNGLFGNLIALSLGLTPNFKSNFDLAEDAKLQLSKDTYDDDLDNLLAQIGDQYADLFLAAKNLSDAILLSDILRVNTEITKAPLSASMIKRYDEHHQDLTLLKALVRQQLPEKYKEIFFDQSKNGYAGYIDGGASQEEFYKFIKPILEKMDGTEELLVKLNREDLLRKQRTFDNGSIPHQIHLGELHAILRRQEDFYPFLKDNREKIEKILTFRIPYYVGPLARGNSRFAWMTRKSEETITPWNFEEVVDKGASAQSFIERMTNFDKNLPNEKVLPKHSLLYEYFTVYNELTKVKYVTEGMRKPAFLSGEQKKAIVDLLFKTNRKVTVKQLKEDYFKKIECFDSVEISGVEDRFNASLGTYHDLLKIIKDKDFLDNEENEDILEDIVLTLTLFEDREMIEERLKTYAHLFDDKVMKQLKRRRYTGWGRLSRKLINGIRDKQSGKTILDFLKSDGFANRNFMQLIHDDSLTFKEDIQKAQVSGQGDSLHEHIANLAGSPAIKKGILQTVKVVDELVKVMGRHKPENIVIEMARENQTTQKGQKNSRERMKRIEEGIKELGSQILKEHPVENTQLQNEKLYLYYLQNGRDMYVDQELDINRLSDYDVDHIVPQSFLKDDSIDNKVLTRSDKARGKSDNVPSEEVVKKMKNYWRQLLNAKLITQRKFDNLTKAERGGLSELDKAGFIKRQLVETRQITKHVAQILDSRMNTKYDENDKLIREVKVITLKSKLVSDFRKDFQFYKVREINNYHHAHDAYLNAVVGTALIKKYPKLESEFVYGDYKVYDVRKMIAKSEQEIGKATAKYFFYSNIMNFFKTEITLANGEIRKRPLIETNGETGEIVWDKGRDFATVRKVLSMPQVNIVKKTEVQTGGFSKESILPKRNSDKLIARKKDWDPKKYGGFDSPTVAYSVLVVAKVEKGKSKKLKSVKELLGITIMERSSFEKNPIDFLEAKGYKEVKKDLIIKLPKYSLFELENGRKRMLASAGELQKGNELALPSKYVNFLYLASHYEKLKGSPEDNEQKQLFVEQHKHYLDEIIEQISEFSKRVILADANLDKVLSAYNKHRDKPIREQAENIIHLFTLTNLGAPAAFKYFDTTIDRKRYTSTKEVLDATLIHQSITGLYETRIDLSQLGGDGGEAAAKPAPGGGGGVLNLEEEYRLHEKPVPSSIDPSWLQLFPTVWAERAGMGLANQVPPVVVELRSGASPVAVRQYPMSKEAREGIRPHIQKFLDLGVLVPCRSPWNTPLLPVKKPGTNDYRPVQDLREINKRVQDIHPTVPNPYNLLSSLPPSYTWYSVLDLKDAFFCLRLHPNSQPLFAFEWKDPEKGNTGQLTWTRLPQGFKNSPTLFNEALHRDLAPFRALNPQVVLLQYVDDLLVAAPTYEDCKKGTQKLLQELSKLGYRVSAKKAQLCQREVTYLGYLLKEGKRWLTPARKATVMKIPVPTTPRQVREFLGKAGFCRLFIPGFASLAAPLYPLTKPSIPFIWTEEHQQAFDHIKKALLSAPALALPDLTKPFTLYIDERAGVARGVLTQTLGPWRRPVAYLSKKLDPVASGWPTCLKAVAAVALLLKDADKLTLGQNVTVIASHSLESIVRQPPDRWMTNARMTHYQSLLLNERVSFAPPAVLNPATLLPVESEATPVHRCSEILAEETGTRRDLEDQPLPGVPTWYTDGSSFITEGKRRAGAPIVDGKRTVWASSLPEGTSAQKAELVALTQALRLAEGKNINIYTDSRYAFATAHIHGAIYKQRGWLTSAGKDIKNKEEILALLEAIHLPRRVAIIHCPGHQRGSNPVATGNRRADEAAKQAALSTRVLAGTTKPAGKRTADGSEFEKRTADGSEFESPKKKAKVE

SEQ ID NO: 7505 - protein, 2218 aa, synthetic construct
MPAAKRVKLDGGDKKYSIGLDIGTNSVGWAVITDEYKVPSKKFKVLGNTDRHSIKKNLIGALLFDSGETAEATRLKRTARRRYTRRKNRICYLQEIFSNEMAKVDDSFFHRLEESFLVEEDKKHERHPIFGNIVDEVAYHEKYPTIYHLRKKLVDSTDKADLRLIYLALAHMIKFRGHFLIEGDLNPDNSDVDKLFIQLVQTYNQLFEENPINASGVDAKAILSARLSKSRRLENLIAQLPGEKKNGLFGNLIALSLGLTPNFKSNFDLAEDAKLQLSKDTYDDDLDNLLAQIGDQYADLFLAAKNLSDAILLSDILRVNTEITKAPLSASMIKRYDEHHQDLTLLKALVRQQLPEKYKEIFFDQSKNGYAGYIDGGASQEEFYKFIKPILEKMDGTEELLVKLNREDLLRKQRTFDNGSIPHQIHLGELHAILRRQEDFYPFLKDNREKIEKILTFRIPYYVGPLARGNSRFAWMTRKSEETITPWNFEEVVDKGASAQSFIERMTNFDKNLPNEKVLPKHSLLYEYFTVYNELTKVKYVTEGMRKPAFLSGEQKKAIVDLLFKTNRKVTVKQLKEDYFKKIECFDSVEISGVEDRFNASLGTYHDLLKIIKDKDFLDNEENEDILEDIVLTLTLFEDREMIEERLKTYAHLFDDKVMKQLKRRRYTGWGRLSRKLINGIRDKQSGKTILDFLKSDGFANRNFMQLIHDDSLTFKEDIQKAQVSGQGDSLHEHIANLAGSPAIKKGILQTVKVVDELVKVMGRHKPENIVIEMARENQTTQKGQKNSRERMKRIEEGIKELGSQILKEHPVENTQLQNEKLYLYYLQNGRDMYVDQELDINRLSDYDVDHIVPQSFLKDDSIDNKVLTRSDKARGKSDNVPSEEVVKKMKNYWRQLLNAKLITQRKFDNLTKAERGGLSELDKAGFIKRQLVETRQITKHVAQILDSRMNTKYDENDKLIREVKVITLKSKLVSDFRKDFQFYKVREINNYHHAHDAYLNAVVGTALIKKYPKLESEFVYGDYKVYDVRKMIAKSEQEIGKATAKYFFYSNIMNFFKTEITLANGEIRKRPLIETNGETGEIVWDKGRDFATVRKVLSMPQVNIVKKTEVQTGGFSKESILPKRNSDKLIARKKDWDPKKYGGFDSPTVAYSVLVVAKVEKGKSKKLKSVKELLGITIMERSSFEKNPIDFLEAKGYKEVKKDLIIKLPKYSLFELENGRKRMLASAGELQKGNELALPSKYVNFLYLASHYEKLKGSPEDNEQKQLFVEQHKHYLDEIIEQISEFSKRVILADANLDKVLSAYNKHRDKPIREQAENIIHLFTLTNLGAPAAFKYFDTTIDRKRYTSTKEVLDATLIHQSITGLYETRIDLSQLGGDGGEAAAKPAPGGGGGTLGDQGSRGSDPLPEPRVTLTVEGIPTEFLVNTGAEHSVLTKPMGKMGSKRTVVAGATGSKVYPWTTKRLLKIGQKQVTHSFLVIPECPAPLLGRDLLTKLKAQIQFSTEGPQVTWEDRPAMCLVLNLEEEYRLHEKPVPPSIDPSWLQLFPMVWAEKAGMGLANQVPPVVVELKSDASPVAVRQYPMSKEAREGIRPHIQRFLDLGILVPCQSPWNTPLLPVKKPGTNDYRPVQDLREVNKRVQDIHPTVPNPYNLLSSLPPSHTWYSVLDLKDAFFCLKLHPNSQPLFAFEWRDPEKGNTGQLTWTRLPQGFKNSPTLFNEALHRDLASFRALNPQVVMLQYVDDLLVAAPTYRDCKEGTRRLLQELSKLGYRVSAKKAQLCREEVTYLGYLLKGGKRWLTPARKATVMKIPTPTTPRQVREFLGKAGFCRLFIPGFASLAAPLYPLTRPKVPFTWTEAHQEAFGRIKEALLSAPALALPDLTKPFALYVDEKEGVARGVLTQTLGPWRRPVAYLSKKLDPVASGWPTCLKAIAAVALLLKDADKLTLGQNVLVIAPHNLESIVRQPPDRWMTNARMTHYQSLLLNERVSFAPPAILNPATLLPVESDDTPIHICSEILAEETGTRPDLRDQPLPGVPAWYTDGSSFIMDGRRQAGAAIVDNKRTVWASNLPEGTSAQKAELIALTQALRLAEGKSINIYTDSRYAFATAHVHGAIYKQRGWLTSAGKDIKNKEEILALLEAIHLPKRVAIIHCPGHQRGTDPVATGNRKADEAAKQAAQSTRILTETTKNAGKRTADGSEFEKRTADGSEFESPKKKAKVE

SEQ ID NO: 7506 - protein, 2096 aa, synthetic construct
MPAAKRVKLDGGDKKYSIGLDIGTNSVGWAVITDEYKVPSKKFKVLGNTDRHSIKKNLIGALLFDSGETAEATRLKRTARRRYTRRKNRICYLQEIFSNEMAKVDDSFFHRLEESFLVEEDKKHERHPIFGNIVDEVAYHEKYPTIYHLRKKLVDSTDKADLRLIYLALAHMIKFRGHFLIEGDLNPDNSDVDKLFIQLVQTYNQLFEENPINASGVDAKAILSARLSKSRRLENLIAQLPGEKKNGLFGNLIALSLGLTPNFKSNFDLAEDAKLQLSKDTYDDDLDNLLAQIGDQYADLFLAAKNLSDAILLSDILRVNTEITKAPLSASMIKRYDEHHQDLTLLKALVRQQLPEKYKEIFFDQSKNGYAGYIDGGASQEEFYKFIKPILEKMDGTEELLVKLNREDLLRKQRTFDNGSIPHQIHLGELHAILRRQEDFYPFLKDNREKIEKILTFRIPYYVGPLARGNSRFAWMTRKSEETITPWNFEEVVDKGASAQSFIERMTNFDKNLPNEKVLPKHSLLYEYFTVYNELTKVKYVTEGMRKPAFLSGEQKKAIVDLLFKTNRKVTVKQLKEDYFKKIECFDSVEISGVEDRFNASLGTYHDLLKIIKDKDFLDNEENEDILEDIVLTLTLFEDREMIEERLKTYAHLFDDKVMKQLKRRRYTGWGRLSRKLINGIRDKQSGKTILDFLKSDGFANRNFMQLIHDDSLTFKEDIQKAQVSGQGDSLHEHIANLAGSPAIKKGILQTVKVVDELVKVMGRHKPENIVIEMARENQTTQKGQKNSRERMKRIEEGIKELGSQILKEHPVENTQLQNEKLYLYYLQNGRDMYVDQELDINRLSDYDVDHIVPQSFLKDDSIDNKVLTRSDKARGKSDNVPSEEVVKKMKNYWRQLLNAKLITQRKFDNLTKAERGGLSELDKAGFIKRQLVETRQITKHVAQILDSRMNTKYDENDKLIREVKVITLKSKLVSDFRKDFQFYKVREINNYHHAHDAYLNAVVGTALIKKYPKLESEFVYGDYKVYDVRKMIAKSEQEIGKATAKYFFYSNIMNFFKTEITLANGEIRKRPLIETNGETGEIVWDKGRDFATVRKVLSMPQVNIVKKTEVQTGGFSKESILPKRNSDKLIARKKDWDPKKYGGFDSPTVAYSVLVVAKVEKGKSKKLKSVKELLGITIMERSSFEKNPIDFLEAKGYKEVKKDLIIKLPKYSLFELENGRKRMLASAGELQKGNELALPSKYVNFLYLASHYEKLKGSPEDNEQKQLFVEQHKHYLDEIIEQISEFSKRVILADANLDKVLSAYNKHRDKPIREQAENIIHLFTLTNLGAPAAFKYFDTTIDRKRYTSTKEVLDATLIHQSITGLYETRIDLSQLGGDGGEAAAKPAPGGGGGTLNLEDEYRLYETSAEPEVSPGSTWLSDFPQAWAETGGMGLAVRQAPLIIPLKATSTPVSIKQYPMSQEAKLGIKPHIQRLLDQGILVPCQSPWNTPLLPVKKPGTNDYRPVQDLREVNKRVEDIHPTVPNPYNLLSGLPPSHRWYTVLDLKDAFFCLRLHPTSQPLFAFEWRDPGMGISGQLTWTRLPQGFKNSPTLFDEALHRDLADFRIQHPDLILLQYVDDILLAATSELDCQQGTRALLLTLGNLGYRASAKKAQLCQKQVKYLGYLLKEGQRWLTEARKETVMGQPTPKTPRQLREFLGTAGFCRLWIPGFAEMAAPLYPLTKTGTLFNWGPDQQKAYQEIKQALLTAPALGLPDLTKPFELFVDEKQGYAKGVLTQKLGPWRRPVAYLSKKLDPVAAGWPPCLRMVAAIAVLRKDAGKLTMGQPLVILAPHAVEALVKQPPDRWLSNARMTHYQAMLLDTDRVQFGPVVALNPATLLPLPEEGAPHDCLEILAETHGTRPDLTDQPIPDADHTWYTDGSSFLQEGQRKAGAAVTTETEVIWARALPAGTSAQRAELIALTQALKMAEGKRLNVYTDSRYAFATAHIHGEIYRRRGLLTSEGREIKNKSEILALLKALFLPKRLSIIHCLGHQKGDSAEARGNRLADQAAREAAIKTPPDTSTLLAGKRTADGSEFEKRTADGSEFESPKKKAKVE

SEQ ID NO: 7507 - protein, 2096 aa, synthetic construct
MPAAKRVKLDGGDKKYSIGLDIGTNSVGWAVITDEYKVPSKKFKVLGNTDRHSIKKNLIGALLFDSGETAEATRLKRTARRRYTRRKNRICYLQEIFSNEMAKVDDSFFHRLEESFLVEEDKKHERHPIFGNIVDEVAYHEKYPTIYHLRKKLVDSTDKADLRLIYLALAHMIKFRGHFLIEGDLNPDNSDVDKLFIQLVQTYNQLFEENPINASGVDAKAILSARLSKSRRLENLIAQLPGEKKNGLFGNLIALSLGLTPNFKSNFDLAEDAKLQLSKDTYDDDLDNLLAQIGDQYADLFLAAKNLSDAILLSDILRVNTEITKAPLSASMIKRYDEHHQDLTLLKALVRQQLPEKYKEIFFDQSKNGYAGYIDGGASQEEFYKFIKPILEKMDGTEELLVKLNREDLLRKQRTFDNGSIPHQIHLGELHAILRRQEDFYPFLKDNREKIEKILTFRIPYYVGPLARGNSRFAWMTRKSEETITPWNFEEVVDKGASAQSFIERMTNFDKNLPNEKVLPKHSLLYEYFTVYNELTKVKYVTEGMRKPAFLSGEQKKAIVDLLFKTNRKVTVKQLKEDYFKKIECFDSVEISGVEDRFNASLGTYHDLLKIIKDKDFLDNEENEDILEDIVLTLTLFEDREMIEERLKTYAHLFDDKVMKQLKRRRYTGWGRLSRKLINGIRDKQSGKTILDFLKSDGFANRNFMQLIHDDSLTFKEDIQKAQVSGQGDSLHEHIANLAGSPAIKKGILQTVKVVDELVKVMGRHKPENIVIEMARENQTTQKGQKNSRERMKRIEEGIKELGSQILKEHPVENTQLQNEKLYLYYLQNGRDMYVDQELDINRLSDYDVDHIVPQSFLKDDSIDNKVLTRSDKARGKSDNVPSEEVVKKMKNYWRQLLNAKLITQRKFDNLTKAERGGLSELDKAGFIKRQLVETRQITKHVAQILDSRMNTKYDENDKLIREVKVITLKSKLVSDFRKDFQFYKVREINNYHHAHDAYLNAVVGTALIKKYPKLESEFVYGDYKVYDVRKMIAKSEQEIGKATAKYFFYSNIMNFFKTEITLANGEIRKRPLIETNGETGEIVWDKGRDFATVRKVLSMPQVNIVKKTEVQTGGFSKESILPKRNSDKLIARKKDWDPKKYGGFDSPTVAYSVLVVAKVEKGKSKKLKSVKELLGITIMERSSFEKNPIDFLEAKGYKEVKKDLIIKLPKYSLFELENGRKRMLASAGELQKGNELALPSKYVNFLYLASHYEKLKGSPEDNEQKQLFVEQHKHYLDEIIEQISEFSKRVILADANLDKVLSAYNKHRDKPIREQAENIIHLFTLTNLGAPAAFKYFDTTIDRKRYTSTKEVLDATLIHQSITGLYETRIDLSQLGGDGGEAAAKPAPGGGGGTLNLEDEYRLYETSAEPEVSPGSTWLSDFPQAWAETGGMGLAVRQAPLIIPLKATSTPVSIKQYPMSQEAKLGIKPHIQRLLDQGILVPCQSPWNTPLLPVKKPGTNDYRPVQDLREVNKRVEDIHPTVPNPYNLLSGLPPSHRWYTVLDLKDAFFCLRLHPTSQPLFAFEWRDPGMGISGQLTWTRLPQGFKNSPTLFNEALHRDLADFRIQHPDLILLQYVDDILLAATSELDCQQGTRALLLTLGNLGYRASAKKAQLCQKQVKYLGYLLKEGQRWLTEARKETVMGQPTPKTPRQLREFLGTAGFCRLWIPGFAEMAAPLYPLTKPGTLFNWGPDQQKAYQEIKQALLTAPALGLPDLTKPFELFVDEKQGYAKGVLTQKLGPWRRPVAYLSKKLDPVAAGWPPCLRMVAAIAVLRKDAGKLTMGQPLVILAPHAVEALVKQPPDRWLSNARMTHYQAMLLDTDRVQFGPVVALNPATLLPLPEEGAPHDCLEILAETHGTRPDLTDQPIPDADHTWYTDGSSFLQEGQRKAGAAVTTETEVIWARALPAGTSAQRAELIALTQALKMAEGKRLNVYTDSRYAFATAHIHGEIYRRRGWLTSEGREIKNKSEILALLKALFLPKRLSIIHCLGHQKGDSAEARGNRLADQAAREAAIKTPPDTSTLLAGKRTADGSEFEKRTADGSEFESPKKKAKVE

SEQ ID NO: 7508 - protein, 2096 aa, synthetic construct
MPAAKRVKLDGGDKKYSIGLDIGTNSVGWAVITDEYKVPSKKFKVLGNTDRHSIKKNLIGALLFDSGETAEATRLKRTARRRYTRRKNRICYLQEIFSNEMAKVDDSFFHRLEESFLVEEDKKHERHPIFGNIVDEVAYHEKYPTIYHLRKKLVDSTDKADLRLIYLALAHMIKFRGHFLIEGDLNPDNSDVDKLFIQLVQTYNQLFEENPINASGVDAKAILSARLSKSRRLENLIAQLPGEKKNGLFGNLIALSLGLTPNFKSNFDLAEDAKLQLSKDTYDDDLDNLLAQIGDQYADLFLAAKNLSDAILLSDILRVNTEITKAPLSASMIKRYDEHHQDLTLLKALVRQQLPEKYKEIFFDQSKNGYAGYIDGGASQEEFYKFIKPILEKMDGTEELLVKLNREDLLRKQRTFDNGSIPHQIHLGELHAILRRQEDFYPFLKDNREKIEKILTFRIPYYVGPLARGNSRFAWMTRKSEETITPWNFEEVVDKGASAQSFIERMTNFDKNLPNEKVLPKHSLLYEYFTVYNELTKVKYVTEGMRKPAFLSGEQKKAIVDLLFKTNRKVTVKQLKEDYFKKIECFDSVEISGVEDRFNASLGTYHDLLKIIKDKDFLDNEENEDILEDIVLTLTLFEDREMIEERLKTYAHLFDDKVMKQLKRRRYTGWGRLSRKLINGIRDKQSGKTILDFLKSDGFANRNFMQLIHDDSLTFKEDIQKAQVSGQGDSLHEHIANLAGSPAIKKGILQTVKVVDELVKVMGRHKPENIVIEMARENQTTQKGQKNSRERMKRIEEGIKELGSQILKEHPVENTQLQNEKLYLYYLQNGRDMYVDQELDINRLSDYDVDHIVPQSFLKDDSIDNKVLTRSDKARGKSDNVPSEEVVKKMKNYWRQLLNAKLITQRKFDNLTKAERGGLSELDKAGFIKRQLVETRQITKHVAQILDSRMNTKYDENDKLIREVKVITLKSKLVSDFRKDFQFYKVREINNYHHAHDAYLNAVVGTALIKKYPKLESEFVYGDYKVYDVRKMIAKSEQEIGKATAKYFFYSNIMNFFKTEITLANGEIRKRPLIETNGETGEIVWDKGRDFATVRKVLSMPQVNIVKKTEVQTGGFSKESILPKRNSDKLIARKKDWDPKKYGGFDSPTVAYSVLVVAKVEKGKSKKLKSVKELLGITIMERSSFEKNPIDFLEAKGYKEVKKDLIIKLPKYSLFELENGRKRMLASAGELQKGNELALPSKYVNFLYLASHYEKLKGSPEDNEQKQLFVEQHKHYLDEIIEQISEFSKRVILADANLDKVLSAYNKHRDKPIREQAENIIHLFTLTNLGAPAAFKYFDTTIDRKRYTSTKEVLDATLIHQSITGLYETRIDLSQLGGDGGEAAAKPAPGGGGGTLGIEDEYRLHETSTEPDVSLGSTWLSDFPQAWAETGGMGLAVRQAPLIIPLKATSTPVSIQQYPMSHEARLGIKPHIQRLLDQGILVPCQSPWNTPLLPVKKPGTNDYRPVQDLREVNKRVEDIHPTVPNPYNLLSGLPPSHQWYTVLDLKDAFFCLRLHPTSQPLFAFEWRDPGMGISGQLTWTRLPQGFKNSPTLFNEALHRDLADFRIQHPDLILLQYVDDILLAATSELDCQQGTRALLQTLGDLGYRASAKKAQICQKQVKYLGYLLREGQRWLTEARKETVMGQPVPKTPRQLREFLGTAGFCRLWIPGFAEMAAPLYPLTKPGTLFSWGPDQQKAYQEIKQALLTAPALGLPDLTKPFELFVDEKQGYAKGVLTQKLGPWRRPVAYLSKKLDPVAAGWPPCLRMVAAIAVLTKDAGKLTMGQPLVILAPHAVEALVKQPPDRWLSNARMTHYQAMLLDTDRVQFGPVVALNPATLLPLPEEGAPHDCLEILAETHGTRPDLTDQPIPDADHTWYTDGSSFLQEGQRKAGAAVTTETEVIWAGALPAGTSAQRAELIALTQALKMAEGKRLNVYTDSRYAFATAHIHGEIYRRRGWLTSEGREIKNKSEILALLKALFLPKRLSIIHCLGHQKGDSAEARGNRLADQAAREAAIKTPPDTSTLLAGKRTADGSEFEKRTADGSEFESPKKKAKVE

SEQ ID NO: 7509 - protein, 2096 aa, synthetic construct; identical to SEQ ID NO: 4536

SEQ ID NO: 7510 - protein, 2096 aa, synthetic construct
MPAAKRVKLDGGDKKYSIGLDIGTNSVGWAVITDEYKVPSKKFKVLGNTDRHSIKKNLIGALLFDSGETAEATRLKRTARRRYTRRKNRICYLQEIFSNEMAKVDDSFFHRLEESFLVEEDKKHERHPIFGNIVDEVAYHEKYPTIYHLRKKLVDSTDKADLRLIYLALAHMIKFRGHFLIEGDLNPDNSDVDKLFIQLVQTYNQLFEENPINASGVDAKAILSARLSKSRRLENLIAQLPGEKKNGLFGNLIALSLGLTPNFKSNFDLAEDAKLQLSKDTYDDDLDNLLAQIGDQYADLFLAAKNLSDAILLSDILRVNTEITKAPLSASMIKRYDEHHQDLTLLKALVRQQLPEKYKEIFFDQSKNGYAGYIDGGASQEEFYKFIKPILEKMDGTEELLVKLNREDLLRKQRTFDNGSIPHQIHLGELHAILRRQEDFYPFLKDNREKIEKILTFRIPYYVGPLARGNSRFAWMTRKSEETITPWNFEEVVDKGASAQSFIERMTNFDKNLPNEKVLPKHSLLYEYFTVYNELTKVKYVTEGMRKPAFLSGEQKKAIVDLLFKTNRKVTVKQLKEDYFKKIECFDSVEISGVEDRFNASLGTYHDLLKIIKDKDFLDNEENEDILEDIVLTLTLFEDREMIEERLKTYAHLFDDKVMKQLKRRRYTGWGRLSRKLINGIRDKQSGKTILDFLKSDGFANRNFMQLIHDDSLTFKEDIQKAQVSGQGDSLHEHIANLAGSPAIKKGILQTVKVVDELVKVMGRHKPENIVIEMARENQTTQKGQKNSRERMKRIEEGIKELGSQILKEHPVENTQLQNEKLYLYYLQNGRDMYVDQELDINRLSDYDVDHIVPQSFLKDDSIDNKVLTRSDKARGKSDNVPSEEVVKKMKNYWRQLLNAKLITQRKFDNLTKAERGGLSELDKAGFIKRQLVETRQITKHVAQILDSRMNTKYDENDKLIREVKVITLKSKLVSDFRKDFQFYKVREINNYHHAHDAYLNAVVGTALIKKYPKLESEFVYGDYKVYDVRKMIAKSEQEIGKATAKYFFYSNIMNFFKTEITLANGEIRKRPLIETNGETGEIVWDKGRDFATVRKVLSMPQVNIVKKTEVQTGGFSKESILPKRNSDKLIARKKDWDPKKYGGFDSPTVAYSVLVVAKVEKGKSKKLKSVKELLGITIMERSSFEKNPIDFLEAKGYKEVKKDLIIKLPKYSLFELENGRKRMLASAGELQKGNELALPSKYVNFLYLASHYEKLKGSPEDNEQKQLFVEQHKHYLDEIIEQISEFSKRVILADANLDKVLSAYNKHRDKPIREQAENIIHLFTLTNLGAPAAFKYFDTTIDRKRYTSTKEVLDATLIHQSITGLYETRIDLSQLGGDGGEAAAKPAPGGGGGTLNIEDEYRLHETSKGPDVPLGSTWLSDFPQAWAETGGMGLAVRQAPLIIPLKATSTPVSIKQYPMSQEARLGIKPHIQRLLDQGILVPCQSPWNTPLLPVKKPGTNDYRPVQDLREVNKRVEDIHPTVPNPYNLLSGLPPSHQWYTVLDLKDAFFCLRLHPTSQSLFAFEWRDPEMGISGQLTWTRLPQGFKNSPTLFNEALHRDLADFRIQHPDLILLQYVDDLLLAATSELDCQQGTRALLQTLGDLGYRASAKKAQICQKQVKYLGYLLKEGQRWLTEARKETVMGQPTPKTPRQLREFLGTAGFCRLWIPGFAEMAAPLYPLTKPGTLFEWGPDQQKAYQEIKQALLTAPALGLPDLTKPFELFVDEKQGYAKGVLTQKLGPWRRPVAYLSKKLDPVAAGWPPCLRMVAAIAVLTKDAGKLTMGQPLVILAPHAVEALVKQPPDRWLSNARMTHYQALLLDTDRVQFGPIVALNPATLLPLPEEGLQHDCLDILAEAHGTRPDLTDQPLPDADHTWYTDGSSFLQEGQRKAGAAVTTETEVVWAKALPAGTSAQRAELIALTQALKMAEGKKLNVYTDSRYAFATAHIHGEIYRRRGWLTSEGKEIKNKDEILALLKALFLPKRLSIIHCPGHQKGNRAEARGNRMADQAAREVATRETPETSTLLAGKRTADGSEFEKRTADGSEFESPKKKAKVE

SEQ ID NO: 7511 - protein, 2096 aa, synthetic construct
MPAAKRVKLDGGDKKYSIGLDIGTNSVGWAVITDEYKVPSKKFKVLGNTDRHSIKKNLIGALLFDSGETAEATRLKRTARRRYTRRKNRICYLQEIFSNEMAKVDDSFFHRLEESFLVEEDKKHERHPIFGNIVDEVAYHEKYPTIYHLRKKLVDSTDKADLRLIYLALAHMIKFRGHFLIEGDLNPDNSDVDKLFIQLVQTYNQLFEENPINASGVDAKAILSARLSKSRRLENLIAQLPGEKKNGLFGNLIALSLGLTPNFKSNFDLAEDAKLQLSKDTYDDDLDNLLAQIGDQYADLFLAAKNLSDAILLSDILRVNTEITKAPLSASMIKRYDEHHQDLTLLKALVRQQLPEKYKEIFFDQSKNGYAGYIDGGASQEEFYKFIKPILEKMDGTEELLVKLNREDLLRKQRTFDNGSIPHQIHLGELHAILRRQEDFYPFLKDNREKIEKILTFRIPYYVGPLARGNSRFAWMTRKSEETITPWNFEEVVDKGASAQSFIERMTNFDKNLPNEKVLPKHSLLYEYFTVYNELTKVKYVTEGMRKPAFLSGEQKKAIVDLLFKTNRKVTVKQLKEDYFKKIECFDSVEISGVEDRFNASLGTYHDLLKIIKDKDFLDNEENEDILEDIVLTLTLFEDREMIEERLKTYAHLFDDKVMKQLKRRRYTGWGRLSRKLINGIRDKQSGKTILDFLKSDGFANRNFMQLIHDDSLTFKEDIQKAQVSGQGDSLHEHIANLAGSPAIKKGILQTVKVVDELVKVMGRHKPENIVIEMARENQTTQKGQKNSRERMKRIEEGIKELGSQILKEHPVENTQLQNEKLYLYYLQNGRDMYVDQELDINRLSDYDVDHIVPQSFLKDDSIDNKVLTRSDKARGKSDNVPSEEVVKKMKNYWRQLLNAKLITQRKFDNLTKAERGGLSELDKAGFIKRQLVETRQITKHVAQILDSRMNTKYDENDKLIREVKVITLKSKLVSDFRKDFQFYKVREINNYHHAHDAYLNAVVGTALIKKYPKLESEFVYGDYKVYDVRKMIAKSEQEIGKATAKYFFYSNIMNFFKTEITLANGEIRKRPLIETNGETGEIVWDKGRDFATVRKVLSMPQVNIVKKTEVQTGGFSKESILPKRNSDKLIARKKDWDPKKYGGFDSPTVAYSVLVVAKVEKGKSKKLKSVKELLGITIMERSSFEKNPIDFLEAKGYKEVKKDLIIKLPKYSLFELENGRKRMLASAGELQKGNELALPSKYVNFLYLASHYEKLKGSPEDNEQKQLFVEQHKHYLDEIIEQISEFSKRVILADANLDKVLSAYNKHRDKPIREQAENIIHLFTLTNLGAPAAFKYFDTTIDRKRYTSTKEVLDATLIHQSITGLYETRIDLSQLGGDGGEAAAKPAPGGGGGTLNIEDEHRLHETSKEPDVSLGSTWLSDFPQAWAETGGMGLAVRQAPLIIPLKATSTPVSIKQYPMSQEARLGIKPHIQRLLDQGILVPCQSPWNTPLLPVKKPGTNDYRPVQDLREVNKRVEDIHPTVPNPYNLLSGLPPSHQWYTVLDLKDAFFCLRLHPTSQPLFAFEWRDPEMGISGQLTWTRLPQGFKNSPTLFDEALHRDLADFRIQHPDLILLQYVDDLLLAATSELDCQQGTRALLQTLGNLGYRASAKKAQICQKQVKYLGYLLKEGQRWLTEARKETVMGQPTPKTPRQLREFLGTAGFCRLWIPGFAEMAAPLYPLTKTGTLFNWGPDQQKAYQEIKQALLTAPALGLPDLTKPFELFVDEKQGYAKGVLTQKLGPWRRPVAYLSKKLDPVAAGWPPCLRMVAAIAVLTKDAGKLTMGQPLVILAPHAVEALVKQPPDRWLSNARMTHYQALLLDTDRVQFGPVVALNPATLLPLPEEGLQHNCLDILAEAHGTRPDLTDQPLPDADHTWYTDGSSLLQEGQRKAGAAVTTETEVIWAKALPAGTSAQRAELIALTQALKMAEGKKLNVYTDSRYAFATAHIHGEIYRRRGLLTSEGKEIKNKDEILALLKALFLPKRLSIIHCPGHQKGHSAEARGNRMADQAARKAAITETPDTSTLLAGKRTADGSEFEKRTADGSEFESPKKKAKVE

SEQ ID NO: 7512 - protein, 2024 aa, synthetic construct
MPAAKRVKLDGGDKKYSIGLDIGTNSVGWAVITDEYKVPSKKFKVLGNTDRHSIKKNLIGALLFDSGETAEATRLKRTARRRYTRRKNRICYLQEIFSNEMAKVDDSFFHRLEESFLVEEDKKHERHPIFGNIVDEVAYHEKYPTIYHLRKKLVDSTDKADLRLIYLALAHMIKFRGHFLIEGDLNPDNSDVDKLFIQLVQTYNQLFEENPINASGVDAKAILSARLSKSRRLENLIAQLPGEKKNGLFGNLIALSLGLTPNFKSNFDLAEDAKLQLSKDTYDDDLDNLLAQIGDQYADLFLAAKNLSDAILLSDILRVNTEITKAPLSASMIKRYDEHHQDLTLLKALVRQQLPEKYKEIFFDQSKNGYAGYIDGGASQEEFYKFIKPILEKMDGTEELLVKLNREDLLRKQRTFDNGSIPHQIHLGELHAILRRQEDFYPFLKDNREKIEKILTFRIPYYVGPLARGNSRFAWMTRKSEETITPWNFEEVVDKGASAQSFIERMTNFDKNLPNEKVLPKHSLLYEYFTVYNELTKVKYVTEGMRKPAFLSGEQKKAIVDLLFKTNRKVTVKQLKEDYFKKIECFDSVEISGVEDRFNASLGTYHDLLKIIKDKDFLDNEENEDILEDIVLTLTLFEDREMIEERLKTYAHLFDDKVMKQLKRRRYTGWGRLSRKLINGIRDKQSGKTILDFLKSDGFANRNFMQLIHDDSLTFKEDIQKAQVSGQGDSLHEHIANLAGSPAIKKGILQTVKVVDELVKVMGRHKPENIVIEMARENQTTQKGQKNSRERMKRIEEGIKELGSQILKEHPVENTQLQNEKLYLYYLQNGRDMYVDQELDINRLSDYDVDHIVPQSFLKDDSIDNKVLTRSDKARGKSDNVPSEEVVKKMKNYWRQLLNAKLITQRKFDNLTKAERGGLSELDKAGFIKRQLVETRQITKHVAQILDSRMNTKYDENDKLIREVKVITLKSKLVSDFRKDFQFYKVREINNYHHAHDAYLNAVVGTALIKKYPKLESEFVYGDYKVYDVRKMIAKSEQEIGKATAKYFFYSNIMNFFKTEITLANGEIRKRPLIETNGETGEIVWDKGRDFATVRKVLSMPQVNIVKKTEVQTGGFSKESILPKRNSDKLIARKKDWDPKKYGGFDSPTVAYSVLVVAKVEKGKSKKLKSVKELLGITIMERSSFEKNPIDFLEAKGYKEVKKDLIIKLPKYSLFELENGRKRMLASAGELQKGNELALPSKYVNFLYLASHYEKLKGSPEDNEQKQLFVEQHKHYLDEIIEQISEFSKRVILADANLDKVLSAYNKHRDKPIREQAENIIHLFTLTNLGAPAAFKYFDTTIDRKRYTSTKEVLDATLIHQSITGLYETRIDLSQLGGDGGEAAAKPAPGGGGGGRDIMKDIKVRLMTDSPDDSQDLMIGAIESNLFADQISWKSDQPVWLNQWPLKQEKLQALQQLVTEQLQLGHLEESNSPWNTPVFVIKKKSGKWRLLQDLRAVNATMHDMGALQPGLPSPVAVPKGWEIIIIDLQDCFFNIKLHPEDCKRFAFSVPSPNFKRPYQRFQWKVLPQGMKNSPTLCQKFVDKAILTVRDKYQDSYIVHYMDDILLAHPSRSIVDEILTSMIQALNKHGLVVSTEKIQKYDNLKYLGTHIQGDSVSYQKLQIRTDKLRTLNDFQKLLGNINWIRPFLKLTTGELKPLFEILNGDSNPISTRKLTPEACKALQLMNERLSTARVKRLDLSQPWSLCILKTEYTPTACLWQDGVVEWIHLPHISPKVITPYDIFCTQLIIKGRHRSKELFSKDPDYIVVPYTKVQFDLLLQEKEDWPISLLGFLGEVHFHLPKDPLLTFTLQTAIIFPHMTSTTPLEKGIVIFTDGSANGRSVTYIQGREPIIKENTQNTAQQAEIVAVITAFEEVSQPFNLYTDSKYVTGLFPEIETATLSPRTKIYTELKHLQRLIHKRQEKFYIGHIRGHTGLPGPLAQGNAYADSLTRILTAGKRTADGSEFEKRTADGSEFESPKKKAKVE

SEQ ID NO: 7513 - protein, 2088 aa, synthetic construct
MPAAKRVKLDGGDKKYSIGLDIGTNSVGWAVITDEYKVPSKKFKVLGNTDRHSIKKNLIGALLFDSGETAEATRLKRTARRRYTRRKNRICYLQEIFSNEMAKVDDSFFHRLEESFLVEEDKKHERHPIFGNIVDEVAYHEKYPTIYHLRKKLVDSTDKADLRLIYLALAHMIKFRGHFLIEGDLNPDNSDVDKLFIQLVQTYNQLFEENPINASGVDAKAILSARLSKSRRLENLIAQLPGEKKNGLFGNLIALSLGLTPNFKSNFDLAEDAKLQLSKDTYDDDLDNLLAQIGDQYADLFLAAKNLSDAILLSDILRVNTEITKAPLSASMIKRYDEHHQDLTLLKALVRQQLPEKYKEIFFDQSKNGYAGYIDGGASQEEFYKFIKPILEKMDGTEELLVKLNREDLLRKQRTFDNGSIPHQIHLGELHAILRRQEDFYPFLKDNREKIEKILTFRIPYYVGPLARGNSRFAWMTRKSEETITPWNFEEVVDKGASAQSFIERMTNFDKNLPNEKVLPKHSLLYEYFTVYNELTKVKYVTEGMRKPAFLSGEQKKAIVDLLFKTNRKVTVKQLKEDYFKKIECFDSVEISGVEDRFNASLGTYHDLLKIIKDKDFLDNEENEDILEDIVLTLTLFEDREMIEERLKTYAHLFDDKVMKQLKRRRYTGWGRLSRKLINGIRDKQSGKTILDFLKSDGFANRNFMQLIHDDSLTFKEDIQKAQVSGQGDSLHEHIANLAGSPAIKKGILQTVKVVDELVKVMGRHKPENIVIEMARENQTTQKGQKNSRERMKRIEEGIKELGSQILKEHPVENTQLQNEKLYLYYLQNGRDMYVDQELDINRLSDYDVDHIVPQSFLKDDSIDNKVLTRSDKARGKSDNVPSEEVVKKMKNYWRQLLNAKLITQRKFDNLTKAERGGLSELDKAGFIKRQLVETRQITKHVAQILDSRMNTKYDENDKLIREVKVITLKSKLVSDFRKDFQFYKVREINNYHHAHDAYLNAVVGTALIKKYPKLESEFVYGDYKVYDVRKMIAKSEQEIGKATAKYFFYSNIMNFFKTEITLANGEIRKRPLIETNGETGEIVWDKGRDFATVRKVLSMPQVNIVKKTEVQTGGFSKESILPKRNSDKLIARKKDWDPKKYGGFDSPTVAYSVLVVAKVEKGKSKKLKSVKELLGITIMERSSFEKNPIDFLEAKGYKEVKKDLIIKLPKYSLFELENGRKRMLASAGELQKGNELALPSKYVNFLYLASHYEKLKGSPEDNEQKQLFVEQHKHYLDEIIEQISEFSKRVILADANLDKVLSAYNKHRDKPIREQAENIIHLFTLTNLGAPAAFKYFDTTIDRKRYTSTKEVLDATLIHQSITGLYETRIDLSQLGGDGGEAAAKPAPGGGGGLDDEYRLYSPLVKPDQNIQFWLEQFPQAWAETAGMGLAKQVPPQVIQLKASATPVSVRQYPLSKEAQEGIRPHVQRLIQQGILVPVQSPWNTPLLPVRKPGTNDYRPVQDLREVNKRVQDIHPTVPNPYNLLCALPPQRSWYTVLDLKDAFFCLRLHPTSQPLFAFEWRDPGTGRTGQLTWTRLPQGFKNSPTIFNEALHRDLANFRIQHPQVTLLQYVDDLLLAGATKQDCLEGTKALLLELSDLGYRASAKKAQICRREVTYLGYSLRDGQRWLTEARKKTVVQIPAPTTAKQVREFLGKAGFCRLFIPGFATLAAPLYPLTKPKGEFSWAPEHQKAFDAIKKALLSAPALALPDVTKPFTLYVDERKGVARGVLTQTLGPWRRPVAYLSKKLDPVASGWPVCLKAIAAVAILVKDADKLTLGQNITVIAPHALENIVRQPPDRWMTNARMTHYQSLLLTERVTFAPPAALNPATLLPEETDEPVTHDCHQLLIEETGVRKDLTDIPLTGEVLTWFTDGSSYVVEGKRMAGAAVVDGTRTIWASSLPEGTSAQKAELMALTQALRLAEGKSINIYTDSRYAFATAHVHGAIYKQRGWLTSAGREIKNKEEILSLLEALHLPKRLAIIHCPGHQKAKDPISRGNQMADRVAKQAAQGVNLLPAGKRTADGSEFEKRTADGSEFESPKKKAKVE

SEQ ID NO: 7514 - protein, 2090 aa, synthetic construct
MPAAKRVKLDGGDKKYSIGLDIGTNSVGWAVITDEYKVPSKKFKVLGNTDRHSIKKNLIGALLFDSGETAEATRLKRTARRRYTRRKNRICYLQEIFSNEMAKVDDSFFHRLEESFLVEEDKKHERHPIFGNIVDEVAYHEKYPTIYHLRKKLVDSTDKADLRLIYLALAHMIKFRGHFLIEGDLNPDNSDVDKLFIQLVQTYNQLFEENPINASGVDAKAILSARLSKSRRLENLIAQLPGEKKNGLFGNLIALSLGLTPNFKSNFDLAEDAKLQLSKDTYDDDLDNLLAQIGDQYADLFLAAKNLSDAILLSDILRVNTEITKAPLSASMIKRYDEHHQDLTLLKALVRQQLPEKYKEIFFDQSKNGYAGYIDGGASQEEFYKFIKPILEKMDGTEELLVKLNREDLLRKQRTFDNGSIPHQIHLGELHAILRRQEDFYPFLKDNREKIEKILTFRIPYYVGPLARGNSRFAWMTRKSEETITPWNFEEVVDKGASAQSFIERMTNFDKNLPNEKVLPKHSLLYEYFTVYNELTKVKYVTEGMRKPAFLSGEQKKAIVDLLFKTNRKVTVKQLKEDYFKKIECFDSVEISGVEDRFNASLGTYHDLLKIIKDKDFLDNEENEDILEDIVLTLTLFEDREMIEERLKTYAHLFDDKVMKQLKRRRYTGWGRLSRKLINGIRDKQSGKTILDFLKSDGFANRNFMQLIHDDSLTFKEDIQKAQVSGQGDSLHEHIANLAGSPAIKKGILQTVKVVDELVKVMGRHKPENIVIEMARENQTTQKGQKNSRERMKRIEEGIKELGSQILKEHPVENTQLQNEKLYLYYLQNGRDMYVDQELDINRLSDYDVDHIVPQSFLKDDSIDNKVLTRSDKARGKSDNVPSEEVVKKMKNYWRQLLNAKLITQRKFDNLTKAERGGLSELDKAGFIKRQLVETRQITKHVAQILDSRMNTKYDENDKLIREVKVITLKSKLVSDFRKDFQFYKVREINNYHHAHDAYLNAVVGTALIKKYPKLESEFVYGDYKVYDVRKMIAKSEQEIGKATAKYFFYSNIMNFFKTEITLANGEIRKRPLIETNGETGEIVWDKGRDFATVRKVLSMPQVNIVKKTEVQTGGFSKESILPKRNSDKLIARKKDWDPKKYGGFDSPTVAYSVLVVAKVEKGKSKKLKSVKELLGITIMERSSFEKNPIDFLEAKGYKEVKKDLIIKLPKYSLFELENGRKRMLASAGELQKGNELALPSKYVNFLYLASHYEKLKGSPEDNEQKQLFVEQHKHYLDEIIEQISEFSKRVILADANLDKVLSAYNKHRDKPIREQAENIIHLFTLTNLGAPAAFKYFDTTIDRKRYTSTKEVLDATLIHQSITGLYETRIDLSQLGGDGGEAAAKPAPGGGGGTLQLDDEYRLYSPLVKPDQNIQFWLEQFPQAWAETAGMGLAKQVPPQVIQLKASATPVSVRQYPLSKEAQEGIRPHVQRLIQQGILVPVQSPWNTPLLPVRKPGTNDYRPVQDLREVNKRVQDIHPTVPNPYNLLCALPPQRSWYTVLDLKDAFFCLRLHPTSQPLFAFEWRDPGTGRTGQLTWTRLPQGFKNSPTIFDEALHRDLANFRIQHPQVTLLQYVDDLLLAGATKQDCLEGTKALLLELSDLGYRASAKKAQICRREVTYLGYSLRDGQRWLTEARKKTVVQIPAPTTAKQVREFLGTAGFCRLWIPGFATLAAPLYPLTKEKGEFSWAPEHQKAFDAIKKALLSAPALALPDVTKPFTLYVDERKGVARGVLTQTLGPWRRPVAYLSKKLDPVASGWPVCLKAIAAVAILVKDADKLTLGQNITVIAPHALENIVRQPPDRWMTNARMTHYQSLLLTERVTFAPPAALNPATLLPEETDEPVTHDCHQLLIEETGVRKDLTDIPLTGEVLTWFTDGSSYVVEGKRMAGAAVVDGTRTIWASSLPEGTSAQKAELMALTQALRLAEGKSINIYTDSRYAFATAHVHGAIYKQRGLLTSAGREIKNKEEILSLLEALHLPKRLAIIHCPGHQKAKDPISRGNQMADRVAKQAAQGVNLLAGKRTADGSEFEKRTADGSEFESPKKKAKVE

SEQ ID NO: 7515 - protein, 2088 aa, synthetic construct; identical to SEQ ID NO: 7513

SEQ ID NO: 7516 - protein, 2176 aa, synthetic construct
MPAAKRVKLDGGDKKYSIGLDIGTNSVGWAVITDEYKVPSKKFKVLGNTDRHSIKKNLIGALLFDSGETAEATRLKRTARRRYTRRKNRICYLQEIFSNEMAKVDDSFFHRLEESFLVEEDKKHERHPIFGNIVDEVAYHEKYPTIYHLRKKLVDSTDKADLRLIYLALAHMIKFRGHFLIEGDLNPDNSDVDKLFIQLVQTYNQLFEENPINASGVDAKAILSARLSKSRRLENLIAQLPGEKKNGLFGNLIALSLGLTPNFKSNFDLAEDAKLQLSKDTYDDDLDNLLAQIGDQYADLFLAAKNLSDAILLSDILRVNTEITKAPLSASMIKRYDEHHQDLTLLKALVRQQLPEKYKEIFFDQSKNGYAGYIDGGASQEEFYKFIKPILEKMDGTEELLVKLNREDLLRKQRTFDNGSIPHQIHLGELHAILRRQEDFYPFLKDNREKIEKILTFRIPYYVGPLARGNSRFAWMTRKSEETITPWNFEEVVDKGASAQSFIERMTNFDKNLPNEKVLPKHSLLYEYFTVYNELTKVKYVTEGMRKPAFLSGEQKKAIVDLLFKTNRKVTVKQLKEDYFKKIECFDSVEISGVEDRFNASLGTYHDLLKIIKDKDFLDNEENEDILEDIVLTLTLFEDREMIEERLKTYAHLFDDKVMKQLKRRRYTGWGRLSRKLINGIRDKQSGKTILDFLKSDGFANRNFMQLIHDDSLTFKEDIQKAQVSGQGDSLHEHIANLAGSPAIKKGILQTVKVVDELVKVMGRHKPENIVIEMARENQTTQKGQKNSRERMKRIEEGIKELGSQILKEHPVENTQLQNEKLYLYYLQNGRDMYVDQELDINRLSDYDVDHIVPQSFLKDDSIDNKVLTRSDKARGKSDNVPSEEVVKKMKNYWRQLLNAKLITQRKFDNLTKAERGGLSELDKAGFIKRQLVETRQITKHVAQILDSRMNTKYDENDKLIREVKVITLKSKLVSDFRKDFQFYKVREINNYHHAHDAYLNAVVGTALIKKYPKLESEFVYGDYKVYDVRKMIAKSEQEIGKATAKYFFYSNIMNFFKTEITLANGEIRKRPLIETNGETGEIVWDKGRDFATVRKVLSMPQVNIVKKTEVQTGGFSKESILPKRNSDKLIARKKDWDPKKYGGFDSPTVAYSVLVVAKVEKGKSKKLKSVKELLGITIMERSSFEKNPIDFLEAKGYKEVKKDLIIKLPKYSLFELENGRKRMLASAGELQKGNELALPSKYVNFLYLASHYEKLKGSPEDNEQKQLFVEQHKHYLDEIIEQISEFSKRVILADANLDKVLSAYNKHRDKPIREQAENIIHLFTLTNLGAPAAFKYFDTTIDRKRYTSTKEVLDATLIHQSITGLYETRIDLSQLGGDGGEAAAKPAPGGGGGMDPLQLLQPLEAEIKGTKLKAHWNSGATITCVPEAFLEDERPIQTMLIKTIHGEKQQDVYYLTFKVQGRKVEAEVLASPYDYILLNPSDVPWLMKKPLQLTVLVPLHEYQERLLQQTALPKEQKELLQKLFLKYDALWQHWENQVGHRRIKPHNIATGTLAPRPQKQYPINPKAKPSIQIVIDDLLKQGVLIQQNSTMNTPVYPVPKPDGKWRMVLDYREVNKTIPLIAAQNQHSAGILSSIYRGKYKTTLDLTNGFWAHPITPESYWLTAFTWQGKQYCWTRLPQGFLNSPALFNADVVDLLKEIPNVQAYVDDIYISHDDPQEHLEQLEKIFSILLNAGYVVSLKKSEIAQREVEFLGFNITKEGRGLTDTFKQKLLNITPPKDLKQLQSILGKLNFARNFIPNYSELVKPLYTIVAPANGKFISWTEDNSNQLQHIISVLNQADNLEERNPETRLIIKVNSSPSAGYIRYYNEGSKRPIMYVNYIFSKAEAKFTQTEKLLTTMHKGLIKAMDLAMGQEILVYSPIVSMTKIQRTPLPERKALPVRWITWMTYLEDPRIQFHYDKSLPELQQIPNVTEDVIAKTKHPSEFAMVFYTDGSAIKHPDVNKSHSAGMGIAQVQFIPEYKIVHQWSIPLGDHTAQLAEIAAVEFACKKALKISGPVLIVTDSFYVAESANKELPYWKSNGFLNNKKKPLRHVSKWKSIAECLQLKPDIIIMHEKGHQQPMTTLHTEGNNLADKLATQGSYVVHAGKRTADGSEFEKRTADGSEFESPKKKAKVE

SEQ ID NO: 7517 - protein, 2176 aa, synthetic construct
MPAAKRVKLDGGDKKYSIGLDIGTNSVGWAVITDEYKVPSKKFKVLGNTDRHSIKKNLIGALLFDSGETAEATRLKRTARRRYTRRKNRICYLQEIFSNEMAKVDDSFFHRLEESFLVEEDKKHERHPIFGNIVDEVAYHEKYPTIYHLRKKLVDSTDKADLRLIYLALAHMIKFRGHFLIEGDLNPDNSDVDKLFIQLVQTYNQLFEENPINASGVDAKAILSARLSKSRRLENLIAQLPGEKKNGLFGNLIALSLGLTPNFKSNFDLAEDAKLQLSKDTYDDDLDNLLAQIGDQYADLFLAAKNLSDAILLSDILRVNTEITKAPLSASMIKRYDEHHQDLTLLKALVRQQLPEKYKEIFFDQSKNGYAGYIDGGASQEEFYKFIKPILEKMDGTEELLVKLNREDLLRKQRTFDNGSIPHQIHLGELHAILRRQEDFYPFLKDNREKIEKILTFRIPYYVGPLARGNSRFAWMTRKSEETITPWNFEEVVDKGASAQSFIERMTNFDKNLPNEKVLPKHSLLYEYFTVYNELTKVKYVTEGMRKPAFLSGEQKKAIVDLLFKTNRKVTVKQLKEDYFKKIECFDSVEISGVEDRFNASLGTYHDLLKIIKDKDFLDNEENEDILEDIVLTLTLFEDREMIEERLKTYAHLFDDKVMKQLKRRRYTGWGRLSRKLINGIRDKQSGKTILDFLKSDGFANRNFMQLIHDDSLTFKEDIQKAQVSGQGDSLHEHIANLAGSPAIKKGILQTVKVVDELVKVMGRHKPENIVIEMARENQTTQKGQKNSRERMKRIEEGIKELGSQILKEHPVENTQLQNEKLYLYYLQNGRDMYVDQELDINRLSDYDVDHIVPQSFLKDDSIDNKVLTRSDKARGKSDNVPSEEVVKKMKNYWRQLLNAKLITQRKFDNLTKAERGGLSELDKAGFIKRQLVETRQITKHVAQILDSRMNTKYDENDKLIREVKVITLKSKLVSDFRKDFQFYKVREINNYHHAHDAYLNAVVGTALIKKYPKLESEFVYGDYKVYDVRKMIAKSEQEIGKATAKYFFYSNIMNFFKTEITLANGEIRKRPLIETNGETGEIVWDKGRDFATVRKVLSMPQVNIVKKTEVQTGGFSKESILPKRNSDKLIARKKDWDPKKYGGFDSPTVAYSVLVVAKVEKGKSKKLKSVKELLGITIMERSSFEKNPIDFLEAKGYKEVKKDLIIKLPKYSLFELENGRKRMLASAGELQKGNELALPSKYVNFLYLASHYEKLKGSPEDNEQKQLFVEQHKHYLDEIIEQISEFSKRVILADANLDKVLSAYNKHRDKPIREQAENIIHLFTLTNLGAPAAFKYFDTTIDRKRYTSTKEVLDATLIHQSITGLYETRIDLSQLGGDGGEAAAKPAPGGGGGMDPLQLLQPLEAEIKGTKLKAHWNSGATITCVPQAFLEEEVPIKNIWIKTIHGEKEQPVYYLTFKIQGRKVEAEVISSPYDYILVSPSDIPWLMKKPLQLTTLVPLQEYEERLLKQTMLTGSYKEKLQSLFLKYDALWQHWENQVGHRRIKPHHIATGTVNPRPQKQYPINPKAKASIQTVINDLLKQGVLIQQNSIMNTPVYPVPKPDGKWRMVLDYREVNKTIPLIAAQNQHSAGILSSIFRGKYKTTLDLSNGFWAHSITPESYWLTAFTWLGQQYCWTRLPQGFLNSPALFTADVVDLLKEVPNVQVYVDDIYISHDDPREHLEQLEKVFSLLLNAGYVVSLKKSEIAQHEVEFLGFNITKEGRGLTETFKQKLLNITPPRDLKQLQSILGLLNFARNFIPNFSELVKPLYNIIATANGKYITWTTDNSQQLQNIISMLNSAENLEERNPEVRLIMKVNTSPSAGYIRFYNEFAKRPIMYLNYVYTKAEVKFTNTEKLLTTIHKGLIKALDLGMGQEILVYSPIVSMTKIQKTPLPERKALPIRWITWMSYLEDPRIQFHYDKTLPELQQVPTVTDDIIAKIKHPSEFSMVFYTDGSAIKHPNVNKSHNAGMGIAQVQFKPEFTVINTWSIPLGDHTAQLAEVAAVEFACKKALKIDGPVLIVTDSFYVAESVNKELPYWQSNGFFNNKKKPLKHVSKWKSIADCIQLKPDIIIIHEKGHQPTASTFHTEGNNLADKLATQGSYVVNAGKRTADGSEFEKRTADGSEFESPKKKAKVE

SEQ ID NO: 7518 - protein, 2087 aa, synthetic construct
MPAAKRVKLDGGDKKYSIGLDIGTNSVGWAVITDEYKVPSKKFKVLGNTDRHSIKKNLIGALLFDSGETAEATRLKRTARRRYTRRKNRICYLQEIFSNEMAKVDDSFFHRLEESFLVEEDKKHERHPIFGNIVDEVAYHEKYPTIYHLRKKLVDSTDKADLRLIYLALAHMIKFRGHFLIEGDLNPDNSDVDKLFIQLVQTYNQLFEENPINASGVDAKAILSARLSKSRRLENLIAQLPGEKKNGLFGNLIALSLGLTPNFKSNFDLAEDAKLQLSKDTYDDDLDNLLAQIGDQYADLFLAAKNLSDAILLSDILRVNTEITKAPLSASMIKRYDEHHQDLTLLKALVRQQLPEKYKEIFFDQSKNGYAGYIDGGASQEEFYKFIKPILEKMDGTEELLVKLNREDLLRKQRTFDNGSIPHQIHLGELHAILRRQEDFYPFLKDNREKIEKILTFRIPYYVGPLARGNSRFAWMTRKSEETITPWNFEEVVDKGASAQSFIERMTNFDKNLPNEKVLPKHSLLYEYFTVYNELTKVKYVTEGMRKPAFLSGEQKKAIVDLLFKTNRKVTVKQLKEDYFKKIECFDSVEISGVEDRFNASLGTYHDLLKIIKDKDFLDNEENEDILEDIVLTLTLFEDREMIEERLKTYAHLFDDKVMKQLKRRRYTGWGRLSRKLINGIRDKQSGKTILDFLKSDGFANRNFMQLIHDDSLTFKEDIQKAQVSGQGDSLHEHIANLAGSPAIKKGILQTVKVVDELVKVMGRHKPENIVIEMARENQTTQKGQKNSRERMKRIEEGIKELGSQILKEHPVENTQLQNEKLYLYYLQNGRDMYVDQELDINRLSDYDVDHIVPQSFLKDDSIDNKVLTRSDKARGKSDNVPSEEVVKKMKNYWRQLLNAKLITQRKFDNLTKAERGGLSELDKAGFIKRQLVETRQITKHVAQILDSRMNTKYDENDKLIREVKVITLKSKLVSDFRKDFQFYKVREINNYHHAHDAYLNAVVGTALIKKYPKLESEFVYGDYKVYDVRKMIAKSEQEIGKATAKYFFYSNIMNFFKTEITLANGEIRKRPLIETNGETGEIVWDKGRDFATVRKVLSMPQVNIVKKTEVQTGGFSKESILPKRNSDKLIARKKDWDPKKYGGFDSPTVAYSVLVVAKVEKGKSKKLKSVKELLGITIMERSSFEKNPIDFLEAKGYKEVKKDLIIKLPKYSLFELENGRKRMLASAGELQKGNELALPSKYVNFLYLASHYEKLKGSPEDNEQKQLFVEQHKHYLDEIIEQISEFSKRVILADANLDKVLSAYNKHRDKPIREQAENIIHLFTLTNLGAPAAFKYFDTTIDRKRYTSTKEVLDATLIHQSITGLYETRIDLSQLGGDGGEAAAKPAPGGGGGIPWLMKKPLQLTTLVPLQEYEERLLKQTMLTGSYKEKLQSLFLKYDALWQHWENQVGHRRIKPHHIATGTVNPRPQKQYPINPKAKASIQTVINDLLKQGVLIQQNSIMNTPVYPVPKPDGKWRMVLDYREVNKTIPLIAAQNQHSAGILSSIFRGKYKTTLDLSNGFWAHSITPESYWLTAFTWLGQQYCWTRLPQGFLNSPALFNADVVDLLKEVPNVQVYVDDIYISHDDPREHLEQLEKVFSLLLNAGYVVSLKKSEIAQHEVEFLGFNITKEGRGLTETFKQKLLNITPPRDLKQLQSILGLLNFARNFIPNFSELVKPLYNIIATAPGKYITWTTDNSQQLQNIISMLNSAENLEERNPEVRLIMKVNTSPSAGYIRFYNEFAKRPIMYLNYVYTKAEVKFTNTEKLLTTIHKGLIKALDLGMGQEILVYSPIVSMTKIQKTPLPERKALPIRWITWMSYLEDPRIQFHYDKTLPELQQVPTVTDDIIAKIKHPSEFSMVFYTDGSAIKHPNVNKSHNAGMGIAQVQFKPEFTVINTWSIPLGDHTAQLAEVAAVEFACKKALKIDGPVLIVTDSFYVAESVNKELPYWQSNGFFNNKKKPLKHVSKWKSIADCIQLKPDIIIIHEKGHQPTASTFHTEGNNLADKLATQGSYVVNAGKRTADGSEFEKRTADGSEFESPKKKAKVE

SEQ ID NO: 7519 - protein, 2176 aa, synthetic construct
MPAAKRVKLDGGDKKYSIGLDIGTNSVGWAVITDEYKVPSKKFKVLGNTDRHSIKKNLIGALLFDSGETAEATRLKRTARRRYTRRKNRICYLQEIFSNEMAKVDDSFFHRLEESFLVEEDKKHERHPIFGNIVDEVAYHEKYPTIYHLRKKLVDSTDKADLRLIYLALAHMIKFRGHFLIEGDLNPDNSDVDKLFIQLVQTYNQLFEENPINASGVDAKAILSARLSKSRRLENLIAQLPGEKKNGLFGNLIALSLGLTPNFKSNFDLAEDAKLQLSKDTYDDDLDNLLAQIGDQYADLFLAAKNLSDAILLSDILRVNTEITKAPLSASMIKRYDEHHQDLTLLKALVRQQLPEKYKEIFFDQSKNGYAGYIDGGASQEEFYKFIKPILEKMDGTEELLVKLNREDLLRKQRTFDNGSIPHQIHLGELHAILRRQEDFYPFLKDNREKIEKILTFRIPYYVGPLARGNSRFAWMTRKSEETITPWNFEEVVDKGASAQSFIERMTNFDKNLPNEKVLPKHSLLYEYFTVYNELTKVKYVTEGMRKPAFLSGEQKKAIVDLLFKTNRKVTVKQLKEDYFKKIECFDSVEISGVEDRFNASLGTYHDLLKIIKDKDFLDNEENEDILEDIVLTLTLFEDREMIEERLKTYAHLFDDKVMKQLKRRRYTGWGRLSRKLINGIRDKQSGKTILDFLKSDGFANRNFMQLIHDDSLTFKEDIQKAQVSGQGDSLHEHIANLAGSPAIKKGILQTVKVVDELVKVMGRHKPENIVIEMARENQTTQKGQKNSRERMKRIEEGIKELGSQILKEHPVENTQLQNEKLYLYYLQNGRDMYVDQELDINRLSDYDVDHIVPQSFLKDDSIDNKVLTRSDKARGKSDNVPSEEVVKKMKNYWRQLLNAKLITQRKFDNLTKAERGGLSELDKAGFIKRQLVETRQITKHVAQILDSRMNTKYDENDKLIREVKVITLKSKLVSDFRKDFQFYKVREINNYHHAHDAYLNAVVGTALIKKYPKLESEFVYGDYKVYDVRKMIAKSEQEIGKATAKYFFYSNIMNFFKTEITLANGEIRKRPLIETNGETGEIVWDKGRDFATVRKVLSMPQVNIVKKTEVQTGGFSKESILPKRNSDKLIARKKDWDPKKYGGFDSPTVAYSVLVVAKVEKGKSKKLKSVKELLGITIMERSSFEKNPIDFLEAKGYKEVKKDLIIKLPKYSLFELENGRKRMLASAGELQKGNELALPSKYVNFLYLASHYEKLKGSPEDNEQKQLFVEQHKHYLDEIIEQISEFSKRVILADANLDKVLSAYNKHRDKPIREQAENIIHLFTLTNLGAPAAFKYFDTTIDRKRYTSTKEVLDATLIHQSITGLYETRIDLSQLGGDGGEAAAKPAPGGGGGMDPLQLLQPLEAEIKGTKLKAHWNSGATITCVPQAFLEEEVPIKNIWIKTIHGEKEQPVYYLTFKIQGRKVEAEVISSPYDYILVSPSDIPWLMKKPLQLTTLVPLQEYEERLLKQTMLTGSYKEKLQSLFLKYDALWQHWENQVGHRRIKPHHIATGTVNPRPQKQYPINPKAKASIQTVINDLLKQGVLIQQNSIMNTPVYPVPKPDGKWRMVLDYREVNKTIPLIAAQNQHSAGILSSIFRGKYKTTLDLSNGFWAHSITPESYWLTAFTWLGQQYCWTRLPQGFLNSPALFNADVVDLLKEVPNVQVYVDDIYISHDDPREHLEQLEKVFSLLLNAGYVVSLKKSEIAQHEVEFLGFNITKEGRGLTETFKQKLLNITPPRDLKQLQSILGLLNFARNFIPNFSELVKPLYNIIATAPGKYITWTTDNSQQLQNIISMLNSAENLEERNPEVRLIMKVNTSPSAGYIRFYNEFAKRPIMYLNYVYTKAEVKFTNTEKLLTTIHKGLIKALDLGMGQEILVYSPIVSMTKIQKTPLPERKALPIRWITWMSYLEDPRIQFHYDKTLPELQQVPTVTDDIIAKIKHPSEFSMVFYTDGSAIKHPNVNKSHNAGMGIAQVQFKPEFTVINTWSIPLGDHTAQLAEVAAVEFACKKALKIDGPVLIVTDSFYVAESVNKELPYWQSNGFFNNKKKPLKHVSKWKSIADCIQLKPDIIIIHEKGHQPTASTFHTEGNNLADKLATQGSYVVNAGKRTADGSEFEKRTADGSEFESPKKKAKVE

SEQ ID NO: 7520 - protein, 2017 aa, synthetic construct
MPAAKRVKLDGGDKKYSIGLDIGTNSVGWAVITDEYKVPSKKFKVLGNTDRHSIKKNLIGALLFDSGETAEATRLKRTARRRYTRRKNRICYLQEIFSNEMAKVDDSFFHRLEESFLVEEDKKHERHPIFGNIVDEVAYHEKYPTIYHLRKKLVDSTDKADLRLIYLALAHMIKFRGHFLIEGDLNPDNSDVDKLFIQLVQTYNQLFEENPINASGVDAKAILSARLSKSRRLENLIAQLPGEKKNGLFGNLIALSLGLTPNFKSNFDLAEDAKLQLSKDTYDDDLDNLLAQIGDQYADLFLAAKNLSDAILLSDILRVNTEITKAPLSASMIKRYDEHHQDLTLLKALVRQQLPEKYKEIFFDQSKNGYAGYIDGGASQEEFYKFIKPILEKMDGTEELLVKLNREDLLRKQRTFDNGSIPHQIHLGELHAILRRQEDFYPFLKDNREKIEKILTFRIPYYVGPLARGNSRFAWMTRKSEETITPWNFEEVVDKGASAQSFIERMTNFDKNLPNEKVLPKHSLLYEYFTVYNELTKVKYVTEGMRKPAFLSGEQKKAIVDLLFKTNRKVTVKQLKEDYFKKIECFDSVEISGVEDRFNASLGTYHDLLKIIKDKDFLDNEENEDILEDIVLTLTLFEDREMIEERLKTYAHLFDDKVMKQLKRRRYTGWGRLSRKLINGIRDKQSGKTILDFLKSDGFANRNFMQLIHDDSLTFKEDIQKAQVSGQGDSLHEHIANLAGSPAIKKGILQTVKVVDELVKVMGRHKPENIVIEMARENQTTQKGQKNSRERMKRIEEGIKELGSQILKEHPVENTQLQNEKLYLYYLQNGRDMYVDQELDINRLSDYDVDHIVPQSFLKDDSIDNKVLTRSDKARGKSDNVPSEEVVKKMKNYWRQLLNAKLITQRKFDNLTKAERGGLSELDKAGFIKRQLVETRQITKHVAQILDSRMNTKYDENDKLIREVKVITLKSKLVSDFRKDFQFYKVREINNYHHAHDAYLNAVVGTALIKKYPKLESEFVYGDYKVYDVRKMIAKSEQEIGKATAKYFFYSNIMNFFKTEITLANGEIRKRPLIETNGETGEIVWDKGRDFATVRKVLSMPQVNIVKKTEVQTGGFSKESILPKRNSDKLIARKKDWDPKKYGGFDSPTVAYSVLVVAKVEKGKSKKLKSVKELLGITIMERSSFEKNPIDFLEAKGYKEVKKDLIIKLPKYSLFELENGRKRMLASAGELQKGNELALPSKYVNFLYLASHYEKLKGSPEDNEQKQLFVEQHKHYLDEIIEQISEFSKRVILADANLDKVLSAYNKHRDKPIREQAENIIHLFTLTNLGAPAAFKYFDTTIDRKRYTSTKEVLDATLIHQSITGLYETRIDLSQLGGDGGEAAAKPAPGGGGGPRSRAIDIPVPHADKISWKITDPVWVDQWPLTYEKTLAAIALVQEQLAAGHIEPTNSPWNTPIFIIKKKSGSWRLLQDLRAVNKVMVPMGALQPGLPSPVAPPLNYHKIVIDLKDCFFTIPLHPEDRPYFAFSVPQINFQSPMPRYQWKVLPQGMANSPTLCQKFVAAAIAPVRSQWPEAYILHYMDDILLACDSAEAAKACYAHIISCLTSYGLKIAPDKVQVSEPFSYLGFELHHQQVFTPRVCLKTDHLKTLNDFQKLLGDIQWLRPYLKLPTSALVPLNNILKPDPNPLSVRALTPEAKQSLALINKAIQNQSVQQISYNLPLVLLLLPTPHTPTAVFWQPNGTDPTKNGSPLLWLHLPASPSKVLLTYPSLLAMLIIKGRYTGRQLFGRDPHSIIIPYTQDQLTWLLQTSDEWAIALSSFTGDIDNHYPSDPVIQFAKLHQFIFPKITKCAPIPQATLVFTDGSSNGIAAYVIDNQPISIKSPYLSAQLVELYAILQVFTVLAHQPFNLYTDSAYIAQSVPLLETVPFIKSSTNATPLFSKLQQLILNRQHPFFIGHLRAHLNLPGPLAEGNALADAATQIFPIISDAGKRTADGSEFEKRTADGSEFESPKKKAKVE

SEQ ID NO: 7521 - protein, 2094 aa, synthetic construct
MPAAKRVKLDGGDKKYSIGLDIGTNSVGWAVITDEYKVPSKKFKVLGNTDRHSIKKNLIGALLFDSGETAEATRLKRTARRRYTRRKNRICYLQEIFSNEMAKVDDSFFHRLEESFLVEEDKKHERHPIFGNIVDEVAYHEKYPTIYHLRKKLVDSTDKADLRLIYLALAHMIKFRGHFLIEGDLNPDNSDVDKLFIQLVQTYNQLFEENPINASGVDAKAILSARLSKSRRLENLIAQLPGEKKNGLFGNLIALSLGLTPNFKSNFDLAEDAKLQLSKDTYDDDLDNLLAQIGDQYADLFLAAKNLSDAILLSDILRVNTEITKAPLSASMIKRYDEHHQDLTLLKALVRQQLPEKYKEIFFDQSKNGYAGYIDGGASQEEFYKFIKPILEKMDGTEELLVKLNREDLLRKQRTFDNGSIPHQIHLGELHAILRRQEDFYPFLKDNREKIEKILTFRIPYYVGPLARGNSRFAWMTRKSEETITPWNFEEVVDKGASAQSFIERMTNFDKNLPNEKVLPKHSLLYEYFTVYNELTKVKYVTEGMRKPAFLSGEQKKAIVDLLFKTNRKVTVKQLKEDYFKKIECFDSVEISGVEDRFNASLGTYHDLLKIIKDKDFLDNEENEDILEDIVLTLTLFEDREMIEERLKTYAHLFDDKVMKQLKRRRYTGWGRLSRKLINGIRDKQSGKTILDFLKSDGFANRNFMQLIHDDSLTFKEDIQKAQVSGQGDSLHEHIANLAGSPAIKKGILQTVKVVDELVKVMGRHKPENIVIEMARENQTTQKGQKNSRERMKRIEEGIKELGSQILKEHPVENTQLQNEKLYLYYLQNGRDMYVDQELDINRLSDYDVDHIVPQSFLKDDSIDNKVLTRSDKARGKSDNVPSEEVVKKMKNYWRQLLNAKLITQRKFDNLTKAERGGLSELDKAGFIKRQLVETRQITKHVAQILDSRMNTKYDENDKLIREVKVITLKSKLVSDFRKDFQFYKVREINNYHHAHDAYLNAVVGTALIKKYPKLESEFVYGDYKVYDVRKMIAKSEQEIGKATAKYFFYSNIMNFFKTEITLANGEIRKRPLIETNGETGEIVWDKGRDFATVRKVLSMPQVNIVKKTEVQTGGFSKESILPKRNSDKLIARKKDWDPKKYGGFDSPTVAYSVLVVAKVEKGKSKKLKSVKELLGITIMERSSFEKNPIDFLEAKGYKEVKKDLIIKLPKYSLFELENGRKRMLASAGELQKGNELALPSKYVNFLYLASHYEKLKGSPEDNEQKQLFVEQHKHYLDEIIEQISEFSKRVILADANLDKVLSAYNKHRDKPIREQAENIIHLFTLTNLGAPAAFKYFDTTIDRKRYTSTKEVLDATLIHQSITGLYETRIDLSQLGGDGGEAAAKPAPGGGGGVLNLEEEYRLHEKPVPSSIDPSWLQLFPTVWAERAGMGLANQVPPVVVELRSGASPVAVRQYPMSKEAREGIRPHIQRFLDLGVLVPCQSPWNTPLLPVKKPGTNDYRPVQDLREINKRVQDIHPTVPNPYNLLSSLPPSHTWYSVLDLKDAFFCLKLHPNSQPLFAFEWRDPEKGNTGQLTWTRLPQGFKNSPTLFNEALHRDLAPFRALNPQVVLLQYVDDLLVAAPTYRDCKEGTQKLLQELSKLGYRVSAKKAQLCQKEVTYLGYLLKEGKRWLTPARKATVMKIPPPTTPRQVREFLGKAGFCRLFIPGFASLAAPLYPLTKPSIPFIWTEEHQKAFDRIKEALLSAPALALPDLTKPFTLYVDERAGVARGVLTQTLGPWRRPVAYLSKKLDPVASGWPTCLKAVAAVALLLKDADKLTLGQNVTVIASHSLESIVRQPPDRWMTNARMTHYQSLLLNERVSFAPPAVLNPATLLPVESEATPVHRCSEILAEETGTRRDLKDQPLPGVPAWYTDGSSFIAEGKRRAGAAIVDGKRTVWASSLPEGTSAQKAELVALTQALRLAEGKDINIYTDSRYAFATAHIHGAIYKQRGWLTSAGKDIKNKEEILALLEAIHLPKRVAIIHCPGHQKGNDPVATGNRRADEAAKQAALSTRVLAETTKPAGKRTADGSEFEKRTADGSEFESPKKKAKVE

SEQ ID NO: 7522 - protein, 2096 aa, synthetic construct
MPAAKRVKLDGGDKKYSIGLDIGTNSVGWAVITDEYKVPSKKFKVLGNTDRHSIKKNLIGALLFDSGETAEATRLKRTARRRYTRRKNRICYLQEIFSNEMAKVDDSFFHRLEESFLVEEDKKHERHPIFGNIVDEVAYHEKYPTIYHLRKKLVDSTDKADLRLIYLALAHMIKFRGHFLIEGDLNPDNSDVDKLFIQLVQTYNQLFEENPINASGVDAKAILSARLSKSRRLENLIAQLPGEKKNGLFGNLIALSLGLTPNFKSNFDLAEDAKLQLSKDTYDDDLDNLLAQIGDQYADLFLAAKNLSDAILLSDILRVNTEITKAPLSASMIKRYDEHHQDLTLLKALVRQQLPEKYKEIFFDQSKNGYAGYIDGGASQEEFYKFIKPILEKMDGTEELLVKLNREDLLRKQRTFDNGSIPHQIHLGELHAILRRQEDFYPFLKDNREKIEKILTFRIPYYVGPLARGNSRFAWMTRKSEETITPWNFEEVVDKGASAQSFIERMTNFDKNLPNEKVLPKHSLLYEYFTVYNELTKVKYVTEGMRKPAFLSGEQKKAIVDLLFKTNRKVTVKQLKEDYFKKIECFDSVEISGVEDRFNASLGTYHDLLKIIKDKDFLDNEENEDILEDIVLTLTLFEDREMIEERLKTYAHLFDDKVMKQLKRRRYTGWGRLSRKLINGIRDKQSGKTILDFLKSDGFANRNFMQLIHDDSLTFKEDIQKAQVSGQGDSLHEHIANLAGSPAIKKGILQTVKVVDELVKVMGRHKPENIVIEMARENQTTQKGQKNSRERMKRIEEGIKELGSQILKEHPVENTQLQNEKLYLYYLQNGRDMYVDQELDINRLSDYDVDHIVPQSFLKDDSIDNKVLTRSDKARGKSDNVPSEEVVKKMKNYWRQLLNAKLITQRKFDNLTKAERGGLSELDKAGFIKRQLVETRQITKHVAQILDSRMNTKYDENDKLIREVKVITLKSKLVSDFRKDFQFYKVREINNYHHAHDAYLNAVVGTALIKKYPKLESEFVYGDYKVYDVRKMIAKSEQEIGKATAKYFFYSNIMNFFKTEITLANGEIRKRPLIETNGETGEIVWDKGRDFATVRKVLSMPQVNIVKKTEVQTGGFSKESILPKRNSDKLIARKKDWDPKKYGGFDSPTVAYSVLVVAKVEKGKSKKLKSVKELLGITIMERSSFEKNPIDFLEAKGYKEVKKDLIIKLPKYSLFELENGRKRMLASAGELQKGNELALPSKYVNFLYLASHYEKLKGSPEDNEQKQLFVEQHKHYLDEIIEQISEFSKRVILADANLDKVLSAYNKHRDKPIREQAENIIHLFTLTNLGAPAAFKYFDTTIDRKRYTSTKEVLDATLIHQSITGLYETRIDLSQLGGDGGEAAAKPAPGGGGGTLNIEDEYRLHETSKEPDVPLGSTWLSDFPQAWAETGGMGLAVRQAPLIIPLKATSTPVSIKQYPMSQEARLGIKPHIQRLLDQGILVPCQSPWNTPLLPVKKPGTNDYRPVQDLREVNKRVEDIHPTVPNPYNLLSGLPPSHQWYTVLDLKDAFFCLRLHPTSQPLFAFEWRDPEMGISGQLTWTRLPQGFKNSPTLFNEALHRDLADFRIQHPDLILLQYVDDLLLAATSEQDCQRGTRALLQTLGNLGYRASAKKAQICQKQVKYLGYLLKEGQRWLTEARKETVMGQPTPKTPRQLREFLGTAGFCRLWIPGFAEMAAPLYPLTKPGTLFNWGPDQQKAYQEIKQALLTAPALGLPDLTKPFELFVDEKQGYAKGVLTQKLGPWRRPVAYLSKKLDPVAAGWPPCLRMVAAIAVLTKDAGKLTMGQPLVILAPHAVEALVKQPPDRWLSNARMTHYQAMLLDTDRVQFGPVVALNPATLLPLPEKEAPHDCLEILAETHGTRPDLTDQPIPDADYTWYTDGSSFLQEGQRRAGAAVTTETEVIWARALPAGTSAQRAELIALTQALKMAEGKKLNVYTDSRYAFATAHVHGEIYRRRGWLTSEGREIKNKNEILALLKALFLPKRLSIIHCPGHQKGNSAEARGNRMADQAAREAAMKAVLETSTLLAGKRTADGSEFEKRTADGSEFESPKKKAKVE

SEQ ID NO: 7523 - protein, 2096 aa, synthetic construct
MPAAKRVKLDGGDKKYSIGLDIGTNSVGWAVITDEYKVPSKKFKVLGNTDRHSIKKNLIGALLFDSGETAEATRLKRTARRRYTRRKNRICYLQEIFSNEMAKVDDSFFHRLEESFLVEEDKKHERHPIFGNIVDEVAYHEKYPTIYHLRKKLVDSTDKADLRLIYLALAHMIKFRGHFLIEGDLNPDNSDVDKLFIQLVQTYNQLFEENPINASGVDAKAILSARLSKSRRLENLIAQLPGEKKNGLFGNLIALSLGLTPNFKSNFDLAEDAKLQLSKDTYDDDLDNLLAQIGDQYADLFLAAKNLSDAILLSDILRVNTEITKAPLSASMIKRYDEHHQDLTLLKALVRQQLPEKYKEIFFDQSKNGYAGYIDGGASQEEFYKFIKPILEKMDGTEELLVKLNREDLLRKQRTFDNGSIPHQIHLGELHAILRRQEDFYPFLKDNREKIEKILTFRIPYYVGPLARGNSRFAWMTRKSEETITPWNFEEVVDKGASAQSFIERMTNFDKNLPNEKVLPKHSLLYEYFTVYNELTKVKYVTEGMRKPAFLSGEQKKAIVDLLFKTNRKVTVKQLKEDYFKKIECFDSVEISGVEDRFNASLGTYHDLLKIIKDKDFLDNEENEDILEDIVLTLTLFEDREMIEERLKTYAHLFDDKVMKQLKRRRYTGWGRLSRKLINGIRDKQSGKTILDFLKSDGFANRNFMQLIHDDSLTFKEDIQKAQVSGQGDSLHEHIANLAGSPAIKKGILQTVKVVDELVKVMGRHKPENIVIEMARENQTTQKGQKNSRERMKRIEEGIKELGSQILKEHPVENTQLQNEKLYLYYLQNGRDMYVDQELDINRLSDYDVDHIVPQSFLKDDSIDNKVLTRSDKARGKSDNVPSEEVVKKMKNYWRQLLNAKLITQRKFDNLTKAERGGLSELDKAGFIKRQLVETRQITKHVAQILDSRMNTKYDENDKLIREVKVITLKSKLVSDFRKDFQFYKVREINNYHHAHDAYLNAVVGTALIKKYPKLESEFVYGDYKVYDVRKMIAKSEQEIGKATAKYFFYSNIMNFFKTEITLANGEIRKRPLIETNGETGEIVWDKGRDFATVRKVLSMPQVNIVKKTEVQTGGFSKESILPKRNSDKLIARKKDWDPKKYGGFDSPTVAYSVLVVAKVEKGKSKKLKSVKELLGITIMERSSFEKNPIDFLEAKGYKEVKKDLIIKLPKYSLFELENGRKRMLASAGELQKGNELALPSKYVNFLYLASHYEKLKGSPEDNEQKQLFVEQHKHYLDEIIEQISEFSKRVILADANLDKVLSAYNKHRDKPIREQAENIIHLFTLTNLGAPAAFKYFDTTIDRKRYTSTKEVLDATLIHQSITGLYETRIDLSQLGGDGGEAAAKPAPGGGGGTLNIEDEYRLHETSKEPDVPLGSTWLSDFPQAWAETGGMGLAVRQAPLIIPLKATSTPVSIKQYPMSQEARLGIKPHIQRLLDQGILVPCQSPWNTPLLPVKKPGTNDYRPVQDLREVNKRVEDIHPTVPNPYNLLSGLPPSHQWYTVLDLKDAFFCLRLHPTSQPLFAFEWRDPEMGISGQLTWTRLPQGFKNSPTLFNEALHRDLADFRIQHPDLILLQYVDDLLLAATSEQDCQRGTRALLQTLGNLGYRASAKKAQICQKQVKYLGYLLKEGQRWLTEARKETVMGQPTPKTPRQLREFLGKAGFCRLFIPGFAEMAAPLYPLTKPGTLFNWGPDQQKAYQEIKQALLTAPALGLPDLTKPFELFVDEKQGYAKGVLTQKLGPWRRPVAYLSKKLDPVAAGWPPCLRMVAAIAVLTKDAGKLTMGQPLVILAPHAVEALVKQPPDRWLSNARMTHYQAMLLDTDRVQFGPVVALNPATLLPLPEKEAPHDCLEILAETHGTRPDLTDQPIPDADYTWYTDGSSFLQEGQRRAGAAVTTETEVIWARALPAGTSAQRAELIALTQALKMAEGKKLNVYTDSRYAFATAHVHGEIYRRRGWLTSEGREIKNKNEILALLKALFLPKRLSIIHCPGHQKGNSAEARGNRMADQAAREAAMKAVLETSTLLAGKRTADGSEFEKRTADGSEFESPKKKAKVE

SEQ ID NO: 7524 - protein, 2098 aa, synthetic construct
MPAAKRVKLDGGDKKYSIGLDIGTNSVGWAVITDEYKVPSKKFKVLGNTDRHSIKKNLIGALLFDSGETAEATRLKRTARRRYTRRKNRICYLQEIFSNEMAKVDDSFFHRLEESFLVEEDKKHERHPIFGNIVDEVAYHEKYPTIYHLRKKLVDSTDKADLRLIYLALAHMIKFRGHFLIEGDLNPDNSDVDKLFIQLVQTYNQLFEENPINASGVDAKAILSARLSKSRRLENLIAQLPGEKKNGLFGNLIALSLGLTPNFKSNFDLAEDAKLQLSKDTYDDDLDNLLAQIGDQYADLFLAAKNLSDAILLSDILRVNTEITKAPLSASMIKRYDEHHQDLTLLKALVRQQLPEKYKEIFFDQSKNGYAGYIDGGASQEEFYKFIKPILEKMDGTEELLVKLNREDLLRKQRTFDNGSIPHQIHLGELHAILRRQEDFYPFLKDNREKIEKILTFRIPYYVGPLARGNSRFAWMTRKSEETITPWNFEEVVDKGASAQSFIERMTNFDKNLPNEKVLPKHSLLYEYFTVYNELTKVKYVTEGMRKPAFLSGEQKKAIVDLLFKTNRKVTVKQLKEDYFKKIECFDSVEISGVEDRFNASLGTYHDLLKIIKDKDFLDNEENEDILEDIVLTLTLFEDREMIEERLKTYAHLFDDKVMKQLKRRRYTGWGRLSRKLINGIRDKQSGKTILDFLKSDGFANRNFMQLIHDDSLTFKEDIQKAQVSGQGDSLHEHIANLAGSPAIKKGILQTVKVVDELVKVMGRHKPENIVIEMARENQTTQKGQKNSRERMKRIEEGIKELGSQILKEHPVENTQLQNEKLYLYYLQNGRDMYVDQELDINRLSDYDVDHIVPQSFLKDDSIDNKVLTRSDKARGKSDNVPSEEVVKKMKNYWRQLLNAKLITQRKFDNLTKAERGGLSELDKAGFIKRQLVETRQITKHVAQILDSRMNTKYDENDKLIREVKVITLKSKLVSDFRKDFQFYKVREINNYHHAHDAYLNAVVGTALIKKYPKLESEFVYGDYKVYDVRKMIAKSEQEIGKATAKYFFYSNIMNFFKTEITLANGEIRKRPLIETNGETGEIVWDKGRDFATVRKVLSMPQVNIVKKTEVQTGGFSKESILPKRNSDKLIARKKDWDPKKYGGFDSPTVAYSVLVVAKVEKGKSKKLKSVKELLGITIMERSSFEKNPIDFLEAKGYKEVKKDLIIKLPKYSLFELENGRKRMLASAGELQKGNELALPSKYVNFLYLASHYEKLKGSPEDNEQKQLFVEQHKHYLDEIIEQISEFSKRVILADANLDKVLSAYNKHRDKPIREQAENIIHLFTLTNLGAPAAFKYFDTTIDRKRYTSTKEVLDATLIHQSITGLYETRIDLSQLGGDGGPAPGGGEAAAKGGTAPLEEEYRLFLEAPIQNVTLLEQWKREIPKVWAEINPPGLASTQAPIHVQLLSTALPVRVRQYPITLEAKRSLRETIRKFRAAGILRPVHSPWNTPLLPVRKSGTSEYRMVQDLREVNKRVETIHPTVPNPYTLLSLLPPDRIWYSVLDLKDAFFCIPLAPESQLIFAFEWADAEEGESGQLTWTRLPQGFKNSPTLFDEALNRDLQGFRLDHPSVSLLQYVDDLLIAADTQAACLSATRDLLMTLAELGYRVSGKKAQLCQEEVTYLGFKIHKGSRSLSNSRTQAILQIPVPKTKRQVREFLGTIGYCRLWIPGFAELAQPLYAATRGGNDPLVWGEKEEEAFQSLKLALTQPPALALPSLDKPFQLFVEETSGAAKGVLTQALGPWKRPVAYLSKRLDPVAAGWPRCLRAIAAAALLTREASKLTFGQDIEITSSHNLESLLRSPPDKWLTNARITQYQVLLLDPPRVRFKQTAALNPATLLPETDDTLPIHHCLDTLDSLTSTRPDLTDQPLAQAEATLFTDGSSYIRDGKRYAGAAVVTLDSVIWAEPLPIGTSAQKAELIALTKALEWSKDKSVNIYTDSRYAFATLHVHGMIYRERGLLTAGGKAIKNAPEILALLTAVWLPKRVAVMHCKGHQKDDAPTSTGNRRADEVAREVAIRPLSTQATISAGKRTADGSEFEKRTADGSEFESPKKKAKVE

SEQ ID NO: 7525 - protein, 2098 aa, synthetic construct
MPAAKRVKLDGGDKKYSIGLDIGTNSVGWAVITDEYKVPSKKFKVLGNTDRHSIKKNLIGALLFDSGETAEATRLKRTARRRYTRRKNRICYLQEIFSNEMAKVDDSFFHRLEESFLVEEDKKHERHPIFGNIVDEVAYHEKYPTIYHLRKKLVDSTDKADLRLIYLALAHMIKFRGHFLIEGDLNPDNSDVDKLFIQLVQTYNQLFEENPINASGVDAKAILSARLSKSRRLENLIAQLPGEKKNGLFGNLIALSLGLTPNFKSNFDLAEDAKLQLSKDTYDDDLDNLLAQIGDQYADLFLAAKNLSDAILLSDILRVNTEITKAPLSASMIKRYDEHHQDLTLLKALVRQQLPEKYKEIFFDQSKNGYAGYIDGGASQEEFYKFIKPILEKMDGTEELLVKLNREDLLRKQRTFDNGSIPHQIHLGELHAILRRQEDFYPFLKDNREKIEKILTFRIPYYVGPLARGNSRFAWMTRKSEETITPWNFEEVVDKGASAQSFIERMTNFDKNLPNEKVLPKHSLLYEYFTVYNELTKVKYVTEGMRKPAFLSGEQKKAIVDLLFKTNRKVTVKQLKEDYFKKIECFDSVEISGVEDRFNASLGTYHDLLKIIKDKDFLDNEENEDILEDIVLTLTLFEDREMIEERLKTYAHLFDDKVMKQLKRRRYTGWGRLSRKLINGIRDKQSGKTILDFLKSDGFANRNFMQLIHDDSLTFKEDIQKAQVSGQGDSLHEHIANLAGSPAIKKGILQTVKVVDELVKVMGRHKPENIVIEMARENQTTQKGQKNSRERMKRIEEGIKELGSQILKEHPVENTQLQNEKLYLYYLQNGRDMYVDQELDINRLSDYDVDHIVPQSFLKDDSIDNKVLTRSDKARGKSDNVPSEEVVKKMKNYWRQLLNAKLITQRKFDNLTKAERGGLSELDKAGFIKRQLVETRQITKHVAQILDSRMNTKYDENDKLIREVKVITLKSKLVSDFRKDFQFYKVREINNYHHAHDAYLNAVVGTALIKKYPKLESEFVYGDYKVYDVRKMIAKSEQEIGKATAKYFFYSNIMNFFKTEITLANGEIRKRPLIETNGETGEIVWDKGRDFATVRKVLSMPQVNIVKKTEVQTGGFSKESILPKRNSDKLIARKKDWDPKKYGGFDSPTVAYSVLVVAKVEKGKSKKLKSVKELLGITIMERSSFEKNPIDFLEAKGYKEVKKDLIIKLPKYSLFELENGRKRMLASAGELQKGNELALPSKYVNFLYLASHYEKLKGSPEDNEQKQLFVEQHKHYLDEIIEQISEFSKRVILADANLDKVLSAYNKHRDKPIREQAENIIHLFTLTNLGAPAAFKYFDTTIDRKRYTSTKEVLDATLIHQSITGLYETRIDLSQLGGDGGPAPGGGEAAAKGGTAPLEEEYRLFLEAPIQNVTLLEQWKREIPKVWAEINPPGLASTQAPIHVQLLSTALPVRVRQYPITLEAKRSLRETIRKFRAAGILRPVHSPWNTPLLPVRKSGTSEYRMVQDLREVNKRVETIHPTVPNPYTLLSLLPPDRIWYSVLDLKDAFFCIPLAPESQLIFAFEWADAEEGESGQLTWTRLPQGFKNSPTLFNEALNRDLQGFRLDHPSVSLLQYVDDLLIAADTQAACLSATRDLLMTLAELGYRVSGKKAQLCQEEVTYLGFKIHKGSRSLSNSRTQAILQIPVPKTKRQVREFLGTIGYCRLWIPGFAELAQPLYAATRPGNDPLVWGEKEEEAFQSLKLALTQPPALALPSLDKPFQLFVEETSGAAKGVLTQALGPWKRPVAYLSKRLDPVAAGWPRCLRAIAAAALLTREASKLTFGQDIEITSSHNLESLLRSPPDKWLTNARITQYQVLLLDPPRVRFKQTAALNPATLLPETDDTLPIHHCLDTLDSLTSTRPDLTDQPLAQAEATLFTDGSSYIRDGKRYAGAAVVTLDSVIWAEPLPIGTSAQKAELIALTKALEWSKDKSVNIYTDSRYAFATLHVHGMIYRERGWLTAGGKAIKNAPEILALLTAVWLPKRVAVMHCKGHQKDDAPTSTGNRRADEVAREVAIRPLSTQATISAGKRTADGSEFEKRTADGSEFESPKKKAKVE

SEQ ID NO: 7526 - protein, 2098 aa, synthetic construct
MPAAKRVKLDGGDKKYSIGLDIGTNSVGWAVITDEYKVPSKKFKVLGNTDRHSIKKNLIGALLFDSGETAEATRLKRTARRRYTRRKNRICYLQEIFSNEMAKVDDSFFHRLEESFLVEEDKKHERHPIFGNIVDEVAYHEKYPTIYHLRKKLVDSTDKADLRLIYLALAHMIKFRGHFLIEGDLNPDNSDVDKLFIQLVQTYNQLFEENPINASGVDAKAILSARLSKSRRLENLIAQLPGEKKNGLFGNLIALSLGLTPNFKSNFDLAEDAKLQLSKDTYDDDLDNLLAQIGDQYADLFLAAKNLSDAILLSDILRVNTEITKAPLSASMIKRYDEHHQDLTLLKALVRQQLPEKYKEIFFDQSKNGYAGYIDGGASQEEFYKFIKPILEKMDGTEELLVKLNREDLLRKQRTFDNGSIPHQIHLGELHAILRRQEDFYPFLKDNREKIEKILTFRIPYYVGPLARGNSRFAWMTRKSEETITPWNFEEVVDKGASAQSFIERMTNFDKNLPNEKVLPKHSLLYEYFTVYNELTKVKYVTEGMRKPAFLSGEQKKAIVDLLFKTNRKVTVKQLKEDYFKKIECFDSVEISGVEDRFNASLGTYHDLLKIIKDKDFLDNEENEDILEDIVLTLTLFEDREMIEERLKTYAHLFDDKVMKQLKRRRYTGWGRLSRKLINGIRDKQSGKTILDFLKSDGFANRNFMQLIHDDSLTFKEDIQKAQVSGQGDSLHEHIANLAGSPAIKKGILQTVKVVDELVKVMGRHKPENIVIEMARENQTTQKGQKNSRERMKRIEEGIKELGSQILKEHPVENTQLQNEKLYLYYLQNGRDMYVDQELDINRLSDYDVDHIVPQSFLKDDSIDNKVLTRSDKARGKSDNVPSEEVVKKMKNYWRQLLNAKLITQRKFDNLTKAERGGLSELDKAGFIKRQLVETRQITKHVAQILDSRMNTKYDENDKLIREVKVITLKSKLVSDFRKDFQFYKVREINNYHHAHDAYLNAVVGTALIKKYPKLESEFVYGDYKVYDVRKMIAKSEQEIGKATAKYFFYSNIMNFFKTEITLANGEIRKRPLIETNGETGEIVWDKGRDFATVRKVLSMPQVNIVKKTEVQTGGFSKESILPKRNSDKLIARKKDWDPKKYGGFDSPTVAYSVLVVAKVEKGKSKKLKSVKELLGITIMERSSFEKNPIDFLEAKGYKEVKKDLIIKLPKYSLFELENGRKRMLASAGELQKGNELALPSKYVNFLYLASHYEKLKGSPEDNEQKQLFVEQHKHYLDEIIEQISEFSKRVILADANLDKVLSAYNKHRDKPIREQAENIIHLFTLTNLGAPAAFKYFDTTIDRKRYTSTKEVLDATLIHQSITGLYETRIDLSQLGGDGGPAPGGGEAAAKGGTAPLEEEYRLFLEAPIQNVTLLEQWKREIPKVWAEINPPGLASTQAPIHVQLLSTALPVRVRQYPITLEAKRSLRETIRKFRAAGILRPVHSPWNTPLLPVRKSGTSEYRMVQDLREVNKRVETIHPTVPNPYTLLSLLPPDRIWYSVLDLKDAFFCIPLAPESQLIFAFEWADAEEGESGQLTWTRLPQGFKNSPTLFNEALNRDLQGFRLDHPSVSLLQYVDDLLIAADTQAACLSATRDLLMTLAELGYRVSGKKAQLCQEEVTYLGFKIHKGSRSLSNSRTQAILQIPVPKTKRQVREFLGKIGYCRLFIPGFAELAQPLYAATRPGNDPLVWGEKEEEAFQSLKLALTQPPALALPSLDKPFQLFVEETSGAAKGVLTQALGPWKRPVAYLSKRLDPVAAGWPRCLRAIAAAALLTREASKLTFGQDIEITSSHNLESLLRSPPDKWLTNARITQYQVLLLDPPRVRFKQTAALNPATLLPETDDTLPIHHCLDTLDSLTSTRPDLTDQPLAQAEATLFTDGSSYIRDGKRYAGAAVVTLDSVIWAEPLPIGTSAQKAELIALTKALEWSKDKSVNIYTDSRYAFATLHVHGMIYRERGWLTAGGKAIKNAPEILALLTAVWLPKRVAVMHCKGHQKDDAPTSTGNRRADEVAREVAIRPLSTQATISAGKRTADGSEFEKRTADGSEFESPKKKAKVE

SEQ ID NO: 7527 - protein, 2173 aa, synthetic construct
MPAAKRVKLDGGDKKYSIGLDIGTNSVGWAVITDEYKVPSKKFKVLGNTDRHSIKKNLIGALLFDSGETAEATRLKRTARRRYTRRKNRICYLQEIFSNEMAKVDDSFFHRLEESFLVEEDKKHERHPIFGNIVDEVAYHEKYPTIYHLRKKLVDSTDKADLRLIYLALAHMIKFRGHFLIEGDLNPDNSDVDKLFIQLVQTYNQLFEENPINASGVDAKAILSARLSKSRRLENLIAQLPGEKKNGLFGNLIALSLGLTPNFKSNFDLAEDAKLQLSKDTYDDDLDNLLAQIGDQYADLFLAAKNLSDAILLSDILRVNTEITKAPLSASMIKRYDEHHQDLTLLKALVRQQLPEKYKEIFFDQSKNGYAGYIDGGASQEEFYKFIKPILEKMDGTEELLVKLNREDLLRKQRTFDNGSIPHQIHLGELHAILRRQEDFYPFLKDNREKIEKILTFRIPYYVGPLARGNSRFAWMTRKSEETITPWNFEEVVDKGASAQSFIERMTNFDKNLPNEKVLPKHSLLYEYFTVYNELTKVKYVTEGMRKPAFLSGEQKKAIVDLLFKTNRKVTVKQLKEDYFKKIECFDSVEISGVEDRFNASLGTYHDLLKIIKDKDFLDNEENEDILEDIVLTLTLFEDREMIEERLKTYAHLFDDKVMKQLKRRRYTGWGRLSRKLINGIRDKQSGKTILDFLKSDGFANRNFMQLIHDDSLTFKEDIQKAQVSGQGDSLHEHIANLAGSPAIKKGILQTVKVVDELVKVMGRHKPENIVIEMARENQTTQKGQKNSRERMKRIEEGIKELGSQILKEHPVENTQLQNEKLYLYYLQNGRDMYVDQELDINRLSDYDVDHIVPQSFLKDDSIDNKVLTRSDKARGKSDNVPSEEVVKKMKNYWRQLLNAKLITQRKFDNLTKAERGGLSELDKAGFIKRQLVETRQITKHVAQILDSRMNTKYDENDKLIREVKVITLKSKLVSDFRKDFQFYKVREINNYHHAHDAYLNAVVGTALIKKYPKLESEFVYGDYKVYDVRKMIAKSEQEIGKATAKYFFYSNIMNFFKTEITLANGEIRKRPLIETNGETGEIVWDKGRDFATVRKVLSMPQVNIVKKTEVQTGGFSKESILPKRNSDKLIARKKDWDPKKYGGFDSPTVAYSVLVVAKVEKGKSKKLKSVKELLGITIMERSSFEKNPIDFLEAKGYKEVKKDLIIKLPKYSLFELENGRKRMLASAGELQKGNELALPSKYVNFLYLASHYEKLKGSPEDNEQKQLFVEQHKHYLDEIIEQISEFSKRVILADANLDKVLSAYNKHRDKPIREQAENIIHLFTLTNLGAPAAFKYFDTTIDRKRYTSTKEVLDATLIHQSITGLYETRIDLSQLGGDGGPAPGGGEAAAKGGMDLLKPLTVERKGVKIKGYWNSQADITCVPKDLLQGEEPVRQQNVTTIHGTQEGDVYYVNLKIDGRRINTEVIGTTLDYAIITPGDVPWILKKPLELTIKLDLEEQQGTLLNNSILSKKGKEELKQLFEKYSALWQSWENQVGHRRIRPHKIATGTVKPTPQKQYHINPKAKPDIQIVINDLLKQGVLIQKESTMNTPVYPVPKPNGRWRMVLDYRAVNKVTPLIAVQNQHSYGILGSLFKGRYKTTIDLSNGFWAHPIVPEDYWITAFTWQGKQYCWTVLPQGFLNSPGLFTGDVVDLLQGIPNVEVYVDDVYISHDSEKEHLEYLDILFNRLKEAGYIISLKKSNIANSIVDFLGFQITNEGRGLTDTFKEKLENITAPTTLKQLQSILGLLNFARNFIPDFTELIAPLYALIPKSTKNYVPWQIEHSTTLETLITKLNGAEYLQGRKGDKTLIMKVNASYTTGYIRYYNEGEKKPISYVSIVFSKTELKFTELEKLLTTVHKGLLKALDLSMGQNIHVYSPIVSMQNIQKTPQTAKKALASRWLSWLSYLEDPRIRFFYDPQMPALKDLPAVDTGKDNKKHPSNFQHIFYTDGSAITSPTKEGHLNAGMGIVYFINKDGNLQKQQEWSISLGNHTAQFAEIAAFEFALKKCLPLGGNILVVTDSNYVAKAYNEELDVWASNGFVNNRKKPLKHISKWKSVADLKRLRPDVVVTHEPGHQKLDSSPHAYGNNLADQLATQASFKVHAGKRTADGSEFEKRTADGSEFESPKKKAKVE

SEQ ID NO: 7528 - protein, 2095 aa, synthetic construct
MPAAKRVKLDGGDKKYSIGLDIGTNSVGWAVITDEYKVPSKKFKVLGNTDRHSIKKNLIGALLFDSGETAEATRLKRTARRRYTRRKNRICYLQEIFSNEMAKVDDSFFHRLEESFLVEEDKKHERHPIFGNIVDEVAYHEKYPTIYHLRKKLVDSTDKADLRLIYLALAHMIKFRGHFLIEGDLNPDNSDVDKLFIQLVQTYNQLFEENPINASGVDAKAILSARLSKSRRLENLIAQLPGEKKNGLFGNLIALSLGLTPNFKSNFDLAEDAKLQLSKDTYDDDLDNLLAQIGDQYADLFLAAKNLSDAILLSDILRVNTEITKAPLSASMIKRYDEHHQDLTLLKALVRQQLPEKYKEIFFDQSKNGYAGYIDGGASQEEFYKFIKPILEKMDGTEELLVKLNREDLLRKQRTFDNGSIPHQIHLGELHAILRRQEDFYPFLKDNREKIEKILTFRIPYYVGPLARGNSRFAWMTRKSEETITPWNFEEVVDKGASAQSFIERMTNFDKNLPNEKVLPKHSLLYEYFTVYNELTKVKYVTEGMRKPAFLSGEQKKAIVDLLFKTNRKVTVKQLKEDYFKKIECFDSVEISGVEDRFNASLGTYHDLLKIIKDKDFLDNEENEDILEDIVLTLTLFEDREMIEERLKTYAHLFDDKVMKQLKRRRYTGWGRLSRKLINGIRDKQSGKTILDFLKSDGFANRNFMQLIHDDSLTFKEDIQKAQVSGQGDSLHEHIANLAGSPAIKKGILQTVKVVDELVKVMGRHKPENIVIEMARENQTTQKGQKNSRERMKRIEEGIKELGSQILKEHPVENTQLQNEKLYLYYLQNGRDMYVDQELDINRLSDYDVDHIVPQSFLKDDSIDNKVLTRSDKARGKSDNVPSEEVVKKMKNYWRQLLNAKLITQRKFDNLTKAERGGLSELDKAGFIKRQLVETRQITKHVAQILDSRMNTKYDENDKLIREVKVITLKSKLVSDFRKDFQFYKVREINNYHHAHDAYLNAVVGTALIKKYPKLESEFVYGDYKVYDVRKMIAKSEQEIGKATAKYFFYSNIMNFFKTEITLANGEIRKRPLIETNGETGEIVWDKGRDFATVRKVLSMPQVNIVKKTEVQTGGFSKESILPKRNSDKLIARKKDWDPKKYGGFDSPTVAYSVLVVAKVEKGKSKKLKSVKELLGITIMERSSFEKNPIDFLEAKGYKEVKKDLIIKLPKYSLFELENGRKRMLASAGELQKGNELALPSKYVNFLYLASHYEKLKGSPEDNEQKQLFVEQHKHYLDEIIEQISEFSKRVILADANLDKVLSAYNKHRDKPIREQAENIIHLFTLTNLGAPAAFKYFDTTIDRKRYTSTKEVLDATLIHQSITGLYETRIDLSQLGGDGGPAPGGGEAAAKGGTLQLEEEYRLFEPESTQKQEMDIWLKNFPQAWAETGGMGTAHCQAPVLIQLKATATPISIRQYPMPHEAYQGIKPHIRRMLDQGILKPCQSPWNTPLLPVKKPGTEDYRPVQDLREVNKRVEDIHPTVPNPYNLLSTLPPSHPWYTVLDLKDAFFCLRLHSESQLLFAFEWRDPEIGLSGQLTWTRLPQGFKNSPTLFNEALHSDLADFRVRYPALVLLQYVDDLLLAAATRTECLEGTKALLETLGNKGYRASAKKAQICLQEVTYLGYSLKDGQRWLTKARKEAILSIPVPKNSRQVREFLGTAGYCRLWIPGFAELAAPLYPLTRPGTLFQWGTEQQLAFEDIKKALLSSPALGLPDITKPFELFIDENSGFAKGVLVQKLGPWKRPVAYLSKKLDTVASGWPPCLRMVAAIAILVKDAGKLTLGQPLTILTSHPVEALVRQPPNKWLSNARMTHYQAMLLDAERVHFGPTVSLNPATLLPLPSGGNHHDCLQILAETHGTRPDLTDQPLPDADLTWYTDGSSFIRNGEREAGAAVTTESEVIWAAPLPPGTSAQRAELIALTQALKMAEGKKLTVYTDSRYAFATTHVHGEIYRRRGWLTSEGKEIKNKNEILALLEALFLPKRLSIIHCPGHQKGDSPQAKGNRLADDTAKKAATETHSSLTVLPAGKRTADGSEFEKRTADGSEFESPKKKAKVE

SEQ ID NO: 7529 - protein, 2094 aa, synthetic construct
MPAAKRVKLDGGDKKYSIGLDIGTNSVGWAVITDEYKVPSKKFKVLGNTDRHSIKKNLIGALLFDSGETAEATRLKRTARRRYTRRKNRICYLQEIFSNEMAKVDDSFFHRLEESFLVEEDKKHERHPIFGNIVDEVAYHEKYPTIYHLRKKLVDSTDKADLRLIYLALAHMIKFRGHFLIEGDLNPDNSDVDKLFIQLVQTYNQLFEENPINASGVDAKAILSARLSKSRRLENLIAQLPGEKKNGLFGNLIALSLGLTPNFKSNFDLAEDAKLQLSKDTYDDDLDNLLAQIGDQYADLFLAAKNLSDAILLSDILRVNTEITKAPLSASMIKRYDEHHQDLTLLKALVRQQLPEKYKEIFFDQSKNGYAGYIDGGASQEEFYKFIKPILEKMDGTEELLVKLNREDLLRKQRTFDNGSIPHQIHLGELHAILRRQEDFYPFLKDNREKIEKILTFRIPYYVGPLARGNSRFAWMTRKSEETITPWNFEEVVDKGASAQSFIERMTNFDKNLPNEKVLPKHSLLYEYFTVYNELTKVKYVTEGMRKPAFLSGEQKKAIVDLLFKTNRKVTVKQLKEDYFKKIECFDSVEISGVEDRFNASLGTYHDLLKIIKDKDFLDNEENEDILEDIVLTLTLFEDREMIEERLKTYAHLFDDKVMKQLKRRRYTGWGRLSRKLINGIRDKQSGKTILDFLKSDGFANRNFMQLIHDDSLTFKEDIQKAQVSGQGDSLHEHIANLAGSPAIKKGILQTVKVVDELVKVMGRHKPENIVIEMARENQTTQKGQKNSRERMKRIEEGIKELGSQILKEHPVENTQLQNEKLYLYYLQNGRDMYVDQELDINRLSDYDVDHIVPQSFLKDDSIDNKVLTRSDKARGKSDNVPSEEVVKKMKNYWRQLLNAKLITQRKFDNLTKAERGGLSELDKAGFIKRQLVETRQITKHVAQILDSRMNTKYDENDKLIREVKVITLKSKLVSDFRKDFQFYKVREINNYHHAHDAYLNAVVGTALIKKYPKLESEFVYGDYKVYDVRKMIAKSEQEIGKATAKYFFYSNIMNFFKTEITLANGEIRKRPLIETNGETGEIVWDKGRDFATVRKVLSMPQVNIVKKTEVQTGGFSKESILPKRNSDKLIARKKDWDPKKYGGFDSPTVAYSVLVVAKVEKGKSKKLKSVKELLGITIMERSSFEKNPIDFLEAKGYKEVKKDLIIKLPKYSLFELENGRKRMLASAGELQKGNELALPSKYVNFLYLASHYEKLKGSPEDNEQKQLFVEQHKHYLDEIIEQISEFSKRVILADANLDKVLSAYNKHRDKPIREQAENIIHLFTLTNLGAPAAFKYFDTTIDRKRYTSTKEVLDATLIHQSITGLYETRIDLSQLGGDGGPAPGGGEAAAKGGVLNLEEEYRLHEKPVPSSIDPSWLQLFPTVWAERAGMGLANQVPPVVVELRSGASPVAVRQYPMSKEAREGIRPHIQKFLDLGVLVPCRSPWNTPLLPVKKPGTNDYRPVQDLREINKRVQDIHPTVPNPYNLLSSLPPSYTWYSVLDLKDAFFCLRLHPNSQPLFAFEWKDPEKGNTGQLTWTRLPQGFKNSPTLFNEALHRDLAPFRALNPQVVLLQYVDDLLVAAPTYEDCKKGTQKLLQELSKLGYRVSAKKAQLCQREVTYLGYLLKEGKRWLTPARKATVMKIPVPTTPRQVREFLGTAGFCRLWIPGFASLAAPLYPLTKPSIPFIWTEEHQQAFDHIKKALLSAPALALPDLTKPFTLYIDERAGVARGVLTQTLGPWRRPVAYLSKKLDPVASGWPTCLKAVAAVALLLKDADKLTLGQNVTVIASHSLESIVRQPPDRWMTNARMTHYQSLLLNERVSFAPPAVLNPATLLPVESEATPVHRCSEILAEETGTRRDLEDQPLPGVPTWYTDGSSFITEGKRRAGAPIVDGKRTVWASSLPEGTSAQKAELVALTQALRLAEGKNINIYTDSRYAFATAHIHGAIYKQRGWLTSAGKDIKNKEEILALLEAIHLPRRVAIIHCPGHQRGSNPVATGNRRADEAAKQAALSTRVLAGTTKPAGKRTADGSEFEKRTADGSEFESPKKKAKVE

SEQ ID NO: 7530 - protein, 2127 aa, synthetic construct
MPAAKRVKLDGGDKKYSIGLDIGTNSVGWAVITDEYKVPSKKFKVLGNTDRHSIKKNLIGALLFDSGETAEATRLKRTARRRYTRRKNRICYLQEIFSNEMAKVDDSFFHRLEESFLVEEDKKHERHPIFGNIVDEVAYHEKYPTIYHLRKKLVDSTDKADLRLIYLALAHMIKFRGHFLIEGDLNPDNSDVDKLFIQLVQTYNQLFEENPINASGVDAKAILSARLSKSRRLENLIAQLPGEKKNGLFGNLIALSLGLTPNFKSNFDLAEDAKLQLSKDTYDDDLDNLLAQIGDQYADLFLAAKNLSDAILLSDILRVNTEITKAPLSASMIKRYDEHHQDLTLLKALVRQQLPEKYKEIFFDQSKNGYAGYIDGGASQEEFYKFIKPILEKMDGTEELLVKLNREDLLRKQRTFDNGSIPHQIHLGELHAILRRQEDFYPFLKDNREKIEKILTFRIPYYVGPLARGNSRFAWMTRKSEETITPWNFEEVVDKGASAQSFIERMTNFDKNLPNEKVLPKHSLLYEYFTVYNELTKVKYVTEGMRKPAFLSGEQKKAIVDLLFKTNRKVTVKQLKEDYFKKIECFDSVEISGVEDRFNASLGTYHDLLKIIKDKDFLDNEENEDILEDIVLTLTLFEDREMIEERLKTYAHLFDDKVMKQLKRRRYTGWGRLSRKLINGIRDKQSGKTILDFLKSDGFANRNFMQLIHDDSLTFKEDIQKAQVSGQGDSLHEHIANLAGSPAIKKGILQTVKVVDELVKVMGRHKPENIVIEMARENQTTQKGQKNSRERMKRIEEGIKELGSQILKEHPVENTQLQNEKLYLYYLQNGRDMYVDQELDINRLSDYDVDHIVPQSFLKDDSIDNKVLTRSDKARGKSDNVPSEEVVKKMKNYWRQLLNAKLITQRKFDNLTKAERGGLSELDKAGFIKRQLVETRQITKHVAQILDSRMNTKYDENDKLIREVKVITLKSKLVSDFRKDFQFYKVREINNYHHAHDAYLNAVVGTALIKKYPKLESEFVYGDYKVYDVRKMIAKSEQEIGKATAKYFFYSNIMNFFKTEITLANGEIRKRPLIETNGETGEIVWDKGRDFATVRKVLSMPQVNIVKKTEVQTGGFSKESILPKRNSDKLIARKKDWDPKKYGGFDSPTVAYSVLVVAKVEKGKSKKLKSVKELLGITIMERSSFEKNPIDFLEAKGYKEVKKDLIIKLPKYSLFELENGRKRMLASAGELQKGNELALPSKYVNFLYLASHYEKLKGSPEDNEQKQLFVEQHKHYLDEIIEQISEFSKRVILADANLDKVLSAYNKHRDKPIREQAENIIHLFTLTNLGAPAAFKYFDTTIDRKRYTSTKEVLDATLIHQSITGLYETRIDLSQLGGDGGPAPGGGEAAAKGGLLGRDLLTKLKAQIQFSTEGPQVTWEDRPAMCLVLNLEEEYRLHEKPVPPSIDPSWLQLFPMVWAEKAGMGLANQVPPVVVELKSDASPVAVRQYPMSKEAREGIRPHIQRFLDLGILVPCQSPWNTPLLPVKKPGTNDYRPVQDLREVNKRVQDIHPTVPNPYNLLSSLPPSHTWYSVLDLKDAFFCLKLHPNSQPLFAFEWRDPEKGNTGQLTWTRLPQGFKNSPTLFNEALHRDLASFRALNPQVVMLQYVDDLLVAAPTYRDCKEGTRRLLQELSKLGYRVSAKKAQLCREEVTYLGYLLKGGKRWLTPARKATVMKIPTPTTPRQVREFLGTAGFCRLWIPGFASLAAPLYPLTRPKVPFTWTEAHQEAFGRIKEALLSAPALALPDLTKPFALYVDEKEGVARGVLTQTLGPWRRPVAYLSKKLDPVASGWPTCLKAIAAVALLLKDADKLTLGQNVLVIAPHNLESIVRQPPDRWMTNARMTHYQSLLLNERVSFAPPAILNPATLLPVESDDTPIHICSEILAEETGTRPDLRDQPLPGVPAWYTDGSSFIMDGRRQAGAAIVDNKRTVWASNLPEGTSAQKAELIALTQALRLAEGKSINIYTDSRYAFATAHVHGAIYKQRGWLTSAGKDIKNKEEILALLEAIHLPKRVAIIHCPGHQRGTDPVATGNRKADEAAKQAAQSTRILTETTKNAGKRTADGSEFEKRTADGSEFESPKKKAKVE

SEQ ID NO: 7531 - protein, 2127 aa, synthetic construct
MPAAKRVKLDGGDKKYSIGLDIGTNSVGWAVITDEYKVPSKKFKVLGNTDRHSIKKNLIGALLFDSGETAEATRLKRTARRRYTRRKNRICYLQEIFSNEMAKVDDSFFHRLEESFLVEEDKKHERHPIFGNIVDEVAYHEKYPTIYHLRKKLVDSTDKADLRLIYLALAHMIKFRGHFLIEGDLNPDNSDVDKLFIQLVQTYNQLFEENPINASGVDAKAILSARLSKSRRLENLIAQLPGEKKNGLFGNLIALSLGLTPNFKSNFDLAEDAKLQLSKDTYDDDLDNLLAQIGDQYADLFLAAKNLSDAILLSDILRVNTEITKAPLSASMIKRYDEHHQDLTLLKALVRQQLPEKYKEIFFDQSKNGYAGYIDGGASQEEFYKFIKPILEKMDGTEELLVKLNREDLLRKQRTFDNGSIPHQIHLGELHAILRRQEDFYPFLKDNREKIEKILTFRIPYYVGPLARGNSRFAWMTRKSEETITPWNFEEVVDKGASAQSFIERMTNFDKNLPNEKVLPKHSLLYEYFTVYNELTKVKYVTEGMRKPAFLSGEQKKAIVDLLFKTNRKVTVKQLKEDYFKKIECFDSVEISGVEDRFNASLGTYHDLLKIIKDKDFLDNEENEDILEDIVLTLTLFEDREMIEERLKTYAHLFDDKVMKQLKRRRYTGWGRLSRKLINGIRDKQSGKTILDFLKSDGFANRNFMQLIHDDSLTFKEDIQKAQVSGQGDSLHEHIANLAGSPAIKKGILQTVKVVDELVKVMGRHKPENIVIEMARENQTTQKGQKNSRERMKRIEEGIKELGSQILKEHPVENTQLQNEKLYLYYLQNGRDMYVDQELDINRLSDYDVDHIVPQSFLKDDSIDNKVLTRSDKARGKSDNVPSEEVVKKMKNYWRQLLNAKLITQRKFDNLTKAERGGLSELDKAGFIKRQLVETRQITKHVAQILDSRMNTKYDENDKLIREVKVITLKSKLVSDFRKDFQFYKVREINNYHHAHDAYLNAVVGTALIKKYPKLESEFVYGDYKVYDVRKMIAKSEQEIGKATAKYFFYSNIMNFFKTEITLANGEIRKRPLIETNGETGEIVWDKGRDFATVRKVLSMPQVNIVKKTEVQTGGFSKESILPKRNSDKLIARKKDWDPKKYGGFDSPTVAYSVLVVAKVEKGKSKKLKSVKELLGITIMERSSFEKNPIDFLEAKGYKEVKKDLIIKLPKYSLFELENGRKRMLASAGELQKGNELALPSKYVNFLYLASHYEKLKGSPEDNEQKQLFVEQHKHYLDEIIEQISEFSKRVILADANLDKVLSAYNKHRDKPIREQAENIIHLFTLTNLGAPAAFKYFDTTIDRKRYTSTKEVLDATLIHQSITGLYETRIDLSQLGGDGGPAPGGGEAAAKGGLLGRDLLTKLKAQIQFSTEGPQVTWEDRPAMCLVLNLEEEYRLHEKPVPPSIDPSWLQLFPMVWAEKAGMGLANQVPPVVVELKSDASPVAVRQYPMSKEAREGIRPHIQRFLDLGILVPCQSPWNTPLLPVKKPGTNDYRPVQDLREVNKRVQDIHPTVPNPYNLLSSLPPSHTWYSVLDLKDAFFCLKLHPNSQPLFAFEWRDPEKGNTGQLTWTRLPQGFKNSPTLFNEALHRDLASFRALNPQVVMLQYVDDLLVAAPTYRDCKEGTRRLLQELSKLGYRVSAKKAQLCREEVTYLGYLLKGGKRWLTPARKATVMKIPTPTTPRQVREFLGKAGFCRLFIPGFASLAAPLYPLTRPKVPFTWTEAHQEAFGRIKEALLSAPALALPDLTKPFALYVDEKEGVARGVLTQTLGPWRRPVAYLSKKLDPVASGWPTCLKAIAAVALLLKDADKLTLGQNVLVIAPHNLESIVRQPPDRWMTNARMTHYQSLLLNERVSFAPPAILNPATLLPVESDDTPIHICSEILAEETGTRPDLRDQPLPGVPAWYTDGSSFIMDGRRQAGAAIVDNKRTVWASNLPEGTSAQKAELIALTQALRLAEGKSINIYTDSRYAFATAHVHGAIYKQRGWLTSAGKDIKNKEEILALLEAIHLPKRVAIIHCPGHQRGTDPVATGNRKADEAAKQAAQSTRILTETTKNAGKRTADGSEFEKRTADGSEFESPKKKAKVE

SEQ ID NO: 7532 - protein, 2218 aa, synthetic construct
MPAAKRVKLDGGDKKYSIGLDIGTNSVGWAVITDEYKVPSKKFKVLGNTDRHSIKKNLIGALLFDSGETAEATRLKRTARRRYTRRKNRICYLQEIFSNEMAKVDDSFFHRLEESFLVEEDKKHERHPIFGNIVDEVAYHEKYPTIYHLRKKLVDSTDKADLRLIYLALAHMIKFRGHFLIEGDLNPDNSDVDKLFIQLVQTYNQLFEENPINASGVDAKAILSARLSKSRRLENLIAQLPGEKKNGLFGNLIALSLGLTPNFKSNFDLAEDAKLQLSKDTYDDDLDNLLAQIGDQYADLFLAAKNLSDAILLSDILRVNTEITKAPLSASMIKRYDEHHQDLTLLKALVRQQLPEKYKEIFFDQSKNGYAGYIDGGASQEEFYKFIKPILEKMDGTEELLVKLNREDLLRKQRTFDNGSIPHQIHLGELHAILRRQEDFYPFLKDNREKIEKILTFRIPYYVGPLARGNSRFAWMTRKSEETITPWNFEEVVDKGASAQSFIERMTNFDKNLPNEKVLPKHSLLYEYFTVYNELTKVKYVTEGMRKPAFLSGEQKKAIVDLLFKTNRKVTVKQLKEDYFKKIECFDSVEISGVEDRFNASLGTYHDLLKIIKDKDFLDNEENEDILEDIVLTLTLFEDREMIEERLKTYAHLFDDKVMKQLKRRRYTGWGRLSRKLINGIRDKQSGKTILDFLKSDGFANRNFMQLIHDDSLTFKEDIQKAQVSGQGDSLHEHIANLAGSPAIKKGILQTVKVVDELVKVMGRHKPENIVIEMARENQTTQKGQKNSRERMKRIEEGIKELGSQILKEHPVENTQLQNEKLYLYYLQNGRDMYVDQELDINRLSDYDVDHIVPQSFLKDDSIDNKVLTRSDKARGKSDNVPSEEVVKKMKNYWRQLLNAKLITQRKFDNLTKAERGGLSELDKAGFIKRQLVETRQITKHVAQILDSRMNTKYDENDKLIREVKVITLKSKLVSDFRKDFQFYKVREINNYHHAHDAYLNAVVGTALIKKYPKLESEFVYGDYKVYDVRKMIAKSEQEIGKATAKYFFYSNIMNFFKTEITLANGEIRKRPLIETNGETGEIVWDKGRDFATVRKVLSMPQVNIVKKTEVQTGGFSKESILPKRNSDKLIARKKDWDPKKYGGFDSPTVAYSVLVVAKVEKGKSKKLKSVKELLGITIMERSSFEKNPIDFLEAKGYKEVKKDLIIKLPKYSLFELENGRKRMLASAGELQKGNELALPSKYVNFLYLASHYEKLKGSPEDNEQKQLFVEQHKHYLDEIIEQISEFSKRVILADANLDKVLSAYNKHRDKPIREQAENIIHLFTLTNLGAPAAFKYFDTTIDRKRYTSTKEVLDATLIHQSITGLYETRIDLSQLGGDGGPAPGGGEAAAKGGTLGDQGSRGSDPLPEPRVTLTVEGIPTEFLVNTGAEHSVLTKPMGKMGSKRTVVAGATGSKVYPWTTKRLLKIGQKQVTHSFLVIPECPAPLLGRDLLTKLKAQIQFSTEGPQVTWEDRPAMCLVLNLEEEYRLHEKPVPPSIDPSWLQLFPMVWAEKAGMGLANQVPPVVVELKSDASPVAVRQYPMSKEAREGIRPHIQRFLDLGILVPCQSPWNTPLLPVKKPGTNDYRPVQDLREVNKRVQDIHPTVPNPYNLLSSLPPSHTWYSVLDLKDAFFCLKLHPNSQPLFAFEWRDPEKGNTGQLTWTRLPQGFKNSPTLFNEALHRDLASFRALNPQVVMLQYVDDLLVAAPTYRDCKEGTRRLLQELSKLGYRVSAKKAQLCREEVTYLGYLLKGGKRWLTPARKATVMKIPTPTTPRQVREFLGTAGFCRLWIPGFASLAAPLYPLTRPKVPFTWTEAHQEAFGRIKEALLSAPALALPDLTKPFALYVDEKEGVARGVLTQTLGPWRRPVAYLSKKLDPVASGWPTCLKAIAAVALLLKDADKLTLGQNVLVIAPHNLESIVRQPPDRWMTNARMTHYQSLLLNERVSFAPPAILNPATLLPVESDDTPIHICSEILAEETGTRPDLRDQPLPGVPAWYTDGSSFIMDGRRQAGAAIVDNKRTVWASNLPEGTSAQKAELIALTQALRLAEGKSINIYTDSRYAFATAHVHGAIYKQRGWLTSAGKDIKNKEEILALLEAIHLPKRVAIIHCPGHQRGTDPVATGNRKADEAAKQAAQSTRILTETTKNAGKRTADGSEFEKRTADGSEFESPKKKAKVE

SEQ ID NO: 7533 - protein, 2218 aa, synthetic construct
MPAAKRVKLDGGDKKYSIGLDIGTNSVGWAVITDEYKVPSKKFKVLGNTDRHSIKKNLIGALLFDSGETAEATRLKRTARRRYTRRKNRICYLQEIFSNEMAKVDDSFFHRLEESFLVEEDKKHERHPIFGNIVDEVAYHEKYPTIYHLRKKLVDSTDKADLRLIYLALAHMIKFRGHFLIEGDLNPDNSDVDKLFIQLVQTYNQLFEENPINASGVDAKAILSARLSKSRRLENLIAQLPGEKKNGLFGNLIALSLGLTPNFKSNFDLAEDAKLQLSKDTYDDDLDNLLAQIGDQYADLFLAAKNLSDAILLSDILRVNTEITKAPLSASMIKRYDEHHQDLTLLKALVRQQLPEKYKEIFFDQSKNGYAGYIDGGASQEEFYKFIKPILEKMDGTEELLVKLNREDLLRKQRTFDNGSIPHQIHLGELHAILRRQEDFYPFLKDNREKIEKILTFRIPYYVGPLARGNSRFAWMTRKSEETITPWNFEEVVDKGASAQSFIERMTNFDKNLPNEKVLPKHSLLYEYFTVYNELTKVKYVTEGMRKPAFLSGEQKKAIVDLLFKTNRKVTVKQLKEDYFKKIECFDSVEISGVEDRFNASLGTYHDLLKIIKDKDFLDNEENEDILEDIVLTLTLFEDREMIEERLKTYAHLFDDKVMKQLKRRRYTGWGRLSRKLINGIRDKQSGKTILDFLKSDGFANRNFMQLIHDDSLTFKEDIQKAQVSGQGDSLHEHIANLAGSPAIKKGILQTVKVVDELVKVMGRHKPENIVIEMARENQTTQKGQKNSRERMKRIEEGIKELGSQILKEHPVENTQLQNEKLYLYYLQNGRDMYVDQELDINRLSDYDVDHIVPQSFLKDDSIDNKVLTRSDKARGKSDNVPSEEVVKKMKNYWRQLLNAKLITQRKFDNLTKAERGGLSELDKAGFIKRQLVETRQITKHVAQILDSRMNTKYDENDKLIREVKVITLKSKLVSDFRKDFQFYKVREINNYHHAHDAYLNAVVGTALIKKYPKLESEFVYGDYKVYDVRKMIAKSEQEIGKATAKYFFYSNIMNFFKTEITLANGEIRKRPLIETNGETGEIVWDKGRDFATVRKVLSMPQVNIVKKTEVQTGGFSKESILPKRNSDKLIARKKDWDPKKYGGFDSPTVAYSVLVVAKVEKGKSKKLKSVKELLGITIMERSSFEKNPIDFLEAKGYKEVKKDLIIKLPKYSLFELENGRKRMLASAGELQKGNELALPSKYVNFLYLASHYEKLKGSPEDNEQKQLFVEQHKHYLDEIIEQISEFSKRVILADANLDKVLSAYNKHRDKPIREQAENIIHLFTLTNLGAPAAFKYFDTTIDRKRYTSTKEVLDATLIHQSITGLYETRIDLSQLGGDGGPAPGGGEAAAKGGTLGDQGSRGSDPLPEPRVTLTVEGIPTEFLVNTGAEHSVLTKPMGKMGSKRTVVAGATGSKVYPWTTKRLLKIGQKQVTHSFLVIPECPAPLLGRDLLTKLKAQIQFSTEGPQVTWEDRPAMCLVLNLEEEYRLHEKPVPPSIDPSWLQLFPMVWAEKAGMGLANQVPPVVVELKSDASPVAVRQYPMSKEAREGIRPHIQRFLDLGILVPCQSPWNTPLLPVKKPGTNDYRPVQDLREVNKRVQDIHPTVPNPYNLLSSLPPSHTWYSVLDLKDAFFCLKLHPNSQPLFAFEWRDPEKGNTGQLTWTRLPQGFKNSPTLFNEALHRDLASFRALNPQVVMLQYVDDLLVAAPTYRDCKEGTRRLLQELSKLGYRVSAKKAQLCREEVTYLGYLLKGGKRWLTPARKATVMKIPTPTTPRQVREFLGKAGFCRLFIPGFASLAAPLYPLTRPKVPFTWTEAHQEAFGRIKEALLSAPALALPDLTKPFALYVDEKEGVARGVLTQTLGPWRRPVAYLSKKLDPVASGWPTCLKAIAAVALLLKDADKLTLGQNVLVIAPHNLESIVRQPPDRWMTNARMTHYQSLLLNERVSFAPPAILNPATLLPVESDDTPIHICSEILAEETGTRPDLRDQPLPGVPAWYTDGSSFIMDGRRQAGAAIVDNKRTVWASNLPEGTSAQKAELIALTQALRLAEGKSINIYTDSRYAFATAHVHGAIYKQRGWLTSAGKDIKNKEEILALLEAIHLPKRVAIIHCPGHQRGTDPVATGNRKADEAAKQAAQSTRILTETTKNAGKRTADGSEFEKRTADGSEFESPKKKAKVE

SEQ ID NO: 7534 - protein, 2096 aa, synthetic construct
MPAAKRVKLDGGDKKYSIGLDIGTNSVGWAVITDEYKVPSKKFKVLGNTDRHSIKKNLIGALLFDSGETAEATRLKRTARRRYTRRKNRICYLQEIFSNEMAKVDDSFFHRLEESFLVEEDKKHERHPIFGNIVDEVAYHEKYPTIYHLRKKLVDSTDKADLRLIYLALAHMIKFRGHFLIEGDLNPDNSDVDKLFIQLVQTYNQLFEENPINASGVDAKAILSARLSKSRRLENLIAQLPGEKKNGLFGNLIALSLGLTPNFKSNFDLAEDAKLQLSKDTYDDDLDNLLAQIGDQYADLFLAAKNLSDAILLSDILRVNTEITKAPLSASMIKRYDEHHQDLTLLKALVRQQLPEKYKEIFFDQSKNGYAGYIDGGASQEEFYKFIKPILEKMDGTEELLVKLNREDLLRKQRTFDNGSIPHQIHLGELHAILRRQEDFYPFLKDNREKIEKILTFRIPYYVGPLARGNSRFAWMTRKSEETITPWNFEEVVDKGASAQSFIERMTNFDKNLPNEKVLPKHSLLYEYFTVYNELTKVKYVTEGMRKPAFLSGEQKKAIVDLLFKTNRKVTVKQLKEDYFKKIECFDSVEISGVEDRFNASLGTYHDLLKIIKDKDFLDNEENEDILEDIVLTLTLFEDREMIEERLKTYAHLFDDKVMKQLKRRRYTGWGRLSRKLINGIRDKQSGKTILDFLKSDGFANRNFMQLIHDDSLTFKEDIQKAQVSGQGDSLHEHIANLAGSPAIKKGILQTVKVVDELVKVMGRHKPENIVIEMARENQTTQKGQKNSRERMKRIEEGIKELGSQILKEHPVENTQLQNEKLYLYYLQNGRDMYVDQELDINRLSDYDVDHIVPQSFLKDDSIDNKVLTRSDKARGKSDNVPSEEVVKKMKNYWRQLLNAKLITQRKFDNLTKAERGGLSELDKAGFIKRQLVETRQITKHVAQILDSRMNTKYDENDKLIREVKVITLKSKLVSDFRKDFQFYKVREINNYHHAHDAYLNAVVGTALIKKYPKLESEFVYGDYKVYDVRKMIAKSEQEIGKATAKYFFYSNIMNFFKTEITLANGEIRKRPLIETNGETGEIVWDKGRDFATVRKVLSMPQVNIVKKTEVQTGGFSKESILPKRNSDKLIARKKDWDPKKYGGFDSPTVAYSVLVVAKVEKGKSKKLKSVKELLGITIMERSSFEKNPIDFLEAKGYKEVKKDLIIKLPKYSLFELENGRKRMLASAGELQKGNELALPSKYVNFLYLASHYEKLKGSPEDNEQKQLFVEQHKHYLDEIIEQISEFSKRVILADANLDKVLSAYNKHRDKPIREQAENIIHLFTLTNLGAPAAFKYFDTTIDRKRYTSTKEVLDATLIHQSITGLYETRIDLSQLGGDGGPAPGGGEAAAKGGTLNLEDEYRLYETSAEPEVSPGSTWLSDFPQAWAETGGMGLAVRQAPLIIPLKATSTPVSIKQYPMSQEAKLGIKPHIQRLLDQGILVPCQSPWNTPLLPVKKPGTNDYRPVQDLREVNKRVEDIHPTVPNPYNLLSGLPPSHRWYTVLDLKDAFFCLRLHPTSQPLFAFEWRDPGMGISGQLTWTRLPQGFKNSPTLFNEALHRDLADFRIQHPDLILLQYVDDILLAATSELDCQQGTRALLLTLGNLGYRASAKKAQLCQKQVKYLGYLLKEGQRWLTEARKETVMGQPTPKTPRQLREFLGTAGFCRLWIPGFAEMAAPLYPLTKPGTLFNWGPDQQKAYQEIKQALLTAPALGLPDLTKPFELFVDEKQGYAKGVLTQKLGPWRRPVAYLSKKLDPVAAGWPPCLRMVAAIAVLRKDAGKLTMGQPLVILAPHAVEALVKQPPDRWLSNARMTHYQAMLLDTDRVQFGPVVALNPATLLPLPEEGAPHDCLEILAETHGTRPDLTDQPIPDADHTWYTDGSSFLQEGQRKAGAAVTTETEVIWARALPAGTSAQRAELIALTQALKMAEGKRLNVYTDSRYAFATAHIHGEIYRRRGWLTSEGREIKNKSEILALLKALFLPKRLSIIHCLGHQKGDSAEARGNRLADQAAREAAIKTPPDTSTLLAGKRTADGSEFEKRTADGSEFESPKKKAKVE

SEQ ID NO: 7535 - protein, 2096 aa, synthetic construct
MPAAKRVKLDGGDKKYSIGLDIGTNSVGWAVITDEYKVPSKKFKVLGNTDRHSIKKNLIGALLFDSGETAEATRLKRTARRRYTRRKNRICYLQEIFSNEMAKVDDSFFHRLEESFLVEEDKKHERHPIFGNIVDEVAYHEKYPTIYHLRKKLVDSTDKADLRLIYLALAHMIKFRGHFLIEGDLNPDNSDVDKLFIQLVQTYNQLFEENPINASGVDAKAILSARLSKSRRLENLIAQLPGEKKNGLFGNLIALSLGLTPNFKSNFDLAEDAKLQLSKDTYDDDLDNLLAQIGDQYADLFLAAKNLSDAILLSDILRVNTEITKAPLSASMIKRYDEHHQDLTLLKALVRQQLPEKYKEIFFDQSKNGYAGYIDGGASQEEFYKFIKPILEKMDGTEELLVKLNREDLLRKQRTFDNGSIPHQIHLGELHAILRRQEDFYPFLKDNREKIEKILTFRIPYYVGPLARGNSRFAWMTRKSEETITPWNFEEVVDKGASAQSFIERMTNFDKNLPNEKVLPKHSLLYEYFTVYNELTKVKYVTEGMRKPAFLSGEQKKAIVDLLFKTNRKVTVKQLKEDYFKKIECFDSVEISGVEDRFNASLGTYHDLLKIIKDKDFLDNEENEDILEDIVLTLTLFEDREMIEERLKTYAHLFDDKVMKQLKRRRYTGWGRLSRKLINGIRDKQSGKTILDFLKSDGFANRNFMQLIHDDSLTFKEDIQKAQVSGQGDSLHEHIANLAGSPAIKKGILQTVKVVDELVKVMGRHKPENIVIEMARENQTTQKGQKNSRERMKRIEEGIKELGSQILKEHPVENTQLQNEKLYLYYLQNGRDMYVDQELDINRLSDYDVDHIVPQSFLKDDSIDNKVLTRSDKARGKSDNVPSEEVVKKMKNYWRQLLNAKLITQRKFDNLTKAERGGLSELDKAGFIKRQLVETRQITKHVAQILDSRMNTKYDENDKLIREVKVITLKSKLVSDFRKDFQFYKVREINNYHHAHDAYLNAVVGTALIKKYPKLESEFVYGDYKVYDVRKMIAKSEQEIGKATAKYFFYSNIMNFFKTEITLANGEIRKRPLIETNGETGEIVWDKGRDFATVRKVLSMPQVNIVKKTEVQTGGFSKESILPKRNSDKLIARKKDWDPKKYGGFDSPTVAYSVLVVAKVEKGKSKKLKSVKELLGITIMERSSFEKNPIDFLEAKGYKEVKKDLIIKLPKYSLFELENGRKRMLASAGELQKGNELALPSKYVNFLYLASHYEKLKGSPEDNEQKQLFVEQHKHYLDEIIEQISEFSKRVILADANLDKVLSAYNKHRDKPIREQAENIIHLFTLTNLGAPAAFKYFDTTIDRKRYTSTKEVLDATLIHQSITGLYETRIDLSQLGGDGGPAPGGGEAAAKGGTLGIEDEYRLHETSTEPDVSLGSTWLSDFPQAWAETGGMGLAVRQAPLIIPLKATSTPVSIQQYPMSHEARLGIKPHIQRLLDQGILVPCQSPWNTPLLPVKKPGTNDYRPVQDLREVNKRVEDIHPTVPNPYNLLSGLPPSHQWYTVLDLKDAFFCLRLHPTSQPLFAFEWRDPGMGISGQLTWTRLPQGFKNSPTLFNEALHRDLADFRIQHPDLILLQYVDDILLAATSELDCQQGTRALLQTLGDLGYRASAKKAQICQKQVKYLGYLLREGQRWLTEARKETVMGQPVPKTPRQLREFLGTAGFCRLWIPGFAEMAAPLYPLTKPGTLFSWGPDQQKAYQEIKQALLTAPALGLPDLTKPFELFVDEKQGYAKGVLTQKLGPWRRPVAYLSKKLDPVAAGWPPCLRMVAAIAVLTKDAGKLTMGQPLVILAPHAVEALVKQPPDRWLSNARMTHYQAMLLDTDRVQFGPVVALNPATLLPLPEEGAPHDCLEILAETHGTRPDLTDQPIPDADHTWYTDGSSFLQEGQRKAGAAVTTETEVIWAGALPAGTSAQRAELIALTQALKMAEGKRLNVYTDSRYAFATAHIHGEIYRRRGWLTSEGREIKNKSEILALLKALFLPKRLSIIHCLGHQKGDSAEARGNRLADQAAREAAIKTPPDTSTLLAGKRTADGSEFEKRTADGSEFESPKKKAKVE

SEQ ID NO: 7536 - protein, 2096 aa, synthetic construct
MPAAKRVKLDGGDKKYSIGLDIGTNSVGWAVITDEYKVPSKKFKVLGNTDRHSIKKNLIGALLFDSGETAEATRLKRTARRRYTRRKNRICYLQEIFSNEMAKVDDSFFHRLEESFLVEEDKKHERHPIFGNIVDEVAYHEKYPTIYHLRKKLVDSTDKADLRLIYLALAHMIKFRGHFLIEGDLNPDNSDVDKLFIQLVQTYNQLFEENPINASGVDAKAILSARLSKSRRLENLIAQLPGEKKNGLFGNLIALSLGLTPNFKSNFDLAEDAKLQLSKDTYDDDLDNLLAQIGDQYADLFLAAKNLSDAILLSDILRVNTEITKAPLSASMIKRYDEHHQDLTLLKALVRQQLPEKYKEIFFDQSKNGYAGYIDGGASQEEFYKFIKPILEKMDGTEELLVKLNREDLLRKQRTFDNGSIPHQIHLGELHAILRRQEDFYPFLKDNREKIEKILTFRIPYYVGPLARGNSRFAWMTRKSEETITPWNFEEVVDKGASAQSFIERMTNFDKNLPNEKVLPKHSLLYEYFTVYNELTKVKYVTEGMRKPAFLSGEQKKAIVDLLFKTNRKVTVKQLKEDYFKKIECFDSVEISGVEDRFNASLGTYHDLLKIIKDKDFLDNEENEDILEDIVLTLTLFEDREMIEERLKTYAHLFDDKVMKQLKRRRYTGWGRLSRKLINGIRDKQSGKTILDFLKSDGFANRNFMQLIHDDSLTFKEDIQKAQVSGQGDSLHEHIANLAGSPAIKKGILQTVKVVDELVKVMGRHKPENIVIEMARENQTTQKGQKNSRERMKRIEEGIKELGSQILKEHPVENTQLQNEKLYLYYLQNGRDMYVDQELDINRLSDYDVDHIVPQSFLKDDSIDNKVLTRSDKARGKSDNVPSEEVVKKMKNYWRQLLNAKLITQRKFDNLTKAERGGLSELDKAGFIKRQLVETRQITKHVAQILDSRMNTKYDENDKLIREVKVITLKSKLVSDFRKDFQFYKVREINNYHHAHDAYLNAVVGTALIKKYPKLESEFVYGDYKVYDVRKMIAKSEQEIGKATAKYFFYSNIMNFFKTEITLANGEIRKRPLIETNGETGEIVWDKGRDFATVRKVLSMPQVNIVKKTEVQTGGFSKESILPKRNSDKLIARKKDWDPKKYGGFDSPTVAYSVLVVAKVEKGKSKKLKSVKELLGITIMERSSFEKNPIDFLEAKGYKEVKKDLIIKLPKYSLFELENGRKRMLASAGELQKGNELALPSKYVNFLYLASHYEKLKGSPEDNEQKQLFVEQHKHYLDEIIEQISEFSKRVILADANLDKVLSAYNKHRDKPIREQAENIIHLFTLTNLGAPAAFKYFDTTIDRKRYTSTKEVLDATLIHQSITGLYETRIDLSQLGGDGGPAPGGGEAAAKGGTLNIEDEYRLHETSKEPDVSLGSTWLSDFPQAWAETGGMGLAVRQAPLIIPLKATSTPVSIKQYPMSQEARLGIKPHIQRLLDQGILVPCQSPWNTPLLPVKKPGTNDYRPVQDLREVNKRVEDIHPTVPNPYNLLSGLPPSHQWYTVLDLKDAFFCLRLHPTSQPLFAFEWRDPEMGISGQLTWTRLPQGFKNSPTLFNEALHRDLAGFRIQHPDLILLQYVDDLLLAATSELDCQQGTRALLQTLGDLGYRASAKKAQICQKQVKYLGYLLKEGQRWLTEARKETVMGQPIPKTPRQLREFLGTAGFCRLWIPGFAEMAAPLYPLTKPGTLFNWGPDQQKAFQEIKQALLTAPALGLPDLTKPFELFVDEKQGYAKGVLTQKLGPWRRPVAYLSKKLDPVAAGWPPCLRMVAAIAVLTKDAGKLTMGQPLVILAPHAVEALVKQPPDRWLSNARMTHYQALLLDTDRVQFGPVVALNPATLLPLPEEGLQHDCLDILAEAHGTRSDLMDQPLPDADHTWYTDGSSFLQEGQRKAGAAVTTETEVIWARALPAGTSAQRAELIALTQALKMAEGKKLNVYTDSRYAFATAHIHGEIYRRRGWLTSEGKEIKNKDEILALLKALFLPKRLSIIHCPGHQKGNSAEARGNRMADQAAREVATRETPETSTLLAGKRTADGSEFEKRTADGSEFESPKKKAKVE

SEQ ID NO: 7537 - protein, 2096 aa, synthetic construct
MPAAKRVKLDGGDKKYSIGLDIGTNSVGWAVITDEYKVPSKKFKVLGNTDRHSIKKNLIGALLFDSGETAEATRLKRTARRRYTRRKNRICYLQEIFSNEMAKVDDSFFHRLEESFLVEEDKKHERHPIFGNIVDEVAYHEKYPTIYHLRKKLVDSTDKADLRLIYLALAHMIKFRGHFLIEGDLNPDNSDVDKLFIQLVQTYNQLFEENPINASGVDAKAILSARLSKSRRLENLIAQLPGEKKNGLFGNLIALSLGLTPNFKSNFDLAEDAKLQLSKDTYDDDLDNLLAQIGDQYADLFLAAKNLSDAILLSDILRVNTEITKAPLSASMIKRYDEHHQDLTLLKALVRQQLPEKYKEIFFDQSKNGYAGYIDGGASQEEFYKFIKPILEKMDGTEELLVKLNREDLLRKQRTFDNGSIPHQIHLGELHAILRRQEDFYPFLKDNREKIEKILTFRIPYYVGPLARGNSRFAWMTRKSEETITPWNFEEVVDKGASAQSFIERMTNFDKNLPNEKVLPKHSLLYEYFTVYNELTKVKYVTEGMRKPAFLSGEQKKAIVDLLFKTNRKVTVKQLKEDYFKKIECFDSVEISGVEDRFNASLGTYHDLLKIIKDKDFLDNEENEDILEDIVLTLTLFEDREMIEERLKTYAHLFDDKVMKQLKRRRYTGWGRLSRKLINGIRDKQSGKTILDFLKSDGFANRNFMQLIHDDSLTFKEDIQKAQVSGQGDSLHEHIANLAGSPAIKKGILQTVKVVDELVKVMGRHKPENIVIEMARENQTTQKGQKNSRERMKRIEEGIKELGSQILKEHPVENTQLQNEKLYLYYLQNGRDMYVDQELDINRLSDYDVDHIVPQSFLKDDSIDNKVLTRSDKARGKSDNVPSEEVVKKMKNYWRQLLNAKLITQRKFDNLTKAERGGLSELDKAGFIKRQLVETRQITKHVAQILDSRMNTKYDENDKLIREVKVITLKSKLVSDFRKDFQFYKVREINNYHHAHDAYLNAVVGTALIKKYPKLESEFVYGDYKVYDVRKMIAKSEQEIGKATAKYFFYSNIMNFFKTEITLANGEIRKRPLIETNGETGEIVWDKGRDFATVRKVLSMPQVNIVKKTEVQTGGFSKESILPKRNSDKLIARKKDWDPKKYGGFDSPTVAYSVLVVAKVEKGKSKKLKSVKELLGITIMERSSFEKNPIDFLEAKGYKEVKKDLIIKLPKYSLFELENGRKRMLASAGELQKGNELALPSKYVNFLYLASHYEKLKGSPEDNEQKQLFVEQHKHYLDEIIEQISEFSKRVILADANLDKVLSAYNKHRDKPIREQAENIIHLFTLTNLGAPAAFKYFDTTIDRKRYTSTKEVLDATLIHQSITGLYETRIDLSQLGGDGGPAPGGGEAAAKGGTLNIEDEHRLHETSKEPDVSLGSTWLSDFPQAWAETGGMGLAVRQAPLIIPLKATSTPVSIKQYPMSQEARLGIKPHIQRLLDQGILVPCQSPWNTPLLPVKKPGTNDYRPVQDLREVNKRVEDIHPTVPNPYNLLSGLPPSHQWYTVLDLKDAFFCLRLHPTSQPLFAFEWRDPEMGISGQLTWTRLPQGFKNSPTLFNEALHRDLADFRIQHPDLILLQYVDDLLLAATSELDCQQGTRALLQTLGNLGYRASAKKAQICQKQVKYLGYLLKEGQRWLTEARKETVMGQPTPKTPRQLREFLGTAGFCRLWIPGFAEMAAPLYPLTKPGTLFNWGPDQQKAYQEIKQALLTAPALGLPDLTKPFELFVDEKQGYAKGVLTQKLGPWRRPVAYLSKKLDPVAAGWPPCLRMVAAIAVLTKDAGKLTMGQPLVILAPHAVEALVKQPPDRWLSNARMTHYQALLLDTDRVQFGPVVALNPATLLPLPEEGLQHNCLDILAEAHGTRPDLTDQPLPDADHTWYTDGSSLLQEGQRKAGAAVTTETEVIWAKALPAGTSAQRAELIALTQALKMAEGKKLNVYTDSRYAFATAHIHGEIYRRRGWLTSEGKEIKNKDEILALLKALFLPKRLSIIHCPGHQKGHSAEARGNRMADQAARKAAITETPDTSTLLAGKRTADGSEFEKRTADGSEFESPKKKAKVE

SEQ ID NO: 7538 - protein, 2096 aa, synthetic construct
MPAAKRVKLDGGDKKYSIGLDIGTNSVGWAVITDEYKVPSKKFKVLGNTDRHSIKKNLIGALLFDSGETAEATRLKRTARRRYTRRKNRICYLQEIFSNEMAKVDDSFFHRLEESFLVEEDKKHERHPIFGNIVDEVAYHEKYPTIYHLRKKLVDSTDKADLRLIYLALAHMIKFRGHFLIEGDLNPDNSDVDKLFIQLVQTYNQLFEENPINASGVDAKAILSARLSKSRRLENLIAQLPGEKKNGLFGNLIALSLGLTPNFKSNFDLAEDAKLQLSKDTYDDDLDNLLAQIGDQYADLFLAAKNLSDAILLSDILRVNTEITKAPLSASMIKRYDEHHQDLTLLKALVRQQLPEKYKEIFFDQSKNGYAGYIDGGASQEEFYKFIKPILEKMDGTEELLVKLNREDLLRKQRTFDNGSIPHQIHLGELHAILRRQEDFYPFLKDNREKIEKILTFRIPYYVGPLARGNSRFAWMTRKSEETITPWNFEEVVDKGASAQSFIERMTNFDKNLPNEKVLPKHSLLYEYFTVYNELTKVKYVTEGMRKPAFLSGEQKKAIVDLLFKTNRKVTVKQLKEDYFKKIECFDSVEISGVEDRFNASLGTYHDLLKIIKDKDFLDNEENEDILEDIVLTLTLFEDREMIEERLKTYAHLFDDKVMKQLKRRRYTGWGRLSRKLINGIRDKQSGKTILDFLKSDGFANRNFMQLIHDDSLTFKEDIQKAQVSGQGDSLHEHIANLAGSPAIKKGILQTVKVVDELVKVMGRHKPENIVIEMARENQTTQKGQKNSRERMKRIEEGIKELGSQILKEHPVENTQLQNEKLYLYYLQNGRDMYVDQELDINRLSDYDVDHIVPQSFLKDDSIDNKVLTRSDKARGKSDNVPSEEVVKKMKNYWRQLLNAKLITQRKFDNLTKAERGGLSELDKAGFIKRQLVETRQITKHVAQILDSRMNTKYDENDKLIREVKVITLKSKLVSDFRKDFQFYKVREINNYHHAHDAYLNAVVGTALIKKYPKLESEFVYGDYKVYDVRKMIAKSEQEIGKATAKYFFYSNIMNFFKTEITLANGEIRKRPLIETNGETGEIVWDKGRDFATVRKVLSMPQVNIVKKTEVQTGGFSKESILPKRNSDKLIARKKDWDPKKYGGFDSPTVAYSVLVVAKVEKGKSKKLKSVKELLGITIMERSSFEKNPIDFLEAKGYKEVKKDLIIKLPKYSLFELENGRKRMLASAGELQKGNELALPSKYVNFLYLASHYEKLKGSPEDNEQKQLFVEQHKHYLDEIIEQISEFSKRVILADANLDKVLSAYNKHRDKPIREQAENIIHLFTLTNLGAPAAFKYFDTTIDRKRYTSTKEVLDATLIHQSITGLYETRIDLSQLGGDGGPAPGGGEAAAKGGTLNIEDEHRLHETSKEPDVSLGSTWLSDFPQAWAETGGMGLAVRQAPLIIPLKATSTPVSIKQYPMSQEARLGIKPHIQRLLDQGILVPCQSPWNTPLLPVKKPGTNDYRPVQDLREVNKRVEDIHPTVPNPYNLLSGLPPSHQWYTVLDLKDAFFCLRLHPTSQPLFAFEWRDPEMGISGQLTWTRLPQGFKNSPTLFDEALHRDLADFRIQHPDLILLQYVDDLLLAATSELDCQQGTRALLQTLGNLGYRASAKKAQICQKQVKYLGYLLKEGQRWLTEARKETVMGQPTPKTPRQLREFLGTAGFCRLWIPGFAEMAAPLYPLTKTGTLFNWGPDQQKAYQEIKQALLTAPALGLPDLTKPFELFVDEKQGYAKGVLTQKLGPWRRPVAYLSKKLDPVAAGWPPCLRMVAAIAVLTKDAGKLTMGQPLVILAPHAVEALVKQPPDRWLSNARMTHYQALLLDTDRVQFGPVVALNPATLLPLPEEGLQHNCLDILAEAHGTRPDLTDQPLPDADHTWYTDGSSLLQEGQRKAGAAVTTETEVIWAKALPAGTSAQRAELIALTQALKMAEGKKLNVYTDSRYAFATAHIHGEIYRRRGLLTSEGKEIKNKDEILALLKALFLPKRLSIIHCPGHQKGHSAEARGNRMADQAARKAAITETPDTSTLLAGKRTADGSEFEKRTADGSEFESPKKKAKVE

SEQ ID NO: 7539 - protein, 2096 aa, synthetic construct; identical to SEQ ID NO: 7537

SEQ ID NO: 7540 - protein, 2090 aa, synthetic construct
MPAAKRVKLDGGDKKYSIGLDIGTNSVGWAVITDEYKVPSKKFKVLGNTDRHSIKKNLIGALLFDSGETAEATRLKRTARRRYTRRKNRICYLQEIFSNEMAKVDDSFFHRLEESFLVEEDKKHERHPIFGNIVDEVAYHEKYPTIYHLRKKLVDSTDKADLRLIYLALAHMIKFRGHFLIEGDLNPDNSDVDKLFIQLVQTYNQLFEENPINASGVDAKAILSARLSKSRRLENLIAQLPGEKKNGLFGNLIALSLGLTPNFKSNFDLAEDAKLQLSKDTYDDDLDNLLAQIGDQYADLFLAAKNLSDAILLSDILRVNTEITKAPLSASMIKRYDEHHQDLTLLKALVRQQLPEKYKEIFFDQSKNGYAGYIDGGASQEEFYKFIKPILEKMDGTEELLVKLNREDLLRKQRTFDNGSIPHQIHLGELHAILRRQEDFYPFLKDNREKIEKILTFRIPYYVGPLARGNSRFAWMTRKSEETITPWNFEEVVDKGASAQSFIERMTNFDKNLPNEKVLPKHSLLYEYFTVYNELTKVKYVTEGMRKPAFLSGEQKKAIVDLLFKTNRKVTVKQLKEDYFKKIECFDSVEISGVEDRFNASLGTYHDLLKIIKDKDFLDNEENEDILEDIVLTLTLFEDREMIEERLKTYAHLFDDKVMKQLKRRRYTGWGRLSRKLINGIRDKQSGKTILDFLKSDGFANRNFMQLIHDDSLTFKEDIQKAQVSGQGDSLHEHIANLAGSPAIKKGILQTVKVVDELVKVMGRHKPENIVIEMARENQTTQKGQKNSRERMKRIEEGIKELGSQILKEHPVENTQLQNEKLYLYYLQNGRDMYVDQELDINRLSDYDVDHIVPQSFLKDDSIDNKVLTRSDKARGKSDNVPSEEVVKKMKNYWRQLLNAKLITQRKFDNLTKAERGGLSELDKAGFIKRQLVETRQITKHVAQILDSRMNTKYDENDKLIREVKVITLKSKLVSDFRKDFQFYKVREINNYHHAHDAYLNAVVGTALIKKYPKLESEFVYGDYKVYDVRKMIAKSEQEIGKATAKYFFYSNIMNFFKTEITLANGEIRKRPLIETNGETGEIVWDKGRDFATVRKVLSMPQVNIVKKTEVQTGGFSKESILPKRNSDKLIARKKDWDPKKYGGFDSPTVAYSVLVVAKVEKGKSKKLKSVKELLGITIMERSSFEKNPIDFLEAKGYKEVKKDLIIKLPKYSLFELENGRKRMLASAGELQKGNELALPSKYVNFLYLASHYEKLKGSPEDNEQKQLFVEQHKHYLDEIIEQISEFSKRVILADANLDKVLSAYNKHRDKPIREQAENIIHLFTLTNLGAPAAFKYFDTTIDRKRYTSTKEVLDATLIHQSITGLYETRIDLSQLGGDGGPAPGGGEAAAKGGTLQLDDEYRLYSPLVKPDQNIQFWLEQFPQAWAETAGMGLAKQVPPQVIQLKASATPVSVRQYPLSKEAQEGIRPHVQRLIQQGILVPVQSPWNTPLLPVRKPGTNDYRPVQDLREVNKRVQDIHPTVPNPYNLLCALPPQRSWYTVLDLKDAFFCLRLHPTSQPLFAFEWRDPGTGRTGQLTWTRLPQGFKNSPTIFDEALHRDLANFRIQHPQVTLLQYVDDLLLAGATKQDCLEGTKALLLELSDLGYRASAKKAQICRREVTYLGYSLRDGQRWLTEARKKTVVQIPAPTTAKQVREFLGTAGFCRLWIPGFATLAAPLYPLTKEKGEFSWAPEHQKAFDAIKKALLSAPALALPDVTKPFTLYVDERKGVARGVLTQTLGPWRRPVAYLSKKLDPVASGWPVCLKAIAAVAILVKDADKLTLGQNITVIAPHALENIVRQPPDRWMTNARMTHYQSLLLTERVTFAPPAALNPATLLPEETDEPVTHDCHQLLIEETGVRKDLTDIPLTGEVLTWFTDGSSYVVEGKRMAGAAVVDGTRTIWASSLPEGTSAQKAELMALTQALRLAEGKSINIYTDSRYAFATAHVHGAIYKQRGLLTSAGREIKNKEEILSLLEALHLPKRLAIIHCPGHQKAKDPISRGNQMADRVAKQAAQGVNLLAGKRTADGSEFEKRTADGSEFESPKKKAKVE

SEQ ID NO: 7541 - protein, 2090 aa, synthetic construct; identical to SEQ ID NO: 7540

SEQ ID NO: 7542 - protein, 2176 aa, synthetic construct
MPAAKRVKLDGGDKKYSIGLDIGTNSVGWAVITDEYKVPSKKFKVLGNTDRHSIKKNLIGALLFDSGETAEATRLKRTARRRYTRRKNRICYLQEIFSNEMAKVDDSFFHRLEESFLVEEDKKHERHPIFGNIVDEVAYHEKYPTIYHLRKKLVDSTDKADLRLIYLALAHMIKFRGHFLIEGDLNPDNSDVDKLFIQLVQTYNQLFEENPINASGVDAKAILSARLSKSRRLENLIAQLPGEKKNGLFGNLIALSLGLTPNFKSNFDLAEDAKLQLSKDTYDDDLDNLLAQIGDQYADLFLAAKNLSDAILLSDILRVNTEITKAPLSASMIKRYDEHHQDLTLLKALVRQQLPEKYKEIFFDQSKNGYAGYIDGGASQEEFYKFIKPILEKMDGTEELLVKLNREDLLRKQRTFDNGSIPHQIHLGELHAILRRQEDFYPFLKDNREKIEKILTFRIPYYVGPLARGNSRFAWMTRKSEETITPWNFEEVVDKGASAQSFIERMTNFDKNLPNEKVLPKHSLLYEYFTVYNELTKVKYVTEGMRKPAFLSGEQKKAIVDLLFKTNRKVTVKQLKEDYFKKIECFDSVEISGVEDRFNASLGTYHDLLKIIKDKDFLDNEENEDILEDIVLTLTLFEDREMIEERLKTYAHLFDDKVMKQLKRRRYTGWGRLSRKLINGIRDKQSGKTILDFLKSDGFANRNFMQLIHDDSLTFKEDIQKAQVSGQGDSLHEHIANLAGSPAIKKGILQTVKVVDELVKVMGRHKPENIVIEMARENQTTQKGQKNSRERMKRIEEGIKELGSQILKEHPVENTQLQNEKLYLYYLQNGRDMYVDQELDINRLSDYDVDHIVPQSFLKDDSIDNKVLTRSDKARGKSDNVPSEEVVKKMKNYWRQLLNAKLITQRKFDNLTKAERGGLSELDKAGFIKRQLVETRQITKHVAQILDSRMNTKYDENDKLIREVKVITLKSKLVSDFRKDFQFYKVREINNYHHAHDAYLNAVVGTALIKKYPKLESEFVYGDYKVYDVRKMIAKSEQEIGKATAKYFFYSNIMNFFKTEITLANGEIRKRPLIETNGETGEIVWDKGRDFATVRKVLSMPQVNIVKKTEVQTGGFSKESILPKRNSDKLIARKKDWDPKKYGGFDSPTVAYSVLVVAKVEKGKSKKLKSVKELLGITIMERSSFEKNPIDFLEAKGYKEVKKDLIIKLPKYSLFELENGRKRMLASAGELQKGNELALPSKYVNFLYLASHYEKLKGSPEDNEQKQLFVEQHKHYLDEIIEQISEFSKRVILADANLDKVLSAYNKHRDKPIREQAENIIHLFTLTNLGAPAAFKYFDTTIDRKRYTSTKEVLDATLIHQSITGLYETRIDLSQLGGDGGPAPGGGEAAAKGGMDPLQLLQPLEAEIKGTKLKAHWNSGATITCVPEAFLEDERPIQTMLIKTIHGEKQQDVYYLTFKVQGRKVEAEVLASPYDYILLNPSDVPWLMKKPLQLTVLVPLHEYQERLLQQTALPKEQKELLQKLFLKYDALWQHWENQVGHRRIKPHNIATGTLAPRPQKQYPINPKAKPSIQIVIDDLLKQGVLIQQNSTMNTPVYPVPKPDGKWRMVLDYREVNKTIPLIAAQNQHSAGILSSIYRGKYKTTLDLTNGFWAHPITPESYWLTAFTWQGKQYCWTRLPQGFLNSPALFNADVVDLLKEIPNVQAYVDDIYISHDDPQEHLEQLEKIFSILLNAGYVVSLKKSEIAQREVEFLGFNITKEGRGLTDTFKQKLLNITPPKDLKQLQSILGLLNFARNFIPNYSELVKPLYTIVAPANGKFISWTEDNSNQLQHIISVLNQADNLEERNPETRLIIKVNSSPSAGYIRYYNEGSKRPIMYVNYIFSKAEAKFTQTEKLLTTMHKGLIKAMDLAMGQEILVYSPIVSMTKIQRTPLPERKALPVRWITWMTYLEDPRIQFHYDKSLPELQQIPNVTEDVIAKTKHPSEFAMVFYTDGSAIKHPDVNKSHSAGMGIAQVQFIPEYKIVHQWSIPLGDHTAQLAEIAAVEFACKKALKISGPVLIVTDSFYVAESANKELPYWKSNGFLNNKKKPLRHVSKWKSIAECLQLKPDIIIMHEKGHQQPMTTLHTEGNNLADKLATQGSYVVHAGKRTADGSEFEKRTADGSEFESPKKKAKVE

SEQ ID NO: 7543 - protein, 2087 aa, synthetic construct
MPAAKRVKLDGGDKKYSIGLDIGTNSVGWAVITDEYKVPSKKFKVLGNTDRHSIKKNLIGALLFDSGETAEATRLKRTARRRYTRRKNRICYLQEIFSNEMAKVDDSFFHRLEESFLVEEDKKHERHPIFGNIVDEVAYHEKYPTIYHLRKKLVDSTDKADLRLIYLALAHMIKFRGHFLIEGDLNPDNSDVDKLFIQLVQTYNQLFEENPINASGVDAKAILSARLSKSRRLENLIAQLPGEKKNGLFGNLIALSLGLTPNFKSNFDLAEDAKLQLSKDTYDDDLDNLLAQIGDQYADLFLAAKNLSDAILLSDILRVNTEITKAPLSASMIKRYDEHHQDLTLLKALVRQQLPEKYKEIFFDQSKNGYAGYIDGGASQEEFYKFIKPILEKMDGTEELLVKLNREDLLRKQRTFDNGSIPHQIHLGELHAILRRQEDFYPFLKDNREKIEKILTFRIPYYVGPLARGNSRFAWMTRKSEETITPWNFEEVVDKGASAQSFIERMTNFDKNLPNEKVLPKHSLLYEYFTVYNELTKVKYVTEGMRKPAFLSGEQKKAIVDLLFKTNRKVTVKQLKEDYFKKIECFDSVEISGVEDRFNASLGTYHDLLKIIKDKDFLDNEENEDILEDIVLTLTLFEDREMIEERLKTYAHLFDDKVMKQLKRRRYTGWGRLSRKLINGIRDKQSGKTILDFLKSDGFANRNFMQLIHDDSLTFKEDIQKAQVSGQGDSLHEHIANLAGSPAIKKGILQTVKVVDELVKVMGRHKPENIVIEMARENQTTQKGQKNSRERMKRIEEGIKELGSQILKEHPVENTQLQNEKLYLYYLQNGRDMYVDQELDINRLSDYDVDHIVPQSFLKDDSIDNKVLTRSDKARGKSDNVPSEEVVKKMKNYWRQLLNAKLITQRKFDNLTKAERGGLSELDKAGFIKRQLVETRQITKHVAQILDSRMNTKYDENDKLIREVKVITLKSKLVSDFRKDFQFYKVREINNYHHAHDAYLNAVVGTALIKKYPKLESEFVYGDYKVYDVRKMIAKSEQEIGKATAKYFFYSNIMNFFKTEITLANGEIRKRPLIETNGETGEIVWDKGRDFATVRKVLSMPQVNIVKKTEVQTGGFSKESILPKRNSDKLIARKKDWDPKKYGGFDSPTVAYSVLVVAKVEKGKSKKLKSVKELLGITIMERSSFEKNPIDFLEAKGYKEVKKDLIIKLPKYSLFELENGRKRMLASAGELQKGNELALPSKYVNFLYLASHYEKLKGSPEDNEQKQLFVEQHKHYLDEIIEQISEFSKRVILADANLDKVLSAYNKHRDKPIREQAENIIHLFTLTNLGAPAAFKYFDTTIDRKRYTSTKEVLDATLIHQSITGLYETRIDLSQLGGDGGPAPGGGEAAAKGGIPWLMKKPLQLTTLVPLQEYEERLLKQTMLTGSYKEKLQSLFLKYDALWQHWENQVGHRRIKPHHIATGTVNPRPQKQYPINPKAKASIQTVINDLLKQGVLIQQNSIMNTPVYPVPKPDGKWRMVLDYREVNKTIPLIAAQNQHSAGILSSIFRGKYKTTLDLSNGFWAHSITPESYWLTAFTWLGQQYCWTRLPQGFLNSPALFNADVVDLLKEVPNVQVYVDDIYISHDDPREHLEQLEKVFSLLLNAGYVVSLKKSEIAQHEVEFLGFNITKEGRGLTETFKQKLLNITPPRDLKQLQSILGKLNFARNFIPNFSELVKPLYNIIATAPGKYITWTTDNSQQLQNIISMLNSAENLEERNPEVRLIMKVNTSPSAGYIRFYNEFAKRPIMYLNYVYTKAEVKFTNTEKLLTTIHKGLIKALDLGMGQEILVYSPIVSMTKIQKTPLPERKALPIRWITWMSYLEDPRIQFHYDKTLPELQQVPTVTDDIIAKIKHPSEFSMVFYTDGSAIKHPNVNKSHNAGMGIAQVQFKPEFTVINTWSIPLGDHTAQLAEVAAVEFACKKALKIDGPVLIVTDSFYVAESVNKELPYWQSNGFFNNKKKPLKHVSKWKSIADCIQLKPDIIIIHEKGHQPTASTFHTEGNNLADKLATQGSYVVNAGKRTADGSEFEKRTADGSEFESPKKKAKVE

SEQ ID NO: 7544 - protein, 2094 aa, synthetic construct
MPAAKRVKLDGGDKKYSIGLDIGTNSVGWAVITDEYKVPSKKFKVLGNTDRHSIKKNLIGALLFDSGETAEATRLKRTARRRYTRRKNRICYLQEIFSNEMAKVDDSFFHRLEESFLVEEDKKHERHPIFGNIVDEVAYHEKYPTIYHLRKKLVDSTDKADLRLIYLALAHMIKFRGHFLIEGDLNPDNSDVDKLFIQLVQTYNQLFEENPINASGVDAKAILSARLSKSRRLENLIAQLPGEKKNGLFGNLIALSLGLTPNFKSNFDLAEDAKLQLSKDTYDDDLDNLLAQIGDQYADLFLAAKNLSDAILLSDILRVNTEITKAPLSASMIKRYDEHHQDLTLLKALVRQQLPEKYKEIFFDQSKNGYAGYIDGGASQEEFYKFIKPILEKMDGTEELLVKLNREDLLRKQRTFDNGSIPHQIHLGELHAILRRQEDFYPFLKDNREKIEKILTFRIPYYVGPLARGNSRFAWMTRKSEETITPWNFEEVVDKGASAQSFIERMTNFDKNLPNEKVLPKHSLLYEYFTVYNELTKVKYVTEGMRKPAFLSGEQKKAIVDLLFKTNRKVTVKQLKEDYFKKIECFDSVEISGVEDRFNASLGTYHDLLKIIKDKDFLDNEENEDILEDIVLTLTLFEDREMIEERLKTYAHLFDDKVMKQLKRRRYTGWGRLSRKLINGIRDKQSGKTILDFLKSDGFANRNFMQLIHDDSLTFKEDIQKAQVSGQGDSLHEHIANLAGSPAIKKGILQTVKVVDELVKVMGRHKPENIVIEMARENQTTQKGQKNSRERMKRIEEGIKELGSQILKEHPVENTQLQNEKLYLYYLQNGRDMYVDQELDINRLSDYDVDHIVPQSFLKDDSIDNKVLTRSDKARGKSDNVPSEEVVKKMKNYWRQLLNAKLITQRKFDNLTKAERGGLSELDKAGFIKRQLVETRQITKHVAQILDSRMNTKYDENDKLIREVKVITLKSKLVSDFRKDFQFYKVREINNYHHAHDAYLNAVVGTALIKKYPKLESEFVYGDYKVYDVRKMIAKSEQEIGKATAKYFFYSNIMNFFKTEITLANGEIRKRPLIETNGETGEIVWDKGRDFATVRKVLSMPQVNIVKKTEVQTGGFSKESILPKRNSDKLIARKKDWDPKKYGGFDSPTVAYSVLVVAKVEKGKSKKLKSVKELLGITIMERSSFEKNPIDFLEAKGYKEVKKDLIIKLPKYSLFELENGRKRMLASAGELQKGNELALPSKYVNFLYLASHYEKLKGSPEDNEQKQLFVEQHKHYLDEIIEQISEFSKRVILADANLDKVLSAYNKHRDKPIREQAENIIHLFTLTNLGAPAAFKYFDTTIDRKRYTSTKEVLDATLIHQSITGLYETRIDLSQLGGDGGPAPGGGEAAAKGGVLNLEEEYRLHEKPVPSSIDPSWLQLFPTVWAERAGMGLANQVPPVVVELRSGASPVAVRQYPMSKEAREGIRPHIQRFLDLGVLVPCQSPWNTPLLPVKKPGTNDYRPVQDLREINKRVQDIHPTVPNPYNLLSSLPPSHTWYSVLDLKDAFFCLKLHPNSQPLFAFEWRDPEKGNTGQLTWTRLPQGFKNSPTLFNEALHRDLAPFRALNPQVVLLQYVDDLLVAAPTYRDCKEGTQKLLQELSKLGYRVSAKKAQLCQKEVTYLGYLLKEGKRWLTPARKATVMKIPPPTTPRQVREFLGTAGFCRLWIPGFASLAAPLYPLTKPSIPFIWTEEHQKAFDRIKEALLSAPALALPDLTKPFTLYVDERAGVARGVLTQTLGPWRRPVAYLSKKLDPVASGWPTCLKAVAAVALLLKDADKLTLGQNVTVIASHSLESIVRQPPDRWMTNARMTHYQSLLLNERVSFAPPAVLNPATLLPVESEATPVHRCSEILAEETGTRRDLKDQPLPGVPAWYTDGSSFIAEGKRRAGAAIVDGKRTVWASSLPEGTSAQKAELVALTQALRLAEGKDINIYTDSRYAFATAHIHGAIYKQRGWLTSAGKDIKNKEEILALLEAIHLPKRVAIIHCPGHQKGNDPVATGNRRADEAAKQAALSTRVLAETTKPAGKRTADGSEFEKRTADGSEFESPKKKAKVE

SEQ ID NO: 7545 - protein, 2094 aa, synthetic construct
MPAAKRVKLDGGDKKYSIGLDIGTNSVGWAVITDEYKVPSKKFKVLGNTDRHSIKKNLIGALLFDSGETAEATRLKRTARRRYTRRKNRICYLQEIFSNEMAKVDDSFFHRLEESFLVEEDKKHERHPIFGNIVDEVAYHEKYPTIYHLRKKLVDSTDKADLRLIYLALAHMIKFRGHFLIEGDLNPDNSDVDKLFIQLVQTYNQLFEENPINASGVDAKAILSARLSKSRRLENLIAQLPGEKKNGLFGNLIALSLGLTPNFKSNFDLAEDAKLQLSKDTYDDDLDNLLAQIGDQYADLFLAAKNLSDAILLSDILRVNTEITKAPLSASMIKRYDEHHQDLTLLKALVRQQLPEKYKEIFFDQSKNGYAGYIDGGASQEEFYKFIKPILEKMDGTEELLVKLNREDLLRKQRTFDNGSIPHQIHLGELHAILRRQEDFYPFLKDNREKIEKILTFRIPYYVGPLARGNSRFAWMTRKSEETITPWNFEEVVDKGASAQSFIERMTNFDKNLPNEKVLPKHSLLYEYFTVYNELTKVKYVTEGMRKPAFLSGEQKKAIVDLLFKTNRKVTVKQLKEDYFKKIECFDSVEISGVEDRFNASLGTYHDLLKIIKDKDFLDNEENEDILEDIVLTLTLFEDREMIEERLKTYAHLFDDKVMKQLKRRRYTGWGRLSRKLINGIRDKQSGKTILDFLKSDGFANRNFMQLIHDDSLTFKEDIQKAQVSGQGDSLHEHIANLAGSPAIKKGILQTVKVVDELVKVMGRHKPENIVIEMARENQTTQKGQKNSRERMKRIEEGIKELGSQILKEHPVENTQLQNEKLYLYYLQNGRDMYVDQELDINRLSDYDVDHIVPQSFLKDDSIDNKVLTRSDKARGKSDNVPSEEVVKKMKNYWRQLLNAKLITQRKFDNLTKAERGGLSELDKAGFIKRQLVETRQITKHVAQILDSRMNTKYDENDKLIREVKVITLKSKLVSDFRKDFQFYKVREINNYHHAHDAYLNAVVGTALIKKYPKLESEFVYGDYKVYDVRKMIAKSEQEIGKATAKYFFYSNIMNFFKTEITLANGEIRKRPLIETNGETGEIVWDKGRDFATVRKVLSMPQVNIVKKTEVQTGGFSKESILPKRNSDKLIARKKDWDPKKYGGFDSPTVAYSVLVVAKVEKGKSKKLKSVKELLGITIMERSSFEKNPIDFLEAKGYKEVKKDLIIKLPKYSLFELENGRKRMLASAGELQKGNELALPSKYVNFLYLASHYEKLKGSPEDNEQKQLFVEQHKHYLDEIIEQISEFSKRVILADANLDKVLSAYNKHRDKPIREQAENIIHLFTLTNLGAPAAFKYFDTTIDRKRYTSTKEVLDATLIHQSITGLYETRIDLSQLGGDGGPAPGGGEAAAKGGVLNLEEEYRLHEKPVPSSIDPSWLQLFPTVWAERAGMGLANQVPPVVVELRSGASPVAVRQYPMSKEAREGIRPHIQRFLDLGVLVPCQSPWNTPLLPVKKPGTNDYRPVQDLREINKRVQDIHPTVPNPYNLLSSLPPSHTWYSVLDLKDAFFCLKLHPNSQPLFAFEWRDPEKGNTGQLTWTRLPQGFKNSPTLFNEALHRDLAPFRALNPQVVLLQYVDDLLVAAPTYRDCKEGTQKLLQELSKLGYRVSAKKAQLCQKEVTYLGYLLKEGKRWLTPARKATVMKIPPPTTPRQVREFLGKAGFCRLFIPGFASLAAPLYPLTKPSIPFIWTEEHQKAFDRIKEALLSAPALALPDLTKPFTLYVDERAGVARGVLTQTLGPWRRPVAYLSKKLDPVASGWPTCLKAVAAVALLLKDADKLTLGQNVTVIASHSLESIVRQPPDRWMTNARMTHYQSLLLNERVSFAPPAVLNPATLLPVESEATPVHRCSEILAEETGTRRDLKDQPLPGVPAWYTDGSSFIAEGKRRAGAAIVDGKRTVWASSLPEGTSAQKAELVALTQALRLAEGKDINIYTDSRYAFATAHIHGAIYKQRGWLTSAGKDIKNKEEILALLEAIHLPKRVAIIHCPGHQKGNDPVATGNRRADEAAKQAALSTRVLAETTKPAGKRTADGSEFEKRTADGSEFESPKKKAKVE

SEQ ID NO: 7546 - protein, 2096 aa, synthetic construct
MPAAKRVKLDGGDKKYSIGLDIGTNSVGWAVITDEYKVPSKKFKVLGNTDRHSIKKNLIGALLFDSGETAEATRLKRTARRRYTRRKNRICYLQEIFSNEMAKVDDSFFHRLEESFLVEEDKKHERHPIFGNIVDEVAYHEKYPTIYHLRKKLVDSTDKADLRLIYLALAHMIKFRGHFLIEGDLNPDNSDVDKLFIQLVQTYNQLFEENPINASGVDAKAILSARLSKSRRLENLIAQLPGEKKNGLFGNLIALSLGLTPNFKSNFDLAEDAKLQLSKDTYDDDLDNLLAQIGDQYADLFLAAKNLSDAILLSDILRVNTEITKAPLSASMIKRYDEHHQDLTLLKALVRQQLPEKYKEIFFDQSKNGYAGYIDGGASQEEFYKFIKPILEKMDGTEELLVKLNREDLLRKQRTFDNGSIPHQIHLGELHAILRRQEDFYPFLKDNREKIEKILTFRIPYYVGPLARGNSRFAWMTRKSEETITPWNFEEVVDKGASAQSFIERMTNFDKNLPNEKVLPKHSLLYEYFTVYNELTKVKYVTEGMRKPAFLSGEQKKAIVDLLFKTNRKVTVKQLKEDYFKKIECFDSVEISGVEDRFNASLGTYHDLLKIIKDKDFLDNEENEDILEDIVLTLTLFEDREMIEERLKTYAHLFDDKVMKQLKRRRYTGWGRLSRKLINGIRDKQSGKTILDFLKSDGFANRNFMQLIHDDSLTFKEDIQKAQVSGQGDSLHEHIANLAGSPAIKKGILQTVKVVDELVKVMGRHKPENIVIEMARENQTTQKGQKNSRERMKRIEEGIKELGSQILKEHPVENTQLQNEKLYLYYLQNGRDMYVDQELDINRLSDYDVDHIVPQSFLKDDSIDNKVLTRSDKARGKSDNVPSEEVVKKMKNYWRQLLNAKLITQRKFDNLTKAERGGLSELDKAGFIKRQLVETRQITKHVAQILDSRMNTKYDENDKLIREVKVITLKSKLVSDFRKDFQFYKVREINNYHHAHDAYLNAVVGTALIKKYPKLESEFVYGDYKVYDVRKMIAKSEQEIGKATAKYFFYSNIMNFFKTEITLANGEIRKRPLIETNGETGEIVWDKGRDFATVRKVLSMPQVNIVKKTEVQTGGFSKESILPKRNSDKLIARKKDWDPKKYGGFDSPTVAYSVLVVAKVEKGKSKKLKSVKELLGITIMERSSFEKNPIDFLEAKGYKEVKKDLIIKLPKYSLFELENGRKRMLASAGELQKGNELALPSKYVNFLYLASHYEKLKGSPEDNEQKQLFVEQHKHYLDEIIEQISEFSKRVILADANLDKVLSAYNKHRDKPIREQAENIIHLFTLTNLGAPAAFKYFDTTIDRKRYTSTKEVLDATLIHQSITGLYETRIDLSQLGGDGGPAPGGGEAAAKGGTLNIEDEYRLHETSKEPDVPLGSTWLSDFPQAWAETGGMGLAVRQAPLIIPLKATSTPVSIKQYPMSQEARLGIKPHIQRLLDQGILVPCQSPWNTPLLPVKKPGTNDYRPVQDLREVNKRVEDIHPTVPNPYNLLSGLPPSHQWYTVLDLKDAFFCLRLHPTSQPLFAFEWRDPEMGISGQLTWTRLPQGFKNSPTLFNEALHRDLADFRIQHPDLILLQYVDDLLLAATSEQDCQRGTRALLQTLGNLGYRASAKKAQICQKQVKYLGYLLKEGQRWLTEARKETVMGQPTPKTPRQLREFLGTAGFCRLWIPGFAEMAAPLYPLTKPGTLFNWGPDQQKAYQEIKQALLTAPALGLPDLTKPFELFVDEKQGYAKGVLTQKLGPWRRPVAYLSKKLDPVAAGWPPCLRMVAAIAVLTKDAGKLTMGQPLVILAPHAVEALVKQPPDRWLSNARMTHYQAMLLDTDRVQFGPVVALNPATLLPLPEKEAPHDCLEILAETHGTRPDLTDQPIPDADYTWYTDGSSFLQEGQRRAGAAVTTETEVIWARALPAGTSAQRAELIALTQALKMAEGKKLNVYTDSRYAFATAHVHGEIYRRRGWLTSEGREIKNKNEILALLKALFLPKRLSIIHCPGHQKGNSAEARGNRMADQAAREAAMKAVLETSTLLAGKRTADGSEFEKRTADGSEFESPKKKAKVE

SEQ ID NO: 7547 - protein, 2096 aa, synthetic construct
MPAAKRVKLDGGDKKYSIGLDIGTNSVGWAVITDEYKVPSKKFKVLGNTDRHSIKKNLIGALLFDSGETAEATRLKRTARRRYTRRKNRICYLQEIFSNEMAKVDDSFFHRLEESFLVEEDKKHERHPIFGNIVDEVAYHEKYPTIYHLRKKLVDSTDKADLRLIYLALAHMIKFRGHFLIEGDLNPDNSDVDKLFIQLVQTYNQLFEENPINASGVDAKAILSARLSKSRRLENLIAQLPGEKKNGLFGNLIALSLGLTPNFKSNFDLAEDAKLQLSKDTYDDDLDNLLAQIGDQYADLFLAAKNLSDAILLSDILRVNTEITKAPLSASMIKRYDEHHQDLTLLKALVRQQLPEKYKEIFFDQSKNGYAGYIDGGASQEEFYKFIKPILEKMDGTEELLVKLNREDLLRKQRTFDNGSIPHQIHLGELHAILRRQEDFYPFLKDNREKIEKILTFRIPYYVGPLARGNSRFAWMTRKSEETITPWNFEEVVDKGASAQSFIERMTNFDKNLPNEKVLPKHSLLYEYFTVYNELTKVKYVTEGMRKPAFLSGEQKKAIVDLLFKTNRKVTVKQLKEDYFKKIECFDSVEISGVEDRFNASLGTYHDLLKIIKDKDFLDNEENEDILEDIVLTLTLFEDREMIEERLKTYAHLFDDKVMKQLKRRRYTGWGRLSRKLINGIRDKQSGKTILDFLKSDGFANRNFMQLIHDDSLTFKEDIQKAQVSGQGDSLHEHIANLAGSPAIKKGILQTVKVVDELVKVMGRHKPENIVIEMARENQTTQKGQKNSRERMKRIEEGIKELGSQILKEHPVENTQLQNEKLYLYYLQNGRDMYVDQELDINRLSDYDVDHIVPQSFLKDDSIDNKVLTRSDKARGKSDNVPSEEVVKKMKNYWRQLLNAKLITQRKFDNLTKAERGGLSELDKAGFIKRQLVETRQITKHVAQILDSRMNTKYDENDKLIREVKVITLKSKLVSDFRKDFQFYKVREINNYHHAHDAYLNAVVGTALIKKYPKLESEFVYGDYKVYDVRKMIAKSEQEIGKATAKYFFYSNIMNFFKTEITLANGEIRKRPLIETNGETGEIVWDKGRDFATVRKVLSMPQVNIVKKTEVQTGGFSKESILPKRNSDKLIARKKDWDPKKYGGFDSPTVAYSVLVVAKVEKGKSKKLKSVKELLGITIMERSSFEKNPIDFLEAKGYKEVKKDLIIKLPKYSLFELENGRKRMLASAGELQKGNELALPSKYVNFLYLASHYEKLKGSPEDNEQKQLFVEQHKHYLDEIIEQISEFSKRVILADANLDKVLSAYNKHRDKPIREQAENIIHLFTLTNLGAPAAFKYFDTTIDRKRYTSTKEVLDATLIHQSITGLYETRIDLSQLGGDGGPAPGGGEAAAKGGTLNIEDEYRLHETSKEPDVPLGSTWLSDFPQAWAETGGMGLAVRQAPLIIPLKATSTPVSIKQYPMSQEARLGIKPHIQRLLDQGILVPCQSPWNTPLLPVKKPGTNDYRPVQDLREVNKRVEDIHPTVPNPYNLLSGLPPSHQWYTVLDLKDAFFCLRLHPTSQPLFAFEWRDPEMGISGQLTWTRLPQGFKNSPTLFNEALHRDLADFRIQHPDLILLQYVDDLLLAATSEQDCQRGTRALLQTLGNLGYRASAKKAQICQKQVKYLGYLLKEGQRWLTEARKETVMGQPTPKTPRQLREFLGKAGFCRLFIPGFAEMAAPLYPLTKPGTLFNWGPDQQKAYQEIKQALLTAPALGLPDLTKPFELFVDEKQGYAKGVLTQKLGPWRRPVAYLSKKLDPVAAGWPPCLRMVAAIAVLTKDAGKLTMGQPLVILAPHAVEALVKQPPDRWLSNARMTHYQAMLLDTDRVQFGPVVALNPATLLPLPEKEAPHDCLEILAETHGTRPDLTDQPIPDADYTWYTDGSSFLQEGQRRAGAAVTTETEVIWARALPAGTSAQRAELIALTQALKMAEGKKLNVYTDSRYAFATAHVHGEIYRRRGWLTSEGREIKNKNEILALLKALFLPKRLSIIHCPGHQKGNSAEARGNRMADQAAREAAMKAVLETSTLLAGKRTADGSEFEKRTADGSEFESPKKKAKVE

SEQ ID NO: 7548 - protein, 2173 aa, synthetic construct
MPAAKRVKLDGGDKKYSIGLDIGTNSVGWAVITDEYKVPSKKFKVLGNTDRHSIKKNLIGALLFDSGETAEATRLKRTARRRYTRRKNRICYLQEIFSNEMAKVDDSFFHRLEESFLVEEDKKHERHPIFGNIVDEVAYHEKYPTIYHLRKKLVDSTDKADLRLIYLALAHMIKFRGHFLIEGDLNPDNSDVDKLFIQLVQTYNQLFEENPINASGVDAKAILSARLSKSRRLENLIAQLPGEKKNGLFGNLIALSLGLTPNFKSNFDLAEDAKLQLSKDTYDDDLDNLLAQIGDQYADLFLAAKNLSDAILLSDILRVNTEITKAPLSASMIKRYDEHHQDLTLLKALVRQQLPEKYKEIFFDQSKNGYAGYIDGGASQEEFYKFIKPILEKMDGTEELLVKLNREDLLRKQRTFDNGSIPHQIHLGELHAILRRQEDFYPFLKDNREKIEKILTFRIPYYVGPLARGNSRFAWMTRKSEETITPWNFEEVVDKGASAQSFIERMTNFDKNLPNEKVLPKHSLLYEYFTVYNELTKVKYVTEGMRKPAFLSGEQKKAIVDLLFKTNRKVTVKQLKEDYFKKIECFDSVEISGVEDRFNASLGTYHDLLKIIKDKDFLDNEENEDILEDIVLTLTLFEDREMIEERLKTYAHLFDDKVMKQLKRRRYTGWGRLSRKLINGIRDKQSGKTILDFLKSDGFANRNFMQLIHDDSLTFKEDIQKAQVSGQGDSLHEHIANLAGSPAIKKGILQTVKVVDELVKVMGRHKPENIVIEMARENQTTQKGQKNSRERMKRIEEGIKELGSQILKEHPVENTQLQNEKLYLYYLQNGRDMYVDQELDINRLSDYDVDHIVPQSFLKDDSIDNKVLTRSDKARGKSDNVPSEEVVKKMKNYWRQLLNAKLITQRKFDNLTKAERGGLSELDKAGFIKRQLVETRQITKHVAQILDSRMNTKYDENDKLIREVKVITLKSKLVSDFRKDFQFYKVREINNYHHAHDAYLNAVVGTALIKKYPKLESEFVYGDYKVYDVRKMIAKSEQEIGKATAKYFFYSNIMNFFKTEITLANGEIRKRPLIETNGETGEIVWDKGRDFATVRKVLSMPQVNIVKKTEVQTGGFSKESILPKRNSDKLIARKKDWDPKKYGGFDSPTVAYSVLVVAKVEKGKSKKLKSVKELLGITIMERSSFEKNPIDFLEAKGYKEVKKDLIIKLPKYSLFELENGRKRMLASAGELQKGNELALPSKYVNFLYLASHYEKLKGSPEDNEQKQLFVEQHKHYLDEIIEQISEFSKRVILADANLDKVLSAYNKHRDKPIREQAENIIHLFTLTNLGAPAAFKYFDTTIDRKRYTSTKEVLDATLIHQSITGLYETRIDLSQLGGDGGPAPEAAAKGGGGGMDLLKPLTVERKGVKIKGYWNSQADITCVPKDLLQGEEPVRQQNVTTIHGTQEGDVYYVNLKIDGRRINTEVIGTTLDYAIITPGDVPWILKKPLELTIKLDLEEQQGTLLNNSILSKKGKEELKQLFEKYSALWQSWENQVGHRRIRPHKIATGTVKPTPQKQYHINPKAKPDIQIVINDLLKQGVLIQKESTMNTPVYPVPKPNGRWRMVLDYRAVNKVTPLIAVQNQHSYGILGSLFKGRYKTTIDLSNGFWAHPIVPEDYWITAFTWQGKQYCWTVLPQGFLNSPGLFTGDVVDLLQGIPNVEVYVDDVYISHDSEKEHLEYLDILFNRLKEAGYIISLKKSNIANSIVDFLGFQITNEGRGLTDTFKEKLENITAPTTLKQLQSILGLLNFARNFIPDFTELIAPLYALIPKSTKNYVPWQIEHSTTLETLITKLNGAEYLQGRKGDKTLIMKVNASYTTGYIRYYNEGEKKPISYVSIVFSKTELKFTELEKLLTTVHKGLLKALDLSMGQNIHVYSPIVSMQNIQKTPQTAKKALASRWLSWLSYLEDPRIRFFYDPQMPALKDLPAVDTGKDNKKHPSNFQHIFYTDGSAITSPTKEGHLNAGMGIVYFINKDGNLQKQQEWSISLGNHTAQFAEIAAFEFALKKCLPLGGNILVVTDSNYVAKAYNEELDVWASNGFVNNRKKPLKHISKWKSVADLKRLRPDVVVTHEPGHQKLDSSPHAYGNNLADQLATQASFKVHAGKRTADGSEFEKRTADGSEFESPKKKAKVE

SEQ ID NO: 7549 - protein, 2087 aa, synthetic construct
MPAAKRVKLDGGDKKYSIGLDIGTNSVGWAVITDEYKVPSKKFKVLGNTDRHSIKKNLIGALLFDSGETAEATRLKRTARRRYTRRKNRICYLQEIFSNEMAKVDDSFFHRLEESFLVEEDKKHERHPIFGNIVDEVAYHEKYPTIYHLRKKLVDSTDKADLRLIYLALAHMIKFRGHFLIEGDLNPDNSDVDKLFIQLVQTYNQLFEENPINASGVDAKAILSARLSKSRRLENLIAQLPGEKKNGLFGNLIALSLGLTPNFKSNFDLAEDAKLQLSKDTYDDDLDNLLAQIGDQYADLFLAAKNLSDAILLSDILRVNTEITKAPLSASMIKRYDEHHQDLTLLKALVRQQLPEKYKEIFFDQSKNGYAGYIDGGASQEEFYKFIKPILEKMDGTEELLVKLNREDLLRKQRTFDNGSIPHQIHLGELHAILRRQEDFYPFLKDNREKIEKILTFRIPYYVGPLARGNSRFAWMTRKSEETITPWNFEEVVDKGASAQSFIERMTNFDKNLPNEKVLPKHSLLYEYFTVYNELTKVKYVTEGMRKPAFLSGEQKKAIVDLLFKTNRKVTVKQLKEDYFKKIECFDSVEISGVEDRFNASLGTYHDLLKIIKDKDFLDNEENEDILEDIVLTLTLFEDREMIEERLKTYAHLFDDKVMKQLKRRRYTGWGRLSRKLINGIRDKQSGKTILDFLKSDGFANRNFMQLIHDDSLTFKEDIQKAQVSGQGDSLHEHIANLAGSPAIKKGILQTVKVVDELVKVMGRHKPENIVIEMARENQTTQKGQKNSRERMKRIEEGIKELGSQILKEHPVENTQLQNEKLYLYYLQNGRDMYVDQELDINRLSDYDVDHIVPQSFLKDDSIDNKVLTRSDKARGKSDNVPSEEVVKKMKNYWRQLLNAKLITQRKFDNLTKAERGGLSELDKAGFIKRQLVETRQITKHVAQILDSRMNTKYDENDKLIREVKVITLKSKLVSDFRKDFQFYKVREINNYHHAHDAYLNAVVGTALIKKYPKLESEFVYGDYKVYDVRKMIAKSEQEIGKATAKYFFYSNIMNFFKTEITLANGEIRKRPLIETNGETGEIVWDKGRDFATVRKVLSMPQVNIVKKTEVQTGGFSKESILPKRNSDKLIARKKDWDPKKYGGFDSPTVAYSVLVVAKVEKGKSKKLKSVKELLGITIMERSSFEKNPIDFLEAKGYKEVKKDLIIKLPKYSLFELENGRKRMLASAGELQKGNELALPSKYVNFLYLASHYEKLKGSPEDNEQKQLFVEQHKHYLDEIIEQISEFSKRVILADANLDKVLSAYNKHRDKPIREQAENIIHLFTLTNLGAPAAFKYFDTTIDRKRYTSTKEVLDATLIHQSITGLYETRIDLSQLGGDGGPAPEAAAKGGGGGVPWILKKPLELTIKLDLEEQQGTLLNNSILSKKGKEELKQLFEKYSALWQSWENQVGHRRIRPHKIATGTVKPTPQKQYHINPKAKPDIQIVINDLLKQGVLIQKESTMNTPVYPVPKPNGRWRMVLDYRAVNKVTPLIAVQNQHSYGILGSLFKGRYKTTIDLSNGFWAHPIVPEDYWITAFTWQGKQYCWTVLPQGFLNSPGLFTGDVVDLLQGIPNVEVYVDDVYISHDSEKEHLEYLDILFNRLKEAGYIISLKKSNIANSIVDFLGFQITNEGRGLTDTFKEKLENITAPTTLKQLQSILGLLNFARNFIPDFTELIAPLYALIPKSTKNYVPWQIEHSTTLETLITKLNGAEYLQGRKGDKTLIMKVNASYTTGYIRYYNEGEKKPISYVSIVFSKTELKFTELEKLLTTVHKGLLKALDLSMGQNIHVYSPIVSMQNIQKTPQTAKKALASRWLSWLSYLEDPRIRFFYDPQMPALKDLPAVDTGKDNKKHPSNFQHIFYTDGSAITSPTKEGHLNAGMGIVYFINKDGNLQKQQEWSISLGNHTAQFAEIAAFEFALKKCLPLGGNILVVTDSNYVAKAYNEELDVWASNGFVNNRKKPLKHISKWKSVADLKRLRPDVVVTHEPGHQKLDSSPHAYGNNLADQLATQASFKVHAGKRTADGSEFEKRTADGSEFESPKKKAKVE

SEQ ID NO: 7550 - protein, 2095 aa, synthetic construct
MPAAKRVKLDGGDKKYSIGLDIGTNSVGWAVITDEYKVPSKKFKVLGNTDRHSIKKNLIGALLFDSGETAEATRLKRTARRRYTRRKNRICYLQEIFSNEMAKVDDSFFHRLEESFLVEEDKKHERHPIFGNIVDEVAYHEKYPTIYHLRKKLVDSTDKADLRLIYLALAHMIKFRGHFLIEGDLNPDNSDVDKLFIQLVQTYNQLFEENPINASGVDAKAILSARLSKSRRLENLIAQLPGEKKNGLFGNLIALSLGLTPNFKSNFDLAEDAKLQLSKDTYDDDLDNLLAQIGDQYADLFLAAKNLSDAILLSDILRVNTEITKAPLSASMIKRYDEHHQDLTLLKALVRQQLPEKYKEIFFDQSKNGYAGYIDGGASQEEFYKFIKPILEKMDGTEELLVKLNREDLLRKQRTFDNGSIPHQIHLGELHAILRRQEDFYPFLKDNREKIEKILTFRIPYYVGPLARGNSRFAWMTRKSEETITPWNFEEVVDKGASAQSFIERMTNFDKNLPNEKVLPKHSLLYEYFTVYNELTKVKYVTEGMRKPAFLSGEQKKAIVDLLFKTNRKVTVKQLKEDYFKKIECFDSVEISGVEDRFNASLGTYHDLLKIIKDKDFLDNEENEDILEDIVLTLTLFEDREMIEERLKTYAHLFDDKVMKQLKRRRYTGWGRLSRKLINGIRDKQSGKTILDFLKSDGFANRNFMQLIHDDSLTFKEDIQKAQVSGQGDSLHEHIANLAGSPAIKKGILQTVKVVDELVKVMGRHKPENIVIEMARENQTTQKGQKNSRERMKRIEEGIKELGSQILKEHPVENTQLQNEKLYLYYLQNGRDMYVDQELDINRLSDYDVDHIVPQSFLKDDSIDNKVLTRSDKARGKSDNVPSEEVVKKMKNYWRQLLNAKLITQRKFDNLTKAERGGLSELDKAGFIKRQLVETRQITKHVAQILDSRMNTKYDENDKLIREVKVITLKSKLVSDFRKDFQFYKVREINNYHHAHDAYLNAVVGTALIKKYPKLESEFVYGDYKVYDVRKMIAKSEQEIGKATAKYFFYSNIMNFFKTEITLANGEIRKRPLIETNGETGEIVWDKGRDFATVRKVLSMPQVNIVKKTEVQTGGFSKESILPKRNSDKLIARKKDWDPKKYGGFDSPTVAYSVLVVAKVEKGKSKKLKSVKELLGITIMERSSFEKNPIDFLEAKGYKEVKKDLIIKLPKYSLFELENGRKRMLASAGELQKGNELALPSKYVNFLYLASHYEKLKGSPEDNEQKQLFVEQHKHYLDEIIEQISEFSKRVILADANLDKVLSAYNKHRDKPIREQAENIIHLFTLTNLGAPAAFKYFDTTIDRKRYTSTKEVLDATLIHQSITGLYETRIDLSQLGGDGGPAPEAAAKGGGGGTLQLEEEYRLFEPESTQKQEMDIWLKNFPQAWAETGGMGTAHCQAPVLIQLKATATPISIRQYPMPHEAYQGIKPHIRRMLDQGILKPCQSPWNTPLLPVKKPGTEDYRPVQDLREVNKRVEDIHPTVPNPYNLLSTLPPSHPWYTVLDLKDAFFCLRLHSESQLLFAFEWRDPEIGLSGQLTWTRLPQGFKNSPTLFNEALHSDLADFRVRYPALVLLQYVDDLLLAAATRTECLEGTKALLETLGNKGYRASAKKAQICLQEVTYLGYSLKDGQRWLTKARKEAILSIPVPKNSRQVREFLGTAGYCRLWIPGFAELAAPLYPLTRPGTLFQWGTEQQLAFEDIKKALLSSPALGLPDITKPFELFIDENSGFAKGVLVQKLGPWKRPVAYLSKKLDTVASGWPPCLRMVAAIAILVKDAGKLTLGQPLTILTSHPVEALVRQPPNKWLSNARMTHYQAMLLDAERVHFGPTVSLNPATLLPLPSGGNHHDCLQILAETHGTRPDLTDQPLPDADLTWYTDGSSFIRNGEREAGAAVTTESEVIWAAPLPPGTSAQRAELIALTQALKMAEGKKLTVYTDSRYAFATTHVHGEIYRRRGWLTSEGKEIKNKNEILALLEALFLPKRLSIIHCPGHQKGDSPQAKGNRLADDTAKKAATETHSSLTVLPAGKRTADGSEFEKRTADGSEFESPKKKAKVE

SEQ ID NO: 7551 - protein, 2087 aa, synthetic construct
MPAAKRVKLDGGDKKYSIGLDIGTNSVGWAVITDEYKVPSKKFKVLGNTDRHSIKKNLIGALLFDSGETAEATRLKRTARRRYTRRKNRICYLQEIFSNEMAKVDDSFFHRLEESFLVEEDKKHERHPIFGNIVDEVAYHEKYPTIYHLRKKLVDSTDKADLRLIYLALAHMIKFRGHFLIEGDLNPDNSDVDKLFIQLVQTYNQLFEENPINASGVDAKAILSARLSKSRRLENLIAQLPGEKKNGLFGNLIALSLGLTPNFKSNFDLAEDAKLQLSKDTYDDDLDNLLAQIGDQYADLFLAAKNLSDAILLSDILRVNTEITKAPLSASMIKRYDEHHQDLTLLKALVRQQLPEKYKEIFFDQSKNGYAGYIDGGASQEEFYKFIKPILEKMDGTEELLVKLNREDLLRKQRTFDNGSIPHQIHLGELHAILRRQEDFYPFLKDNREKIEKILTFRIPYYVGPLARGNSRFAWMTRKSEETITPWNFEEVVDKGASAQSFIERMTNFDKNLPNEKVLPKHSLLYEYFTVYNELTKVKYVTEGMRKPAFLSGEQKKAIVDLLFKTNRKVTVKQLKEDYFKKIECFDSVEISGVEDRFNASLGTYHDLLKIIKDKDFLDNEENEDILEDIVLTLTLFEDREMIEERLKTYAHLFDDKVMKQLKRRRYTGWGRLSRKLINGIRDKQSGKTILDFLKSDGFANRNFMQLIHDDSLTFKEDIQKAQVSGQGDSLHEHIANLAGSPAIKKGILQTVKVVDELVKVMGRHKPENIVIEMARENQTTQKGQKNSRERMKRIEEGIKELGSQILKEHPVENTQLQNEKLYLYYLQNGRDMYVDQELDINRLSDYDVDHIVPQSFLKDDSIDNKVLTRSDKARGKSDNVPSEEVVKKMKNYWRQLLNAKLITQRKFDNLTKAERGGLSELDKAGFIKRQLVETRQITKHVAQILDSRMNTKYDENDKLIREVKVITLKSKLVSDFRKDFQFYKVREINNYHHAHDAYLNAVVGTALIKKYPKLESEFVYGDYKVYDVRKMIAKSEQEIGKATAKYFFYSNIMNFFKTEITLANGEIRKRPLIETNGETGEIVWDKGRDFATVRKVLSMPQVNIVKKTEVQTGGFSKESILPKRNSDKLIARKKDWDPKKYGGFDSPTVAYSVLVVAKVEKGKSKKLKSVKELLGITIMERSSFEKNPIDFLEAKGYKEVKKDLIIKLPKYSLFELENGRKRMLASAGELQKGNELALPSKYVNFLYLASHYEKLKGSPEDNEQKQLFVEQHKHYLDEIIEQISEFSKRVILADANLDKVLSAYNKHRDKPIREQAENIIHLFTLTNLGAPAAFKYFDTTIDRKRYTSTKEVLDATLIHQSITGLYETRIDLSQLGGDGGPAPEAAAKGGGGGVPWLTQQPLQLTILVPLQEYQEKILSKTALPEDQKQQLKTLFVKYDNLWQHWENQVGHRKIRPHNIATGDYPPRPQKQYPINPKAKPSIQIVIDDLLKQGVLTPQNSTMNTPVYPVPKPDGRWRMVLDYREVNKTIPLTAAQNQHSAGILATIVRQKYKTTLDLANGFWAHPITPESYWLTAFTWQGKQYCWTRLPQGFLNSPALFNADVVDLLKEIPNVQVYVDDIYLSHDDPKEHVQQLEKVFQILLQAGYVVSLKKSEIGQKTVEFLGFNITKEGRGLTDTFKTKLLNITPPKDLKQLQSILGKLNFARNFIPNFAELVQPLYNLIAPAKGKYIEWSEENTKQLNMVIEALNTASNLEERLPEQRLVIKVNTSPSAGYVRYYNETGKKPIMYLNYVFSKAELKFSMLEKLLTTMHKALIKAMDLAMGQEILVYSPIVSMTKIQKTPLPERKALPIRWITWMTYLEDPRIQFHYDKTLPELKHIPDVYTSSQSPVKHPSQYEGVFYTDGSAIKSPDPTKSNNAGMGIVHATYKPEYQVLNQWSIPLGNHTAQMAEIAAVEFACKKALKIPGPVLVITDSFYVAESANKELPYWKSNGFVNNKKKPLKHISKWKSIAECLSMKPDITIQHEKGISLQIPVFILKGNALADKLATQGSYVVNAGKRTADGSEFEKRTADGSEFESPKKKAKVE

SEQ ID NO: 7552 - protein, 2176 aa, synthetic construct
MPAAKRVKLDGGDKKYSIGLDIGTNSVGWAVITDEYKVPSKKFKVLGNTDRHSIKKNLIGALLFDSGETAEATRLKRTARRRYTRRKNRICYLQEIFSNEMAKVDDSFFHRLEESFLVEEDKKHERHPIFGNIVDEVAYHEKYPTIYHLRKKLVDSTDKADLRLIYLALAHMIKFRGHFLIEGDLNPDNSDVDKLFIQLVQTYNQLFEENPINASGVDAKAILSARLSKSRRLENLIAQLPGEKKNGLFGNLIALSLGLTPNFKSNFDLAEDAKLQLSKDTYDDDLDNLLAQIGDQYADLFLAAKNLSDAILLSDILRVNTEITKAPLSASMIKRYDEHHQDLTLLKALVRQQLPEKYKEIFFDQSKNGYAGYIDGGASQEEFYKFIKPILEKMDGTEELLVKLNREDLLRKQRTFDNGSIPHQIHLGELHAILRRQEDFYPFLKDNREKIEKILTFRIPYYVGPLARGNSRFAWMTRKSEETITPWNFEEVVDKGASAQSFIERMTNFDKNLPNEKVLPKHSLLYEYFTVYNELTKVKYVTEGMRKPAFLSGEQKKAIVDLLFKTNRKVTVKQLKEDYFKKIECFDSVEISGVEDRFNASLGTYHDLLKIIKDKDFLDNEENEDILEDIVLTLTLFEDREMIEERLKTYAHLFDDKVMKQLKRRRYTGWGRLSRKLINGIRDKQSGKTILDFLKSDGFANRNFMQLIHDDSLTFKEDIQKAQVSGQGDSLHEHIANLAGSPAIKKGILQTVKVVDELVKVMGRHKPENIVIEMARENQTTQKGQKNSRERMKRIEEGIKELGSQILKEHPVENTQLQNEKLYLYYLQNGRDMYVDQELDINRLSDYDVDHIVPQSFLKDDSIDNKVLTRSDKARGKSDNVPSEEVVKKMKNYWRQLLNAKLITQRKFDNLTKAERGGLSELDKAGFIKRQLVETRQITKHVAQILDSRMNTKYDENDKLIREVKVITLKSKLVSDFRKDFQFYKVREINNYHHAHDAYLNAVVGTALIKKYPKLESEFVYGDYKVYDVRKMIAKSEQEIGKATAKYFFYSNIMNFFKTEITLANGEIRKRPLIETNGETGEIVWDKGRDFATVRKVLSMPQVNIVKKTEVQTGGFSKESILPKRNSDKLIARKKDWDPKKYGGFDSPTVAYSVLVVAKVEKGKSKKLKSVKELLGITIMERSSFEKNPIDFLEAKGYKEVKKDLIIKLPKYSLFELENGRKRMLASAGELQKGNELALPSKYVNFLYLASHYEKLKGSPEDNEQKQLFVEQHKHYLDEIIEQISEFSKRVILADANLDKVLSAYNKHRDKPIREQAENIIHLFTLTNLGAPAAFKYFDTTIDRKRYTSTKEVLDATLIHQSITGLYETRIDLSQLGGDGGPAPEAAAKGGGGGMNPLQLLQPLPAEIKGTKLLAHWNSGATITCIPESFLEDEQPIKKTLIKTIHGEKQQNVYYVTFKVKGRKVEAEVIASPYEYILLSPTDVPWLTQQPLQLTILVPLQEYQEKILSKTALPEDQKQQLKTLFVKYDNLWQHWENQVGHRKIRPHNIATGDYPPRPQKQYPINPKAKPSIQIVIDDLLKQGVLTPQNSTMNTPVYPVPKPDGRWRMVLDYREVNKTIPLTAAQNQHSAGILATIVRQKYKTTLDLANGFWAHPITPESYWLTAFTWQGKQYCWTRLPQGFLNSPALFNADVVDLLKEIPNVQVYVDDIYLSHDDPKEHVQQLEKVFQILLQAGYVVSLKKSEIGQKTVEFLGFNITKEGRGLTDTFKTKLLNITPPKDLKQLQSILGLLNFARNFIPNFAELVQPLYNLIAPAKGKYIEWSEENTKQLNMVIEALNTASNLEERLPEQRLVIKVNTSPSAGYVRYYNETGKKPIMYLNYVFSKAELKFSMLEKLLTTMHKALIKAMDLAMGQEILVYSPIVSMTKIQKTPLPERKALPIRWITWMTYLEDPRIQFHYDKTLPELKHIPDVYTSSQSPVKHPSQYEGVFYTDGSAIKSPDPTKSNNAGMGIVHATYKPEYQVLNQWSIPLGNHTAQMAEIAAVEFACKKALKIPGPVLVITDSFYVAESANKELPYWKSNGFVNNKKKPLKHISKWKSIAECLSMKPDITIQHEKGISLQIPVFILKGNALADKLATQGSYVVNAGKRTADGSEFEKRTADGSEFESPKKKAKVE

SEQ ID NO: 7553 - protein, 2176 aa, synthetic construct
MPAAKRVKLDGGDKKYSIGLDIGTNSVGWAVITDEYKVPSKKFKVLGNTDRHSIKKNLIGALLFDSGETAEATRLKRTARRRYTRRKNRICYLQEIFSNEMAKVDDSFFHRLEESFLVEEDKKHERHPIFGNIVDEVAYHEKYPTIYHLRKKLVDSTDKADLRLIYLALAHMIKFRGHFLIEGDLNPDNSDVDKLFIQLVQTYNQLFEENPINASGVDAKAILSARLSKSRRLENLIAQLPGEKKNGLFGNLIALSLGLTPNFKSNFDLAEDAKLQLSKDTYDDDLDNLLAQIGDQYADLFLAAKNLSDAILLSDILRVNTEITKAPLSASMIKRYDEHHQDLTLLKALVRQQLPEKYKEIFFDQSKNGYAGYIDGGASQEEFYKFIKPILEKMDGTEELLVKLNREDLLRKQRTFDNGSIPHQIHLGELHAILRRQEDFYPFLKDNREKIEKILTFRIPYYVGPLARGNSRFAWMTRKSEETITPWNFEEVVDKGASAQSFIERMTNFDKNLPNEKVLPKHSLLYEYFTVYNELTKVKYVTEGMRKPAFLSGEQKKAIVDLLFKTNRKVTVKQLKEDYFKKIECFDSVEISGVEDRFNASLGTYHDLLKIIKDKDFLDNEENEDILEDIVLTLTLFEDREMIEERLKTYAHLFDDKVMKQLKRRRYTGWGRLSRKLINGIRDKQSGKTILDFLKSDGFANRNFMQLIHDDSLTFKEDIQKAQVSGQGDSLHEHIANLAGSPAIKKGILQTVKVVDELVKVMGRHKPENIVIEMARENQTTQKGQKNSRERMKRIEEGIKELGSQILKEHPVENTQLQNEKLYLYYLQNGRDMYVDQELDINRLSDYDVDHIVPQSFLKDDSIDNKVLTRSDKARGKSDNVPSEEVVKKMKNYWRQLLNAKLITQRKFDNLTKAERGGLSELDKAGFIKRQLVETRQITKHVAQILDSRMNTKYDENDKLIREVKVITLKSKLVSDFRKDFQFYKVREINNYHHAHDAYLNAVVGTALIKKYPKLESEFVYGDYKVYDVRKMIAKSEQEIGKATAKYFFYSNIMNFFKTEITLANGEIRKRPLIETNGETGEIVWDKGRDFATVRKVLSMPQVNIVKKTEVQTGGFSKESILPKRNSDKLIARKKDWDPKKYGGFDSPTVAYSVLVVAKVEKGKSKKLKSVKELLGITIMERSSFEKNPIDFLEAKGYKEVKKDLIIKLPKYSLFELENGRKRMLASAGELQKGNELALPSKYVNFLYLASHYEKLKGSPEDNEQKQLFVEQHKHYLDEIIEQISEFSKRVILADANLDKVLSAYNKHRDKPIREQAENIIHLFTLTNLGAPAAFKYFDTTIDRKRYTSTKEVLDATLIHQSITGLYETRIDLSQLGGDGGPAPEAAAKGGGGGMNPLQLLQPLPAEIKGTKLLAHWNSGATITCIPESFLEDEQPIKKTLIKTIHGEKQQNVYYVTFKVKGRKVEAEVIASPYEYILLSPTDVPWLTQQPLQLTILVPLQEYQEKILSKTALPEDQKQQLKTLFVKYDNLWQHWENQVGHRKIRPHNIATGDYPPRPQKQYPINPKAKPSIQIVIDDLLKQGVLTPQNSTMNTPVYPVPKPDGRWRMVLDYREVNKTIPLTAAQNQHSAGILATIVRQKYKTTLDLANGFWAHPITPESYWLTAFTWQGKQYCWTRLPQGFLNSPALFNADVVDLLKEIPNVQVYVDDIYLSHDDPKEHVQQLEKVFQILLQAGYVVSLKKSEIGQKTVEFLGFNITKEGRGLTDTFKTKLLNITPPKDLKQLQSILGKLNFARNFIPNFAELVQPLYNLIAPAKGKYIEWSEENTKQLNMVIEALNTASNLEERLPEQRLVIKVNTSPSAGYVRYYNETGKKPIMYLNYVFSKAELKFSMLEKLLTTMHKALIKAMDLAMGQEILVYSPIVSMTKIQKTPLPERKALPIRWITWMTYLEDPRIQFHYDKTLPELKHIPDVYTSSQSPVKHPSQYEGVFYTDGSAIKSPDPTKSNNAGMGIVHATYKPEYQVLNQWSIPLGNHTAQMAEIAAVEFACKKALKIPGPVLVITDSFYVAESANKELPYWKSNGFVNNKKKPLKHISKWKSIAECLSMKPDITIQHEKGISLQIPVFILKGNALADKLATQGSYVVNAGKRTADGSEFEKRTADGSEFESPKKKAKVE

SEQ ID NO: 7554 - protein, 2094 aa, synthetic construct
MPAAKRVKLDGGDKKYSIGLDIGTNSVGWAVITDEYKVPSKKFKVLGNTDRHSIKKNLIGALLFDSGETAEATRLKRTARRRYTRRKNRICYLQEIFSNEMAKVDDSFFHRLEESFLVEEDKKHERHPIFGNIVDEVAYHEKYPTIYHLRKKLVDSTDKADLRLIYLALAHMIKFRGHFLIEGDLNPDNSDVDKLFIQLVQTYNQLFEENPINASGVDAKAILSARLSKSRRLENLIAQLPGEKKNGLFGNLIALSLGLTPNFKSNFDLAEDAKLQLSKDTYDDDLDNLLAQIGDQYADLFLAAKNLSDAILLSDILRVNTEITKAPLSASMIKRYDEHHQDLTLLKALVRQQLPEKYKEIFFDQSKNGYAGYIDGGASQEEFYKFIKPILEKMDGTEELLVKLNREDLLRKQRTFDNGSIPHQIHLGELHAILRRQEDFYPFLKDNREKIEKILTFRIPYYVGPLARGNSRFAWMTRKSEETITPWNFEEVVDKGASAQSFIERMTNFDKNLPNEKVLPKHSLLYEYFTVYNELTKVKYVTEGMRKPAFLSGEQKKAIVDLLFKTNRKVTVKQLKEDYFKKIECFDSVEISGVEDRFNASLGTYHDLLKIIKDKDFLDNEENEDILEDIVLTLTLFEDREMIEERLKTYAHLFDDKVMKQLKRRRYTGWGRLSRKLINGIRDKQSGKTILDFLKSDGFANRNFMQLIHDDSLTFKEDIQKAQVSGQGDSLHEHIANLAGSPAIKKGILQTVKVVDELVKVMGRHKPENIVIEMARENQTTQKGQKNSRERMKRIEEGIKELGSQILKEHPVENTQLQNEKLYLYYLQNGRDMYVDQELDINRLSDYDVDHIVPQSFLKDDSIDNKVLTRSDKARGKSDNVPSEEVVKKMKNYWRQLLNAKLITQRKFDNLTKAERGGLSELDKAGFIKRQLVETRQITKHVAQILDSRMNTKYDENDKLIREVKVITLKSKLVSDFRKDFQFYKVREINNYHHAHDAYLNAVVGTALIKKYPKLESEFVYGDYKVYDVRKMIAKSEQEIGKATAKYFFYSNIMNFFKTEITLANGEIRKRPLIETNGETGEIVWDKGRDFATVRKVLSMPQVNIVKKTEVQTGGFSKESILPKRNSDKLIARKKDWDPKKYGGFDSPTVAYSVLVVAKVEKGKSKKLKSVKELLGITIMERSSFEKNPIDFLEAKGYKEVKKDLIIKLPKYSLFELENGRKRMLASAGELQKGNELALPSKYVNFLYLASHYEKLKGSPEDNEQKQLFVEQHKHYLDEIIEQISEFSKRVILADANLDKVLSAYNKHRDKPIREQAENIIHLFTLTNLGAPAAFKYFDTTIDRKRYTSTKEVLDATLIHQSITGLYETRIDLSQLGGDGGPAPEAAAKGGGGGVLNLEEEYRLHEKPVPSSIDPSWLQLFPTVWAERAGMGLANQVPPVVVELRSGASPVAVRQYPMSKEAREGIRPHIQKFLDLGVLVPCRSPWNTPLLPVKKPGTNDYRPVQDLREINKRVQDIHPTVPNPYNLLSSLPPSYTWYSVLDLKDAFFCLRLHPNSQPLFAFEWKDPEKGNTGQLTWTRLPQGFKNSPTLFNEALHRDLAPFRALNPQVVLLQYVDDLLVAAPTYEDCKKGTQKLLQELSKLGYRVSAKKAQLCQREVTYLGYLLKEGKRWLTPARKATVMKIPVPTTPRQVREFLGKAGFCRLFIPGFASLAAPLYPLTKPSIPFIWTEEHQQAFDHIKKALLSAPALALPDLTKPFTLYIDERAGVARGVLTQTLGPWRRPVAYLSKKLDPVASGWPTCLKAVAAVALLLKDADKLTLGQNVTVIASHSLESIVRQPPDRWMTNARMTHYQSLLLNERVSFAPPAVLNPATLLPVESEATPVHRCSEILAEETGTRRDLEDQPLPGVPTWYTDGSSFITEGKRRAGAPIVDGKRTVWASSLPEGTSAQKAELVALTQALRLAEGKNINIYTDSRYAFATAHIHGAIYKQRGWLTSAGKDIKNKEEILALLEAIHLPRRVAIIHCPGHQRGSNPVATGNRRADEAAKQAALSTRVLAGTTKPAGKRTADGSEFEKRTADGSEFESPKKKAKVE

SEQ ID NO: 7555 - protein, 2127 aa, synthetic construct; identical to SEQ ID NO: 4537

SEQ ID NO: 7556 - protein, 2218 aa, synthetic construct
MPAAKRVKLDGGDKKYSIGLDIGTNSVGWAVITDEYKVPSKKFKVLGNTDRHSIKKNLIGALLFDSGETAEATRLKRTARRRYTRRKNRICYLQEIFSNEMAKVDDSFFHRLEESFLVEEDKKHERHPIFGNIVDEVAYHEKYPTIYHLRKKLVDSTDKADLRLIYLALAHMIKFRGHFLIEGDLNPDNSDVDKLFIQLVQTYNQLFEENPINASGVDAKAILSARLSKSRRLENLIAQLPGEKKNGLFGNLIALSLGLTPNFKSNFDLAEDAKLQLSKDTYDDDLDNLLAQIGDQYADLFLAAKNLSDAILLSDILRVNTEITKAPLSASMIKRYDEHHQDLTLLKALVRQQLPEKYKEIFFDQSKNGYAGYIDGGASQEEFYKFIKPILEKMDGTEELLVKLNREDLLRKQRTFDNGSIPHQIHLGELHAILRRQEDFYPFLKDNREKIEKILTFRIPYYVGPLARGNSRFAWMTRKSEETITPWNFEEVVDKGASAQSFIERMTNFDKNLPNEKVLPKHSLLYEYFTVYNELTKVKYVTEGMRKPAFLSGEQKKAIVDLLFKTNRKVTVKQLKEDYFKKIECFDSVEISGVEDRFNASLGTYHDLLKIIKDKDFLDNEENEDILEDIVLTLTLFEDREMIEERLKTYAHLFDDKVMKQLKRRRYTGWGRLSRKLINGIRDKQSGKTILDFLKSDGFANRNFMQLIHDDSLTFKEDIQKAQVSGQGDSLHEHIANLAGSPAIKKGILQTVKVVDELVKVMGRHKPENIVIEMARENQTTQKGQKNSRERMKRIEEGIKELGSQILKEHPVENTQLQNEKLYLYYLQNGRDMYVDQELDINRLSDYDVDHIVPQSFLKDDSIDNKVLTRSDKARGKSDNVPSEEVVKKMKNYWRQLLNAKLITQRKFDNLTKAERGGLSELDKAGFIKRQLVETRQITKHVAQILDSRMNTKYDENDKLIREVKVITLKSKLVSDFRKDFQFYKVREINNYHHAHDAYLNAVVGTALIKKYPKLESEFVYGDYKVYDVRKMIAKSEQEIGKATAKYFFYSNIMNFFKTEITLANGEIRKRPLIETNGETGEIVWDKGRDFATVRKVLSMPQVNIVKKTEVQTGGFSKESILPKRNSDKLIARKKDWDPKKYGGFDSPTVAYSVLVVAKVEKGKSKKLKSVKELLGITIMERSSFEKNPIDFLEAKGYKEVKKDLIIKLPKYSLFELENGRKRMLASAGELQKGNELALPSKYVNFLYLASHYEKLKGSPEDNEQKQLFVEQHKHYLDEIIEQISEFSKRVILADANLDKVLSAYNKHRDKPIREQAENIIHLFTLTNLGAPAAFKYFDTTIDRKRYTSTKEVLDATLIHQSITGLYETRIDLSQLGGDGGPAPEAAAKGGGGGTLGDQGSRGSDPLPEPRVTLTVEGIPTEFLVNTGAEHSVLTKPMGKMGSKRTVVAGATGSKVYPWTTKRLLKIGQKQVTHSFLVIPECPAPLLGRDLLTKLKAQIQFSTEGPQVTWEDRPAMCLVLNLEEEYRLHEKPVPPSIDPSWLQLFPMVWAEKAGMGLANQVPPVVVELKSDASPVAVRQYPMSKEAREGIRPHIQRFLDLGILVPCQSPWNTPLLPVKKPGTNDYRPVQDLREVNKRVQDIHPTVPNPYNLLSSLPPSHTWYSVLDLKDAFFCLKLHPNSQPLFAFEWRDPEKGNTGQLTWTRLPQGFKNSPTLFNEALHRDLASFRALNPQVVMLQYVDDLLVAAPTYRDCKEGTRRLLQELSKLGYRVSAKKAQLCREEVTYLGYLLKGGKRWLTPARKATVMKIPTPTTPRQVREFLGTAGFCRLWIPGFASLAAPLYPLTRPKVPFTWTEAHQEAFGRIKEALLSAPALALPDLTKPFALYVDEKEGVARGVLTQTLGPWRRPVAYLSKKLDPVASGWPTCLKAIAAVALLLKDADKLTLGQNVLVIAPHNLESIVRQPPDRWMTNARMTHYQSLLLNERVSFAPPAILNPATLLPVESDDTPIHICSEILAEETGTRPDLRDQPLPGVPAWYTDGSSFIMDGRRQAGAAIVDNKRTVWASNLPEGTSAQKAELIALTQALRLAEGKSINIYTDSRYAFATAHVHGAIYKQRGWLTSAGKDIKNKEEILALLEAIHLPKRVAIIHCPGHQRGTDPVATGNRKADEAAKQAAQSTRILTETTKNAGKRTADGSEFEKRTADGSEFESPKKKAKVE

SEQ ID NO: 7557 - protein, 2218 aa, synthetic construct
MPAAKRVKLDGGDKKYSIGLDIGTNSVGWAVITDEYKVPSKKFKVLGNTDRHSIKKNLIGALLFDSGETAEATRLKRTARRRYTRRKNRICYLQEIFSNEMAKVDDSFFHRLEESFLVEEDKKHERHPIFGNIVDEVAYHEKYPTIYHLRKKLVDSTDKADLRLIYLALAHMIKFRGHFLIEGDLNPDNSDVDKLFIQLVQTYNQLFEENPINASGVDAKAILSARLSKSRRLENLIAQLPGEKKNGLFGNLIALSLGLTPNFKSNFDLAEDAKLQLSKDTYDDDLDNLLAQIGDQYADLFLAAKNLSDAILLSDILRVNTEITKAPLSASMIKRYDEHHQDLTLLKALVRQQLPEKYKEIFFDQSKNGYAGYIDGGASQEEFYKFIKPILEKMDGTEELLVKLNREDLLRKQRTFDNGSIPHQIHLGELHAILRRQEDFYPFLKDNREKIEKILTFRIPYYVGPLARGNSRFAWMTRKSEETITPWNFEEVVDKGASAQSFIERMTNFDKNLPNEKVLPKHSLLYEYFTVYNELTKVKYVTEGMRKPAFLSGEQKKAIVDLLFKTNRKVTVKQLKEDYFKKIECFDSVEISGVEDRFNASLGTYHDLLKIIKDKDFLDNEENEDILEDIVLTLTLFEDREMIEERLKTYAHLFDDKVMKQLKRRRYTGWGRLSRKLINGIRDKQSGKTILDFLKSDGFANRNFMQLIHDDSLTFKEDIQKAQVSGQGDSLHEHIANLAGSPAIKKGILQTVKVVDELVKVMGRHKPENIVIEMARENQTTQKGQKNSRERMKRIEEGIKELGSQILKEHPVENTQLQNEKLYLYYLQNGRDMYVDQELDINRLSDYDVDHIVPQSFLKDDSIDNKVLTRSDKARGKSDNVPSEEVVKKMKNYWRQLLNAKLITQRKFDNLTKAERGGLSELDKAGFIKRQLVETRQITKHVAQILDSRMNTKYDENDKLIREVKVITLKSKLVSDFRKDFQFYKVREINNYHHAHDAYLNAVVGTALIKKYPKLESEFVYGDYKVYDVRKMIAKSEQEIGKATAKYFFYSNIMNFFKTEITLANGEIRKRPLIETNGETGEIVWDKGRDFATVRKVLSMPQVNIVKKTEVQTGGFSKESILPKRNSDKLIARKKDWDPKKYGGFDSPTVAYSVLVVAKVEKGKSKKLKSVKELLGITIMERSSFEKNPIDFLEAKGYKEVKKDLIIKLPKYSLFELENGRKRMLASAGELQKGNELALPSKYVNFLYLASHYEKLKGSPEDNEQKQLFVEQHKHYLDEIIEQISEFSKRVILADANLDKVLSAYNKHRDKPIREQAENIIHLFTLTNLGAPAAFKYFDTTIDRKRYTSTKEVLDATLIHQSITGLYETRIDLSQLGGDGGPAPEAAAKGGGGGTLGDQGSRGSDPLPEPRVTLTVEGIPTEFLVNTGAEHSVLTKPMGKMGSKRTVVAGATGSKVYPWTTKRLLKIGQKQVTHSFLVIPECPAPLLGRDLLTKLKAQIQFSTEGPQVTWEDRPAMCLVLNLEEEYRLHEKPVPPSIDPSWLQLFPMVWAEKAGMGLANQVPPVVVELKSDASPVAVRQYPMSKEAREGIRPHIQRFLDLGILVPCQSPWNTPLLPVKKPGTNDYRPVQDLREVNKRVQDIHPTVPNPYNLLSSLPPSHTWYSVLDLKDAFFCLKLHPNSQPLFAFEWRDPEKGNTGQLTWTRLPQGFKNSPTLFNEALHRDLASFRALNPQVVMLQYVDDLLVAAPTYRDCKEGTRRLLQELSKLGYRVSAKKAQLCREEVTYLGYLLKGGKRWLTPARKATVMKIPTPTTPRQVREFLGKAGFCRLFIPGFASLAAPLYPLTRPKVPFTWTEAHQEAFGRIKEALLSAPALALPDLTKPFALYVDEKEGVARGVLTQTLGPWRRPVAYLSKKLDPVASGWPTCLKAIAAVALLLKDADKLTLGQNVLVIAPHNLESIVRQPPDRWMTNARMTHYQSLLLNERVSFAPPAILNPATLLPVESDDTPIHICSEILAEETGTRPDLRDQPLPGVPAWYTDGSSFIMDGRRQAGAAIVDNKRTVWASNLPEGTSAQKAELIALTQALRLAEGKSINIYTDSRYAFATAHVHGAIYKQRGWLTSAGKDIKNKEEILALLEAIHLPKRVAIIHCPGHQRGTDPVATGNRKADEAAKQAAQSTRILTETTKNAGKRTADGSEFEKRTADGSEFESPKKKAKVE

SEQ ID NO: 7558 - protein, 2096 aa, synthetic construct
MPAAKRVKLDGGDKKYSIGLDIGTNSVGWAVITDEYKVPSKKFKVLGNTDRHSIKKNLIGALLFDSGETAEATRLKRTARRRYTRRKNRICYLQEIFSNEMAKVDDSFFHRLEESFLVEEDKKHERHPIFGNIVDEVAYHEKYPTIYHLRKKLVDSTDKADLRLIYLALAHMIKFRGHFLIEGDLNPDNSDVDKLFIQLVQTYNQLFEENPINASGVDAKAILSARLSKSRRLENLIAQLPGEKKNGLFGNLIALSLGLTPNFKSNFDLAEDAKLQLSKDTYDDDLDNLLAQIGDQYADLFLAAKNLSDAILLSDILRVNTEITKAPLSASMIKRYDEHHQDLTLLKALVRQQLPEKYKEIFFDQSKNGYAGYIDGGASQEEFYKFIKPILEKMDGTEELLVKLNREDLLRKQRTFDNGSIPHQIHLGELHAILRRQEDFYPFLKDNREKIEKILTFRIPYYVGPLARGNSRFAWMTRKSEETITPWNFEEVVDKGASAQSFIERMTNFDKNLPNEKVLPKHSLLYEYFTVYNELTKVKYVTEGMRKPAFLSGEQKKAIVDLLFKTNRKVTVKQLKEDYFKKIECFDSVEISGVEDRFNASLGTYHDLLKIIKDKDFLDNEENEDILEDIVLTLTLFEDREMIEERLKTYAHLFDDKVMKQLKRRRYTGWGRLSRKLINGIRDKQSGKTILDFLKSDGFANRNFMQLIHDDSLTFKEDIQKAQVSGQGDSLHEHIANLAGSPAIKKGILQTVKVVDELVKVMGRHKPENIVIEMARENQTTQKGQKNSRERMKRIEEGIKELGSQILKEHPVENTQLQNEKLYLYYLQNGRDMYVDQELDINRLSDYDVDHIVPQSFLKDDSIDNKVLTRSDKARGKSDNVPSEEVVKKMKNYWRQLLNAKLITQRKFDNLTKAERGGLSELDKAGFIKRQLVETRQITKHVAQILDSRMNTKYDENDKLIREVKVITLKSKLVSDFRKDFQFYKVREINNYHHAHDAYLNAVVGTALIKKYPKLESEFVYGDYKVYDVRKMIAKSEQEIGKATAKYFFYSNIMNFFKTEITLANGEIRKRPLIETNGETGEIVWDKGRDFATVRKVLSMPQVNIVKKTEVQTGGFSKESILPKRNSDKLIARKKDWDPKKYGGFDSPTVAYSVLVVAKVEKGKSKKLKSVKELLGITIMERSSFEKNPIDFLEAKGYKEVKKDLIIKLPKYSLFELENGRKRMLASAGELQKGNELALPSKYVNFLYLASHYEKLKGSPEDNEQKQLFVEQHKHYLDEIIEQISEFSKRVILADANLDKVLSAYNKHRDKPIREQAENIIHLFTLTNLGAPAAFKYFDTTIDRKRYTSTKEVLDATLIHQSITGLYETRIDLSQLGGDGGPAPEAAAKGGGGGTLNIEDEYRLHETSKGPDVPLGSTWLSDFPQAWAETGGMGLAVRQAPLIIPLKATSTPVSIKQYPMSQEARLGIKPHIQRLLDQGILVPCQSPWNTPLLPVKKPGTNDYRPVQDLREVNKRVEDIHPTVPNPYNLLSGLPPSHQWYTVLDLKDAFFCLRLHPTSQSLFAFEWRDPEMGISGQLTWTRLPQGFKNSPTLFNEALHRDLADFRIQHPDLILLQYVDDLLLAATSELDCQQGTRALLQTLGDLGYRASAKKAQICQKQVKYLGYLLKEGQRWLTEARKETVMGQPTPKTPRQLREFLGKAGFCRLFIPGFAEMAAPLYPLTKPGTLFEWGPDQQKAYQEIKQALLTAPALGLPDLTKPFELFVDEKQGYAKGVLTQKLGPWRRPVAYLSKKLDPVAAGWPPCLRMVAAIAVLTKDAGKLTMGQPLVILAPHAVEALVKQPPDRWLSNARMTHYQALLLDTDRVQFGPIVALNPATLLPLPEEGLQHDCLDILAEAHGTRPDLTDQPLPDADHTWYTDGSSFLQEGQRKAGAAVTTETEVVWAKALPAGTSAQRAELIALTQALKMAEGKKLNVYTDSRYAFATAHIHGEIYRRRGWLTSEGKEIKNKDEILALLKALFLPKRLSIIHCPGHQKGNRAEARGNRMADQAAREVATRETPETSTLLAGKRTADGSEFEKRTADGSEFESPKKKAKVE

SEQ ID NO: 7559 - protein, 2096 aa, synthetic construct
MPAAKRVKLDGGDKKYSIGLDIGTNSVGWAVITDEYKVPSKKFKVLGNTDRHSIKKNLIGALLFDSGETAEATRLKRTARRRYTRRKNRICYLQEIFSNEMAKVDDSFFHRLEESFLVEEDKKHERHPIFGNIVDEVAYHEKYPTIYHLRKKLVDSTDKADLRLIYLALAHMIKFRGHFLIEGDLNPDNSDVDKLFIQLVQTYNQLFEENPINASGVDAKAILSARLSKSRRLENLIAQLPGEKKNGLFGNLIALSLGLTPNFKSNFDLAEDAKLQLSKDTYDDDLDNLLAQIGDQYADLFLAAKNLSDAILLSDILRVNTEITKAPLSASMIKRYDEHHQDLTLLKALVRQQLPEKYKEIFFDQSKNGYAGYIDGGASQEEFYKFIKPILEKMDGTEELLVKLNREDLLRKQRTFDNGSIPHQIHLGELHAILRRQEDFYPFLKDNREKIEKILTFRIPYYVGPLARGNSRFAWMTRKSEETITPWNFEEVVDKGASAQSFIERMTNFDKNLPNEKVLPKHSLLYEYFTVYNELTKVKYVTEGMRKPAFLSGEQKKAIVDLLFKTNRKVTVKQLKEDYFKKIECFDSVEISGVEDRFNASLGTYHDLLKIIKDKDFLDNEENEDILEDIVLTLTLFEDREMIEERLKTYAHLFDDKVMKQLKRRRYTGWGRLSRKLINGIRDKQSGKTILDFLKSDGFANRNFMQLIHDDSLTFKEDIQKAQVSGQGDSLHEHIANLAGSPAIKKGILQTVKVVDELVKVMGRHKPENIVIEMARENQTTQKGQKNSRERMKRIEEGIKELGSQILKEHPVENTQLQNEKLYLYYLQNGRDMYVDQELDINRLSDYDVDHIVPQSFLKDDSIDNKVLTRSDKARGKSDNVPSEEVVKKMKNYWRQLLNAKLITQRKFDNLTKAERGGLSELDKAGFIKRQLVETRQITKHVAQILDSRMNTKYDENDKLIREVKVITLKSKLVSDFRKDFQFYKVREINNYHHAHDAYLNAVVGTALIKKYPKLESEFVYGDYKVYDVRKMIAKSEQEIGKATAKYFFYSNIMNFFKTEITLANGEIRKRPLIETNGETGEIVWDKGRDFATVRKVLSMPQVNIVKKTEVQTGGFSKESILPKRNSDKLIARKKDWDPKKYGGFDSPTVAYSVLVVAKVEKGKSKKLKSVKELLGITIMERSSFEKNPIDFLEAKGYKEVKKDLIIKLPKYSLFELENGRKRMLASAGELQKGNELALPSKYVNFLYLASHYEKLKGSPEDNEQKQLFVEQHKHYLDEIIEQISEFSKRVILADANLDKVLSAYNKHRDKPIREQAENIIHLFTLTNLGAPAAFKYFDTTIDRKRYTSTKEVLDATLIHQSITGLYETRIDLSQLGGDGGPAPEAAAKGGGGGTLNIEDEHRLHETSKEPDVSLGSTWLSDFPQAWAETGGMGLAVRQAPLIIPLKATSTPVSIKQYPMSQEARLGIKPHIQRLLDQGILVPCQSPWNTPLLPVKKPGTNDYRPVQDLREVNKRVEDIHPTVPNPYNLLSGLPPSHQWYTVLDLKDAFFCLRLHPTSQPLFAFEWRDPEMGISGQLTWTRLPQGFKNSPTLFDEALHRDLADFRIQHPDLILLQYVDDLLLAATSELDCQQGTRALLQTLGNLGYRASAKKAQICQKQVKYLGYLLKEGQRWLTEARKETVMGQPTPKTPRQLREFLGTAGFCRLWIPGFAEMAAPLYPLTKTGTLFNWGPDQQKAYQEIKQALLTAPALGLPDLTKPFELFVDEKQGYAKGVLTQKLGPWRRPVAYLSKKLDPVAAGWPPCLRMVAAIAVLTKDAGKLTMGQPLVILAPHAVEALVKQPPDRWLSNARMTHYQALLLDTDRVQFGPVVALNPATLLPLPEEGLQHNCLDILAEAHGTRPDLTDQPLPDADHTWYTDGSSLLQEGQRKAGAAVTTETEVIWAKALPAGTSAQRAELIALTQALKMAEGKKLNVYTDSRYAFATAHIHGEIYRRRGLLTSEGKEIKNKDEILALLKALFLPKRLSIIHCPGHQKGHSAEARGNRMADQAARKAAITETPDTSTLLAGKRTADGSEFEKRTADGSEFESPKKKAKVE

SEQ ID NO: 7560 - protein, 2096 aa, synthetic construct; identical to SEQ ID NO: 7559

SEQ ID NO: 7561 - protein, 2116 aa, synthetic construct
MPAAKRVKLDGGDKKYSIGLDIGTNSVGWAVITDEYKVPSKKFKVLGNTDRHSIKKNLIGALLFDSGETAEATRLKRTARRRYTRRKNRICYLQEIFSNEMAKVDDSFFHRLEESFLVEEDKKHERHPIFGNIVDEVAYHEKYPTIYHLRKKLVDSTDKADLRLIYLALAHMIKFRGHFLIEGDLNPDNSDVDKLFIQLVQTYNQLFEENPINASGVDAKAILSARLSKSRRLENLIAQLPGEKKNGLFGNLIALSLGLTPNFKSNFDLAEDAKLQLSKDTYDDDLDNLLAQIGDQYADLFLAAKNLSDAILLSDILRVNTEITKAPLSASMIKRYDEHHQDLTLLKALVRQQLPEKYKEIFFDQSKNGYAGYIDGGASQEEFYKFIKPILEKMDGTEELLVKLNREDLLRKQRTFDNGSIPHQIHLGELHAILRRQEDFYPFLKDNREKIEKILTFRIPYYVGPLARGNSRFAWMTRKSEETITPWNFEEVVDKGASAQSFIERMTNFDKNLPNEKVLPKHSLLYEYFTVYNELTKVKYVTEGMRKPAFLSGEQKKAIVDLLFKTNRKVTVKQLKEDYFKKIECFDSVEISGVEDRFNASLGTYHDLLKIIKDKDFLDNEENEDILEDIVLTLTLFEDREMIEERLKTYAHLFDDKVMKQLKRRRYTGWGRLSRKLINGIRDKQSGKTILDFLKSDGFANRNFMQLIHDDSLTFKEDIQKAQVSGQGDSLHEHIANLAGSPAIKKGILQTVKVVDELVKVMGRHKPENIVIEMARENQTTQKGQKNSRERMKRIEEGIKELGSQILKEHPVENTQLQNEKLYLYYLQNGRDMYVDQELDINRLSDYDVDHIVPQSFLKDDSIDNKVLTRSDKARGKSDNVPSEEVVKKMKNYWRQLLNAKLITQRKFDNLTKAERGGLSELDKAGFIKRQLVETRQITKHVAQILDSRMNTKYDENDKLIREVKVITLKSKLVSDFRKDFQFYKVREINNYHHAHDAYLNAVVGTALIKKYPKLESEFVYGDYKVYDVRKMIAKSEQEIGKATAKYFFYSNIMNFFKTEITLANGEIRKRPLIETNGETGEIVWDKGRDFATVRKVLSMPQVNIVKKTEVQTGGFSKESILPKRNSDKLIARKKDWDPKKYGGFDSPTVAYSVLVVAKVEKGKSKKLKSVKELLGITIMERSSFEKNPIDFLEAKGYKEVKKDLIIKLPKYSLFELENGRKRMLASAGELQKGNELALPSKYVNFLYLASHYEKLKGSPEDNEQKQLFVEQHKHYLDEIIEQISEFSKRVILADANLDKVLSAYNKHRDKPIREQAENIIHLFTLTNLGAPAAFKYFDTTIDRKRYTSTKEVLDATLIHQSITGLYETRIDLSQLGGDGGPAPEAAAKGGGGGVQEISDSRPMLHIYLNGRRFLGLLDTGADKTCIAGRDWPANWPIHQTESSLQGLGMACGVARSSQPLRWQHEDKSGIIHPFVIPTLPFTLWGRDIMKDIKVRLMTDSPDDSQDLMIGAIESNLFADQISWKSDQPVWLNQWPLKQEKLQALQQLVTEQLQLGHLEESNSPWNTPVFVIKKKSGKWRLLQDLRAVNATMHDMGALQPGLPSPVAVPKGWEIIIIDLQDCFFNIKLHPEDCKRFAFSVPSPNFKRPYQRFQWKVLPQGMKNSPTLCQKFVDKAILTVRDKYQDSYIVHYMDDILLAHPSRSIVDEILTSMIQALNKHGLVVSTEKIQKYDNLKYLGTHIQGDSVSYQKLQIRTDKLRTLNDFQKLLGNINWIRPFLKLTTGELKPLFEILNGDSNPISTRKLTPEACKALQLMNERLSTARVKRLDLSQPWSLCILKTEYTPTACLWQDGVVEWIHLPHISPKVITPYDIFCTQLIIKGRHRSKELFSKDPDYIVVPYTKVQFDLLLQEKEDWPISLLGFLGEVHFHLPKDPLLTFTLQTAIIFPHMTSTTPLEKGIVIFTDGSANGRSVTYIQGREPIIKENTQNTAQQAEIVAVITAFEEVSQPFNLYTDSKYVTGLFPEIETATLSPRTKIYTELKHLQRLIHKRQEKFYIGHIRGHTGLPGPLAQGNAYADSLTRILTAAGKRTADGSEFEKRTADGSEFESPKKKAKVE

SEQ ID NO: 7562 - protein, 2090 aa, synthetic construct
MPAAKRVKLDGGDKKYSIGLDIGTNSVGWAVITDEYKVPSKKFKVLGNTDRHSIKKNLIGALLFDSGETAEATRLKRTARRRYTRRKNRICYLQEIFSNEMAKVDDSFFHRLEESFLVEEDKKHERHPIFGNIVDEVAYHEKYPTIYHLRKKLVDSTDKADLRLIYLALAHMIKFRGHFLIEGDLNPDNSDVDKLFIQLVQTYNQLFEENPINASGVDAKAILSARLSKSRRLENLIAQLPGEKKNGLFGNLIALSLGLTPNFKSNFDLAEDAKLQLSKDTYDDDLDNLLAQIGDQYADLFLAAKNLSDAILLSDILRVNTEITKAPLSASMIKRYDEHHQDLTLLKALVRQQLPEKYKEIFFDQSKNGYAGYIDGGASQEEFYKFIKPILEKMDGTEELLVKLNREDLLRKQRTFDNGSIPHQIHLGELHAILRRQEDFYPFLKDNREKIEKILTFRIPYYVGPLARGNSRFAWMTRKSEETITPWNFEEVVDKGASAQSFIERMTNFDKNLPNEKVLPKHSLLYEYFTVYNELTKVKYVTEGMRKPAFLSGEQKKAIVDLLFKTNRKVTVKQLKEDYFKKIECFDSVEISGVEDRFNASLGTYHDLLKIIKDKDFLDNEENEDILEDIVLTLTLFEDREMIEERLKTYAHLFDDKVMKQLKRRRYTGWGRLSRKLINGIRDKQSGKTILDFLKSDGFANRNFMQLIHDDSLTFKEDIQKAQVSGQGDSLHEHIANLAGSPAIKKGILQTVKVVDELVKVMGRHKPENIVIEMARENQTTQKGQKNSRERMKRIEEGIKELGSQILKEHPVENTQLQNEKLYLYYLQNGRDMYVDQELDINRLSDYDVDHIVPQSFLKDDSIDNKVLTRSDKARGKSDNVPSEEVVKKMKNYWRQLLNAKLITQRKFDNLTKAERGGLSELDKAGFIKRQLVETRQITKHVAQILDSRMNTKYDENDKLIREVKVITLKSKLVSDFRKDFQFYKVREINNYHHAHDAYLNAVVGTALIKKYPKLESEFVYGDYKVYDVRKMIAKSEQEIGKATAKYFFYSNIMNFFKTEITLANGEIRKRPLIETNGETGEIVWDKGRDFATVRKVLSMPQVNIVKKTEVQTGGFSKESILPKRNSDKLIARKKDWDPKKYGGFDSPTVAYSVLVVAKVEKGKSKKLKSVKELLGITIMERSSFEKNPIDFLEAKGYKEVKKDLIIKLPKYSLFELENGRKRMLASAGELQKGNELALPSKYVNFLYLASHYEKLKGSPEDNEQKQLFVEQHKHYLDEIIEQISEFSKRVILADANLDKVLSAYNKHRDKPIREQAENIIHLFTLTNLGAPAAFKYFDTTIDRKRYTSTKEVLDATLIHQSITGLYETRIDLSQLGGDGGPAPEAAAKGGGGGTLQLDDEYRLYSPLVKPDQNIQFWLEQFPQAWAETAGMGLAKQVPPQVIQLKASATPVSVRQYPLSKEAQEGIRPHVQRLIQQGILVPVQSPWNTPLLPVRKPGTNDYRPVQDLREVNKRVQDIHPTVPNPYNLLCALPPQRSWYTVLDLKDAFFCLRLHPTSQPLFAFEWRDPGTGRTGQLTWTRLPQGFKNSPTIFDEALHRDLANFRIQHPQVTLLQYVDDLLLAGATKQDCLEGTKALLLELSDLGYRASAKKAQICRREVTYLGYSLRDGQRWLTEARKKTVVQIPAPTTAKQVREFLGTAGFCRLWIPGFATLAAPLYPLTKEKGEFSWAPEHQKAFDAIKKALLSAPALALPDVTKPFTLYVDERKGVARGVLTQTLGPWRRPVAYLSKKLDPVASGWPVCLKAIAAVAILVKDADKLTLGQNITVIAPHALENIVRQPPDRWMTNARMTHYQSLLLTERVTFAPPAALNPATLLPEETDEPVTHDCHQLLIEETGVRKDLTDIPLTGEVLTWFTDGSSYVVEGKRMAGAAVVDGTRTIWASSLPEGTSAQKAELMALTQALRLAEGKSINIYTDSRYAFATAHVHGAIYKQRGLLTSAGREIKNKEEILSLLEALHLPKRLAIIHCPGHQKAKDPISRGNQMADRVAKQAAQGVNLLAGKRTADGSEFEKRTADGSEFESPKKKAKVE

SEQ ID NO: 7563 - protein, 2176 aa, synthetic construct
MPAAKRVKLDGGDKKYSIGLDIGTNSVGWAVITDEYKVPSKKFKVLGNTDRHSIKKNLIGALLFDSGETAEATRLKRTARRRYTRRKNRICYLQEIFSNEMAKVDDSFFHRLEESFLVEEDKKHERHPIFGNIVDEVAYHEKYPTIYHLRKKLVDSTDKADLRLIYLALAHMIKFRGHFLIEGDLNPDNSDVDKLFIQLVQTYNQLFEENPINASGVDAKAILSARLSKSRRLENLIAQLPGEKKNGLFGNLIALSLGLTPNFKSNFDLAEDAKLQLSKDTYDDDLDNLLAQIGDQYADLFLAAKNLSDAILLSDILRVNTEITKAPLSASMIKRYDEHHQDLTLLKALVRQQLPEKYKEIFFDQSKNGYAGYIDGGASQEEFYKFIKPILEKMDGTEELLVKLNREDLLRKQRTFDNGSIPHQIHLGELHAILRRQEDFYPFLKDNREKIEKILTFRIPYYVGPLARGNSRFAWMTRKSEETITPWNFEEVVDKGASAQSFIERMTNFDKNLPNEKVLPKHSLLYEYFTVYNELTKVKYVTEGMRKPAFLSGEQKKAIVDLLFKTNRKVTVKQLKEDYFKKIECFDSVEISGVEDRFNASLGTYHDLLKIIKDKDFLDNEENEDILEDIVLTLTLFEDREMIEERLKTYAHLFDDKVMKQLKRRRYTGWGRLSRKLINGIRDKQSGKTILDFLKSDGFANRNFMQLIHDDSLTFKEDIQKAQVSGQGDSLHEHIANLAGSPAIKKGILQTVKVVDELVKVMGRHKPENIVIEMARENQTTQKGQKNSRERMKRIEEGIKELGSQILKEHPVENTQLQNEKLYLYYLQNGRDMYVDQELDINRLSDYDVDHIVPQSFLKDDSIDNKVLTRSDKARGKSDNVPSEEVVKKMKNYWRQLLNAKLITQRKFDNLTKAERGGLSELDKAGFIKRQLVETRQITKHVAQILDSRMNTKYDENDKLIREVKVITLKSKLVSDFRKDFQFYKVREINNYHHAHDAYLNAVVGTALIKKYPKLESEFVYGDYKVYDVRKMIAKSEQEIGKATAKYFFYSNIMNFFKTEITLANGEIRKRPLIETNGETGEIVWDKGRDFATVRKVLSMPQVNIVKKTEVQTGGFSKESILPKRNSDKLIARKKDWDPKKYGGFDSPTVAYSVLVVAKVEKGKSKKLKSVKELLGITIMERSSFEKNPIDFLEAKGYKEVKKDLIIKLPKYSLFELENGRKRMLASAGELQKGNELALPSKYVNFLYLASHYEKLKGSPEDNEQKQLFVEQHKHYLDEIIEQISEFSKRVILADANLDKVLSAYNKHRDKPIREQAENIIHLFTLTNLGAPAAFKYFDTTIDRKRYTSTKEVLDATLIHQSITGLYETRIDLSQLGGDGGPAPEAAAKGGGGGMDPLQLLQPLEAEIKGTKLKAHWNSGATITCVPEAFLEDERPIQTMLIKTIHGEKQQDVYYLTFKVQGRKVEAEVLASPYDYILLNPSDVPWLMKKPLQLTVLVPLHEYQERLLQQTALPKEQKELLQKLFLKYDALWQHWENQVGHRRIKPHNIATGTLAPRPQKQYPINPKAKPSIQIVIDDLLKQGVLIQQNSTMNTPVYPVPKPDGKWRMVLDYREVNKTIPLIAAQNQHSAGILSSIYRGKYKTTLDLTNGFWAHPITPESYWLTAFTWQGKQYCWTRLPQGFLNSPALFTADVVDLLKEIPNVQAYVDDIYISHDDPQEHLEQLEKIFSILLNAGYVVSLKKSEIAQREVEFLGFNITKEGRGLTDTFKQKLLNITPPKDLKQLQSILGLLNFARNFIPNYSELVKPLYTIVANANGKFISWTEDNSNQLQHIISVLNQADNLEERNPETRLIIKVNSSPSAGYIRYYNEGSKRPIMYVNYIFSKAEAKFTQTEKLLTTMHKGLIKAMDLAMGQEILVYSPIVSMTKIQRTPLPERKALPVRWITWMTYLEDPRIQFHYDKSLPELQQIPNVTEDVIAKTKHPSEFAMVFYTDGSAIKHPDVNKSHSAGMGIAQVQFIPEYKIVHQWSIPLGDHTAQLAEIAAVEFACKKALKISGPVLIVTDSFYVAESANKELPYWKSNGFLNNKKKPLRHVSKWKSIAECLQLKPDIIIMHEKGHQQPMTTLHTEGNNLADKLATQGSYVVHAGKRTADGSEFEKRTADGSEFESPKKKAKVE

SEQ ID NO: 7564 - protein, 2176 aa, synthetic construct
MPAAKRVKLDGGDKKYSIGLDIGTNSVGWAVITDEYKVPSKKFKVLGNTDRHSIKKNLIGALLFDSGETAEATRLKRTARRRYTRRKNRICYLQEIFSNEMAKVDDSFFHRLEESFLVEEDKKHERHPIFGNIVDEVAYHEKYPTIYHLRKKLVDSTDKADLRLIYLALAHMIKFRGHFLIEGDLNPDNSDVDKLFIQLVQTYNQLFEENPINASGVDAKAILSARLSKSRRLENLIAQLPGEKKNGLFGNLIALSLGLTPNFKSNFDLAEDAKLQLSKDTYDDDLDNLLAQIGDQYADLFLAAKNLSDAILLSDILRVNTEITKAPLSASMIKRYDEHHQDLTLLKALVRQQLPEKYKEIFFDQSKNGYAGYIDGGASQEEFYKFIKPILEKMDGTEELLVKLNREDLLRKQRTFDNGSIPHQIHLGELHAILRRQEDFYPFLKDNREKIEKILTFRIPYYVGPLARGNSRFAWMTRKSEETITPWNFEEVVDKGASAQSFIERMTNFDKNLPNEKVLPKHSLLYEYFTVYNELTKVKYVTEGMRKPAFLSGEQKKAIVDLLFKTNRKVTVKQLKEDYFKKIECFDSVEISGVEDRFNASLGTYHDLLKIIKDKDFLDNEENEDILEDIVLTLTLFEDREMIEERLKTYAHLFDDKVMKQLKRRRYTGWGRLSRKLINGIRDKQSGKTILDFLKSDGFANRNFMQLIHDDSLTFKEDIQKAQVSGQGDSLHEHIANLAGSPAIKKGILQTVKVVDELVKVMGRHKPENIVIEMARENQTTQKGQKNSRERMKRIEEGIKELGSQILKEHPVENTQLQNEKLYLYYLQNGRDMYVDQELDINRLSDYDVDHIVPQSFLKDDSIDNKVLTRSDKARGKSDNVPSEEVVKKMKNYWRQLLNAKLITQRKFDNLTKAERGGLSELDKAGFIKRQLVETRQITKHVAQILDSRMNTKYDENDKLIREVKVITLKSKLVSDFRKDFQFYKVREINNYHHAHDAYLNAVVGTALIKKYPKLESEFVYGDYKVYDVRKMIAKSEQEIGKATAKYFFYSNIMNFFKTEITLANGEIRKRPLIETNGETGEIVWDKGRDFATVRKVLSMPQVNIVKKTEVQTGGFSKESILPKRNSDKLIARKKDWDPKKYGGFDSPTVAYSVLVVAKVEKGKSKKLKSVKELLGITIMERSSFEKNPIDFLEAKGYKEVKKDLIIKLPKYSLFELENGRKRMLASAGELQKGNELALPSKYVNFLYLASHYEKLKGSPEDNEQKQLFVEQHKHYLDEIIEQISEFSKRVILADANLDKVLSAYNKHRDKPIREQAENIIHLFTLTNLGAPAAFKYFDTTIDRKRYTSTKEVLDATLIHQSITGLYETRIDLSQLGGDGGPAPEAAAKGGGGGMDPLQLLQPLEAEIKGTKLKAHWNSGATITCVPEAFLEDERPIQTMLIKTIHGEKQQDVYYLTFKVQGRKVEAEVLASPYDYILLNPSDVPWLMKKPLQLTVLVPLHEYQERLLQQTALPKEQKELLQKLFLKYDALWQHWENQVGHRRIKPHNIATGTLAPRPQKQYPINPKAKPSIQIVIDDLLKQGVLIQQNSTMNTPVYPVPKPDGKWRMVLDYREVNKTIPLIAAQNQHSAGILSSIYRGKYKTTLDLTNGFWAHPITPESYWLTAFTWQGKQYCWTRLPQGFLNSPALFNADVVDLLKEIPNVQAYVDDIYISHDDPQEHLEQLEKIFSILLNAGYVVSLKKSEIAQREVEFLGFNITKEGRGLTDTFKQKLLNITPPKDLKQLQSILGLLNFARNFIPNYSELVKPLYTIVAPANGKFISWTEDNSNQLQHIISVLNQADNLEERNPETRLIIKVNSSPSAGYIRYYNEGSKRPIMYVNYIFSKAEAKFTQTEKLLTTMHKGLIKAMDLAMGQEILVYSPIVSMTKIQRTPLPERKALPVRWITWMTYLEDPRIQFHYDKSLPELQQIPNVTEDVIAKTKHPSEFAMVFYTDGSAIKHPDVNKSHSAGMGIAQVQFIPEYKIVHQWSIPLGDHTAQLAEIAAVEFACKKALKISGPVLIVTDSFYVAESANKELPYWKSNGFLNNKKKPLRHVSKWKSIAECLQLKPDIIIMHEKGHQQPMTTLHTEGNNLADKLATQGSYVVHAGKRTADGSEFEKRTADGSEFESPKKKAKVE

SEQ ID NO: 7565 - protein, 2087 aa, synthetic construct
MPAAKRVKLDGGDKKYSIGLDIGTNSVGWAVITDEYKVPSKKFKVLGNTDRHSIKKNLIGALLFDSGETAEATRLKRTARRRYTRRKNRICYLQEIFSNEMAKVDDSFFHRLEESFLVEEDKKHERHPIFGNIVDEVAYHEKYPTIYHLRKKLVDSTDKADLRLIYLALAHMIKFRGHFLIEGDLNPDNSDVDKLFIQLVQTYNQLFEENPINASGVDAKAILSARLSKSRRLENLIAQLPGEKKNGLFGNLIALSLGLTPNFKSNFDLAEDAKLQLSKDTYDDDLDNLLAQIGDQYADLFLAAKNLSDAILLSDILRVNTEITKAPLSASMIKRYDEHHQDLTLLKALVRQQLPEKYKEIFFDQSKNGYAGYIDGGASQEEFYKFIKPILEKMDGTEELLVKLNREDLLRKQRTFDNGSIPHQIHLGELHAILRRQEDFYPFLKDNREKIEKILTFRIPYYVGPLARGNSRFAWMTRKSEETITPWNFEEVVDKGASAQSFIERMTNFDKNLPNEKVLPKHSLLYEYFTVYNELTKVKYVTEGMRKPAFLSGEQKKAIVDLLFKTNRKVTVKQLKEDYFKKIECFDSVEISGVEDRFNASLGTYHDLLKIIKDKDFLDNEENEDILEDIVLTLTLFEDREMIEERLKTYAHLFDDKVMKQLKRRRYTGWGRLSRKLINGIRDKQSGKTILDFLKSDGFANRNFMQLIHDDSLTFKEDIQKAQVSGQGDSLHEHIANLAGSPAIKKGILQTVKVVDELVKVMGRHKPENIVIEMARENQTTQKGQKNSRERMKRIEEGIKELGSQILKEHPVENTQLQNEKLYLYYLQNGRDMYVDQELDINRLSDYDVDHIVPQSFLKDDSIDNKVLTRSDKARGKSDNVPSEEVVKKMKNYWRQLLNAKLITQRKFDNLTKAERGGLSELDKAGFIKRQLVETRQITKHVAQILDSRMNTKYDENDKLIREVKVITLKSKLVSDFRKDFQFYKVREINNYHHAHDAYLNAVVGTALIKKYPKLESEFVYGDYKVYDVRKMIAKSEQEIGKATAKYFFYSNIMNFFKTEITLANGEIRKRPLIETNGETGEIVWDKGRDFATVRKVLSMPQVNIVKKTEVQTGGFSKESILPKRNSDKLIARKKDWDPKKYGGFDSPTVAYSVLVVAKVEKGKSKKLKSVKELLGITIMERSSFEKNPIDFLEAKGYKEVKKDLIIKLPKYSLFELENGRKRMLASAGELQKGNELALPSKYVNFLYLASHYEKLKGSPEDNEQKQLFVEQHKHYLDEIIEQISEFSKRVILADANLDKVLSAYNKHRDKPIREQAENIIHLFTLTNLGAPAAFKYFDTTIDRKRYTSTKEVLDATLIHQSITGLYETRIDLSQLGGDGGPAPEAAAKGGGGGIPWLMKKPLQLTTLVPLQEYEERLLKQTMLTGSYKEKLQSLFLKYDALWQHWENQVGHRRIKPHHIATGTVNPRPQKQYPINPKAKASIQTVINDLLKQGVLIQQNSIMNTPVYPVPKPDGKWRMVLDYREVNKTIPLIAAQNQHSAGILSSIFRGKYKTTLDLSNGFWAHSITPESYWLTAFTWLGQQYCWTRLPQGFLNSPALFTADVVDLLKEVPNVQVYVDDIYISHDDPREHLEQLEKVFSLLLNAGYVVSLKKSEIAQHEVEFLGFNITKEGRGLTETFKQKLLNITPPRDLKQLQSILGLLNFARNFIPNFSELVKPLYNIIATANGKYITWTTDNSQQLQNIISMLNSAENLEERNPEVRLIMKVNTSPSAGYIRFYNEFAKRPIMYLNYVYTKAEVKFTNTEKLLTTIHKGLIKALDLGMGQEILVYSPIVSMTKIQKTPLPERKALPIRWITWMSYLEDPRIQFHYDKTLPELQQVPTVTDDIIAKIKHPSEFSMVFYTDGSAIKHPNVNKSHNAGMGIAQVQFKPEFTVINTWSIPLGDHTAQLAEVAAVEFACKKALKIDGPVLIVTDSFYVAESVNKELPYWQSNGFFNNKKKPLKHVSKWKSIADCIQLKPDIIIIHEKGHQPTASTFHTEGNNLADKLATQGSYVVNAGKRTADGSEFEKRTADGSEFESPKKKAKVE

SEQ ID NO: 7566 - protein, 2096 aa, synthetic construct
MPAAKRVKLDGGDKKYSIGLDIGTNSVGWAVITDEYKVPSKKFKVLGNTDRHSIKKNLIGALLFDSGETAEATRLKRTARRRYTRRKNRICYLQEIFSNEMAKVDDSFFHRLEESFLVEEDKKHERHPIFGNIVDEVAYHEKYPTIYHLRKKLVDSTDKADLRLIYLALAHMIKFRGHFLIEGDLNPDNSDVDKLFIQLVQTYNQLFEENPINASGVDAKAILSARLSKSRRLENLIAQLPGEKKNGLFGNLIALSLGLTPNFKSNFDLAEDAKLQLSKDTYDDDLDNLLAQIGDQYADLFLAAKNLSDAILLSDILRVNTEITKAPLSASMIKRYDEHHQDLTLLKALVRQQLPEKYKEIFFDQSKNGYAGYIDGGASQEEFYKFIKPILEKMDGTEELLVKLNREDLLRKQRTFDNGSIPHQIHLGELHAILRRQEDFYPFLKDNREKIEKILTFRIPYYVGPLARGNSRFAWMTRKSEETITPWNFEEVVDKGASAQSFIERMTNFDKNLPNEKVLPKHSLLYEYFTVYNELTKVKYVTEGMRKPAFLSGEQKKAIVDLLFKTNRKVTVKQLKEDYFKKIECFDSVEISGVEDRFNASLGTYHDLLKIIKDKDFLDNEENEDILEDIVLTLTLFEDREMIEERLKTYAHLFDDKVMKQLKRRRYTGWGRLSRKLINGIRDKQSGKTILDFLKSDGFANRNFMQLIHDDSLTFKEDIQKAQVSGQGDSLHEHIANLAGSPAIKKGILQTVKVVDELVKVMGRHKPENIVIEMARENQTTQKGQKNSRERMKRIEEGIKELGSQILKEHPVENTQLQNEKLYLYYLQNGRDMYVDQELDINRLSDYDVDHIVPQSFLKDDSIDNKVLTRSDKARGKSDNVPSEEVVKKMKNYWRQLLNAKLITQRKFDNLTKAERGGLSELDKAGFIKRQLVETRQITKHVAQILDSRMNTKYDENDKLIREVKVITLKSKLVSDFRKDFQFYKVREINNYHHAHDAYLNAVVGTALIKKYPKLESEFVYGDYKVYDVRKMIAKSEQEIGKATAKYFFYSNIMNFFKTEITLANGEIRKRPLIETNGETGEIVWDKGRDFATVRKVLSMPQVNIVKKTEVQTGGFSKESILPKRNSDKLIARKKDWDPKKYGGFDSPTVAYSVLVVAKVEKGKSKKLKSVKELLGITIMERSSFEKNPIDFLEAKGYKEVKKDLIIKLPKYSLFELENGRKRMLASAGELQKGNELALPSKYVNFLYLASHYEKLKGSPEDNEQKQLFVEQHKHYLDEIIEQISEFSKRVILADANLDKVLSAYNKHRDKPIREQAENIIHLFTLTNLGAPAAFKYFDTTIDRKRYTSTKEVLDATLIHQSITGLYETRIDLSQLGGDGGPAPEAAAKGGGGGTLNIEDEYRLHETSKEPDVPLGSTWLSDFPQAWAETGGMGLAVRQAPLIIPLKATSTPVSIKQYPMSQEARLGIKPHIQRLLDQGILVPCQSPWNTPLLPVKKPGTNDYRPVQDLREVNKRVEDIHPTVPNPYNLLSGLPPSHQWYTVLDLKDAFFCLRLHPTSQPLFAFEWRDPEMGISGQLTWTRLPQGFKNSPTLFDEALHRDLADFRIQHPDLILLQYVDDLLLAATSEQDCQRGTRALLQTLGNLGYRASAKKAQICQKQVKYLGYLLKEGQRWLTEARKETVMGQPTPKTPRQLREFLGTAGFCRLWIPGFAEMAAPLYPLTKTGTLFNWGPDQQKAYQEIKQALLTAPALGLPDLTKPFELFVDEKQGYAKGVLTQKLGPWRRPVAYLSKKLDPVAAGWPPCLRMVAAIAVLTKDAGKLTMGQPLVILAPHAVEALVKQPPDRWLSNARMTHYQAMLLDTDRVQFGPVVALNPATLLPLPEKEAPHDCLEILAETHGTRPDLTDQPIPDADYTWYTDGSSFLQEGQRRAGAAVTTETEVIWARALPAGTSAQRAELIALTQALKMAEGKKLNVYTDSRYAFATAHVHGEIYRRRGLLTSEGREIKNKNEILALLKALFLPKRLSIIHCPGHQKGNSAEARGNRMADQAAREAAMKAVLETSTLLAGKRTADGSEFEKRTADGSEFESPKKKAKVE

SEQ ID NO: 7567 - protein, 2096 aa, synthetic construct
MPAAKRVKLDGGDKKYSIGLDIGTNSVGWAVITDEYKVPSKKFKVLGNTDRHSIKKNLIGALLFDSGETAEATRLKRTARRRYTRRKNRICYLQEIFSNEMAKVDDSFFHRLEESFLVEEDKKHERHPIFGNIVDEVAYHEKYPTIYHLRKKLVDSTDKADLRLIYLALAHMIKFRGHFLIEGDLNPDNSDVDKLFIQLVQTYNQLFEENPINASGVDAKAILSARLSKSRRLENLIAQLPGEKKNGLFGNLIALSLGLTPNFKSNFDLAEDAKLQLSKDTYDDDLDNLLAQIGDQYADLFLAAKNLSDAILLSDILRVNTEITKAPLSASMIKRYDEHHQDLTLLKALVRQQLPEKYKEIFFDQSKNGYAGYIDGGASQEEFYKFIKPILEKMDGTEELLVKLNREDLLRKQRTFDNGSIPHQIHLGELHAILRRQEDFYPFLKDNREKIEKILTFRIPYYVGPLARGNSRFAWMTRKSEETITPWNFEEVVDKGASAQSFIERMTNFDKNLPNEKVLPKHSLLYEYFTVYNELTKVKYVTEGMRKPAFLSGEQKKAIVDLLFKTNRKVTVKQLKEDYFKKIECFDSVEISGVEDRFNASLGTYHDLLKIIKDKDFLDNEENEDILEDIVLTLTLFEDREMIEERLKTYAHLFDDKVMKQLKRRRYTGWGRLSRKLINGIRDKQSGKTILDFLKSDGFANRNFMQLIHDDSLTFKEDIQKAQVSGQGDSLHEHIANLAGSPAIKKGILQTVKVVDELVKVMGRHKPENIVIEMARENQTTQKGQKNSRERMKRIEEGIKELGSQILKEHPVENTQLQNEKLYLYYLQNGRDMYVDQELDINRLSDYDVDHIVPQSFLKDDSIDNKVLTRSDKARGKSDNVPSEEVVKKMKNYWRQLLNAKLITQRKFDNLTKAERGGLSELDKAGFIKRQLVETRQITKHVAQILDSRMNTKYDENDKLIREVKVITLKSKLVSDFRKDFQFYKVREINNYHHAHDAYLNAVVGTALIKKYPKLESEFVYGDYKVYDVRKMIAKSEQEIGKATAKYFFYSNIMNFFKTEITLANGEIRKRPLIETNGETGEIVWDKGRDFATVRKVLSMPQVNIVKKTEVQTGGFSKESILPKRNSDKLIARKKDWDPKKYGGFDSPTVAYSVLVVAKVEKGKSKKLKSVKELLGITIMERSSFEKNPIDFLEAKGYKEVKKDLIIKLPKYSLFELENGRKRMLASAGELQKGNELALPSKYVNFLYLASHYEKLKGSPEDNEQKQLFVEQHKHYLDEIIEQISEFSKRVILADANLDKVLSAYNKHRDKPIREQAENIIHLFTLTNLGAPAAFKYFDTTIDRKRYTSTKEVLDATLIHQSITGLYETRIDLSQLGGDGGPAPEAAAKGGGGGTLNIEDEYRLHETSKEPDVPLGSTWLSDFPQAWAETGGMGLAVRQAPLIIPLKATSTPVSIKQYPMSQEARLGIKPHIQRLLDQGILVPCQSPWNTPLLPVKKPGTNDYRPVQDLREVNKRVEDIHPTVPNPYNLLSGLPPSHQWYTVLDLKDAFFCLRLHPTSQPLFAFEWRDPEMGISGQLTWTRLPQGFKNSPTLFNEALHRDLADFRIQHPDLILLQYVDDLLLAATSEQDCQRGTRALLQTLGNLGYRASAKKAQICQKQVKYLGYLLKEGQRWLTEARKETVMGQPTPKTPRQLREFLGTAGFCRLWIPGFAEMAAPLYPLTKPGTLFNWGPDQQKAYQEIKQALLTAPALGLPDLTKPFELFVDEKQGYAKGVLTQKLGPWRRPVAYLSKKLDPVAAGWPPCLRMVAAIAVLTKDAGKLTMGQPLVILAPHAVEALVKQPPDRWLSNARMTHYQAMLLDTDRVQFGPVVALNPATLLPLPEKEAPHDCLEILAETHGTRPDLTDQPIPDADYTWYTDGSSFLQEGQRRAGAAVTTETEVIWARALPAGTSAQRAELIALTQALKMAEGKKLNVYTDSRYAFATAHVHGEIYRRRGWLTSEGREIKNKNEILALLKALFLPKRLSIIHCPGHQKGNSAEARGNRMADQAAREAAMKAVLETSTLLAGKRTADGSEFEKRTADGSEFESPKKKAKVE

SEQ ID NO: 7568 - protein, 2096 aa, synthetic construct
MPAAKRVKLDGGDKKYSIGLDIGTNSVGWAVITDEYKVPSKKFKVLGNTDRHSIKKNLIGALLFDSGETAEATRLKRTARRRYTRRKNRICYLQEIFSNEMAKVDDSFFHRLEESFLVEEDKKHERHPIFGNIVDEVAYHEKYPTIYHLRKKLVDSTDKADLRLIYLALAHMIKFRGHFLIEGDLNPDNSDVDKLFIQLVQTYNQLFEENPINASGVDAKAILSARLSKSRRLENLIAQLPGEKKNGLFGNLIALSLGLTPNFKSNFDLAEDAKLQLSKDTYDDDLDNLLAQIGDQYADLFLAAKNLSDAILLSDILRVNTEITKAPLSASMIKRYDEHHQDLTLLKALVRQQLPEKYKEIFFDQSKNGYAGYIDGGASQEEFYKFIKPILEKMDGTEELLVKLNREDLLRKQRTFDNGSIPHQIHLGELHAILRRQEDFYPFLKDNREKIEKILTFRIPYYVGPLARGNSRFAWMTRKSEETITPWNFEEVVDKGASAQSFIERMTNFDKNLPNEKVLPKHSLLYEYFTVYNELTKVKYVTEGMRKPAFLSGEQKKAIVDLLFKTNRKVTVKQLKEDYFKKIECFDSVEISGVEDRFNASLGTYHDLLKIIKDKDFLDNEENEDILEDIVLTLTLFEDREMIEERLKTYAHLFDDKVMKQLKRRRYTGWGRLSRKLINGIRDKQSGKTILDFLKSDGFANRNFMQLIHDDSLTFKEDIQKAQVSGQGDSLHEHIANLAGSPAIKKGILQTVKVVDELVKVMGRHKPENIVIEMARENQTTQKGQKNSRERMKRIEEGIKELGSQILKEHPVENTQLQNEKLYLYYLQNGRDMYVDQELDINRLSDYDVDHIVPQSFLKDDSIDNKVLTRSDKARGKSDNVPSEEVVKKMKNYWRQLLNAKLITQRKFDNLTKAERGGLSELDKAGFIKRQLVETRQITKHVAQILDSRMNTKYDENDKLIREVKVITLKSKLVSDFRKDFQFYKVREINNYHHAHDAYLNAVVGTALIKKYPKLESEFVYGDYKVYDVRKMIAKSEQEIGKATAKYFFYSNIMNFFKTEITLANGEIRKRPLIETNGETGEIVWDKGRDFATVRKVLSMPQVNIVKKTEVQTGGFSKESILPKRNSDKLIARKKDWDPKKYGGFDSPTVAYSVLVVAKVEKGKSKKLKSVKELLGITIMERSSFEKNPIDFLEAKGYKEVKKDLIIKLPKYSLFELENGRKRMLASAGELQKGNELALPSKYVNFLYLASHYEKLKGSPEDNEQKQLFVEQHKHYLDEIIEQISEFSKRVILADANLDKVLSAYNKHRDKPIREQAENIIHLFTLTNLGAPAAFKYFDTTIDRKRYTSTKEVLDATLIHQSITGLYETRIDLSQLGGDGGPAPEAAAKGGGGGTLNIEDEYRLHETSKEPDVPLGSTWLSDFPQAWAETGGMGLAVRQAPLIIPLKATSTPVSIKQYPMSQEARLGIKPHIQRLLDQGILVPCQSPWNTPLLPVKKPGTNDYRPVQDLREVNKRVEDIHPTVPNPYNLLSGLPPSHQWYTVLDLKDAFFCLRLHPTSQPLFAFEWRDPEMGISGQLTWTRLPQGFKNSPTLFNEALHRDLADFRIQHPDLILLQYVDDLLLAATSEQDCQRGTRALLQTLGNLGYRASAKKAQICQKQVKYLGYLLKEGQRWLTEARKETVMGQPTPKTPRQLREFLGKAGFCRLFIPGFAEMAAPLYPLTKPGTLFNWGPDQQKAYQEIKQALLTAPALGLPDLTKPFELFVDEKQGYAKGVLTQKLGPWRRPVAYLSKKLDPVAAGWPPCLRMVAAIAVLTKDAGKLTMGQPLVILAPHAVEALVKQPPDRWLSNARMTHYQAMLLDTDRVQFGPVVALNPATLLPLPEKEAPHDCLEILAETHGTRPDLTDQPIPDADYTWYTDGSSFLQEGQRRAGAAVTTETEVIWARALPAGTSAQRAELIALTQALKMAEGKKLNVYTDSRYAFATAHVHGEIYRRRGWLTSEGREIKNKNEILALLKALFLPKRLSIIHCPGHQKGNSAEARGNRMADQAAREAAMKAVLETSTLLAGKRTADGSEFEKRTADGSEFESPKKKAKVE

SEQ ID NO: 7569 - protein, 2098 aa, synthetic construct
MPAAKRVKLDGGDKKYSIGLDIGTNSVGWAVITDEYKVPSKKFKVLGNTDRHSIKKNLIGALLFDSGETAEATRLKRTARRRYTRRKNRICYLQEIFSNEMAKVDDSFFHRLEESFLVEEDKKHERHPIFGNIVDEVAYHEKYPTIYHLRKKLVDSTDKADLRLIYLALAHMIKFRGHFLIEGDLNPDNSDVDKLFIQLVQTYNQLFEENPINASGVDAKAILSARLSKSRRLENLIAQLPGEKKNGLFGNLIALSLGLTPNFKSNFDLAEDAKLQLSKDTYDDDLDNLLAQIGDQYADLFLAAKNLSDAILLSDILRVNTEITKAPLSASMIKRYDEHHQDLTLLKALVRQQLPEKYKEIFFDQSKNGYAGYIDGGASQEEFYKFIKPILEKMDGTEELLVKLNREDLLRKQRTFDNGSIPHQIHLGELHAILRRQEDFYPFLKDNREKIEKILTFRIPYYVGPLARGNSRFAWMTRKSEETITPWNFEEVVDKGASAQSFIERMTNFDKNLPNEKVLPKHSLLYEYFTVYNELTKVKYVTEGMRKPAFLSGEQKKAIVDLLFKTNRKVTVKQLKEDYFKKIECFDSVEISGVEDRFNASLGTYHDLLKIIKDKDFLDNEENEDILEDIVLTLTLFEDREMIEERLKTYAHLFDDKVMKQLKRRRYTGWGRLSRKLINGIRDKQSGKTILDFLKSDGFANRNFMQLIHDDSLTFKEDIQKAQVSGQGDSLHEHIANLAGSPAIKKGILQTVKVVDELVKVMGRHKPENIVIEMARENQTTQKGQKNSRERMKRIEEGIKELGSQILKEHPVENTQLQNEKLYLYYLQNGRDMYVDQELDINRLSDYDVDHIVPQSFLKDDSIDNKVLTRSDKARGKSDNVPSEEVVKKMKNYWRQLLNAKLITQRKFDNLTKAERGGLSELDKAGFIKRQLVETRQITKHVAQILDSRMNTKYDENDKLIREVKVITLKSKLVSDFRKDFQFYKVREINNYHHAHDAYLNAVVGTALIKKYPKLESEFVYGDYKVYDVRKMIAKSEQEIGKATAKYFFYSNIMNFFKTEITLANGEIRKRPLIETNGETGEIVWDKGRDFATVRKVLSMPQVNIVKKTEVQTGGFSKESILPKRNSDKLIARKKDWDPKKYGGFDSPTVAYSVLVVAKVEKGKSKKLKSVKELLGITIMERSSFEKNPIDFLEAKGYKEVKKDLIIKLPKYSLFELENGRKRMLASAGELQKGNELALPSKYVNFLYLASHYEKLKGSPEDNEQKQLFVEQHKHYLDEIIEQISEFSKRVILADANLDKVLSAYNKHRDKPIREQAENIIHLFTLTNLGAPAAFKYFDTTIDRKRYTSTKEVLDATLIHQSITGLYETRIDLSQLGGDGGGSSEAAAKPAPGGTAPLEEEYRLFLEAPIQNVTLLEQWKREIPKVWAEINPPGLASTQAPIHVQLLSTALPVRVRQYPITLEAKRSLRETIRKFRAAGILRPVHSPWNTPLLPVRKSGTSEYRMVQDLREVNKRVETIHPTVPNPYTLLSLLPPDRIWYSVLDLKDAFFCIPLAPESQLIFAFEWADAEEGESGQLTWTRLPQGFKNSPTLFNEALNRDLQGFRLDHPSVSLLQYVDDLLIAADTQAACLSATRDLLMTLAELGYRVSGKKAQLCQEEVTYLGFKIHKGSRSLSNSRTQAILQIPVPKTKRQVREFLGTIGYCRLWIPGFAELAQPLYAATRPGNDPLVWGEKEEEAFQSLKLALTQPPALALPSLDKPFQLFVEETSGAAKGVLTQALGPWKRPVAYLSKRLDPVAAGWPRCLRAIAAAALLTREASKLTFGQDIEITSSHNLESLLRSPPDKWLTNARITQYQVLLLDPPRVRFKQTAALNPATLLPETDDTLPIHHCLDTLDSLTSTRPDLTDQPLAQAEATLFTDGSSYIRDGKRYAGAAVVTLDSVIWAEPLPIGTSAQKAELIALTKALEWSKDKSVNIYTDSRYAFATLHVHGMIYRERGWLTAGGKAIKNAPEILALLTAVWLPKRVAVMHCKGHQKDDAPTSTGNRRADEVAREVAIRPLSTQATISAGKRTADGSEFEKRTADGSEFESPKKKAKVE

SEQ ID NO: 7570 - protein, 2102 aa, synthetic construct
MPAAKRVKLDGGDKKYSIGLDIGTNSVGWAVITDEYKVPSKKFKVLGNTDRHSIKKNLIGALLFDSGETAEATRLKRTARRRYTRRKNRICYLQEIFSNEMAKVDDSFFHRLEESFLVEEDKKHERHPIFGNIVDEVAYHEKYPTIYHLRKKLVDSTDKADLRLIYLALAHMIKFRGHFLIEGDLNPDNSDVDKLFIQLVQTYNQLFEENPINASGVDAKAILSARLSKSRRLENLIAQLPGEKKNGLFGNLIALSLGLTPNFKSNFDLAEDAKLQLSKDTYDDDLDNLLAQIGDQYADLFLAAKNLSDAILLSDILRVNTEITKAPLSASMIKRYDEHHQDLTLLKALVRQQLPEKYKEIFFDQSKNGYAGYIDGGASQEEFYKFIKPILEKMDGTEELLVKLNREDLLRKQRTFDNGSIPHQIHLGELHAILRRQEDFYPFLKDNREKIEKILTFRIPYYVGPLARGNSRFAWMTRKSEETITPWNFEEVVDKGASAQSFIERMTNFDKNLPNEKVLPKHSLLYEYFTVYNELTKVKYVTEGMRKPAFLSGEQKKAIVDLLFKTNRKVTVKQLKEDYFKKIECFDSVEISGVEDRFNASLGTYHDLLKIIKDKDFLDNEENEDILEDIVLTLTLFEDREMIEERLKTYAHLFDDKVMKQLKRRRYTGWGRLSRKLINGIRDKQSGKTILDFLKSDGFANRNFMQLIHDDSLTFKEDIQKAQVSGQGDSLHEHIANLAGSPAIKKGILQTVKVVDELVKVMGRHKPENIVIEMARENQTTQKGQKNSRERMKRIEEGIKELGSQILKEHPVENTQLQNEKLYLYYLQNGRDMYVDQELDINRLSDYDVDHIVPQSFLKDDSIDNKVLTRSDKARGKSDNVPSEEVVKKMKNYWRQLLNAKLITQRKFDNLTKAERGGLSELDKAGFIKRQLVETRQITKHVAQILDSRMNTKYDENDKLIREVKVITLKSKLVSDFRKDFQFYKVREINNYHHAHDAYLNAVVGTALIKKYPKLESEFVYGDYKVYDVRKMIAKSEQEIGKATAKYFFYSNIMNFFKTEITLANGEIRKRPLIETNGETGEIVWDKGRDFATVRKVLSMPQVNIVKKTEVQTGGFSKESILPKRNSDKLIARKKDWDPKKYGGFDSPTVAYSVLVVAKVEKGKSKKLKSVKELLGITIMERSSFEKNPIDFLEAKGYKEVKKDLIIKLPKYSLFELENGRKRMLASAGELQKGNELALPSKYVNFLYLASHYEKLKGSPEDNEQKQLFVEQHKHYLDEIIEQISEFSKRVILADANLDKVLSAYNKHRDKPIREQAENIIHLFTLTNLGAPAAFKYFDTTIDRKRYTSTKEVLDATLIHQSITGLYETRIDLSQLGGDGGGSSEAAAKPAPGGTVSLQDEHRLFDIPVTTSLPDVWLQDFPQAWAETGGLGRAKCQAPIIIDLKPTAVPVSIKQYPMSLEAHMGIRQHIIKFLELGVLRPCRSPWNTPLLPVKKPGTQDYRPVQDLREINKRTVDIHPTVPNPYNLLSTLKPDYSWYTVLDLKDAFFCLPLAPQSQELFAFEWKDPERGISGQLTWTRLPQGFKNSPTLFNEALHRDLTDFRTQHPEVTLLQYVDDLLLAAPTKKACTQGTRHLLQELGEKGYRASAKKAQICQTKVTYLGYILSEGKRWLTPGRIETVARIPPPRNPREVREFLGTAGFCRLWIPGFAELAAPLYALTKPSTPFTWQTEHQLAFEALKKALLSAPALGLPDTSKPFTLFLDERQGIAKGVLTQKLGPWKRPVAYLSKKLDPVAAGWPPCLRIMAATAMLVKDSAKLTLGQPLTVITPHTLEAIVRQPPDRWITNARLTHYQALLLDTDRVQFGPPVTLNPATLLPVPENQPSPHDCRQVLAETHGTREDLKDQELPDADHTWYTDGSSYLDSGTRRAGAAVVDGHNTIWAQSLPPGTSAQKAELIALTKALELSKGKKANIYTDSRYAFATAHTHGSIYERRGWLTSEGKEIKNKAEIIALLKALFLPQEVAIIHCPGHQKGQDPVAVGNRQADRVARQAAMAEVLTLATEPDNTSHITAGKRTADGSEFEKRTADGSEFESPKKKAKVE

SEQ ID NO: 7571 - protein, 2173 aa, synthetic construct
MPAAKRVKLDGGDKKYSIGLDIGTNSVGWAVITDEYKVPSKKFKVLGNTDRHSIKKNLIGALLFDSGETAEATRLKRTARRRYTRRKNRICYLQEIFSNEMAKVDDSFFHRLEESFLVEEDKKHERHPIFGNIVDEVAYHEKYPTIYHLRKKLVDSTDKADLRLIYLALAHMIKFRGHFLIEGDLNPDNSDVDKLFIQLVQTYNQLFEENPINASGVDAKAILSARLSKSRRLENLIAQLPGEKKNGLFGNLIALSLGLTPNFKSNFDLAEDAKLQLSKDTYDDDLDNLLAQIGDQYADLFLAAKNLSDAILLSDILRVNTEITKAPLSASMIKRYDEHHQDLTLLKALVRQQLPEKYKEIFFDQSKNGYAGYIDGGASQEEFYKFIKPILEKMDGTEELLVKLNREDLLRKQRTFDNGSIPHQIHLGELHAILRRQEDFYPFLKDNREKIEKILTFRIPYYVGPLARGNSRFAWMTRKSEETITPWNFEEVVDKGASAQSFIERMTNFDKNLPNEKVLPKHSLLYEYFTVYNELTKVKYVTEGMRKPAFLSGEQKKAIVDLLFKTNRKVTVKQLKEDYFKKIECFDSVEISGVEDRFNASLGTYHDLLKIIKDKDFLDNEENEDILEDIVLTLTLFEDREMIEERLKTYAHLFDDKVMKQLKRRRYTGWGRLSRKLINGIRDKQSGKTILDFLKSDGFANRNFMQLIHDDSLTFKEDIQKAQVSGQGDSLHEHIANLAGSPAIKKGILQTVKVVDELVKVMGRHKPENIVIEMARENQTTQKGQKNSRERMKRIEEGIKELGSQILKEHPVENTQLQNEKLYLYYLQNGRDMYVDQELDINRLSDYDVDHIVPQSFLKDDSIDNKVLTRSDKARGKSDNVPSEEVVKKMKNYWRQLLNAKLITQRKFDNLTKAERGGLSELDKAGFIKRQLVETRQITKHVAQILDSRMNTKYDENDKLIREVKVITLKSKLVSDFRKDFQFYKVREINNYHHAHDAYLNAVVGTALIKKYPKLESEFVYGDYKVYDVRKMIAKSEQEIGKATAKYFFYSNIMNFFKTEITLANGEIRKRPLIETNGETGEIVWDKGRDFATVRKVLSMPQVNIVKKTEVQTGGFSKESILPKRNSDKLIARKKDWDPKKYGGFDSPTVAYSVLVVAKVEKGKSKKLKSVKELLGITIMERSSFEKNPIDFLEAKGYKEVKKDLIIKLPKYSLFELENGRKRMLASAGELQKGNELALPSKYVNFLYLASHYEKLKGSPEDNEQKQLFVEQHKHYLDEIIEQISEFSKRVILADANLDKVLSAYNKHRDKPIREQAENIIHLFTLTNLGAPAAFKYFDTTIDRKRYTSTKEVLDATLIHQSITGLYETRIDLSQLGGDGGGSSEAAAKPAPGGMDLLKPLTVERKGVKIKGYWNSQADITCVPKDLLQGEEPVRQQNVTTIHGTQEGDVYYVNLKIDGRRINTEVIGTTLDYAIITPGDVPWILKKPLELTIKLDLEEQQGTLLNNSILSKKGKEELKQLFEKYSALWQSWENQVGHRRIRPHKIATGTVKPTPQKQYHINPKAKPDIQIVINDLLKQGVLIQKESTMNTPVYPVPKPNGRWRMVLDYRAVNKVTPLIAVQNQHSYGILGSLFKGRYKTTIDLSNGFWAHPIVPEDYWITAFTWQGKQYCWTVLPQGFLNSPGLFNGDVVDLLQGIPNVEVYVDDVYISHDSEKEHLEYLDILFNRLKEAGYIISLKKSNIANSIVDFLGFQITNEGRGLTDTFKEKLENITAPTTLKQLQSILGLLNFARNFIPDFTELIAPLYALIPKSPKNYVPWQIEHSTTLETLITKLNGAEYLQGRKGDKTLIMKVNASYTTGYIRYYNEGEKKPISYVSIVFSKTELKFTELEKLLTTVHKGLLKALDLSMGQNIHVYSPIVSMQNIQKTPQTAKKALASRWLSWLSYLEDPRIRFFYDPQMPALKDLPAVDTGKDNKKHPSNFQHIFYTDGSAITSPTKEGHLNAGMGIVYFINKDGNLQKQQEWSISLGNHTAQFAEIAAFEFALKKCLPLGGNILVVTDSNYVAKAYNEELDVWASNGFVNNRKKPLKHISKWKSVADLKRLRPDVVVTHEPGHQKLDSSPHAYGNNLADQLATQASFKVHAGKRTADGSEFEKRTADGSEFESPKKKAKVE

SEQ ID NO: 7572 - protein, 2095 aa, synthetic construct
MPAAKRVKLDGGDKKYSIGLDIGTNSVGWAVITDEYKVPSKKFKVLGNTDRHSIKKNLIGALLFDSGETAEATRLKRTARRRYTRRKNRICYLQEIFSNEMAKVDDSFFHRLEESFLVEEDKKHERHPIFGNIVDEVAYHEKYPTIYHLRKKLVDSTDKADLRLIYLALAHMIKFRGHFLIEGDLNPDNSDVDKLFIQLVQTYNQLFEENPINASGVDAKAILSARLSKSRRLENLIAQLPGEKKNGLFGNLIALSLGLTPNFKSNFDLAEDAKLQLSKDTYDDDLDNLLAQIGDQYADLFLAAKNLSDAILLSDILRVNTEITKAPLSASMIKRYDEHHQDLTLLKALVRQQLPEKYKEIFFDQSKNGYAGYIDGGASQEEFYKFIKPILEKMDGTEELLVKLNREDLLRKQRTFDNGSIPHQIHLGELHAILRRQEDFYPFLKDNREKIEKILTFRIPYYVGPLARGNSRFAWMTRKSEETITPWNFEEVVDKGASAQSFIERMTNFDKNLPNEKVLPKHSLLYEYFTVYNELTKVKYVTEGMRKPAFLSGEQKKAIVDLLFKTNRKVTVKQLKEDYFKKIECFDSVEISGVEDRFNASLGTYHDLLKIIKDKDFLDNEENEDILEDIVLTLTLFEDREMIEERLKTYAHLFDDKVMKQLKRRRYTGWGRLSRKLINGIRDKQSGKTILDFLKSDGFANRNFMQLIHDDSLTFKEDIQKAQVSGQGDSLHEHIANLAGSPAIKKGILQTVKVVDELVKVMGRHKPENIVIEMARENQTTQKGQKNSRERMKRIEEGIKELGSQILKEHPVENTQLQNEKLYLYYLQNGRDMYVDQELDINRLSDYDVDHIVPQSFLKDDSIDNKVLTRSDKARGKSDNVPSEEVVKKMKNYWRQLLNAKLITQRKFDNLTKAERGGLSELDKAGFIKRQLVETRQITKHVAQILDSRMNTKYDENDKLIREVKVITLKSKLVSDFRKDFQFYKVREINNYHHAHDAYLNAVVGTALIKKYPKLESEFVYGDYKVYDVRKMIAKSEQEIGKATAKYFFYSNIMNFFKTEITLANGEIRKRPLIETNGETGEIVWDKGRDFATVRKVLSMPQVNIVKKTEVQTGGFSKESILPKRNSDKLIARKKDWDPKKYGGFDSPTVAYSVLVVAKVEKGKSKKLKSVKELLGITIMERSSFEKNPIDFLEAKGYKEVKKDLIIKLPKYSLFELENGRKRMLASAGELQKGNELALPSKYVNFLYLASHYEKLKGSPEDNEQKQLFVEQHKHYLDEIIEQISEFSKRVILADANLDKVLSAYNKHRDKPIREQAENIIHLFTLTNLGAPAAFKYFDTTIDRKRYTSTKEVLDATLIHQSITGLYETRIDLSQLGGDGGGSSEAAAKPAPGGTLQLEEEYRLFEPESTQKQEMDIWLKNFPQAWAETGGMGTAHCQAPVLIQLKATATPISIRQYPMPHEAYQGIKPHIRRMLDQGILKPCQSPWNTPLLPVKKPGTEDYRPVQDLREVNKRVEDIHPTVPNPYNLLSTLPPSHPWYTVLDLKDAFFCLRLHSESQLLFAFEWRDPEIGLSGQLTWTRLPQGFKNSPTLFNEALHSDLADFRVRYPALVLLQYVDDLLLAAATRTECLEGTKALLETLGNKGYRASAKKAQICLQEVTYLGYSLKDGQRWLTKARKEAILSIPVPKNSRQVREFLGTAGYCRLWIPGFAELAAPLYPLTRPGTLFQWGTEQQLAFEDIKKALLSSPALGLPDITKPFELFIDENSGFAKGVLVQKLGPWKRPVAYLSKKLDTVASGWPPCLRMVAAIAILVKDAGKLTLGQPLTILTSHPVEALVRQPPNKWLSNARMTHYQAMLLDAERVHFGPTVSLNPATLLPLPSGGNHHDCLQILAETHGTRPDLTDQPLPDADLTWYTDGSSFIRNGEREAGAAVTTESEVIWAAPLPPGTSAQRAELIALTQALKMAEGKKLTVYTDSRYAFATTHVHGEIYRRRGWLTSEGKEIKNKNEILALLEALFLPKRLSIIHCPGHQKGDSPQAKGNRLADDTAKKAATETHSSLTVLPAGKRTADGSEFEKRTADGSEFESPKKKAKVE

SEQ ID NO: 7573 - protein, 2087 aa, synthetic construct
MPAAKRVKLDGGDKKYSIGLDIGTNSVGWAVITDEYKVPSKKFKVLGNTDRHSIKKNLIGALLFDSGETAEATRLKRTARRRYTRRKNRICYLQEIFSNEMAKVDDSFFHRLEESFLVEEDKKHERHPIFGNIVDEVAYHEKYPTIYHLRKKLVDSTDKADLRLIYLALAHMIKFRGHFLIEGDLNPDNSDVDKLFIQLVQTYNQLFEENPINASGVDAKAILSARLSKSRRLENLIAQLPGEKKNGLFGNLIALSLGLTPNFKSNFDLAEDAKLQLSKDTYDDDLDNLLAQIGDQYADLFLAAKNLSDAILLSDILRVNTEITKAPLSASMIKRYDEHHQDLTLLKALVRQQLPEKYKEIFFDQSKNGYAGYIDGGASQEEFYKFIKPILEKMDGTEELLVKLNREDLLRKQRTFDNGSIPHQIHLGELHAILRRQEDFYPFLKDNREKIEKILTFRIPYYVGPLARGNSRFAWMTRKSEETITPWNFEEVVDKGASAQSFIERMTNFDKNLPNEKVLPKHSLLYEYFTVYNELTKVKYVTEGMRKPAFLSGEQKKAIVDLLFKTNRKVTVKQLKEDYFKKIECFDSVEISGVEDRFNASLGTYHDLLKIIKDKDFLDNEENEDILEDIVLTLTLFEDREMIEERLKTYAHLFDDKVMKQLKRRRYTGWGRLSRKLINGIRDKQSGKTILDFLKSDGFANRNFMQLIHDDSLTFKEDIQKAQVSGQGDSLHEHIANLAGSPAIKKGILQTVKVVDELVKVMGRHKPENIVIEMARENQTTQKGQKNSRERMKRIEEGIKELGSQILKEHPVENTQLQNEKLYLYYLQNGRDMYVDQELDINRLSDYDVDHIVPQSFLKDDSIDNKVLTRSDKARGKSDNVPSEEVVKKMKNYWRQLLNAKLITQRKFDNLTKAERGGLSELDKAGFIKRQLVETRQITKHVAQILDSRMNTKYDENDKLIREVKVITLKSKLVSDFRKDFQFYKVREINNYHHAHDAYLNAVVGTALIKKYPKLESEFVYGDYKVYDVRKMIAKSEQEIGKATAKYFFYSNIMNFFKTEITLANGEIRKRPLIETNGETGEIVWDKGRDFATVRKVLSMPQVNIVKKTEVQTGGFSKESILPKRNSDKLIARKKDWDPKKYGGFDSPTVAYSVLVVAKVEKGKSKKLKSVKELLGITIMERSSFEKNPIDFLEAKGYKEVKKDLIIKLPKYSLFELENGRKRMLASAGELQKGNELALPSKYVNFLYLASHYEKLKGSPEDNEQKQLFVEQHKHYLDEIIEQISEFSKRVILADANLDKVLSAYNKHRDKPIREQAENIIHLFTLTNLGAPAAFKYFDTTIDRKRYTSTKEVLDATLIHQSITGLYETRIDLSQLGGDGGGSSEAAAKPAPGGVPWLTQQPLQLTILVPLQEYQEKILSKTALPEDQKQQLKTLFVKYDNLWQHWENQVGHRKIRPHNIATGDYPPRPQKQYPINPKAKPSIQIVIDDLLKQGVLTPQNSTMNTPVYPVPKPDGRWRMVLDYREVNKTIPLTAAQNQHSAGILATIVRQKYKTTLDLANGFWAHPITPESYWLTAFTWQGKQYCWTRLPQGFLNSPALFNADVVDLLKEIPNVQVYVDDIYLSHDDPKEHVQQLEKVFQILLQAGYVVSLKKSEIGQKTVEFLGFNITKEGRGLTDTFKTKLLNITPPKDLKQLQSILGKLNFARNFIPNFAELVQPLYNLIAPAKGKYIEWSEENTKQLNMVIEALNTASNLEERLPEQRLVIKVNTSPSAGYVRYYNETGKKPIMYLNYVFSKAELKFSMLEKLLTTMHKALIKAMDLAMGQEILVYSPIVSMTKIQKTPLPERKALPIRWITWMTYLEDPRIQFHYDKTLPELKHIPDVYTSSQSPVKHPSQYEGVFYTDGSAIKSPDPTKSNNAGMGIVHATYKPEYQVLNQWSIPLGNHTAQMAEIAAVEFACKKALKIPGPVLVITDSFYVAESANKELPYWKSNGFVNNKKKPLKHISKWKSIAECLSMKPDITIQHEKGISLQIPVFILKGNALADKLATQGSYVVNAGKRTADGSEFEKRTADGSEFESPKKKAKVE

SEQ ID NO: 7574 - protein, 2127 aa, synthetic construct
MPAAKRVKLDGGDKKYSIGLDIGTNSVGWAVITDEYKVPSKKFKVLGNTDRHSIKKNLIGALLFDSGETAEATRLKRTARRRYTRRKNRICYLQEIFSNEMAKVDDSFFHRLEESFLVEEDKKHERHPIFGNIVDEVAYHEKYPTIYHLRKKLVDSTDKADLRLIYLALAHMIKFRGHFLIEGDLNPDNSDVDKLFIQLVQTYNQLFEENPINASGVDAKAILSARLSKSRRLENLIAQLPGEKKNGLFGNLIALSLGLTPNFKSNFDLAEDAKLQLSKDTYDDDLDNLLAQIGDQYADLFLAAKNLSDAILLSDILRVNTEITKAPLSASMIKRYDEHHQDLTLLKALVRQQLPEKYKEIFFDQSKNGYAGYIDGGASQEEFYKFIKPILEKMDGTEELLVKLNREDLLRKQRTFDNGSIPHQIHLGELHAILRRQEDFYPFLKDNREKIEKILTFRIPYYVGPLARGNSRFAWMTRKSEETITPWNFEEVVDKGASAQSFIERMTNFDKNLPNEKVLPKHSLLYEYFTVYNELTKVKYVTEGMRKPAFLSGEQKKAIVDLLFKTNRKVTVKQLKEDYFKKIECFDSVEISGVEDRFNASLGTYHDLLKIIKDKDFLDNEENEDILEDIVLTLTLFEDREMIEERLKTYAHLFDDKVMKQLKRRRYTGWGRLSRKLINGIRDKQSGKTILDFLKSDGFANRNFMQLIHDDSLTFKEDIQKAQVSGQGDSLHEHIANLAGSPAIKKGILQTVKVVDELVKVMGRHKPENIVIEMARENQTTQKGQKNSRERMKRIEEGIKELGSQILKEHPVENTQLQNEKLYLYYLQNGRDMYVDQELDINRLSDYDVDHIVPQSFLKDDSIDNKVLTRSDKARGKSDNVPSEEVVKKMKNYWRQLLNAKLITQRKFDNLTKAERGGLSELDKAGFIKRQLVETRQITKHVAQILDSRMNTKYDENDKLIREVKVITLKSKLVSDFRKDFQFYKVREINNYHHAHDAYLNAVVGTALIKKYPKLESEFVYGDYKVYDVRKMIAKSEQEIGKATAKYFFYSNIMNFFKTEITLANGEIRKRPLIETNGETGEIVWDKGRDFATVRKVLSMPQVNIVKKTEVQTGGFSKESILPKRNSDKLIARKKDWDPKKYGGFDSPTVAYSVLVVAKVEKGKSKKLKSVKELLGITIMERSSFEKNPIDFLEAKGYKEVKKDLIIKLPKYSLFELENGRKRMLASAGELQKGNELALPSKYVNFLYLASHYEKLKGSPEDNEQKQLFVEQHKHYLDEIIEQISEFSKRVILADANLDKVLSAYNKHRDKPIREQAENIIHLFTLTNLGAPAAFKYFDTTIDRKRYTSTKEVLDATLIHQSITGLYETRIDLSQLGGDGGGSSEAAAKPAPGGLLGRDLLTKLKAQIQFSTEGPQVTWEDRPAMCLVLNLEEEYRLHEKPVPPSIDPSWLQLFPMVWAEKAGMGLANQVPPVVVELKSDASPVAVRQYPMSKEAREGIRPHIQRFLDLGILVPCQSPWNTPLLPVKKPGTNDYRPVQDLREVNKRVQDIHPTVPNPYNLLSSLPPSHTWYSVLDLKDAFFCLKLHPNSQPLFAFEWRDPEKGNTGQLTWTRLPQGFKNSPTLFNEALHRDLASFRALNPQVVMLQYVDDLLVAAPTYRDCKEGTRRLLQELSKLGYRVSAKKAQLCREEVTYLGYLLKGGKRWLTPARKATVMKIPTPTTPRQVREFLGTAGFCRLWIPGFASLAAPLYPLTRPKVPFTWTEAHQEAFGRIKEALLSAPALALPDLTKPFALYVDEKEGVARGVLTQTLGPWRRPVAYLSKKLDPVASGWPTCLKAIAAVALLLKDADKLTLGQNVLVIAPHNLESIVRQPPDRWMTNARMTHYQSLLLNERVSFAPPAILNPATLLPVESDDTPIHICSEILAEETGTRPDLRDQPLPGVPAWYTDGSSFIMDGRRQAGAAIVDNKRTVWASNLPEGTSAQKAELIALTQALRLAEGKSINIYTDSRYAFATAHVHGAIYKQRGWLTSAGKDIKNKEEILALLEAIHLPKRVAIIHCPGHQRGTDPVATGNRKADEAAKQAAQSTRILTETTKNAGKRTADGSEFEKRTADGSEFESPKKKAKVE

SEQ ID NO: 7575 - protein, 2218 aa, synthetic construct
MPAAKRVKLDGGDKKYSIGLDIGTNSVGWAVITDEYKVPSKKFKVLGNTDRHSIKKNLIGALLFDSGETAEATRLKRTARRRYTRRKNRICYLQEIFSNEMAKVDDSFFHRLEESFLVEEDKKHERHPIFGNIVDEVAYHEKYPTIYHLRKKLVDSTDKADLRLIYLALAHMIKFRGHFLIEGDLNPDNSDVDKLFIQLVQTYNQLFEENPINASGVDAKAILSARLSKSRRLENLIAQLPGEKKNGLFGNLIALSLGLTPNFKSNFDLAEDAKLQLSKDTYDDDLDNLLAQIGDQYADLFLAAKNLSDAILLSDILRVNTEITKAPLSASMIKRYDEHHQDLTLLKALVRQQLPEKYKEIFFDQSKNGYAGYIDGGASQEEFYKFIKPILEKMDGTEELLVKLNREDLLRKQRTFDNGSIPHQIHLGELHAILRRQEDFYPFLKDNREKIEKILTFRIPYYVGPLARGNSRFAWMTRKSEETITPWNFEEVVDKGASAQSFIERMTNFDKNLPNEKVLPKHSLLYEYFTVYNELTKVKYVTEGMRKPAFLSGEQKKAIVDLLFKTNRKVTVKQLKEDYFKKIECFDSVEISGVEDRFNASLGTYHDLLKIIKDKDFLDNEENEDILEDIVLTLTLFEDREMIEERLKTYAHLFDDKVMKQLKRRRYTGWGRLSRKLINGIRDKQSGKTILDFLKSDGFANRNFMQLIHDDSLTFKEDIQKAQVSGQGDSLHEHIANLAGSPAIKKGILQTVKVVDELVKVMGRHKPENIVIEMARENQTTQKGQKNSRERMKRIEEGIKELGSQILKEHPVENTQLQNEKLYLYYLQNGRDMYVDQELDINRLSDYDVDHIVPQSFLKDDSIDNKVLTRSDKARGKSDNVPSEEVVKKMKNYWRQLLNAKLITQRKFDNLTKAERGGLSELDKAGFIKRQLVETRQITKHVAQILDSRMNTKYDENDKLIREVKVITLKSKLVSDFRKDFQFYKVREINNYHHAHDAYLNAVVGTALIKKYPKLESEFVYGDYKVYDVRKMIAKSEQEIGKATAKYFFYSNIMNFFKTEITLANGEIRKRPLIETNGETGEIVWDKGRDFATVRKVLSMPQVNIVKKTEVQTGGFSKESILPKRNSDKLIARKKDWDPKKYGGFDSPTVAYSVLVVAKVEKGKSKKLKSVKELLGITIMERSSFEKNPIDFLEAKGYKEVKKDLIIKLPKYSLFELENGRKRMLASAGELQKGNELALPSKYVNFLYLASHYEKLKGSPEDNEQKQLFVEQHKHYLDEIIEQISEFSKRVILADANLDKVLSAYNKHRDKPIREQAENIIHLFTLTNLGAPAAFKYFDTTIDRKRYTSTKEVLDATLIHQSITGLYETRIDLSQLGGDGGGSSEAAAKPAPGGTLGDQGSRGSDPLPEPRVTLTVEGIPTEFLVNTGAEHSVLTKPMGKMGSKRTVVAGATGSKVYPWTTKRLLKIGQKQVTHSFLVIPECPAPLLGRDLLTKLKAQIQFSTEGPQVTWEDRPAMCLVLNLEEEYRLHEKPVPPSIDPSWLQLFPMVWAEKAGMGLANQVPPVVVELKSDASPVAVRQYPMSKEAREGIRPHIQRFLDLGILVPCQSPWNTPLLPVKKPGTNDYRPVQDLREVNKRVQDIHPTVPNPYNLLSSLPPSHTWYSVLDLKDAFFCLKLHPNSQPLFAFEWRDPEKGNTGQLTWTRLPQGFKNSPTLFNEALHRDLASFRALNPQVVMLQYVDDLLVAAPTYRDCKEGTRRLLQELSKLGYRVSAKKAQLCREEVTYLGYLLKGGKRWLTPARKATVMKIPTPTTPRQVREFLGTAGFCRLWIPGFASLAAPLYPLTRPKVPFTWTEAHQEAFGRIKEALLSAPALALPDLTKPFALYVDEKEGVARGVLTQTLGPWRRPVAYLSKKLDPVASGWPTCLKAIAAVALLLKDADKLTLGQNVLVIAPHNLESIVRQPPDRWMTNARMTHYQSLLLNERVSFAPPAILNPATLLPVESDDTPIHICSEILAEETGTRPDLRDQPLPGVPAWYTDGSSFIMDGRRQAGAAIVDNKRTVWASNLPEGTSAQKAELIALTQALRLAEGKSINIYTDSRYAFATAHVHGAIYKQRGWLTSAGKDIKNKEEILALLEAIHLPKRVAIIHCPGHQRGTDPVATGNRKADEAAKQAAQSTRILTETTKNAGKRTADGSEFEKRTADGSEFESPKKKAKVE

SEQ ID NO: 7576 - protein, 2218 aa, synthetic construct
MPAAKRVKLDGGDKKYSIGLDIGTNSVGWAVITDEYKVPSKKFKVLGNTDRHSIKKNLIGALLFDSGETAEATRLKRTARRRYTRRKNRICYLQEIFSNEMAKVDDSFFHRLEESFLVEEDKKHERHPIFGNIVDEVAYHEKYPTIYHLRKKLVDSTDKADLRLIYLALAHMIKFRGHFLIEGDLNPDNSDVDKLFIQLVQTYNQLFEENPINASGVDAKAILSARLSKSRRLENLIAQLPGEKKNGLFGNLIALSLGLTPNFKSNFDLAEDAKLQLSKDTYDDDLDNLLAQIGDQYADLFLAAKNLSDAILLSDILRVNTEITKAPLSASMIKRYDEHHQDLTLLKALVRQQLPEKYKEIFFDQSKNGYAGYIDGGASQEEFYKFIKPILEKMDGTEELLVKLNREDLLRKQRTFDNGSIPHQIHLGELHAILRRQEDFYPFLKDNREKIEKILTFRIPYYVGPLARGNSRFAWMTRKSEETITPWNFEEVVDKGASAQSFIERMTNFDKNLPNEKVLPKHSLLYEYFTVYNELTKVKYVTEGMRKPAFLSGEQKKAIVDLLFKTNRKVTVKQLKEDYFKKIECFDSVEISGVEDRFNASLGTYHDLLKIIKDKDFLDNEENEDILEDIVLTLTLFEDREMIEERLKTYAHLFDDKVMKQLKRRRYTGWGRLSRKLINGIRDKQSGKTILDFLKSDGFANRNFMQLIHDDSLTFKEDIQKAQVSGQGDSLHEHIANLAGSPAIKKGILQTVKVVDELVKVMGRHKPENIVIEMARENQTTQKGQKNSRERMKRIEEGIKELGSQILKEHPVENTQLQNEKLYLYYLQNGRDMYVDQELDINRLSDYDVDHIVPQSFLKDDSIDNKVLTRSDKARGKSDNVPSEEVVKKMKNYWRQLLNAKLITQRKFDNLTKAERGGLSELDKAGFIKRQLVETRQITKHVAQILDSRMNTKYDENDKLIREVKVITLKSKLVSDFRKDFQFYKVREINNYHHAHDAYLNAVVGTALIKKYPKLESEFVYGDYKVYDVRKMIAKSEQEIGKATAKYFFYSNIMNFFKTEITLANGEIRKRPLIETNGETGEIVWDKGRDFATVRKVLSMPQVNIVKKTEVQTGGFSKESILPKRNSDKLIARKKDWDPKKYGGFDSPTVAYSVLVVAKVEKGKSKKLKSVKELLGITIMERSSFEKNPIDFLEAKGYKEVKKDLIIKLPKYSLFELENGRKRMLASAGELQKGNELALPSKYVNFLYLASHYEKLKGSPEDNEQKQLFVEQHKHYLDEIIEQISEFSKRVILADANLDKVLSAYNKHRDKPIREQAENIIHLFTLTNLGAPAAFKYFDTTIDRKRYTSTKEVLDATLIHQSITGLYETRIDLSQLGGDGGGSSEAAAKPAPGGTLGDQGSRGSDPLPEPRVTLTVEGIPTEFLVNTGAEHSVLTKPMGKMGSKRTVVAGATGSKVYPWTTKRLLKIGQKQVTHSFLVIPECPAPLLGRDLLTKLKAQIQFSTEGPQVTWEDRPAMCLVLNLEEEYRLHEKPVPPSIDPSWLQLFPMVWAEKAGMGLANQVPPVVVELKSDASPVAVRQYPMSKEAREGIRPHIQRFLDLGILVPCQSPWNTPLLPVKKPGTNDYRPVQDLREVNKRVQDIHPTVPNPYNLLSSLPPSHTWYSVLDLKDAFFCLKLHPNSQPLFAFEWRDPEKGNTGQLTWTRLPQGFKNSPTLFNEALHRDLASFRALNPQVVMLQYVDDLLVAAPTYRDCKEGTRRLLQELSKLGYRVSAKKAQLCREEVTYLGYLLKGGKRWLTPARKATVMKIPTPTTPRQVREFLGKAGFCRLFIPGFASLAAPLYPLTRPKVPFTWTEAHQEAFGRIKEALLSAPALALPDLTKPFALYVDEKEGVARGVLTQTLGPWRRPVAYLSKKLDPVASGWPTCLKAIAAVALLLKDADKLTLGQNVLVIAPHNLESIVRQPPDRWMTNARMTHYQSLLLNERVSFAPPAILNPATLLPVESDDTPIHICSEILAEETGTRPDLRDQPLPGVPAWYTDGSSFIMDGRRQAGAAIVDNKRTVWASNLPEGTSAQKAELIALTQALRLAEGKSINIYTDSRYAFATAHVHGAIYKQRGWLTSAGKDIKNKEEILALLEAIHLPKRVAIIHCPGHQRGTDPVATGNRKADEAAKQAAQSTRILTETTKNAGKRTADGSEFEKRTADGSEFESPKKKAKVE

SEQ ID NO: 7577 - protein, 2096 aa, synthetic construct
MPAAKRVKLDGGDKKYSIGLDIGTNSVGWAVITDEYKVPSKKFKVLGNTDRHSIKKNLIGALLFDSGETAEATRLKRTARRRYTRRKNRICYLQEIFSNEMAKVDDSFFHRLEESFLVEEDKKHERHPIFGNIVDEVAYHEKYPTIYHLRKKLVDSTDKADLRLIYLALAHMIKFRGHFLIEGDLNPDNSDVDKLFIQLVQTYNQLFEENPINASGVDAKAILSARLSKSRRLENLIAQLPGEKKNGLFGNLIALSLGLTPNFKSNFDLAEDAKLQLSKDTYDDDLDNLLAQIGDQYADLFLAAKNLSDAILLSDILRVNTEITKAPLSASMIKRYDEHHQDLTLLKALVRQQLPEKYKEIFFDQSKNGYAGYIDGGASQEEFYKFIKPILEKMDGTEELLVKLNREDLLRKQRTFDNGSIPHQIHLGELHAILRRQEDFYPFLKDNREKIEKILTFRIPYYVGPLARGNSRFAWMTRKSEETITPWNFEEVVDKGASAQSFIERMTNFDKNLPNEKVLPKHSLLYEYFTVYNELTKVKYVTEGMRKPAFLSGEQKKAIVDLLFKTNRKVTVKQLKEDYFKKIECFDSVEISGVEDRFNASLGTYHDLLKIIKDKDFLDNEENEDILEDIVLTLTLFEDREMIEERLKTYAHLFDDKVMKQLKRRRYTGWGRLSRKLINGIRDKQSGKTILDFLKSDGFANRNFMQLIHDDSLTFKEDIQKAQVSGQGDSLHEHIANLAGSPAIKKGILQTVKVVDELVKVMGRHKPENIVIEMARENQTTQKGQKNSRERMKRIEEGIKELGSQILKEHPVENTQLQNEKLYLYYLQNGRDMYVDQELDINRLSDYDVDHIVPQSFLKDDSIDNKVLTRSDKARGKSDNVPSEEVVKKMKNYWRQLLNAKLITQRKFDNLTKAERGGLSELDKAGFIKRQLVETRQITKHVAQILDSRMNTKYDENDKLIREVKVITLKSKLVSDFRKDFQFYKVREINNYHHAHDAYLNAVVGTALIKKYPKLESEFVYGDYKVYDVRKMIAKSEQEIGKATAKYFFYSNIMNFFKTEITLANGEIRKRPLIETNGETGEIVWDKGRDFATVRKVLSMPQVNIVKKTEVQTGGFSKESILPKRNSDKLIARKKDWDPKKYGGFDSPTVAYSVLVVAKVEKGKSKKLKSVKELLGITIMERSSFEKNPIDFLEAKGYKEVKKDLIIKLPKYSLFELENGRKRMLASAGELQKGNELALPSKYVNFLYLASHYEKLKGSPEDNEQKQLFVEQHKHYLDEIIEQISEFSKRVILADANLDKVLSAYNKHRDKPIREQAENIIHLFTLTNLGAPAAFKYFDTTIDRKRYTSTKEVLDATLIHQSITGLYETRIDLSQLGGDGGGSSEAAAKPAPGGTLNLEDEYRLYETSAEPEVSPGSTWLSDFPQAWAETGGMGLAVRQAPLIIPLKATSTPVSIKQYPMSQEAKLGIKPHIQRLLDQGILVPCQSPWNTPLLPVKKPGTNDYRPVQDLREVNKRVEDIHPTVPNPYNLLSGLPPSHRWYTVLDLKDAFFCLRLHPTSQPLFAFEWRDPGMGISGQLTWTRLPQGFKNSPTLFNEALHRDLADFRIQHPDLILLQYVDDILLAATSELDCQQGTRALLLTLGNLGYRASAKKAQLCQKQVKYLGYLLKEGQRWLTEARKETVMGQPTPKTPRQLREFLGTAGFCRLWIPGFAEMAAPLYPLTKPGTLFNWGPDQQKAYQEIKQALLTAPALGLPDLTKPFELFVDEKQGYAKGVLTQKLGPWRRPVAYLSKKLDPVAAGWPPCLRMVAAIAVLRKDAGKLTMGQPLVILAPHAVEALVKQPPDRWLSNARMTHYQAMLLDTDRVQFGPVVALNPATLLPLPEEGAPHDCLEILAETHGTRPDLTDQPIPDADHTWYTDGSSFLQEGQRKAGAAVTTETEVIWARALPAGTSAQRAELIALTQALKMAEGKRLNVYTDSRYAFATAHIHGEIYRRRGWLTSEGREIKNKSEILALLKALFLPKRLSIIHCLGHQKGDSAEARGNRLADQAAREAAIKTPPDTSTLLAGKRTADGSEFEKRTADGSEFESPKKKAKVE

SEQ ID NO: 7578 - protein, 2096 aa, synthetic construct
MPAAKRVKLDGGDKKYSIGLDIGTNSVGWAVITDEYKVPSKKFKVLGNTDRHSIKKNLIGALLFDSGETAEATRLKRTARRRYTRRKNRICYLQEIFSNEMAKVDDSFFHRLEESFLVEEDKKHERHPIFGNIVDEVAYHEKYPTIYHLRKKLVDSTDKADLRLIYLALAHMIKFRGHFLIEGDLNPDNSDVDKLFIQLVQTYNQLFEENPINASGVDAKAILSARLSKSRRLENLIAQLPGEKKNGLFGNLIALSLGLTPNFKSNFDLAEDAKLQLSKDTYDDDLDNLLAQIGDQYADLFLAAKNLSDAILLSDILRVNTEITKAPLSASMIKRYDEHHQDLTLLKALVRQQLPEKYKEIFFDQSKNGYAGYIDGGASQEEFYKFIKPILEKMDGTEELLVKLNREDLLRKQRTFDNGSIPHQIHLGELHAILRRQEDFYPFLKDNREKIEKILTFRIPYYVGPLARGNSRFAWMTRKSEETITPWNFEEVVDKGASAQSFIERMTNFDKNLPNEKVLPKHSLLYEYFTVYNELTKVKYVTEGMRKPAFLSGEQKKAIVDLLFKTNRKVTVKQLKEDYFKKIECFDSVEISGVEDRFNASLGTYHDLLKIIKDKDFLDNEENEDILEDIVLTLTLFEDREMIEERLKTYAHLFDDKVMKQLKRRRYTGWGRLSRKLINGIRDKQSGKTILDFLKSDGFANRNFMQLIHDDSLTFKEDIQKAQVSGQGDSLHEHIANLAGSPAIKKGILQTVKVVDELVKVMGRHKPENIVIEMARENQTTQKGQKNSRERMKRIEEGIKELGSQILKEHPVENTQLQNEKLYLYYLQNGRDMYVDQELDINRLSDYDVDHIVPQSFLKDDSIDNKVLTRSDKARGKSDNVPSEEVVKKMKNYWRQLLNAKLITQRKFDNLTKAERGGLSELDKAGFIKRQLVETRQITKHVAQILDSRMNTKYDENDKLIREVKVITLKSKLVSDFRKDFQFYKVREINNYHHAHDAYLNAVVGTALIKKYPKLESEFVYGDYKVYDVRKMIAKSEQEIGKATAKYFFYSNIMNFFKTEITLANGEIRKRPLIETNGETGEIVWDKGRDFATVRKVLSMPQVNIVKKTEVQTGGFSKESILPKRNSDKLIARKKDWDPKKYGGFDSPTVAYSVLVVAKVEKGKSKKLKSVKELLGITIMERSSFEKNPIDFLEAKGYKEVKKDLIIKLPKYSLFELENGRKRMLASAGELQKGNELALPSKYVNFLYLASHYEKLKGSPEDNEQKQLFVEQHKHYLDEIIEQISEFSKRVILADANLDKVLSAYNKHRDKPIREQAENIIHLFTLTNLGAPAAFKYFDTTIDRKRYTSTKEVLDATLIHQSITGLYETRIDLSQLGGDGGGSSEAAAKPAPGGTLNLEDEYRLYETSAEPEVSPGSTWLSDFPQAWAETGGMGLAVRQAPLIIPLKATSTPVSIKQYPMSQEAKLGIKPHIQRLLDQGILVPCQSPWNTPLLPVKKPGTNDYRPVQDLREVNKRVEDIHPTVPNPYNLLSGLPPSHRWYTVLDLKDAFFCLRLHPTSQPLFAFEWRDPGMGISGQLTWTRLPQGFKNSPTLFNEALHRDLADFRIQHPDLILLQYVDDILLAATSELDCQQGTRALLLTLGNLGYRASAKKAQLCQKQVKYLGYLLKEGQRWLTEARKETVMGQPTPKTPRQLREFLGKAGFCRLFIPGFAEMAAPLYPLTKPGTLFNWGPDQQKAYQEIKQALLTAPALGLPDLTKPFELFVDEKQGYAKGVLTQKLGPWRRPVAYLSKKLDPVAAGWPPCLRMVAAIAVLRKDAGKLTMGQPLVILAPHAVEALVKQPPDRWLSNARMTHYQAMLLDTDRVQFGPVVALNPATLLPLPEEGAPHDCLEILAETHGTRPDLTDQPIPDADHTWYTDGSSFLQEGQRKAGAAVTTETEVIWARALPAGTSAQRAELIALTQALKMAEGKRLNVYTDSRYAFATAHIHGEIYRRRGWLTSEGREIKNKSEILALLKALFLPKRLSIIHCLGHQKGDSAEARGNRLADQAAREAAIKTPPDTSTLLAGKRTADGSEFEKRTADGSEFESPKKKAKVE

SEQ ID NO: 7579 - protein, 2096 aa, synthetic construct
MPAAKRVKLDGGDKKYSIGLDIGTNSVGWAVITDEYKVPSKKFKVLGNTDRHSIKKNLIGALLFDSGETAEATRLKRTARRRYTRRKNRICYLQEIFSNEMAKVDDSFFHRLEESFLVEEDKKHERHPIFGNIVDEVAYHEKYPTIYHLRKKLVDSTDKADLRLIYLALAHMIKFRGHFLIEGDLNPDNSDVDKLFIQLVQTYNQLFEENPINASGVDAKAILSARLSKSRRLENLIAQLPGEKKNGLFGNLIALSLGLTPNFKSNFDLAEDAKLQLSKDTYDDDLDNLLAQIGDQYADLFLAAKNLSDAILLSDILRVNTEITKAPLSASMIKRYDEHHQDLTLLKALVRQQLPEKYKEIFFDQSKNGYAGYIDGGASQEEFYKFIKPILEKMDGTEELLVKLNREDLLRKQRTFDNGSIPHQIHLGELHAILRRQEDFYPFLKDNREKIEKILTFRIPYYVGPLARGNSRFAWMTRKSEETITPWNFEEVVDKGASAQSFIERMTNFDKNLPNEKVLPKHSLLYEYFTVYNELTKVKYVTEGMRKPAFLSGEQKKAIVDLLFKTNRKVTVKQLKEDYFKKIECFDSVEISGVEDRFNASLGTYHDLLKIIKDKDFLDNEENEDILEDIVLTLTLFEDREMIEERLKTYAHLFDDKVMKQLKRRRYTGWGRLSRKLINGIRDKQSGKTILDFLKSDGFANRNFMQLIHDDSLTFKEDIQKAQVSGQGDSLHEHIANLAGSPAIKKGILQTVKVVDELVKVMGRHKPENIVIEMARENQTTQKGQKNSRERMKRIEEGIKELGSQILKEHPVENTQLQNEKLYLYYLQNGRDMYVDQELDINRLSDYDVDHIVPQSFLKDDSIDNKVLTRSDKARGKSDNVPSEEVVKKMKNYWRQLLNAKLITQRKFDNLTKAERGGLSELDKAGFIKRQLVETRQITKHVAQILDSRMNTKYDENDKLIREVKVITLKSKLVSDFRKDFQFYKVREINNYHHAHDAYLNAVVGTALIKKYPKLESEFVYGDYKVYDVRKMIAKSEQEIGKATAKYFFYSNIMNFFKTEITLANGEIRKRPLIETNGETGEIVWDKGRDFATVRKVLSMPQVNIVKKTEVQTGGFSKESILPKRNSDKLIARKKDWDPKKYGGFDSPTVAYSVLVVAKVEKGKSKKLKSVKELLGITIMERSSFEKNPIDFLEAKGYKEVKKDLIIKLPKYSLFELENGRKRMLASAGELQKGNELALPSKYVNFLYLASHYEKLKGSPEDNEQKQLFVEQHKHYLDEIIEQISEFSKRVILADANLDKVLSAYNKHRDKPIREQAENIIHLFTLTNLGAPAAFKYFDTTIDRKRYTSTKEVLDATLIHQSITGLYETRIDLSQLGGDGGGSSEAAAKPAPGGTLGIEDEYRLHETSTEPDVSLGSTWLSDFPQAWAETGGMGLAVRQAPLIIPLKATSTPVSIQQYPMSHEARLGIKPHIQRLLDQGILVPCQSPWNTPLLPVKKPGTNDYRPVQDLREVNKRVEDIHPTVPNPYNLLSGLPPSHQWYTVLDLKDAFFCLRLHPTSQPLFAFEWRDPGMGISGQLTWTRLPQGFKNSPTLFDEALHRDLADFRIQHPDLILLQYVDDILLAATSELDCQQGTRALLQTLGDLGYRASAKKAQICQKQVKYLGYLLREGQRWLTEARKETVMGQPVPKTPRQLREFLGTAGFCRLWIPGFAEMAAPLYPLTKTGTLFSWGPDQQKAYQEIKQALLTAPALGLPDLTKPFELFVDEKQGYAKGVLTQKLGPWRRPVAYLSKKLDPVAAGWPPCLRMVAAIAVLTKDAGKLTMGQPLVILAPHAVEALVKQPPDRWLSNARMTHYQAMLLDTDRVQFGPVVALNPATLLPLPEEGAPHDCLEILAETHGTRPDLTDQPIPDADHTWYTDGSSFLQEGQRKAGAAVTTETEVIWAGALPAGTSAQRAELIALTQALKMAEGKRLNVYTDSRYAFATAHIHGEIYRRRGLLTSEGREIKNKSEILALLKALFLPKRLSIIHCLGHQKGDSAEARGNRLADQAAREAAIKTPPDTSTLLAGKRTADGSEFEKRTADGSEFESPKKKAKVE

SEQ ID NO: 7580 - protein, 2096 aa, synthetic construct
MPAAKRVKLDGGDKKYSIGLDIGTNSVGWAVITDEYKVPSKKFKVLGNTDRHSIKKNLIGALLFDSGETAEATRLKRTARRRYTRRKNRICYLQEIFSNEMAKVDDSFFHRLEESFLVEEDKKHERHPIFGNIVDEVAYHEKYPTIYHLRKKLVDSTDKADLRLIYLALAHMIKFRGHFLIEGDLNPDNSDVDKLFIQLVQTYNQLFEENPINASGVDAKAILSARLSKSRRLENLIAQLPGEKKNGLFGNLIALSLGLTPNFKSNFDLAEDAKLQLSKDTYDDDLDNLLAQIGDQYADLFLAAKNLSDAILLSDILRVNTEITKAPLSASMIKRYDEHHQDLTLLKALVRQQLPEKYKEIFFDQSKNGYAGYIDGGASQEEFYKFIKPILEKMDGTEELLVKLNREDLLRKQRTFDNGSIPHQIHLGELHAILRRQEDFYPFLKDNREKIEKILTFRIPYYVGPLARGNSRFAWMTRKSEETITPWNFEEVVDKGASAQSFIERMTNFDKNLPNEKVLPKHSLLYEYFTVYNELTKVKYVTEGMRKPAFLSGEQKKAIVDLLFKTNRKVTVKQLKEDYFKKIECFDSVEISGVEDRFNASLGTYHDLLKIIKDKDFLDNEENEDILEDIVLTLTLFEDREMIEERLKTYAHLFDDKVMKQLKRRRYTGWGRLSRKLINGIRDKQSGKTILDFLKSDGFANRNFMQLIHDDSLTFKEDIQKAQVSGQGDSLHEHIANLAGSPAIKKGILQTVKVVDELVKVMGRHKPENIVIEMARENQTTQKGQKNSRERMKRIEEGIKELGSQILKEHPVENTQLQNEKLYLYYLQNGRDMYVDQELDINRLSDYDVDHIVPQSFLKDDSIDNKVLTRSDKARGKSDNVPSEEVVKKMKNYWRQLLNAKLITQRKFDNLTKAERGGLSELDKAGFIKRQLVETRQITKHVAQILDSRMNTKYDENDKLIREVKVITLKSKLVSDFRKDFQFYKVREINNYHHAHDAYLNAVVGTALIKKYPKLESEFVYGDYKVYDVRKMIAKSEQEIGKATAKYFFYSNIMNFFKTEITLANGEIRKRPLIETNGETGEIVWDKGRDFATVRKVLSMPQVNIVKKTEVQTGGFSKESILPKRNSDKLIARKKDWDPKKYGGFDSPTVAYSVLVVAKVEKGKSKKLKSVKELLGITIMERSSFEKNPIDFLEAKGYKEVKKDLIIKLPKYSLFELENGRKRMLASAGELQKGNELALPSKYVNFLYLASHYEKLKGSPEDNEQKQLFVEQHKHYLDEIIEQISEFSKRVILADANLDKVLSAYNKHRDKPIREQAENIIHLFTLTNLGAPAAFKYFDTTIDRKRYTSTKEVLDATLIHQSITGLYETRIDLSQLGGDGGGSSEAAAKPAPGGTLNIEDEYRLHETSKEPDVSLGSTWLSDFPQAWAETGGMGLAVRQAPLIIPLKATSTPVSIKQYPMSQEARLGIKPHIQRLLDQGILVPCQSPWNTPLLPVKKPGTNDYRPVQDLREVNKRVEDIHPTVPNPYNLLSGLPPSHQWYTVLDLKDAFFCLRLHPTSQPLFAFEWRDPEMGISGQLTWTRLPQGFKNSPTLFNEALHRDLAGFRIQHPDLILLQYVDDLLLAATSELDCQQGTRALLQTLGDLGYRASAKKAQICQKQVKYLGYLLKEGQRWLTEARKETVMGQPIPKTPRQLREFLGTAGFCRLWIPGFAEMAAPLYPLTKPGTLFNWGPDQQKAFQEIKQALLTAPALGLPDLTKPFELFVDEKQGYAKGVLTQKLGPWRRPVAYLSKKLDPVAAGWPPCLRMVAAIAVLTKDAGKLTMGQPLVILAPHAVEALVKQPPDRWLSNARMTHYQALLLDTDRVQFGPVVALNPATLLPLPEEGLQHDCLDILAEAHGTRSDLMDQPLPDADHTWYTDGSSFLQEGQRKAGAAVTTETEVIWARALPAGTSAQRAELIALTQALKMAEGKKLNVYTDSRYAFATAHIHGEIYRRRGWLTSEGKEIKNKDEILALLKALFLPKRLSIIHCPGHQKGNSAEARGNRMADQAAREVATRETPETSTLLAGKRTADGSEFEKRTADGSEFESPKKKAKVE

SEQ ID NO: 7581 - protein, 2096 aa, synthetic construct
MPAAKRVKLDGGDKKYSIGLDIGTNSVGWAVITDEYKVPSKKFKVLGNTDRHSIKKNLIGALLFDSGETAEATRLKRTARRRYTRRKNRICYLQEIFSNEMAKVDDSFFHRLEESFLVEEDKKHERHPIFGNIVDEVAYHEKYPTIYHLRKKLVDSTDKADLRLIYLALAHMIKFRGHFLIEGDLNPDNSDVDKLFIQLVQTYNQLFEENPINASGVDAKAILSARLSKSRRLENLIAQLPGEKKNGLFGNLIALSLGLTPNFKSNFDLAEDAKLQLSKDTYDDDLDNLLAQIGDQYADLFLAAKNLSDAILLSDILRVNTEITKAPLSASMIKRYDEHHQDLTLLKALVRQQLPEKYKEIFFDQSKNGYAGYIDGGASQEEFYKFIKPILEKMDGTEELLVKLNREDLLRKQRTFDNGSIPHQIHLGELHAILRRQEDFYPFLKDNREKIEKILTFRIPYYVGPLARGNSRFAWMTRKSEETITPWNFEEVVDKGASAQSFIERMTNFDKNLPNEKVLPKHSLLYEYFTVYNELTKVKYVTEGMRKPAFLSGEQKKAIVDLLFKTNRKVTVKQLKEDYFKKIECFDSVEISGVEDRFNASLGTYHDLLKIIKDKDFLDNEENEDILEDIVLTLTLFEDREMIEERLKTYAHLFDDKVMKQLKRRRYTGWGRLSRKLINGIRDKQSGKTILDFLKSDGFANRNFMQLIHDDSLTFKEDIQKAQVSGQGDSLHEHIANLAGSPAIKKGILQTVKVVDELVKVMGRHKPENIVIEMARENQTTQKGQKNSRERMKRIEEGIKELGSQILKEHPVENTQLQNEKLYLYYLQNGRDMYVDQELDINRLSDYDVDHIVPQSFLKDDSIDNKVLTRSDKARGKSDNVPSEEVVKKMKNYWRQLLNAKLITQRKFDNLTKAERGGLSELDKAGFIKRQLVETRQITKHVAQILDSRMNTKYDENDKLIREVKVITLKSKLVSDFRKDFQFYKVREINNYHHAHDAYLNAVVGTALIKKYPKLESEFVYGDYKVYDVRKMIAKSEQEIGKATAKYFFYSNIMNFFKTEITLANGEIRKRPLIETNGETGEIVWDKGRDFATVRKVLSMPQVNIVKKTEVQTGGFSKESILPKRNSDKLIARKKDWDPKKYGGFDSPTVAYSVLVVAKVEKGKSKKLKSVKELLGITIMERSSFEKNPIDFLEAKGYKEVKKDLIIKLPKYSLFELENGRKRMLASAGELQKGNELALPSKYVNFLYLASHYEKLKGSPEDNEQKQLFVEQHKHYLDEIIEQISEFSKRVILADANLDKVLSAYNKHRDKPIREQAENIIHLFTLTNLGAPAAFKYFDTTIDRKRYTSTKEVLDATLIHQSITGLYETRIDLSQLGGDGGGSSEAAAKPAPGGTLNIEDEYRLHEISTEPDVSPGSTWLSDFPQAWAETGGMGLAVRQAPLIIPLKATSTPVSIKQYPMSQEAKLGIKPHIQRLLDQGILVPCQSPWNTPLLPVKKPGTNDYRPVQGLREVNKRVEDIHPTVPNPYNLLSGLPTSHRWYTVLDLKDAFFCLRLHPTSQPLFASEWRDPGMGISGQLTWTRLPQGFKNSPTLFNEALHRGLADFRIQHPDLILLQYVDDLLLAATSELDCQQGTRALLKTLGNLGYRASAKKAQICQKQVKYLGYLLREGQRWLTEARKETVMGQPTPKTPRQLREFLGKAGFCRLFIPRFAEMAAPLYPLTKPGTLFNWGPDQQKAYHEIKQALLTAPALGLPDLTKPFELFVDEKQGYAKGVLTQKLGPWRRPVAYLSKKLDPVAAGWPPCLRMVAAIAVLTKDAGKLTMGQPLVILAPHAVEALVKQPPDRWLSNARMTHYQAMLLDTDRVQFGPVVALNPATLLPLPEEGAPHDCLEILAETHGTEPDLTDQPIPDADHTWYTDGSSFLQEGQRKAGAAVTTETEVIWARALPAGTSAQRAELIALTQALKMAEGKRLNVYTDSRYAFATAHIHGEIYKRRGWLTSEGREIKNKSEILALLKALFLPKRLSIIHCLGHQKGDSAEARGNRLADQAAREAAIKTPPDTSTLLAGKRTADGSEFEKRTADGSEFESPKKKAKVE

SEQ ID NO: 7582 - protein, 2090 aa, synthetic construct
MPAAKRVKLDGGDKKYSIGLDIGTNSVGWAVITDEYKVPSKKFKVLGNTDRHSIKKNLIGALLFDSGETAEATRLKRTARRRYTRRKNRICYLQEIFSNEMAKVDDSFFHRLEESFLVEEDKKHERHPIFGNIVDEVAYHEKYPTIYHLRKKLVDSTDKADLRLIYLALAHMIKFRGHFLIEGDLNPDNSDVDKLFIQLVQTYNQLFEENPINASGVDAKAILSARLSKSRRLENLIAQLPGEKKNGLFGNLIALSLGLTPNFKSNFDLAEDAKLQLSKDTYDDDLDNLLAQIGDQYADLFLAAKNLSDAILLSDILRVNTEITKAPLSASMIKRYDEHHQDLTLLKALVRQQLPEKYKEIFFDQSKNGYAGYIDGGASQEEFYKFIKPILEKMDGTEELLVKLNREDLLRKQRTFDNGSIPHQIHLGELHAILRRQEDFYPFLKDNREKIEKILTFRIPYYVGPLARGNSRFAWMTRKSEETITPWNFEEVVDKGASAQSFIERMTNFDKNLPNEKVLPKHSLLYEYFTVYNELTKVKYVTEGMRKPAFLSGEQKKAIVDLLFKTNRKVTVKQLKEDYFKKIECFDSVEISGVEDRFNASLGTYHDLLKIIKDKDFLDNEENEDILEDIVLTLTLFEDREMIEERLKTYAHLFDDKVMKQLKRRRYTGWGRLSRKLINGIRDKQSGKTILDFLKSDGFANRNFMQLIHDDSLTFKEDIQKAQVSGQGDSLHEHIANLAGSPAIKKGILQTVKVVDELVKVMGRHKPENIVIEMARENQTTQKGQKNSRERMKRIEEGIKELGSQILKEHPVENTQLQNEKLYLYYLQNGRDMYVDQELDINRLSDYDVDHIVPQSFLKDDSIDNKVLTRSDKARGKSDNVPSEEVVKKMKNYWRQLLNAKLITQRKFDNLTKAERGGLSELDKAGFIKRQLVETRQITKHVAQILDSRMNTKYDENDKLIREVKVITLKSKLVSDFRKDFQFYKVREINNYHHAHDAYLNAVVGTALIKKYPKLESEFVYGDYKVYDVRKMIAKSEQEIGKATAKYFFYSNIMNFFKTEITLANGEIRKRPLIETNGETGEIVWDKGRDFATVRKVLSMPQVNIVKKTEVQTGGFSKESILPKRNSDKLIARKKDWDPKKYGGFDSPTVAYSVLVVAKVEKGKSKKLKSVKELLGITIMERSSFEKNPIDFLEAKGYKEVKKDLIIKLPKYSLFELENGRKRMLASAGELQKGNELALPSKYVNFLYLASHYEKLKGSPEDNEQKQLFVEQHKHYLDEIIEQISEFSKRVILADANLDKVLSAYNKHRDKPIREQAENIIHLFTLTNLGAPAAFKYFDTTIDRKRYTSTKEVLDATLIHQSITGLYETRIDLSQLGGDGGGSSEAAAKPAPGGTLQLDDEYRLYSPLVKPDQNIQFWLEQFPQAWAETAGMGLAKQVPPQVIQLKASATPVSVRQYPLSKEAQEGIRPHVQRLIQQGILVPVQSPWNTPLLPVRKPGTNDYRPVQDLREVNKRVQDIHPTVPNPYNLLCALPPQRSWYTVLDLKDAFFCLRLHPTSQPLFAFEWRDPGTGRTGQLTWTRLPQGFKNSPTIFDEALHRDLANFRIQHPQVTLLQYVDDLLLAGATKQDCLEGTKALLLELSDLGYRASAKKAQICRREVTYLGYSLRDGQRWLTEARKKTVVQIPAPTTAKQVREFLGTAGFCRLWIPGFATLAAPLYPLTKEKGEFSWAPEHQKAFDAIKKALLSAPALALPDVTKPFTLYVDERKGVARGVLTQTLGPWRRPVAYLSKKLDPVASGWPVCLKAIAAVAILVKDADKLTLGQNITVIAPHALENIVRQPPDRWMTNARMTHYQSLLLTERVTFAPPAALNPATLLPEETDEPVTHDCHQLLIEETGVRKDLTDIPLTGEVLTWFTDGSSYVVEGKRMAGAAVVDGTRTIWASSLPEGTSAQKAELMALTQALRLAEGKSINIYTDSRYAFATAHVHGAIYKQRGLLTSAGREIKNKEEILSLLEALHLPKRLAIIHCPGHQKAKDPISRGNQMADRVAKQAAQGVNLLAGKRTADGSEFEKRTADGSEFESPKKKAKVE

SEQ ID NO: 7583 - protein, 2176 aa, synthetic construct
MPAAKRVKLDGGDKKYSIGLDIGTNSVGWAVITDEYKVPSKKFKVLGNTDRHSIKKNLIGALLFDSGETAEATRLKRTARRRYTRRKNRICYLQEIFSNEMAKVDDSFFHRLEESFLVEEDKKHERHPIFGNIVDEVAYHEKYPTIYHLRKKLVDSTDKADLRLIYLALAHMIKFRGHFLIEGDLNPDNSDVDKLFIQLVQTYNQLFEENPINASGVDAKAILSARLSKSRRLENLIAQLPGEKKNGLFGNLIALSLGLTPNFKSNFDLAEDAKLQLSKDTYDDDLDNLLAQIGDQYADLFLAAKNLSDAILLSDILRVNTEITKAPLSASMIKRYDEHHQDLTLLKALVRQQLPEKYKEIFFDQSKNGYAGYIDGGASQEEFYKFIKPILEKMDGTEELLVKLNREDLLRKQRTFDNGSIPHQIHLGELHAILRRQEDFYPFLKDNREKIEKILTFRIPYYVGPLARGNSRFAWMTRKSEETITPWNFEEVVDKGASAQSFIERMTNFDKNLPNEKVLPKHSLLYEYFTVYNELTKVKYVTEGMRKPAFLSGEQKKAIVDLLFKTNRKVTVKQLKEDYFKKIECFDSVEISGVEDRFNASLGTYHDLLKIIKDKDFLDNEENEDILEDIVLTLTLFEDREMIEERLKTYAHLFDDKVMKQLKRRRYTGWGRLSRKLINGIRDKQSGKTILDFLKSDGFANRNFMQLIHDDSLTFKEDIQKAQVSGQGDSLHEHIANLAGSPAIKKGILQTVKVVDELVKVMGRHKPENIVIEMARENQTTQKGQKNSRERMKRIEEGIKELGSQILKEHPVENTQLQNEKLYLYYLQNGRDMYVDQELDINRLSDYDVDHIVPQSFLKDDSIDNKVLTRSDKARGKSDNVPSEEVVKKMKNYWRQLLNAKLITQRKFDNLTKAERGGLSELDKAGFIKRQLVETRQITKHVAQILDSRMNTKYDENDKLIREVKVITLKSKLVSDFRKDFQFYKVREINNYHHAHDAYLNAVVGTALIKKYPKLESEFVYGDYKVYDVRKMIAKSEQEIGKATAKYFFYSNIMNFFKTEITLANGEIRKRPLIETNGETGEIVWDKGRDFATVRKVLSMPQVNIVKKTEVQTGGFSKESILPKRNSDKLIARKKDWDPKKYGGFDSPTVAYSVLVVAKVEKGKSKKLKSVKELLGITIMERSSFEKNPIDFLEAKGYKEVKKDLIIKLPKYSLFELENGRKRMLASAGELQKGNELALPSKYVNFLYLASHYEKLKGSPEDNEQKQLFVEQHKHYLDEIIEQISEFSKRVILADANLDKVLSAYNKHRDKPIREQAENIIHLFTLTNLGAPAAFKYFDTTIDRKRYTSTKEVLDATLIHQSITGLYETRIDLSQLGGDGGGSSEAAAKPAPGGMDPLQLLQPLEAEIKGTKLKAHWNSGATITCVPQAFLEEEVPIKNIWIKTIHGEKEQPVYYLTFKIQGRKVEAEVISSPYDYILVSPSDIPWLMKKPLQLTTLVPLQEYEERLLKQTMLTGSYKEKLQSLFLKYDALWQHWENQVGHRRIKPHHIATGTVNPRPQKQYPINPKAKASIQTVINDLLKQGVLIQQNSIMNTPVYPVPKPDGKWRMVLDYREVNKTIPLIAAQNQHSAGILSSIFRGKYKTTLDLSNGFWAHSITPESYWLTAFTWLGQQYCWTRLPQGFLNSPALFNADVVDLLKEVPNVQVYVDDIYISHDDPREHLEQLEKVFSLLLNAGYVVSLKKSEIAQHEVEFLGFNITKEGRGLTETFKQKLLNITPPRDLKQLQSILGKLNFARNFIPNFSELVKPLYNIIATAPGKYITWTTDNSQQLQNIISMLNSAENLEERNPEVRLIMKVNTSPSAGYIRFYNEFAKRPIMYLNYVYTKAEVKFTNTEKLLTTIHKGLIKALDLGMGQEILVYSPIVSMTKIQKTPLPERKALPIRWITWMSYLEDPRIQFHYDKTLPELQQVPTVTDDIIAKIKHPSEFSMVFYTDGSAIKHPNVNKSHNAGMGIAQVQFKPEFTVINTWSIPLGDHTAQLAEVAAVEFACKKALKIDGPVLIVTDSFYVAESVNKELPYWQSNGFFNNKKKPLKHVSKWKSIADCIQLKPDIIIIHEKGHQPTASTFHTEGNNLADKLATQGSYVVNAGKRTADGSEFEKRTADGSEFESPKKKAKVE

SEQ ID NO: 7584 - protein, 2094 aa, synthetic construct
MPAAKRVKLDGGDKKYSIGLDIGTNSVGWAVITDEYKVPSKKFKVLGNTDRHSIKKNLIGALLFDSGETAEATRLKRTARRRYTRRKNRICYLQEIFSNEMAKVDDSFFHRLEESFLVEEDKKHERHPIFGNIVDEVAYHEKYPTIYHLRKKLVDSTDKADLRLIYLALAHMIKFRGHFLIEGDLNPDNSDVDKLFIQLVQTYNQLFEENPINASGVDAKAILSARLSKSRRLENLIAQLPGEKKNGLFGNLIALSLGLTPNFKSNFDLAEDAKLQLSKDTYDDDLDNLLAQIGDQYADLFLAAKNLSDAILLSDILRVNTEITKAPLSASMIKRYDEHHQDLTLLKALVRQQLPEKYKEIFFDQSKNGYAGYIDGGASQEEFYKFIKPILEKMDGTEELLVKLNREDLLRKQRTFDNGSIPHQIHLGELHAILRRQEDFYPFLKDNREKIEKILTFRIPYYVGPLARGNSRFAWMTRKSEETITPWNFEEVVDKGASAQSFIERMTNFDKNLPNEKVLPKHSLLYEYFTVYNELTKVKYVTEGMRKPAFLSGEQKKAIVDLLFKTNRKVTVKQLKEDYFKKIECFDSVEISGVEDRFNASLGTYHDLLKIIKDKDFLDNEENEDILEDIVLTLTLFEDREMIEERLKTYAHLFDDKVMKQLKRRRYTGWGRLSRKLINGIRDKQSGKTILDFLKSDGFANRNFMQLIHDDSLTFKEDIQKAQVSGQGDSLHEHIANLAGSPAIKKGILQTVKVVDELVKVMGRHKPENIVIEMARENQTTQKGQKNSRERMKRIEEGIKELGSQILKEHPVENTQLQNEKLYLYYLQNGRDMYVDQELDINRLSDYDVDHIVPQSFLKDDSIDNKVLTRSDKARGKSDNVPSEEVVKKMKNYWRQLLNAKLITQRKFDNLTKAERGGLSELDKAGFIKRQLVETRQITKHVAQILDSRMNTKYDENDKLIREVKVITLKSKLVSDFRKDFQFYKVREINNYHHAHDAYLNAVVGTALIKKYPKLESEFVYGDYKVYDVRKMIAKSEQEIGKATAKYFFYSNIMNFFKTEITLANGEIRKRPLIETNGETGEIVWDKGRDFATVRKVLSMPQVNIVKKTEVQTGGFSKESILPKRNSDKLIARKKDWDPKKYGGFDSPTVAYSVLVVAKVEKGKSKKLKSVKELLGITIMERSSFEKNPIDFLEAKGYKEVKKDLIIKLPKYSLFELENGRKRMLASAGELQKGNELALPSKYVNFLYLASHYEKLKGSPEDNEQKQLFVEQHKHYLDEIIEQISEFSKRVILADANLDKVLSAYNKHRDKPIREQAENIIHLFTLTNLGAPAAFKYFDTTIDRKRYTSTKEVLDATLIHQSITGLYETRIDLSQLGGDGGGSSEAAAKPAPGGVLNLEEEYRLHEKPVPSSIDPSWLQLFPTVWAERAGMGLANQVPPVVVELRSGASPVAVRQYPMSKEAREGIRPHIQRFLDLGVLVPCQSPWNTPLLPVKKPGTNDYRPVQDLREINKRVQDIHPTVPNPYNLLSSLPPSHTWYSVLDLKDAFFCLKLHPNSQPLFAFEWRDPEKGNTGQLTWTRLPQGFKNSPTLFDEALHRDLAPFRALNPQVVLLQYVDDLLVAAPTYRDCKEGTQKLLQELSKLGYRVSAKKAQLCQKEVTYLGYLLKEGKRWLTPARKATVMKIPPPTTPRQVREFLGTAGFCRLWIPGFASLAAPLYPLTKESIPFIWTEEHQKAFDRIKEALLSAPALALPDLTKPFTLYVDERAGVARGVLTQTLGPWRRPVAYLSKKLDPVASGWPTCLKAVAAVALLLKDADKLTLGQNVTVIASHSLESIVRQPPDRWMTNARMTHYQSLLLNERVSFAPPAVLNPATLLPVESEATPVHRCSEILAEETGTRRDLKDQPLPGVPAWYTDGSSFIAEGKRRAGAAIVDGKRTVWASSLPEGTSAQKAELVALTQALRLAEGKDINIYTDSRYAFATAHIHGAIYKQRGLLTSAGKDIKNKEEILALLEAIHLPKRVAIIHCPGHQKGNDPVATGNRRADEAAKQAALSTRVLAETTKPAGKRTADGSEFEKRTADGSEFESPKKKAKVE

SEQ ID NO: 7585 - protein, 2094 aa, synthetic construct
MPAAKRVKLDGGDKKYSIGLDIGTNSVGWAVITDEYKVPSKKFKVLGNTDRHSIKKNLIGALLFDSGETAEATRLKRTARRRYTRRKNRICYLQEIFSNEMAKVDDSFFHRLEESFLVEEDKKHERHPIFGNIVDEVAYHEKYPTIYHLRKKLVDSTDKADLRLIYLALAHMIKFRGHFLIEGDLNPDNSDVDKLFIQLVQTYNQLFEENPINASGVDAKAILSARLSKSRRLENLIAQLPGEKKNGLFGNLIALSLGLTPNFKSNFDLAEDAKLQLSKDTYDDDLDNLLAQIGDQYADLFLAAKNLSDAILLSDILRVNTEITKAPLSASMIKRYDEHHQDLTLLKALVRQQLPEKYKEIFFDQSKNGYAGYIDGGASQEEFYKFIKPILEKMDGTEELLVKLNREDLLRKQRTFDNGSIPHQIHLGELHAILRRQEDFYPFLKDNREKIEKILTFRIPYYVGPLARGNSRFAWMTRKSEETITPWNFEEVVDKGASAQSFIERMTNFDKNLPNEKVLPKHSLLYEYFTVYNELTKVKYVTEGMRKPAFLSGEQKKAIVDLLFKTNRKVTVKQLKEDYFKKIECFDSVEISGVEDRFNASLGTYHDLLKIIKDKDFLDNEENEDILEDIVLTLTLFEDREMIEERLKTYAHLFDDKVMKQLKRRRYTGWGRLSRKLINGIRDKQSGKTILDFLKSDGFANRNFMQLIHDDSLTFKEDIQKAQVSGQGDSLHEHIANLAGSPAIKKGILQTVKVVDELVKVMGRHKPENIVIEMARENQTTQKGQKNSRERMKRIEEGIKELGSQILKEHPVENTQLQNEKLYLYYLQNGRDMYVDQELDINRLSDYDVDHIVPQSFLKDDSIDNKVLTRSDKARGKSDNVPSEEVVKKMKNYWRQLLNAKLITQRKFDNLTKAERGGLSELDKAGFIKRQLVETRQITKHVAQILDSRMNTKYDENDKLIREVKVITLKSKLVSDFRKDFQFYKVREINNYHHAHDAYLNAVVGTALIKKYPKLESEFVYGDYKVYDVRKMIAKSEQEIGKATAKYFFYSNIMNFFKTEITLANGEIRKRPLIETNGETGEIVWDKGRDFATVRKVLSMPQVNIVKKTEVQTGGFSKESILPKRNSDKLIARKKDWDPKKYGGFDSPTVAYSVLVVAKVEKGKSKKLKSVKELLGITIMERSSFEKNPIDFLEAKGYKEVKKDLIIKLPKYSLFELENGRKRMLASAGELQKGNELALPSKYVNFLYLASHYEKLKGSPEDNEQKQLFVEQHKHYLDEIIEQISEFSKRVILADANLDKVLSAYNKHRDKPIREQAENIIHLFTLTNLGAPAAFKYFDTTIDRKRYTSTKEVLDATLIHQSITGLYETRIDLSQLGGDGGGSSEAAAKPAPGGVLNLEEEYRLHEKPVPSSIDPSWLQLFPTVWAERAGMGLANQVPPVVVELRSGASPVAVRQYPMSKEAREGIRPHIQRFLDLGVLVPCQSPWNTPLLPVKKPGTNDYRPVQDLREINKRVQDIHPTVPNPYNLLSSLPPSHTWYSVLDLKDAFFCLKLHPNSQPLFAFEWRDPEKGNTGQLTWTRLPQGFKNSPTLFNEALHRDLAPFRALNPQVVLLQYVDDLLVAAPTYRDCKEGTQKLLQELSKLGYRVSAKKAQLCQKEVTYLGYLLKEGKRWLTPARKATVMKIPPPTTPRQVREFLGTAGFCRLWIPGFASLAAPLYPLTKPSIPFIWTEEHQKAFDRIKEALLSAPALALPDLTKPFTLYVDERAGVARGVLTQTLGPWRRPVAYLSKKLDPVASGWPTCLKAVAAVALLLKDADKLTLGQNVTVIASHSLESIVRQPPDRWMTNARMTHYQSLLLNERVSFAPPAVLNPATLLPVESEATPVHRCSEILAEETGTRRDLKDQPLPGVPAWYTDGSSFIAEGKRRAGAAIVDGKRTVWASSLPEGTSAQKAELVALTQALRLAEGKDINIYTDSRYAFATAHIHGAIYKQRGWLTSAGKDIKNKEEILALLEAIHLPKRVAIIHCPGHQKGNDPVATGNRRADEAAKQAALSTRVLAETTKPAGKRTADGSEFEKRTADGSEFESPKKKAKVE

SEQ ID NO: 7586 - protein, 2094 aa, synthetic construct
MPAAKRVKLDGGDKKYSIGLDIGTNSVGWAVITDEYKVPSKKFKVLGNTDRHSIKKNLIGALLFDSGETAEATRLKRTARRRYTRRKNRICYLQEIFSNEMAKVDDSFFHRLEESFLVEEDKKHERHPIFGNIVDEVAYHEKYPTIYHLRKKLVDSTDKADLRLIYLALAHMIKFRGHFLIEGDLNPDNSDVDKLFIQLVQTYNQLFEENPINASGVDAKAILSARLSKSRRLENLIAQLPGEKKNGLFGNLIALSLGLTPNFKSNFDLAEDAKLQLSKDTYDDDLDNLLAQIGDQYADLFLAAKNLSDAILLSDILRVNTEITKAPLSASMIKRYDEHHQDLTLLKALVRQQLPEKYKEIFFDQSKNGYAGYIDGGASQEEFYKFIKPILEKMDGTEELLVKLNREDLLRKQRTFDNGSIPHQIHLGELHAILRRQEDFYPFLKDNREKIEKILTFRIPYYVGPLARGNSRFAWMTRKSEETITPWNFEEVVDKGASAQSFIERMTNFDKNLPNEKVLPKHSLLYEYFTVYNELTKVKYVTEGMRKPAFLSGEQKKAIVDLLFKTNRKVTVKQLKEDYFKKIECFDSVEISGVEDRFNASLGTYHDLLKIIKDKDFLDNEENEDILEDIVLTLTLFEDREMIEERLKTYAHLFDDKVMKQLKRRRYTGWGRLSRKLINGIRDKQSGKTILDFLKSDGFANRNFMQLIHDDSLTFKEDIQKAQVSGQGDSLHEHIANLAGSPAIKKGILQTVKVVDELVKVMGRHKPENIVIEMARENQTTQKGQKNSRERMKRIEEGIKELGSQILKEHPVENTQLQNEKLYLYYLQNGRDMYVDQELDINRLSDYDVDHIVPQSFLKDDSIDNKVLTRSDKARGKSDNVPSEEVVKKMKNYWRQLLNAKLITQRKFDNLTKAERGGLSELDKAGFIKRQLVETRQITKHVAQILDSRMNTKYDENDKLIREVKVITLKSKLVSDFRKDFQFYKVREINNYHHAHDAYLNAVVGTALIKKYPKLESEFVYGDYKVYDVRKMIAKSEQEIGKATAKYFFYSNIMNFFKTEITLANGEIRKRPLIETNGETGEIVWDKGRDFATVRKVLSMPQVNIVKKTEVQTGGFSKESILPKRNSDKLIARKKDWDPKKYGGFDSPTVAYSVLVVAKVEKGKSKKLKSVKELLGITIMERSSFEKNPIDFLEAKGYKEVKKDLIIKLPKYSLFELENGRKRMLASAGELQKGNELALPSKYVNFLYLASHYEKLKGSPEDNEQKQLFVEQHKHYLDEIIEQISEFSKRVILADANLDKVLSAYNKHRDKPIREQAENIIHLFTLTNLGAPAAFKYFDTTIDRKRYTSTKEVLDATLIHQSITGLYETRIDLSQLGGDGGGSSEAAAKPAPGGVLNLEEEYRLHEKPVPSSIDPSWLQLFPTVWAERAGMGLANQVPPVVVELRSGASPVAVRQYPMSKEAREGIRPHIQRFLDLGVLVPCQSPWNTPLLPVKKPGTNDYRPVQDLREINKRVQDIHPTVPNPYNLLSSLPPSHTWYSVLDLKDAFFCLKLHPNSQPLFAFEWRDPEKGNTGQLTWTRLPQGFKNSPTLFNEALHRDLAPFRALNPQVVLLQYVDDLLVAAPTYRDCKEGTQKLLQELSKLGYRVSAKKAQLCQKEVTYLGYLLKEGKRWLTPARKATVMKIPPPTTPRQVREFLGKAGFCRLFIPGFASLAAPLYPLTKPSIPFIWTEEHQKAFDRIKEALLSAPALALPDLTKPFTLYVDERAGVARGVLTQTLGPWRRPVAYLSKKLDPVASGWPTCLKAVAAVALLLKDADKLTLGQNVTVIASHSLESIVRQPPDRWMTNARMTHYQSLLLNERVSFAPPAVLNPATLLPVESEATPVHRCSEILAEETGTRRDLKDQPLPGVPAWYTDGSSFIAEGKRRAGAAIVDGKRTVWASSLPEGTSAQKAELVALTQALRLAEGKDINIYTDSRYAFATAHIHGAIYKQRGWLTSAGKDIKNKEEILALLEAIHLPKRVAIIHCPGHQKGNDPVATGNRRADEAAKQAALSTRVLAETTKPAGKRTADGSEFEKRTADGSEFESPKKKAKVE

SEQ ID NO: 7587 - protein, 2096 aa, synthetic construct; identical to SEQ ID NO: 4538

SEQ ID NO: 7588 - protein, 2098 aa, synthetic construct; identical to SEQ ID NO: 4539

SEQ ID NO: 7589 - protein, 2173 aa, synthetic construct
MPAAKRVKLDGGDKKYSIGLDIGTNSVGWAVITDEYKVPSKKFKVLGNTDRHSIKKNLIGALLFDSGETAEATRLKRTARRRYTRRKNRICYLQEIFSNEMAKVDDSFFHRLEESFLVEEDKKHERHPIFGNIVDEVAYHEKYPTIYHLRKKLVDSTDKADLRLIYLALAHMIKFRGHFLIEGDLNPDNSDVDKLFIQLVQTYNQLFEENPINASGVDAKAILSARLSKSRRLENLIAQLPGEKKNGLFGNLIALSLGLTPNFKSNFDLAEDAKLQLSKDTYDDDLDNLLAQIGDQYADLFLAAKNLSDAILLSDILRVNTEITKAPLSASMIKRYDEHHQDLTLLKALVRQQLPEKYKEIFFDQSKNGYAGYIDGGASQEEFYKFIKPILEKMDGTEELLVKLNREDLLRKQRTFDNGSIPHQIHLGELHAILRRQEDFYPFLKDNREKIEKILTFRIPYYVGPLARGNSRFAWMTRKSEETITPWNFEEVVDKGASAQSFIERMTNFDKNLPNEKVLPKHSLLYEYFTVYNELTKVKYVTEGMRKPAFLSGEQKKAIVDLLFKTNRKVTVKQLKEDYFKKIECFDSVEISGVEDRFNASLGTYHDLLKIIKDKDFLDNEENEDILEDIVLTLTLFEDREMIEERLKTYAHLFDDKVMKQLKRRRYTGWGRLSRKLINGIRDKQSGKTILDFLKSDGFANRNFMQLIHDDSLTFKEDIQKAQVSGQGDSLHEHIANLAGSPAIKKGILQTVKVVDELVKVMGRHKPENIVIEMARENQTTQKGQKNSRERMKRIEEGIKELGSQILKEHPVENTQLQNEKLYLYYLQNGRDMYVDQELDINRLSDYDVDHIVPQSFLKDDSIDNKVLTRSDKARGKSDNVPSEEVVKKMKNYWRQLLNAKLITQRKFDNLTKAERGGLSELDKAGFIKRQLVETRQITKHVAQILDSRMNTKYDENDKLIREVKVITLKSKLVSDFRKDFQFYKVREINNYHHAHDAYLNAVVGTALIKKYPKLESEFVYGDYKVYDVRKMIAKSEQEIGKATAKYFFYSNIMNFFKTEITLANGEIRKRPLIETNGETGEIVWDKGRDFATVRKVLSMPQVNIVKKTEVQTGGFSKESILPKRNSDKLIARKKDWDPKKYGGFDSPTVAYSVLVVAKVEKGKSKKLKSVKELLGITIMERSSFEKNPIDFLEAKGYKEVKKDLIIKLPKYSLFELENGRKRMLASAGELQKGNELALPSKYVNFLYLASHYEKLKGSPEDNEQKQLFVEQHKHYLDEIIEQISEFSKRVILADANLDKVLSAYNKHRDKPIREQAENIIHLFTLTNLGAPAAFKYFDTTIDRKRYTSTKEVLDATLIHQSITGLYETRIDLSQLGGDGGGSSPAPEAAAKGGMDLLKPLTVERKGVKIKGYWNSQADITCVPKDLLQGEEPVRQQNVTTIHGTQEGDVYYVNLKIDGRRINTEVIGTTLDYAIITPGDVPWILKKPLELTIKLDLEEQQGTLLNNSILSKKGKEELKQLFEKYSALWQSWENQVGHRRIRPHKIATGTVKPTPQKQYHINPKAKPDIQIVINDLLKQGVLIQKESTMNTPVYPVPKPNGRWRMVLDYRAVNKVTPLIAVQNQHSYGILGSLFKGRYKTTIDLSNGFWAHPIVPEDYWITAFTWQGKQYCWTVLPQGFLNSPGLFTGDVVDLLQGIPNVEVYVDDVYISHDSEKEHLEYLDILFNRLKEAGYIISLKKSNIANSIVDFLGFQITNEGRGLTDTFKEKLENITAPTTLKQLQSILGLLNFARNFIPDFTELIAPLYALIPKSTKNYVPWQIEHSTTLETLITKLNGAEYLQGRKGDKTLIMKVNASYTTGYIRYYNEGEKKPISYVSIVFSKTELKFTELEKLLTTVHKGLLKALDLSMGQNIHVYSPIVSMQNIQKTPQTAKKALASRWLSWLSYLEDPRIRFFYDPQMPALKDLPAVDTGKDNKKHPSNFQHIFYTDGSAITSPTKEGHLNAGMGIVYFINKDGNLQKQQEWSISLGNHTAQFAEIAAFEFALKKCLPLGGNILVVTDSNYVAKAYNEELDVWASNGFVNNRKKPLKHISKWKSVADLKRLRPDVVVTHEPGHQKLDSSPHAYGNNLADQLATQASFKVHAGKRTADGSEFEKRTADGSEFESPKKKAKVE

SEQ ID NO: 7590 - protein, 2127 aa, synthetic construct
MPAAKRVKLDGGDKKYSIGLDIGTNSVGWAVITDEYKVPSKKFKVLGNTDRHSIKKNLIGALLFDSGETAEATRLKRTARRRYTRRKNRICYLQEIFSNEMAKVDDSFFHRLEESFLVEEDKKHERHPIFGNIVDEVAYHEKYPTIYHLRKKLVDSTDKADLRLIYLALAHMIKFRGHFLIEGDLNPDNSDVDKLFIQLVQTYNQLFEENPINASGVDAKAILSARLSKSRRLENLIAQLPGEKKNGLFGNLIALSLGLTPNFKSNFDLAEDAKLQLSKDTYDDDLDNLLAQIGDQYADLFLAAKNLSDAILLSDILRVNTEITKAPLSASMIKRYDEHHQDLTLLKALVRQQLPEKYKEIFFDQSKNGYAGYIDGGASQEEFYKFIKPILEKMDGTEELLVKLNREDLLRKQRTFDNGSIPHQIHLGELHAILRRQEDFYPFLKDNREKIEKILTFRIPYYVGPLARGNSRFAWMTRKSEETITPWNFEEVVDKGASAQSFIERMTNFDKNLPNEKVLPKHSLLYEYFTVYNELTKVKYVTEGMRKPAFLSGEQKKAIVDLLFKTNRKVTVKQLKEDYFKKIECFDSVEISGVEDRFNASLGTYHDLLKIIKDKDFLDNEENEDILEDIVLTLTLFEDREMIEERLKTYAHLFDDKVMKQLKRRRYTGWGRLSRKLINGIRDKQSGKTILDFLKSDGFANRNFMQLIHDDSLTFKEDIQKAQVSGQGDSLHEHIANLAGSPAIKKGILQTVKVVDELVKVMGRHKPENIVIEMARENQTTQKGQKNSRERMKRIEEGIKELGSQILKEHPVENTQLQNEKLYLYYLQNGRDMYVDQELDINRLSDYDVDHIVPQSFLKDDSIDNKVLTRSDKARGKSDNVPSEEVVKKMKNYWRQLLNAKLITQRKFDNLTKAERGGLSELDKAGFIKRQLVETRQITKHVAQILDSRMNTKYDENDKLIREVKVITLKSKLVSDFRKDFQFYKVREINNYHHAHDAYLNAVVGTALIKKYPKLESEFVYGDYKVYDVRKMIAKSEQEIGKATAKYFFYSNIMNFFKTEITLANGEIRKRPLIETNGETGEIVWDKGRDFATVRKVLSMPQVNIVKKTEVQTGGFSKESILPKRNSDKLIARKKDWDPKKYGGFDSPTVAYSVLVVAKVEKGKSKKLKSVKELLGITIMERSSFEKNPIDFLEAKGYKEVKKDLIIKLPKYSLFELENGRKRMLASAGELQKGNELALPSKYVNFLYLASHYEKLKGSPEDNEQKQLFVEQHKHYLDEIIEQISEFSKRVILADANLDKVLSAYNKHRDKPIREQAENIIHLFTLTNLGAPAAFKYFDTTIDRKRYTSTKEVLDATLIHQSITGLYETRIDLSQLGGDGGGSSPAPEAAAKGGLLGRDLLTKLKAQIQFSTEGPQVTWEDRPAMCLVLNLEEEYRLHEKPVPPSIDPSWLQLFPMVWAEKAGMGLANQVPPVVVELKSDASPVAVRQYPMSKEAREGIRPHIQRFLDLGILVPCQSPWNTPLLPVKKPGTNDYRPVQDLREVNKRVQDIHPTVPNPYNLLSSLPPSHTWYSVLDLKDAFFCLKLHPNSQPLFAFEWRDPEKGNTGQLTWTRLPQGFKNSPTLFNEALHRDLASFRALNPQVVMLQYVDDLLVAAPTYRDCKEGTRRLLQELSKLGYRVSAKKAQLCREEVTYLGYLLKGGKRWLTPARKATVMKIPTPTTPRQVREFLGTAGFCRLWIPGFASLAAPLYPLTRPKVPFTWTEAHQEAFGRIKEALLSAPALALPDLTKPFALYVDEKEGVARGVLTQTLGPWRRPVAYLSKKLDPVASGWPTCLKAIAAVALLLKDADKLTLGQNVLVIAPHNLESIVRQPPDRWMTNARMTHYQSLLLNERVSFAPPAILNPATLLPVESDDTPIHICSEILAEETGTRPDLRDQPLPGVPAWYTDGSSFIMDGRRQAGAAIVDNKRTVWASNLPEGTSAQKAELIALTQALRLAEGKSINIYTDSRYAFATAHVHGAIYKQRGWLTSAGKDIKNKEEILALLEAIHLPKRVAIIHCPGHQRGTDPVATGNRKADEAAKQAAQSTRILTETTKNAGKRTADGSEFEKRTADGSEFESPKKKAKVE

SEQ ID NO: 7591 - protein, 2218 aa, synthetic construct
MPAAKRVKLDGGDKKYSIGLDIGTNSVGWAVITDEYKVPSKKFKVLGNTDRHSIKKNLIGALLFDSGETAEATRLKRTARRRYTRRKNRICYLQEIFSNEMAKVDDSFFHRLEESFLVEEDKKHERHPIFGNIVDEVAYHEKYPTIYHLRKKLVDSTDKADLRLIYLALAHMIKFRGHFLIEGDLNPDNSDVDKLFIQLVQTYNQLFEENPINASGVDAKAILSARLSKSRRLENLIAQLPGEKKNGLFGNLIALSLGLTPNFKSNFDLAEDAKLQLSKDTYDDDLDNLLAQIGDQYADLFLAAKNLSDAILLSDILRVNTEITKAPLSASMIKRYDEHHQDLTLLKALVRQQLPEKYKEIFFDQSKNGYAGYIDGGASQEEFYKFIKPILEKMDGTEELLVKLNREDLLRKQRTFDNGSIPHQIHLGELHAILRRQEDFYPFLKDNREKIEKILTFRIPYYVGPLARGNSRFAWMTRKSEETITPWNFEEVVDKGASAQSFIERMTNFDKNLPNEKVLPKHSLLYEYFTVYNELTKVKYVTEGMRKPAFLSGEQKKAIVDLLFKTNRKVTVKQLKEDYFKKIECFDSVEISGVEDRFNASLGTYHDLLKIIKDKDFLDNEENEDILEDIVLTLTLFEDREMIEERLKTYAHLFDDKVMKQLKRRRYTGWGRLSRKLINGIRDKQSGKTILDFLKSDGFANRNFMQLIHDDSLTFKEDIQKAQVSGQGDSLHEHIANLAGSPAIKKGILQTVKVVDELVKVMGRHKPENIVIEMARENQTTQKGQKNSRERMKRIEEGIKELGSQILKEHPVENTQLQNEKLYLYYLQNGRDMYVDQELDINRLSDYDVDHIVPQSFLKDDSIDNKVLTRSDKARGKSDNVPSEEVVKKMKNYWRQLLNAKLITQRKFDNLTKAERGGLSELDKAGFIKRQLVETRQITKHVAQILDSRMNTKYDENDKLIREVKVITLKSKLVSDFRKDFQFYKVREINNYHHAHDAYLNAVVGTALIKKYPKLESEFVYGDYKVYDVRKMIAKSEQEIGKATAKYFFYSNIMNFFKTEITLANGEIRKRPLIETNGETGEIVWDKGRDFATVRKVLSMPQVNIVKKTEVQTGGFSKESILPKRNSDKLIARKKDWDPKKYGGFDSPTVAYSVLVVAKVEKGKSKKLKSVKELLGITIMERSSFEKNPIDFLEAKGYKEVKKDLIIKLPKYSLFELENGRKRMLASAGELQKGNELALPSKYVNFLYLASHYEKLKGSPEDNEQKQLFVEQHKHYLDEIIEQISEFSKRVILADANLDKVLSAYNKHRDKPIREQAENIIHLFTLTNLGAPAAFKYFDTTIDRKRYTSTKEVLDATLIHQSITGLYETRIDLSQLGGDGGGSSPAPEAAAKGGTLGDQGSRGSDPLPEPRVTLTVEGIPTEFLVNTGAEHSVLTKPMGKMGSKRTVVAGATGSKVYPWTTKRLLKIGQKQVTHSFLVIPECPAPLLGRDLLTKLKAQIQFSTEGPQVTWEDRPAMCLVLNLEEEYRLHEKPVPPSIDPSWLQLFPMVWAEKAGMGLANQVPPVVVELKSDASPVAVRQYPMSKEAREGIRPHIQRFLDLGILVPCQSPWNTPLLPVKKPGTNDYRPVQDLREVNKRVQDIHPTVPNPYNLLSSLPPSHTWYSVLDLKDAFFCLKLHPNSQPLFAFEWRDPEKGNTGQLTWTRLPQGFKNSPTLFNEALHRDLASFRALNPQVVMLQYVDDLLVAAPTYRDCKEGTRRLLQELSKLGYRVSAKKAQLCREEVTYLGYLLKGGKRWLTPARKATVMKIPTPTTPRQVREFLGTAGFCRLWIPGFASLAAPLYPLTRPKVPFTWTEAHQEAFGRIKEALLSAPALALPDLTKPFALYVDEKEGVARGVLTQTLGPWRRPVAYLSKKLDPVASGWPTCLKAIAAVALLLKDADKLTLGQNVLVIAPHNLESIVRQPPDRWMTNARMTHYQSLLLNERVSFAPPAILNPATLLPVESDDTPIHICSEILAEETGTRPDLRDQPLPGVPAWYTDGSSFIMDGRRQAGAAIVDNKRTVWASNLPEGTSAQKAELIALTQALRLAEGKSINIYTDSRYAFATAHVHGAIYKQRGWLTSAGKDIKNKEEILALLEAIHLPKRVAIIHCPGHQRGTDPVATGNRKADEAAKQAAQSTRILTETTKNAGKRTADGSEFEKRTADGSEFESPKKKAKVE

SEQ ID NO: 7592 - protein, 2096 aa, synthetic construct
MPAAKRVKLDGGDKKYSIGLDIGTNSVGWAVITDEYKVPSKKFKVLGNTDRHSIKKNLIGALLFDSGETAEATRLKRTARRRYTRRKNRICYLQEIFSNEMAKVDDSFFHRLEESFLVEEDKKHERHPIFGNIVDEVAYHEKYPTIYHLRKKLVDSTDKADLRLIYLALAHMIKFRGHFLIEGDLNPDNSDVDKLFIQLVQTYNQLFEENPINASGVDAKAILSARLSKSRRLENLIAQLPGEKKNGLFGNLIALSLGLTPNFKSNFDLAEDAKLQLSKDTYDDDLDNLLAQIGDQYADLFLAAKNLSDAILLSDILRVNTEITKAPLSASMIKRYDEHHQDLTLLKALVRQQLPEKYKEIFFDQSKNGYAGYIDGGASQEEFYKFIKPILEKMDGTEELLVKLNREDLLRKQRTFDNGSIPHQIHLGELHAILRRQEDFYPFLKDNREKIEKILTFRIPYYVGPLARGNSRFAWMTRKSEETITPWNFEEVVDKGASAQSFIERMTNFDKNLPNEKVLPKHSLLYEYFTVYNELTKVKYVTEGMRKPAFLSGEQKKAIVDLLFKTNRKVTVKQLKEDYFKKIECFDSVEISGVEDRFNASLGTYHDLLKIIKDKDFLDNEENEDILEDIVLTLTLFEDREMIEERLKTYAHLFDDKVMKQLKRRRYTGWGRLSRKLINGIRDKQSGKTILDFLKSDGFANRNFMQLIHDDSLTFKEDIQKAQVSGQGDSLHEHIANLAGSPAIKKGILQTVKVVDELVKVMGRHKPENIVIEMARENQTTQKGQKNSRERMKRIEEGIKELGSQILKEHPVENTQLQNEKLYLYYLQNGRDMYVDQELDINRLSDYDVDHIVPQSFLKDDSIDNKVLTRSDKARGKSDNVPSEEVVKKMKNYWRQLLNAKLITQRKFDNLTKAERGGLSELDKAGFIKRQLVETRQITKHVAQILDSRMNTKYDENDKLIREVKVITLKSKLVSDFRKDFQFYKVREINNYHHAHDAYLNAVVGTALIKKYPKLESEFVYGDYKVYDVRKMIAKSEQEIGKATAKYFFYSNIMNFFKTEITLANGEIRKRPLIETNGETGEIVWDKGRDFATVRKVLSMPQVNIVKKTEVQTGGFSKESILPKRNSDKLIARKKDWDPKKYGGFDSPTVAYSVLVVAKVEKGKSKKLKSVKELLGITIMERSSFEKNPIDFLEAKGYKEVKKDLIIKLPKYSLFELENGRKRMLASAGELQKGNELALPSKYVNFLYLASHYEKLKGSPEDNEQKQLFVEQHKHYLDEIIEQISEFSKRVILADANLDKVLSAYNKHRDKPIREQAENIIHLFTLTNLGAPAAFKYFDTTIDRKRYTSTKEVLDATLIHQSITGLYETRIDLSQLGGDGGGSSPAPEAAAKGGTLGIEDEYRLHETSTEPDVSLGSTWLSDFPQAWAETGGMGLAVRQAPLIIPLKATSTPVSIQQYPMSHEARLGIKPHIQRLLDQGILVPCQSPWNTPLLPVKKPGTNDYRPVQDLREVNKRVEDIHPTVPNPYNLLSGLPPSHQWYTVLDLKDAFFCLRLHPTSQPLFAFEWRDPGMGISGQLTWTRLPQGFKNSPTLFNEALHRDLADFRIQHPDLILLQYVDDILLAATSELDCQQGTRALLQTLGDLGYRASAKKAQICQKQVKYLGYLLREGQRWLTEARKETVMGQPVPKTPRQLREFLGTAGFCRLWIPGFAEMAAPLYPLTKPGTLFSWGPDQQKAYQEIKQALLTAPALGLPDLTKPFELFVDEKQGYAKGVLTQKLGPWRRPVAYLSKKLDPVAAGWPPCLRMVAAIAVLTKDAGKLTMGQPLVILAPHAVEALVKQPPDRWLSNARMTHYQAMLLDTDRVQFGPVVALNPATLLPLPEEGAPHDCLEILAETHGTRPDLTDQPIPDADHTWYTDGSSFLQEGQRKAGAAVTTETEVIWAGALPAGTSAQRAELIALTQALKMAEGKRLNVYTDSRYAFATAHIHGEIYRRRGWLTSEGREIKNKSEILALLKALFLPKRLSIIHCLGHQKGDSAEARGNRLADQAAREAAIKTPPDTSTLLAGKRTADGSEFEKRTADGSEFESPKKKAKVE

SEQ ID NO: 7593 - protein, 2096 aa, synthetic construct
MPAAKRVKLDGGDKKYSIGLDIGTNSVGWAVITDEYKVPSKKFKVLGNTDRHSIKKNLIGALLFDSGETAEATRLKRTARRRYTRRKNRICYLQEIFSNEMAKVDDSFFHRLEESFLVEEDKKHERHPIFGNIVDEVAYHEKYPTIYHLRKKLVDSTDKADLRLIYLALAHMIKFRGHFLIEGDLNPDNSDVDKLFIQLVQTYNQLFEENPINASGVDAKAILSARLSKSRRLENLIAQLPGEKKNGLFGNLIALSLGLTPNFKSNFDLAEDAKLQLSKDTYDDDLDNLLAQIGDQYADLFLAAKNLSDAILLSDILRVNTEITKAPLSASMIKRYDEHHQDLTLLKALVRQQLPEKYKEIFFDQSKNGYAGYIDGGASQEEFYKFIKPILEKMDGTEELLVKLNREDLLRKQRTFDNGSIPHQIHLGELHAILRRQEDFYPFLKDNREKIEKILTFRIPYYVGPLARGNSRFAWMTRKSEETITPWNFEEVVDKGASAQSFIERMTNFDKNLPNEKVLPKHSLLYEYFTVYNELTKVKYVTEGMRKPAFLSGEQKKAIVDLLFKTNRKVTVKQLKEDYFKKIECFDSVEISGVEDRFNASLGTYHDLLKIIKDKDFLDNEENEDILEDIVLTLTLFEDREMIEERLKTYAHLFDDKVMKQLKRRRYTGWGRLSRKLINGIRDKQSGKTILDFLKSDGFANRNFMQLIHDDSLTFKEDIQKAQVSGQGDSLHEHIANLAGSPAIKKGILQTVKVVDELVKVMGRHKPENIVIEMARENQTTQKGQKNSRERMKRIEEGIKELGSQILKEHPVENTQLQNEKLYLYYLQNGRDMYVDQELDINRLSDYDVDHIVPQSFLKDDSIDNKVLTRSDKARGKSDNVPSEEVVKKMKNYWRQLLNAKLITQRKFDNLTKAERGGLSELDKAGFIKRQLVETRQITKHVAQILDSRMNTKYDENDKLIREVKVITLKSKLVSDFRKDFQFYKVREINNYHHAHDAYLNAVVGTALIKKYPKLESEFVYGDYKVYDVRKMIAKSEQEIGKATAKYFFYSNIMNFFKTEITLANGEIRKRPLIETNGETGEIVWDKGRDFATVRKVLSMPQVNIVKKTEVQTGGFSKESILPKRNSDKLIARKKDWDPKKYGGFDSPTVAYSVLVVAKVEKGKSKKLKSVKELLGITIMERSSFEKNPIDFLEAKGYKEVKKDLIIKLPKYSLFELENGRKRMLASAGELQKGNELALPSKYVNFLYLASHYEKLKGSPEDNEQKQLFVEQHKHYLDEIIEQISEFSKRVILADANLDKVLSAYNKHRDKPIREQAENIIHLFTLTNLGAPAAFKYFDTTIDRKRYTSTKEVLDATLIHQSITGLYETRIDLSQLGGDGGGSSPAPEAAAKGGTLNIEDEHRLHETSKEPDVSLGSTWLSDFPQAWAETGGMGLAVRQAPLIIPLKATSTPVSIKQYPMSQEARLGIKPHIQRLLDQGILVPCQSPWNTPLLPVKKPGTNDYRPVQDLREVNKRVEDIHPTVPNPYNLLSGLPPSHQWYTVLDLKDAFFCLRLHPTSQPLFAFEWRDPEMGISGQLTWTRLPQGFKNSPTLFDEALHRDLADFRIQHPDLILLQYVDDLLLAATSELDCQQGTRALLQTLGNLGYRASAKKAQICQKQVKYLGYLLKEGQRWLTEARKETVMGQPTPKTPRQLREFLGTAGFCRLWIPGFAEMAAPLYPLTKTGTLFNWGPDQQKAYQEIKQALLTAPALGLPDLTKPFELFVDEKQGYAKGVLTQKLGPWRRPVAYLSKKLDPVAAGWPPCLRMVAAIAVLTKDAGKLTMGQPLVILAPHAVEALVKQPPDRWLSNARMTHYQALLLDTDRVQFGPVVALNPATLLPLPEEGLQHNCLDILAEAHGTRPDLTDQPLPDADHTWYTDGSSLLQEGQRKAGAAVTTETEVIWAKALPAGTSAQRAELIALTQALKMAEGKKLNVYTDSRYAFATAHIHGEIYRRRGLLTSEGKEIKNKDEILALLKALFLPKRLSIIHCPGHQKGHSAEARGNRMADQAARKAAITETPDTSTLLAGKRTADGSEFEKRTADGSEFESPKKKAKVE

SEQ ID NO: 7594 - protein, 2096 aa, synthetic construct; identical to SEQ ID NO: 7593

SEQ ID NO: 7595 - protein, 2096 aa, synthetic construct
MPAAKRVKLDGGDKKYSIGLDIGTNSVGWAVITDEYKVPSKKFKVLGNTDRHSIKKNLIGALLFDSGETAEATRLKRTARRRYTRRKNRICYLQEIFSNEMAKVDDSFFHRLEESFLVEEDKKHERHPIFGNIVDEVAYHEKYPTIYHLRKKLVDSTDKADLRLIYLALAHMIKFRGHFLIEGDLNPDNSDVDKLFIQLVQTYNQLFEENPINASGVDAKAILSARLSKSRRLENLIAQLPGEKKNGLFGNLIALSLGLTPNFKSNFDLAEDAKLQLSKDTYDDDLDNLLAQIGDQYADLFLAAKNLSDAILLSDILRVNTEITKAPLSASMIKRYDEHHQDLTLLKALVRQQLPEKYKEIFFDQSKNGYAGYIDGGASQEEFYKFIKPILEKMDGTEELLVKLNREDLLRKQRTFDNGSIPHQIHLGELHAILRRQEDFYPFLKDNREKIEKILTFRIPYYVGPLARGNSRFAWMTRKSEETITPWNFEEVVDKGASAQSFIERMTNFDKNLPNEKVLPKHSLLYEYFTVYNELTKVKYVTEGMRKPAFLSGEQKKAIVDLLFKTNRKVTVKQLKEDYFKKIECFDSVEISGVEDRFNASLGTYHDLLKIIKDKDFLDNEENEDILEDIVLTLTLFEDREMIEERLKTYAHLFDDKVMKQLKRRRYTGWGRLSRKLINGIRDKQSGKTILDFLKSDGFANRNFMQLIHDDSLTFKEDIQKAQVSGQGDSLHEHIANLAGSPAIKKGILQTVKVVDELVKVMGRHKPENIVIEMARENQTTQKGQKNSRERMKRIEEGIKELGSQILKEHPVENTQLQNEKLYLYYLQNGRDMYVDQELDINRLSDYDVDHIVPQSFLKDDSIDNKVLTRSDKARGKSDNVPSEEVVKKMKNYWRQLLNAKLITQRKFDNLTKAERGGLSELDKAGFIKRQLVETRQITKHVAQILDSRMNTKYDENDKLIREVKVITLKSKLVSDFRKDFQFYKVREINNYHHAHDAYLNAVVGTALIKKYPKLESEFVYGDYKVYDVRKMIAKSEQEIGKATAKYFFYSNIMNFFKTEITLANGEIRKRPLIETNGETGEIVWDKGRDFATVRKVLSMPQVNIVKKTEVQTGGFSKESILPKRNSDKLIARKKDWDPKKYGGFDSPTVAYSVLVVAKVEKGKSKKLKSVKELLGITIMERSSFEKNPIDFLEAKGYKEVKKDLIIKLPKYSLFELENGRKRMLASAGELQKGNELALPSKYVNFLYLASHYEKLKGSPEDNEQKQLFVEQHKHYLDEIIEQISEFSKRVILADANLDKVLSAYNKHRDKPIREQAENIIHLFTLTNLGAPAAFKYFDTTIDRKRYTSTKEVLDATLIHQSITGLYETRIDLSQLGGDGGGSSPAPEAAAKGGTLNIEDEYRLHEISTEPDVSPGSTWLSDFPQAWAETGGMGLAVRQAPLIIPLKATSTPVSIKQYPMSQEAKLGIKPHIQRLLDQGILVPCQSPWNTPLLPVKKPGTNDYRPVQGLREVNKRVEDIHPTVPNPYNLLSGLPTSHRWYTVLDLKDAFFCLRLHPTSQPLFASEWRDPGMGISGQLTWTRLPQGFKNSPTLFNEALHRGLADFRIQHPDLILLQYVDDLLLAATSELDCQQGTRALLKTLGNLGYRASAKKAQICQKQVKYLGYLLREGQRWLTEARKETVMGQPTPKTPRQLREFLGTAGFCRLWIPRFAEMAAPLYPLTKPGTLFNWGPDQQKAYHEIKQALLTAPALGLPDLTKPFELFVDEKQGYAKGVLTQKLGPWRRPVAYLSKKLDPVAAGWPPCLRMVAAIAVLTKDAGKLTMGQPLVILAPHAVEALVKQPPDRWLSNARMTHYQAMLLDTDRVQFGPVVALNPATLLPLPEEGAPHDCLEILAETHGTEPDLTDQPIPDADHTWYTDGSSFLQEGQRKAGAAVTTETEVIWARALPAGTSAQRAELIALTQALKMAEGKRLNVYTDSRYAFATAHIHGEIYKRRGWLTSEGREIKNKSEILALLKALFLPKRLSIIHCLGHQKGDSAEARGNRLADQAAREAAIKTPPDTSTLLAGKRTADGSEFEKRTADGSEFESPKKKAKVE

SEQ ID NO: 7596 - protein, 2090 aa, synthetic construct
MPAAKRVKLDGGDKKYSIGLDIGTNSVGWAVITDEYKVPSKKFKVLGNTDRHSIKKNLIGALLFDSGETAEATRLKRTARRRYTRRKNRICYLQEIFSNEMAKVDDSFFHRLEESFLVEEDKKHERHPIFGNIVDEVAYHEKYPTIYHLRKKLVDSTDKADLRLIYLALAHMIKFRGHFLIEGDLNPDNSDVDKLFIQLVQTYNQLFEENPINASGVDAKAILSARLSKSRRLENLIAQLPGEKKNGLFGNLIALSLGLTPNFKSNFDLAEDAKLQLSKDTYDDDLDNLLAQIGDQYADLFLAAKNLSDAILLSDILRVNTEITKAPLSASMIKRYDEHHQDLTLLKALVRQQLPEKYKEIFFDQSKNGYAGYIDGGASQEEFYKFIKPILEKMDGTEELLVKLNREDLLRKQRTFDNGSIPHQIHLGELHAILRRQEDFYPFLKDNREKIEKILTFRIPYYVGPLARGNSRFAWMTRKSEETITPWNFEEVVDKGASAQSFIERMTNFDKNLPNEKVLPKHSLLYEYFTVYNELTKVKYVTEGMRKPAFLSGEQKKAIVDLLFKTNRKVTVKQLKEDYFKKIECFDSVEISGVEDRFNASLGTYHDLLKIIKDKDFLDNEENEDILEDIVLTLTLFEDREMIEERLKTYAHLFDDKVMKQLKRRRYTGWGRLSRKLINGIRDKQSGKTILDFLKSDGFANRNFMQLIHDDSLTFKEDIQKAQVSGQGDSLHEHIANLAGSPAIKKGILQTVKVVDELVKVMGRHKPENIVIEMARENQTTQKGQKNSRERMKRIEEGIKELGSQILKEHPVENTQLQNEKLYLYYLQNGRDMYVDQELDINRLSDYDVDHIVPQSFLKDDSIDNKVLTRSDKARGKSDNVPSEEVVKKMKNYWRQLLNAKLITQRKFDNLTKAERGGLSELDKAGFIKRQLVETRQITKHVAQILDSRMNTKYDENDKLIREVKVITLKSKLVSDFRKDFQFYKVREINNYHHAHDAYLNAVVGTALIKKYPKLESEFVYGDYKVYDVRKMIAKSEQEIGKATAKYFFYSNIMNFFKTEITLANGEIRKRPLIETNGETGEIVWDKGRDFATVRKVLSMPQVNIVKKTEVQTGGFSKESILPKRNSDKLIARKKDWDPKKYGGFDSPTVAYSVLVVAKVEKGKSKKLKSVKELLGITIMERSSFEKNPIDFLEAKGYKEVKKDLIIKLPKYSLFELENGRKRMLASAGELQKGNELALPSKYVNFLYLASHYEKLKGSPEDNEQKQLFVEQHKHYLDEIIEQISEFSKRVILADANLDKVLSAYNKHRDKPIREQAENIIHLFTLTNLGAPAAFKYFDTTIDRKRYTSTKEVLDATLIHQSITGLYETRIDLSQLGGDGGGSSPAPEAAAKGGTLQLDDEYRLYSPLVKPDQNIQFWLEQFPQAWAETAGMGLAKQVPPQVIQLKASATPVSVRQYPLSKEAQEGIRPHVQRLIQQGILVPVQSPWNTPLLPVRKPGTNDYRPVQDLREVNKRVQDIHPTVPNPYNLLCALPPQRSWYTVLDLKDAFFCLRLHPTSQPLFAFEWRDPGTGRTGQLTWTRLPQGFKNSPTIFDEALHRDLANFRIQHPQVTLLQYVDDLLLAGATKQDCLEGTKALLLELSDLGYRASAKKAQICRREVTYLGYSLRDGQRWLTEARKKTVVQIPAPTTAKQVREFLGTAGFCRLWIPGFATLAAPLYPLTKEKGEFSWAPEHQKAFDAIKKALLSAPALALPDVTKPFTLYVDERKGVARGVLTQTLGPWRRPVAYLSKKLDPVASGWPVCLKAIAAVAILVKDADKLTLGQNITVIAPHALENIVRQPPDRWMTNARMTHYQSLLLTERVTFAPPAALNPATLLPEETDEPVTHDCHQLLIEETGVRKDLTDIPLTGEVLTWFTDGSSYVVEGKRMAGAAVVDGTRTIWASSLPEGTSAQKAELMALTQALRLAEGKSINIYTDSRYAFATAHVHGAIYKQRGLLTSAGREIKNKEEILSLLEALHLPKRLAIIHCPGHQKAKDPISRGNQMADRVAKQAAQGVNLLAGKRTADGSEFEKRTADGSEFESPKKKAKVE

SEQ ID NO: 7597 - protein, 2090 aa, synthetic construct; identical to SEQ ID NO: 7596

SEQ ID NO: 7598 - protein, 2176 aa, synthetic construct
MPAAKRVKLDGGDKKYSIGLDIGTNSVGWAVITDEYKVPSKKFKVLGNTDRHSIKKNLIGALLFDSGETAEATRLKRTARRRYTRRKNRICYLQEIFSNEMAKVDDSFFHRLEESFLVEEDKKHERHPIFGNIVDEVAYHEKYPTIYHLRKKLVDSTDKADLRLIYLALAHMIKFRGHFLIEGDLNPDNSDVDKLFIQLVQTYNQLFEENPINASGVDAKAILSARLSKSRRLENLIAQLPGEKKNGLFGNLIALSLGLTPNFKSNFDLAEDAKLQLSKDTYDDDLDNLLAQIGDQYADLFLAAKNLSDAILLSDILRVNTEITKAPLSASMIKRYDEHHQDLTLLKALVRQQLPEKYKEIFFDQSKNGYAGYIDGGASQEEFYKFIKPILEKMDGTEELLVKLNREDLLRKQRTFDNGSIPHQIHLGELHAILRRQEDFYPFLKDNREKIEKILTFRIPYYVGPLARGNSRFAWMTRKSEETITPWNFEEVVDKGASAQSFIERMTNFDKNLPNEKVLPKHSLLYEYFTVYNELTKVKYVTEGMRKPAFLSGEQKKAIVDLLFKTNRKVTVKQLKEDYFKKIECFDSVEISGVEDRFNASLGTYHDLLKIIKDKDFLDNEENEDILEDIVLTLTLFEDREMIEERLKTYAHLFDDKVMKQLKRRRYTGWGRLSRKLINGIRDKQSGKTILDFLKSDGFANRNFMQLIHDDSLTFKEDIQKAQVSGQGDSLHEHIANLAGSPAIKKGILQTVKVVDELVKVMGRHKPENIVIEMARENQTTQKGQKNSRERMKRIEEGIKELGSQILKEHPVENTQLQNEKLYLYYLQNGRDMYVDQELDINRLSDYDVDHIVPQSFLKDDSIDNKVLTRSDKARGKSDNVPSEEVVKKMKNYWRQLLNAKLITQRKFDNLTKAERGGLSELDKAGFIKRQLVETRQITKHVAQILDSRMNTKYDENDKLIREVKVITLKSKLVSDFRKDFQFYKVREINNYHHAHDAYLNAVVGTALIKKYPKLESEFVYGDYKVYDVRKMIAKSEQEIGKATAKYFFYSNIMNFFKTEITLANGEIRKRPLIETNGETGEIVWDKGRDFATVRKVLSMPQVNIVKKTEVQTGGFSKESILPKRNSDKLIARKKDWDPKKYGGFDSPTVAYSVLVVAKVEKGKSKKLKSVKELLGITIMERSSFEKNPIDFLEAKGYKEVKKDLIIKLPKYSLFELENGRKRMLASAGELQKGNELALPSKYVNFLYLASHYEKLKGSPEDNEQKQLFVEQHKHYLDEIIEQISEFSKRVILADANLDKVLSAYNKHRDKPIREQAENIIHLFTLTNLGAPAAFKYFDTTIDRKRYTSTKEVLDATLIHQSITGLYETRIDLSQLGGDGGGSSPAPEAAAKGGMDPLQLLQPLEAEIKGTKLKAHWNSGATITCVPEAFLEDERPIQTMLIKTIHGEKQQDVYYLTFKVQGRKVEAEVLASPYDYILLNPSDVPWLMKKPLQLTVLVPLHEYQERLLQQTALPKEQKELLQKLFLKYDALWQHWENQVGHRRIKPHNIATGTLAPRPQKQYPINPKAKPSIQIVIDDLLKQGVLIQQNSTMNTPVYPVPKPDGKWRMVLDYREVNKTIPLIAAQNQHSAGILSSIYRGKYKTTLDLTNGFWAHPITPESYWLTAFTWQGKQYCWTRLPQGFLNSPALFTADVVDLLKEIPNVQAYVDDIYISHDDPQEHLEQLEKIFSILLNAGYVVSLKKSEIAQREVEFLGFNITKEGRGLTDTFKQKLLNITPPKDLKQLQSILGLLNFARNFIPNYSELVKPLYTIVANANGKFISWTEDNSNQLQHIISVLNQADNLEERNPETRLIIKVNSSPSAGYIRYYNEGSKRPIMYVNYIFSKAEAKFTQTEKLLTTMHKGLIKAMDLAMGQEILVYSPIVSMTKIQRTPLPERKALPVRWITWMTYLEDPRIQFHYDKSLPELQQIPNVTEDVIAKTKHPSEFAMVFYTDGSAIKHPDVNKSHSAGMGIAQVQFIPEYKIVHQWSIPLGDHTAQLAEIAAVEFACKKALKISGPVLIVTDSFYVAESANKELPYWKSNGFLNNKKKPLRHVSKWKSIAECLQLKPDIIIMHEKGHQQPMTTLHTEGNNLADKLATQGSYVVHAGKRTADGSEFEKRTADGSEFESPKKKAKVE

SEQ ID NO: 7599 - protein, 2087 aa, synthetic construct
MPAAKRVKLDGGDKKYSIGLDIGTNSVGWAVITDEYKVPSKKFKVLGNTDRHSIKKNLIGALLFDSGETAEATRLKRTARRRYTRRKNRICYLQEIFSNEMAKVDDSFFHRLEESFLVEEDKKHERHPIFGNIVDEVAYHEKYPTIYHLRKKLVDSTDKADLRLIYLALAHMIKFRGHFLIEGDLNPDNSDVDKLFIQLVQTYNQLFEENPINASGVDAKAILSARLSKSRRLENLIAQLPGEKKNGLFGNLIALSLGLTPNFKSNFDLAEDAKLQLSKDTYDDDLDNLLAQIGDQYADLFLAAKNLSDAILLSDILRVNTEITKAPLSASMIKRYDEHHQDLTLLKALVRQQLPEKYKEIFFDQSKNGYAGYIDGGASQEEFYKFIKPILEKMDGTEELLVKLNREDLLRKQRTFDNGSIPHQIHLGELHAILRRQEDFYPFLKDNREKIEKILTFRIPYYVGPLARGNSRFAWMTRKSEETITPWNFEEVVDKGASAQSFIERMTNFDKNLPNEKVLPKHSLLYEYFTVYNELTKVKYVTEGMRKPAFLSGEQKKAIVDLLFKTNRKVTVKQLKEDYFKKIECFDSVEISGVEDRFNASLGTYHDLLKIIKDKDFLDNEENEDILEDIVLTLTLFEDREMIEERLKTYAHLFDDKVMKQLKRRRYTGWGRLSRKLINGIRDKQSGKTILDFLKSDGFANRNFMQLIHDDSLTFKEDIQKAQVSGQGDSLHEHIANLAGSPAIKKGILQTVKVVDELVKVMGRHKPENIVIEMARENQTTQKGQKNSRERMKRIEEGIKELGSQILKEHPVENTQLQNEKLYLYYLQNGRDMYVDQELDINRLSDYDVDHIVPQSFLKDDSIDNKVLTRSDKARGKSDNVPSEEVVKKMKNYWRQLLNAKLITQRKFDNLTKAERGGLSELDKAGFIKRQLVETRQITKHVAQILDSRMNTKYDENDKLIREVKVITLKSKLVSDFRKDFQFYKVREINNYHHAHDAYLNAVVGTALIKKYPKLESEFVYGDYKVYDVRKMIAKSEQEIGKATAKYFFYSNIMNFFKTEITLANGEIRKRPLIETNGETGEIVWDKGRDFATVRKVLSMPQVNIVKKTEVQTGGFSKESILPKRNSDKLIARKKDWDPKKYGGFDSPTVAYSVLVVAKVEKGKSKKLKSVKELLGITIMERSSFEKNPIDFLEAKGYKEVKKDLIIKLPKYSLFELENGRKRMLASAGELQKGNELALPSKYVNFLYLASHYEKLKGSPEDNEQKQLFVEQHKHYLDEIIEQISEFSKRVILADANLDKVLSAYNKHRDKPIREQAENIIHLFTLTNLGAPAAFKYFDTTIDRKRYTSTKEVLDATLIHQSITGLYETRIDLSQLGGDGGGSSPAPEAAAKGGIPWLMKKPLQLTTLVPLQEYEERLLKQTMLTGSYKEKLQSLFLKYDALWQHWENQVGHRRIKPHHIATGTVNPRPQKQYPINPKAKASIQTVINDLLKQGVLIQQNSIMNTPVYPVPKPDGKWRMVLDYREVNKTIPLIAAQNQHSAGILSSIFRGKYKTTLDLSNGFWAHSITPESYWLTAFTWLGQQYCWTRLPQGFLNSPALFNADVVDLLKEVPNVQVYVDDIYISHDDPREHLEQLEKVFSLLLNAGYVVSLKKSEIAQHEVEFLGFNITKEGRGLTETFKQKLLNITPPRDLKQLQSILGKLNFARNFIPNFSELVKPLYNIIATAPGKYITWTTDNSQQLQNIISMLNSAENLEERNPEVRLIMKVNTSPSAGYIRFYNEFAKRPIMYLNYVYTKAEVKFTNTEKLLTTIHKGLIKALDLGMGQEILVYSPIVSMTKIQKTPLPERKALPIRWITWMSYLEDPRIQFHYDKTLPELQQVPTVTDDIIAKIKHPSEFSMVFYTDGSAIKHPNVNKSHNAGMGIAQVQFKPEFTVINTWSIPLGDHTAQLAEVAAVEFACKKALKIDGPVLIVTDSFYVAESVNKELPYWQSNGFFNNKKKPLKHVSKWKSIADCIQLKPDIIIIHEKGHQPTASTFHTEGNNLADKLATQGSYVVNAGKRTADGSEFEKRTADGSEFESPKKKAKVE

SEQ ID NO: 7600 - protein, 2096 aa, synthetic construct
MPAAKRVKLDGGDKKYSIGLDIGTNSVGWAVITDEYKVPSKKFKVLGNTDRHSIKKNLIGALLFDSGETAEATRLKRTARRRYTRRKNRICYLQEIFSNEMAKVDDSFFHRLEESFLVEEDKKHERHPIFGNIVDEVAYHEKYPTIYHLRKKLVDSTDKADLRLIYLALAHMIKFRGHFLIEGDLNPDNSDVDKLFIQLVQTYNQLFEENPINASGVDAKAILSARLSKSRRLENLIAQLPGEKKNGLFGNLIALSLGLTPNFKSNFDLAEDAKLQLSKDTYDDDLDNLLAQIGDQYADLFLAAKNLSDAILLSDILRVNTEITKAPLSASMIKRYDEHHQDLTLLKALVRQQLPEKYKEIFFDQSKNGYAGYIDGGASQEEFYKFIKPILEKMDGTEELLVKLNREDLLRKQRTFDNGSIPHQIHLGELHAILRRQEDFYPFLKDNREKIEKILTFRIPYYVGPLARGNSRFAWMTRKSEETITPWNFEEVVDKGASAQSFIERMTNFDKNLPNEKVLPKHSLLYEYFTVYNELTKVKYVTEGMRKPAFLSGEQKKAIVDLLFKTNRKVTVKQLKEDYFKKIECFDSVEISGVEDRFNASLGTYHDLLKIIKDKDFLDNEENEDILEDIVLTLTLFEDREMIEERLKTYAHLFDDKVMKQLKRRRYTGWGRLSRKLINGIRDKQSGKTILDFLKSDGFANRNFMQLIHDDSLTFKEDIQKAQVSGQGDSLHEHIANLAGSPAIKKGILQTVKVVDELVKVMGRHKPENIVIEMARENQTTQKGQKNSRERMKRIEEGIKELGSQILKEHPVENTQLQNEKLYLYYLQNGRDMYVDQELDINRLSDYDVDHIVPQSFLKDDSIDNKVLTRSDKARGKSDNVPSEEVVKKMKNYWRQLLNAKLITQRKFDNLTKAERGGLSELDKAGFIKRQLVETRQITKHVAQILDSRMNTKYDENDKLIREVKVITLKSKLVSDFRKDFQFYKVREINNYHHAHDAYLNAVVGTALIKKYPKLESEFVYGDYKVYDVRKMIAKSEQEIGKATAKYFFYSNIMNFFKTEITLANGEIRKRPLIETNGETGEIVWDKGRDFATVRKVLSMPQVNIVKKTEVQTGGFSKESILPKRNSDKLIARKKDWDPKKYGGFDSPTVAYSVLVVAKVEKGKSKKLKSVKELLGITIMERSSFEKNPIDFLEAKGYKEVKKDLIIKLPKYSLFELENGRKRMLASAGELQKGNELALPSKYVNFLYLASHYEKLKGSPEDNEQKQLFVEQHKHYLDEIIEQISEFSKRVILADANLDKVLSAYNKHRDKPIREQAENIIHLFTLTNLGAPAAFKYFDTTIDRKRYTSTKEVLDATLIHQSITGLYETRIDLSQLGGDGGGSSPAPEAAAKGGTLNIEDEYRLHETSKEPDVPLGSTWLSDFPQAWAETGGMGLAVRQAPLIIPLKATSTPVSIKQYPMSQEARLGIKPHIQRLLDQGILVPCQSPWNTPLLPVKKPGTNDYRPVQDLREVNKRVEDIHPTVPNPYNLLSGLPPSHQWYTVLDLKDAFFCLRLHPTSQPLFAFEWRDPEMGISGQLTWTRLPQGFKNSPTLFNEALHRDLADFRIQHPDLILLQYVDDLLLAATSEQDCQRGTRALLQTLGNLGYRASAKKAQICQKQVKYLGYLLKEGQRWLTEARKETVMGQPTPKTPRQLREFLGTAGFCRLWIPGFAEMAAPLYPLTKPGTLFNWGPDQQKAYQEIKQALLTAPALGLPDLTKPFELFVDEKQGYAKGVLTQKLGPWRRPVAYLSKKLDPVAAGWPPCLRMVAAIAVLTKDAGKLTMGQPLVILAPHAVEALVKQPPDRWLSNARMTHYQAMLLDTDRVQFGPVVALNPATLLPLPEKEAPHDCLEILAETHGTRPDLTDQPIPDADYTWYTDGSSFLQEGQRRAGAAVTTETEVIWARALPAGTSAQRAELIALTQALKMAEGKKLNVYTDSRYAFATAHVHGEIYRRRGWLTSEGREIKNKNEILALLKALFLPKRLSIIHCPGHQKGNSAEARGNRMADQAAREAAMKAVLETSTLLAGKRTADGSEFEKRTADGSEFESPKKKAKVE

SEQ ID NO: 7601 - protein, 2087 aa, synthetic construct
MPAAKRVKLDGGDKKYSIGLDIGTNSVGWAVITDEYKVPSKKFKVLGNTDRHSIKKNLIGALLFDSGETAEATRLKRTARRRYTRRKNRICYLQEIFSNEMAKVDDSFFHRLEESFLVEEDKKHERHPIFGNIVDEVAYHEKYPTIYHLRKKLVDSTDKADLRLIYLALAHMIKFRGHFLIEGDLNPDNSDVDKLFIQLVQTYNQLFEENPINASGVDAKAILSARLSKSRRLENLIAQLPGEKKNGLFGNLIALSLGLTPNFKSNFDLAEDAKLQLSKDTYDDDLDNLLAQIGDQYADLFLAAKNLSDAILLSDILRVNTEITKAPLSASMIKRYDEHHQDLTLLKALVRQQLPEKYKEIFFDQSKNGYAGYIDGGASQEEFYKFIKPILEKMDGTEELLVKLNREDLLRKQRTFDNGSIPHQIHLGELHAILRRQEDFYPFLKDNREKIEKILTFRIPYYVGPLARGNSRFAWMTRKSEETITPWNFEEVVDKGASAQSFIERMTNFDKNLPNEKVLPKHSLLYEYFTVYNELTKVKYVTEGMRKPAFLSGEQKKAIVDLLFKTNRKVTVKQLKEDYFKKIECFDSVEISGVEDRFNASLGTYHDLLKIIKDKDFLDNEENEDILEDIVLTLTLFEDREMIEERLKTYAHLFDDKVMKQLKRRRYTGWGRLSRKLINGIRDKQSGKTILDFLKSDGFANRNFMQLIHDDSLTFKEDIQKAQVSGQGDSLHEHIANLAGSPAIKKGILQTVKVVDELVKVMGRHKPENIVIEMARENQTTQKGQKNSRERMKRIEEGIKELGSQILKEHPVENTQLQNEKLYLYYLQNGRDMYVDQELDINRLSDYDVDHIVPQSFLKDDSIDNKVLTRSDKARGKSDNVPSEEVVKKMKNYWRQLLNAKLITQRKFDNLTKAERGGLSELDKAGFIKRQLVETRQITKHVAQILDSRMNTKYDENDKLIREVKVITLKSKLVSDFRKDFQFYKVREINNYHHAHDAYLNAVVGTALIKKYPKLESEFVYGDYKVYDVRKMIAKSEQEIGKATAKYFFYSNIMNFFKTEITLANGEIRKRPLIETNGETGEIVWDKGRDFATVRKVLSMPQVNIVKKTEVQTGGFSKESILPKRNSDKLIARKKDWDPKKYGGFDSPTVAYSVLVVAKVEKGKSKKLKSVKELLGITIMERSSFEKNPIDFLEAKGYKEVKKDLIIKLPKYSLFELENGRKRMLASAGELQKGNELALPSKYVNFLYLASHYEKLKGSPEDNEQKQLFVEQHKHYLDEIIEQISEFSKRVILADANLDKVLSAYNKHRDKPIREQAENIIHLFTLTNLGAPAAFKYFDTTIDRKRYTSTKEVLDATLIHQSITGLYETRIDLSQLGGDGGEAAAKGSSPAPGGVPWILKKPLELTIKLDLEEQQGTLLNNSILSKKGKEELKQLFEKYSALWQSWENQVGHRRIRPHKIATGTVKPTPQKQYHINPKAKPDIQIVINDLLKQGVLIQKESTMNTPVYPVPKPNGRWRMVLDYRAVNKVTPLIAVQNQHSYGILGSLFKGRYKTTIDLSNGFWAHPIVPEDYWITAFTWQGKQYCWTVLPQGFLNSPGLFTGDVVDLLQGIPNVEVYVDDVYISHDSEKEHLEYLDILFNRLKEAGYIISLKKSNIANSIVDFLGFQITNEGRGLTDTFKEKLENITAPTTLKQLQSILGLLNFARNFIPDFTELIAPLYALIPKSTKNYVPWQIEHSTTLETLITKLNGAEYLQGRKGDKTLIMKVNASYTTGYIRYYNEGEKKPISYVSIVFSKTELKFTELEKLLTTVHKGLLKALDLSMGQNIHVYSPIVSMQNIQKTPQTAKKALASRWLSWLSYLEDPRIRFFYDPQMPALKDLPAVDTGKDNKKHPSNFQHIFYTDGSAITSPTKEGHLNAGMGIVYFINKDGNLQKQQEWSISLGNHTAQFAEIAAFEFALKKCLPLGGNILVVTDSNYVAKAYNEELDVWASNGFVNNRKKPLKHISKWKSVADLKRLRPDVVVTHEPGHQKLDSSPHAYGNNLADQLATQASFKVHAGKRTADGSEFEKRTADGSEFESPKKKAKVE

SEQ ID NO: 7602 - protein, 2087 aa, synthetic construct
MPAAKRVKLDGGDKKYSIGLDIGTNSVGWAVITDEYKVPSKKFKVLGNTDRHSIKKNLIGALLFDSGETAEATRLKRTARRRYTRRKNRICYLQEIFSNEMAKVDDSFFHRLEESFLVEEDKKHERHPIFGNIVDEVAYHEKYPTIYHLRKKLVDSTDKADLRLIYLALAHMIKFRGHFLIEGDLNPDNSDVDKLFIQLVQTYNQLFEENPINASGVDAKAILSARLSKSRRLENLIAQLPGEKKNGLFGNLIALSLGLTPNFKSNFDLAEDAKLQLSKDTYDDDLDNLLAQIGDQYADLFLAAKNLSDAILLSDILRVNTEITKAPLSASMIKRYDEHHQDLTLLKALVRQQLPEKYKEIFFDQSKNGYAGYIDGGASQEEFYKFIKPILEKMDGTEELLVKLNREDLLRKQRTFDNGSIPHQIHLGELHAILRRQEDFYPFLKDNREKIEKILTFRIPYYVGPLARGNSRFAWMTRKSEETITPWNFEEVVDKGASAQSFIERMTNFDKNLPNEKVLPKHSLLYEYFTVYNELTKVKYVTEGMRKPAFLSGEQKKAIVDLLFKTNRKVTVKQLKEDYFKKIECFDSVEISGVEDRFNASLGTYHDLLKIIKDKDFLDNEENEDILEDIVLTLTLFEDREMIEERLKTYAHLFDDKVMKQLKRRRYTGWGRLSRKLINGIRDKQSGKTILDFLKSDGFANRNFMQLIHDDSLTFKEDIQKAQVSGQGDSLHEHIANLAGSPAIKKGILQTVKVVDELVKVMGRHKPENIVIEMARENQTTQKGQKNSRERMKRIEEGIKELGSQILKEHPVENTQLQNEKLYLYYLQNGRDMYVDQELDINRLSDYDVDHIVPQSFLKDDSIDNKVLTRSDKARGKSDNVPSEEVVKKMKNYWRQLLNAKLITQRKFDNLTKAERGGLSELDKAGFIKRQLVETRQITKHVAQILDSRMNTKYDENDKLIREVKVITLKSKLVSDFRKDFQFYKVREINNYHHAHDAYLNAVVGTALIKKYPKLESEFVYGDYKVYDVRKMIAKSEQEIGKATAKYFFYSNIMNFFKTEITLANGEIRKRPLIETNGETGEIVWDKGRDFATVRKVLSMPQVNIVKKTEVQTGGFSKESILPKRNSDKLIARKKDWDPKKYGGFDSPTVAYSVLVVAKVEKGKSKKLKSVKELLGITIMERSSFEKNPIDFLEAKGYKEVKKDLIIKLPKYSLFELENGRKRMLASAGELQKGNELALPSKYVNFLYLASHYEKLKGSPEDNEQKQLFVEQHKHYLDEIIEQISEFSKRVILADANLDKVLSAYNKHRDKPIREQAENIIHLFTLTNLGAPAAFKYFDTTIDRKRYTSTKEVLDATLIHQSITGLYETRIDLSQLGGDGGEAAAKGSSPAPGGVPWLTQQPLQLTILVPLQEYQEKILSKTALPEDQKQQLKTLFVKYDNLWQHWENQVGHRKIRPHNIATGDYPPRPQKQYPINPKAKPSIQIVIDDLLKQGVLTPQNSTMNTPVYPVPKPDGRWRMVLDYREVNKTIPLTAAQNQHSAGILATIVRQKYKTTLDLANGFWAHPITPESYWLTAFTWQGKQYCWTRLPQGFLNSPALFNADVVDLLKEIPNVQVYVDDIYLSHDDPKEHVQQLEKVFQILLQAGYVVSLKKSEIGQKTVEFLGFNITKEGRGLTDTFKTKLLNITPPKDLKQLQSILGKLNFARNFIPNFAELVQPLYNLIAPAKGKYIEWSEENTKQLNMVIEALNTASNLEERLPEQRLVIKVNTSPSAGYVRYYNETGKKPIMYLNYVFSKAELKFSMLEKLLTTMHKALIKAMDLAMGQEILVYSPIVSMTKIQKTPLPERKALPIRWITWMTYLEDPRIQFHYDKTLPELKHIPDVYTSSQSPVKHPSQYEGVFYTDGSAIKSPDPTKSNNAGMGIVHATYKPEYQVLNQWSIPLGNHTAQMAEIAAVEFACKKALKIPGPVLVITDSFYVAESANKELPYWKSNGFVNNKKKPLKHISKWKSIAECLSMKPDITIQHEKGISLQIPVFILKGNALADKLATQGSYVVNAGKRTADGSEFEKRTADGSEFESPKKKAKVE

SEQ ID NO: 7603 - protein, 2218 aa, synthetic construct
MPAAKRVKLDGGDKKYSIGLDIGTNSVGWAVITDEYKVPSKKFKVLGNTDRHSIKKNLIGALLFDSGETAEATRLKRTARRRYTRRKNRICYLQEIFSNEMAKVDDSFFHRLEESFLVEEDKKHERHPIFGNIVDEVAYHEKYPTIYHLRKKLVDSTDKADLRLIYLALAHMIKFRGHFLIEGDLNPDNSDVDKLFIQLVQTYNQLFEENPINASGVDAKAILSARLSKSRRLENLIAQLPGEKKNGLFGNLIALSLGLTPNFKSNFDLAEDAKLQLSKDTYDDDLDNLLAQIGDQYADLFLAAKNLSDAILLSDILRVNTEITKAPLSASMIKRYDEHHQDLTLLKALVRQQLPEKYKEIFFDQSKNGYAGYIDGGASQEEFYKFIKPILEKMDGTEELLVKLNREDLLRKQRTFDNGSIPHQIHLGELHAILRRQEDFYPFLKDNREKIEKILTFRIPYYVGPLARGNSRFAWMTRKSEETITPWNFEEVVDKGASAQSFIERMTNFDKNLPNEKVLPKHSLLYEYFTVYNELTKVKYVTEGMRKPAFLSGEQKKAIVDLLFKTNRKVTVKQLKEDYFKKIECFDSVEISGVEDRFNASLGTYHDLLKIIKDKDFLDNEENEDILEDIVLTLTLFEDREMIEERLKTYAHLFDDKVMKQLKRRRYTGWGRLSRKLINGIRDKQSGKTILDFLKSDGFANRNFMQLIHDDSLTFKEDIQKAQVSGQGDSLHEHIANLAGSPAIKKGILQTVKVVDELVKVMGRHKPENIVIEMARENQTTQKGQKNSRERMKRIEEGIKELGSQILKEHPVENTQLQNEKLYLYYLQNGRDMYVDQELDINRLSDYDVDHIVPQSFLKDDSIDNKVLTRSDKARGKSDNVPSEEVVKKMKNYWRQLLNAKLITQRKFDNLTKAERGGLSELDKAGFIKRQLVETRQITKHVAQILDSRMNTKYDENDKLIREVKVITLKSKLVSDFRKDFQFYKVREINNYHHAHDAYLNAVVGTALIKKYPKLESEFVYGDYKVYDVRKMIAKSEQEIGKATAKYFFYSNIMNFFKTEITLANGEIRKRPLIETNGETGEIVWDKGRDFATVRKVLSMPQVNIVKKTEVQTGGFSKESILPKRNSDKLIARKKDWDPKKYGGFDSPTVAYSVLVVAKVEKGKSKKLKSVKELLGITIMERSSFEKNPIDFLEAKGYKEVKKDLIIKLPKYSLFELENGRKRMLASAGELQKGNELALPSKYVNFLYLASHYEKLKGSPEDNEQKQLFVEQHKHYLDEIIEQISEFSKRVILADANLDKVLSAYNKHRDKPIREQAENIIHLFTLTNLGAPAAFKYFDTTIDRKRYTSTKEVLDATLIHQSITGLYETRIDLSQLGGDGGEAAAKGSSPAPGGTLGDQGSRGSDPLPEPRVTLTVEGIPTEFLVNTGAEHSVLTKPMGKMGSKRTVVAGATGSKVYPWTTKRLLKIGQKQVTHSFLVIPECPAPLLGRDLLTKLKAQIQFSTEGPQVTWEDRPAMCLVLNLEEEYRLHEKPVPPSIDPSWLQLFPMVWAEKAGMGLANQVPPVVVELKSDASPVAVRQYPMSKEAREGIRPHIQRFLDLGILVPCQSPWNTPLLPVKKPGTNDYRPVQDLREVNKRVQDIHPTVPNPYNLLSSLPPSHTWYSVLDLKDAFFCLKLHPNSQPLFAFEWRDPEKGNTGQLTWTRLPQGFKNSPTLFNEALHRDLASFRALNPQVVMLQYVDDLLVAAPTYRDCKEGTRRLLQELSKLGYRVSAKKAQLCREEVTYLGYLLKGGKRWLTPARKATVMKIPTPTTPRQVREFLGTAGFCRLWIPGFASLAAPLYPLTRPKVPFTWTEAHQEAFGRIKEALLSAPALALPDLTKPFALYVDEKEGVARGVLTQTLGPWRRPVAYLSKKLDPVASGWPTCLKAIAAVALLLKDADKLTLGQNVLVIAPHNLESIVRQPPDRWMTNARMTHYQSLLLNERVSFAPPAILNPATLLPVESDDTPIHICSEILAEETGTRPDLRDQPLPGVPAWYTDGSSFIMDGRRQAGAAIVDNKRTVWASNLPEGTSAQKAELIALTQALRLAEGKSINIYTDSRYAFATAHVHGAIYKQRGWLTSAGKDIKNKEEILALLEAIHLPKRVAIIHCPGHQRGTDPVATGNRKADEAAKQAAQSTRILTETTKNAGKRTADGSEFEKRTADGSEFESPKKKAKVE

SEQ ID NO: 7604 - protein, 2096 aa, synthetic construct
MPAAKRVKLDGGDKKYSIGLDIGTNSVGWAVITDEYKVPSKKFKVLGNTDRHSIKKNLIGALLFDSGETAEATRLKRTARRRYTRRKNRICYLQEIFSNEMAKVDDSFFHRLEESFLVEEDKKHERHPIFGNIVDEVAYHEKYPTIYHLRKKLVDSTDKADLRLIYLALAHMIKFRGHFLIEGDLNPDNSDVDKLFIQLVQTYNQLFEENPINASGVDAKAILSARLSKSRRLENLIAQLPGEKKNGLFGNLIALSLGLTPNFKSNFDLAEDAKLQLSKDTYDDDLDNLLAQIGDQYADLFLAAKNLSDAILLSDILRVNTEITKAPLSASMIKRYDEHHQDLTLLKALVRQQLPEKYKEIFFDQSKNGYAGYIDGGASQEEFYKFIKPILEKMDGTEELLVKLNREDLLRKQRTFDNGSIPHQIHLGELHAILRRQEDFYPFLKDNREKIEKILTFRIPYYVGPLARGNSRFAWMTRKSEETITPWNFEEVVDKGASAQSFIERMTNFDKNLPNEKVLPKHSLLYEYFTVYNELTKVKYVTEGMRKPAFLSGEQKKAIVDLLFKTNRKVTVKQLKEDYFKKIECFDSVEISGVEDRFNASLGTYHDLLKIIKDKDFLDNEENEDILEDIVLTLTLFEDREMIEERLKTYAHLFDDKVMKQLKRRRYTGWGRLSRKLINGIRDKQSGKTILDFLKSDGFANRNFMQLIHDDSLTFKEDIQKAQVSGQGDSLHEHIANLAGSPAIKKGILQTVKVVDELVKVMGRHKPENIVIEMARENQTTQKGQKNSRERMKRIEEGIKELGSQILKEHPVENTQLQNEKLYLYYLQNGRDMYVDQELDINRLSDYDVDHIVPQSFLKDDSIDNKVLTRSDKARGKSDNVPSEEVVKKMKNYWRQLLNAKLITQRKFDNLTKAERGGLSELDKAGFIKRQLVETRQITKHVAQILDSRMNTKYDENDKLIREVKVITLKSKLVSDFRKDFQFYKVREINNYHHAHDAYLNAVVGTALIKKYPKLESEFVYGDYKVYDVRKMIAKSEQEIGKATAKYFFYSNIMNFFKTEITLANGEIRKRPLIETNGETGEIVWDKGRDFATVRKVLSMPQVNIVKKTEVQTGGFSKESILPKRNSDKLIARKKDWDPKKYGGFDSPTVAYSVLVVAKVEKGKSKKLKSVKELLGITIMERSSFEKNPIDFLEAKGYKEVKKDLIIKLPKYSLFELENGRKRMLASAGELQKGNELALPSKYVNFLYLASHYEKLKGSPEDNEQKQLFVEQHKHYLDEIIEQISEFSKRVILADANLDKVLSAYNKHRDKPIREQAENIIHLFTLTNLGAPAAFKYFDTTIDRKRYTSTKEVLDATLIHQSITGLYETRIDLSQLGGDGGEAAAKGSSPAPGGTLNLEDEYRLYETSAEPEVSPGSTWLSDFPQAWAETGGMGLAVRQAPLIIPLKATSTPVSIKQYPMSQEAKLGIKPHIQRLLDQGILVPCQSPWNTPLLPVKKPGTNDYRPVQDLREVNKRVEDIHPTVPNPYNLLSGLPPSHRWYTVLDLKDAFFCLRLHPTSQPLFAFEWRDPGMGISGQLTWTRLPQGFKNSPTLFNEALHRDLADFRIQHPDLILLQYVDDILLAATSELDCQQGTRALLLTLGNLGYRASAKKAQLCQKQVKYLGYLLKEGQRWLTEARKETVMGQPTPKTPRQLREFLGTAGFCRLWIPGFAEMAAPLYPLTKPGTLFNWGPDQQKAYQEIKQALLTAPALGLPDLTKPFELFVDEKQGYAKGVLTQKLGPWRRPVAYLSKKLDPVAAGWPPCLRMVAAIAVLRKDAGKLTMGQPLVILAPHAVEALVKQPPDRWLSNARMTHYQAMLLDTDRVQFGPVVALNPATLLPLPEEGAPHDCLEILAETHGTRPDLTDQPIPDADHTWYTDGSSFLQEGQRKAGAAVTTETEVIWARALPAGTSAQRAELIALTQALKMAEGKRLNVYTDSRYAFATAHIHGEIYRRRGWLTSEGREIKNKSEILALLKALFLPKRLSIIHCLGHQKGDSAEARGNRLADQAAREAAIKTPPDTSTLLAGKRTADGSEFEKRTADGSEFESPKKKAKVE

SEQ ID NO: 7605 - protein, 2096 aa, synthetic construct
MPAAKRVKLDGGDKKYSIGLDIGTNSVGWAVITDEYKVPSKKFKVLGNTDRHSIKKNLIGALLFDSGETAEATRLKRTARRRYTRRKNRICYLQEIFSNEMAKVDDSFFHRLEESFLVEEDKKHERHPIFGNIVDEVAYHEKYPTIYHLRKKLVDSTDKADLRLIYLALAHMIKFRGHFLIEGDLNPDNSDVDKLFIQLVQTYNQLFEENPINASGVDAKAILSARLSKSRRLENLIAQLPGEKKNGLFGNLIALSLGLTPNFKSNFDLAEDAKLQLSKDTYDDDLDNLLAQIGDQYADLFLAAKNLSDAILLSDILRVNTEITKAPLSASMIKRYDEHHQDLTLLKALVRQQLPEKYKEIFFDQSKNGYAGYIDGGASQEEFYKFIKPILEKMDGTEELLVKLNREDLLRKQRTFDNGSIPHQIHLGELHAILRRQEDFYPFLKDNREKIEKILTFRIPYYVGPLARGNSRFAWMTRKSEETITPWNFEEVVDKGASAQSFIERMTNFDKNLPNEKVLPKHSLLYEYFTVYNELTKVKYVTEGMRKPAFLSGEQKKAIVDLLFKTNRKVTVKQLKEDYFKKIECFDSVEISGVEDRFNASLGTYHDLLKIIKDKDFLDNEENEDILEDIVLTLTLFEDREMIEERLKTYAHLFDDKVMKQLKRRRYTGWGRLSRKLINGIRDKQSGKTILDFLKSDGFANRNFMQLIHDDSLTFKEDIQKAQVSGQGDSLHEHIANLAGSPAIKKGILQTVKVVDELVKVMGRHKPENIVIEMARENQTTQKGQKNSRERMKRIEEGIKELGSQILKEHPVENTQLQNEKLYLYYLQNGRDMYVDQELDINRLSDYDVDHIVPQSFLKDDSIDNKVLTRSDKARGKSDNVPSEEVVKKMKNYWRQLLNAKLITQRKFDNLTKAERGGLSELDKAGFIKRQLVETRQITKHVAQILDSRMNTKYDENDKLIREVKVITLKSKLVSDFRKDFQFYKVREINNYHHAHDAYLNAVVGTALIKKYPKLESEFVYGDYKVYDVRKMIAKSEQEIGKATAKYFFYSNIMNFFKTEITLANGEIRKRPLIETNGETGEIVWDKGRDFATVRKVLSMPQVNIVKKTEVQTGGFSKESILPKRNSDKLIARKKDWDPKKYGGFDSPTVAYSVLVVAKVEKGKSKKLKSVKELLGITIMERSSFEKNPIDFLEAKGYKEVKKDLIIKLPKYSLFELENGRKRMLASAGELQKGNELALPSKYVNFLYLASHYEKLKGSPEDNEQKQLFVEQHKHYLDEIIEQISEFSKRVILADANLDKVLSAYNKHRDKPIREQAENIIHLFTLTNLGAPAAFKYFDTTIDRKRYTSTKEVLDATLIHQSITGLYETRIDLSQLGGDGGEAAAKGSSPAPGGTLNIEDEYRLHETSKEPDVSLGSTWLSDFPQAWAETGGMGLAVRQAPLIIPLKATSTPVSIKQYPMSQEARLGIKPHIQRLLDQGILVPCQSPWNTPLLPVKKPGTNDYRPVQDLREVNKRVEDIHPTVPNPYNLLSGLPPSHQWYTVLDLKDAFFCLRLHPTSQPLFAFEWRDPEMGISGQLTWTRLPQGFKNSPTLFDEALHRDLAGFRIQHPDLILLQYVDDLLLAATSELDCQQGTRALLQTLGDLGYRASAKKAQICQKQVKYLGYLLKEGQRWLTEARKETVMGQPIPKTPRQLREFLGTAGFCRLWIPGFAEMAAPLYPLTKTGTLFNWGPDQQKAFQEIKQALLTAPALGLPDLTKPFELFVDEKQGYAKGVLTQKLGPWRRPVAYLSKKLDPVAAGWPPCLRMVAAIAVLTKDAGKLTMGQPLVILAPHAVEALVKQPPDRWLSNARMTHYQALLLDTDRVQFGPVVALNPATLLPLPEEGLQHDCLDILAEAHGTRSDLMDQPLPDADHTWYTDGSSFLQEGQRKAGAAVTTETEVIWARALPAGTSAQRAELIALTQALKMAEGKKLNVYTDSRYAFATAHIHGEIYRRRGLLTSEGKEIKNKDEILALLKALFLPKRLSIIHCPGHQKGNSAEARGNRMADQAAREVATRETPETSTLLAGKRTADGSEFEKRTADGSEFESPKKKAKVE

SEQ ID NO: 7606 - protein, 2096 aa, synthetic construct
MPAAKRVKLDGGDKKYSIGLDIGTNSVGWAVITDEYKVPSKKFKVLGNTDRHSIKKNLIGALLFDSGETAEATRLKRTARRRYTRRKNRICYLQEIFSNEMAKVDDSFFHRLEESFLVEEDKKHERHPIFGNIVDEVAYHEKYPTIYHLRKKLVDSTDKADLRLIYLALAHMIKFRGHFLIEGDLNPDNSDVDKLFIQLVQTYNQLFEENPINASGVDAKAILSARLSKSRRLENLIAQLPGEKKNGLFGNLIALSLGLTPNFKSNFDLAEDAKLQLSKDTYDDDLDNLLAQIGDQYADLFLAAKNLSDAILLSDILRVNTEITKAPLSASMIKRYDEHHQDLTLLKALVRQQLPEKYKEIFFDQSKNGYAGYIDGGASQEEFYKFIKPILEKMDGTEELLVKLNREDLLRKQRTFDNGSIPHQIHLGELHAILRRQEDFYPFLKDNREKIEKILTFRIPYYVGPLARGNSRFAWMTRKSEETITPWNFEEVVDKGASAQSFIERMTNFDKNLPNEKVLPKHSLLYEYFTVYNELTKVKYVTEGMRKPAFLSGEQKKAIVDLLFKTNRKVTVKQLKEDYFKKIECFDSVEISGVEDRFNASLGTYHDLLKIIKDKDFLDNEENEDILEDIVLTLTLFEDREMIEERLKTYAHLFDDKVMKQLKRRRYTGWGRLSRKLINGIRDKQSGKTILDFLKSDGFANRNFMQLIHDDSLTFKEDIQKAQVSGQGDSLHEHIANLAGSPAIKKGILQTVKVVDELVKVMGRHKPENIVIEMARENQTTQKGQKNSRERMKRIEEGIKELGSQILKEHPVENTQLQNEKLYLYYLQNGRDMYVDQELDINRLSDYDVDHIVPQSFLKDDSIDNKVLTRSDKARGKSDNVPSEEVVKKMKNYWRQLLNAKLITQRKFDNLTKAERGGLSELDKAGFIKRQLVETRQITKHVAQILDSRMNTKYDENDKLIREVKVITLKSKLVSDFRKDFQFYKVREINNYHHAHDAYLNAVVGTALIKKYPKLESEFVYGDYKVYDVRKMIAKSEQEIGKATAKYFFYSNIMNFFKTEITLANGEIRKRPLIETNGETGEIVWDKGRDFATVRKVLSMPQVNIVKKTEVQTGGFSKESILPKRNSDKLIARKKDWDPKKYGGFDSPTVAYSVLVVAKVEKGKSKKLKSVKELLGITIMERSSFEKNPIDFLEAKGYKEVKKDLIIKLPKYSLFELENGRKRMLASAGELQKGNELALPSKYVNFLYLASHYEKLKGSPEDNEQKQLFVEQHKHYLDEIIEQISEFSKRVILADANLDKVLSAYNKHRDKPIREQAENIIHLFTLTNLGAPAAFKYFDTTIDRKRYTSTKEVLDATLIHQSITGLYETRIDLSQLGGDGGEAAAKGSSPAPGGTLNIEDEYRLHETSKEPDVSLGSTWLSDFPQAWAETGGMGLAVRQAPLIIPLKATSTPVSIKQYPMSQEARLGIKPHIQRLLDQGILVPCQSPWNTPLLPVKKPGTNDYRPVQDLREVNKRVEDIHPTVPNPYNLLSGLPPSHQWYTVLDLKDAFFCLRLHPTSQPLFAFEWRDPEMGISGQLTWTRLPQGFKNSPTLFNEALHRDLAGFRIQHPDLILLQYVDDLLLAATSELDCQQGTRALLQTLGDLGYRASAKKAQICQKQVKYLGYLLKEGQRWLTEARKETVMGQPIPKTPRQLREFLGKAGFCRLFIPGFAEMAAPLYPLTKPGTLFNWGPDQQKAFQEIKQALLTAPALGLPDLTKPFELFVDEKQGYAKGVLTQKLGPWRRPVAYLSKKLDPVAAGWPPCLRMVAAIAVLTKDAGKLTMGQPLVILAPHAVEALVKQPPDRWLSNARMTHYQALLLDTDRVQFGPVVALNPATLLPLPEEGLQHDCLDILAEAHGTRSDLMDQPLPDADHTWYTDGSSFLQEGQRKAGAAVTTETEVIWARALPAGTSAQRAELIALTQALKMAEGKKLNVYTDSRYAFATAHIHGEIYRRRGWLTSEGKEIKNKDEILALLKALFLPKRLSIIHCPGHQKGNSAEARGNRMADQAAREVATRETPETSTLLAGKRTADGSEFEKRTADGSEFESPKKKAKVE

SEQ ID NO: 7607 - protein, 2096 aa, synthetic construct
MPAAKRVKLDGGDKKYSIGLDIGTNSVGWAVITDEYKVPSKKFKVLGNTDRHSIKKNLIGALLFDSGETAEATRLKRTARRRYTRRKNRICYLQEIFSNEMAKVDDSFFHRLEESFLVEEDKKHERHPIFGNIVDEVAYHEKYPTIYHLRKKLVDSTDKADLRLIYLALAHMIKFRGHFLIEGDLNPDNSDVDKLFIQLVQTYNQLFEENPINASGVDAKAILSARLSKSRRLENLIAQLPGEKKNGLFGNLIALSLGLTPNFKSNFDLAEDAKLQLSKDTYDDDLDNLLAQIGDQYADLFLAAKNLSDAILLSDILRVNTEITKAPLSASMIKRYDEHHQDLTLLKALVRQQLPEKYKEIFFDQSKNGYAGYIDGGASQEEFYKFIKPILEKMDGTEELLVKLNREDLLRKQRTFDNGSIPHQIHLGELHAILRRQEDFYPFLKDNREKIEKILTFRIPYYVGPLARGNSRFAWMTRKSEETITPWNFEEVVDKGASAQSFIERMTNFDKNLPNEKVLPKHSLLYEYFTVYNELTKVKYVTEGMRKPAFLSGEQKKAIVDLLFKTNRKVTVKQLKEDYFKKIECFDSVEISGVEDRFNASLGTYHDLLKIIKDKDFLDNEENEDILEDIVLTLTLFEDREMIEERLKTYAHLFDDKVMKQLKRRRYTGWGRLSRKLINGIRDKQSGKTILDFLKSDGFANRNFMQLIHDDSLTFKEDIQKAQVSGQGDSLHEHIANLAGSPAIKKGILQTVKVVDELVKVMGRHKPENIVIEMARENQTTQKGQKNSRERMKRIEEGIKELGSQILKEHPVENTQLQNEKLYLYYLQNGRDMYVDQELDINRLSDYDVDHIVPQSFLKDDSIDNKVLTRSDKARGKSDNVPSEEVVKKMKNYWRQLLNAKLITQRKFDNLTKAERGGLSELDKAGFIKRQLVETRQITKHVAQILDSRMNTKYDENDKLIREVKVITLKSKLVSDFRKDFQFYKVREINNYHHAHDAYLNAVVGTALIKKYPKLESEFVYGDYKVYDVRKMIAKSEQEIGKATAKYFFYSNIMNFFKTEITLANGEIRKRPLIETNGETGEIVWDKGRDFATVRKVLSMPQVNIVKKTEVQTGGFSKESILPKRNSDKLIARKKDWDPKKYGGFDSPTVAYSVLVVAKVEKGKSKKLKSVKELLGITIMERSSFEKNPIDFLEAKGYKEVKKDLIIKLPKYSLFELENGRKRMLASAGELQKGNELALPSKYVNFLYLASHYEKLKGSPEDNEQKQLFVEQHKHYLDEIIEQISEFSKRVILADANLDKVLSAYNKHRDKPIREQAENIIHLFTLTNLGAPAAFKYFDTTIDRKRYTSTKEVLDATLIHQSITGLYETRIDLSQLGGDGGEAAAKGSSPAPGGTLNIEDEHRLHETSKEPDVSLGSTWLSDFPQAWAETGGMGLAVRQAPLIIPLKATSTPVSIKQYPMSQEARLGIKPHIQRLLDQGILVPCQSPWNTPLLPVKKPGTNDYRPVQDLREVNKRVEDIHPTVPNPYNLLSGLPPSHQWYTVLDLKDAFFCLRLHPTSQPLFAFEWRDPEMGISGQLTWTRLPQGFKNSPTLFDEALHRDLADFRIQHPDLILLQYVDDLLLAATSELDCQQGTRALLQTLGNLGYRASAKKAQICQKQVKYLGYLLKEGQRWLTEARKETVMGQPTPKTPRQLREFLGTAGFCRLWIPGFAEMAAPLYPLTKTGTLFNWGPDQQKAYQEIKQALLTAPALGLPDLTKPFELFVDEKQGYAKGVLTQKLGPWRRPVAYLSKKLDPVAAGWPPCLRMVAAIAVLTKDAGKLTMGQPLVILAPHAVEALVKQPPDRWLSNARMTHYQALLLDTDRVQFGPVVALNPATLLPLPEEGLQHNCLDILAEAHGTRPDLTDQPLPDADHTWYTDGSSLLQEGQRKAGAAVTTETEVIWAKALPAGTSAQRAELIALTQALKMAEGKKLNVYTDSRYAFATAHIHGEIYRRRGLLTSEGKEIKNKDEILALLKALFLPKRLSIIHCPGHQKGHSAEARGNRMADQAARKAAITETPDTSTLLAGKRTADGSEFEKRTADGSEFESPKKKAKVE

SEQ ID NO: 7608 - protein, 2024 aa, synthetic construct
MPAAKRVKLDGGDKKYSIGLDIGTNSVGWAVITDEYKVPSKKFKVLGNTDRHSIKKNLIGALLFDSGETAEATRLKRTARRRYTRRKNRICYLQEIFSNEMAKVDDSFFHRLEESFLVEEDKKHERHPIFGNIVDEVAYHEKYPTIYHLRKKLVDSTDKADLRLIYLALAHMIKFRGHFLIEGDLNPDNSDVDKLFIQLVQTYNQLFEENPINASGVDAKAILSARLSKSRRLENLIAQLPGEKKNGLFGNLIALSLGLTPNFKSNFDLAEDAKLQLSKDTYDDDLDNLLAQIGDQYADLFLAAKNLSDAILLSDILRVNTEITKAPLSASMIKRYDEHHQDLTLLKALVRQQLPEKYKEIFFDQSKNGYAGYIDGGASQEEFYKFIKPILEKMDGTEELLVKLNREDLLRKQRTFDNGSIPHQIHLGELHAILRRQEDFYPFLKDNREKIEKILTFRIPYYVGPLARGNSRFAWMTRKSEETITPWNFEEVVDKGASAQSFIERMTNFDKNLPNEKVLPKHSLLYEYFTVYNELTKVKYVTEGMRKPAFLSGEQKKAIVDLLFKTNRKVTVKQLKEDYFKKIECFDSVEISGVEDRFNASLGTYHDLLKIIKDKDFLDNEENEDILEDIVLTLTLFEDREMIEERLKTYAHLFDDKVMKQLKRRRYTGWGRLSRKLINGIRDKQSGKTILDFLKSDGFANRNFMQLIHDDSLTFKEDIQKAQVSGQGDSLHEHIANLAGSPAIKKGILQTVKVVDELVKVMGRHKPENIVIEMARENQTTQKGQKNSRERMKRIEEGIKELGSQILKEHPVENTQLQNEKLYLYYLQNGRDMYVDQELDINRLSDYDVDHIVPQSFLKDDSIDNKVLTRSDKARGKSDNVPSEEVVKKMKNYWRQLLNAKLITQRKFDNLTKAERGGLSELDKAGFIKRQLVETRQITKHVAQILDSRMNTKYDENDKLIREVKVITLKSKLVSDFRKDFQFYKVREINNYHHAHDAYLNAVVGTALIKKYPKLESEFVYGDYKVYDVRKMIAKSEQEIGKATAKYFFYSNIMNFFKTEITLANGEIRKRPLIETNGETGEIVWDKGRDFATVRKVLSMPQVNIVKKTEVQTGGFSKESILPKRNSDKLIARKKDWDPKKYGGFDSPTVAYSVLVVAKVEKGKSKKLKSVKELLGITIMERSSFEKNPIDFLEAKGYKEVKKDLIIKLPKYSLFELENGRKRMLASAGELQKGNELALPSKYVNFLYLASHYEKLKGSPEDNEQKQLFVEQHKHYLDEIIEQISEFSKRVILADANLDKVLSAYNKHRDKPIREQAENIIHLFTLTNLGAPAAFKYFDTTIDRKRYTSTKEVLDATLIHQSITGLYETRIDLSQLGGDGGEAAAKGSSPAPGGGRDIMKDIKVRLMTDSPDDSQDLMIGAIESNLFADQISWKSDQPVWLNQWPLKQEKLQALQQLVTEQLQLGHLEESNSPWNTPVFVIKKKSGKWRLLQDLRAVNATMHDMGALQPGLPSPVAPPKGWEIIIIDLQDCFFNIKLHPEDCKRFAFSVPSPNFKRPYQRFQWKVLPQGMKNSPTLCQKFVDKAILTVRDKYQDSYIVHYMDDILLAHPSRSIVDEILTSMIQALNKHGLVVSTEKIQKYDNLKYLGTHIQGDSVSYQKLQIRTDKLRTLNDFQKLLGNINWIRPFLKLTTGELKPLFEILNPDSNPISTRKLTPEACKALQLMNERLSTARVKRLDLSQPWSLCILKTEYTPTACLWQDGVVEWIHLPHISPKVITPYDIFCTQLIIKGRHRSKELFSKDPDYIVVPYTKVQFDLLLQEKEDWPISLLGFLGEVHFHLPKDPLLTFTLQTAIIFPHMTSTTPLEKGIVIFTDGSANGRSVTYIQGREPIIKENTQNTAQQAEIVAVITAFEEVSQPFNLYTDSKYVTGLFPEIETATLSPRTKIYTELKHLQRLIHKRQEKFYIGHIRGHTGLPGPLAQGNAYADSLTRILTAGKRTADGSEFEKRTADGSEFESPKKKAKVE

SEQ ID NO: 7609 - protein, 2176 aa, synthetic construct
MPAAKRVKLDGGDKKYSIGLDIGTNSVGWAVITDEYKVPSKKFKVLGNTDRHSIKKNLIGALLFDSGETAEATRLKRTARRRYTRRKNRICYLQEIFSNEMAKVDDSFFHRLEESFLVEEDKKHERHPIFGNIVDEVAYHEKYPTIYHLRKKLVDSTDKADLRLIYLALAHMIKFRGHFLIEGDLNPDNSDVDKLFIQLVQTYNQLFEENPINASGVDAKAILSARLSKSRRLENLIAQLPGEKKNGLFGNLIALSLGLTPNFKSNFDLAEDAKLQLSKDTYDDDLDNLLAQIGDQYADLFLAAKNLSDAILLSDILRVNTEITKAPLSASMIKRYDEHHQDLTLLKALVRQQLPEKYKEIFFDQSKNGYAGYIDGGASQEEFYKFIKPILEKMDGTEELLVKLNREDLLRKQRTFDNGSIPHQIHLGELHAILRRQEDFYPFLKDNREKIEKILTFRIPYYVGPLARGNSRFAWMTRKSEETITPWNFEEVVDKGASAQSFIERMTNFDKNLPNEKVLPKHSLLYEYFTVYNELTKVKYVTEGMRKPAFLSGEQKKAIVDLLFKTNRKVTVKQLKEDYFKKIECFDSVEISGVEDRFNASLGTYHDLLKIIKDKDFLDNEENEDILEDIVLTLTLFEDREMIEERLKTYAHLFDDKVMKQLKRRRYTGWGRLSRKLINGIRDKQSGKTILDFLKSDGFANRNFMQLIHDDSLTFKEDIQKAQVSGQGDSLHEHIANLAGSPAIKKGILQTVKVVDELVKVMGRHKPENIVIEMARENQTTQKGQKNSRERMKRIEEGIKELGSQILKEHPVENTQLQNEKLYLYYLQNGRDMYVDQELDINRLSDYDVDHIVPQSFLKDDSIDNKVLTRSDKARGKSDNVPSEEVVKKMKNYWRQLLNAKLITQRKFDNLTKAERGGLSELDKAGFIKRQLVETRQITKHVAQILDSRMNTKYDENDKLIREVKVITLKSKLVSDFRKDFQFYKVREINNYHHAHDAYLNAVVGTALIKKYPKLESEFVYGDYKVYDVRKMIAKSEQEIGKATAKYFFYSNIMNFFKTEITLANGEIRKRPLIETNGETGEIVWDKGRDFATVRKVLSMPQVNIVKKTEVQTGGFSKESILPKRNSDKLIARKKDWDPKKYGGFDSPTVAYSVLVVAKVEKGKSKKLKSVKELLGITIMERSSFEKNPIDFLEAKGYKEVKKDLIIKLPKYSLFELENGRKRMLASAGELQKGNELALPSKYVNFLYLASHYEKLKGSPEDNEQKQLFVEQHKHYLDEIIEQISEFSKRVILADANLDKVLSAYNKHRDKPIREQAENIIHLFTLTNLGAPAAFKYFDTTIDRKRYTSTKEVLDATLIHQSITGLYETRIDLSQLGGDGGEAAAKGSSPAPGGMDPLQLLQPLEAEIKGTKLKAHWNSGATITCVPEAFLEDERPIQTMLIKTIHGEKQQDVYYLTFKVQGRKVEAEVLASPYDYILLNPSDVPWLMKKPLQLTVLVPLHEYQERLLQQTALPKEQKELLQKLFLKYDALWQHWENQVGHRRIKPHNIATGTLAPRPQKQYPINPKAKPSIQIVIDDLLKQGVLIQQNSTMNTPVYPVPKPDGKWRMVLDYREVNKTIPLIAAQNQHSAGILSSIYRGKYKTTLDLTNGFWAHPITPESYWLTAFTWQGKQYCWTRLPQGFLNSPALFNADVVDLLKEIPNVQAYVDDIYISHDDPQEHLEQLEKIFSILLNAGYVVSLKKSEIAQREVEFLGFNITKEGRGLTDTFKQKLLNITPPKDLKQLQSILGKLNFARNFIPNYSELVKPLYTIVAPANGKFISWTEDNSNQLQHIISVLNQADNLEERNPETRLIIKVNSSPSAGYIRYYNEGSKRPIMYVNYIFSKAEAKFTQTEKLLTTMHKGLIKAMDLAMGQEILVYSPIVSMTKIQRTPLPERKALPVRWITWMTYLEDPRIQFHYDKSLPELQQIPNVTEDVIAKTKHPSEFAMVFYTDGSAIKHPDVNKSHSAGMGIAQVQFIPEYKIVHQWSIPLGDHTAQLAEIAAVEFACKKALKISGPVLIVTDSFYVAESANKELPYWKSNGFLNNKKKPLRHVSKWKSIAECLQLKPDIIIMHEKGHQQPMTTLHTEGNNLADKLATQGSYVVHAGKRTADGSEFEKRTADGSEFESPKKKAKVE

SEQ ID NO: 7610 - protein, 2087 aa, synthetic construct
MPAAKRVKLDGGDKKYSIGLDIGTNSVGWAVITDEYKVPSKKFKVLGNTDRHSIKKNLIGALLFDSGETAEATRLKRTARRRYTRRKNRICYLQEIFSNEMAKVDDSFFHRLEESFLVEEDKKHERHPIFGNIVDEVAYHEKYPTIYHLRKKLVDSTDKADLRLIYLALAHMIKFRGHFLIEGDLNPDNSDVDKLFIQLVQTYNQLFEENPINASGVDAKAILSARLSKSRRLENLIAQLPGEKKNGLFGNLIALSLGLTPNFKSNFDLAEDAKLQLSKDTYDDDLDNLLAQIGDQYADLFLAAKNLSDAILLSDILRVNTEITKAPLSASMIKRYDEHHQDLTLLKALVRQQLPEKYKEIFFDQSKNGYAGYIDGGASQEEFYKFIKPILEKMDGTEELLVKLNREDLLRKQRTFDNGSIPHQIHLGELHAILRRQEDFYPFLKDNREKIEKILTFRIPYYVGPLARGNSRFAWMTRKSEETITPWNFEEVVDKGASAQSFIERMTNFDKNLPNEKVLPKHSLLYEYFTVYNELTKVKYVTEGMRKPAFLSGEQKKAIVDLLFKTNRKVTVKQLKEDYFKKIECFDSVEISGVEDRFNASLGTYHDLLKIIKDKDFLDNEENEDILEDIVLTLTLFEDREMIEERLKTYAHLFDDKVMKQLKRRRYTGWGRLSRKLINGIRDKQSGKTILDFLKSDGFANRNFMQLIHDDSLTFKEDIQKAQVSGQGDSLHEHIANLAGSPAIKKGILQTVKVVDELVKVMGRHKPENIVIEMARENQTTQKGQKNSRERMKRIEEGIKELGSQILKEHPVENTQLQNEKLYLYYLQNGRDMYVDQELDINRLSDYDVDHIVPQSFLKDDSIDNKVLTRSDKARGKSDNVPSEEVVKKMKNYWRQLLNAKLITQRKFDNLTKAERGGLSELDKAGFIKRQLVETRQITKHVAQILDSRMNTKYDENDKLIREVKVITLKSKLVSDFRKDFQFYKVREINNYHHAHDAYLNAVVGTALIKKYPKLESEFVYGDYKVYDVRKMIAKSEQEIGKATAKYFFYSNIMNFFKTEITLANGEIRKRPLIETNGETGEIVWDKGRDFATVRKVLSMPQVNIVKKTEVQTGGFSKESILPKRNSDKLIARKKDWDPKKYGGFDSPTVAYSVLVVAKVEKGKSKKLKSVKELLGITIMERSSFEKNPIDFLEAKGYKEVKKDLIIKLPKYSLFELENGRKRMLASAGELQKGNELALPSKYVNFLYLASHYEKLKGSPEDNEQKQLFVEQHKHYLDEIIEQISEFSKRVILADANLDKVLSAYNKHRDKPIREQAENIIHLFTLTNLGAPAAFKYFDTTIDRKRYTSTKEVLDATLIHQSITGLYETRIDLSQLGGDGGEAAAKGSSPAPGGIPWLMKKPLQLTTLVPLQEYEERLLKQTMLTGSYKEKLQSLFLKYDALWQHWENQVGHRRIKPHHIATGTVNPRPQKQYPINPKAKASIQTVINDLLKQGVLIQQNSIMNTPVYPVPKPDGKWRMVLDYREVNKTIPLIAAQNQHSAGILSSIFRGKYKTTLDLSNGFWAHSITPESYWLTAFTWLGQQYCWTRLPQGFLNSPALFNADVVDLLKEVPNVQVYVDDIYISHDDPREHLEQLEKVFSLLLNAGYVVSLKKSEIAQHEVEFLGFNITKEGRGLTETFKQKLLNITPPRDLKQLQSILGKLNFARNFIPNFSELVKPLYNIIATAPGKYITWTTDNSQQLQNIISMLNSAENLEERNPEVRLIMKVNTSPSAGYIRFYNEFAKRPIMYLNYVYTKAEVKFTNTEKLLTTIHKGLIKALDLGMGQEILVYSPIVSMTKIQKTPLPERKALPIRWITWMSYLEDPRIQFHYDKTLPELQQVPTVTDDIIAKIKHPSEFSMVFYTDGSAIKHPNVNKSHNAGMGIAQVQFKPEFTVINTWSIPLGDHTAQLAEVAAVEFACKKALKIDGPVLIVTDSFYVAESVNKELPYWQSNGFFNNKKKPLKHVSKWKSIADCIQLKPDIIIIHEKGHQPTASTFHTEGNNLADKLATQGSYVVNAGKRTADGSEFEKRTADGSEFESPKKKAKVE

SEQ ID NO: 7611 - protein, 2176 aa, synthetic construct
MPAAKRVKLDGGDKKYSIGLDIGTNSVGWAVITDEYKVPSKKFKVLGNTDRHSIKKNLIGALLFDSGETAEATRLKRTARRRYTRRKNRICYLQEIFSNEMAKVDDSFFHRLEESFLVEEDKKHERHPIFGNIVDEVAYHEKYPTIYHLRKKLVDSTDKADLRLIYLALAHMIKFRGHFLIEGDLNPDNSDVDKLFIQLVQTYNQLFEENPINASGVDAKAILSARLSKSRRLENLIAQLPGEKKNGLFGNLIALSLGLTPNFKSNFDLAEDAKLQLSKDTYDDDLDNLLAQIGDQYADLFLAAKNLSDAILLSDILRVNTEITKAPLSASMIKRYDEHHQDLTLLKALVRQQLPEKYKEIFFDQSKNGYAGYIDGGASQEEFYKFIKPILEKMDGTEELLVKLNREDLLRKQRTFDNGSIPHQIHLGELHAILRRQEDFYPFLKDNREKIEKILTFRIPYYVGPLARGNSRFAWMTRKSEETITPWNFEEVVDKGASAQSFIERMTNFDKNLPNEKVLPKHSLLYEYFTVYNELTKVKYVTEGMRKPAFLSGEQKKAIVDLLFKTNRKVTVKQLKEDYFKKIECFDSVEISGVEDRFNASLGTYHDLLKIIKDKDFLDNEENEDILEDIVLTLTLFEDREMIEERLKTYAHLFDDKVMKQLKRRRYTGWGRLSRKLINGIRDKQSGKTILDFLKSDGFANRNFMQLIHDDSLTFKEDIQKAQVSGQGDSLHEHIANLAGSPAIKKGILQTVKVVDELVKVMGRHKPENIVIEMARENQTTQKGQKNSRERMKRIEEGIKELGSQILKEHPVENTQLQNEKLYLYYLQNGRDMYVDQELDINRLSDYDVDHIVPQSFLKDDSIDNKVLTRSDKARGKSDNVPSEEVVKKMKNYWRQLLNAKLITQRKFDNLTKAERGGLSELDKAGFIKRQLVETRQITKHVAQILDSRMNTKYDENDKLIREVKVITLKSKLVSDFRKDFQFYKVREINNYHHAHDAYLNAVVGTALIKKYPKLESEFVYGDYKVYDVRKMIAKSEQEIGKATAKYFFYSNIMNFFKTEITLANGEIRKRPLIETNGETGEIVWDKGRDFATVRKVLSMPQVNIVKKTEVQTGGFSKESILPKRNSDKLIARKKDWDPKKYGGFDSPTVAYSVLVVAKVEKGKSKKLKSVKELLGITIMERSSFEKNPIDFLEAKGYKEVKKDLIIKLPKYSLFELENGRKRMLASAGELQKGNELALPSKYVNFLYLASHYEKLKGSPEDNEQKQLFVEQHKHYLDEIIEQISEFSKRVILADANLDKVLSAYNKHRDKPIREQAENIIHLFTLTNLGAPAAFKYFDTTIDRKRYTSTKEVLDATLIHQSITGLYETRIDLSQLGGDGGEAAAKGSSPAPGGMDPLQLLQPLEAEIKGTKLKAHWNSGATITCVPQAFLEEEVPIKNIWIKTIHGEKEQPVYYLTFKIQGRKVEAEVISSPYDYILVSPSDIPWLMKKPLQLTTLVPLQEYEERLLKQTMLTGSYKEKLQSLFLKYDALWQHWENQVGHRRIKPHHIATGTVNPRPQKQYPINPKAKASIQTVINDLLKQGVLIQQNSIMNTPVYPVPKPDGKWRMVLDYREVNKTIPLIAAQNQHSAGILSSIFRGKYKTTLDLSNGFWAHSITPESYWLTAFTWLGQQYCWTRLPQGFLNSPALFNADVVDLLKEVPNVQVYVDDIYISHDDPREHLEQLEKVFSLLLNAGYVVSLKKSEIAQHEVEFLGFNITKEGRGLTETFKQKLLNITPPRDLKQLQSILGKLNFARNFIPNFSELVKPLYNIIATAPGKYITWTTDNSQQLQNIISMLNSAENLEERNPEVRLIMKVNTSPSAGYIRFYNEFAKRPIMYLNYVYTKAEVKFTNTEKLLTTIHKGLIKALDLGMGQEILVYSPIVSMTKIQKTPLPERKALPIRWITWMSYLEDPRIQFHYDKTLPELQQVPTVTDDIIAKIKHPSEFSMVFYTDGSAIKHPNVNKSHNAGMGIAQVQFKPEFTVINTWSIPLGDHTAQLAEVAAVEFACKKALKIDGPVLIVTDSFYVAESVNKELPYWQSNGFFNNKKKPLKHVSKWKSIADCIQLKPDIIIIHEKGHQPTASTFHTEGNNLADKLATQGSYVVNAGKRTADGSEFEKRTADGSEFESPKKKAKVE

SEQ ID NO: 7612 - protein, 2098 aa, synthetic construct
MPAAKRVKLDGGDKKYSIGLDIGTNSVGWAVITDEYKVPSKKFKVLGNTDRHSIKKNLIGALLFDSGETAEATRLKRTARRRYTRRKNRICYLQEIFSNEMAKVDDSFFHRLEESFLVEEDKKHERHPIFGNIVDEVAYHEKYPTIYHLRKKLVDSTDKADLRLIYLALAHMIKFRGHFLIEGDLNPDNSDVDKLFIQLVQTYNQLFEENPINASGVDAKAILSARLSKSRRLENLIAQLPGEKKNGLFGNLIALSLGLTPNFKSNFDLAEDAKLQLSKDTYDDDLDNLLAQIGDQYADLFLAAKNLSDAILLSDILRVNTEITKAPLSASMIKRYDEHHQDLTLLKALVRQQLPEKYKEIFFDQSKNGYAGYIDGGASQEEFYKFIKPILEKMDGTEELLVKLNREDLLRKQRTFDNGSIPHQIHLGELHAILRRQEDFYPFLKDNREKIEKILTFRIPYYVGPLARGNSRFAWMTRKSEETITPWNFEEVVDKGASAQSFIERMTNFDKNLPNEKVLPKHSLLYEYFTVYNELTKVKYVTEGMRKPAFLSGEQKKAIVDLLFKTNRKVTVKQLKEDYFKKIECFDSVEISGVEDRFNASLGTYHDLLKIIKDKDFLDNEENEDILEDIVLTLTLFEDREMIEERLKTYAHLFDDKVMKQLKRRRYTGWGRLSRKLINGIRDKQSGKTILDFLKSDGFANRNFMQLIHDDSLTFKEDIQKAQVSGQGDSLHEHIANLAGSPAIKKGILQTVKVVDELVKVMGRHKPENIVIEMARENQTTQKGQKNSRERMKRIEEGIKELGSQILKEHPVENTQLQNEKLYLYYLQNGRDMYVDQELDINRLSDYDVDHIVPQSFLKDDSIDNKVLTRSDKARGKSDNVPSEEVVKKMKNYWRQLLNAKLITQRKFDNLTKAERGGLSELDKAGFIKRQLVETRQITKHVAQILDSRMNTKYDENDKLIREVKVITLKSKLVSDFRKDFQFYKVREINNYHHAHDAYLNAVVGTALIKKYPKLESEFVYGDYKVYDVRKMIAKSEQEIGKATAKYFFYSNIMNFFKTEITLANGEIRKRPLIETNGETGEIVWDKGRDFATVRKVLSMPQVNIVKKTEVQTGGFSKESILPKRNSDKLIARKKDWDPKKYGGFDSPTVAYSVLVVAKVEKGKSKKLKSVKELLGITIMERSSFEKNPIDFLEAKGYKEVKKDLIIKLPKYSLFELENGRKRMLASAGELQKGNELALPSKYVNFLYLASHYEKLKGSPEDNEQKQLFVEQHKHYLDEIIEQISEFSKRVILADANLDKVLSAYNKHRDKPIREQAENIIHLFTLTNLGAPAAFKYFDTTIDRKRYTSTKEVLDATLIHQSITGLYETRIDLSQLGGDGGEAAAKPAPGSSGGTAPLEEEYRLFLEAPIQNVTLLEQWKREIPKVWAEINPPGLASTQAPIHVQLLSTALPVRVRQYPITLEAKRSLRETIRKFRAAGILRPVHSPWNTPLLPVRKSGTSEYRMVQDLREVNKRVETIHPTVPNPYTLLSLLPPDRIWYSVLDLKDAFFCIPLAPESQLIFAFEWADAEEGESGQLTWTRLPQGFKNSPTLFNEALNRDLQGFRLDHPSVSLLQYVDDLLIAADTQAACLSATRDLLMTLAELGYRVSGKKAQLCQEEVTYLGFKIHKGSRSLSNSRTQAILQIPVPKTKRQVREFLGKIGYCRLFIPGFAELAQPLYAATRPGNDPLVWGEKEEEAFQSLKLALTQPPALALPSLDKPFQLFVEETSGAAKGVLTQALGPWKRPVAYLSKRLDPVAAGWPRCLRAIAAAALLTREASKLTFGQDIEITSSHNLESLLRSPPDKWLTNARITQYQVLLLDPPRVRFKQTAALNPATLLPETDDTLPIHHCLDTLDSLTSTRPDLTDQPLAQAEATLFTDGSSYIRDGKRYAGAAVVTLDSVIWAEPLPIGTSAQKAELIALTKALEWSKDKSVNIYTDSRYAFATLHVHGMIYRERGWLTAGGKAIKNAPEILALLTAVWLPKRVAVMHCKGHQKDDAPTSTGNRRADEVAREVAIRPLSTQATISAGKRTADGSEFEKRTADGSEFESPKKKAKVE

SEQ ID NO: 7613 - protein, 2102 aa, synthetic construct
MPAAKRVKLDGGDKKYSIGLDIGTNSVGWAVITDEYKVPSKKFKVLGNTDRHSIKKNLIGALLFDSGETAEATRLKRTARRRYTRRKNRICYLQEIFSNEMAKVDDSFFHRLEESFLVEEDKKHERHPIFGNIVDEVAYHEKYPTIYHLRKKLVDSTDKADLRLIYLALAHMIKFRGHFLIEGDLNPDNSDVDKLFIQLVQTYNQLFEENPINASGVDAKAILSARLSKSRRLENLIAQLPGEKKNGLFGNLIALSLGLTPNFKSNFDLAEDAKLQLSKDTYDDDLDNLLAQIGDQYADLFLAAKNLSDAILLSDILRVNTEITKAPLSASMIKRYDEHHQDLTLLKALVRQQLPEKYKEIFFDQSKNGYAGYIDGGASQEEFYKFIKPILEKMDGTEELLVKLNREDLLRKQRTFDNGSIPHQIHLGELHAILRRQEDFYPFLKDNREKIEKILTFRIPYYVGPLARGNSRFAWMTRKSEETITPWNFEEVVDKGASAQSFIERMTNFDKNLPNEKVLPKHSLLYEYFTVYNELTKVKYVTEGMRKPAFLSGEQKKAIVDLLFKTNRKVTVKQLKEDYFKKIECFDSVEISGVEDRFNASLGTYHDLLKIIKDKDFLDNEENEDILEDIVLTLTLFEDREMIEERLKTYAHLFDDKVMKQLKRRRYTGWGRLSRKLINGIRDKQSGKTILDFLKSDGFANRNFMQLIHDDSLTFKEDIQKAQVSGQGDSLHEHIANLAGSPAIKKGILQTVKVVDELVKVMGRHKPENIVIEMARENQTTQKGQKNSRERMKRIEEGIKELGSQILKEHPVENTQLQNEKLYLYYLQNGRDMYVDQELDINRLSDYDVDHIVPQSFLKDDSIDNKVLTRSDKARGKSDNVPSEEVVKKMKNYWRQLLNAKLITQRKFDNLTKAERGGLSELDKAGFIKRQLVETRQITKHVAQILDSRMNTKYDENDKLIREVKVITLKSKLVSDFRKDFQFYKVREINNYHHAHDAYLNAVVGTALIKKYPKLESEFVYGDYKVYDVRKMIAKSEQEIGKATAKYFFYSNIMNFFKTEITLANGEIRKRPLIETNGETGEIVWDKGRDFATVRKVLSMPQVNIVKKTEVQTGGFSKESILPKRNSDKLIARKKDWDPKKYGGFDSPTVAYSVLVVAKVEKGKSKKLKSVKELLGITIMERSSFEKNPIDFLEAKGYKEVKKDLIIKLPKYSLFELENGRKRMLASAGELQKGNELALPSKYVNFLYLASHYEKLKGSPEDNEQKQLFVEQHKHYLDEIIEQISEFSKRVILADANLDKVLSAYNKHRDKPIREQAENIIHLFTLTNLGAPAAFKYFDTTIDRKRYTSTKEVLDATLIHQSITGLYETRIDLSQLGGDGGEAAAKPAPGSSGGTVSLQDEHRLFDIPVTTSLPDVWLQDFPQAWAETGGLGRAKCQAPIIIDLKPTAVPVSIKQYPMSLEAHMGIRQHIIKFLELGVLRPCRSPWNTPLLPVKKPGTQDYRPVQDLREINKRTVDIHPTVPNPYNLLSTLKPDYSWYTVLDLKDAFFCLPLAPQSQELFAFEWKDPERGISGQLTWTRLPQGFKNSPTLFNEALHRDLTDFRTQHPEVTLLQYVDDLLLAAPTKKACTQGTRHLLQELGEKGYRASAKKAQICQTKVTYLGYILSEGKRWLTPGRIETVARIPPPRNPREVREFLGTAGFCRLWIPGFAELAAPLYALTKPSTPFTWQTEHQLAFEALKKALLSAPALGLPDTSKPFTLFLDERQGIAKGVLTQKLGPWKRPVAYLSKKLDPVAAGWPPCLRIMAATAMLVKDSAKLTLGQPLTVITPHTLEAIVRQPPDRWITNARLTHYQALLLDTDRVQFGPPVTLNPATLLPVPENQPSPHDCRQVLAETHGTREDLKDQELPDADHTWYTDGSSYLDSGTRRAGAAVVDGHNTIWAQSLPPGTSAQKAELIALTKALELSKGKKANIYTDSRYAFATAHTHGSIYERRGWLTSEGKEIKNKAEIIALLKALFLPQEVAIIHCPGHQKGQDPVAVGNRQADRVARQAAMAEVLTLATEPDNTSHITAGKRTADGSEFEKRTADGSEFESPKKKAKVE

SEQ ID NO: 7614 - protein, 2173 aa, synthetic construct
MPAAKRVKLDGGDKKYSIGLDIGTNSVGWAVITDEYKVPSKKFKVLGNTDRHSIKKNLIGALLFDSGETAEATRLKRTARRRYTRRKNRICYLQEIFSNEMAKVDDSFFHRLEESFLVEEDKKHERHPIFGNIVDEVAYHEKYPTIYHLRKKLVDSTDKADLRLIYLALAHMIKFRGHFLIEGDLNPDNSDVDKLFIQLVQTYNQLFEENPINASGVDAKAILSARLSKSRRLENLIAQLPGEKKNGLFGNLIALSLGLTPNFKSNFDLAEDAKLQLSKDTYDDDLDNLLAQIGDQYADLFLAAKNLSDAILLSDILRVNTEITKAPLSASMIKRYDEHHQDLTLLKALVRQQLPEKYKEIFFDQSKNGYAGYIDGGASQEEFYKFIKPILEKMDGTEELLVKLNREDLLRKQRTFDNGSIPHQIHLGELHAILRRQEDFYPFLKDNREKIEKILTFRIPYYVGPLARGNSRFAWMTRKSEETITPWNFEEVVDKGASAQSFIERMTNFDKNLPNEKVLPKHSLLYEYFTVYNELTKVKYVTEGMRKPAFLSGEQKKAIVDLLFKTNRKVTVKQLKEDYFKKIECFDSVEISGVEDRFNASLGTYHDLLKIIKDKDFLDNEENEDILEDIVLTLTLFEDREMIEERLKTYAHLFDDKVMKQLKRRRYTGWGRLSRKLINGIRDKQSGKTILDFLKSDGFANRNFMQLIHDDSLTFKEDIQKAQVSGQGDSLHEHIANLAGSPAIKKGILQTVKVVDELVKVMGRHKPENIVIEMARENQTTQKGQKNSRERMKRIEEGIKELGSQILKEHPVENTQLQNEKLYLYYLQNGRDMYVDQELDINRLSDYDVDHIVPQSFLKDDSIDNKVLTRSDKARGKSDNVPSEEVVKKMKNYWRQLLNAKLITQRKFDNLTKAERGGLSELDKAGFIKRQLVETRQITKHVAQILDSRMNTKYDENDKLIREVKVITLKSKLVSDFRKDFQFYKVREINNYHHAHDAYLNAVVGTALIKKYPKLESEFVYGDYKVYDVRKMIAKSEQEIGKATAKYFFYSNIMNFFKTEITLANGEIRKRPLIETNGETGEIVWDKGRDFATVRKVLSMPQVNIVKKTEVQTGGFSKESILPKRNSDKLIARKKDWDPKKYGGFDSPTVAYSVLVVAKVEKGKSKKLKSVKELLGITIMERSSFEKNPIDFLEAKGYKEVKKDLIIKLPKYSLFELENGRKRMLASAGELQKGNELALPSKYVNFLYLASHYEKLKGSPEDNEQKQLFVEQHKHYLDEIIEQISEFSKRVILADANLDKVLSAYNKHRDKPIREQAENIIHLFTLTNLGAPAAFKYFDTTIDRKRYTSTKEVLDATLIHQSITGLYETRIDLSQLGGDGGEAAAKPAPGSSGGMDLLKPLTVERKGVKIKGYWNSQADITCVPKDLLQGEEPVRQQNVTTIHGTQEGDVYYVNLKIDGRRINTEVIGTTLDYAIITPGDVPWILKKPLELTIKLDLEEQQGTLLNNSILSKKGKEELKQLFEKYSALWQSWENQVGHRRIRPHKIATGTVKPTPQKQYHINPKAKPDIQIVINDLLKQGVLIQKESTMNTPVYPVPKPNGRWRMVLDYRAVNKVTPLIAVQNQHSYGILGSLFKGRYKTTIDLSNGFWAHPIVPEDYWITAFTWQGKQYCWTVLPQGFLNSPGLFTGDVVDLLQGIPNVEVYVDDVYISHDSEKEHLEYLDILFNRLKEAGYIISLKKSNIANSIVDFLGFQITNEGRGLTDTFKEKLENITAPTTLKQLQSILGLLNFARNFIPDFTELIAPLYALIPKSTKNYVPWQIEHSTTLETLITKLNGAEYLQGRKGDKTLIMKVNASYTTGYIRYYNEGEKKPISYVSIVFSKTELKFTELEKLLTTVHKGLLKALDLSMGQNIHVYSPIVSMQNIQKTPQTAKKALASRWLSWLSYLEDPRIRFFYDPQMPALKDLPAVDTGKDNKKHPSNFQHIFYTDGSAITSPTKEGHLNAGMGIVYFINKDGNLQKQQEWSISLGNHTAQFAEIAAFEFALKKCLPLGGNILVVTDSNYVAKAYNEELDVWASNGFVNNRKKPLKHISKWKSVADLKRLRPDVVVTHEPGHQKLDSSPHAYGNNLADQLATQASFKVHAGKRTADGSEFEKRTADGSEFESPKKKAKVE

SEQ ID NO: 7615 - protein, 2095 aa, synthetic construct
MPAAKRVKLDGGDKKYSIGLDIGTNSVGWAVITDEYKVPSKKFKVLGNTDRHSIKKNLIGALLFDSGETAEATRLKRTARRRYTRRKNRICYLQEIFSNEMAKVDDSFFHRLEESFLVEEDKKHERHPIFGNIVDEVAYHEKYPTIYHLRKKLVDSTDKADLRLIYLALAHMIKFRGHFLIEGDLNPDNSDVDKLFIQLVQTYNQLFEENPINASGVDAKAILSARLSKSRRLENLIAQLPGEKKNGLFGNLIALSLGLTPNFKSNFDLAEDAKLQLSKDTYDDDLDNLLAQIGDQYADLFLAAKNLSDAILLSDILRVNTEITKAPLSASMIKRYDEHHQDLTLLKALVRQQLPEKYKEIFFDQSKNGYAGYIDGGASQEEFYKFIKPILEKMDGTEELLVKLNREDLLRKQRTFDNGSIPHQIHLGELHAILRRQEDFYPFLKDNREKIEKILTFRIPYYVGPLARGNSRFAWMTRKSEETITPWNFEEVVDKGASAQSFIERMTNFDKNLPNEKVLPKHSLLYEYFTVYNELTKVKYVTEGMRKPAFLSGEQKKAIVDLLFKTNRKVTVKQLKEDYFKKIECFDSVEISGVEDRFNASLGTYHDLLKIIKDKDFLDNEENEDILEDIVLTLTLFEDREMIEERLKTYAHLFDDKVMKQLKRRRYTGWGRLSRKLINGIRDKQSGKTILDFLKSDGFANRNFMQLIHDDSLTFKEDIQKAQVSGQGDSLHEHIANLAGSPAIKKGILQTVKVVDELVKVMGRHKPENIVIEMARENQTTQKGQKNSRERMKRIEEGIKELGSQILKEHPVENTQLQNEKLYLYYLQNGRDMYVDQELDINRLSDYDVDHIVPQSFLKDDSIDNKVLTRSDKARGKSDNVPSEEVVKKMKNYWRQLLNAKLITQRKFDNLTKAERGGLSELDKAGFIKRQLVETRQITKHVAQILDSRMNTKYDENDKLIREVKVITLKSKLVSDFRKDFQFYKVREINNYHHAHDAYLNAVVGTALIKKYPKLESEFVYGDYKVYDVRKMIAKSEQEIGKATAKYFFYSNIMNFFKTEITLANGEIRKRPLIETNGETGEIVWDKGRDFATVRKVLSMPQVNIVKKTEVQTGGFSKESILPKRNSDKLIARKKDWDPKKYGGFDSPTVAYSVLVVAKVEKGKSKKLKSVKELLGITIMERSSFEKNPIDFLEAKGYKEVKKDLIIKLPKYSLFELENGRKRMLASAGELQKGNELALPSKYVNFLYLASHYEKLKGSPEDNEQKQLFVEQHKHYLDEIIEQISEFSKRVILADANLDKVLSAYNKHRDKPIREQAENIIHLFTLTNLGAPAAFKYFDTTIDRKRYTSTKEVLDATLIHQSITGLYETRIDLSQLGGDGGEAAAKPAPGSSGGTLQLEEEYRLFEPESTQKQEMDIWLKNFPQAWAETGGMGTAHCQAPVLIQLKATATPISIRQYPMPHEAYQGIKPHIRRMLDQGILKPCQSPWNTPLLPVKKPGTEDYRPVQDLREVNKRVEDIHPTVPNPYNLLSTLPPSHPWYTVLDLKDAFFCLRLHSESQLLFAFEWRDPEIGLSGQLTWTRLPQGFKNSPTLFNEALHSDLADFRVRYPALVLLQYVDDLLLAAATRTECLEGTKALLETLGNKGYRASAKKAQICLQEVTYLGYSLKDGQRWLTKARKEAILSIPVPKNSRQVREFLGKAGYCRLFIPGFAELAAPLYPLTRPGTLFQWGTEQQLAFEDIKKALLSSPALGLPDITKPFELFIDENSGFAKGVLVQKLGPWKRPVAYLSKKLDTVASGWPPCLRMVAAIAILVKDAGKLTLGQPLTILTSHPVEALVRQPPNKWLSNARMTHYQAMLLDAERVHFGPTVSLNPATLLPLPSGGNHHDCLQILAETHGTRPDLTDQPLPDADLTWYTDGSSFIRNGEREAGAAVTTESEVIWAAPLPPGTSAQRAELIALTQALKMAEGKKLTVYTDSRYAFATTHVHGEIYRRRGWLTSEGKEIKNKNEILALLEALFLPKRLSIIHCPGHQKGDSPQAKGNRLADDTAKKAATETHSSLTVLPAGKRTADGSEFEKRTADGSEFESPKKKAKVE

SEQ ID NO: 7616 - protein, 2087 aa, synthetic construct
MPAAKRVKLDGGDKKYSIGLDIGTNSVGWAVITDEYKVPSKKFKVLGNTDRHSIKKNLIGALLFDSGETAEATRLKRTARRRYTRRKNRICYLQEIFSNEMAKVDDSFFHRLEESFLVEEDKKHERHPIFGNIVDEVAYHEKYPTIYHLRKKLVDSTDKADLRLIYLALAHMIKFRGHFLIEGDLNPDNSDVDKLFIQLVQTYNQLFEENPINASGVDAKAILSARLSKSRRLENLIAQLPGEKKNGLFGNLIALSLGLTPNFKSNFDLAEDAKLQLSKDTYDDDLDNLLAQIGDQYADLFLAAKNLSDAILLSDILRVNTEITKAPLSASMIKRYDEHHQDLTLLKALVRQQLPEKYKEIFFDQSKNGYAGYIDGGASQEEFYKFIKPILEKMDGTEELLVKLNREDLLRKQRTFDNGSIPHQIHLGELHAILRRQEDFYPFLKDNREKIEKILTFRIPYYVGPLARGNSRFAWMTRKSEETITPWNFEEVVDKGASAQSFIERMTNFDKNLPNEKVLPKHSLLYEYFTVYNELTKVKYVTEGMRKPAFLSGEQKKAIVDLLFKTNRKVTVKQLKEDYFKKIECFDSVEISGVEDRFNASLGTYHDLLKIIKDKDFLDNEENEDILEDIVLTLTLFEDREMIEERLKTYAHLFDDKVMKQLKRRRYTGWGRLSRKLINGIRDKQSGKTILDFLKSDGFANRNFMQLIHDDSLTFKEDIQKAQVSGQGDSLHEHIANLAGSPAIKKGILQTVKVVDELVKVMGRHKPENIVIEMARENQTTQKGQKNSRERMKRIEEGIKELGSQILKEHPVENTQLQNEKLYLYYLQNGRDMYVDQELDINRLSDYDVDHIVPQSFLKDDSIDNKVLTRSDKARGKSDNVPSEEVVKKMKNYWRQLLNAKLITQRKFDNLTKAERGGLSELDKAGFIKRQLVETRQITKHVAQILDSRMNTKYDENDKLIREVKVITLKSKLVSDFRKDFQFYKVREINNYHHAHDAYLNAVVGTALIKKYPKLESEFVYGDYKVYDVRKMIAKSEQEIGKATAKYFFYSNIMNFFKTEITLANGEIRKRPLIETNGETGEIVWDKGRDFATVRKVLSMPQVNIVKKTEVQTGGFSKESILPKRNSDKLIARKKDWDPKKYGGFDSPTVAYSVLVVAKVEKGKSKKLKSVKELLGITIMERSSFEKNPIDFLEAKGYKEVKKDLIIKLPKYSLFELENGRKRMLASAGELQKGNELALPSKYVNFLYLASHYEKLKGSPEDNEQKQLFVEQHKHYLDEIIEQISEFSKRVILADANLDKVLSAYNKHRDKPIREQAENIIHLFTLTNLGAPAAFKYFDTTIDRKRYTSTKEVLDATLIHQSITGLYETRIDLSQLGGDGGEAAAKPAPGSSGGVPWLTQQPLQLTILVPLQEYQEKILSKTALPEDQKQQLKTLFVKYDNLWQHWENQVGHRKIRPHNIATGDYPPRPQKQYPINPKAKPSIQIVIDDLLKQGVLTPQNSTMNTPVYPVPKPDGRWRMVLDYREVNKTIPLTAAQNQHSAGILATIVRQKYKTTLDLANGFWAHPITPESYWLTAFTWQGKQYCWTRLPQGFLNSPALFNADVVDLLKEIPNVQVYVDDIYLSHDDPKEHVQQLEKVFQILLQAGYVVSLKKSEIGQKTVEFLGFNITKEGRGLTDTFKTKLLNITPPKDLKQLQSILGKLNFARNFIPNFAELVQPLYNLIAPAKGKYIEWSEENTKQLNMVIEALNTASNLEERLPEQRLVIKVNTSPSAGYVRYYNETGKKPIMYLNYVFSKAELKFSMLEKLLTTMHKALIKAMDLAMGQEILVYSPIVSMTKIQKTPLPERKALPIRWITWMTYLEDPRIQFHYDKTLPELKHIPDVYTSSQSPVKHPSQYEGVFYTDGSAIKSPDPTKSNNAGMGIVHATYKPEYQVLNQWSIPLGNHTAQMAEIAAVEFACKKALKIPGPVLVITDSFYVAESANKELPYWKSNGFVNNKKKPLKHISKWKSIAECLSMKPDITIQHEKGISLQIPVFILKGNALADKLATQGSYVVNAGKRTADGSEFEKRTADGSEFESPKKKAKVE

SEQ ID NO: 7617 - protein, 2094 aa, synthetic construct
MPAAKRVKLDGGDKKYSIGLDIGTNSVGWAVITDEYKVPSKKFKVLGNTDRHSIKKNLIGALLFDSGETAEATRLKRTARRRYTRRKNRICYLQEIFSNEMAKVDDSFFHRLEESFLVEEDKKHERHPIFGNIVDEVAYHEKYPTIYHLRKKLVDSTDKADLRLIYLALAHMIKFRGHFLIEGDLNPDNSDVDKLFIQLVQTYNQLFEENPINASGVDAKAILSARLSKSRRLENLIAQLPGEKKNGLFGNLIALSLGLTPNFKSNFDLAEDAKLQLSKDTYDDDLDNLLAQIGDQYADLFLAAKNLSDAILLSDILRVNTEITKAPLSASMIKRYDEHHQDLTLLKALVRQQLPEKYKEIFFDQSKNGYAGYIDGGASQEEFYKFIKPILEKMDGTEELLVKLNREDLLRKQRTFDNGSIPHQIHLGELHAILRRQEDFYPFLKDNREKIEKILTFRIPYYVGPLARGNSRFAWMTRKSEETITPWNFEEVVDKGASAQSFIERMTNFDKNLPNEKVLPKHSLLYEYFTVYNELTKVKYVTEGMRKPAFLSGEQKKAIVDLLFKTNRKVTVKQLKEDYFKKIECFDSVEISGVEDRFNASLGTYHDLLKIIKDKDFLDNEENEDILEDIVLTLTLFEDREMIEERLKTYAHLFDDKVMKQLKRRRYTGWGRLSRKLINGIRDKQSGKTILDFLKSDGFANRNFMQLIHDDSLTFKEDIQKAQVSGQGDSLHEHIANLAGSPAIKKGILQTVKVVDELVKVMGRHKPENIVIEMARENQTTQKGQKNSRERMKRIEEGIKELGSQILKEHPVENTQLQNEKLYLYYLQNGRDMYVDQELDINRLSDYDVDHIVPQSFLKDDSIDNKVLTRSDKARGKSDNVPSEEVVKKMKNYWRQLLNAKLITQRKFDNLTKAERGGLSELDKAGFIKRQLVETRQITKHVAQILDSRMNTKYDENDKLIREVKVITLKSKLVSDFRKDFQFYKVREINNYHHAHDAYLNAVVGTALIKKYPKLESEFVYGDYKVYDVRKMIAKSEQEIGKATAKYFFYSNIMNFFKTEITLANGEIRKRPLIETNGETGEIVWDKGRDFATVRKVLSMPQVNIVKKTEVQTGGFSKESILPKRNSDKLIARKKDWDPKKYGGFDSPTVAYSVLVVAKVEKGKSKKLKSVKELLGITIMERSSFEKNPIDFLEAKGYKEVKKDLIIKLPKYSLFELENGRKRMLASAGELQKGNELALPSKYVNFLYLASHYEKLKGSPEDNEQKQLFVEQHKHYLDEIIEQISEFSKRVILADANLDKVLSAYNKHRDKPIREQAENIIHLFTLTNLGAPAAFKYFDTTIDRKRYTSTKEVLDATLIHQSITGLYETRIDLSQLGGDGGEAAAKPAPGSSGGVLNLEEEYRLHEKPVPSSIDPSWLQLFPTVWAERAGMGLANQVPPVVVELRSGASPVAVRQYPMSKEAREGIRPHIQKFLDLGVLVPCRSPWNTPLLPVKKPGTNDYRPVQDLREINKRVQDIHPTVPNPYNLLSSLPPSYTWYSVLDLKDAFFCLRLHPNSQPLFAFEWKDPEKGNTGQLTWTRLPQGFKNSPTLFNEALHRDLAPFRALNPQVVLLQYVDDLLVAAPTYEDCKKGTQKLLQELSKLGYRVSAKKAQLCQREVTYLGYLLKEGKRWLTPARKATVMKIPVPTTPRQVREFLGTAGFCRLWIPGFASLAAPLYPLTKPSIPFIWTEEHQQAFDHIKKALLSAPALALPDLTKPFTLYIDERAGVARGVLTQTLGPWRRPVAYLSKKLDPVASGWPTCLKAVAAVALLLKDADKLTLGQNVTVIASHSLESIVRQPPDRWMTNARMTHYQSLLLNERVSFAPPAVLNPATLLPVESEATPVHRCSEILAEETGTRRDLEDQPLPGVPTWYTDGSSFITEGKRRAGAPIVDGKRTVWASSLPEGTSAQKAELVALTQALRLAEGKNINIYTDSRYAFATAHIHGAIYKQRGWLTSAGKDIKNKEEILALLEAIHLPRRVAIIHCPGHQRGSNPVATGNRRADEAAKQAALSTRVLAGTTKPAGKRTADGSEFEKRTADGSEFESPKKKAKVE

SEQ ID NO: 7618 - protein, 2094 aa, synthetic construct
MPAAKRVKLDGGDKKYSIGLDIGTNSVGWAVITDEYKVPSKKFKVLGNTDRHSIKKNLIGALLFDSGETAEATRLKRTARRRYTRRKNRICYLQEIFSNEMAKVDDSFFHRLEESFLVEEDKKHERHPIFGNIVDEVAYHEKYPTIYHLRKKLVDSTDKADLRLIYLALAHMIKFRGHFLIEGDLNPDNSDVDKLFIQLVQTYNQLFEENPINASGVDAKAILSARLSKSRRLENLIAQLPGEKKNGLFGNLIALSLGLTPNFKSNFDLAEDAKLQLSKDTYDDDLDNLLAQIGDQYADLFLAAKNLSDAILLSDILRVNTEITKAPLSASMIKRYDEHHQDLTLLKALVRQQLPEKYKEIFFDQSKNGYAGYIDGGASQEEFYKFIKPILEKMDGTEELLVKLNREDLLRKQRTFDNGSIPHQIHLGELHAILRRQEDFYPFLKDNREKIEKILTFRIPYYVGPLARGNSRFAWMTRKSEETITPWNFEEVVDKGASAQSFIERMTNFDKNLPNEKVLPKHSLLYEYFTVYNELTKVKYVTEGMRKPAFLSGEQKKAIVDLLFKTNRKVTVKQLKEDYFKKIECFDSVEISGVEDRFNASLGTYHDLLKIIKDKDFLDNEENEDILEDIVLTLTLFEDREMIEERLKTYAHLFDDKVMKQLKRRRYTGWGRLSRKLINGIRDKQSGKTILDFLKSDGFANRNFMQLIHDDSLTFKEDIQKAQVSGQGDSLHEHIANLAGSPAIKKGILQTVKVVDELVKVMGRHKPENIVIEMARENQTTQKGQKNSRERMKRIEEGIKELGSQILKEHPVENTQLQNEKLYLYYLQNGRDMYVDQELDINRLSDYDVDHIVPQSFLKDDSIDNKVLTRSDKARGKSDNVPSEEVVKKMKNYWRQLLNAKLITQRKFDNLTKAERGGLSELDKAGFIKRQLVETRQITKHVAQILDSRMNTKYDENDKLIREVKVITLKSKLVSDFRKDFQFYKVREINNYHHAHDAYLNAVVGTALIKKYPKLESEFVYGDYKVYDVRKMIAKSEQEIGKATAKYFFYSNIMNFFKTEITLANGEIRKRPLIETNGETGEIVWDKGRDFATVRKVLSMPQVNIVKKTEVQTGGFSKESILPKRNSDKLIARKKDWDPKKYGGFDSPTVAYSVLVVAKVEKGKSKKLKSVKELLGITIMERSSFEKNPIDFLEAKGYKEVKKDLIIKLPKYSLFELENGRKRMLASAGELQKGNELALPSKYVNFLYLASHYEKLKGSPEDNEQKQLFVEQHKHYLDEIIEQISEFSKRVILADANLDKVLSAYNKHRDKPIREQAENIIHLFTLTNLGAPAAFKYFDTTIDRKRYTSTKEVLDATLIHQSITGLYETRIDLSQLGGDGGEAAAKPAPGSSGGVLNLEEEYRLHEKPVPSSIDPSWLQLFPTVWAERAGMGLANQVPPVVVELRSGASPVAVRQYPMSKEAREGIRPHIQKFLDLGVLVPCRSPWNTPLLPVKKPGTNDYRPVQDLREINKRVQDIHPTVPNPYNLLSSLPPSYTWYSVLDLKDAFFCLRLHPNSQPLFAFEWKDPEKGNTGQLTWTRLPQGFKNSPTLFNEALHRDLAPFRALNPQVVLLQYVDDLLVAAPTYEDCKKGTQKLLQELSKLGYRVSAKKAQLCQREVTYLGYLLKEGKRWLTPARKATVMKIPVPTTPRQVREFLGKAGFCRLFIPGFASLAAPLYPLTKPSIPFIWTEEHQQAFDHIKKALLSAPALALPDLTKPFTLYIDERAGVARGVLTQTLGPWRRPVAYLSKKLDPVASGWPTCLKAVAAVALLLKDADKLTLGQNVTVIASHSLESIVRQPPDRWMTNARMTHYQSLLLNERVSFAPPAVLNPATLLPVESEATPVHRCSEILAEETGTRRDLEDQPLPGVPTWYTDGSSFITEGKRRAGAPIVDGKRTVWASSLPEGTSAQKAELVALTQALRLAEGKNINIYTDSRYAFATAHIHGAIYKQRGWLTSAGKDIKNKEEILALLEAIHLPRRVAIIHCPGHQRGSNPVATGNRRADEAAKQAALSTRVLAGTTKPAGKRTADGSEFEKRTADGSEFESPKKKAKVE

SEQ ID NO: 7619 - protein, 2218 aa, synthetic construct
MPAAKRVKLDGGDKKYSIGLDIGTNSVGWAVITDEYKVPSKKFKVLGNTDRHSIKKNLIGALLFDSGETAEATRLKRTARRRYTRRKNRICYLQEIFSNEMAKVDDSFFHRLEESFLVEEDKKHERHPIFGNIVDEVAYHEKYPTIYHLRKKLVDSTDKADLRLIYLALAHMIKFRGHFLIEGDLNPDNSDVDKLFIQLVQTYNQLFEENPINASGVDAKAILSARLSKSRRLENLIAQLPGEKKNGLFGNLIALSLGLTPNFKSNFDLAEDAKLQLSKDTYDDDLDNLLAQIGDQYADLFLAAKNLSDAILLSDILRVNTEITKAPLSASMIKRYDEHHQDLTLLKALVRQQLPEKYKEIFFDQSKNGYAGYIDGGASQEEFYKFIKPILEKMDGTEELLVKLNREDLLRKQRTFDNGSIPHQIHLGELHAILRRQEDFYPFLKDNREKIEKILTFRIPYYVGPLARGNSRFAWMTRKSEETITPWNFEEVVDKGASAQSFIERMTNFDKNLPNEKVLPKHSLLYEYFTVYNELTKVKYVTEGMRKPAFLSGEQKKAIVDLLFKTNRKVTVKQLKEDYFKKIECFDSVEISGVEDRFNASLGTYHDLLKIIKDKDFLDNEENEDILEDIVLTLTLFEDREMIEERLKTYAHLFDDKVMKQLKRRRYTGWGRLSRKLINGIRDKQSGKTILDFLKSDGFANRNFMQLIHDDSLTFKEDIQKAQVSGQGDSLHEHIANLAGSPAIKKGILQTVKVVDELVKVMGRHKPENIVIEMARENQTTQKGQKNSRERMKRIEEGIKELGSQILKEHPVENTQLQNEKLYLYYLQNGRDMYVDQELDINRLSDYDVDHIVPQSFLKDDSIDNKVLTRSDKARGKSDNVPSEEVVKKMKNYWRQLLNAKLITQRKFDNLTKAERGGLSELDKAGFIKRQLVETRQITKHVAQILDSRMNTKYDENDKLIREVKVITLKSKLVSDFRKDFQFYKVREINNYHHAHDAYLNAVVGTALIKKYPKLESEFVYGDYKVYDVRKMIAKSEQEIGKATAKYFFYSNIMNFFKTEITLANGEIRKRPLIETNGETGEIVWDKGRDFATVRKVLSMPQVNIVKKTEVQTGGFSKESILPKRNSDKLIARKKDWDPKKYGGFDSPTVAYSVLVVAKVEKGKSKKLKSVKELLGITIMERSSFEKNPIDFLEAKGYKEVKKDLIIKLPKYSLFELENGRKRMLASAGELQKGNELALPSKYVNFLYLASHYEKLKGSPEDNEQKQLFVEQHKHYLDEIIEQISEFSKRVILADANLDKVLSAYNKHRDKPIREQAENIIHLFTLTNLGAPAAFKYFDTTIDRKRYTSTKEVLDATLIHQSITGLYETRIDLSQLGGDGGEAAAKPAPGSSGGTLGDQGSRGSDPLPEPRVTLTVEGIPTEFLVNTGAEHSVLTKPMGKMGSKRTVVAGATGSKVYPWTTKRLLKIGQKQVTHSFLVIPECPAPLLGRDLLTKLKAQIQFSTEGPQVTWEDRPAMCLVLNLEEEYRLHEKPVPPSIDPSWLQLFPMVWAEKAGMGLANQVPPVVVELKSDASPVAVRQYPMSKEAREGIRPHIQRFLDLGILVPCQSPWNTPLLPVKKPGTNDYRPVQDLREVNKRVQDIHPTVPNPYNLLSSLPPSHTWYSVLDLKDAFFCLKLHPNSQPLFAFEWRDPEKGNTGQLTWTRLPQGFKNSPTLFDEALHRDLASFRALNPQVVMLQYVDDLLVAAPTYRDCKEGTRRLLQELSKLGYRVSAKKAQLCREEVTYLGYLLKGGKRWLTPARKATVMKIPTPTTPRQVREFLGTAGFCRLWIPGFASLAAPLYPLTREKVPFTWTEAHQEAFGRIKEALLSAPALALPDLTKPFALYVDEKEGVARGVLTQTLGPWRRPVAYLSKKLDPVASGWPTCLKAIAAVALLLKDADKLTLGQNVLVIAPHNLESIVRQPPDRWMTNARMTHYQSLLLNERVSFAPPAILNPATLLPVESDDTPIHICSEILAEETGTRPDLRDQPLPGVPAWYTDGSSFIMDGRRQAGAAIVDNKRTVWASNLPEGTSAQKAELIALTQALRLAEGKSINIYTDSRYAFATAHVHGAIYKQRGLLTSAGKDIKNKEEILALLEAIHLPKRVAIIHCPGHQRGTDPVATGNRKADEAAKQAAQSTRILTETTKNAGKRTADGSEFEKRTADGSEFESPKKKAKVE

SEQ ID NO: 7620 - protein, 2218 aa, synthetic construct
MPAAKRVKLDGGDKKYSIGLDIGTNSVGWAVITDEYKVPSKKFKVLGNTDRHSIKKNLIGALLFDSGETAEATRLKRTARRRYTRRKNRICYLQEIFSNEMAKVDDSFFHRLEESFLVEEDKKHERHPIFGNIVDEVAYHEKYPTIYHLRKKLVDSTDKADLRLIYLALAHMIKFRGHFLIEGDLNPDNSDVDKLFIQLVQTYNQLFEENPINASGVDAKAILSARLSKSRRLENLIAQLPGEKKNGLFGNLIALSLGLTPNFKSNFDLAEDAKLQLSKDTYDDDLDNLLAQIGDQYADLFLAAKNLSDAILLSDILRVNTEITKAPLSASMIKRYDEHHQDLTLLKALVRQQLPEKYKEIFFDQSKNGYAGYIDGGASQEEFYKFIKPILEKMDGTEELLVKLNREDLLRKQRTFDNGSIPHQIHLGELHAILRRQEDFYPFLKDNREKIEKILTFRIPYYVGPLARGNSRFAWMTRKSEETITPWNFEEVVDKGASAQSFIERMTNFDKNLPNEKVLPKHSLLYEYFTVYNELTKVKYVTEGMRKPAFLSGEQKKAIVDLLFKTNRKVTVKQLKEDYFKKIECFDSVEISGVEDRFNASLGTYHDLLKIIKDKDFLDNEENEDILEDIVLTLTLFEDREMIEERLKTYAHLFDDKVMKQLKRRRYTGWGRLSRKLINGIRDKQSGKTILDFLKSDGFANRNFMQLIHDDSLTFKEDIQKAQVSGQGDSLHEHIANLAGSPAIKKGILQTVKVVDELVKVMGRHKPENIVIEMARENQTTQKGQKNSRERMKRIEEGIKELGSQILKEHPVENTQLQNEKLYLYYLQNGRDMYVDQELDINRLSDYDVDHIVPQSFLKDDSIDNKVLTRSDKARGKSDNVPSEEVVKKMKNYWRQLLNAKLITQRKFDNLTKAERGGLSELDKAGFIKRQLVETRQITKHVAQILDSRMNTKYDENDKLIREVKVITLKSKLVSDFRKDFQFYKVREINNYHHAHDAYLNAVVGTALIKKYPKLESEFVYGDYKVYDVRKMIAKSEQEIGKATAKYFFYSNIMNFFKTEITLANGEIRKRPLIETNGETGEIVWDKGRDFATVRKVLSMPQVNIVKKTEVQTGGFSKESILPKRNSDKLIARKKDWDPKKYGGFDSPTVAYSVLVVAKVEKGKSKKLKSVKELLGITIMERSSFEKNPIDFLEAKGYKEVKKDLIIKLPKYSLFELENGRKRMLASAGELQKGNELALPSKYVNFLYLASHYEKLKGSPEDNEQKQLFVEQHKHYLDEIIEQISEFSKRVILADANLDKVLSAYNKHRDKPIREQAENIIHLFTLTNLGAPAAFKYFDTTIDRKRYTSTKEVLDATLIHQSITGLYETRIDLSQLGGDGGEAAAKPAPGSSGGTLGDQGSRGSDPLPEPRVTLTVEGIPTEFLVNTGAEHSVLTKPMGKMGSKRTVVAGATGSKVYPWTTKRLLKIGQKQVTHSFLVIPECPAPLLGRDLLTKLKAQIQFSTEGPQVTWEDRPAMCLVLNLEEEYRLHEKPVPPSIDPSWLQLFPMVWAEKAGMGLANQVPPVVVELKSDASPVAVRQYPMSKEAREGIRPHIQRFLDLGILVPCQSPWNTPLLPVKKPGTNDYRPVQDLREVNKRVQDIHPTVPNPYNLLSSLPPSHTWYSVLDLKDAFFCLKLHPNSQPLFAFEWRDPEKGNTGQLTWTRLPQGFKNSPTLFNEALHRDLASFRALNPQVVMLQYVDDLLVAAPTYRDCKEGTRRLLQELSKLGYRVSAKKAQLCREEVTYLGYLLKGGKRWLTPARKATVMKIPTPTTPRQVREFLGTAGFCRLWIPGFASLAAPLYPLTRPKVPFTWTEAHQEAFGRIKEALLSAPALALPDLTKPFALYVDEKEGVARGVLTQTLGPWRRPVAYLSKKLDPVASGWPTCLKAIAAVALLLKDADKLTLGQNVLVIAPHNLESIVRQPPDRWMTNARMTHYQSLLLNERVSFAPPAILNPATLLPVESDDTPIHICSEILAEETGTRPDLRDQPLPGVPAWYTDGSSFIMDGRRQAGAAIVDNKRTVWASNLPEGTSAQKAELIALTQALRLAEGKSINIYTDSRYAFATAHVHGAIYKQRGWLTSAGKDIKNKEEILALLEAIHLPKRVAIIHCPGHQRGTDPVATGNRKADEAAKQAAQSTRILTETTKNAGKRTADGSEFEKRTADGSEFESPKKKAKVE

SEQ ID NO: 7621 - protein, 2096 aa, synthetic construct
MPAAKRVKLDGGDKKYSIGLDIGTNSVGWAVITDEYKVPSKKFKVLGNTDRHSIKKNLIGALLFDSGETAEATRLKRTARRRYTRRKNRICYLQEIFSNEMAKVDDSFFHRLEESFLVEEDKKHERHPIFGNIVDEVAYHEKYPTIYHLRKKLVDSTDKADLRLIYLALAHMIKFRGHFLIEGDLNPDNSDVDKLFIQLVQTYNQLFEENPINASGVDAKAILSARLSKSRRLENLIAQLPGEKKNGLFGNLIALSLGLTPNFKSNFDLAEDAKLQLSKDTYDDDLDNLLAQIGDQYADLFLAAKNLSDAILLSDILRVNTEITKAPLSASMIKRYDEHHQDLTLLKALVRQQLPEKYKEIFFDQSKNGYAGYIDGGASQEEFYKFIKPILEKMDGTEELLVKLNREDLLRKQRTFDNGSIPHQIHLGELHAILRRQEDFYPFLKDNREKIEKILTFRIPYYVGPLARGNSRFAWMTRKSEETITPWNFEEVVDKGASAQSFIERMTNFDKNLPNEKVLPKHSLLYEYFTVYNELTKVKYVTEGMRKPAFLSGEQKKAIVDLLFKTNRKVTVKQLKEDYFKKIECFDSVEISGVEDRFNASLGTYHDLLKIIKDKDFLDNEENEDILEDIVLTLTLFEDREMIEERLKTYAHLFDDKVMKQLKRRRYTGWGRLSRKLINGIRDKQSGKTILDFLKSDGFANRNFMQLIHDDSLTFKEDIQKAQVSGQGDSLHEHIANLAGSPAIKKGILQTVKVVDELVKVMGRHKPENIVIEMARENQTTQKGQKNSRERMKRIEEGIKELGSQILKEHPVENTQLQNEKLYLYYLQNGRDMYVDQELDINRLSDYDVDHIVPQSFLKDDSIDNKVLTRSDKARGKSDNVPSEEVVKKMKNYWRQLLNAKLITQRKFDNLTKAERGGLSELDKAGFIKRQLVETRQITKHVAQILDSRMNTKYDENDKLIREVKVITLKSKLVSDFRKDFQFYKVREINNYHHAHDAYLNAVVGTALIKKYPKLESEFVYGDYKVYDVRKMIAKSEQEIGKATAKYFFYSNIMNFFKTEITLANGEIRKRPLIETNGETGEIVWDKGRDFATVRKVLSMPQVNIVKKTEVQTGGFSKESILPKRNSDKLIARKKDWDPKKYGGFDSPTVAYSVLVVAKVEKGKSKKLKSVKELLGITIMERSSFEKNPIDFLEAKGYKEVKKDLIIKLPKYSLFELENGRKRMLASAGELQKGNELALPSKYVNFLYLASHYEKLKGSPEDNEQKQLFVEQHKHYLDEIIEQISEFSKRVILADANLDKVLSAYNKHRDKPIREQAENIIHLFTLTNLGAPAAFKYFDTTIDRKRYTSTKEVLDATLIHQSITGLYETRIDLSQLGGDGGEAAAKPAPGSSGGTLNLEDEYRLYETSAEPEVSPGSTWLSDFPQAWAETGGMGLAVRQAPLIIPLKATSTPVSIKQYPMSQEAKLGIKPHIQRLLDQGILVPCQSPWNTPLLPVKKPGTNDYRPVQDLREVNKRVEDIHPTVPNPYNLLSGLPPSHRWYTVLDLKDAFFCLRLHPTSQPLFAFEWRDPGMGISGQLTWTRLPQGFKNSPTLFNEALHRDLADFRIQHPDLILLQYVDDILLAATSELDCQQGTRALLLTLGNLGYRASAKKAQLCQKQVKYLGYLLKEGQRWLTEARKETVMGQPTPKTPRQLREFLGKAGFCRLFIPGFAEMAAPLYPLTKPGTLFNWGPDQQKAYQEIKQALLTAPALGLPDLTKPFELFVDEKQGYAKGVLTQKLGPWRRPVAYLSKKLDPVAAGWPPCLRMVAAIAVLRKDAGKLTMGQPLVILAPHAVEALVKQPPDRWLSNARMTHYQAMLLDTDRVQFGPVVALNPATLLPLPEEGAPHDCLEILAETHGTRPDLTDQPIPDADHTWYTDGSSFLQEGQRKAGAAVTTETEVIWARALPAGTSAQRAELIALTQALKMAEGKRLNVYTDSRYAFATAHIHGEIYRRRGWLTSEGREIKNKSEILALLKALFLPKRLSIIHCLGHQKGDSAEARGNRLADQAAREAAIKTPPDTSTLLAGKRTADGSEFEKRTADGSEFESPKKKAKVE

SEQ ID NO: 7622 - protein, 2096 aa, synthetic construct
MPAAKRVKLDGGDKKYSIGLDIGTNSVGWAVITDEYKVPSKKFKVLGNTDRHSIKKNLIGALLFDSGETAEATRLKRTARRRYTRRKNRICYLQEIFSNEMAKVDDSFFHRLEESFLVEEDKKHERHPIFGNIVDEVAYHEKYPTIYHLRKKLVDSTDKADLRLIYLALAHMIKFRGHFLIEGDLNPDNSDVDKLFIQLVQTYNQLFEENPINASGVDAKAILSARLSKSRRLENLIAQLPGEKKNGLFGNLIALSLGLTPNFKSNFDLAEDAKLQLSKDTYDDDLDNLLAQIGDQYADLFLAAKNLSDAILLSDILRVNTEITKAPLSASMIKRYDEHHQDLTLLKALVRQQLPEKYKEIFFDQSKNGYAGYIDGGASQEEFYKFIKPILEKMDGTEELLVKLNREDLLRKQRTFDNGSIPHQIHLGELHAILRRQEDFYPFLKDNREKIEKILTFRIPYYVGPLARGNSRFAWMTRKSEETITPWNFEEVVDKGASAQSFIERMTNFDKNLPNEKVLPKHSLLYEYFTVYNELTKVKYVTEGMRKPAFLSGEQKKAIVDLLFKTNRKVTVKQLKEDYFKKIECFDSVEISGVEDRFNASLGTYHDLLKIIKDKDFLDNEENEDILEDIVLTLTLFEDREMIEERLKTYAHLFDDKVMKQLKRRRYTGWGRLSRKLINGIRDKQSGKTILDFLKSDGFANRNFMQLIHDDSLTFKEDIQKAQVSGQGDSLHEHIANLAGSPAIKKGILQTVKVVDELVKVMGRHKPENIVIEMARENQTTQKGQKNSRERMKRIEEGIKELGSQILKEHPVENTQLQNEKLYLYYLQNGRDMYVDQELDINRLSDYDVDHIVPQSFLKDDSIDNKVLTRSDKARGKSDNVPSEEVVKKMKNYWRQLLNAKLITQRKFDNLTKAERGGLSELDKAGFIKRQLVETRQITKHVAQILDSRMNTKYDENDKLIREVKVITLKSKLVSDFRKDFQFYKVREINNYHHAHDAYLNAVVGTALIKKYPKLESEFVYGDYKVYDVRKMIAKSEQEIGKATAKYFFYSNIMNFFKTEITLANGEIRKRPLIETNGETGEIVWDKGRDFATVRKVLSMPQVNIVKKTEVQTGGFSKESILPKRNSDKLIARKKDWDPKKYGGFDSPTVAYSVLVVAKVEKGKSKKLKSVKELLGITIMERSSFEKNPIDFLEAKGYKEVKKDLIIKLPKYSLFELENGRKRMLASAGELQKGNELALPSKYVNFLYLASHYEKLKGSPEDNEQKQLFVEQHKHYLDEIIEQISEFSKRVILADANLDKVLSAYNKHRDKPIREQAENIIHLFTLTNLGAPAAFKYFDTTIDRKRYTSTKEVLDATLIHQSITGLYETRIDLSQLGGDGGEAAAKPAPGSSGGTLNIEDEYRLHETSKGPDVPLGSTWLSDFPQAWAETGGMGLAFRQAPLIISLKATSTPVSIKQYPMSQEARLGIKPHIQRLLDQGILVPCQSPWNTPLLPVKKPGTNDYRPVQDLREVNKRVEDIHPTVPNPYNLLSGLPPSHQWYTVLDLKDAFFCLRLHPTSQSLFAFEWKDPEMGISGQLTWTRLPQGFKNSPTLFNEALHRDLADFRIQHPDLILLQYVDDLLLAATSELDCQQGTRALLQTLGDLGYRASAKKAQICQKQVKYLGYLLKEGQRWLTEARKETVMGQPTPKTPRQLREFLGKAGLCRLFIPGFAEMAAPLYPLTKPGTLFKWGPDQQKAYQEIKQALLTAPALGLPDLTKPFELFVDEKQGYAKGVLTQKLGPWRRPVAYLSKKLDPVAAGWPPCLRMVAAIAVLTKDVGKLTMGQPLVILAPHAVEALVKQPPDRWLSNARMTHYQALLLDTDRVQFGPIVALNPATLLPLPEEGLQHDCLDILAEAHGTRPDLTDQPLPDADHTWYTDGSSFLQEGQRRAGAAVTTETEVIWAKALPAGTSAQRAELIALTQALKMAAGKKLNVYTDSRYAFATAHIHGEIYRRRGWLTSEGKEIKNKDEILALLKALFLPKRLSIIHCPGHQKGNHAEARGNRMADQAAREVATRETPETSTLLAGKRTADGSEFEKRTADGSEFESPKKKAKVE

SEQ ID NO: 7623 - protein, 2096 aa, synthetic construct
MPAAKRVKLDGGDKKYSIGLDIGTNSVGWAVITDEYKVPSKKFKVLGNTDRHSIKKNLIGALLFDSGETAEATRLKRTARRRYTRRKNRICYLQEIFSNEMAKVDDSFFHRLEESFLVEEDKKHERHPIFGNIVDEVAYHEKYPTIYHLRKKLVDSTDKADLRLIYLALAHMIKFRGHFLIEGDLNPDNSDVDKLFIQLVQTYNQLFEENPINASGVDAKAILSARLSKSRRLENLIAQLPGEKKNGLFGNLIALSLGLTPNFKSNFDLAEDAKLQLSKDTYDDDLDNLLAQIGDQYADLFLAAKNLSDAILLSDILRVNTEITKAPLSASMIKRYDEHHQDLTLLKALVRQQLPEKYKEIFFDQSKNGYAGYIDGGASQEEFYKFIKPILEKMDGTEELLVKLNREDLLRKQRTFDNGSIPHQIHLGELHAILRRQEDFYPFLKDNREKIEKILTFRIPYYVGPLARGNSRFAWMTRKSEETITPWNFEEVVDKGASAQSFIERMTNFDKNLPNEKVLPKHSLLYEYFTVYNELTKVKYVTEGMRKPAFLSGEQKKAIVDLLFKTNRKVTVKQLKEDYFKKIECFDSVEISGVEDRFNASLGTYHDLLKIIKDKDFLDNEENEDILEDIVLTLTLFEDREMIEERLKTYAHLFDDKVMKQLKRRRYTGWGRLSRKLINGIRDKQSGKTILDFLKSDGFANRNFMQLIHDDSLTFKEDIQKAQVSGQGDSLHEHIANLAGSPAIKKGILQTVKVVDELVKVMGRHKPENIVIEMARENQTTQKGQKNSRERMKRIEEGIKELGSQILKEHPVENTQLQNEKLYLYYLQNGRDMYVDQELDINRLSDYDVDHIVPQSFLKDDSIDNKVLTRSDKARGKSDNVPSEEVVKKMKNYWRQLLNAKLITQRKFDNLTKAERGGLSELDKAGFIKRQLVETRQITKHVAQILDSRMNTKYDENDKLIREVKVITLKSKLVSDFRKDFQFYKVREINNYHHAHDAYLNAVVGTALIKKYPKLESEFVYGDYKVYDVRKMIAKSEQEIGKATAKYFFYSNIMNFFKTEITLANGEIRKRPLIETNGETGEIVWDKGRDFATVRKVLSMPQVNIVKKTEVQTGGFSKESILPKRNSDKLIARKKDWDPKKYGGFDSPTVAYSVLVVAKVEKGKSKKLKSVKELLGITIMERSSFEKNPIDFLEAKGYKEVKKDLIIKLPKYSLFELENGRKRMLASAGELQKGNELALPSKYVNFLYLASHYEKLKGSPEDNEQKQLFVEQHKHYLDEIIEQISEFSKRVILADANLDKVLSAYNKHRDKPIREQAENIIHLFTLTNLGAPAAFKYFDTTIDRKRYTSTKEVLDATLIHQSITGLYETRIDLSQLGGDGGEAAAKPAPGSSGGTLNIEDEHRLHETSKEPDVSLGSTWLSDFPQAWAETGGMGLAVRQAPLIIPLKATSTPVSIKQYPMSQEARLGIKPHIQRLLDQGILVPCQSPWNTPLLPVKKPGTNDYRPVQDLREVNKRVEDIHPTVPNPYNLLSGLPPSHQWYTVLDLKDAFFCLRLHPTSQPLFAFEWRDPEMGISGQLTWTRLPQGFKNSPTLFDEALHRDLADFRIQHPDLILLQYVDDLLLAATSELDCQQGTRALLQTLGNLGYRASAKKAQICQKQVKYLGYLLKEGQRWLTEARKETVMGQPTPKTPRQLREFLGTAGFCRLWIPGFAEMAAPLYPLTKTGTLFNWGPDQQKAYQEIKQALLTAPALGLPDLTKPFELFVDEKQGYAKGVLTQKLGPWRRPVAYLSKKLDPVAAGWPPCLRMVAAIAVLTKDAGKLTMGQPLVILAPHAVEALVKQPPDRWLSNARMTHYQALLLDTDRVQFGPVVALNPATLLPLPEEGLQHNCLDILAEAHGTRPDLTDQPLPDADHTWYTDGSSLLQEGQRKAGAAVTTETEVIWAKALPAGTSAQRAELIALTQALKMAEGKKLNVYTDSRYAFATAHIHGEIYRRRGLLTSEGKEIKNKDEILALLKALFLPKRLSIIHCPGHQKGHSAEARGNRMADQAARKAAITETPDTSTLLAGKRTADGSEFEKRTADGSEFESPKKKAKVE

SEQ ID NO: 7624 - protein, 2090 aa, synthetic construct
MPAAKRVKLDGGDKKYSIGLDIGTNSVGWAVITDEYKVPSKKFKVLGNTDRHSIKKNLIGALLFDSGETAEATRLKRTARRRYTRRKNRICYLQEIFSNEMAKVDDSFFHRLEESFLVEEDKKHERHPIFGNIVDEVAYHEKYPTIYHLRKKLVDSTDKADLRLIYLALAHMIKFRGHFLIEGDLNPDNSDVDKLFIQLVQTYNQLFEENPINASGVDAKAILSARLSKSRRLENLIAQLPGEKKNGLFGNLIALSLGLTPNFKSNFDLAEDAKLQLSKDTYDDDLDNLLAQIGDQYADLFLAAKNLSDAILLSDILRVNTEITKAPLSASMIKRYDEHHQDLTLLKALVRQQLPEKYKEIFFDQSKNGYAGYIDGGASQEEFYKFIKPILEKMDGTEELLVKLNREDLLRKQRTFDNGSIPHQIHLGELHAILRRQEDFYPFLKDNREKIEKILTFRIPYYVGPLARGNSRFAWMTRKSEETITPWNFEEVVDKGASAQSFIERMTNFDKNLPNEKVLPKHSLLYEYFTVYNELTKVKYVTEGMRKPAFLSGEQKKAIVDLLFKTNRKVTVKQLKEDYFKKIECFDSVEISGVEDRFNASLGTYHDLLKIIKDKDFLDNEENEDILEDIVLTLTLFEDREMIEERLKTYAHLFDDKVMKQLKRRRYTGWGRLSRKLINGIRDKQSGKTILDFLKSDGFANRNFMQLIHDDSLTFKEDIQKAQVSGQGDSLHEHIANLAGSPAIKKGILQTVKVVDELVKVMGRHKPENIVIEMARENQTTQKGQKNSRERMKRIEEGIKELGSQILKEHPVENTQLQNEKLYLYYLQNGRDMYVDQELDINRLSDYDVDHIVPQSFLKDDSIDNKVLTRSDKARGKSDNVPSEEVVKKMKNYWRQLLNAKLITQRKFDNLTKAERGGLSELDKAGFIKRQLVETRQITKHVAQILDSRMNTKYDENDKLIREVKVITLKSKLVSDFRKDFQFYKVREINNYHHAHDAYLNAVVGTALIKKYPKLESEFVYGDYKVYDVRKMIAKSEQEIGKATAKYFFYSNIMNFFKTEITLANGEIRKRPLIETNGETGEIVWDKGRDFATVRKVLSMPQVNIVKKTEVQTGGFSKESILPKRNSDKLIARKKDWDPKKYGGFDSPTVAYSVLVVAKVEKGKSKKLKSVKELLGITIMERSSFEKNPIDFLEAKGYKEVKKDLIIKLPKYSLFELENGRKRMLASAGELQKGNELALPSKYVNFLYLASHYEKLKGSPEDNEQKQLFVEQHKHYLDEIIEQISEFSKRVILADANLDKVLSAYNKHRDKPIREQAENIIHLFTLTNLGAPAAFKYFDTTIDRKRYTSTKEVLDATLIHQSITGLYETRIDLSQLGGDGGEAAAKPAPGSSGGTLQLDDEYRLYSPLVKPDQNIQFWLEQFPQAWAETAGMGLAKQVPPQVIQLKASATPVSVRQYPLSKEAQEGIRPHVQRLIQQGILVPVQSPWNTPLLPVRKPGTNDYRPVQDLREVNKRVQDIHPTVPNPYNLLCALPPQRSWYTVLDLKDAFFCLRLHPTSQPLFAFEWRDPGTGRTGQLTWTRLPQGFKNSPTIFDEALHRDLANFRIQHPQVTLLQYVDDLLLAGATKQDCLEGTKALLLELSDLGYRASAKKAQICRREVTYLGYSLRDGQRWLTEARKKTVVQIPAPTTAKQVREFLGTAGFCRLWIPGFATLAAPLYPLTKEKGEFSWAPEHQKAFDAIKKALLSAPALALPDVTKPFTLYVDERKGVARGVLTQTLGPWRRPVAYLSKKLDPVASGWPVCLKAIAAVAILVKDADKLTLGQNITVIAPHALENIVRQPPDRWMTNARMTHYQSLLLTERVTFAPPAALNPATLLPEETDEPVTHDCHQLLIEETGVRKDLTDIPLTGEVLTWFTDGSSYVVEGKRMAGAAVVDGTRTIWASSLPEGTSAQKAELMALTQALRLAEGKSINIYTDSRYAFATAHVHGAIYKQRGLLTSAGREIKNKEEILSLLEALHLPKRLAIIHCPGHQKAKDPISRGNQMADRVAKQAAQGVNLLAGKRTADGSEFEKRTADGSEFESPKKKAKVE

SEQ ID NO: 7625 - protein, 2096 aa, synthetic construct
MPAAKRVKLDGGDKKYSIGLDIGTNSVGWAVITDEYKVPSKKFKVLGNTDRHSIKKNLIGALLFDSGETAEATRLKRTARRRYTRRKNRICYLQEIFSNEMAKVDDSFFHRLEESFLVEEDKKHERHPIFGNIVDEVAYHEKYPTIYHLRKKLVDSTDKADLRLIYLALAHMIKFRGHFLIEGDLNPDNSDVDKLFIQLVQTYNQLFEENPINASGVDAKAILSARLSKSRRLENLIAQLPGEKKNGLFGNLIALSLGLTPNFKSNFDLAEDAKLQLSKDTYDDDLDNLLAQIGDQYADLFLAAKNLSDAILLSDILRVNTEITKAPLSASMIKRYDEHHQDLTLLKALVRQQLPEKYKEIFFDQSKNGYAGYIDGGASQEEFYKFIKPILEKMDGTEELLVKLNREDLLRKQRTFDNGSIPHQIHLGELHAILRRQEDFYPFLKDNREKIEKILTFRIPYYVGPLARGNSRFAWMTRKSEETITPWNFEEVVDKGASAQSFIERMTNFDKNLPNEKVLPKHSLLYEYFTVYNELTKVKYVTEGMRKPAFLSGEQKKAIVDLLFKTNRKVTVKQLKEDYFKKIECFDSVEISGVEDRFNASLGTYHDLLKIIKDKDFLDNEENEDILEDIVLTLTLFEDREMIEERLKTYAHLFDDKVMKQLKRRRYTGWGRLSRKLINGIRDKQSGKTILDFLKSDGFANRNFMQLIHDDSLTFKEDIQKAQVSGQGDSLHEHIANLAGSPAIKKGILQTVKVVDELVKVMGRHKPENIVIEMARENQTTQKGQKNSRERMKRIEEGIKELGSQILKEHPVENTQLQNEKLYLYYLQNGRDMYVDQELDINRLSDYDVDHIVPQSFLKDDSIDNKVLTRSDKARGKSDNVPSEEVVKKMKNYWRQLLNAKLITQRKFDNLTKAERGGLSELDKAGFIKRQLVETRQITKHVAQILDSRMNTKYDENDKLIREVKVITLKSKLVSDFRKDFQFYKVREINNYHHAHDAYLNAVVGTALIKKYPKLESEFVYGDYKVYDVRKMIAKSEQEIGKATAKYFFYSNIMNFFKTEITLANGEIRKRPLIETNGETGEIVWDKGRDFATVRKVLSMPQVNIVKKTEVQTGGFSKESILPKRNSDKLIARKKDWDPKKYGGFDSPTVAYSVLVVAKVEKGKSKKLKSVKELLGITIMERSSFEKNPIDFLEAKGYKEVKKDLIIKLPKYSLFELENGRKRMLASAGELQKGNELALPSKYVNFLYLASHYEKLKGSPEDNEQKQLFVEQHKHYLDEIIEQISEFSKRVILADANLDKVLSAYNKHRDKPIREQAENIIHLFTLTNLGAPAAFKYFDTTIDRKRYTSTKEVLDATLIHQSITGLYETRIDLSQLGGDGGEAAAKPAPGSSGGTLNIEDEYRLHETSKEPDVPLGSTWLSDFPQAWAETGGMGLAVRQAPLIIPLKATSTPVSIKQYPMSQEARLGIKPHIQRLLDQGILVPCQSPWNTPLLPVKKPGTNDYRPVQDLREVNKRVEDIHPTVPNPYNLLSGLPPSHQWYTVLDLKDAFFCLRLHPTSQPLFAFEWRDPEMGISGQLTWTRLPQGFKNSPTLFNEALHRDLADFRIQHPDLILLQYVDDLLLAATSEQDCQRGTRALLQTLGNLGYRASAKKAQICQKQVKYLGYLLKEGQRWLTEARKETVMGQPTPKTPRQLREFLGTAGFCRLWIPGFAEMAAPLYPLTKPGTLFNWGPDQQKAYQEIKQALLTAPALGLPDLTKPFELFVDEKQGYAKGVLTQKLGPWRRPVAYLSKKLDPVAAGWPPCLRMVAAIAVLTKDAGKLTMGQPLVILAPHAVEALVKQPPDRWLSNARMTHYQAMLLDTDRVQFGPVVALNPATLLPLPEKEAPHDCLEILAETHGTRPDLTDQPIPDADYTWYTDGSSFLQEGQRRAGAAVTTETEVIWARALPAGTSAQRAELIALTQALKMAEGKKLNVYTDSRYAFATAHVHGEIYRRRGWLTSEGREIKNKNEILALLKALFLPKRLSIIHCPGHQKGNSAEARGNRMADQAAREAAMKAVLETSTLLAGKRTADGSEFEKRTADGSEFESPKKKAKVE

SEQ ID NO: 7626 - protein, 2098 aa, synthetic construct
MPAAKRVKLDGGDKKYSIGLDIGTNSVGWAVITDEYKVPSKKFKVLGNTDRHSIKKNLIGALLFDSGETAEATRLKRTARRRYTRRKNRICYLQEIFSNEMAKVDDSFFHRLEESFLVEEDKKHERHPIFGNIVDEVAYHEKYPTIYHLRKKLVDSTDKADLRLIYLALAHMIKFRGHFLIEGDLNPDNSDVDKLFIQLVQTYNQLFEENPINASGVDAKAILSARLSKSRRLENLIAQLPGEKKNGLFGNLIALSLGLTPNFKSNFDLAEDAKLQLSKDTYDDDLDNLLAQIGDQYADLFLAAKNLSDAILLSDILRVNTEITKAPLSASMIKRYDEHHQDLTLLKALVRQQLPEKYKEIFFDQSKNGYAGYIDGGASQEEFYKFIKPILEKMDGTEELLVKLNREDLLRKQRTFDNGSIPHQIHLGELHAILRRQEDFYPFLKDNREKIEKILTFRIPYYVGPLARGNSRFAWMTRKSEETITPWNFEEVVDKGASAQSFIERMTNFDKNLPNEKVLPKHSLLYEYFTVYNELTKVKYVTEGMRKPAFLSGEQKKAIVDLLFKTNRKVTVKQLKEDYFKKIECFDSVEISGVEDRFNASLGTYHDLLKIIKDKDFLDNEENEDILEDIVLTLTLFEDREMIEERLKTYAHLFDDKVMKQLKRRRYTGWGRLSRKLINGIRDKQSGKTILDFLKSDGFANRNFMQLIHDDSLTFKEDIQKAQVSGQGDSLHEHIANLAGSPAIKKGILQTVKVVDELVKVMGRHKPENIVIEMARENQTTQKGQKNSRERMKRIEEGIKELGSQILKEHPVENTQLQNEKLYLYYLQNGRDMYVDQELDINRLSDYDVDHIVPQSFLKDDSIDNKVLTRSDKARGKSDNVPSEEVVKKMKNYWRQLLNAKLITQRKFDNLTKAERGGLSELDKAGFIKRQLVETRQITKHVAQILDSRMNTKYDENDKLIREVKVITLKSKLVSDFRKDFQFYKVREINNYHHAHDAYLNAVVGTALIKKYPKLESEFVYGDYKVYDVRKMIAKSEQEIGKATAKYFFYSNIMNFFKTEITLANGEIRKRPLIETNGETGEIVWDKGRDFATVRKVLSMPQVNIVKKTEVQTGGFSKESILPKRNSDKLIARKKDWDPKKYGGFDSPTVAYSVLVVAKVEKGKSKKLKSVKELLGITIMERSSFEKNPIDFLEAKGYKEVKKDLIIKLPKYSLFELENGRKRMLASAGELQKGNELALPSKYVNFLYLASHYEKLKGSPEDNEQKQLFVEQHKHYLDEIIEQISEFSKRVILADANLDKVLSAYNKHRDKPIREQAENIIHLFTLTNLGAPAAFKYFDTTIDRKRYTSTKEVLDATLIHQSITGLYETRIDLSQLGGDGGPAPGSSEAAAKGGTAPLEEEYRLFLEAPIQNVTLLEQWKREIPKVWAEINPPGLASTQAPIHVQLLSTALPVRVRQYPITLEAKRSLRETIRKFRAAGILRPVHSPWNTPLLPVRKSGTSEYRMVQDLREVNKRVETIHPTVPNPYTLLSLLPPDRIWYSVLDLKDAFFCIPLAPESQLIFAFEWADAEEGESGQLTWTRLPQGFKNSPTLFNEALNRDLQGFRLDHPSVSLLQYVDDLLIAADTQAACLSATRDLLMTLAELGYRVSGKKAQLCQEEVTYLGFKIHKGSRSLSNSRTQAILQIPVPKTKRQVREFLGTIGYCRLWIPGFAELAQPLYAATRPGNDPLVWGEKEEEAFQSLKLALTQPPALALPSLDKPFQLFVEETSGAAKGVLTQALGPWKRPVAYLSKRLDPVAAGWPRCLRAIAAAALLTREASKLTFGQDIEITSSHNLESLLRSPPDKWLTNARITQYQVLLLDPPRVRFKQTAALNPATLLPETDDTLPIHHCLDTLDSLTSTRPDLTDQPLAQAEATLFTDGSSYIRDGKRYAGAAVVTLDSVIWAEPLPIGTSAQKAELIALTKALEWSKDKSVNIYTDSRYAFATLHVHGMIYRERGWLTAGGKAIKNAPEILALLTAVWLPKRVAVMHCKGHQKDDAPTSTGNRRADEVAREVAIRPLSTQATISAGKRTADGSEFEKRTADGSEFESPKKKAKVE

SEQ ID NO: 7627 - protein, 2098 aa, synthetic construct
MPAAKRVKLDGGDKKYSIGLDIGTNSVGWAVITDEYKVPSKKFKVLGNTDRHSIKKNLIGALLFDSGETAEATRLKRTARRRYTRRKNRICYLQEIFSNEMAKVDDSFFHRLEESFLVEEDKKHERHPIFGNIVDEVAYHEKYPTIYHLRKKLVDSTDKADLRLIYLALAHMIKFRGHFLIEGDLNPDNSDVDKLFIQLVQTYNQLFEENPINASGVDAKAILSARLSKSRRLENLIAQLPGEKKNGLFGNLIALSLGLTPNFKSNFDLAEDAKLQLSKDTYDDDLDNLLAQIGDQYADLFLAAKNLSDAILLSDILRVNTEITKAPLSASMIKRYDEHHQDLTLLKALVRQQLPEKYKEIFFDQSKNGYAGYIDGGASQEEFYKFIKPILEKMDGTEELLVKLNREDLLRKQRTFDNGSIPHQIHLGELHAILRRQEDFYPFLKDNREKIEKILTFRIPYYVGPLARGNSRFAWMTRKSEETITPWNFEEVVDKGASAQSFIERMTNFDKNLPNEKVLPKHSLLYEYFTVYNELTKVKYVTEGMRKPAFLSGEQKKAIVDLLFKTNRKVTVKQLKEDYFKKIECFDSVEISGVEDRFNASLGTYHDLLKIIKDKDFLDNEENEDILEDIVLTLTLFEDREMIEERLKTYAHLFDDKVMKQLKRRRYTGWGRLSRKLINGIRDKQSGKTILDFLKSDGFANRNFMQLIHDDSLTFKEDIQKAQVSGQGDSLHEHIANLAGSPAIKKGILQTVKVVDELVKVMGRHKPENIVIEMARENQTTQKGQKNSRERMKRIEEGIKELGSQILKEHPVENTQLQNEKLYLYYLQNGRDMYVDQELDINRLSDYDVDHIVPQSFLKDDSIDNKVLTRSDKARGKSDNVPSEEVVKKMKNYWRQLLNAKLITQRKFDNLTKAERGGLSELDKAGFIKRQLVETRQITKHVAQILDSRMNTKYDENDKLIREVKVITLKSKLVSDFRKDFQFYKVREINNYHHAHDAYLNAVVGTALIKKYPKLESEFVYGDYKVYDVRKMIAKSEQEIGKATAKYFFYSNIMNFFKTEITLANGEIRKRPLIETNGETGEIVWDKGRDFATVRKVLSMPQVNIVKKTEVQTGGFSKESILPKRNSDKLIARKKDWDPKKYGGFDSPTVAYSVLVVAKVEKGKSKKLKSVKELLGITIMERSSFEKNPIDFLEAKGYKEVKKDLIIKLPKYSLFELENGRKRMLASAGELQKGNELALPSKYVNFLYLASHYEKLKGSPEDNEQKQLFVEQHKHYLDEIIEQISEFSKRVILADANLDKVLSAYNKHRDKPIREQAENIIHLFTLTNLGAPAAFKYFDTTIDRKRYTSTKEVLDATLIHQSITGLYETRIDLSQLGGDGGPAPGSSEAAAKGGTAPLEEEYRLFLEAPIQNVTLLEQWKREIPKVWAEINPPGLASTQAPIHVQLLSTALPVRVRQYPITLEAKRSLRETIRKFRAAGILRPVHSPWNTPLLPVRKSGTSEYRMVQDLREVNKRVETIHPTVPNPYTLLSLLPPDRIWYSVLDLKDAFFCIPLAPESQLIFAFEWADAEEGESGQLTWTRLPQGFKNSPTLFNEALNRDLQGFRLDHPSVSLLQYVDDLLIAADTQAACLSATRDLLMTLAELGYRVSGKKAQLCQEEVTYLGFKIHKGSRSLSNSRTQAILQIPVPKTKRQVREFLGKIGYCRLFIPGFAELAQPLYAATRPGNDPLVWGEKEEEAFQSLKLALTQPPALALPSLDKPFQLFVEETSGAAKGVLTQALGPWKRPVAYLSKRLDPVAAGWPRCLRAIAAAALLTREASKLTFGQDIEITSSHNLESLLRSPPDKWLTNARITQYQVLLLDPPRVRFKQTAALNPATLLPETDDTLPIHHCLDTLDSLTSTRPDLTDQPLAQAEATLFTDGSSYIRDGKRYAGAAVVTLDSVIWAEPLPIGTSAQKAELIALTKALEWSKDKSVNIYTDSRYAFATLHVHGMIYRERGWLTAGGKAIKNAPEILALLTAVWLPKRVAVMHCKGHQKDDAPTSTGNRRADEVAREVAIRPLSTQATISAGKRTADGSEFEKRTADGSEFESPKKKAKVE

SEQ ID NO: 7628 - protein, 2087 aa, synthetic construct
MPAAKRVKLDGGDKKYSIGLDIGTNSVGWAVITDEYKVPSKKFKVLGNTDRHSIKKNLIGALLFDSGETAEATRLKRTARRRYTRRKNRICYLQEIFSNEMAKVDDSFFHRLEESFLVEEDKKHERHPIFGNIVDEVAYHEKYPTIYHLRKKLVDSTDKADLRLIYLALAHMIKFRGHFLIEGDLNPDNSDVDKLFIQLVQTYNQLFEENPINASGVDAKAILSARLSKSRRLENLIAQLPGEKKNGLFGNLIALSLGLTPNFKSNFDLAEDAKLQLSKDTYDDDLDNLLAQIGDQYADLFLAAKNLSDAILLSDILRVNTEITKAPLSASMIKRYDEHHQDLTLLKALVRQQLPEKYKEIFFDQSKNGYAGYIDGGASQEEFYKFIKPILEKMDGTEELLVKLNREDLLRKQRTFDNGSIPHQIHLGELHAILRRQEDFYPFLKDNREKIEKILTFRIPYYVGPLARGNSRFAWMTRKSEETITPWNFEEVVDKGASAQSFIERMTNFDKNLPNEKVLPKHSLLYEYFTVYNELTKVKYVTEGMRKPAFLSGEQKKAIVDLLFKTNRKVTVKQLKEDYFKKIECFDSVEISGVEDRFNASLGTYHDLLKIIKDKDFLDNEENEDILEDIVLTLTLFEDREMIEERLKTYAHLFDDKVMKQLKRRRYTGWGRLSRKLINGIRDKQSGKTILDFLKSDGFANRNFMQLIHDDSLTFKEDIQKAQVSGQGDSLHEHIANLAGSPAIKKGILQTVKVVDELVKVMGRHKPENIVIEMARENQTTQKGQKNSRERMKRIEEGIKELGSQILKEHPVENTQLQNEKLYLYYLQNGRDMYVDQELDINRLSDYDVDHIVPQSFLKDDSIDNKVLTRSDKARGKSDNVPSEEVVKKMKNYWRQLLNAKLITQRKFDNLTKAERGGLSELDKAGFIKRQLVETRQITKHVAQILDSRMNTKYDENDKLIREVKVITLKSKLVSDFRKDFQFYKVREINNYHHAHDAYLNAVVGTALIKKYPKLESEFVYGDYKVYDVRKMIAKSEQEIGKATAKYFFYSNIMNFFKTEITLANGEIRKRPLIETNGETGEIVWDKGRDFATVRKVLSMPQVNIVKKTEVQTGGFSKESILPKRNSDKLIARKKDWDPKKYGGFDSPTVAYSVLVVAKVEKGKSKKLKSVKELLGITIMERSSFEKNPIDFLEAKGYKEVKKDLIIKLPKYSLFELENGRKRMLASAGELQKGNELALPSKYVNFLYLASHYEKLKGSPEDNEQKQLFVEQHKHYLDEIIEQISEFSKRVILADANLDKVLSAYNKHRDKPIREQAENIIHLFTLTNLGAPAAFKYFDTTIDRKRYTSTKEVLDATLIHQSITGLYETRIDLSQLGGDGGPAPGSSEAAAKGGVPWILKKPLELTIKLDLEEQQGTLLNNSILSKKGKEELKQLFEKYSALWQSWENQVGHRRIRPHKIATGTVKPTPQKQYHINPKAKPDIQIVINDLLKQGVLIQKESTMNTPVYPVPKPNGRWRMVLDYRAVNKVTPLIAVQNQHSYGILGSLFKGRYKTTIDLSNGFWAHPIVPEDYWITAFTWQGKQYCWTVLPQGFLNSPGLFTGDVVDLLQGIPNVEVYVDDVYISHDSEKEHLEYLDILFNRLKEAGYIISLKKSNIANSIVDFLGFQITNEGRGLTDTFKEKLENITAPTTLKQLQSILGLLNFARNFIPDFTELIAPLYALIPKSTKNYVPWQIEHSTTLETLITKLNGAEYLQGRKGDKTLIMKVNASYTTGYIRYYNEGEKKPISYVSIVFSKTELKFTELEKLLTTVHKGLLKALDLSMGQNIHVYSPIVSMQNIQKTPQTAKKALASRWLSWLSYLEDPRIRFFYDPQMPALKDLPAVDTGKDNKKHPSNFQHIFYTDGSAITSPTKEGHLNAGMGIVYFINKDGNLQKQQEWSISLGNHTAQFAEIAAFEFALKKCLPLGGNILVVTDSNYVAKAYNEELDVWASNGFVNNRKKPLKHISKWKSVADLKRLRPDVVVTHEPGHQKLDSSPHAYGNNLADQLATQASFKVHAGKRTADGSEFEKRTADGSEFESPKKKAKVE

SEQ ID NO: 7629 - protein, 2095 aa, synthetic construct
MPAAKRVKLDGGDKKYSIGLDIGTNSVGWAVITDEYKVPSKKFKVLGNTDRHSIKKNLIGALLFDSGETAEATRLKRTARRRYTRRKNRICYLQEIFSNEMAKVDDSFFHRLEESFLVEEDKKHERHPIFGNIVDEVAYHEKYPTIYHLRKKLVDSTDKADLRLIYLALAHMIKFRGHFLIEGDLNPDNSDVDKLFIQLVQTYNQLFEENPINASGVDAKAILSARLSKSRRLENLIAQLPGEKKNGLFGNLIALSLGLTPNFKSNFDLAEDAKLQLSKDTYDDDLDNLLAQIGDQYADLFLAAKNLSDAILLSDILRVNTEITKAPLSASMIKRYDEHHQDLTLLKALVRQQLPEKYKEIFFDQSKNGYAGYIDGGASQEEFYKFIKPILEKMDGTEELLVKLNREDLLRKQRTFDNGSIPHQIHLGELHAILRRQEDFYPFLKDNREKIEKILTFRIPYYVGPLARGNSRFAWMTRKSEETITPWNFEEVVDKGASAQSFIERMTNFDKNLPNEKVLPKHSLLYEYFTVYNELTKVKYVTEGMRKPAFLSGEQKKAIVDLLFKTNRKVTVKQLKEDYFKKIECFDSVEISGVEDRFNASLGTYHDLLKIIKDKDFLDNEENEDILEDIVLTLTLFEDREMIEERLKTYAHLFDDKVMKQLKRRRYTGWGRLSRKLINGIRDKQSGKTILDFLKSDGFANRNFMQLIHDDSLTFKEDIQKAQVSGQGDSLHEHIANLAGSPAIKKGILQTVKVVDELVKVMGRHKPENIVIEMARENQTTQKGQKNSRERMKRIEEGIKELGSQILKEHPVENTQLQNEKLYLYYLQNGRDMYVDQELDINRLSDYDVDHIVPQSFLKDDSIDNKVLTRSDKARGKSDNVPSEEVVKKMKNYWRQLLNAKLITQRKFDNLTKAERGGLSELDKAGFIKRQLVETRQITKHVAQILDSRMNTKYDENDKLIREVKVITLKSKLVSDFRKDFQFYKVREINNYHHAHDAYLNAVVGTALIKKYPKLESEFVYGDYKVYDVRKMIAKSEQEIGKATAKYFFYSNIMNFFKTEITLANGEIRKRPLIETNGETGEIVWDKGRDFATVRKVLSMPQVNIVKKTEVQTGGFSKESILPKRNSDKLIARKKDWDPKKYGGFDSPTVAYSVLVVAKVEKGKSKKLKSVKELLGITIMERSSFEKNPIDFLEAKGYKEVKKDLIIKLPKYSLFELENGRKRMLASAGELQKGNELALPSKYVNFLYLASHYEKLKGSPEDNEQKQLFVEQHKHYLDEIIEQISEFSKRVILADANLDKVLSAYNKHRDKPIREQAENIIHLFTLTNLGAPAAFKYFDTTIDRKRYTSTKEVLDATLIHQSITGLYETRIDLSQLGGDGGPAPGSSEAAAKGGTLQLEEEYRLFEPESTQKQEMDIWLKNFPQAWAETGGMGTAHCQAPVLIQLKATATPISIRQYPMPHEAYQGIKPHIRRMLDQGILKPCQSPWNTPLLPVKKPGTEDYRPVQDLREVNKRVEDIHPTVPNPYNLLSTLPPSHPWYTVLDLKDAFFCLRLHSESQLLFAFEWRDPEIGLSGQLTWTRLPQGFKNSPTLFNEALHSDLADFRVRYPALVLLQYVDDLLLAAATRTECLEGTKALLETLGNKGYRASAKKAQICLQEVTYLGYSLKDGQRWLTKARKEAILSIPVPKNSRQVREFLGTAGYCRLWIPGFAELAAPLYPLTRPGTLFQWGTEQQLAFEDIKKALLSSPALGLPDITKPFELFIDENSGFAKGVLVQKLGPWKRPVAYLSKKLDTVASGWPPCLRMVAAIAILVKDAGKLTLGQPLTILTSHPVEALVRQPPNKWLSNARMTHYQAMLLDAERVHFGPTVSLNPATLLPLPSGGNHHDCLQILAETHGTRPDLTDQPLPDADLTWYTDGSSFIRNGEREAGAAVTTESEVIWAAPLPPGTSAQRAELIALTQALKMAEGKKLTVYTDSRYAFATTHVHGEIYRRRGWLTSEGKEIKNKNEILALLEALFLPKRLSIIHCPGHQKGDSPQAKGNRLADDTAKKAATETHSSLTVLPAGKRTADGSEFEKRTADGSEFESPKKKAKVE

SEQ ID NO: 7630 - protein, 2094 aa, synthetic construct
MPAAKRVKLDGGDKKYSIGLDIGTNSVGWAVITDEYKVPSKKFKVLGNTDRHSIKKNLIGALLFDSGETAEATRLKRTARRRYTRRKNRICYLQEIFSNEMAKVDDSFFHRLEESFLVEEDKKHERHPIFGNIVDEVAYHEKYPTIYHLRKKLVDSTDKADLRLIYLALAHMIKFRGHFLIEGDLNPDNSDVDKLFIQLVQTYNQLFEENPINASGVDAKAILSARLSKSRRLENLIAQLPGEKKNGLFGNLIALSLGLTPNFKSNFDLAEDAKLQLSKDTYDDDLDNLLAQIGDQYADLFLAAKNLSDAILLSDILRVNTEITKAPLSASMIKRYDEHHQDLTLLKALVRQQLPEKYKEIFFDQSKNGYAGYIDGGASQEEFYKFIKPILEKMDGTEELLVKLNREDLLRKQRTFDNGSIPHQIHLGELHAILRRQEDFYPFLKDNREKIEKILTFRIPYYVGPLARGNSRFAWMTRKSEETITPWNFEEVVDKGASAQSFIERMTNFDKNLPNEKVLPKHSLLYEYFTVYNELTKVKYVTEGMRKPAFLSGEQKKAIVDLLFKTNRKVTVKQLKEDYFKKIECFDSVEISGVEDRFNASLGTYHDLLKIIKDKDFLDNEENEDILEDIVLTLTLFEDREMIEERLKTYAHLFDDKVMKQLKRRRYTGWGRLSRKLINGIRDKQSGKTILDFLKSDGFANRNFMQLIHDDSLTFKEDIQKAQVSGQGDSLHEHIANLAGSPAIKKGILQTVKVVDELVKVMGRHKPENIVIEMARENQTTQKGQKNSRERMKRIEEGIKELGSQILKEHPVENTQLQNEKLYLYYLQNGRDMYVDQELDINRLSDYDVDHIVPQSFLKDDSIDNKVLTRSDKARGKSDNVPSEEVVKKMKNYWRQLLNAKLITQRKFDNLTKAERGGLSELDKAGFIKRQLVETRQITKHVAQILDSRMNTKYDENDKLIREVKVITLKSKLVSDFRKDFQFYKVREINNYHHAHDAYLNAVVGTALIKKYPKLESEFVYGDYKVYDVRKMIAKSEQEIGKATAKYFFYSNIMNFFKTEITLANGEIRKRPLIETNGETGEIVWDKGRDFATVRKVLSMPQVNIVKKTEVQTGGFSKESILPKRNSDKLIARKKDWDPKKYGGFDSPTVAYSVLVVAKVEKGKSKKLKSVKELLGITIMERSSFEKNPIDFLEAKGYKEVKKDLIIKLPKYSLFELENGRKRMLASAGELQKGNELALPSKYVNFLYLASHYEKLKGSPEDNEQKQLFVEQHKHYLDEIIEQISEFSKRVILADANLDKVLSAYNKHRDKPIREQAENIIHLFTLTNLGAPAAFKYFDTTIDRKRYTSTKEVLDATLIHQSITGLYETRIDLSQLGGDGGPAPGSSEAAAKGGVLNLEEEYRLHEKPVPSSIDPSWLQLFPTVWAERAGMGLANQVPPVVVELRSGASPVAVRQYPMSKEAREGIRPHIQKFLDLGVLVPCRSPWNTPLLPVKKPGTNDYRPVQDLREINKRVQDIHPTVPNPYNLLSSLPPSYTWYSVLDLKDAFFCLRLHPNSQPLFAFEWKDPEKGNTGQLTWTRLPQGFKNSPTLFNEALHRDLAPFRALNPQVVLLQYVDDLLVAAPTYEDCKKGTQKLLQELSKLGYRVSAKKAQLCQREVTYLGYLLKEGKRWLTPARKATVMKIPVPTTPRQVREFLGKAGFCRLFIPGFASLAAPLYPLTKPSIPFIWTEEHQQAFDHIKKALLSAPALALPDLTKPFTLYIDERAGVARGVLTQTLGPWRRPVAYLSKKLDPVASGWPTCLKAVAAVALLLKDADKLTLGQNVTVIASHSLESIVRQPPDRWMTNARMTHYQSLLLNERVSFAPPAVLNPATLLPVESEATPVHRCSEILAEETGTRRDLEDQPLPGVPTWYTDGSSFITEGKRRAGAPIVDGKRTVWASSLPEGTSAQKAELVALTQALRLAEGKNINIYTDSRYAFATAHIHGAIYKQRGWLTSAGKDIKNKEEILALLEAIHLPRRVAIIHCPGHQRGSNPVATGNRRADEAAKQAALSTRVLAGTTKPAGKRTADGSEFEKRTADGSEFESPKKKAKVE

SEQ ID NO: 7631 - protein, 2218 aa, synthetic construct
MPAAKRVKLDGGDKKYSIGLDIGTNSVGWAVITDEYKVPSKKFKVLGNTDRHSIKKNLIGALLFDSGETAEATRLKRTARRRYTRRKNRICYLQEIFSNEMAKVDDSFFHRLEESFLVEEDKKHERHPIFGNIVDEVAYHEKYPTIYHLRKKLVDSTDKADLRLIYLALAHMIKFRGHFLIEGDLNPDNSDVDKLFIQLVQTYNQLFEENPINASGVDAKAILSARLSKSRRLENLIAQLPGEKKNGLFGNLIALSLGLTPNFKSNFDLAEDAKLQLSKDTYDDDLDNLLAQIGDQYADLFLAAKNLSDAILLSDILRVNTEITKAPLSASMIKRYDEHHQDLTLLKALVRQQLPEKYKEIFFDQSKNGYAGYIDGGASQEEFYKFIKPILEKMDGTEELLVKLNREDLLRKQRTFDNGSIPHQIHLGELHAILRRQEDFYPFLKDNREKIEKILTFRIPYYVGPLARGNSRFAWMTRKSEETITPWNFEEVVDKGASAQSFIERMTNFDKNLPNEKVLPKHSLLYEYFTVYNELTKVKYVTEGMRKPAFLSGEQKKAIVDLLFKTNRKVTVKQLKEDYFKKIECFDSVEISGVEDRFNASLGTYHDLLKIIKDKDFLDNEENEDILEDIVLTLTLFEDREMIEERLKTYAHLFDDKVMKQLKRRRYTGWGRLSRKLINGIRDKQSGKTILDFLKSDGFANRNFMQLIHDDSLTFKEDIQKAQVSGQGDSLHEHIANLAGSPAIKKGILQTVKVVDELVKVMGRHKPENIVIEMARENQTTQKGQKNSRERMKRIEEGIKELGSQILKEHPVENTQLQNEKLYLYYLQNGRDMYVDQELDINRLSDYDVDHIVPQSFLKDDSIDNKVLTRSDKARGKSDNVPSEEVVKKMKNYWRQLLNAKLITQRKFDNLTKAERGGLSELDKAGFIKRQLVETRQITKHVAQILDSRMNTKYDENDKLIREVKVITLKSKLVSDFRKDFQFYKVREINNYHHAHDAYLNAVVGTALIKKYPKLESEFVYGDYKVYDVRKMIAKSEQEIGKATAKYFFYSNIMNFFKTEITLANGEIRKRPLIETNGETGEIVWDKGRDFATVRKVLSMPQVNIVKKTEVQTGGFSKESILPKRNSDKLIARKKDWDPKKYGGFDSPTVAYSVLVVAKVEKGKSKKLKSVKELLGITIMERSSFEKNPIDFLEAKGYKEVKKDLIIKLPKYSLFELENGRKRMLASAGELQKGNELALPSKYVNFLYLASHYEKLKGSPEDNEQKQLFVEQHKHYLDEIIEQISEFSKRVILADANLDKVLSAYNKHRDKPIREQAENIIHLFTLTNLGAPAAFKYFDTTIDRKRYTSTKEVLDATLIHQSITGLYETRIDLSQLGGDGGPAPGSSEAAAKGGTLGDQGSRGSDPLPEPRVTLTVEGIPTEFLVNTGAEHSVLTKPMGKMGSKRTVVAGATGSKVYPWTTKRLLKIGQKQVTHSFLVIPECPAPLLGRDLLTKLKAQIQFSTEGPQVTWEDRPAMCLVLNLEEEYRLHEKPVPPSIDPSWLQLFPMVWAEKAGMGLANQVPPVVVELKSDASPVAVRQYPMSKEAREGIRPHIQRFLDLGILVPCQSPWNTPLLPVKKPGTNDYRPVQDLREVNKRVQDIHPTVPNPYNLLSSLPPSHTWYSVLDLKDAFFCLKLHPNSQPLFAFEWRDPEKGNTGQLTWTRLPQGFKNSPTLFDEALHRDLASFRALNPQVVMLQYVDDLLVAAPTYRDCKEGTRRLLQELSKLGYRVSAKKAQLCREEVTYLGYLLKGGKRWLTPARKATVMKIPTPTTPRQVREFLGTAGFCRLWIPGFASLAAPLYPLTREKVPFTWTEAHQEAFGRIKEALLSAPALALPDLTKPFALYVDEKEGVARGVLTQTLGPWRRPVAYLSKKLDPVASGWPTCLKAIAAVALLLKDADKLTLGQNVLVIAPHNLESIVRQPPDRWMTNARMTHYQSLLLNERVSFAPPAILNPATLLPVESDDTPIHICSEILAEETGTRPDLRDQPLPGVPAWYTDGSSFIMDGRRQAGAAIVDNKRTVWASNLPEGTSAQKAELIALTQALRLAEGKSINIYTDSRYAFATAHVHGAIYKQRGLLTSAGKDIKNKEEILALLEAIHLPKRVAIIHCPGHQRGTDPVATGNRKADEAAKQAAQSTRILTETTKNAGKRTADGSEFEKRTADGSEFESPKKKAKVE

SEQ ID NO: 7632 - protein, 2127 aa, synthetic construct
MPAAKRVKLDGGDKKYSIGLDIGTNSVGWAVITDEYKVPSKKFKVLGNTDRHSIKKNLIGALLFDSGETAEATRLKRTARRRYTRRKNRICYLQEIFSNEMAKVDDSFFHRLEESFLVEEDKKHERHPIFGNIVDEVAYHEKYPTIYHLRKKLVDSTDKADLRLIYLALAHMIKFRGHFLIEGDLNPDNSDVDKLFIQLVQTYNQLFEENPINASGVDAKAILSARLSKSRRLENLIAQLPGEKKNGLFGNLIALSLGLTPNFKSNFDLAEDAKLQLSKDTYDDDLDNLLAQIGDQYADLFLAAKNLSDAILLSDILRVNTEITKAPLSASMIKRYDEHHQDLTLLKALVRQQLPEKYKEIFFDQSKNGYAGYIDGGASQEEFYKFIKPILEKMDGTEELLVKLNREDLLRKQRTFDNGSIPHQIHLGELHAILRRQEDFYPFLKDNREKIEKILTFRIPYYVGPLARGNSRFAWMTRKSEETITPWNFEEVVDKGASAQSFIERMTNFDKNLPNEKVLPKHSLLYEYFTVYNELTKVKYVTEGMRKPAFLSGEQKKAIVDLLFKTNRKVTVKQLKEDYFKKIECFDSVEISGVEDRFNASLGTYHDLLKIIKDKDFLDNEENEDILEDIVLTLTLFEDREMIEERLKTYAHLFDDKVMKQLKRRRYTGWGRLSRKLINGIRDKQSGKTILDFLKSDGFANRNFMQLIHDDSLTFKEDIQKAQVSGQGDSLHEHIANLAGSPAIKKGILQTVKVVDELVKVMGRHKPENIVIEMARENQTTQKGQKNSRERMKRIEEGIKELGSQILKEHPVENTQLQNEKLYLYYLQNGRDMYVDQELDINRLSDYDVDHIVPQSFLKDDSIDNKVLTRSDKARGKSDNVPSEEVVKKMKNYWRQLLNAKLITQRKFDNLTKAERGGLSELDKAGFIKRQLVETRQITKHVAQILDSRMNTKYDENDKLIREVKVITLKSKLVSDFRKDFQFYKVREINNYHHAHDAYLNAVVGTALIKKYPKLESEFVYGDYKVYDVRKMIAKSEQEIGKATAKYFFYSNIMNFFKTEITLANGEIRKRPLIETNGETGEIVWDKGRDFATVRKVLSMPQVNIVKKTEVQTGGFSKESILPKRNSDKLIARKKDWDPKKYGGFDSPTVAYSVLVVAKVEKGKSKKLKSVKELLGITIMERSSFEKNPIDFLEAKGYKEVKKDLIIKLPKYSLFELENGRKRMLASAGELQKGNELALPSKYVNFLYLASHYEKLKGSPEDNEQKQLFVEQHKHYLDEIIEQISEFSKRVILADANLDKVLSAYNKHRDKPIREQAENIIHLFTLTNLGAPAAFKYFDTTIDRKRYTSTKEVLDATLIHQSITGLYETRIDLSQLGGDGGPAPGSSEAAAKGGLLGRDLLTKLKAQIQFSTEGPQVTWEDRPAMCLVLNLEEEYRLHEKPVPPSIDPSWLQLFPMVWAEKAGMGLANQVPPVVVELKSDASPVAVRQYPMSKEAREGIRPHIQRFLDLGILVPCQSPWNTPLLPVKKPGTNDYRPVQDLREVNKRVQDIHPTVPNPYNLLSSLPPSHTWYSVLDLKDAFFCLKLHPNSQPLFAFEWRDPEKGNTGQLTWTRLPQGFKNSPTLFNEALHRDLASFRALNPQVVMLQYVDDLLVAAPTYRDCKEGTRRLLQELSKLGYRVSAKKAQLCREEVTYLGYLLKGGKRWLTPARKATVMKIPTPTTPRQVREFLGTAGFCRLWIPGFASLAAPLYPLTRPKVPFTWTEAHQEAFGRIKEALLSAPALALPDLTKPFALYVDEKEGVARGVLTQTLGPWRRPVAYLSKKLDPVASGWPTCLKAIAAVALLLKDADKLTLGQNVLVIAPHNLESIVRQPPDRWMTNARMTHYQSLLLNERVSFAPPAILNPATLLPVESDDTPIHICSEILAEETGTRPDLRDQPLPGVPAWYTDGSSFIMDGRRQAGAAIVDNKRTVWASNLPEGTSAQKAELIALTQALRLAEGKSINIYTDSRYAFATAHVHGAIYKQRGWLTSAGKDIKNKEEILALLEAIHLPKRVAIIHCPGHQRGTDPVATGNRKADEAAKQAAQSTRILTETTKNAGKRTADGSEFEKRTADGSEFESPKKKAKVE

SEQ ID NO: 7633 - protein, 2127 aa, synthetic construct
MPAAKRVKLDGGDKKYSIGLDIGTNSVGWAVITDEYKVPSKKFKVLGNTDRHSIKKNLIGALLFDSGETAEATRLKRTARRRYTRRKNRICYLQEIFSNEMAKVDDSFFHRLEESFLVEEDKKHERHPIFGNIVDEVAYHEKYPTIYHLRKKLVDSTDKADLRLIYLALAHMIKFRGHFLIEGDLNPDNSDVDKLFIQLVQTYNQLFEENPINASGVDAKAILSARLSKSRRLENLIAQLPGEKKNGLFGNLIALSLGLTPNFKSNFDLAEDAKLQLSKDTYDDDLDNLLAQIGDQYADLFLAAKNLSDAILLSDILRVNTEITKAPLSASMIKRYDEHHQDLTLLKALVRQQLPEKYKEIFFDQSKNGYAGYIDGGASQEEFYKFIKPILEKMDGTEELLVKLNREDLLRKQRTFDNGSIPHQIHLGELHAILRRQEDFYPFLKDNREKIEKILTFRIPYYVGPLARGNSRFAWMTRKSEETITPWNFEEVVDKGASAQSFIERMTNFDKNLPNEKVLPKHSLLYEYFTVYNELTKVKYVTEGMRKPAFLSGEQKKAIVDLLFKTNRKVTVKQLKEDYFKKIECFDSVEISGVEDRFNASLGTYHDLLKIIKDKDFLDNEENEDILEDIVLTLTLFEDREMIEERLKTYAHLFDDKVMKQLKRRRYTGWGRLSRKLINGIRDKQSGKTILDFLKSDGFANRNFMQLIHDDSLTFKEDIQKAQVSGQGDSLHEHIANLAGSPAIKKGILQTVKVVDELVKVMGRHKPENIVIEMARENQTTQKGQKNSRERMKRIEEGIKELGSQILKEHPVENTQLQNEKLYLYYLQNGRDMYVDQELDINRLSDYDVDHIVPQSFLKDDSIDNKVLTRSDKARGKSDNVPSEEVVKKMKNYWRQLLNAKLITQRKFDNLTKAERGGLSELDKAGFIKRQLVETRQITKHVAQILDSRMNTKYDENDKLIREVKVITLKSKLVSDFRKDFQFYKVREINNYHHAHDAYLNAVVGTALIKKYPKLESEFVYGDYKVYDVRKMIAKSEQEIGKATAKYFFYSNIMNFFKTEITLANGEIRKRPLIETNGETGEIVWDKGRDFATVRKVLSMPQVNIVKKTEVQTGGFSKESILPKRNSDKLIARKKDWDPKKYGGFDSPTVAYSVLVVAKVEKGKSKKLKSVKELLGITIMERSSFEKNPIDFLEAKGYKEVKKDLIIKLPKYSLFELENGRKRMLASAGELQKGNELALPSKYVNFLYLASHYEKLKGSPEDNEQKQLFVEQHKHYLDEIIEQISEFSKRVILADANLDKVLSAYNKHRDKPIREQAENIIHLFTLTNLGAPAAFKYFDTTIDRKRYTSTKEVLDATLIHQSITGLYETRIDLSQLGGDGGPAPGSSEAAAKGGLLGRDLLTKLKAQIQFSTEGPQVTWEDRPAMCLVLNLEEEYRLHEKPVPPSIDPSWLQLFPMVWAEKAGMGLANQVPPVVVELKSDASPVAVRQYPMSKEAREGIRPHIQRFLDLGILVPCQSPWNTPLLPVKKPGTNDYRPVQDLREVNKRVQDIHPTVPNPYNLLSSLPPSHTWYSVLDLKDAFFCLKLHPNSQPLFAFEWRDPEKGNTGQLTWTRLPQGFKNSPTLFNEALHRDLASFRALNPQVVMLQYVDDLLVAAPTYRDCKEGTRRLLQELSKLGYRVSAKKAQLCREEVTYLGYLLKGGKRWLTPARKATVMKIPTPTTPRQVREFLGKAGFCRLFIPGFASLAAPLYPLTRPKVPFTWTEAHQEAFGRIKEALLSAPALALPDLTKPFALYVDEKEGVARGVLTQTLGPWRRPVAYLSKKLDPVASGWPTCLKAIAAVALLLKDADKLTLGQNVLVIAPHNLESIVRQPPDRWMTNARMTHYQSLLLNERVSFAPPAILNPATLLPVESDDTPIHICSEILAEETGTRPDLRDQPLPGVPAWYTDGSSFIMDGRRQAGAAIVDNKRTVWASNLPEGTSAQKAELIALTQALRLAEGKSINIYTDSRYAFATAHVHGAIYKQRGWLTSAGKDIKNKEEILALLEAIHLPKRVAIIHCPGHQRGTDPVATGNRKADEAAKQAAQSTRILTETTKNAGKRTADGSEFEKRTADGSEFESPKKKAKVE

SEQ ID NO: 7634 - protein, 2218 aa, synthetic construct
MPAAKRVKLDGGDKKYSIGLDIGTNSVGWAVITDEYKVPSKKFKVLGNTDRHSIKKNLIGALLFDSGETAEATRLKRTARRRYTRRKNRICYLQEIFSNEMAKVDDSFFHRLEESFLVEEDKKHERHPIFGNIVDEVAYHEKYPTIYHLRKKLVDSTDKADLRLIYLALAHMIKFRGHFLIEGDLNPDNSDVDKLFIQLVQTYNQLFEENPINASGVDAKAILSARLSKSRRLENLIAQLPGEKKNGLFGNLIALSLGLTPNFKSNFDLAEDAKLQLSKDTYDDDLDNLLAQIGDQYADLFLAAKNLSDAILLSDILRVNTEITKAPLSASMIKRYDEHHQDLTLLKALVRQQLPEKYKEIFFDQSKNGYAGYIDGGASQEEFYKFIKPILEKMDGTEELLVKLNREDLLRKQRTFDNGSIPHQIHLGELHAILRRQEDFYPFLKDNREKIEKILTFRIPYYVGPLARGNSRFAWMTRKSEETITPWNFEEVVDKGASAQSFIERMTNFDKNLPNEKVLPKHSLLYEYFTVYNELTKVKYVTEGMRKPAFLSGEQKKAIVDLLFKTNRKVTVKQLKEDYFKKIECFDSVEISGVEDRFNASLGTYHDLLKIIKDKDFLDNEENEDILEDIVLTLTLFEDREMIEERLKTYAHLFDDKVMKQLKRRRYTGWGRLSRKLINGIRDKQSGKTILDFLKSDGFANRNFMQLIHDDSLTFKEDIQKAQVSGQGDSLHEHIANLAGSPAIKKGILQTVKVVDELVKVMGRHKPENIVIEMARENQTTQKGQKNSRERMKRIEEGIKELGSQILKEHPVENTQLQNEKLYLYYLQNGRDMYVDQELDINRLSDYDVDHIVPQSFLKDDSIDNKVLTRSDKARGKSDNVPSEEVVKKMKNYWRQLLNAKLITQRKFDNLTKAERGGLSELDKAGFIKRQLVETRQITKHVAQILDSRMNTKYDENDKLIREVKVITLKSKLVSDFRKDFQFYKVREINNYHHAHDAYLNAVVGTALIKKYPKLESEFVYGDYKVYDVRKMIAKSEQEIGKATAKYFFYSNIMNFFKTEITLANGEIRKRPLIETNGETGEIVWDKGRDFATVRKVLSMPQVNIVKKTEVQTGGFSKESILPKRNSDKLIARKKDWDPKKYGGFDSPTVAYSVLVVAKVEKGKSKKLKSVKELLGITIMERSSFEKNPIDFLEAKGYKEVKKDLIIKLPKYSLFELENGRKRMLASAGELQKGNELALPSKYVNFLYLASHYEKLKGSPEDNEQKQLFVEQHKHYLDEIIEQISEFSKRVILADANLDKVLSAYNKHRDKPIREQAENIIHLFTLTNLGAPAAFKYFDTTIDRKRYTSTKEVLDATLIHQSITGLYETRIDLSQLGGDGGPAPGSSEAAAKGGTLGDQGSRGSDPLPEPRVTLTVEGIPTEFLVNTGAEHSVLTKPMGKMGSKRTVVAGATGSKVYPWTTKRLLKIGQKQVTHSFLVIPECPAPLLGRDLLTKLKAQIQFSTEGPQVTWEDRPAMCLVLNLEEEYRLHEKPVPPSIDPSWLQLFPMVWAEKAGMGLANQVPPVVVELKSDASPVAVRQYPMSKEAREGIRPHIQRFLDLGILVPCQSPWNTPLLPVKKPGTNDYRPVQDLREVNKRVQDIHPTVPNPYNLLSSLPPSHTWYSVLDLKDAFFCLKLHPNSQPLFAFEWRDPEKGNTGQLTWTRLPQGFKNSPTLFNEALHRDLASFRALNPQVVMLQYVDDLLVAAPTYRDCKEGTRRLLQELSKLGYRVSAKKAQLCREEVTYLGYLLKGGKRWLTPARKATVMKIPTPTTPRQVREFLGTAGFCRLWIPGFASLAAPLYPLTRPKVPFTWTEAHQEAFGRIKEALLSAPALALPDLTKPFALYVDEKEGVARGVLTQTLGPWRRPVAYLSKKLDPVASGWPTCLKAIAAVALLLKDADKLTLGQNVLVIAPHNLESIVRQPPDRWMTNARMTHYQSLLLNERVSFAPPAILNPATLLPVESDDTPIHICSEILAEETGTRPDLRDQPLPGVPAWYTDGSSFIMDGRRQAGAAIVDNKRTVWASNLPEGTSAQKAELIALTQALRLAEGKSINIYTDSRYAFATAHVHGAIYKQRGWLTSAGKDIKNKEEILALLEAIHLPKRVAIIHCPGHQRGTDPVATGNRKADEAAKQAAQSTRILTETTKNAGKRTADGSEFEKRTADGSEFESPKKKAKVE

SEQ ID NO: 7635 - protein, 2218 aa, synthetic construct
MPAAKRVKLDGGDKKYSIGLDIGTNSVGWAVITDEYKVPSKKFKVLGNTDRHSIKKNLIGALLFDSGETAEATRLKRTARRRYTRRKNRICYLQEIFSNEMAKVDDSFFHRLEESFLVEEDKKHERHPIFGNIVDEVAYHEKYPTIYHLRKKLVDSTDKADLRLIYLALAHMIKFRGHFLIEGDLNPDNSDVDKLFIQLVQTYNQLFEENPINASGVDAKAILSARLSKSRRLENLIAQLPGEKKNGLFGNLIALSLGLTPNFKSNFDLAEDAKLQLSKDTYDDDLDNLLAQIGDQYADLFLAAKNLSDAILLSDILRVNTEITKAPLSASMIKRYDEHHQDLTLLKALVRQQLPEKYKEIFFDQSKNGYAGYIDGGASQEEFYKFIKPILEKMDGTEELLVKLNREDLLRKQRTFDNGSIPHQIHLGELHAILRRQEDFYPFLKDNREKIEKILTFRIPYYVGPLARGNSRFAWMTRKSEETITPWNFEEVVDKGASAQSFIERMTNFDKNLPNEKVLPKHSLLYEYFTVYNELTKVKYVTEGMRKPAFLSGEQKKAIVDLLFKTNRKVTVKQLKEDYFKKIECFDSVEISGVEDRFNASLGTYHDLLKIIKDKDFLDNEENEDILEDIVLTLTLFEDREMIEERLKTYAHLFDDKVMKQLKRRRYTGWGRLSRKLINGIRDKQSGKTILDFLKSDGFANRNFMQLIHDDSLTFKEDIQKAQVSGQGDSLHEHIANLAGSPAIKKGILQTVKVVDELVKVMGRHKPENIVIEMARENQTTQKGQKNSRERMKRIEEGIKELGSQILKEHPVENTQLQNEKLYLYYLQNGRDMYVDQELDINRLSDYDVDHIVPQSFLKDDSIDNKVLTRSDKARGKSDNVPSEEVVKKMKNYWRQLLNAKLITQRKFDNLTKAERGGLSELDKAGFIKRQLVETRQITKHVAQILDSRMNTKYDENDKLIREVKVITLKSKLVSDFRKDFQFYKVREINNYHHAHDAYLNAVVGTALIKKYPKLESEFVYGDYKVYDVRKMIAKSEQEIGKATAKYFFYSNIMNFFKTEITLANGEIRKRPLIETNGETGEIVWDKGRDFATVRKVLSMPQVNIVKKTEVQTGGFSKESILPKRNSDKLIARKKDWDPKKYGGFDSPTVAYSVLVVAKVEKGKSKKLKSVKELLGITIMERSSFEKNPIDFLEAKGYKEVKKDLIIKLPKYSLFELENGRKRMLASAGELQKGNELALPSKYVNFLYLASHYEKLKGSPEDNEQKQLFVEQHKHYLDEIIEQISEFSKRVILADANLDKVLSAYNKHRDKPIREQAENIIHLFTLTNLGAPAAFKYFDTTIDRKRYTSTKEVLDATLIHQSITGLYETRIDLSQLGGDGGPAPGSSEAAAKGGTLGDQGSRGSDPLPEPRVTLTVEGIPTEFLVNTGAEHSVLTKPMGKMGSKRTVVAGATGSKVYPWTTKRLLKIGQKQVTHSFLVIPECPAPLLGRDLLTKLKAQIQFSTEGPQVTWEDRPAMCLVLNLEEEYRLHEKPVPPSIDPSWLQLFPMVWAEKAGMGLANQVPPVVVELKSDASPVAVRQYPMSKEAREGIRPHIQRFLDLGILVPCQSPWNTPLLPVKKPGTNDYRPVQDLREVNKRVQDIHPTVPNPYNLLSSLPPSHTWYSVLDLKDAFFCLKLHPNSQPLFAFEWRDPEKGNTGQLTWTRLPQGFKNSPTLFNEALHRDLASFRALNPQVVMLQYVDDLLVAAPTYRDCKEGTRRLLQELSKLGYRVSAKKAQLCREEVTYLGYLLKGGKRWLTPARKATVMKIPTPTTPRQVREFLGKAGFCRLFIPGFASLAAPLYPLTRPKVPFTWTEAHQEAFGRIKEALLSAPALALPDLTKPFALYVDEKEGVARGVLTQTLGPWRRPVAYLSKKLDPVASGWPTCLKAIAAVALLLKDADKLTLGQNVLVIAPHNLESIVRQPPDRWMTNARMTHYQSLLLNERVSFAPPAILNPATLLPVESDDTPIHICSEILAEETGTRPDLRDQPLPGVPAWYTDGSSFIMDGRRQAGAAIVDNKRTVWASNLPEGTSAQKAELIALTQALRLAEGKSINIYTDSRYAFATAHVHGAIYKQRGWLTSAGKDIKNKEEILALLEAIHLPKRVAIIHCPGHQRGTDPVATGNRKADEAAKQAAQSTRILTETTKNAGKRTADGSEFEKRTADGSEFESPKKKAKVE

SEQ ID NO: 7636 - protein, 2096 aa, synthetic construct
MPAAKRVKLDGGDKKYSIGLDIGTNSVGWAVITDEYKVPSKKFKVLGNTDRHSIKKNLIGALLFDSGETAEATRLKRTARRRYTRRKNRICYLQEIFSNEMAKVDDSFFHRLEESFLVEEDKKHERHPIFGNIVDEVAYHEKYPTIYHLRKKLVDSTDKADLRLIYLALAHMIKFRGHFLIEGDLNPDNSDVDKLFIQLVQTYNQLFEENPINASGVDAKAILSARLSKSRRLENLIAQLPGEKKNGLFGNLIALSLGLTPNFKSNFDLAEDAKLQLSKDTYDDDLDNLLAQIGDQYADLFLAAKNLSDAILLSDILRVNTEITKAPLSASMIKRYDEHHQDLTLLKALVRQQLPEKYKEIFFDQSKNGYAGYIDGGASQEEFYKFIKPILEKMDGTEELLVKLNREDLLRKQRTFDNGSIPHQIHLGELHAILRRQEDFYPFLKDNREKIEKILTFRIPYYVGPLARGNSRFAWMTRKSEETITPWNFEEVVDKGASAQSFIERMTNFDKNLPNEKVLPKHSLLYEYFTVYNELTKVKYVTEGMRKPAFLSGEQKKAIVDLLFKTNRKVTVKQLKEDYFKKIECFDSVEISGVEDRFNASLGTYHDLLKIIKDKDFLDNEENEDILEDIVLTLTLFEDREMIEERLKTYAHLFDDKVMKQLKRRRYTGWGRLSRKLINGIRDKQSGKTILDFLKSDGFANRNFMQLIHDDSLTFKEDIQKAQVSGQGDSLHEHIANLAGSPAIKKGILQTVKVVDELVKVMGRHKPENIVIEMARENQTTQKGQKNSRERMKRIEEGIKELGSQILKEHPVENTQLQNEKLYLYYLQNGRDMYVDQELDINRLSDYDVDHIVPQSFLKDDSIDNKVLTRSDKARGKSDNVPSEEVVKKMKNYWRQLLNAKLITQRKFDNLTKAERGGLSELDKAGFIKRQLVETRQITKHVAQILDSRMNTKYDENDKLIREVKVITLKSKLVSDFRKDFQFYKVREINNYHHAHDAYLNAVVGTALIKKYPKLESEFVYGDYKVYDVRKMIAKSEQEIGKATAKYFFYSNIMNFFKTEITLANGEIRKRPLIETNGETGEIVWDKGRDFATVRKVLSMPQVNIVKKTEVQTGGFSKESILPKRNSDKLIARKKDWDPKKYGGFDSPTVAYSVLVVAKVEKGKSKKLKSVKELLGITIMERSSFEKNPIDFLEAKGYKEVKKDLIIKLPKYSLFELENGRKRMLASAGELQKGNELALPSKYVNFLYLASHYEKLKGSPEDNEQKQLFVEQHKHYLDEIIEQISEFSKRVILADANLDKVLSAYNKHRDKPIREQAENIIHLFTLTNLGAPAAFKYFDTTIDRKRYTSTKEVLDATLIHQSITGLYETRIDLSQLGGDGGPAPGSSEAAAKGGTLGIEDEYRLHETSTEPDVSLGSTWLSDFPQAWAETGGMGLAVRQAPLIIPLKATSTPVSIQQYPMSHEARLGIKPHIQRLLDQGILVPCQSPWNTPLLPVKKPGTNDYRPVQDLREVNKRVEDIHPTVPNPYNLLSGLPPSHQWYTVLDLKDAFFCLRLHPTSQPLFAFEWRDPGMGISGQLTWTRLPQGFKNSPTLFNEALHRDLADFRIQHPDLILLQYVDDILLAATSELDCQQGTRALLQTLGDLGYRASAKKAQICQKQVKYLGYLLREGQRWLTEARKETVMGQPVPKTPRQLREFLGTAGFCRLWIPGFAEMAAPLYPLTKPGTLFSWGPDQQKAYQEIKQALLTAPALGLPDLTKPFELFVDEKQGYAKGVLTQKLGPWRRPVAYLSKKLDPVAAGWPPCLRMVAAIAVLTKDAGKLTMGQPLVILAPHAVEALVKQPPDRWLSNARMTHYQAMLLDTDRVQFGPVVALNPATLLPLPEEGAPHDCLEILAETHGTRPDLTDQPIPDADHTWYTDGSSFLQEGQRKAGAAVTTETEVIWAGALPAGTSAQRAELIALTQALKMAEGKRLNVYTDSRYAFATAHIHGEIYRRRGWLTSEGREIKNKSEILALLKALFLPKRLSIIHCLGHQKGDSAEARGNRLADQAAREAAIKTPPDTSTLLAGKRTADGSEFEKRTADGSEFESPKKKAKVE

SEQ ID NO: 7637 - protein, 2096 aa, synthetic construct
MPAAKRVKLDGGDKKYSIGLDIGTNSVGWAVITDEYKVPSKKFKVLGNTDRHSIKKNLIGALLFDSGETAEATRLKRTARRRYTRRKNRICYLQEIFSNEMAKVDDSFFHRLEESFLVEEDKKHERHPIFGNIVDEVAYHEKYPTIYHLRKKLVDSTDKADLRLIYLALAHMIKFRGHFLIEGDLNPDNSDVDKLFIQLVQTYNQLFEENPINASGVDAKAILSARLSKSRRLENLIAQLPGEKKNGLFGNLIALSLGLTPNFKSNFDLAEDAKLQLSKDTYDDDLDNLLAQIGDQYADLFLAAKNLSDAILLSDILRVNTEITKAPLSASMIKRYDEHHQDLTLLKALVRQQLPEKYKEIFFDQSKNGYAGYIDGGASQEEFYKFIKPILEKMDGTEELLVKLNREDLLRKQRTFDNGSIPHQIHLGELHAILRRQEDFYPFLKDNREKIEKILTFRIPYYVGPLARGNSRFAWMTRKSEETITPWNFEEVVDKGASAQSFIERMTNFDKNLPNEKVLPKHSLLYEYFTVYNELTKVKYVTEGMRKPAFLSGEQKKAIVDLLFKTNRKVTVKQLKEDYFKKIECFDSVEISGVEDRFNASLGTYHDLLKIIKDKDFLDNEENEDILEDIVLTLTLFEDREMIEERLKTYAHLFDDKVMKQLKRRRYTGWGRLSRKLINGIRDKQSGKTILDFLKSDGFANRNFMQLIHDDSLTFKEDIQKAQVSGQGDSLHEHIANLAGSPAIKKGILQTVKVVDELVKVMGRHKPENIVIEMARENQTTQKGQKNSRERMKRIEEGIKELGSQILKEHPVENTQLQNEKLYLYYLQNGRDMYVDQELDINRLSDYDVDHIVPQSFLKDDSIDNKVLTRSDKARGKSDNVPSEEVVKKMKNYWRQLLNAKLITQRKFDNLTKAERGGLSELDKAGFIKRQLVETRQITKHVAQILDSRMNTKYDENDKLIREVKVITLKSKLVSDFRKDFQFYKVREINNYHHAHDAYLNAVVGTALIKKYPKLESEFVYGDYKVYDVRKMIAKSEQEIGKATAKYFFYSNIMNFFKTEITLANGEIRKRPLIETNGETGEIVWDKGRDFATVRKVLSMPQVNIVKKTEVQTGGFSKESILPKRNSDKLIARKKDWDPKKYGGFDSPTVAYSVLVVAKVEKGKSKKLKSVKELLGITIMERSSFEKNPIDFLEAKGYKEVKKDLIIKLPKYSLFELENGRKRMLASAGELQKGNELALPSKYVNFLYLASHYEKLKGSPEDNEQKQLFVEQHKHYLDEIIEQISEFSKRVILADANLDKVLSAYNKHRDKPIREQAENIIHLFTLTNLGAPAAFKYFDTTIDRKRYTSTKEVLDATLIHQSITGLYETRIDLSQLGGDGGPAPGSSEAAAKGGTLNIEDEYRLHETSKEPDVSLGSTWLSDFPQAWAETGGMGLAVRQAPLIIPLKATSTPVSIKQYPMSQEARLGIKPHIQRLLDQGILVPCQSPWNTPLLPVKKPGTNDYRPVQDLREVNKRVEDIHPTVPNPYNLLSGLPPSHQWYTVLDLKDAFFCLRLHPTSQPLFAFEWRDPEMGISGQLTWTRLPQGFKNSPTLFDEALHRDLAGFRIQHPDLILLQYVDDLLLAATSELDCQQGTRALLQTLGDLGYRASAKKAQICQKQVKYLGYLLKEGQRWLTEARKETVMGQPIPKTPRQLREFLGTAGFCRLWIPGFAEMAAPLYPLTKTGTLFNWGPDQQKAFQEIKQALLTAPALGLPDLTKPFELFVDEKQGYAKGVLTQKLGPWRRPVAYLSKKLDPVAAGWPPCLRMVAAIAVLTKDAGKLTMGQPLVILAPHAVEALVKQPPDRWLSNARMTHYQALLLDTDRVQFGPVVALNPATLLPLPEEGLQHDCLDILAEAHGTRSDLMDQPLPDADHTWYTDGSSFLQEGQRKAGAAVTTETEVIWARALPAGTSAQRAELIALTQALKMAEGKKLNVYTDSRYAFATAHIHGEIYRRRGLLTSEGKEIKNKDEILALLKALFLPKRLSIIHCPGHQKGNSAEARGNRMADQAAREVATRETPETSTLLAGKRTADGSEFEKRTADGSEFESPKKKAKVE

SEQ ID NO: 7638 - protein, 2096 aa, synthetic construct
MPAAKRVKLDGGDKKYSIGLDIGTNSVGWAVITDEYKVPSKKFKVLGNTDRHSIKKNLIGALLFDSGETAEATRLKRTARRRYTRRKNRICYLQEIFSNEMAKVDDSFFHRLEESFLVEEDKKHERHPIFGNIVDEVAYHEKYPTIYHLRKKLVDSTDKADLRLIYLALAHMIKFRGHFLIEGDLNPDNSDVDKLFIQLVQTYNQLFEENPINASGVDAKAILSARLSKSRRLENLIAQLPGEKKNGLFGNLIALSLGLTPNFKSNFDLAEDAKLQLSKDTYDDDLDNLLAQIGDQYADLFLAAKNLSDAILLSDILRVNTEITKAPLSASMIKRYDEHHQDLTLLKALVRQQLPEKYKEIFFDQSKNGYAGYIDGGASQEEFYKFIKPILEKMDGTEELLVKLNREDLLRKQRTFDNGSIPHQIHLGELHAILRRQEDFYPFLKDNREKIEKILTFRIPYYVGPLARGNSRFAWMTRKSEETITPWNFEEVVDKGASAQSFIERMTNFDKNLPNEKVLPKHSLLYEYFTVYNELTKVKYVTEGMRKPAFLSGEQKKAIVDLLFKTNRKVTVKQLKEDYFKKIECFDSVEISGVEDRFNASLGTYHDLLKIIKDKDFLDNEENEDILEDIVLTLTLFEDREMIEERLKTYAHLFDDKVMKQLKRRRYTGWGRLSRKLINGIRDKQSGKTILDFLKSDGFANRNFMQLIHDDSLTFKEDIQKAQVSGQGDSLHEHIANLAGSPAIKKGILQTVKVVDELVKVMGRHKPENIVIEMARENQTTQKGQKNSRERMKRIEEGIKELGSQILKEHPVENTQLQNEKLYLYYLQNGRDMYVDQELDINRLSDYDVDHIVPQSFLKDDSIDNKVLTRSDKARGKSDNVPSEEVVKKMKNYWRQLLNAKLITQRKFDNLTKAERGGLSELDKAGFIKRQLVETRQITKHVAQILDSRMNTKYDENDKLIREVKVITLKSKLVSDFRKDFQFYKVREINNYHHAHDAYLNAVVGTALIKKYPKLESEFVYGDYKVYDVRKMIAKSEQEIGKATAKYFFYSNIMNFFKTEITLANGEIRKRPLIETNGETGEIVWDKGRDFATVRKVLSMPQVNIVKKTEVQTGGFSKESILPKRNSDKLIARKKDWDPKKYGGFDSPTVAYSVLVVAKVEKGKSKKLKSVKELLGITIMERSSFEKNPIDFLEAKGYKEVKKDLIIKLPKYSLFELENGRKRMLASAGELQKGNELALPSKYVNFLYLASHYEKLKGSPEDNEQKQLFVEQHKHYLDEIIEQISEFSKRVILADANLDKVLSAYNKHRDKPIREQAENIIHLFTLTNLGAPAAFKYFDTTIDRKRYTSTKEVLDATLIHQSITGLYETRIDLSQLGGDGGPAPGSSEAAAKGGTLNIEDEHRLHETSKEPDVSLGSTWLSDFPQAWAETGGMGLAVRQAPLIIPLKATSTPVSIKQYPMSQEARLGIKPHIQRLLDQGILVPCQSPWNTPLLPVKKPGTNDYRPVQDLREVNKRVEDIHPTVPNPYNLLSGLPPSHQWYTVLDLKDAFFCLRLHPTSQPLFAFEWRDPEMGISGQLTWTRLPQGFKNSPTLFDEALHRDLADFRIQHPDLILLQYVDDLLLAATSELDCQQGTRALLQTLGNLGYRASAKKAQICQKQVKYLGYLLKEGQRWLTEARKETVMGQPTPKTPRQLREFLGTAGFCRLWIPGFAEMAAPLYPLTKTGTLFNWGPDQQKAYQEIKQALLTAPALGLPDLTKPFELFVDEKQGYAKGVLTQKLGPWRRPVAYLSKKLDPVAAGWPPCLRMVAAIAVLTKDAGKLTMGQPLVILAPHAVEALVKQPPDRWLSNARMTHYQALLLDTDRVQFGPVVALNPATLLPLPEEGLQHNCLDILAEAHGTRPDLTDQPLPDADHTWYTDGSSLLQEGQRKAGAAVTTETEVIWAKALPAGTSAQRAELIALTQALKMAEGKKLNVYTDSRYAFATAHIHGEIYRRRGLLTSEGKEIKNKDEILALLKALFLPKRLSIIHCPGHQKGHSAEARGNRMADQAARKAAITETPDTSTLLAGKRTADGSEFEKRTADGSEFESPKKKAKVE

SEQ ID NO: 7639 - protein, 2096 aa, synthetic construct
MPAAKRVKLDGGDKKYSIGLDIGTNSVGWAVITDEYKVPSKKFKVLGNTDRHSIKKNLIGALLFDSGETAEATRLKRTARRRYTRRKNRICYLQEIFSNEMAKVDDSFFHRLEESFLVEEDKKHERHPIFGNIVDEVAYHEKYPTIYHLRKKLVDSTDKADLRLIYLALAHMIKFRGHFLIEGDLNPDNSDVDKLFIQLVQTYNQLFEENPINASGVDAKAILSARLSKSRRLENLIAQLPGEKKNGLFGNLIALSLGLTPNFKSNFDLAEDAKLQLSKDTYDDDLDNLLAQIGDQYADLFLAAKNLSDAILLSDILRVNTEITKAPLSASMIKRYDEHHQDLTLLKALVRQQLPEKYKEIFFDQSKNGYAGYIDGGASQEEFYKFIKPILEKMDGTEELLVKLNREDLLRKQRTFDNGSIPHQIHLGELHAILRRQEDFYPFLKDNREKIEKILTFRIPYYVGPLARGNSRFAWMTRKSEETITPWNFEEVVDKGASAQSFIERMTNFDKNLPNEKVLPKHSLLYEYFTVYNELTKVKYVTEGMRKPAFLSGEQKKAIVDLLFKTNRKVTVKQLKEDYFKKIECFDSVEISGVEDRFNASLGTYHDLLKIIKDKDFLDNEENEDILEDIVLTLTLFEDREMIEERLKTYAHLFDDKVMKQLKRRRYTGWGRLSRKLINGIRDKQSGKTILDFLKSDGFANRNFMQLIHDDSLTFKEDIQKAQVSGQGDSLHEHIANLAGSPAIKKGILQTVKVVDELVKVMGRHKPENIVIEMARENQTTQKGQKNSRERMKRIEEGIKELGSQILKEHPVENTQLQNEKLYLYYLQNGRDMYVDQELDINRLSDYDVDHIVPQSFLKDDSIDNKVLTRSDKARGKSDNVPSEEVVKKMKNYWRQLLNAKLITQRKFDNLTKAERGGLSELDKAGFIKRQLVETRQITKHVAQILDSRMNTKYDENDKLIREVKVITLKSKLVSDFRKDFQFYKVREINNYHHAHDAYLNAVVGTALIKKYPKLESEFVYGDYKVYDVRKMIAKSEQEIGKATAKYFFYSNIMNFFKTEITLANGEIRKRPLIETNGETGEIVWDKGRDFATVRKVLSMPQVNIVKKTEVQTGGFSKESILPKRNSDKLIARKKDWDPKKYGGFDSPTVAYSVLVVAKVEKGKSKKLKSVKELLGITIMERSSFEKNPIDFLEAKGYKEVKKDLIIKLPKYSLFELENGRKRMLASAGELQKGNELALPSKYVNFLYLASHYEKLKGSPEDNEQKQLFVEQHKHYLDEIIEQISEFSKRVILADANLDKVLSAYNKHRDKPIREQAENIIHLFTLTNLGAPAAFKYFDTTIDRKRYTSTKEVLDATLIHQSITGLYETRIDLSQLGGDGGPAPGSSEAAAKGGTLNIEDEYRLHETSKEPDVPLGSTWLSDFPQAWAETGGMGLAVRQAPLIIPLKATSTPVSIKQYPMSQEARLGIKPHIQRLLDQGILVPCQSPWNTPLLPVKKPGTNDYRPVQDLREVNKRVEDIHPTVPNPYNLLSGLPPSHQWYTVLDLKDAFFCLRLHPTSQPLFAFEWRDPEMGISGQLTWTRLPQGFKNSPTLFNEALHRDLADFRIQHPDLILLQYVDDLLLAATSEQDCQRGTRALLQTLGNLGYRASAKKAQICQKQVKYLGYLLKEGQRWLTEARKETVMGQPTPKTPRQLREFLGKAGFCRLFIPGFAEMAAPLYPLTKPGTLFNWGPDQQKAYQEIKQALLTAPALGLPDLTKPFELFVDEKQGYAKGVLTQKLGPWRRPVAYLSKKLDPVAAGWPPCLRMVAAIAVLTKDAGKLTMGQPLVILAPHAVEALVKQPPDRWLSNARMTHYQAMLLDTDRVQFGPVVALNPATLLPLPEKEAPHDCLEILAETHGTRPDLTDQPIPDADYTWYTDGSSFLQEGQRRAGAAVTTETEVIWARALPAGTSAQRAELIALTQALKMAEGKKLNVYTDSRYAFATAHVHGEIYRRRGWLTSEGREIKNKNEILALLKALFLPKRLSIIHCPGHQKGNSAEARGNRMADQAAREAAMKAVLETSTLLAGKRTADGSEFEKRTADGSEFESPKKKAKVE

SEQ ID NO: 7640 - protein, 2102 aa, synthetic construct
MPAAKRVKLDGGDKKYSIGLDIGTNSVGWAVITDEYKVPSKKFKVLGNTDRHSIKKNLIGALLFDSGETAEATRLKRTARRRYTRRKNRICYLQEIFSNEMAKVDDSFFHRLEESFLVEEDKKHERHPIFGNIVDEVAYHEKYPTIYHLRKKLVDSTDKADLRLIYLALAHMIKFRGHFLIEGDLNPDNSDVDKLFIQLVQTYNQLFEENPINASGVDAKAILSARLSKSRRLENLIAQLPGEKKNGLFGNLIALSLGLTPNFKSNFDLAEDAKLQLSKDTYDDDLDNLLAQIGDQYADLFLAAKNLSDAILLSDILRVNTEITKAPLSASMIKRYDEHHQDLTLLKALVRQQLPEKYKEIFFDQSKNGYAGYIDGGASQEEFYKFIKPILEKMDGTEELLVKLNREDLLRKQRTFDNGSIPHQIHLGELHAILRRQEDFYPFLKDNREKIEKILTFRIPYYVGPLARGNSRFAWMTRKSEETITPWNFEEVVDKGASAQSFIERMTNFDKNLPNEKVLPKHSLLYEYFTVYNELTKVKYVTEGMRKPAFLSGEQKKAIVDLLFKTNRKVTVKQLKEDYFKKIECFDSVEISGVEDRFNASLGTYHDLLKIIKDKDFLDNEENEDILEDIVLTLTLFEDREMIEERLKTYAHLFDDKVMKQLKRRRYTGWGRLSRKLINGIRDKQSGKTILDFLKSDGFANRNFMQLIHDDSLTFKEDIQKAQVSGQGDSLHEHIANLAGSPAIKKGILQTVKVVDELVKVMGRHKPENIVIEMARENQTTQKGQKNSRERMKRIEEGIKELGSQILKEHPVENTQLQNEKLYLYYLQNGRDMYVDQELDINRLSDYDVDHIVPQSFLKDDSIDNKVLTRSDKARGKSDNVPSEEVVKKMKNYWRQLLNAKLITQRKFDNLTKAERGGLSELDKAGFIKRQLVETRQITKHVAQILDSRMNTKYDENDKLIREVKVITLKSKLVSDFRKDFQFYKVREINNYHHAHDAYLNAVVGTALIKKYPKLESEFVYGDYKVYDVRKMIAKSEQEIGKATAKYFFYSNIMNFFKTEITLANGEIRKRPLIETNGETGEIVWDKGRDFATVRKVLSMPQVNIVKKTEVQTGGFSKESILPKRNSDKLIARKKDWDPKKYGGFDSPTVAYSVLVVAKVEKGKSKKLKSVKELLGITIMERSSFEKNPIDFLEAKGYKEVKKDLIIKLPKYSLFELENGRKRMLASAGELQKGNELALPSKYVNFLYLASHYEKLKGSPEDNEQKQLFVEQHKHYLDEIIEQISEFSKRVILADANLDKVLSAYNKHRDKPIREQAENIIHLFTLTNLGAPAAFKYFDTTIDRKRYTSTKEVLDATLIHQSITGLYETRIDLSQLGGDGGPAPEAAAKGSSGGTVSLQDEHRLFDIPVTTSLPDVWLQDFPQAWAETGGLGRAKCQAPIIIDLKPTAVPVSIKQYPMSLEAHMGIRQHIIKFLELGVLRPCRSPWNTPLLPVKKPGTQDYRPVQDLREINKRTVDIHPTVPNPYNLLSTLKPDYSWYTVLDLKDAFFCLPLAPQSQELFAFEWKDPERGISGQLTWTRLPQGFKNSPTLFDEALHRDLTDFRTQHPEVTLLQYVDDLLLAAPTKKACTQGTRHLLQELGEKGYRASAKKAQICQTKVTYLGYILSEGKRWLTPGRIETVARIPPPRNPREVREFLGTAGFCRLWIPGFAELAAPLYALTKESTPFTWQTEHQLAFEALKKALLSAPALGLPDTSKPFTLFLDERQGIAKGVLTQKLGPWKRPVAYLSKKLDPVAAGWPPCLRIMAATAMLVKDSAKLTLGQPLTVITPHTLEAIVRQPPDRWITNARLTHYQALLLDTDRVQFGPPVTLNPATLLPVPENQPSPHDCRQVLAETHGTREDLKDQELPDADHTWYTDGSSYLDSGTRRAGAAVVDGHNTIWAQSLPPGTSAQKAELIALTKALELSKGKKANIYTDSRYAFATAHTHGSIYERRGLLTSEGKEIKNKAEIIALLKALFLPQEVAIIHCPGHQKGQDPVAVGNRQADRVARQAAMAEVLTLATEPDNTSHITAGKRTADGSEFEKRTADGSEFESPKKKAKVE

SEQ ID NO: 7641 - protein, 2095 aa, synthetic construct
MPAAKRVKLDGGDKKYSIGLDIGTNSVGWAVITDEYKVPSKKFKVLGNTDRHSIKKNLIGALLFDSGETAEATRLKRTARRRYTRRKNRICYLQEIFSNEMAKVDDSFFHRLEESFLVEEDKKHERHPIFGNIVDEVAYHEKYPTIYHLRKKLVDSTDKADLRLIYLALAHMIKFRGHFLIEGDLNPDNSDVDKLFIQLVQTYNQLFEENPINASGVDAKAILSARLSKSRRLENLIAQLPGEKKNGLFGNLIALSLGLTPNFKSNFDLAEDAKLQLSKDTYDDDLDNLLAQIGDQYADLFLAAKNLSDAILLSDILRVNTEITKAPLSASMIKRYDEHHQDLTLLKALVRQQLPEKYKEIFFDQSKNGYAGYIDGGASQEEFYKFIKPILEKMDGTEELLVKLNREDLLRKQRTFDNGSIPHQIHLGELHAILRRQEDFYPFLKDNREKIEKILTFRIPYYVGPLARGNSRFAWMTRKSEETITPWNFEEVVDKGASAQSFIERMTNFDKNLPNEKVLPKHSLLYEYFTVYNELTKVKYVTEGMRKPAFLSGEQKKAIVDLLFKTNRKVTVKQLKEDYFKKIECFDSVEISGVEDRFNASLGTYHDLLKIIKDKDFLDNEENEDILEDIVLTLTLFEDREMIEERLKTYAHLFDDKVMKQLKRRRYTGWGRLSRKLINGIRDKQSGKTILDFLKSDGFANRNFMQLIHDDSLTFKEDIQKAQVSGQGDSLHEHIANLAGSPAIKKGILQTVKVVDELVKVMGRHKPENIVIEMARENQTTQKGQKNSRERMKRIEEGIKELGSQILKEHPVENTQLQNEKLYLYYLQNGRDMYVDQELDINRLSDYDVDHIVPQSFLKDDSIDNKVLTRSDKARGKSDNVPSEEVVKKMKNYWRQLLNAKLITQRKFDNLTKAERGGLSELDKAGFIKRQLVETRQITKHVAQILDSRMNTKYDENDKLIREVKVITLKSKLVSDFRKDFQFYKVREINNYHHAHDAYLNAVVGTALIKKYPKLESEFVYGDYKVYDVRKMIAKSEQEIGKATAKYFFYSNIMNFFKTEITLANGEIRKRPLIETNGETGEIVWDKGRDFATVRKVLSMPQVNIVKKTEVQTGGFSKESILPKRNSDKLIARKKDWDPKKYGGFDSPTVAYSVLVVAKVEKGKSKKLKSVKELLGITIMERSSFEKNPIDFLEAKGYKEVKKDLIIKLPKYSLFELENGRKRMLASAGELQKGNELALPSKYVNFLYLASHYEKLKGSPEDNEQKQLFVEQHKHYLDEIIEQISEFSKRVILADANLDKVLSAYNKHRDKPIREQAENIIHLFTLTNLGAPAAFKYFDTTIDRKRYTSTKEVLDATLIHQSITGLYETRIDLSQLGGDGGPAPEAAAKGSSGGTLQLEEEYRLFEPESTQKQEMDIWLKNFPQAWAETGGMGTAHCQAPVLIQLKATATPISIRQYPMPHEAYQGIKPHIRRMLDQGILKPCQSPWNTPLLPVKKPGTEDYRPVQDLREVNKRVEDIHPTVPNPYNLLSTLPPSHPWYTVLDLKDAFFCLRLHSESQLLFAFEWRDPEIGLSGQLTWTRLPQGFKNSPTLFNEALHSDLADFRVRYPALVLLQYVDDLLLAAATRTECLEGTKALLETLGNKGYRASAKKAQICLQEVTYLGYSLKDGQRWLTKARKEAILSIPVPKNSRQVREFLGTAGYCRLWIPGFAELAAPLYPLTRPGTLFQWGTEQQLAFEDIKKALLSSPALGLPDITKPFELFIDENSGFAKGVLVQKLGPWKRPVAYLSKKLDTVASGWPPCLRMVAAIAILVKDAGKLTLGQPLTILTSHPVEALVRQPPNKWLSNARMTHYQAMLLDAERVHFGPTVSLNPATLLPLPSGGNHHDCLQILAETHGTRPDLTDQPLPDADLTWYTDGSSFIRNGEREAGAAVTTESEVIWAAPLPPGTSAQRAELIALTQALKMAEGKKLTVYTDSRYAFATTHVHGEIYRRRGWLTSEGKEIKNKNEILALLEALFLPKRLSIIHCPGHQKGDSPQAKGNRLADDTAKKAATETHSSLTVLPAGKRTADGSEFEKRTADGSEFESPKKKAKVE

SEQ ID NO: 7642 - protein, 2176 aa, synthetic construct
MPAAKRVKLDGGDKKYSIGLDIGTNSVGWAVITDEYKVPSKKFKVLGNTDRHSIKKNLIGALLFDSGETAEATRLKRTARRRYTRRKNRICYLQEIFSNEMAKVDDSFFHRLEESFLVEEDKKHERHPIFGNIVDEVAYHEKYPTIYHLRKKLVDSTDKADLRLIYLALAHMIKFRGHFLIEGDLNPDNSDVDKLFIQLVQTYNQLFEENPINASGVDAKAILSARLSKSRRLENLIAQLPGEKKNGLFGNLIALSLGLTPNFKSNFDLAEDAKLQLSKDTYDDDLDNLLAQIGDQYADLFLAAKNLSDAILLSDILRVNTEITKAPLSASMIKRYDEHHQDLTLLKALVRQQLPEKYKEIFFDQSKNGYAGYIDGGASQEEFYKFIKPILEKMDGTEELLVKLNREDLLRKQRTFDNGSIPHQIHLGELHAILRRQEDFYPFLKDNREKIEKILTFRIPYYVGPLARGNSRFAWMTRKSEETITPWNFEEVVDKGASAQSFIERMTNFDKNLPNEKVLPKHSLLYEYFTVYNELTKVKYVTEGMRKPAFLSGEQKKAIVDLLFKTNRKVTVKQLKEDYFKKIECFDSVEISGVEDRFNASLGTYHDLLKIIKDKDFLDNEENEDILEDIVLTLTLFEDREMIEERLKTYAHLFDDKVMKQLKRRRYTGWGRLSRKLINGIRDKQSGKTILDFLKSDGFANRNFMQLIHDDSLTFKEDIQKAQVSGQGDSLHEHIANLAGSPAIKKGILQTVKVVDELVKVMGRHKPENIVIEMARENQTTQKGQKNSRERMKRIEEGIKELGSQILKEHPVENTQLQNEKLYLYYLQNGRDMYVDQELDINRLSDYDVDHIVPQSFLKDDSIDNKVLTRSDKARGKSDNVPSEEVVKKMKNYWRQLLNAKLITQRKFDNLTKAERGGLSELDKAGFIKRQLVETRQITKHVAQILDSRMNTKYDENDKLIREVKVITLKSKLVSDFRKDFQFYKVREINNYHHAHDAYLNAVVGTALIKKYPKLESEFVYGDYKVYDVRKMIAKSEQEIGKATAKYFFYSNIMNFFKTEITLANGEIRKRPLIETNGETGEIVWDKGRDFATVRKVLSMPQVNIVKKTEVQTGGFSKESILPKRNSDKLIARKKDWDPKKYGGFDSPTVAYSVLVVAKVEKGKSKKLKSVKELLGITIMERSSFEKNPIDFLEAKGYKEVKKDLIIKLPKYSLFELENGRKRMLASAGELQKGNELALPSKYVNFLYLASHYEKLKGSPEDNEQKQLFVEQHKHYLDEIIEQISEFSKRVILADANLDKVLSAYNKHRDKPIREQAENIIHLFTLTNLGAPAAFKYFDTTIDRKRYTSTKEVLDATLIHQSITGLYETRIDLSQLGGDGGPAPEAAAKGSSGGMNPLQLLQPLPAEIKGTKLLAHWNSGATITCIPESFLEDEQPIKKTLIKTIHGEKQQNVYYVTFKVKGRKVEAEVIASPYEYILLSPTDVPWLTQQPLQLTILVPLQEYQEKILSKTALPEDQKQQLKTLFVKYDNLWQHWENQVGHRKIRPHNIATGDYPPRPQKQYPINPKAKPSIQIVIDDLLKQGVLTPQNSTMNTPVYPVPKPDGRWRMVLDYREVNKTIPLTAAQNQHSAGILATIVRQKYKTTLDLANGFWAHPITPESYWLTAFTWQGKQYCWTRLPQGFLNSPALFNADVVDLLKEIPNVQVYVDDIYLSHDDPKEHVQQLEKVFQILLQAGYVVSLKKSEIGQKTVEFLGFNITKEGRGLTDTFKTKLLNITPPKDLKQLQSILGLLNFARNFIPNFAELVQPLYNLIAPAKGKYIEWSEENTKQLNMVIEALNTASNLEERLPEQRLVIKVNTSPSAGYVRYYNETGKKPIMYLNYVFSKAELKFSMLEKLLTTMHKALIKAMDLAMGQEILVYSPIVSMTKIQKTPLPERKALPIRWITWMTYLEDPRIQFHYDKTLPELKHIPDVYTSSQSPVKHPSQYEGVFYTDGSAIKSPDPTKSNNAGMGIVHATYKPEYQVLNQWSIPLGNHTAQMAEIAAVEFACKKALKIPGPVLVITDSFYVAESANKELPYWKSNGFVNNKKKPLKHISKWKSIAECLSMKPDITIQHEKGISLQIPVFILKGNALADKLATQGSYVVNAGKRTADGSEFEKRTADGSEFESPKKKAKVE

SEQ ID NO: 7643 - protein, 2096 aa, synthetic construct
MPAAKRVKLDGGDKKYSIGLDIGTNSVGWAVITDEYKVPSKKFKVLGNTDRHSIKKNLIGALLFDSGETAEATRLKRTARRRYTRRKNRICYLQEIFSNEMAKVDDSFFHRLEESFLVEEDKKHERHPIFGNIVDEVAYHEKYPTIYHLRKKLVDSTDKADLRLIYLALAHMIKFRGHFLIEGDLNPDNSDVDKLFIQLVQTYNQLFEENPINASGVDAKAILSARLSKSRRLENLIAQLPGEKKNGLFGNLIALSLGLTPNFKSNFDLAEDAKLQLSKDTYDDDLDNLLAQIGDQYADLFLAAKNLSDAILLSDILRVNTEITKAPLSASMIKRYDEHHQDLTLLKALVRQQLPEKYKEIFFDQSKNGYAGYIDGGASQEEFYKFIKPILEKMDGTEELLVKLNREDLLRKQRTFDNGSIPHQIHLGELHAILRRQEDFYPFLKDNREKIEKILTFRIPYYVGPLARGNSRFAWMTRKSEETITPWNFEEVVDKGASAQSFIERMTNFDKNLPNEKVLPKHSLLYEYFTVYNELTKVKYVTEGMRKPAFLSGEQKKAIVDLLFKTNRKVTVKQLKEDYFKKIECFDSVEISGVEDRFNASLGTYHDLLKIIKDKDFLDNEENEDILEDIVLTLTLFEDREMIEERLKTYAHLFDDKVMKQLKRRRYTGWGRLSRKLINGIRDKQSGKTILDFLKSDGFANRNFMQLIHDDSLTFKEDIQKAQVSGQGDSLHEHIANLAGSPAIKKGILQTVKVVDELVKVMGRHKPENIVIEMARENQTTQKGQKNSRERMKRIEEGIKELGSQILKEHPVENTQLQNEKLYLYYLQNGRDMYVDQELDINRLSDYDVDHIVPQSFLKDDSIDNKVLTRSDKARGKSDNVPSEEVVKKMKNYWRQLLNAKLITQRKFDNLTKAERGGLSELDKAGFIKRQLVETRQITKHVAQILDSRMNTKYDENDKLIREVKVITLKSKLVSDFRKDFQFYKVREINNYHHAHDAYLNAVVGTALIKKYPKLESEFVYGDYKVYDVRKMIAKSEQEIGKATAKYFFYSNIMNFFKTEITLANGEIRKRPLIETNGETGEIVWDKGRDFATVRKVLSMPQVNIVKKTEVQTGGFSKESILPKRNSDKLIARKKDWDPKKYGGFDSPTVAYSVLVVAKVEKGKSKKLKSVKELLGITIMERSSFEKNPIDFLEAKGYKEVKKDLIIKLPKYSLFELENGRKRMLASAGELQKGNELALPSKYVNFLYLASHYEKLKGSPEDNEQKQLFVEQHKHYLDEIIEQISEFSKRVILADANLDKVLSAYNKHRDKPIREQAENIIHLFTLTNLGAPAAFKYFDTTIDRKRYTSTKEVLDATLIHQSITGLYETRIDLSQLGGDGGPAPEAAAKGSSGGTLGIEDEYRLHETSTEPDVSLGSTWLSDFPQAWAETGGMGLAVRQAPLIIPLKATSTPVSIQQYPMSHEARLGIKPHIQRLLDQGILVPCQSPWNTPLLPVKKPGTNDYRPVQDLREVNKRVEDIHPTVPNPYNLLSGLPPSHQWYTVLDLKDAFFCLRLHPTSQPLFAFEWRDPGMGISGQLTWTRLPQGFKNSPTLFNEALHRDLADFRIQHPDLILLQYVDDILLAATSELDCQQGTRALLQTLGDLGYRASAKKAQICQKQVKYLGYLLREGQRWLTEARKETVMGQPVPKTPRQLREFLGTAGFCRLWIPGFAEMAAPLYPLTKPGTLFSWGPDQQKAYQEIKQALLTAPALGLPDLTKPFELFVDEKQGYAKGVLTQKLGPWRRPVAYLSKKLDPVAAGWPPCLRMVAAIAVLTKDAGKLTMGQPLVILAPHAVEALVKQPPDRWLSNARMTHYQAMLLDTDRVQFGPVVALNPATLLPLPEEGAPHDCLEILAETHGTRPDLTDQPIPDADHTWYTDGSSFLQEGQRKAGAAVTTETEVIWAGALPAGTSAQRAELIALTQALKMAEGKRLNVYTDSRYAFATAHIHGEIYRRRGWLTSEGREIKNKSEILALLKALFLPKRLSIIHCLGHQKGDSAEARGNRLADQAAREAAIKTPPDTSTLLAGKRTADGSEFEKRTADGSEFESPKKKAKVE

SEQ ID NO: 7644 - protein, 2096 aa, synthetic construct; identical to SEQ ID NO: 7643

SEQ ID NO: 7645 - protein, 2096 aa, synthetic construct
MPAAKRVKLDGGDKKYSIGLDIGTNSVGWAVITDEYKVPSKKFKVLGNTDRHSIKKNLIGALLFDSGETAEATRLKRTARRRYTRRKNRICYLQEIFSNEMAKVDDSFFHRLEESFLVEEDKKHERHPIFGNIVDEVAYHEKYPTIYHLRKKLVDSTDKADLRLIYLALAHMIKFRGHFLIEGDLNPDNSDVDKLFIQLVQTYNQLFEENPINASGVDAKAILSARLSKSRRLENLIAQLPGEKKNGLFGNLIALSLGLTPNFKSNFDLAEDAKLQLSKDTYDDDLDNLLAQIGDQYADLFLAAKNLSDAILLSDILRVNTEITKAPLSASMIKRYDEHHQDLTLLKALVRQQLPEKYKEIFFDQSKNGYAGYIDGGASQEEFYKFIKPILEKMDGTEELLVKLNREDLLRKQRTFDNGSIPHQIHLGELHAILRRQEDFYPFLKDNREKIEKILTFRIPYYVGPLARGNSRFAWMTRKSEETITPWNFEEVVDKGASAQSFIERMTNFDKNLPNEKVLPKHSLLYEYFTVYNELTKVKYVTEGMRKPAFLSGEQKKAIVDLLFKTNRKVTVKQLKEDYFKKIECFDSVEISGVEDRFNASLGTYHDLLKIIKDKDFLDNEENEDILEDIVLTLTLFEDREMIEERLKTYAHLFDDKVMKQLKRRRYTGWGRLSRKLINGIRDKQSGKTILDFLKSDGFANRNFMQLIHDDSLTFKEDIQKAQVSGQGDSLHEHIANLAGSPAIKKGILQTVKVVDELVKVMGRHKPENIVIEMARENQTTQKGQKNSRERMKRIEEGIKELGSQILKEHPVENTQLQNEKLYLYYLQNGRDMYVDQELDINRLSDYDVDHIVPQSFLKDDSIDNKVLTRSDKARGKSDNVPSEEVVKKMKNYWRQLLNAKLITQRKFDNLTKAERGGLSELDKAGFIKRQLVETRQITKHVAQILDSRMNTKYDENDKLIREVKVITLKSKLVSDFRKDFQFYKVREINNYHHAHDAYLNAVVGTALIKKYPKLESEFVYGDYKVYDVRKMIAKSEQEIGKATAKYFFYSNIMNFFKTEITLANGEIRKRPLIETNGETGEIVWDKGRDFATVRKVLSMPQVNIVKKTEVQTGGFSKESILPKRNSDKLIARKKDWDPKKYGGFDSPTVAYSVLVVAKVEKGKSKKLKSVKELLGITIMERSSFEKNPIDFLEAKGYKEVKKDLIIKLPKYSLFELENGRKRMLASAGELQKGNELALPSKYVNFLYLASHYEKLKGSPEDNEQKQLFVEQHKHYLDEIIEQISEFSKRVILADANLDKVLSAYNKHRDKPIREQAENIIHLFTLTNLGAPAAFKYFDTTIDRKRYTSTKEVLDATLIHQSITGLYETRIDLSQLGGDGGPAPEAAAKGSSGGTLNIEDEYRLHETSKGPDVPLGSTWLSDFPQAWAETGGMGLAVRQAPLIIPLKATSTPVSIKQYPMSQEARLGIKPHIQRLLDQGILVPCQSPWNTPLLPVKKPGTNDYRPVQDLREVNKRVEDIHPTVPNPYNLLSGLPPSHQWYTVLDLKDAFFCLRLHPTSQSLFAFEWRDPEMGISGQLTWTRLPQGFKNSPTLFDEALHRDLADFRIQHPDLILLQYVDDLLLAATSELDCQQGTRALLQTLGDLGYRASAKKAQICQKQVKYLGYLLKEGQRWLTEARKETVMGQPTPKTPRQLREFLGTAGFCRLWIPGFAEMAAPLYPLTKTGTLFEWGPDQQKAYQEIKQALLTAPALGLPDLTKPFELFVDEKQGYAKGVLTQKLGPWRRPVAYLSKKLDPVAAGWPPCLRMVAAIAVLTKDAGKLTMGQPLVILAPHAVEALVKQPPDRWLSNARMTHYQALLLDTDRVQFGPIVALNPATLLPLPEEGLQHDCLDILAEAHGTRPDLTDQPLPDADHTWYTDGSSFLQEGQRKAGAAVTTETEVVWAKALPAGTSAQRAELIALTQALKMAEGKKLNVYTDSRYAFATAHIHGEIYRRRGLLTSEGKEIKNKDEILALLKALFLPKRLSIIHCPGHQKGNRAEARGNRMADQAAREVATRETPETSTLLAGKRTADGSEFEKRTADGSEFESPKKKAKVE

SEQ ID NO: 7646 - protein, 2090 aa, synthetic construct
MPAAKRVKLDGGDKKYSIGLDIGTNSVGWAVITDEYKVPSKKFKVLGNTDRHSIKKNLIGALLFDSGETAEATRLKRTARRRYTRRKNRICYLQEIFSNEMAKVDDSFFHRLEESFLVEEDKKHERHPIFGNIVDEVAYHEKYPTIYHLRKKLVDSTDKADLRLIYLALAHMIKFRGHFLIEGDLNPDNSDVDKLFIQLVQTYNQLFEENPINASGVDAKAILSARLSKSRRLENLIAQLPGEKKNGLFGNLIALSLGLTPNFKSNFDLAEDAKLQLSKDTYDDDLDNLLAQIGDQYADLFLAAKNLSDAILLSDILRVNTEITKAPLSASMIKRYDEHHQDLTLLKALVRQQLPEKYKEIFFDQSKNGYAGYIDGGASQEEFYKFIKPILEKMDGTEELLVKLNREDLLRKQRTFDNGSIPHQIHLGELHAILRRQEDFYPFLKDNREKIEKILTFRIPYYVGPLARGNSRFAWMTRKSEETITPWNFEEVVDKGASAQSFIERMTNFDKNLPNEKVLPKHSLLYEYFTVYNELTKVKYVTEGMRKPAFLSGEQKKAIVDLLFKTNRKVTVKQLKEDYFKKIECFDSVEISGVEDRFNASLGTYHDLLKIIKDKDFLDNEENEDILEDIVLTLTLFEDREMIEERLKTYAHLFDDKVMKQLKRRRYTGWGRLSRKLINGIRDKQSGKTILDFLKSDGFANRNFMQLIHDDSLTFKEDIQKAQVSGQGDSLHEHIANLAGSPAIKKGILQTVKVVDELVKVMGRHKPENIVIEMARENQTTQKGQKNSRERMKRIEEGIKELGSQILKEHPVENTQLQNEKLYLYYLQNGRDMYVDQELDINRLSDYDVDHIVPQSFLKDDSIDNKVLTRSDKARGKSDNVPSEEVVKKMKNYWRQLLNAKLITQRKFDNLTKAERGGLSELDKAGFIKRQLVETRQITKHVAQILDSRMNTKYDENDKLIREVKVITLKSKLVSDFRKDFQFYKVREINNYHHAHDAYLNAVVGTALIKKYPKLESEFVYGDYKVYDVRKMIAKSEQEIGKATAKYFFYSNIMNFFKTEITLANGEIRKRPLIETNGETGEIVWDKGRDFATVRKVLSMPQVNIVKKTEVQTGGFSKESILPKRNSDKLIARKKDWDPKKYGGFDSPTVAYSVLVVAKVEKGKSKKLKSVKELLGITIMERSSFEKNPIDFLEAKGYKEVKKDLIIKLPKYSLFELENGRKRMLASAGELQKGNELALPSKYVNFLYLASHYEKLKGSPEDNEQKQLFVEQHKHYLDEIIEQISEFSKRVILADANLDKVLSAYNKHRDKPIREQAENIIHLFTLTNLGAPAAFKYFDTTIDRKRYTSTKEVLDATLIHQSITGLYETRIDLSQLGGDGGPAPEAAAKGSSGGTLQLDDEYRLYSPLVKPDQNIQFWLEQFPQAWAETAGMGLAKQVPPQVIQLKASATPVSVRQYPLSKEAQEGIRPHVQRLIQQGILVPVQSPWNTPLLPVRKPGTNDYRPVQDLREVNKRVQDIHPTVPNPYNLLCALPPQRSWYTVLDLKDAFFCLRLHPTSQPLFAFEWRDPGTGRTGQLTWTRLPQGFKNSPTIFDEALHRDLANFRIQHPQVTLLQYVDDLLLAGATKQDCLEGTKALLLELSDLGYRASAKKAQICRREVTYLGYSLRDGQRWLTEARKKTVVQIPAPTTAKQVREFLGTAGFCRLWIPGFATLAAPLYPLTKEKGEFSWAPEHQKAFDAIKKALLSAPALALPDVTKPFTLYVDERKGVARGVLTQTLGPWRRPVAYLSKKLDPVASGWPVCLKAIAAVAILVKDADKLTLGQNITVIAPHALENIVRQPPDRWMTNARMTHYQSLLLTERVTFAPPAALNPATLLPEETDEPVTHDCHQLLIEETGVRKDLTDIPLTGEVLTWFTDGSSYVVEGKRMAGAAVVDGTRTIWASSLPEGTSAQKAELMALTQALRLAEGKSINIYTDSRYAFATAHVHGAIYKQRGLLTSAGREIKNKEEILSLLEALHLPKRLAIIHCPGHQKAKDPISRGNQMADRVAKQAAQGVNLLAGKRTADGSEFEKRTADGSEFESPKKKAKVE

SEQ ID NO: 7647 - protein, 2087 aa, synthetic construct
MPAAKRVKLDGGDKKYSIGLDIGTNSVGWAVITDEYKVPSKKFKVLGNTDRHSIKKNLIGALLFDSGETAEATRLKRTARRRYTRRKNRICYLQEIFSNEMAKVDDSFFHRLEESFLVEEDKKHERHPIFGNIVDEVAYHEKYPTIYHLRKKLVDSTDKADLRLIYLALAHMIKFRGHFLIEGDLNPDNSDVDKLFIQLVQTYNQLFEENPINASGVDAKAILSARLSKSRRLENLIAQLPGEKKNGLFGNLIALSLGLTPNFKSNFDLAEDAKLQLSKDTYDDDLDNLLAQIGDQYADLFLAAKNLSDAILLSDILRVNTEITKAPLSASMIKRYDEHHQDLTLLKALVRQQLPEKYKEIFFDQSKNGYAGYIDGGASQEEFYKFIKPILEKMDGTEELLVKLNREDLLRKQRTFDNGSIPHQIHLGELHAILRRQEDFYPFLKDNREKIEKILTFRIPYYVGPLARGNSRFAWMTRKSEETITPWNFEEVVDKGASAQSFIERMTNFDKNLPNEKVLPKHSLLYEYFTVYNELTKVKYVTEGMRKPAFLSGEQKKAIVDLLFKTNRKVTVKQLKEDYFKKIECFDSVEISGVEDRFNASLGTYHDLLKIIKDKDFLDNEENEDILEDIVLTLTLFEDREMIEERLKTYAHLFDDKVMKQLKRRRYTGWGRLSRKLINGIRDKQSGKTILDFLKSDGFANRNFMQLIHDDSLTFKEDIQKAQVSGQGDSLHEHIANLAGSPAIKKGILQTVKVVDELVKVMGRHKPENIVIEMARENQTTQKGQKNSRERMKRIEEGIKELGSQILKEHPVENTQLQNEKLYLYYLQNGRDMYVDQELDINRLSDYDVDHIVPQSFLKDDSIDNKVLTRSDKARGKSDNVPSEEVVKKMKNYWRQLLNAKLITQRKFDNLTKAERGGLSELDKAGFIKRQLVETRQITKHVAQILDSRMNTKYDENDKLIREVKVITLKSKLVSDFRKDFQFYKVREINNYHHAHDAYLNAVVGTALIKKYPKLESEFVYGDYKVYDVRKMIAKSEQEIGKATAKYFFYSNIMNFFKTEITLANGEIRKRPLIETNGETGEIVWDKGRDFATVRKVLSMPQVNIVKKTEVQTGGFSKESILPKRNSDKLIARKKDWDPKKYGGFDSPTVAYSVLVVAKVEKGKSKKLKSVKELLGITIMERSSFEKNPIDFLEAKGYKEVKKDLIIKLPKYSLFELENGRKRMLASAGELQKGNELALPSKYVNFLYLASHYEKLKGSPEDNEQKQLFVEQHKHYLDEIIEQISEFSKRVILADANLDKVLSAYNKHRDKPIREQAENIIHLFTLTNLGAPAAFKYFDTTIDRKRYTSTKEVLDATLIHQSITGLYETRIDLSQLGGDGGPAPEAAAKGSSGGIPWLMKKPLQLTTLVPLQEYEERLLKQTMLTGSYKEKLQSLFLKYDALWQHWENQVGHRRIKPHHIATGTVNPRPQKQYPINPKAKASIQTVINDLLKQGVLIQQNSIMNTPVYPVPKPDGKWRMVLDYREVNKTIPLIAAQNQHSAGILSSIFRGKYKTTLDLSNGFWAHSITPESYWLTAFTWLGQQYCWTRLPQGFLNSPALFNADVVDLLKEVPNVQVYVDDIYISHDDPREHLEQLEKVFSLLLNAGYVVSLKKSEIAQHEVEFLGFNITKEGRGLTETFKQKLLNITPPRDLKQLQSILGLLNFARNFIPNFSELVKPLYNIIATAPGKYITWTTDNSQQLQNIISMLNSAENLEERNPEVRLIMKVNTSPSAGYIRFYNEFAKRPIMYLNYVYTKAEVKFTNTEKLLTTIHKGLIKALDLGMGQEILVYSPIVSMTKIQKTPLPERKALPIRWITWMSYLEDPRIQFHYDKTLPELQQVPTVTDDIIAKIKHPSEFSMVFYTDGSAIKHPNVNKSHNAGMGIAQVQFKPEFTVINTWSIPLGDHTAQLAEVAAVEFACKKALKIDGPVLIVTDSFYVAESVNKELPYWQSNGFFNNKKKPLKHVSKWKSIADCIQLKPDIIIIHEKGHQPTASTFHTEGNNLADKLATQGSYVVNAGKRTADGSEFEKRTADGSEFESPKKKAKVE

SEQ ID NO: 7648 - protein, 2176 aa, synthetic construct
MPAAKRVKLDGGDKKYSIGLDIGTNSVGWAVITDEYKVPSKKFKVLGNTDRHSIKKNLIGALLFDSGETAEATRLKRTARRRYTRRKNRICYLQEIFSNEMAKVDDSFFHRLEESFLVEEDKKHERHPIFGNIVDEVAYHEKYPTIYHLRKKLVDSTDKADLRLIYLALAHMIKFRGHFLIEGDLNPDNSDVDKLFIQLVQTYNQLFEENPINASGVDAKAILSARLSKSRRLENLIAQLPGEKKNGLFGNLIALSLGLTPNFKSNFDLAEDAKLQLSKDTYDDDLDNLLAQIGDQYADLFLAAKNLSDAILLSDILRVNTEITKAPLSASMIKRYDEHHQDLTLLKALVRQQLPEKYKEIFFDQSKNGYAGYIDGGASQEEFYKFIKPILEKMDGTEELLVKLNREDLLRKQRTFDNGSIPHQIHLGELHAILRRQEDFYPFLKDNREKIEKILTFRIPYYVGPLARGNSRFAWMTRKSEETITPWNFEEVVDKGASAQSFIERMTNFDKNLPNEKVLPKHSLLYEYFTVYNELTKVKYVTEGMRKPAFLSGEQKKAIVDLLFKTNRKVTVKQLKEDYFKKIECFDSVEISGVEDRFNASLGTYHDLLKIIKDKDFLDNEENEDILEDIVLTLTLFEDREMIEERLKTYAHLFDDKVMKQLKRRRYTGWGRLSRKLINGIRDKQSGKTILDFLKSDGFANRNFMQLIHDDSLTFKEDIQKAQVSGQGDSLHEHIANLAGSPAIKKGILQTVKVVDELVKVMGRHKPENIVIEMARENQTTQKGQKNSRERMKRIEEGIKELGSQILKEHPVENTQLQNEKLYLYYLQNGRDMYVDQELDINRLSDYDVDHIVPQSFLKDDSIDNKVLTRSDKARGKSDNVPSEEVVKKMKNYWRQLLNAKLITQRKFDNLTKAERGGLSELDKAGFIKRQLVETRQITKHVAQILDSRMNTKYDENDKLIREVKVITLKSKLVSDFRKDFQFYKVREINNYHHAHDAYLNAVVGTALIKKYPKLESEFVYGDYKVYDVRKMIAKSEQEIGKATAKYFFYSNIMNFFKTEITLANGEIRKRPLIETNGETGEIVWDKGRDFATVRKVLSMPQVNIVKKTEVQTGGFSKESILPKRNSDKLIARKKDWDPKKYGGFDSPTVAYSVLVVAKVEKGKSKKLKSVKELLGITIMERSSFEKNPIDFLEAKGYKEVKKDLIIKLPKYSLFELENGRKRMLASAGELQKGNELALPSKYVNFLYLASHYEKLKGSPEDNEQKQLFVEQHKHYLDEIIEQISEFSKRVILADANLDKVLSAYNKHRDKPIREQAENIIHLFTLTNLGAPAAFKYFDTTIDRKRYTSTKEVLDATLIHQSITGLYETRIDLSQLGGDGGPAPEAAAKGSSGGMNPLQLLQPLPAEVKGTKLLAHWNSGATITCIPESFLEDEQPIKQTLIKTIHGEKQQNVYYLTFKVKGRKVEAEVIASPYEYILLSPTDVPWLTQQPLQLTILVPLQEYQDRILNKTALPEEQKQQLKALFTKYDNLWQHWENQVGHRKIRPHNIATGDYPPRPQKQYPINPKAKPSIQIVIDDLLKQGVLTPQNSTMNTPVYPVPKPDGRWRMVLDYREVNKTIPLTAAQNQHSAGILATIVRQKYKTTLDLANGFWAHPITPDSYWLTAFTWQGKQYCWTRLPQGFLNSPALFNADAVDLLKEVPNVQVYVDDIYLSHDNPHEHIQQLEKVFQILLQAGYVVSLKKSEIGQRTVEFLGFNITKEGRGLTDTFKTKLLNVTPPKDLKQLQSILGKLNFARNFIPNFAELVQTLYNLIASSPGKYIEWTEDNTKQLNKVIEALNTASNLEERLPDQRLVIKVNTSPSAGYVRYYNESGKKPIMYLNYVFSKAELKFSMLEKLLTTMHKALIKAMDLAMGQEILVYSPIVSMTKIQKTPLPERKALPIRWITWMTYLEDPRIQFHYDKTLPELKHIPDVYTSSIPPLKHPSQYEGVFCTDGSAIKSPDPTKSNNAGMGIVHAIYNPEYKILNQWSIPLGHHTAQMAEIAAVEFACKKALKVPGPVLVITDSFYVAESANKELPYWKSNGFVNNKKEPLKHISKWKSIAECLSIKPDITIQHEKGHQPINTSIHTEGNALADKLATQGSYVVNAGKRTADGSEFEKRTADGSEFESPKKKAKVE

SEQ ID NO: 7649 - protein, 2096 aa, synthetic construct
MPAAKRVKLDGGDKKYSIGLDIGTNSVGWAVITDEYKVPSKKFKVLGNTDRHSIKKNLIGALLFDSGETAEATRLKRTARRRYTRRKNRICYLQEIFSNEMAKVDDSFFHRLEESFLVEEDKKHERHPIFGNIVDEVAYHEKYPTIYHLRKKLVDSTDKADLRLIYLALAHMIKFRGHFLIEGDLNPDNSDVDKLFIQLVQTYNQLFEENPINASGVDAKAILSARLSKSRRLENLIAQLPGEKKNGLFGNLIALSLGLTPNFKSNFDLAEDAKLQLSKDTYDDDLDNLLAQIGDQYADLFLAAKNLSDAILLSDILRVNTEITKAPLSASMIKRYDEHHQDLTLLKALVRQQLPEKYKEIFFDQSKNGYAGYIDGGASQEEFYKFIKPILEKMDGTEELLVKLNREDLLRKQRTFDNGSIPHQIHLGELHAILRRQEDFYPFLKDNREKIEKILTFRIPYYVGPLARGNSRFAWMTRKSEETITPWNFEEVVDKGASAQSFIERMTNFDKNLPNEKVLPKHSLLYEYFTVYNELTKVKYVTEGMRKPAFLSGEQKKAIVDLLFKTNRKVTVKQLKEDYFKKIECFDSVEISGVEDRFNASLGTYHDLLKIIKDKDFLDNEENEDILEDIVLTLTLFEDREMIEERLKTYAHLFDDKVMKQLKRRRYTGWGRLSRKLINGIRDKQSGKTILDFLKSDGFANRNFMQLIHDDSLTFKEDIQKAQVSGQGDSLHEHIANLAGSPAIKKGILQTVKVVDELVKVMGRHKPENIVIEMARENQTTQKGQKNSRERMKRIEEGIKELGSQILKEHPVENTQLQNEKLYLYYLQNGRDMYVDQELDINRLSDYDVDHIVPQSFLKDDSIDNKVLTRSDKARGKSDNVPSEEVVKKMKNYWRQLLNAKLITQRKFDNLTKAERGGLSELDKAGFIKRQLVETRQITKHVAQILDSRMNTKYDENDKLIREVKVITLKSKLVSDFRKDFQFYKVREINNYHHAHDAYLNAVVGTALIKKYPKLESEFVYGDYKVYDVRKMIAKSEQEIGKATAKYFFYSNIMNFFKTEITLANGEIRKRPLIETNGETGEIVWDKGRDFATVRKVLSMPQVNIVKKTEVQTGGFSKESILPKRNSDKLIARKKDWDPKKYGGFDSPTVAYSVLVVAKVEKGKSKKLKSVKELLGITIMERSSFEKNPIDFLEAKGYKEVKKDLIIKLPKYSLFELENGRKRMLASAGELQKGNELALPSKYVNFLYLASHYEKLKGSPEDNEQKQLFVEQHKHYLDEIIEQISEFSKRVILADANLDKVLSAYNKHRDKPIREQAENIIHLFTLTNLGAPAAFKYFDTTIDRKRYTSTKEVLDATLIHQSITGLYETRIDLSQLGGDGGPAPEAAAKGSSGGTLNIEDEYRLHETSKEPDVPLGSTWLSDFPQAWAETGGMGLAVRQAPLIIPLKATSTPVSIKQYPMSQEARLGIKPHIQRLLDQGILVPCQSPWNTPLLPVKKPGTNDYRPVQDLREVNKRVEDIHPTVPNPYNLLSGLPPSHQWYTVLDLKDAFFCLRLHPTSQPLFAFEWRDPEMGISGQLTWTRLPQGFKNSPTLFNEALHRDLADFRIQHPDLILLQYVDDLLLAATSEQDCQRGTRALLQTLGNLGYRASAKKAQICQKQVKYLGYLLKEGQRWLTEARKETVMGQPTPKTPRQLREFLGTAGFCRLWIPGFAEMAAPLYPLTKPGTLFNWGPDQQKAYQEIKQALLTAPALGLPDLTKPFELFVDEKQGYAKGVLTQKLGPWRRPVAYLSKKLDPVAAGWPPCLRMVAAIAVLTKDAGKLTMGQPLVILAPHAVEALVKQPPDRWLSNARMTHYQAMLLDTDRVQFGPVVALNPATLLPLPEKEAPHDCLEILAETHGTRPDLTDQPIPDADYTWYTDGSSFLQEGQRRAGAAVTTETEVIWARALPAGTSAQRAELIALTQALKMAEGKKLNVYTDSRYAFATAHVHGEIYRRRGWLTSEGREIKNKNEILALLKALFLPKRLSIIHCPGHQKGNSAEARGNRMADQAAREAAMKAVLETSTLLAGKRTADGSEFEKRTADGSEFESPKKKAKVE

SEQ ID NO: 7650 - protein, 2122 aa, synthetic construct
MPAAKRVKLDGGDKKYSIGLDIGTNSVGWAVITDEYKVPSKKFKVLGNTDRHSIKKNLIGALLFDSGETAEATRLKRTARRRYTRRKNRICYLQEIFSNEMAKVDDSFFHRLEESFLVEEDKKHERHPIFGNIVDEVAYHEKYPTIYHLRKKLVDSTDKADLRLIYLALAHMIKFRGHFLIEGDLNPDNSDVDKLFIQLVQTYNQLFEENPINASGVDAKAILSARLSKSRRLENLIAQLPGEKKNGLFGNLIALSLGLTPNFKSNFDLAEDAKLQLSKDTYDDDLDNLLAQIGDQYADLFLAAKNLSDAILLSDILRVNTEITKAPLSASMIKRYDEHHQDLTLLKALVRQQLPEKYKEIFFDQSKNGYAGYIDGGASQEEFYKFIKPILEKMDGTEELLVKLNREDLLRKQRTFDNGSIPHQIHLGELHAILRRQEDFYPFLKDNREKIEKILTFRIPYYVGPLARGNSRFAWMTRKSEETITPWNFEEVVDKGASAQSFIERMTNFDKNLPNEKVLPKHSLLYEYFTVYNELTKVKYVTEGMRKPAFLSGEQKKAIVDLLFKTNRKVTVKQLKEDYFKKIECFDSVEISGVEDRFNASLGTYHDLLKIIKDKDFLDNEENEDILEDIVLTLTLFEDREMIEERLKTYAHLFDDKVMKQLKRRRYTGWGRLSRKLINGIRDKQSGKTILDFLKSDGFANRNFMQLIHDDSLTFKEDIQKAQVSGQGDSLHEHIANLAGSPAIKKGILQTVKVVDELVKVMGRHKPENIVIEMARENQTTQKGQKNSRERMKRIEEGIKELGSQILKEHPVENTQLQNEKLYLYYLQNGRDMYVDQELDINRLSDYDVDHIVPQSFLKDDSIDNKVLTRSDKARGKSDNVPSEEVVKKMKNYWRQLLNAKLITQRKFDNLTKAERGGLSELDKAGFIKRQLVETRQITKHVAQILDSRMNTKYDENDKLIREVKVITLKSKLVSDFRKDFQFYKVREINNYHHAHDAYLNAVVGTALIKKYPKLESEFVYGDYKVYDVRKMIAKSEQEIGKATAKYFFYSNIMNFFKTEITLANGEIRKRPLIETNGETGEIVWDKGRDFATVRKVLSMPQVNIVKKTEVQTGGFSKESILPKRNSDKLIARKKDWDPKKYGGFDSPTVAYSVLVVAKVEKGKSKKLKSVKELLGITIMERSSFEKNPIDFLEAKGYKEVKKDLIIKLPKYSLFELENGRKRMLASAGELQKGNELALPSKYVNFLYLASHYEKLKGSPEDNEQKQLFVEQHKHYLDEIIEQISEFSKRVILADANLDKVLSAYNKHRDKPIREQAENIIHLFTLTNLGAPAAFKYFDTTIDRKRYTSTKEVLDATLIHQSITGLYETRIDLSQLGGDGGAEAAAKEAAAKEAAAKEAAAKALEAEAAAKEAAAKEAAAKEAAAKAGGVPWILKKPLELTIKLDLEEQQGTLLNNSILSKKGKEELKQLFEKYSALWQSWENQVGHRRIRPHKIATGTVKPTPQKQYHINPKAKPDIQIVINDLLKQGVLIQKESTMNTPVYPVPKPNGRWRMVLDYRAVNKVTPLIAVQNQHSYGILGSLFKGRYKTTIDLSNGFWAHPIVPEDYWITAFTWQGKQYCWTVLPQGFLNSPGLFTGDVVDLLQGIPNVEVYVDDVYISHDSEKEHLEYLDILFNRLKEAGYIISLKKSNIANSIVDFLGFQITNEGRGLTDTFKEKLENITAPTTLKQLQSILGLLNFARNFIPDFTELIAPLYALIPKSTKNYVPWQIEHSTTLETLITKLNGAEYLQGRKGDKTLIMKVNASYTTGYIRYYNEGEKKPISYVSIVFSKTELKFTELEKLLTTVHKGLLKALDLSMGQNIHVYSPIVSMQNIQKTPQTAKKALASRWLSWLSYLEDPRIRFFYDPQMPALKDLPAVDTGKDNKKHPSNFQHIFYTDGSAITSPTKEGHLNAGMGIVYFINKDGNLQKQQEWSISLGNHTAQFAEIAAFEFALKKCLPLGGNILVVTDSNYVAKAYNEELDVWASNGFVNNRKKPLKHISKWKSVADLKRLRPDVVVTHEPGHQKLDSSPHAYGNNLADQLATQASFKVHAGKRTADGSEFEKRTADGSEFESPKKKAKVE

SEQ ID NO: 7651 - protein, 2122 aa, synthetic construct
MPAAKRVKLDGGDKKYSIGLDIGTNSVGWAVITDEYKVPSKKFKVLGNTDRHSIKKNLIGALLFDSGETAEATRLKRTARRRYTRRKNRICYLQEIFSNEMAKVDDSFFHRLEESFLVEEDKKHERHPIFGNIVDEVAYHEKYPTIYHLRKKLVDSTDKADLRLIYLALAHMIKFRGHFLIEGDLNPDNSDVDKLFIQLVQTYNQLFEENPINASGVDAKAILSARLSKSRRLENLIAQLPGEKKNGLFGNLIALSLGLTPNFKSNFDLAEDAKLQLSKDTYDDDLDNLLAQIGDQYADLFLAAKNLSDAILLSDILRVNTEITKAPLSASMIKRYDEHHQDLTLLKALVRQQLPEKYKEIFFDQSKNGYAGYIDGGASQEEFYKFIKPILEKMDGTEELLVKLNREDLLRKQRTFDNGSIPHQIHLGELHAILRRQEDFYPFLKDNREKIEKILTFRIPYYVGPLARGNSRFAWMTRKSEETITPWNFEEVVDKGASAQSFIERMTNFDKNLPNEKVLPKHSLLYEYFTVYNELTKVKYVTEGMRKPAFLSGEQKKAIVDLLFKTNRKVTVKQLKEDYFKKIECFDSVEISGVEDRFNASLGTYHDLLKIIKDKDFLDNEENEDILEDIVLTLTLFEDREMIEERLKTYAHLFDDKVMKQLKRRRYTGWGRLSRKLINGIRDKQSGKTILDFLKSDGFANRNFMQLIHDDSLTFKEDIQKAQVSGQGDSLHEHIANLAGSPAIKKGILQTVKVVDELVKVMGRHKPENIVIEMARENQTTQKGQKNSRERMKRIEEGIKELGSQILKEHPVENTQLQNEKLYLYYLQNGRDMYVDQELDINRLSDYDVDHIVPQSFLKDDSIDNKVLTRSDKARGKSDNVPSEEVVKKMKNYWRQLLNAKLITQRKFDNLTKAERGGLSELDKAGFIKRQLVETRQITKHVAQILDSRMNTKYDENDKLIREVKVITLKSKLVSDFRKDFQFYKVREINNYHHAHDAYLNAVVGTALIKKYPKLESEFVYGDYKVYDVRKMIAKSEQEIGKATAKYFFYSNIMNFFKTEITLANGEIRKRPLIETNGETGEIVWDKGRDFATVRKVLSMPQVNIVKKTEVQTGGFSKESILPKRNSDKLIARKKDWDPKKYGGFDSPTVAYSVLVVAKVEKGKSKKLKSVKELLGITIMERSSFEKNPIDFLEAKGYKEVKKDLIIKLPKYSLFELENGRKRMLASAGELQKGNELALPSKYVNFLYLASHYEKLKGSPEDNEQKQLFVEQHKHYLDEIIEQISEFSKRVILADANLDKVLSAYNKHRDKPIREQAENIIHLFTLTNLGAPAAFKYFDTTIDRKRYTSTKEVLDATLIHQSITGLYETRIDLSQLGGDGGAEAAAKEAAAKEAAAKEAAAKALEAEAAAKEAAAKEAAAKEAAAKAGGVPWILKKPLELTIKLDLEEQQGTLLNNSILSKKGKEELKQLFEKYSALWQSWENQVGHRRIRPHKIATGTVKPTPQKQYHINPKAKPDIQIVINDLLKQGVLIQKESTMNTPVYPVPKPNGRWRMVLDYRAVNKVTPLIAVQNQHSYGILGSLFKGRYKTTIDLSNGFWAHPIVPEDYWITAFTWQGKQYCWTVLPQGFLNSPGLFNGDVVDLLQGIPNVEVYVDDVYISHDSEKEHLEYLDILFNRLKEAGYIISLKKSNIANSIVDFLGFQITNEGRGLTDTFKEKLENITAPTTLKQLQSILGKLNFARNFIPDFTELIAPLYALIPKSPKNYVPWQIEHSTTLETLITKLNGAEYLQGRKGDKTLIMKVNASYTTGYIRYYNEGEKKPISYVSIVFSKTELKFTELEKLLTTVHKGLLKALDLSMGQNIHVYSPIVSMQNIQKTPQTAKKALASRWLSWLSYLEDPRIRFFYDPQMPALKDLPAVDTGKDNKKHPSNFQHIFYTDGSAITSPTKEGHLNAGMGIVYFINKDGNLQKQQEWSISLGNHTAQFAEIAAFEFALKKCLPLGGNILVVTDSNYVAKAYNEELDVWASNGFVNNRKKPLKHISKWKSVADLKRLRPDVVVTHEPGHQKLDSSPHAYGNNLADQLATQASFKVHAGKRTADGSEFEKRTADGSEFESPKKKAKVE

SEQ ID NO: 7652 - protein, 2122 aa, synthetic construct
MPAAKRVKLDGGDKKYSIGLDIGTNSVGWAVITDEYKVPSKKFKVLGNTDRHSIKKNLIGALLFDSGETAEATRLKRTARRRYTRRKNRICYLQEIFSNEMAKVDDSFFHRLEESFLVEEDKKHERHPIFGNIVDEVAYHEKYPTIYHLRKKLVDSTDKADLRLIYLALAHMIKFRGHFLIEGDLNPDNSDVDKLFIQLVQTYNQLFEENPINASGVDAKAILSARLSKSRRLENLIAQLPGEKKNGLFGNLIALSLGLTPNFKSNFDLAEDAKLQLSKDTYDDDLDNLLAQIGDQYADLFLAAKNLSDAILLSDILRVNTEITKAPLSASMIKRYDEHHQDLTLLKALVRQQLPEKYKEIFFDQSKNGYAGYIDGGASQEEFYKFIKPILEKMDGTEELLVKLNREDLLRKQRTFDNGSIPHQIHLGELHAILRRQEDFYPFLKDNREKIEKILTFRIPYYVGPLARGNSRFAWMTRKSEETITPWNFEEVVDKGASAQSFIERMTNFDKNLPNEKVLPKHSLLYEYFTVYNELTKVKYVTEGMRKPAFLSGEQKKAIVDLLFKTNRKVTVKQLKEDYFKKIECFDSVEISGVEDRFNASLGTYHDLLKIIKDKDFLDNEENEDILEDIVLTLTLFEDREMIEERLKTYAHLFDDKVMKQLKRRRYTGWGRLSRKLINGIRDKQSGKTILDFLKSDGFANRNFMQLIHDDSLTFKEDIQKAQVSGQGDSLHEHIANLAGSPAIKKGILQTVKVVDELVKVMGRHKPENIVIEMARENQTTQKGQKNSRERMKRIEEGIKELGSQILKEHPVENTQLQNEKLYLYYLQNGRDMYVDQELDINRLSDYDVDHIVPQSFLKDDSIDNKVLTRSDKARGKSDNVPSEEVVKKMKNYWRQLLNAKLITQRKFDNLTKAERGGLSELDKAGFIKRQLVETRQITKHVAQILDSRMNTKYDENDKLIREVKVITLKSKLVSDFRKDFQFYKVREINNYHHAHDAYLNAVVGTALIKKYPKLESEFVYGDYKVYDVRKMIAKSEQEIGKATAKYFFYSNIMNFFKTEITLANGEIRKRPLIETNGETGEIVWDKGRDFATVRKVLSMPQVNIVKKTEVQTGGFSKESILPKRNSDKLIARKKDWDPKKYGGFDSPTVAYSVLVVAKVEKGKSKKLKSVKELLGITIMERSSFEKNPIDFLEAKGYKEVKKDLIIKLPKYSLFELENGRKRMLASAGELQKGNELALPSKYVNFLYLASHYEKLKGSPEDNEQKQLFVEQHKHYLDEIIEQISEFSKRVILADANLDKVLSAYNKHRDKPIREQAENIIHLFTLTNLGAPAAFKYFDTTIDRKRYTSTKEVLDATLIHQSITGLYETRIDLSQLGGDGGAEAAAKEAAAKEAAAKEAAAKALEAEAAAKEAAAKEAAAKEAAAKAGGVPWLTQQPLQLTILVPLQEYQEKILSKTALPEDQKQQLKTLFVKYDNLWQHWENQVGHRKIRPHNIATGDYPPRPQKQYPINPKAKPSIQIVIDDLLKQGVLTPQNSTMNTPVYPVPKPDGRWRMVLDYREVNKTIPLTAAQNQHSAGILATIVRQKYKTTLDLANGFWAHPITPESYWLTAFTWQGKQYCWTRLPQGFLNSPALFTADVVDLLKEIPNVQVYVDDIYLSHDDPKEHVQQLEKVFQILLQAGYVVSLKKSEIGQKTVEFLGFNITKEGRGLTDTFKTKLLNITPPKDLKQLQSILGLLNFARNFIPNFAELVQPLYNLIASAKGKYIEWSEENTKQLNMVIEALNTASNLEERLPEQRLVIKVNTSPSAGYVRYYNETGKKPIMYLNYVFSKAELKFSMLEKLLTTMHKALIKAMDLAMGQEILVYSPIVSMTKIQKTPLPERKALPIRWITWMTYLEDPRIQFHYDKTLPELKHIPDVYTSSQSPVKHPSQYEGVFYTDGSAIKSPDPTKSNNAGMGIVHATYKPEYQVLNQWSIPLGNHTAQMAEIAAVEFACKKALKIPGPVLVITDSFYVAESANKELPYWKSNGFVNNKKKPLKHISKWKSIAECLSMKPDITIQHEKGISLQIPVFILKGNALADKLATQGSYVVNAGKRTADGSEFEKRTADGSEFESPKKKAKVE

SEQ ID NO: 7653 - protein, 2211 aa, synthetic construct
MPAAKRVKLDGGDKKYSIGLDIGTNSVGWAVITDEYKVPSKKFKVLGNTDRHSIKKNLIGALLFDSGETAEATRLKRTARRRYTRRKNRICYLQEIFSNEMAKVDDSFFHRLEESFLVEEDKKHERHPIFGNIVDEVAYHEKYPTIYHLRKKLVDSTDKADLRLIYLALAHMIKFRGHFLIEGDLNPDNSDVDKLFIQLVQTYNQLFEENPINASGVDAKAILSARLSKSRRLENLIAQLPGEKKNGLFGNLIALSLGLTPNFKSNFDLAEDAKLQLSKDTYDDDLDNLLAQIGDQYADLFLAAKNLSDAILLSDILRVNTEITKAPLSASMIKRYDEHHQDLTLLKALVRQQLPEKYKEIFFDQSKNGYAGYIDGGASQEEFYKFIKPILEKMDGTEELLVKLNREDLLRKQRTFDNGSIPHQIHLGELHAILRRQEDFYPFLKDNREKIEKILTFRIPYYVGPLARGNSRFAWMTRKSEETITPWNFEEVVDKGASAQSFIERMTNFDKNLPNEKVLPKHSLLYEYFTVYNELTKVKYVTEGMRKPAFLSGEQKKAIVDLLFKTNRKVTVKQLKEDYFKKIECFDSVEISGVEDRFNASLGTYHDLLKIIKDKDFLDNEENEDILEDIVLTLTLFEDREMIEERLKTYAHLFDDKVMKQLKRRRYTGWGRLSRKLINGIRDKQSGKTILDFLKSDGFANRNFMQLIHDDSLTFKEDIQKAQVSGQGDSLHEHIANLAGSPAIKKGILQTVKVVDELVKVMGRHKPENIVIEMARENQTTQKGQKNSRERMKRIEEGIKELGSQILKEHPVENTQLQNEKLYLYYLQNGRDMYVDQELDINRLSDYDVDHIVPQSFLKDDSIDNKVLTRSDKARGKSDNVPSEEVVKKMKNYWRQLLNAKLITQRKFDNLTKAERGGLSELDKAGFIKRQLVETRQITKHVAQILDSRMNTKYDENDKLIREVKVITLKSKLVSDFRKDFQFYKVREINNYHHAHDAYLNAVVGTALIKKYPKLESEFVYGDYKVYDVRKMIAKSEQEIGKATAKYFFYSNIMNFFKTEITLANGEIRKRPLIETNGETGEIVWDKGRDFATVRKVLSMPQVNIVKKTEVQTGGFSKESILPKRNSDKLIARKKDWDPKKYGGFDSPTVAYSVLVVAKVEKGKSKKLKSVKELLGITIMERSSFEKNPIDFLEAKGYKEVKKDLIIKLPKYSLFELENGRKRMLASAGELQKGNELALPSKYVNFLYLASHYEKLKGSPEDNEQKQLFVEQHKHYLDEIIEQISEFSKRVILADANLDKVLSAYNKHRDKPIREQAENIIHLFTLTNLGAPAAFKYFDTTIDRKRYTSTKEVLDATLIHQSITGLYETRIDLSQLGGDGGAEAAAKEAAAKEAAAKEAAAKALEAEAAAKEAAAKEAAAKEAAAKAGGMNPLQLLQPLPAEIKGTKLLAHWNSGATITCIPESFLEDEQPIKKTLIKTIHGEKQQNVYYVTFKVKGRKVEAEVIASPYEYILLSPTDVPWLTQQPLQLTILVPLQEYQEKILSKTALPEDQKQQLKTLFVKYDNLWQHWENQVGHRKIRPHNIATGDYPPRPQKQYPINPKAKPSIQIVIDDLLKQGVLTPQNSTMNTPVYPVPKPDGRWRMVLDYREVNKTIPLTAAQNQHSAGILATIVRQKYKTTLDLANGFWAHPITPESYWLTAFTWQGKQYCWTRLPQGFLNSPALFNADVVDLLKEIPNVQVYVDDIYLSHDDPKEHVQQLEKVFQILLQAGYVVSLKKSEIGQKTVEFLGFNITKEGRGLTDTFKTKLLNITPPKDLKQLQSILGLLNFARNFIPNFAELVQPLYNLIAPAKGKYIEWSEENTKQLNMVIEALNTASNLEERLPEQRLVIKVNTSPSAGYVRYYNETGKKPIMYLNYVFSKAELKFSMLEKLLTTMHKALIKAMDLAMGQEILVYSPIVSMTKIQKTPLPERKALPIRWITWMTYLEDPRIQFHYDKTLPELKHIPDVYTSSQSPVKHPSQYEGVFYTDGSAIKSPDPTKSNNAGMGIVHATYKPEYQVLNQWSIPLGNHTAQMAEIAAVEFACKKALKIPGPVLVITDSFYVAESANKELPYWKSNGFVNNKKKPLKHISKWKSIAECLSMKPDITIQHEKGISLQIPVFILKGNALADKLATQGSYVVNAGKRTADGSEFEKRTADGSEFESPKKKAKVE

SEQ ID NO: 7654 - protein, 2211 aa, synthetic construct
MPAAKRVKLDGGDKKYSIGLDIGTNSVGWAVITDEYKVPSKKFKVLGNTDRHSIKKNLIGALLFDSGETAEATRLKRTARRRYTRRKNRICYLQEIFSNEMAKVDDSFFHRLEESFLVEEDKKHERHPIFGNIVDEVAYHEKYPTIYHLRKKLVDSTDKADLRLIYLALAHMIKFRGHFLIEGDLNPDNSDVDKLFIQLVQTYNQLFEENPINASGVDAKAILSARLSKSRRLENLIAQLPGEKKNGLFGNLIALSLGLTPNFKSNFDLAEDAKLQLSKDTYDDDLDNLLAQIGDQYADLFLAAKNLSDAILLSDILRVNTEITKAPLSASMIKRYDEHHQDLTLLKALVRQQLPEKYKEIFFDQSKNGYAGYIDGGASQEEFYKFIKPILEKMDGTEELLVKLNREDLLRKQRTFDNGSIPHQIHLGELHAILRRQEDFYPFLKDNREKIEKILTFRIPYYVGPLARGNSRFAWMTRKSEETITPWNFEEVVDKGASAQSFIERMTNFDKNLPNEKVLPKHSLLYEYFTVYNELTKVKYVTEGMRKPAFLSGEQKKAIVDLLFKTNRKVTVKQLKEDYFKKIECFDSVEISGVEDRFNASLGTYHDLLKIIKDKDFLDNEENEDILEDIVLTLTLFEDREMIEERLKTYAHLFDDKVMKQLKRRRYTGWGRLSRKLINGIRDKQSGKTILDFLKSDGFANRNFMQLIHDDSLTFKEDIQKAQVSGQGDSLHEHIANLAGSPAIKKGILQTVKVVDELVKVMGRHKPENIVIEMARENQTTQKGQKNSRERMKRIEEGIKELGSQILKEHPVENTQLQNEKLYLYYLQNGRDMYVDQELDINRLSDYDVDHIVPQSFLKDDSIDNKVLTRSDKARGKSDNVPSEEVVKKMKNYWRQLLNAKLITQRKFDNLTKAERGGLSELDKAGFIKRQLVETRQITKHVAQILDSRMNTKYDENDKLIREVKVITLKSKLVSDFRKDFQFYKVREINNYHHAHDAYLNAVVGTALIKKYPKLESEFVYGDYKVYDVRKMIAKSEQEIGKATAKYFFYSNIMNFFKTEITLANGEIRKRPLIETNGETGEIVWDKGRDFATVRKVLSMPQVNIVKKTEVQTGGFSKESILPKRNSDKLIARKKDWDPKKYGGFDSPTVAYSVLVVAKVEKGKSKKLKSVKELLGITIMERSSFEKNPIDFLEAKGYKEVKKDLIIKLPKYSLFELENGRKRMLASAGELQKGNELALPSKYVNFLYLASHYEKLKGSPEDNEQKQLFVEQHKHYLDEIIEQISEFSKRVILADANLDKVLSAYNKHRDKPIREQAENIIHLFTLTNLGAPAAFKYFDTTIDRKRYTSTKEVLDATLIHQSITGLYETRIDLSQLGGDGGAEAAAKEAAAKEAAAKEAAAKALEAEAAAKEAAAKEAAAKEAAAKAGGMNPLQLLQPLPAEIKGTKLLAHWNSGATITCIPESFLEDEQPIKKTLIKTIHGEKQQNVYYVTFKVKGRKVEAEVIASPYEYILLSPTDVPWLTQQPLQLTILVPLQEYQEKILSKTALPEDQKQQLKTLFVKYDNLWQHWENQVGHRKIRPHNIATGDYPPRPQKQYPINPKAKPSIQIVIDDLLKQGVLTPQNSTMNTPVYPVPKPDGRWRMVLDYREVNKTIPLTAAQNQHSAGILATIVRQKYKTTLDLANGFWAHPITPESYWLTAFTWQGKQYCWTRLPQGFLNSPALFNADVVDLLKEIPNVQVYVDDIYLSHDDPKEHVQQLEKVFQILLQAGYVVSLKKSEIGQKTVEFLGFNITKEGRGLTDTFKTKLLNITPPKDLKQLQSILGKLNFARNFIPNFAELVQPLYNLIAPAKGKYIEWSEENTKQLNMVIEALNTASNLEERLPEQRLVIKVNTSPSAGYVRYYNETGKKPIMYLNYVFSKAELKFSMLEKLLTTMHKALIKAMDLAMGQEILVYSPIVSMTKIQKTPLPERKALPIRWITWMTYLEDPRIQFHYDKTLPELKHIPDVYTSSQSPVKHPSQYEGVFYTDGSAIKSPDPTKSNNAGMGIVHATYKPEYQVLNQWSIPLGNHTAQMAEIAAVEFACKKALKIPGPVLVITDSFYVAESANKELPYWKSNGFVNNKKKPLKHISKWKSIAECLSMKPDITIQHEKGISLQIPVFILKGNALADKLATQGSYVVNAGKRTADGSEFEKRTADGSEFESPKKKAKVE

SEQ ID NO: 7655 - protein, 2162 aa, synthetic construct
MPAAKRVKLDGGDKKYSIGLDIGTNSVGWAVITDEYKVPSKKFKVLGNTDRHSIKKNLIGALLFDSGETAEATRLKRTARRRYTRRKNRICYLQEIFSNEMAKVDDSFFHRLEESFLVEEDKKHERHPIFGNIVDEVAYHEKYPTIYHLRKKLVDSTDKADLRLIYLALAHMIKFRGHFLIEGDLNPDNSDVDKLFIQLVQTYNQLFEENPINASGVDAKAILSARLSKSRRLENLIAQLPGEKKNGLFGNLIALSLGLTPNFKSNFDLAEDAKLQLSKDTYDDDLDNLLAQIGDQYADLFLAAKNLSDAILLSDILRVNTEITKAPLSASMIKRYDEHHQDLTLLKALVRQQLPEKYKEIFFDQSKNGYAGYIDGGASQEEFYKFIKPILEKMDGTEELLVKLNREDLLRKQRTFDNGSIPHQIHLGELHAILRRQEDFYPFLKDNREKIEKILTFRIPYYVGPLARGNSRFAWMTRKSEETITPWNFEEVVDKGASAQSFIERMTNFDKNLPNEKVLPKHSLLYEYFTVYNELTKVKYVTEGMRKPAFLSGEQKKAIVDLLFKTNRKVTVKQLKEDYFKKIECFDSVEISGVEDRFNASLGTYHDLLKIIKDKDFLDNEENEDILEDIVLTLTLFEDREMIEERLKTYAHLFDDKVMKQLKRRRYTGWGRLSRKLINGIRDKQSGKTILDFLKSDGFANRNFMQLIHDDSLTFKEDIQKAQVSGQGDSLHEHIANLAGSPAIKKGILQTVKVVDELVKVMGRHKPENIVIEMARENQTTQKGQKNSRERMKRIEEGIKELGSQILKEHPVENTQLQNEKLYLYYLQNGRDMYVDQELDINRLSDYDVDHIVPQSFLKDDSIDNKVLTRSDKARGKSDNVPSEEVVKKMKNYWRQLLNAKLITQRKFDNLTKAERGGLSELDKAGFIKRQLVETRQITKHVAQILDSRMNTKYDENDKLIREVKVITLKSKLVSDFRKDFQFYKVREINNYHHAHDAYLNAVVGTALIKKYPKLESEFVYGDYKVYDVRKMIAKSEQEIGKATAKYFFYSNIMNFFKTEITLANGEIRKRPLIETNGETGEIVWDKGRDFATVRKVLSMPQVNIVKKTEVQTGGFSKESILPKRNSDKLIARKKDWDPKKYGGFDSPTVAYSVLVVAKVEKGKSKKLKSVKELLGITIMERSSFEKNPIDFLEAKGYKEVKKDLIIKLPKYSLFELENGRKRMLASAGELQKGNELALPSKYVNFLYLASHYEKLKGSPEDNEQKQLFVEQHKHYLDEIIEQISEFSKRVILADANLDKVLSAYNKHRDKPIREQAENIIHLFTLTNLGAPAAFKYFDTTIDRKRYTSTKEVLDATLIHQSITGLYETRIDLSQLGGDGGAEAAAKEAAAKEAAAKEAAAKALEAEAAAKEAAAKEAAAKEAAAKAGGLLGRDLLTKLKAQIQFSTEGPQVTWEDRPAMCLVLNLEEEYRLHEKPVPPSIDPSWLQLFPMVWAEKAGMGLANQVPPVVVELKSDASPVAVRQYPMSKEAREGIRPHIQRFLDLGILVPCQSPWNTPLLPVKKPGTNDYRPVQDLREVNKRVQDIHPTVPNPYNLLSSLPPSHTWYSVLDLKDAFFCLKLHPNSQPLFAFEWRDPEKGNTGQLTWTRLPQGFKNSPTLFDEALHRDLASFRALNPQVVMLQYVDDLLVAAPTYRDCKEGTRRLLQELSKLGYRVSAKKAQLCREEVTYLGYLLKGGKRWLTPARKATVMKIPTPTTPRQVREFLGTAGFCRLWIPGFASLAAPLYPLTREKVPFTWTEAHQEAFGRIKEALLSAPALALPDLTKPFALYVDEKEGVARGVLTQTLGPWRRPVAYLSKKLDPVASGWPTCLKAIAAVALLLKDADKLTLGQNVLVIAPHNLESIVRQPPDRWMTNARMTHYQSLLLNERVSFAPPAILNPATLLPVESDDTPIHICSEILAEETGTRPDLRDQPLPGVPAWYTDGSSFIMDGRRQAGAAIVDNKRTVWASNLPEGTSAQKAELIALTQALRLAEGKSINIYTDSRYAFATAHVHGAIYKQRGLLTSAGKDIKNKEEILALLEAIHLPKRVAIIHCPGHQRGTDPVATGNRKADEAAKQAAQSTRILTETTKNAGKRTADGSEFEKRTADGSEFESPKKKAKVE

SEQ ID NO: 7656 - protein, 2253 aa, synthetic construct
MPAAKRVKLDGGDKKYSIGLDIGTNSVGWAVITDEYKVPSKKFKVLGNTDRHSIKKNLIGALLFDSGETAEATRLKRTARRRYTRRKNRICYLQEIFSNEMAKVDDSFFHRLEESFLVEEDKKHERHPIFGNIVDEVAYHEKYPTIYHLRKKLVDSTDKADLRLIYLALAHMIKFRGHFLIEGDLNPDNSDVDKLFIQLVQTYNQLFEENPINASGVDAKAILSARLSKSRRLENLIAQLPGEKKNGLFGNLIALSLGLTPNFKSNFDLAEDAKLQLSKDTYDDDLDNLLAQIGDQYADLFLAAKNLSDAILLSDILRVNTEITKAPLSASMIKRYDEHHQDLTLLKALVRQQLPEKYKEIFFDQSKNGYAGYIDGGASQEEFYKFIKPILEKMDGTEELLVKLNREDLLRKQRTFDNGSIPHQIHLGELHAILRRQEDFYPFLKDNREKIEKILTFRIPYYVGPLARGNSRFAWMTRKSEETITPWNFEEVVDKGASAQSFIERMTNFDKNLPNEKVLPKHSLLYEYFTVYNELTKVKYVTEGMRKPAFLSGEQKKAIVDLLFKTNRKVTVKQLKEDYFKKIECFDSVEISGVEDRFNASLGTYHDLLKIIKDKDFLDNEENEDILEDIVLTLTLFEDREMIEERLKTYAHLFDDKVMKQLKRRRYTGWGRLSRKLINGIRDKQSGKTILDFLKSDGFANRNFMQLIHDDSLTFKEDIQKAQVSGQGDSLHEHIANLAGSPAIKKGILQTVKVVDELVKVMGRHKPENIVIEMARENQTTQKGQKNSRERMKRIEEGIKELGSQILKEHPVENTQLQNEKLYLYYLQNGRDMYVDQELDINRLSDYDVDHIVPQSFLKDDSIDNKVLTRSDKARGKSDNVPSEEVVKKMKNYWRQLLNAKLITQRKFDNLTKAERGGLSELDKAGFIKRQLVETRQITKHVAQILDSRMNTKYDENDKLIREVKVITLKSKLVSDFRKDFQFYKVREINNYHHAHDAYLNAVVGTALIKKYPKLESEFVYGDYKVYDVRKMIAKSEQEIGKATAKYFFYSNIMNFFKTEITLANGEIRKRPLIETNGETGEIVWDKGRDFATVRKVLSMPQVNIVKKTEVQTGGFSKESILPKRNSDKLIARKKDWDPKKYGGFDSPTVAYSVLVVAKVEKGKSKKLKSVKELLGITIMERSSFEKNPIDFLEAKGYKEVKKDLIIKLPKYSLFELENGRKRMLASAGELQKGNELALPSKYVNFLYLASHYEKLKGSPEDNEQKQLFVEQHKHYLDEIIEQISEFSKRVILADANLDKVLSAYNKHRDKPIREQAENIIHLFTLTNLGAPAAFKYFDTTIDRKRYTSTKEVLDATLIHQSITGLYETRIDLSQLGGDGGAEAAAKEAAAKEAAAKEAAAKALEAEAAAKEAAAKEAAAKEAAAKAGGTLGDQGSRGSDPLPEPRVTLTVEGIPTEFLVNTGAEHSVLTKPMGKMGSKRTVVAGATGSKVYPWTTKRLLKIGQKQVTHSFLVIPECPAPLLGRDLLTKLKAQIQFSTEGPQVTWEDRPAMCLVLNLEEEYRLHEKPVPPSIDPSWLQLFPMVWAEKAGMGLANQVPPVVVELKSDASPVAVRQYPMSKEAREGIRPHIQRFLDLGILVPCQSPWNTPLLPVKKPGTNDYRPVQDLREVNKRVQDIHPTVPNPYNLLSSLPPSHTWYSVLDLKDAFFCLKLHPNSQPLFAFEWRDPEKGNTGQLTWTRLPQGFKNSPTLFNEALHRDLASFRALNPQVVMLQYVDDLLVAAPTYRDCKEGTRRLLQELSKLGYRVSAKKAQLCREEVTYLGYLLKGGKRWLTPARKATVMKIPTPTTPRQVREFLGTAGFCRLWIPGFASLAAPLYPLTRPKVPFTWTEAHQEAFGRIKEALLSAPALALPDLTKPFALYVDEKEGVARGVLTQTLGPWRRPVAYLSKKLDPVASGWPTCLKAIAAVALLLKDADKLTLGQNVLVIAPHNLESIVRQPPDRWMTNARMTHYQSLLLNERVSFAPPAILNPATLLPVESDDTPIHICSEILAEETGTRPDLRDQPLPGVPAWYTDGSSFIMDGRRQAGAAIVDNKRTVWASNLPEGTSAQKAELIALTQALRLAEGKSINIYTDSRYAFATAHVHGAIYKQRGWLTSAGKDIKNKEEILALLEAIHLPKRVAIIHCPGHQRGTDPVATGNRKADEAAKQAAQSTRILTETTKNAGKRTADGSEFEKRTADGSEFESPKKKAKVE

SEQ ID NO: 7657 - protein, 2131 aa, synthetic construct
MPAAKRVKLDGGDKKYSIGLDIGTNSVGWAVITDEYKVPSKKFKVLGNTDRHSIKKNLIGALLFDSGETAEATRLKRTARRRYTRRKNRICYLQEIFSNEMAKVDDSFFHRLEESFLVEEDKKHERHPIFGNIVDEVAYHEKYPTIYHLRKKLVDSTDKADLRLIYLALAHMIKFRGHFLIEGDLNPDNSDVDKLFIQLVQTYNQLFEENPINASGVDAKAILSARLSKSRRLENLIAQLPGEKKNGLFGNLIALSLGLTPNFKSNFDLAEDAKLQLSKDTYDDDLDNLLAQIGDQYADLFLAAKNLSDAILLSDILRVNTEITKAPLSASMIKRYDEHHQDLTLLKALVRQQLPEKYKEIFFDQSKNGYAGYIDGGASQEEFYKFIKPILEKMDGTEELLVKLNREDLLRKQRTFDNGSIPHQIHLGELHAILRRQEDFYPFLKDNREKIEKILTFRIPYYVGPLARGNSRFAWMTRKSEETITPWNFEEVVDKGASAQSFIERMTNFDKNLPNEKVLPKHSLLYEYFTVYNELTKVKYVTEGMRKPAFLSGEQKKAIVDLLFKTNRKVTVKQLKEDYFKKIECFDSVEISGVEDRFNASLGTYHDLLKIIKDKDFLDNEENEDILEDIVLTLTLFEDREMIEERLKTYAHLFDDKVMKQLKRRRYTGWGRLSRKLINGIRDKQSGKTILDFLKSDGFANRNFMQLIHDDSLTFKEDIQKAQVSGQGDSLHEHIANLAGSPAIKKGILQTVKVVDELVKVMGRHKPENIVIEMARENQTTQKGQKNSRERMKRIEEGIKELGSQILKEHPVENTQLQNEKLYLYYLQNGRDMYVDQELDINRLSDYDVDHIVPQSFLKDDSIDNKVLTRSDKARGKSDNVPSEEVVKKMKNYWRQLLNAKLITQRKFDNLTKAERGGLSELDKAGFIKRQLVETRQITKHVAQILDSRMNTKYDENDKLIREVKVITLKSKLVSDFRKDFQFYKVREINNYHHAHDAYLNAVVGTALIKKYPKLESEFVYGDYKVYDVRKMIAKSEQEIGKATAKYFFYSNIMNFFKTEITLANGEIRKRPLIETNGETGEIVWDKGRDFATVRKVLSMPQVNIVKKTEVQTGGFSKESILPKRNSDKLIARKKDWDPKKYGGFDSPTVAYSVLVVAKVEKGKSKKLKSVKELLGITIMERSSFEKNPIDFLEAKGYKEVKKDLIIKLPKYSLFELENGRKRMLASAGELQKGNELALPSKYVNFLYLASHYEKLKGSPEDNEQKQLFVEQHKHYLDEIIEQISEFSKRVILADANLDKVLSAYNKHRDKPIREQAENIIHLFTLTNLGAPAAFKYFDTTIDRKRYTSTKEVLDATLIHQSITGLYETRIDLSQLGGDGGAEAAAKEAAAKEAAAKEAAAKALEAEAAAKEAAAKEAAAKEAAAKAGGTLNLEDEYRLYETSAEPEVSPGSTWLSDFPQAWAETGGMGLAVRQAPLIIPLKATSTPVSIKQYPMSQEAKLGIKPHIQRLLDQGILVPCQSPWNTPLLPVKKPGTNDYRPVQDLREVNKRVEDIHPTVPNPYNLLSGLPPSHRWYTVLDLKDAFFCLRLHPTSQPLFAFEWRDPGMGISGQLTWTRLPQGFKNSPTLFNEALHRDLADFRIQHPDLILLQYVDDILLAATSELDCQQGTRALLLTLGNLGYRASAKKAQLCQKQVKYLGYLLKEGQRWLTEARKETVMGQPTPKTPRQLREFLGTAGFCRLWIPGFAEMAAPLYPLTKPGTLFNWGPDQQKAYQEIKQALLTAPALGLPDLTKPFELFVDEKQGYAKGVLTQKLGPWRRPVAYLSKKLDPVAAGWPPCLRMVAAIAVLRKDAGKLTMGQPLVILAPHAVEALVKQPPDRWLSNARMTHYQAMLLDTDRVQFGPVVALNPATLLPLPEEGAPHDCLEILAETHGTRPDLTDQPIPDADHTWYTDGSSFLQEGQRKAGAAVTTETEVIWARALPAGTSAQRAELIALTQALKMAEGKRLNVYTDSRYAFATAHIHGEIYRRRGWLTSEGREIKNKSEILALLKALFLPKRLSIIHCLGHQKGDSAEARGNRLADQAAREAAIKTPPDTSTLLAGKRTADGSEFEKRTADGSEFESPKKKAKVE

SEQ ID NO: 7658 - protein, 2131 aa, synthetic construct
MPAAKRVKLDGGDKKYSIGLDIGTNSVGWAVITDEYKVPSKKFKVLGNTDRHSIKKNLIGALLFDSGETAEATRLKRTARRRYTRRKNRICYLQEIFSNEMAKVDDSFFHRLEESFLVEEDKKHERHPIFGNIVDEVAYHEKYPTIYHLRKKLVDSTDKADLRLIYLALAHMIKFRGHFLIEGDLNPDNSDVDKLFIQLVQTYNQLFEENPINASGVDAKAILSARLSKSRRLENLIAQLPGEKKNGLFGNLIALSLGLTPNFKSNFDLAEDAKLQLSKDTYDDDLDNLLAQIGDQYADLFLAAKNLSDAILLSDILRVNTEITKAPLSASMIKRYDEHHQDLTLLKALVRQQLPEKYKEIFFDQSKNGYAGYIDGGASQEEFYKFIKPILEKMDGTEELLVKLNREDLLRKQRTFDNGSIPHQIHLGELHAILRRQEDFYPFLKDNREKIEKILTFRIPYYVGPLARGNSRFAWMTRKSEETITPWNFEEVVDKGASAQSFIERMTNFDKNLPNEKVLPKHSLLYEYFTVYNELTKVKYVTEGMRKPAFLSGEQKKAIVDLLFKTNRKVTVKQLKEDYFKKIECFDSVEISGVEDRFNASLGTYHDLLKIIKDKDFLDNEENEDILEDIVLTLTLFEDREMIEERLKTYAHLFDDKVMKQLKRRRYTGWGRLSRKLINGIRDKQSGKTILDFLKSDGFANRNFMQLIHDDSLTFKEDIQKAQVSGQGDSLHEHIANLAGSPAIKKGILQTVKVVDELVKVMGRHKPENIVIEMARENQTTQKGQKNSRERMKRIEEGIKELGSQILKEHPVENTQLQNEKLYLYYLQNGRDMYVDQELDINRLSDYDVDHIVPQSFLKDDSIDNKVLTRSDKARGKSDNVPSEEVVKKMKNYWRQLLNAKLITQRKFDNLTKAERGGLSELDKAGFIKRQLVETRQITKHVAQILDSRMNTKYDENDKLIREVKVITLKSKLVSDFRKDFQFYKVREINNYHHAHDAYLNAVVGTALIKKYPKLESEFVYGDYKVYDVRKMIAKSEQEIGKATAKYFFYSNIMNFFKTEITLANGEIRKRPLIETNGETGEIVWDKGRDFATVRKVLSMPQVNIVKKTEVQTGGFSKESILPKRNSDKLIARKKDWDPKKYGGFDSPTVAYSVLVVAKVEKGKSKKLKSVKELLGITIMERSSFEKNPIDFLEAKGYKEVKKDLIIKLPKYSLFELENGRKRMLASAGELQKGNELALPSKYVNFLYLASHYEKLKGSPEDNEQKQLFVEQHKHYLDEIIEQISEFSKRVILADANLDKVLSAYNKHRDKPIREQAENIIHLFTLTNLGAPAAFKYFDTTIDRKRYTSTKEVLDATLIHQSITGLYETRIDLSQLGGDGGAEAAAKEAAAKEAAAKEAAAKALEAEAAAKEAAAKEAAAKEAAAKAGGTLNIEDEYRLHETSKEPDVSLGSTWLSDFPQAWAETGGMGLAVRQAPLIIPLKATSTPVSIKQYPMSQEARLGIKPHIQRLLDQGILVPCQSPWNTPLLPVKKPGTNDYRPVQDLREVNKRVEDIHPTVPNPYNLLSGLPPSHQWYTVLDLKDAFFCLRLHPTSQPLFAFEWRDPEMGISGQLTWTRLPQGFKNSPTLFNEALHRDLAGFRIQHPDLILLQYVDDLLLAATSELDCQQGTRALLQTLGDLGYRASAKKAQICQKQVKYLGYLLKEGQRWLTEARKETVMGQPIPKTPRQLREFLGTAGFCRLWIPGFAEMAAPLYPLTKPGTLFNWGPDQQKAFQEIKQALLTAPALGLPDLTKPFELFVDEKQGYAKGVLTQKLGPWRRPVAYLSKKLDPVAAGWPPCLRMVAAIAVLTKDAGKLTMGQPLVILAPHAVEALVKQPPDRWLSNARMTHYQALLLDTDRVQFGPVVALNPATLLPLPEEGLQHDCLDILAEAHGTRSDLMDQPLPDADHTWYTDGSSFLQEGQRKAGAAVTTETEVIWARALPAGTSAQRAELIALTQALKMAEGKKLNVYTDSRYAFATAHIHGEIYRRRGWLTSEGKEIKNKDEILALLKALFLPKRLSIIHCPGHQKGNSAEARGNRMADQAAREVATRETPETSTLLAGKRTADGSEFEKRTADGSEFESPKKKAKVE

SEQ ID NO: 7659 - protein, 2131 aa, synthetic construct
MPAAKRVKLDGGDKKYSIGLDIGTNSVGWAVITDEYKVPSKKFKVLGNTDRHSIKKNLIGALLFDSGETAEATRLKRTARRRYTRRKNRICYLQEIFSNEMAKVDDSFFHRLEESFLVEEDKKHERHPIFGNIVDEVAYHEKYPTIYHLRKKLVDSTDKADLRLIYLALAHMIKFRGHFLIEGDLNPDNSDVDKLFIQLVQTYNQLFEENPINASGVDAKAILSARLSKSRRLENLIAQLPGEKKNGLFGNLIALSLGLTPNFKSNFDLAEDAKLQLSKDTYDDDLDNLLAQIGDQYADLFLAAKNLSDAILLSDILRVNTEITKAPLSASMIKRYDEHHQDLTLLKALVRQQLPEKYKEIFFDQSKNGYAGYIDGGASQEEFYKFIKPILEKMDGTEELLVKLNREDLLRKQRTFDNGSIPHQIHLGELHAILRRQEDFYPFLKDNREKIEKILTFRIPYYVGPLARGNSRFAWMTRKSEETITPWNFEEVVDKGASAQSFIERMTNFDKNLPNEKVLPKHSLLYEYFTVYNELTKVKYVTEGMRKPAFLSGEQKKAIVDLLFKTNRKVTVKQLKEDYFKKIECFDSVEISGVEDRFNASLGTYHDLLKIIKDKDFLDNEENEDILEDIVLTLTLFEDREMIEERLKTYAHLFDDKVMKQLKRRRYTGWGRLSRKLINGIRDKQSGKTILDFLKSDGFANRNFMQLIHDDSLTFKEDIQKAQVSGQGDSLHEHIANLAGSPAIKKGILQTVKVVDELVKVMGRHKPENIVIEMARENQTTQKGQKNSRERMKRIEEGIKELGSQILKEHPVENTQLQNEKLYLYYLQNGRDMYVDQELDINRLSDYDVDHIVPQSFLKDDSIDNKVLTRSDKARGKSDNVPSEEVVKKMKNYWRQLLNAKLITQRKFDNLTKAERGGLSELDKAGFIKRQLVETRQITKHVAQILDSRMNTKYDENDKLIREVKVITLKSKLVSDFRKDFQFYKVREINNYHHAHDAYLNAVVGTALIKKYPKLESEFVYGDYKVYDVRKMIAKSEQEIGKATAKYFFYSNIMNFFKTEITLANGEIRKRPLIETNGETGEIVWDKGRDFATVRKVLSMPQVNIVKKTEVQTGGFSKESILPKRNSDKLIARKKDWDPKKYGGFDSPTVAYSVLVVAKVEKGKSKKLKSVKELLGITIMERSSFEKNPIDFLEAKGYKEVKKDLIIKLPKYSLFELENGRKRMLASAGELQKGNELALPSKYVNFLYLASHYEKLKGSPEDNEQKQLFVEQHKHYLDEIIEQISEFSKRVILADANLDKVLSAYNKHRDKPIREQAENIIHLFTLTNLGAPAAFKYFDTTIDRKRYTSTKEVLDATLIHQSITGLYETRIDLSQLGGDGGAEAAAKEAAAKEAAAKEAAAKALEAEAAAKEAAAKEAAAKEAAAKAGGTLNIEDEYRLHETSKGPDVPLGSTWLSDFPQAWAETGGMGLAFRQAPLIISLKATSTPVSIKQYPMSQEARLGIKPHIQRLLDQGILVPCQSPWNTPLLPVKKPGTNDYRPVQDLREVNKRVEDIHPTVPNPYNLLSGLPPSHQWYTVLDLKDAFFCLRLHPTSQSLFAFEWKDPEMGISGQLTWTRLPQGFKNSPTLFNEALHRDLADFRIQHPDLILLQYVDDLLLAATSELDCQQGTRALLQTLGDLGYRASAKKAQICQKQVKYLGYLLKEGQRWLTEARKETVMGQPTPKTPRQLREFLGKAGLCRLFIPGFAEMAAPLYPLTKPGTLFKWGPDQQKAYQEIKQALLTAPALGLPDLTKPFELFVDEKQGYAKGVLTQKLGPWRRPVAYLSKKLDPVAAGWPPCLRMVAAIAVLTKDVGKLTMGQPLVILAPHAVEALVKQPPDRWLSNARMTHYQALLLDTDRVQFGPIVALNPATLLPLPEEGLQHDCLDILAEAHGTRPDLTDQPLPDADHTWYTDGSSFLQEGQRRAGAAVTTETEVIWAKALPAGTSAQRAELIALTQALKMAAGKKLNVYTDSRYAFATAHIHGEIYRRRGWLTSEGKEIKNKDEILALLKALFLPKRLSIIHCPGHQKGNHAEARGNRMADQAAREVATRETPETSTLLAGKRTADGSEFEKRTADGSEFESPKKKAKVE

SEQ ID NO: 7660 - protein, 2131 aa, synthetic construct; identical to SEQ ID NO: 4540

SEQ ID NO: 7661 - protein, 2151 aa, synthetic construct
MPAAKRVKLDGGDKKYSIGLDIGTNSVGWAVITDEYKVPSKKFKVLGNTDRHSIKKNLIGALLFDSGETAEATRLKRTARRRYTRRKNRICYLQEIFSNEMAKVDDSFFHRLEESFLVEEDKKHERHPIFGNIVDEVAYHEKYPTIYHLRKKLVDSTDKADLRLIYLALAHMIKFRGHFLIEGDLNPDNSDVDKLFIQLVQTYNQLFEENPINASGVDAKAILSARLSKSRRLENLIAQLPGEKKNGLFGNLIALSLGLTPNFKSNFDLAEDAKLQLSKDTYDDDLDNLLAQIGDQYADLFLAAKNLSDAILLSDILRVNTEITKAPLSASMIKRYDEHHQDLTLLKALVRQQLPEKYKEIFFDQSKNGYAGYIDGGASQEEFYKFIKPILEKMDGTEELLVKLNREDLLRKQRTFDNGSIPHQIHLGELHAILRRQEDFYPFLKDNREKIEKILTFRIPYYVGPLARGNSRFAWMTRKSEETITPWNFEEVVDKGASAQSFIERMTNFDKNLPNEKVLPKHSLLYEYFTVYNELTKVKYVTEGMRKPAFLSGEQKKAIVDLLFKTNRKVTVKQLKEDYFKKIECFDSVEISGVEDRFNASLGTYHDLLKIIKDKDFLDNEENEDILEDIVLTLTLFEDREMIEERLKTYAHLFDDKVMKQLKRRRYTGWGRLSRKLINGIRDKQSGKTILDFLKSDGFANRNFMQLIHDDSLTFKEDIQKAQVSGQGDSLHEHIANLAGSPAIKKGILQTVKVVDELVKVMGRHKPENIVIEMARENQTTQKGQKNSRERMKRIEEGIKELGSQILKEHPVENTQLQNEKLYLYYLQNGRDMYVDQELDINRLSDYDVDHIVPQSFLKDDSIDNKVLTRSDKARGKSDNVPSEEVVKKMKNYWRQLLNAKLITQRKFDNLTKAERGGLSELDKAGFIKRQLVETRQITKHVAQILDSRMNTKYDENDKLIREVKVITLKSKLVSDFRKDFQFYKVREINNYHHAHDAYLNAVVGTALIKKYPKLESEFVYGDYKVYDVRKMIAKSEQEIGKATAKYFFYSNIMNFFKTEITLANGEIRKRPLIETNGETGEIVWDKGRDFATVRKVLSMPQVNIVKKTEVQTGGFSKESILPKRNSDKLIARKKDWDPKKYGGFDSPTVAYSVLVVAKVEKGKSKKLKSVKELLGITIMERSSFEKNPIDFLEAKGYKEVKKDLIIKLPKYSLFELENGRKRMLASAGELQKGNELALPSKYVNFLYLASHYEKLKGSPEDNEQKQLFVEQHKHYLDEIIEQISEFSKRVILADANLDKVLSAYNKHRDKPIREQAENIIHLFTLTNLGAPAAFKYFDTTIDRKRYTSTKEVLDATLIHQSITGLYETRIDLSQLGGDGGAEAAAKEAAAKEAAAKEAAAKALEAEAAAKEAAAKEAAAKEAAAKAGGWVQEISDSRPMLHIYLNGRRFLGLLNTGADKTCIAGRDWPANWPIHQTESSLQGLGMACGVARSSQPLRWQHEDKSGIIHPFVIPTLPFTLWGRDIMKDIKVRLMTDSPDDSQDLMIGAIESNLFADQISWKSDQPVWLNQWPLKQEKLQALQQLVTEQLQLGHLEESNSPWNTPVFVIKKKSGKWRLLQDLRAVNATMHDMGALQPGLPSPVAVPKGWEIIIIDLQDCFFNIKLHPEDCKRFAFSVPSPNFKRPYQRFQWKVLPQGMKNSPTLCQKFVDKAILTVRDKYQDSYIVHYMDDILLAHPSRSIVDEILTSMIQALNKHGLVVSTEKIQKYDNLKYLGTHIQGDSVSYQKLQIRTDKLRTLNDFQKLLGNINWIRPFLKLTTGELKPLFEILNPDSNPISTRKLTPEACKALQLMNERLSTARVKRLDLSQPWSLCILKTEYTPTACLWQDGVVEWIHLPHISPKVITPYDIFCTQLIIKGRHRSKELFSKDPDYIVVPYTKVQFDLLLQEKEDWPISLLGFLGEVHFHLPKDPLLTFTLQTAIIFPHMTSTTPLEKGIVIFTDGSANGRSVTYIQGREPIIKENTQNTAQQAEIVAVITAFEEVSQPFNLYTDSKYVTGLFPEIETATLSPRTKIYTELKHLQRLIHKRQEKFYIGHIRGHTGLPGPLAQGNAYADSLTRILTAGKRTADGSEFEKRTADGSEFESPKKKAKVE

SEQ ID NO: 7662 - protein, 2122 aa, synthetic construct
MPAAKRVKLDGGDKKYSIGLDIGTNSVGWAVITDEYKVPSKKFKVLGNTDRHSIKKNLIGALLFDSGETAEATRLKRTARRRYTRRKNRICYLQEIFSNEMAKVDDSFFHRLEESFLVEEDKKHERHPIFGNIVDEVAYHEKYPTIYHLRKKLVDSTDKADLRLIYLALAHMIKFRGHFLIEGDLNPDNSDVDKLFIQLVQTYNQLFEENPINASGVDAKAILSARLSKSRRLENLIAQLPGEKKNGLFGNLIALSLGLTPNFKSNFDLAEDAKLQLSKDTYDDDLDNLLAQIGDQYADLFLAAKNLSDAILLSDILRVNTEITKAPLSASMIKRYDEHHQDLTLLKALVRQQLPEKYKEIFFDQSKNGYAGYIDGGASQEEFYKFIKPILEKMDGTEELLVKLNREDLLRKQRTFDNGSIPHQIHLGELHAILRRQEDFYPFLKDNREKIEKILTFRIPYYVGPLARGNSRFAWMTRKSEETITPWNFEEVVDKGASAQSFIERMTNFDKNLPNEKVLPKHSLLYEYFTVYNELTKVKYVTEGMRKPAFLSGEQKKAIVDLLFKTNRKVTVKQLKEDYFKKIECFDSVEISGVEDRFNASLGTYHDLLKIIKDKDFLDNEENEDILEDIVLTLTLFEDREMIEERLKTYAHLFDDKVMKQLKRRRYTGWGRLSRKLINGIRDKQSGKTILDFLKSDGFANRNFMQLIHDDSLTFKEDIQKAQVSGQGDSLHEHIANLAGSPAIKKGILQTVKVVDELVKVMGRHKPENIVIEMARENQTTQKGQKNSRERMKRIEEGIKELGSQILKEHPVENTQLQNEKLYLYYLQNGRDMYVDQELDINRLSDYDVDHIVPQSFLKDDSIDNKVLTRSDKARGKSDNVPSEEVVKKMKNYWRQLLNAKLITQRKFDNLTKAERGGLSELDKAGFIKRQLVETRQITKHVAQILDSRMNTKYDENDKLIREVKVITLKSKLVSDFRKDFQFYKVREINNYHHAHDAYLNAVVGTALIKKYPKLESEFVYGDYKVYDVRKMIAKSEQEIGKATAKYFFYSNIMNFFKTEITLANGEIRKRPLIETNGETGEIVWDKGRDFATVRKVLSMPQVNIVKKTEVQTGGFSKESILPKRNSDKLIARKKDWDPKKYGGFDSPTVAYSVLVVAKVEKGKSKKLKSVKELLGITIMERSSFEKNPIDFLEAKGYKEVKKDLIIKLPKYSLFELENGRKRMLASAGELQKGNELALPSKYVNFLYLASHYEKLKGSPEDNEQKQLFVEQHKHYLDEIIEQISEFSKRVILADANLDKVLSAYNKHRDKPIREQAENIIHLFTLTNLGAPAAFKYFDTTIDRKRYTSTKEVLDATLIHQSITGLYETRIDLSQLGGDGGAEAAAKEAAAKEAAAKEAAAKALEAEAAAKEAAAKEAAAKEAAAKAGGVPWLMKKPLQLTVLVPLHEYQERLLQQTALPKEQKELLQKLFLKYDALWQHWENQVGHRRIKPHNIATGTLAPRPQKQYPINPKAKPSIQIVIDDLLKQGVLIQQNSTMNTPVYPVPKPDGKWRMVLDYREVNKTIPLIAAQNQHSAGILSSIYRGKYKTTLDLTNGFWAHPITPESYWLTAFTWQGKQYCWTRLPQGFLNSPALFTADVVDLLKEIPNVQAYVDDIYISHDDPQEHLEQLEKIFSILLNAGYVVSLKKSEIAQREVEFLGFNITKEGRGLTDTFKQKLLNITPPKDLKQLQSILGLLNFARNFIPNYSELVKPLYTIVANANGKFISWTEDNSNQLQHIISVLNQADNLEERNPETRLIIKVNSSPSAGYIRYYNEGSKRPIMYVNYIFSKAEAKFTQTEKLLTTMHKGLIKAMDLAMGQEILVYSPIVSMTKIQRTPLPERKALPVRWITWMTYLEDPRIQFHYDKSLPELQQIPNVTEDVIAKTKHPSEFAMVFYTDGSAIKHPDVNKSHSAGMGIAQVQFIPEYKIVHQWSIPLGDHTAQLAEIAAVEFACKKALKISGPVLIVTDSFYVAESANKELPYWKSNGFLNNKKKPLRHVSKWKSIAECLQLKPDIIIMHEKGHQQPMTTLHTEGNNLADKLATQGSYVVHAGKRTADGSEFEKRTADGSEFESPKKKAKVE

SEQ ID NO: 7663 - protein, 2122 aa, synthetic construct
MPAAKRVKLDGGDKKYSIGLDIGTNSVGWAVITDEYKVPSKKFKVLGNTDRHSIKKNLIGALLFDSGETAEATRLKRTARRRYTRRKNRICYLQEIFSNEMAKVDDSFFHRLEESFLVEEDKKHERHPIFGNIVDEVAYHEKYPTIYHLRKKLVDSTDKADLRLIYLALAHMIKFRGHFLIEGDLNPDNSDVDKLFIQLVQTYNQLFEENPINASGVDAKAILSARLSKSRRLENLIAQLPGEKKNGLFGNLIALSLGLTPNFKSNFDLAEDAKLQLSKDTYDDDLDNLLAQIGDQYADLFLAAKNLSDAILLSDILRVNTEITKAPLSASMIKRYDEHHQDLTLLKALVRQQLPEKYKEIFFDQSKNGYAGYIDGGASQEEFYKFIKPILEKMDGTEELLVKLNREDLLRKQRTFDNGSIPHQIHLGELHAILRRQEDFYPFLKDNREKIEKILTFRIPYYVGPLARGNSRFAWMTRKSEETITPWNFEEVVDKGASAQSFIERMTNFDKNLPNEKVLPKHSLLYEYFTVYNELTKVKYVTEGMRKPAFLSGEQKKAIVDLLFKTNRKVTVKQLKEDYFKKIECFDSVEISGVEDRFNASLGTYHDLLKIIKDKDFLDNEENEDILEDIVLTLTLFEDREMIEERLKTYAHLFDDKVMKQLKRRRYTGWGRLSRKLINGIRDKQSGKTILDFLKSDGFANRNFMQLIHDDSLTFKEDIQKAQVSGQGDSLHEHIANLAGSPAIKKGILQTVKVVDELVKVMGRHKPENIVIEMARENQTTQKGQKNSRERMKRIEEGIKELGSQILKEHPVENTQLQNEKLYLYYLQNGRDMYVDQELDINRLSDYDVDHIVPQSFLKDDSIDNKVLTRSDKARGKSDNVPSEEVVKKMKNYWRQLLNAKLITQRKFDNLTKAERGGLSELDKAGFIKRQLVETRQITKHVAQILDSRMNTKYDENDKLIREVKVITLKSKLVSDFRKDFQFYKVREINNYHHAHDAYLNAVVGTALIKKYPKLESEFVYGDYKVYDVRKMIAKSEQEIGKATAKYFFYSNIMNFFKTEITLANGEIRKRPLIETNGETGEIVWDKGRDFATVRKVLSMPQVNIVKKTEVQTGGFSKESILPKRNSDKLIARKKDWDPKKYGGFDSPTVAYSVLVVAKVEKGKSKKLKSVKELLGITIMERSSFEKNPIDFLEAKGYKEVKKDLIIKLPKYSLFELENGRKRMLASAGELQKGNELALPSKYVNFLYLASHYEKLKGSPEDNEQKQLFVEQHKHYLDEIIEQISEFSKRVILADANLDKVLSAYNKHRDKPIREQAENIIHLFTLTNLGAPAAFKYFDTTIDRKRYTSTKEVLDATLIHQSITGLYETRIDLSQLGGDGGAEAAAKEAAAKEAAAKEAAAKALEAEAAAKEAAAKEAAAKEAAAKAGGVPWLMKKPLQLTVLVPLHEYQERLLQQTALPKEQKELLQKLFLKYDALWQHWENQVGHRRIKPHNIATGTLAPRPQKQYPINPKAKPSIQIVIDDLLKQGVLIQQNSTMNTPVYPVPKPDGKWRMVLDYREVNKTIPLIAAQNQHSAGILSSIYRGKYKTTLDLTNGFWAHPITPESYWLTAFTWQGKQYCWTRLPQGFLNSPALFNADVVDLLKEIPNVQAYVDDIYISHDDPQEHLEQLEKIFSILLNAGYVVSLKKSEIAQREVEFLGFNITKEGRGLTDTFKQKLLNITPPKDLKQLQSILGLLNFARNFIPNYSELVKPLYTIVAPANGKFISWTEDNSNQLQHIISVLNQADNLEERNPETRLIIKVNSSPSAGYIRYYNEGSKRPIMYVNYIFSKAEAKFTQTEKLLTTMHKGLIKAMDLAMGQEILVYSPIVSMTKIQRTPLPERKALPVRWITWMTYLEDPRIQFHYDKSLPELQQIPNVTEDVIAKTKHPSEFAMVFYTDGSAIKHPDVNKSHSAGMGIAQVQFIPEYKIVHQWSIPLGDHTAQLAEIAAVEFACKKALKISGPVLIVTDSFYVAESANKELPYWKSNGFLNNKKKPLRHVSKWKSIAECLQLKPDIIIMHEKGHQQPMTTLHTEGNNLADKLATQGSYVVHAGKRTADGSEFEKRTADGSEFESPKKKAKVE

SEQ ID NO: 7664 - protein, 2122 aa, synthetic construct
MPAAKRVKLDGGDKKYSIGLDIGTNSVGWAVITDEYKVPSKKFKVLGNTDRHSIKKNLIGALLFDSGETAEATRLKRTARRRYTRRKNRICYLQEIFSNEMAKVDDSFFHRLEESFLVEEDKKHERHPIFGNIVDEVAYHEKYPTIYHLRKKLVDSTDKADLRLIYLALAHMIKFRGHFLIEGDLNPDNSDVDKLFIQLVQTYNQLFEENPINASGVDAKAILSARLSKSRRLENLIAQLPGEKKNGLFGNLIALSLGLTPNFKSNFDLAEDAKLQLSKDTYDDDLDNLLAQIGDQYADLFLAAKNLSDAILLSDILRVNTEITKAPLSASMIKRYDEHHQDLTLLKALVRQQLPEKYKEIFFDQSKNGYAGYIDGGASQEEFYKFIKPILEKMDGTEELLVKLNREDLLRKQRTFDNGSIPHQIHLGELHAILRRQEDFYPFLKDNREKIEKILTFRIPYYVGPLARGNSRFAWMTRKSEETITPWNFEEVVDKGASAQSFIERMTNFDKNLPNEKVLPKHSLLYEYFTVYNELTKVKYVTEGMRKPAFLSGEQKKAIVDLLFKTNRKVTVKQLKEDYFKKIECFDSVEISGVEDRFNASLGTYHDLLKIIKDKDFLDNEENEDILEDIVLTLTLFEDREMIEERLKTYAHLFDDKVMKQLKRRRYTGWGRLSRKLINGIRDKQSGKTILDFLKSDGFANRNFMQLIHDDSLTFKEDIQKAQVSGQGDSLHEHIANLAGSPAIKKGILQTVKVVDELVKVMGRHKPENIVIEMARENQTTQKGQKNSRERMKRIEEGIKELGSQILKEHPVENTQLQNEKLYLYYLQNGRDMYVDQELDINRLSDYDVDHIVPQSFLKDDSIDNKVLTRSDKARGKSDNVPSEEVVKKMKNYWRQLLNAKLITQRKFDNLTKAERGGLSELDKAGFIKRQLVETRQITKHVAQILDSRMNTKYDENDKLIREVKVITLKSKLVSDFRKDFQFYKVREINNYHHAHDAYLNAVVGTALIKKYPKLESEFVYGDYKVYDVRKMIAKSEQEIGKATAKYFFYSNIMNFFKTEITLANGEIRKRPLIETNGETGEIVWDKGRDFATVRKVLSMPQVNIVKKTEVQTGGFSKESILPKRNSDKLIARKKDWDPKKYGGFDSPTVAYSVLVVAKVEKGKSKKLKSVKELLGITIMERSSFEKNPIDFLEAKGYKEVKKDLIIKLPKYSLFELENGRKRMLASAGELQKGNELALPSKYVNFLYLASHYEKLKGSPEDNEQKQLFVEQHKHYLDEIIEQISEFSKRVILADANLDKVLSAYNKHRDKPIREQAENIIHLFTLTNLGAPAAFKYFDTTIDRKRYTSTKEVLDATLIHQSITGLYETRIDLSQLGGDGGAEAAAKEAAAKEAAAKEAAAKALEAEAAAKEAAAKEAAAKEAAAKAGGVPWLMKKPLQLTVLVPLHEYQERLLQQTALPKEQKELLQKLFLKYDALWQHWENQVGHRRIKPHNIATGTLAPRPQKQYPINPKAKPSIQIVIDDLLKQGVLIQQNSTMNTPVYPVPKPDGKWRMVLDYREVNKTIPLIAAQNQHSAGILSSIYRGKYKTTLDLTNGFWAHPITPESYWLTAFTWQGKQYCWTRLPQGFLNSPALFNADVVDLLKEIPNVQAYVDDIYISHDDPQEHLEQLEKIFSILLNAGYVVSLKKSEIAQREVEFLGFNITKEGRGLTDTFKQKLLNITPPKDLKQLQSILGKLNFARNFIPNYSELVKPLYTIVAPANGKFISWTEDNSNQLQHIISVLNQADNLEERNPETRLIIKVNSSPSAGYIRYYNEGSKRPIMYVNYIFSKAEAKFTQTEKLLTTMHKGLIKAMDLAMGQEILVYSPIVSMTKIQRTPLPERKALPVRWITWMTYLEDPRIQFHYDKSLPELQQIPNVTEDVIAKTKHPSEFAMVFYTDGSAIKHPDVNKSHSAGMGIAQVQFIPEYKIVHQWSIPLGDHTAQLAEIAAVEFACKKALKISGPVLIVTDSFYVAESANKELPYWKSNGFLNNKKKPLRHVSKWKSIAECLQLKPDIIIMHEKGHQQPMTTLHTEGNNLADKLATQGSYVVHAGKRTADGSEFEKRTADGSEFESPKKKAKVE

SEQ ID NO: 7665 - protein, 2211 aa, synthetic construct
MPAAKRVKLDGGDKKYSIGLDIGTNSVGWAVITDEYKVPSKKFKVLGNTDRHSIKKNLIGALLFDSGETAEATRLKRTARRRYTRRKNRICYLQEIFSNEMAKVDDSFFHRLEESFLVEEDKKHERHPIFGNIVDEVAYHEKYPTIYHLRKKLVDSTDKADLRLIYLALAHMIKFRGHFLIEGDLNPDNSDVDKLFIQLVQTYNQLFEENPINASGVDAKAILSARLSKSRRLENLIAQLPGEKKNGLFGNLIALSLGLTPNFKSNFDLAEDAKLQLSKDTYDDDLDNLLAQIGDQYADLFLAAKNLSDAILLSDILRVNTEITKAPLSASMIKRYDEHHQDLTLLKALVRQQLPEKYKEIFFDQSKNGYAGYIDGGASQEEFYKFIKPILEKMDGTEELLVKLNREDLLRKQRTFDNGSIPHQIHLGELHAILRRQEDFYPFLKDNREKIEKILTFRIPYYVGPLARGNSRFAWMTRKSEETITPWNFEEVVDKGASAQSFIERMTNFDKNLPNEKVLPKHSLLYEYFTVYNELTKVKYVTEGMRKPAFLSGEQKKAIVDLLFKTNRKVTVKQLKEDYFKKIECFDSVEISGVEDRFNASLGTYHDLLKIIKDKDFLDNEENEDILEDIVLTLTLFEDREMIEERLKTYAHLFDDKVMKQLKRRRYTGWGRLSRKLINGIRDKQSGKTILDFLKSDGFANRNFMQLIHDDSLTFKEDIQKAQVSGQGDSLHEHIANLAGSPAIKKGILQTVKVVDELVKVMGRHKPENIVIEMARENQTTQKGQKNSRERMKRIEEGIKELGSQILKEHPVENTQLQNEKLYLYYLQNGRDMYVDQELDINRLSDYDVDHIVPQSFLKDDSIDNKVLTRSDKARGKSDNVPSEEVVKKMKNYWRQLLNAKLITQRKFDNLTKAERGGLSELDKAGFIKRQLVETRQITKHVAQILDSRMNTKYDENDKLIREVKVITLKSKLVSDFRKDFQFYKVREINNYHHAHDAYLNAVVGTALIKKYPKLESEFVYGDYKVYDVRKMIAKSEQEIGKATAKYFFYSNIMNFFKTEITLANGEIRKRPLIETNGETGEIVWDKGRDFATVRKVLSMPQVNIVKKTEVQTGGFSKESILPKRNSDKLIARKKDWDPKKYGGFDSPTVAYSVLVVAKVEKGKSKKLKSVKELLGITIMERSSFEKNPIDFLEAKGYKEVKKDLIIKLPKYSLFELENGRKRMLASAGELQKGNELALPSKYVNFLYLASHYEKLKGSPEDNEQKQLFVEQHKHYLDEIIEQISEFSKRVILADANLDKVLSAYNKHRDKPIREQAENIIHLFTLTNLGAPAAFKYFDTTIDRKRYTSTKEVLDATLIHQSITGLYETRIDLSQLGGDGGAEAAAKEAAAKEAAAKEAAAKALEAEAAAKEAAAKEAAAKEAAAKAGGMDPLQLLQPLEAEIKGTKLKAHWNSGATITCVPEAFLEDERPIQTMLIKTIHGEKQQDVYYLTFKVQGRKVEAEVLASPYDYILLNPSDVPWLMKKPLQLTVLVPLHEYQERLLQQTALPKEQKELLQKLFLKYDALWQHWENQVGHRRIKPHNIATGTLAPRPQKQYPINPKAKPSIQIVIDDLLKQGVLIQQNSTMNTPVYPVPKPDGKWRMVLDYREVNKTIPLIAAQNQHSAGILSSIYRGKYKTTLDLTNGFWAHPITPESYWLTAFTWQGKQYCWTRLPQGFLNSPALFNADVVDLLKEIPNVQAYVDDIYISHDDPQEHLEQLEKIFSILLNAGYVVSLKKSEIAQREVEFLGFNITKEGRGLTDTFKQKLLNITPPKDLKQLQSILGLLNFARNFIPNYSELVKPLYTIVAPANGKFISWTEDNSNQLQHIISVLNQADNLEERNPETRLIIKVNSSPSAGYIRYYNEGSKRPIMYVNYIFSKAEAKFTQTEKLLTTMHKGLIKAMDLAMGQEILVYSPIVSMTKIQRTPLPERKALPVRWITWMTYLEDPRIQFHYDKSLPELQQIPNVTEDVIAKTKHPSEFAMVFYTDGSAIKHPDVNKSHSAGMGIAQVQFIPEYKIVHQWSIPLGDHTAQLAEIAAVEFACKKALKISGPVLIVTDSFYVAESANKELPYWKSNGFLNNKKKPLRHVSKWKSIAECLQLKPDIIIMHEKGHQQPMTTLHTEGNNLADKLATQGSYVVHAGKRTADGSEFEKRTADGSEFESPKKKAKVE

SEQ ID NO: 7666 - protein, 2122 aa, synthetic construct
MPAAKRVKLDGGDKKYSIGLDIGTNSVGWAVITDEYKVPSKKFKVLGNTDRHSIKKNLIGALLFDSGETAEATRLKRTARRRYTRRKNRICYLQEIFSNEMAKVDDSFFHRLEESFLVEEDKKHERHPIFGNIVDEVAYHEKYPTIYHLRKKLVDSTDKADLRLIYLALAHMIKFRGHFLIEGDLNPDNSDVDKLFIQLVQTYNQLFEENPINASGVDAKAILSARLSKSRRLENLIAQLPGEKKNGLFGNLIALSLGLTPNFKSNFDLAEDAKLQLSKDTYDDDLDNLLAQIGDQYADLFLAAKNLSDAILLSDILRVNTEITKAPLSASMIKRYDEHHQDLTLLKALVRQQLPEKYKEIFFDQSKNGYAGYIDGGASQEEFYKFIKPILEKMDGTEELLVKLNREDLLRKQRTFDNGSIPHQIHLGELHAILRRQEDFYPFLKDNREKIEKILTFRIPYYVGPLARGNSRFAWMTRKSEETITPWNFEEVVDKGASAQSFIERMTNFDKNLPNEKVLPKHSLLYEYFTVYNELTKVKYVTEGMRKPAFLSGEQKKAIVDLLFKTNRKVTVKQLKEDYFKKIECFDSVEISGVEDRFNASLGTYHDLLKIIKDKDFLDNEENEDILEDIVLTLTLFEDREMIEERLKTYAHLFDDKVMKQLKRRRYTGWGRLSRKLINGIRDKQSGKTILDFLKSDGFANRNFMQLIHDDSLTFKEDIQKAQVSGQGDSLHEHIANLAGSPAIKKGILQTVKVVDELVKVMGRHKPENIVIEMARENQTTQKGQKNSRERMKRIEEGIKELGSQILKEHPVENTQLQNEKLYLYYLQNGRDMYVDQELDINRLSDYDVDHIVPQSFLKDDSIDNKVLTRSDKARGKSDNVPSEEVVKKMKNYWRQLLNAKLITQRKFDNLTKAERGGLSELDKAGFIKRQLVETRQITKHVAQILDSRMNTKYDENDKLIREVKVITLKSKLVSDFRKDFQFYKVREINNYHHAHDAYLNAVVGTALIKKYPKLESEFVYGDYKVYDVRKMIAKSEQEIGKATAKYFFYSNIMNFFKTEITLANGEIRKRPLIETNGETGEIVWDKGRDFATVRKVLSMPQVNIVKKTEVQTGGFSKESILPKRNSDKLIARKKDWDPKKYGGFDSPTVAYSVLVVAKVEKGKSKKLKSVKELLGITIMERSSFEKNPIDFLEAKGYKEVKKDLIIKLPKYSLFELENGRKRMLASAGELQKGNELALPSKYVNFLYLASHYEKLKGSPEDNEQKQLFVEQHKHYLDEIIEQISEFSKRVILADANLDKVLSAYNKHRDKPIREQAENIIHLFTLTNLGAPAAFKYFDTTIDRKRYTSTKEVLDATLIHQSITGLYETRIDLSQLGGDGGAEAAAKEAAAKEAAAKEAAAKALEAEAAAKEAAAKEAAAKEAAAKAGGIPWLMKKPLQLTTLVPLQEYEERLLKQTMLTGSYKEKLQSLFLKYDALWQHWENQVGHRRIKPHHIATGTVNPRPQKQYPINPKAKASIQTVINDLLKQGVLIQQNSIMNTPVYPVPKPDGKWRMVLDYREVNKTIPLIAAQNQHSAGILSSIFRGKYKTTLDLSNGFWAHSITPESYWLTAFTWLGQQYCWTRLPQGFLNSPALFNADVVDLLKEVPNVQVYVDDIYISHDDPREHLEQLEKVFSLLLNAGYVVSLKKSEIAQHEVEFLGFNITKEGRGLTETFKQKLLNITPPRDLKQLQSILGLLNFARNFIPNFSELVKPLYNIIATAPGKYITWTTDNSQQLQNIISMLNSAENLEERNPEVRLIMKVNTSPSAGYIRFYNEFAKRPIMYLNYVYTKAEVKFTNTEKLLTTIHKGLIKALDLGMGQEILVYSPIVSMTKIQKTPLPERKALPIRWITWMSYLEDPRIQFHYDKTLPELQQVPTVTDDIIAKIKHPSEFSMVFYTDGSAIKHPNVNKSHNAGMGIAQVQFKPEFTVINTWSIPLGDHTAQLAEVAAVEFACKKALKIDGPVLIVTDSFYVAESVNKELPYWQSNGFFNNKKKPLKHVSKWKSIADCIQLKPDIIIIHEKGHQPTASTFHTEGNNLADKLATQGSYVVNAGKRTADGSEFEKRTADGSEFESPKKKAKVE

SEQ ID NO: 7667 - protein, 2122 aa, synthetic construct; identical to SEQ ID NO: 4541

SEQ ID NO: 7668 - protein, 2102 aa, synthetic construct
MPAAKRVKLDGGDKKYSIGLDIGTNSVGWAVITDEYKVPSKKFKVLGNTDRHSIKKNLIGALLFDSGETAEATRLKRTARRRYTRRKNRICYLQEIFSNEMAKVDDSFFHRLEESFLVEEDKKHERHPIFGNIVDEVAYHEKYPTIYHLRKKLVDSTDKADLRLIYLALAHMIKFRGHFLIEGDLNPDNSDVDKLFIQLVQTYNQLFEENPINASGVDAKAILSARLSKSRRLENLIAQLPGEKKNGLFGNLIALSLGLTPNFKSNFDLAEDAKLQLSKDTYDDDLDNLLAQIGDQYADLFLAAKNLSDAILLSDILRVNTEITKAPLSASMIKRYDEHHQDLTLLKALVRQQLPEKYKEIFFDQSKNGYAGYIDGGASQEEFYKFIKPILEKMDGTEELLVKLNREDLLRKQRTFDNGSIPHQIHLGELHAILRRQEDFYPFLKDNREKIEKILTFRIPYYVGPLARGNSRFAWMTRKSEETITPWNFEEVVDKGASAQSFIERMTNFDKNLPNEKVLPKHSLLYEYFTVYNELTKVKYVTEGMRKPAFLSGEQKKAIVDLLFKTNRKVTVKQLKEDYFKKIECFDSVEISGVEDRFNASLGTYHDLLKIIKDKDFLDNEENEDILEDIVLTLTLFEDREMIEERLKTYAHLFDDKVMKQLKRRRYTGWGRLSRKLINGIRDKQSGKTILDFLKSDGFANRNFMQLIHDDSLTFKEDIQKAQVSGQGDSLHEHIANLAGSPAIKKGILQTVKVVDELVKVMGRHKPENIVIEMARENQTTQKGQKNSRERMKRIEEGIKELGSQILKEHPVENTQLQNEKLYLYYLQNGRDMYVDQELDINRLSDYDVDHIVPQSFLKDDSIDNKVLTRSDKARGKSDNVPSEEVVKKMKNYWRQLLNAKLITQRKFDNLTKAERGGLSELDKAGFIKRQLVETRQITKHVAQILDSRMNTKYDENDKLIREVKVITLKSKLVSDFRKDFQFYKVREINNYHHAHDAYLNAVVGTALIKKYPKLESEFVYGDYKVYDVRKMIAKSEQEIGKATAKYFFYSNIMNFFKTEITLANGEIRKRPLIETNGETGEIVWDKGRDFATVRKVLSMPQVNIVKKTEVQTGGFSKESILPKRNSDKLIARKKDWDPKKYGGFDSPTVAYSVLVVAKVEKGKSKKLKSVKELLGITIMERSSFEKNPIDFLEAKGYKEVKKDLIIKLPKYSLFELENGRKRMLASAGELQKGNELALPSKYVNFLYLASHYEKLKGSPEDNEQKQLFVEQHKHYLDEIIEQISEFSKRVILADANLDKVLSAYNKHRDKPIREQAENIIHLFTLTNLGAPAAFKYFDTTIDRKRYTSTKEVLDATLIHQSITGLYETRIDLSQLGGDGGGGGGSEAAAKGGGGSGGTAPLEEEYRLFLEAPIQNVTLLEQWKREIPKVWAEINPPGLASTQAPIHVQLLSTALPVRVRQYPITLEAKRSLRETIRKFRAAGILRPVHSPWNTPLLPVRKSGTSEYRMVQDLREVNKRVETIHPTVPNPYTLLSLLPPDRIWYSVLDLKDAFFCIPLAPESQLIFAFEWADAEEGESGQLTWTRLPQGFKNSPTLFDEALNRDLQGFRLDHPSVSLLQYVDDLLIAADTQAACLSATRDLLMTLAELGYRVSGKKAQLCQEEVTYLGFKIHKGSRSLSNSRTQAILQIPVPKTKRQVREFLGTIGYCRLWIPGFAELAQPLYAATRGGNDPLVWGEKEEEAFQSLKLALTQPPALALPSLDKPFQLFVEETSGAAKGVLTQALGPWKRPVAYLSKRLDPVAAGWPRCLRAIAAAALLTREASKLTFGQDIEITSSHNLESLLRSPPDKWLTNARITQYQVLLLDPPRVRFKQTAALNPATLLPETDDTLPIHHCLDTLDSLTSTRPDLTDQPLAQAEATLFTDGSSYIRDGKRYAGAAVVTLDSVIWAEPLPIGTSAQKAELIALTKALEWSKDKSVNIYTDSRYAFATLHVHGMIYRERGLLTAGGKAIKNAPEILALLTAVWLPKRVAVMHCKGHQKDDAPTSTGNRRADEVAREVAIRPLSTQATISAGKRTADGSEFEKRTADGSEFESPKKKAKVE

SEQ ID NO: 7669 - protein, 2177 aa, synthetic construct
MPAAKRVKLDGGDKKYSIGLDIGTNSVGWAVITDEYKVPSKKFKVLGNTDRHSIKKNLIGALLFDSGETAEATRLKRTARRRYTRRKNRICYLQEIFSNEMAKVDDSFFHRLEESFLVEEDKKHERHPIFGNIVDEVAYHEKYPTIYHLRKKLVDSTDKADLRLIYLALAHMIKFRGHFLIEGDLNPDNSDVDKLFIQLVQTYNQLFEENPINASGVDAKAILSARLSKSRRLENLIAQLPGEKKNGLFGNLIALSLGLTPNFKSNFDLAEDAKLQLSKDTYDDDLDNLLAQIGDQYADLFLAAKNLSDAILLSDILRVNTEITKAPLSASMIKRYDEHHQDLTLLKALVRQQLPEKYKEIFFDQSKNGYAGYIDGGASQEEFYKFIKPILEKMDGTEELLVKLNREDLLRKQRTFDNGSIPHQIHLGELHAILRRQEDFYPFLKDNREKIEKILTFRIPYYVGPLARGNSRFAWMTRKSEETITPWNFEEVVDKGASAQSFIERMTNFDKNLPNEKVLPKHSLLYEYFTVYNELTKVKYVTEGMRKPAFLSGEQKKAIVDLLFKTNRKVTVKQLKEDYFKKIECFDSVEISGVEDRFNASLGTYHDLLKIIKDKDFLDNEENEDILEDIVLTLTLFEDREMIEERLKTYAHLFDDKVMKQLKRRRYTGWGRLSRKLINGIRDKQSGKTILDFLKSDGFANRNFMQLIHDDSLTFKEDIQKAQVSGQGDSLHEHIANLAGSPAIKKGILQTVKVVDELVKVMGRHKPENIVIEMARENQTTQKGQKNSRERMKRIEEGIKELGSQILKEHPVENTQLQNEKLYLYYLQNGRDMYVDQELDINRLSDYDVDHIVPQSFLKDDSIDNKVLTRSDKARGKSDNVPSEEVVKKMKNYWRQLLNAKLITQRKFDNLTKAERGGLSELDKAGFIKRQLVETRQITKHVAQILDSRMNTKYDENDKLIREVKVITLKSKLVSDFRKDFQFYKVREINNYHHAHDAYLNAVVGTALIKKYPKLESEFVYGDYKVYDVRKMIAKSEQEIGKATAKYFFYSNIMNFFKTEITLANGEIRKRPLIETNGETGEIVWDKGRDFATVRKVLSMPQVNIVKKTEVQTGGFSKESILPKRNSDKLIARKKDWDPKKYGGFDSPTVAYSVLVVAKVEKGKSKKLKSVKELLGITIMERSSFEKNPIDFLEAKGYKEVKKDLIIKLPKYSLFELENGRKRMLASAGELQKGNELALPSKYVNFLYLASHYEKLKGSPEDNEQKQLFVEQHKHYLDEIIEQISEFSKRVILADANLDKVLSAYNKHRDKPIREQAENIIHLFTLTNLGAPAAFKYFDTTIDRKRYTSTKEVLDATLIHQSITGLYETRIDLSQLGGDGGGGGGSEAAAKGGGGSGGMDLLKPLTVERKGVKIKGYWNSQADITCVPKDLLQGEEPVRQQNVTTIHGTQEGDVYYVNLKIDGRRINTEVIGTTLDYAIITPGDVPWILKKPLELTIKLDLEEQQGTLLNNSILSKKGKEELKQLFEKYSALWQSWENQVGHRRIRPHKIATGTVKPTPQKQYHINPKAKPDIQIVINDLLKQGVLIQKESTMNTPVYPVPKPNGRWRMVLDYRAVNKVTPLIAVQNQHSYGILGSLFKGRYKTTIDLSNGFWAHPIVPEDYWITAFTWQGKQYCWTVLPQGFLNSPGLFNGDVVDLLQGIPNVEVYVDDVYISHDSEKEHLEYLDILFNRLKEAGYIISLKKSNIANSIVDFLGFQITNEGRGLTDTFKEKLENITAPTTLKQLQSILGLLNFARNFIPDFTELIAPLYALIPKSPKNYVPWQIEHSTTLETLITKLNGAEYLQGRKGDKTLIMKVNASYTTGYIRYYNEGEKKPISYVSIVFSKTELKFTELEKLLTTVHKGLLKALDLSMGQNIHVYSPIVSMQNIQKTPQTAKKALASRWLSWLSYLEDPRIRFFYDPQMPALKDLPAVDTGKDNKKHPSNFQHIFYTDGSAITSPTKEGHLNAGMGIVYFINKDGNLQKQQEWSISLGNHTAQFAEIAAFEFALKKCLPLGGNILVVTDSNYVAKAYNEELDVWASNGFVNNRKKPLKHISKWKSVADLKRLRPDVVVTHEPGHQKLDSSPHAYGNNLADQLATQASFKVHAGKRTADGSEFEKRTADGSEFESPKKKAKVE

SEQ ID NO: 7670 - protein, 2099 aa, synthetic construct
MPAAKRVKLDGGDKKYSIGLDIGTNSVGWAVITDEYKVPSKKFKVLGNTDRHSIKKNLIGALLFDSGETAEATRLKRTARRRYTRRKNRICYLQEIFSNEMAKVDDSFFHRLEESFLVEEDKKHERHPIFGNIVDEVAYHEKYPTIYHLRKKLVDSTDKADLRLIYLALAHMIKFRGHFLIEGDLNPDNSDVDKLFIQLVQTYNQLFEENPINASGVDAKAILSARLSKSRRLENLIAQLPGEKKNGLFGNLIALSLGLTPNFKSNFDLAEDAKLQLSKDTYDDDLDNLLAQIGDQYADLFLAAKNLSDAILLSDILRVNTEITKAPLSASMIKRYDEHHQDLTLLKALVRQQLPEKYKEIFFDQSKNGYAGYIDGGASQEEFYKFIKPILEKMDGTEELLVKLNREDLLRKQRTFDNGSIPHQIHLGELHAILRRQEDFYPFLKDNREKIEKILTFRIPYYVGPLARGNSRFAWMTRKSEETITPWNFEEVVDKGASAQSFIERMTNFDKNLPNEKVLPKHSLLYEYFTVYNELTKVKYVTEGMRKPAFLSGEQKKAIVDLLFKTNRKVTVKQLKEDYFKKIECFDSVEISGVEDRFNASLGTYHDLLKIIKDKDFLDNEENEDILEDIVLTLTLFEDREMIEERLKTYAHLFDDKVMKQLKRRRYTGWGRLSRKLINGIRDKQSGKTILDFLKSDGFANRNFMQLIHDDSLTFKEDIQKAQVSGQGDSLHEHIANLAGSPAIKKGILQTVKVVDELVKVMGRHKPENIVIEMARENQTTQKGQKNSRERMKRIEEGIKELGSQILKEHPVENTQLQNEKLYLYYLQNGRDMYVDQELDINRLSDYDVDHIVPQSFLKDDSIDNKVLTRSDKARGKSDNVPSEEVVKKMKNYWRQLLNAKLITQRKFDNLTKAERGGLSELDKAGFIKRQLVETRQITKHVAQILDSRMNTKYDENDKLIREVKVITLKSKLVSDFRKDFQFYKVREINNYHHAHDAYLNAVVGTALIKKYPKLESEFVYGDYKVYDVRKMIAKSEQEIGKATAKYFFYSNIMNFFKTEITLANGEIRKRPLIETNGETGEIVWDKGRDFATVRKVLSMPQVNIVKKTEVQTGGFSKESILPKRNSDKLIARKKDWDPKKYGGFDSPTVAYSVLVVAKVEKGKSKKLKSVKELLGITIMERSSFEKNPIDFLEAKGYKEVKKDLIIKLPKYSLFELENGRKRMLASAGELQKGNELALPSKYVNFLYLASHYEKLKGSPEDNEQKQLFVEQHKHYLDEIIEQISEFSKRVILADANLDKVLSAYNKHRDKPIREQAENIIHLFTLTNLGAPAAFKYFDTTIDRKRYTSTKEVLDATLIHQSITGLYETRIDLSQLGGDGGGGGGSEAAAKGGGGSGGTLQLEEEYRLFEPESTQKQEMDIWLKNFPQAWAETGGMGTAHCQAPVLIQLKATATPISIRQYPMPHEAYQGIKPHIRRMLDQGILKPCQSPWNTPLLPVKKPGTEDYRPVQDLREVNKRVEDIHPTVPNPYNLLSTLPPSHPWYTVLDLKDAFFCLRLHSESQLLFAFEWRDPEIGLSGQLTWTRLPQGFKNSPTLFNEALHSDLADFRVRYPALVLLQYVDDLLLAAATRTECLEGTKALLETLGNKGYRASAKKAQICLQEVTYLGYSLKDGQRWLTKARKEAILSIPVPKNSRQVREFLGTAGYCRLWIPGFAELAAPLYPLTRPGTLFQWGTEQQLAFEDIKKALLSSPALGLPDITKPFELFIDENSGFAKGVLVQKLGPWKRPVAYLSKKLDTVASGWPPCLRMVAAIAILVKDAGKLTLGQPLTILTSHPVEALVRQPPNKWLSNARMTHYQAMLLDAERVHFGPTVSLNPATLLPLPSGGNHHDCLQILAETHGTRPDLTDQPLPDADLTWYTDGSSFIRNGEREAGAAVTTESEVIWAAPLPPGTSAQRAELIALTQALKMAEGKKLTVYTDSRYAFATTHVHGEIYRRRGWLTSEGKEIKNKNEILALLEALFLPKRLSIIHCPGHQKGDSPQAKGNRLADDTAKKAATETHSSLTVLPAGKRTADGSEFEKRTADGSEFESPKKKAKVE

SEQ ID NO: 7671 - protein, 2180 aa, synthetic construct
MPAAKRVKLDGGDKKYSIGLDIGTNSVGWAVITDEYKVPSKKFKVLGNTDRHSIKKNLIGALLFDSGETAEATRLKRTARRRYTRRKNRICYLQEIFSNEMAKVDDSFFHRLEESFLVEEDKKHERHPIFGNIVDEVAYHEKYPTIYHLRKKLVDSTDKADLRLIYLALAHMIKFRGHFLIEGDLNPDNSDVDKLFIQLVQTYNQLFEENPINASGVDAKAILSARLSKSRRLENLIAQLPGEKKNGLFGNLIALSLGLTPNFKSNFDLAEDAKLQLSKDTYDDDLDNLLAQIGDQYADLFLAAKNLSDAILLSDILRVNTEITKAPLSASMIKRYDEHHQDLTLLKALVRQQLPEKYKEIFFDQSKNGYAGYIDGGASQEEFYKFIKPILEKMDGTEELLVKLNREDLLRKQRTFDNGSIPHQIHLGELHAILRRQEDFYPFLKDNREKIEKILTFRIPYYVGPLARGNSRFAWMTRKSEETITPWNFEEVVDKGASAQSFIERMTNFDKNLPNEKVLPKHSLLYEYFTVYNELTKVKYVTEGMRKPAFLSGEQKKAIVDLLFKTNRKVTVKQLKEDYFKKIECFDSVEISGVEDRFNASLGTYHDLLKIIKDKDFLDNEENEDILEDIVLTLTLFEDREMIEERLKTYAHLFDDKVMKQLKRRRYTGWGRLSRKLINGIRDKQSGKTILDFLKSDGFANRNFMQLIHDDSLTFKEDIQKAQVSGQGDSLHEHIANLAGSPAIKKGILQTVKVVDELVKVMGRHKPENIVIEMARENQTTQKGQKNSRERMKRIEEGIKELGSQILKEHPVENTQLQNEKLYLYYLQNGRDMYVDQELDINRLSDYDVDHIVPQSFLKDDSIDNKVLTRSDKARGKSDNVPSEEVVKKMKNYWRQLLNAKLITQRKFDNLTKAERGGLSELDKAGFIKRQLVETRQITKHVAQILDSRMNTKYDENDKLIREVKVITLKSKLVSDFRKDFQFYKVREINNYHHAHDAYLNAVVGTALIKKYPKLESEFVYGDYKVYDVRKMIAKSEQEIGKATAKYFFYSNIMNFFKTEITLANGEIRKRPLIETNGETGEIVWDKGRDFATVRKVLSMPQVNIVKKTEVQTGGFSKESILPKRNSDKLIARKKDWDPKKYGGFDSPTVAYSVLVVAKVEKGKSKKLKSVKELLGITIMERSSFEKNPIDFLEAKGYKEVKKDLIIKLPKYSLFELENGRKRMLASAGELQKGNELALPSKYVNFLYLASHYEKLKGSPEDNEQKQLFVEQHKHYLDEIIEQISEFSKRVILADANLDKVLSAYNKHRDKPIREQAENIIHLFTLTNLGAPAAFKYFDTTIDRKRYTSTKEVLDATLIHQSITGLYETRIDLSQLGGDGGGGGGSEAAAKGGGGSGGMNPLQLLQPLPAEIKGTKLLAHWNSGATITCIPESFLEDEQPIKKTLIKTIHGEKQQNVYYVTFKVKGRKVEAEVIASPYEYILLSPTDVPWLTQQPLQLTILVPLQEYQEKILSKTALPEDQKQQLKTLFVKYDNLWQHWENQVGHRKIRPHNIATGDYPPRPQKQYPINPKAKPSIQIVIDDLLKQGVLTPQNSTMNTPVYPVPKPDGRWRMVLDYREVNKTIPLTAAQNQHSAGILATIVRQKYKTTLDLANGFWAHPITPESYWLTAFTWQGKQYCWTRLPQGFLNSPALFNADVVDLLKEIPNVQVYVDDIYLSHDDPKEHVQQLEKVFQILLQAGYVVSLKKSEIGQKTVEFLGFNITKEGRGLTDTFKTKLLNITPPKDLKQLQSILGKLNFARNFIPNFAELVQPLYNLIAPAKGKYIEWSEENTKQLNMVIEALNTASNLEERLPEQRLVIKVNTSPSAGYVRYYNETGKKPIMYLNYVFSKAELKFSMLEKLLTTMHKALIKAMDLAMGQEILVYSPIVSMTKIQKTPLPERKALPIRWITWMTYLEDPRIQFHYDKTLPELKHIPDVYTSSQSPVKHPSQYEGVFYTDGSAIKSPDPTKSNNAGMGIVHATYKPEYQVLNQWSIPLGNHTAQMAEIAAVEFACKKALKIPGPVLVITDSFYVAESANKELPYWKSNGFVNNKKKPLKHISKWKSIAECLSMKPDITIQHEKGISLQIPVFILKGNALADKLATQGSYVVNAGKRTADGSEFEKRTADGSEFESPKKKAKVE

SEQ ID NO: 7672 - protein, 2098 aa, synthetic construct
MPAAKRVKLDGGDKKYSIGLDIGTNSVGWAVITDEYKVPSKKFKVLGNTDRHSIKKNLIGALLFDSGETAEATRLKRTARRRYTRRKNRICYLQEIFSNEMAKVDDSFFHRLEESFLVEEDKKHERHPIFGNIVDEVAYHEKYPTIYHLRKKLVDSTDKADLRLIYLALAHMIKFRGHFLIEGDLNPDNSDVDKLFIQLVQTYNQLFEENPINASGVDAKAILSARLSKSRRLENLIAQLPGEKKNGLFGNLIALSLGLTPNFKSNFDLAEDAKLQLSKDTYDDDLDNLLAQIGDQYADLFLAAKNLSDAILLSDILRVNTEITKAPLSASMIKRYDEHHQDLTLLKALVRQQLPEKYKEIFFDQSKNGYAGYIDGGASQEEFYKFIKPILEKMDGTEELLVKLNREDLLRKQRTFDNGSIPHQIHLGELHAILRRQEDFYPFLKDNREKIEKILTFRIPYYVGPLARGNSRFAWMTRKSEETITPWNFEEVVDKGASAQSFIERMTNFDKNLPNEKVLPKHSLLYEYFTVYNELTKVKYVTEGMRKPAFLSGEQKKAIVDLLFKTNRKVTVKQLKEDYFKKIECFDSVEISGVEDRFNASLGTYHDLLKIIKDKDFLDNEENEDILEDIVLTLTLFEDREMIEERLKTYAHLFDDKVMKQLKRRRYTGWGRLSRKLINGIRDKQSGKTILDFLKSDGFANRNFMQLIHDDSLTFKEDIQKAQVSGQGDSLHEHIANLAGSPAIKKGILQTVKVVDELVKVMGRHKPENIVIEMARENQTTQKGQKNSRERMKRIEEGIKELGSQILKEHPVENTQLQNEKLYLYYLQNGRDMYVDQELDINRLSDYDVDHIVPQSFLKDDSIDNKVLTRSDKARGKSDNVPSEEVVKKMKNYWRQLLNAKLITQRKFDNLTKAERGGLSELDKAGFIKRQLVETRQITKHVAQILDSRMNTKYDENDKLIREVKVITLKSKLVSDFRKDFQFYKVREINNYHHAHDAYLNAVVGTALIKKYPKLESEFVYGDYKVYDVRKMIAKSEQEIGKATAKYFFYSNIMNFFKTEITLANGEIRKRPLIETNGETGEIVWDKGRDFATVRKVLSMPQVNIVKKTEVQTGGFSKESILPKRNSDKLIARKKDWDPKKYGGFDSPTVAYSVLVVAKVEKGKSKKLKSVKELLGITIMERSSFEKNPIDFLEAKGYKEVKKDLIIKLPKYSLFELENGRKRMLASAGELQKGNELALPSKYVNFLYLASHYEKLKGSPEDNEQKQLFVEQHKHYLDEIIEQISEFSKRVILADANLDKVLSAYNKHRDKPIREQAENIIHLFTLTNLGAPAAFKYFDTTIDRKRYTSTKEVLDATLIHQSITGLYETRIDLSQLGGDGGGGGGSEAAAKGGGGSGGVLNLEEEYRLHEKPVPSSIDPSWLQLFPTVWAERAGMGLANQVPPVVVELRSGASPVAVRQYPMSKEAREGIRPHIQKFLDLGVLVPCRSPWNTPLLPVKKPGTNDYRPVQDLREINKRVQDIHPTVPNPYNLLSSLPPSYTWYSVLDLKDAFFCLRLHPNSQPLFAFEWKDPEKGNTGQLTWTRLPQGFKNSPTLFNEALHRDLAPFRALNPQVVLLQYVDDLLVAAPTYEDCKKGTQKLLQELSKLGYRVSAKKAQLCQREVTYLGYLLKEGKRWLTPARKATVMKIPVPTTPRQVREFLGKAGFCRLFIPGFASLAAPLYPLTKPSIPFIWTEEHQQAFDHIKKALLSAPALALPDLTKPFTLYIDERAGVARGVLTQTLGPWRRPVAYLSKKLDPVASGWPTCLKAVAAVALLLKDADKLTLGQNVTVIASHSLESIVRQPPDRWMTNARMTHYQSLLLNERVSFAPPAVLNPATLLPVESEATPVHRCSEILAEETGTRRDLEDQPLPGVPTWYTDGSSFITEGKRRAGAPIVDGKRTVWASSLPEGTSAQKAELVALTQALRLAEGKNINIYTDSRYAFATAHIHGAIYKQRGWLTSAGKDIKNKEEILALLEAIHLPRRVAIIHCPGHQRGSNPVATGNRRADEAAKQAALSTRVLAGTTKPAGKRTADGSEFEKRTADGSEFESPKKKAKVE

SEQ ID NO: 7673 - protein, 2017 aa, synthetic construct
MPAAKRVKLDGGDKKYSIGLDIGTNSVGWAVITDEYKVPSKKFKVLGNTDRHSIKKNLIGALLFDSGETAEATRLKRTARRRYTRRKNRICYLQEIFSNEMAKVDDSFFHRLEESFLVEEDKKHERHPIFGNIVDEVAYHEKYPTIYHLRKKLVDSTDKADLRLIYLALAHMIKFRGHFLIEGDLNPDNSDVDKLFIQLVQTYNQLFEENPINASGVDAKAILSARLSKSRRLENLIAQLPGEKKNGLFGNLIALSLGLTPNFKSNFDLAEDAKLQLSKDTYDDDLDNLLAQIGDQYADLFLAAKNLSDAILLSDILRVNTEITKAPLSASMIKRYDEHHQDLTLLKALVRQQLPEKYKEIFFDQSKNGYAGYIDGGASQEEFYKFIKPILEKMDGTEELLVKLNREDLLRKQRTFDNGSIPHQIHLGELHAILRRQEDFYPFLKDNREKIEKILTFRIPYYVGPLARGNSRFAWMTRKSEETITPWNFEEVVDKGASAQSFIERMTNFDKNLPNEKVLPKHSLLYEYFTVYNELTKVKYVTEGMRKPAFLSGEQKKAIVDLLFKTNRKVTVKQLKEDYFKKIECFDSVEISGVEDRFNASLGTYHDLLKIIKDKDFLDNEENEDILEDIVLTLTLFEDREMIEERLKTYAHLFDDKVMKQLKRRRYTGWGRLSRKLINGIRDKQSGKTILDFLKSDGFANRNFMQLIHDDSLTFKEDIQKAQVSGQGDSLHEHIANLAGSPAIKKGILQTVKVVDELVKVMGRHKPENIVIEMARENQTTQKGQKNSRERMKRIEEGIKELGSQILKEHPVENTQLQNEKLYLYYLQNGRDMYVDQELDINRLSDYDVDHIVPQSFLKDDSIDNKVLTRSDKARGKSDNVPSEEVVKKMKNYWRQLLNAKLITQRKFDNLTKAERGGLSELDKAGFIKRQLVETRQITKHVAQILDSRMNTKYDENDKLIREVKVITLKSKLVSDFRKDFQFYKVREINNYHHAHDAYLNAVVGTALIKKYPKLESEFVYGDYKVYDVRKMIAKSEQEIGKATAKYFFYSNIMNFFKTEITLANGEIRKRPLIETNGETGEIVWDKGRDFATVRKVLSMPQVNIVKKTEVQTGGFSKESILPKRNSDKLIARKKDWDPKKYGGFDSPTVAYSVLVVAKVEKGKSKKLKSVKELLGITIMERSSFEKNPIDFLEAKGYKEVKKDLIIKLPKYSLFELENGRKRMLASAGELQKGNELALPSKYVNFLYLASHYEKLKGSPEDNEQKQLFVEQHKHYLDEIIEQISEFSKRVILADANLDKVLSAYNKHRDKPIREQAENIIHLFTLTNLGAPAAFKYFDTTIDRKRYTSTKEVLDATLIHQSITGLYETRIDLSQLGGDGGGGGGSEAAAKGGGGSGGAVLGLEHLPRPPEISQFPLNPERLQALQHLVRKALEAGHIEPYTGPGNNPVFPVKKANGTWRFIHDLRATNSLTIDLSSSSPGPPDLSSLPTTLAHLQTIDLKDAFFQIPLPKQFQPYFAFTVPQQCNYGPGTRYAWRVLPQGFKNSPTLFQMQLAHILQPIRQAFPQCTILQYMDDILLASPSHADLQLLSEATMASLISHGLPVSENKTQQTPGTIKFLGQIISPNHLTYDAVPKVPIRSRWALPELQALLGEIQWVSKGTPTLRQPLHSLYCALQPHTDPRDQIYLNPSQVQSLVQLRQALSQNCRSRLVQTLPLLGAIMLTLTGTTTVVFQSKQQWPLVWLHAPLPHTSQCPWGQLLASAVLLLDKYTLQSYGLLCQTIHHNISTQTFNQFIQTSDHPSVPILLHHSHRFKNLGAQTGELWNTFLKTTAPLAPVKALMPVFTLSPVIINTAPCLFSDGSTSQAAYILWDKHILSQRSFPLPPPHKSAQRAELLGLLHGLSSARSWRCLNIFLDSKYLYHYLRTLALGTFQGRSSQAPFQALLPRLLSRKVVYLHHVRSHTNLPDPISRLNALTDALLITPVLQLAGKRTADGSEFEKRTADGSEFESPKKKAKVE

SEQ ID NO: 7674 - protein, 2100 aa, synthetic construct
MPAAKRVKLDGGDKKYSIGLDIGTNSVGWAVITDEYKVPSKKFKVLGNTDRHSIKKNLIGALLFDSGETAEATRLKRTARRRYTRRKNRICYLQEIFSNEMAKVDDSFFHRLEESFLVEEDKKHERHPIFGNIVDEVAYHEKYPTIYHLRKKLVDSTDKADLRLIYLALAHMIKFRGHFLIEGDLNPDNSDVDKLFIQLVQTYNQLFEENPINASGVDAKAILSARLSKSRRLENLIAQLPGEKKNGLFGNLIALSLGLTPNFKSNFDLAEDAKLQLSKDTYDDDLDNLLAQIGDQYADLFLAAKNLSDAILLSDILRVNTEITKAPLSASMIKRYDEHHQDLTLLKALVRQQLPEKYKEIFFDQSKNGYAGYIDGGASQEEFYKFIKPILEKMDGTEELLVKLNREDLLRKQRTFDNGSIPHQIHLGELHAILRRQEDFYPFLKDNREKIEKILTFRIPYYVGPLARGNSRFAWMTRKSEETITPWNFEEVVDKGASAQSFIERMTNFDKNLPNEKVLPKHSLLYEYFTVYNELTKVKYVTEGMRKPAFLSGEQKKAIVDLLFKTNRKVTVKQLKEDYFKKIECFDSVEISGVEDRFNASLGTYHDLLKIIKDKDFLDNEENEDILEDIVLTLTLFEDREMIEERLKTYAHLFDDKVMKQLKRRRYTGWGRLSRKLINGIRDKQSGKTILDFLKSDGFANRNFMQLIHDDSLTFKEDIQKAQVSGQGDSLHEHIANLAGSPAIKKGILQTVKVVDELVKVMGRHKPENIVIEMARENQTTQKGQKNSRERMKRIEEGIKELGSQILKEHPVENTQLQNEKLYLYYLQNGRDMYVDQELDINRLSDYDVDHIVPQSFLKDDSIDNKVLTRSDKARGKSDNVPSEEVVKKMKNYWRQLLNAKLITQRKFDNLTKAERGGLSELDKAGFIKRQLVETRQITKHVAQILDSRMNTKYDENDKLIREVKVITLKSKLVSDFRKDFQFYKVREINNYHHAHDAYLNAVVGTALIKKYPKLESEFVYGDYKVYDVRKMIAKSEQEIGKATAKYFFYSNIMNFFKTEITLANGEIRKRPLIETNGETGEIVWDKGRDFATVRKVLSMPQVNIVKKTEVQTGGFSKESILPKRNSDKLIARKKDWDPKKYGGFDSPTVAYSVLVVAKVEKGKSKKLKSVKELLGITIMERSSFEKNPIDFLEAKGYKEVKKDLIIKLPKYSLFELENGRKRMLASAGELQKGNELALPSKYVNFLYLASHYEKLKGSPEDNEQKQLFVEQHKHYLDEIIEQISEFSKRVILADANLDKVLSAYNKHRDKPIREQAENIIHLFTLTNLGAPAAFKYFDTTIDRKRYTSTKEVLDATLIHQSITGLYETRIDLSQLGGDGGGGGGSEAAAKGGGGSGGTLNLEDEYRLYETSAEPEVSPGSTWLSDFPQAWAETGGMGLAVRQAPLIIPLKATSTPVSIKQYPMSQEAKLGIKPHIQRLLDQGILVPCQSPWNTPLLPVKKPGTNDYRPVQDLREVNKRVEDIHPTVPNPYNLLSGLPPSHRWYTVLDLKDAFFCLRLHPTSQPLFAFEWRDPGMGISGQLTWTRLPQGFKNSPTLFNEALHRDLADFRIQHPDLILLQYVDDILLAATSELDCQQGTRALLLTLGNLGYRASAKKAQLCQKQVKYLGYLLKEGQRWLTEARKETVMGQPTPKTPRQLREFLGKAGFCRLFIPGFAEMAAPLYPLTKPGTLFNWGPDQQKAYQEIKQALLTAPALGLPDLTKPFELFVDEKQGYAKGVLTQKLGPWRRPVAYLSKKLDPVAAGWPPCLRMVAAIAVLRKDAGKLTMGQPLVILAPHAVEALVKQPPDRWLSNARMTHYQAMLLDTDRVQFGPVVALNPATLLPLPEEGAPHDCLEILAETHGTRPDLTDQPIPDADHTWYTDGSSFLQEGQRKAGAAVTTETEVIWARALPAGTSAQRAELIALTQALKMAEGKRLNVYTDSRYAFATAHIHGEIYRRRGWLTSEGREIKNKSEILALLKALFLPKRLSIIHCLGHQKGDSAEARGNRLADQAAREAAIKTPPDTSTLLAGKRTADGSEFEKRTADGSEFESPKKKAKVE

SEQ ID NO: 7675 - protein, 2100 aa, synthetic construct
MPAAKRVKLDGGDKKYSIGLDIGTNSVGWAVITDEYKVPSKKFKVLGNTDRHSIKKNLIGALLFDSGETAEATRLKRTARRRYTRRKNRICYLQEIFSNEMAKVDDSFFHRLEESFLVEEDKKHERHPIFGNIVDEVAYHEKYPTIYHLRKKLVDSTDKADLRLIYLALAHMIKFRGHFLIEGDLNPDNSDVDKLFIQLVQTYNQLFEENPINASGVDAKAILSARLSKSRRLENLIAQLPGEKKNGLFGNLIALSLGLTPNFKSNFDLAEDAKLQLSKDTYDDDLDNLLAQIGDQYADLFLAAKNLSDAILLSDILRVNTEITKAPLSASMIKRYDEHHQDLTLLKALVRQQLPEKYKEIFFDQSKNGYAGYIDGGASQEEFYKFIKPILEKMDGTEELLVKLNREDLLRKQRTFDNGSIPHQIHLGELHAILRRQEDFYPFLKDNREKIEKILTFRIPYYVGPLARGNSRFAWMTRKSEETITPWNFEEVVDKGASAQSFIERMTNFDKNLPNEKVLPKHSLLYEYFTVYNELTKVKYVTEGMRKPAFLSGEQKKAIVDLLFKTNRKVTVKQLKEDYFKKIECFDSVEISGVEDRFNASLGTYHDLLKIIKDKDFLDNEENEDILEDIVLTLTLFEDREMIEERLKTYAHLFDDKVMKQLKRRRYTGWGRLSRKLINGIRDKQSGKTILDFLKSDGFANRNFMQLIHDDSLTFKEDIQKAQVSGQGDSLHEHIANLAGSPAIKKGILQTVKVVDELVKVMGRHKPENIVIEMARENQTTQKGQKNSRERMKRIEEGIKELGSQILKEHPVENTQLQNEKLYLYYLQNGRDMYVDQELDINRLSDYDVDHIVPQSFLKDDSIDNKVLTRSDKARGKSDNVPSEEVVKKMKNYWRQLLNAKLITQRKFDNLTKAERGGLSELDKAGFIKRQLVETRQITKHVAQILDSRMNTKYDENDKLIREVKVITLKSKLVSDFRKDFQFYKVREINNYHHAHDAYLNAVVGTALIKKYPKLESEFVYGDYKVYDVRKMIAKSEQEIGKATAKYFFYSNIMNFFKTEITLANGEIRKRPLIETNGETGEIVWDKGRDFATVRKVLSMPQVNIVKKTEVQTGGFSKESILPKRNSDKLIARKKDWDPKKYGGFDSPTVAYSVLVVAKVEKGKSKKLKSVKELLGITIMERSSFEKNPIDFLEAKGYKEVKKDLIIKLPKYSLFELENGRKRMLASAGELQKGNELALPSKYVNFLYLASHYEKLKGSPEDNEQKQLFVEQHKHYLDEIIEQISEFSKRVILADANLDKVLSAYNKHRDKPIREQAENIIHLFTLTNLGAPAAFKYFDTTIDRKRYTSTKEVLDATLIHQSITGLYETRIDLSQLGGDGGGGGGSEAAAKGGGGSGGTLGIEDEYRLHETSTEPDVSLGSTWLSDFPQAWAETGGMGLAVRQAPLIIPLKATSTPVSIQQYPMSHEARLGIKPHIQRLLDQGILVPCQSPWNTPLLPVKKPGTNDYRPVQDLREVNKRVEDIHPTVPNPYNLLSGLPPSHQWYTVLDLKDAFFCLRLHPTSQPLFAFEWRDPGMGISGQLTWTRLPQGFKNSPTLFNEALHRDLADFRIQHPDLILLQYVDDILLAATSELDCQQGTRALLQTLGDLGYRASAKKAQICQKQVKYLGYLLREGQRWLTEARKETVMGQPVPKTPRQLREFLGTAGFCRLWIPGFAEMAAPLYPLTKPGTLFSWGPDQQKAYQEIKQALLTAPALGLPDLTKPFELFVDEKQGYAKGVLTQKLGPWRRPVAYLSKKLDPVAAGWPPCLRMVAAIAVLTKDAGKLTMGQPLVILAPHAVEALVKQPPDRWLSNARMTHYQAMLLDTDRVQFGPVVALNPATLLPLPEEGAPHDCLEILAETHGTRPDLTDQPIPDADHTWYTDGSSFLQEGQRKAGAAVTTETEVIWAGALPAGTSAQRAELIALTQALKMAEGKRLNVYTDSRYAFATAHIHGEIYRRRGWLTSEGREIKNKSEILALLKALFLPKRLSIIHCLGHQKGDSAEARGNRLADQAAREAAIKTPPDTSTLLAGKRTADGSEFEKRTADGSEFESPKKKAKVE

SEQ ID NO: 7676 - protein, 2100 aa, synthetic construct
MPAAKRVKLDGGDKKYSIGLDIGTNSVGWAVITDEYKVPSKKFKVLGNTDRHSIKKNLIGALLFDSGETAEATRLKRTARRRYTRRKNRICYLQEIFSNEMAKVDDSFFHRLEESFLVEEDKKHERHPIFGNIVDEVAYHEKYPTIYHLRKKLVDSTDKADLRLIYLALAHMIKFRGHFLIEGDLNPDNSDVDKLFIQLVQTYNQLFEENPINASGVDAKAILSARLSKSRRLENLIAQLPGEKKNGLFGNLIALSLGLTPNFKSNFDLAEDAKLQLSKDTYDDDLDNLLAQIGDQYADLFLAAKNLSDAILLSDILRVNTEITKAPLSASMIKRYDEHHQDLTLLKALVRQQLPEKYKEIFFDQSKNGYAGYIDGGASQEEFYKFIKPILEKMDGTEELLVKLNREDLLRKQRTFDNGSIPHQIHLGELHAILRRQEDFYPFLKDNREKIEKILTFRIPYYVGPLARGNSRFAWMTRKSEETITPWNFEEVVDKGASAQSFIERMTNFDKNLPNEKVLPKHSLLYEYFTVYNELTKVKYVTEGMRKPAFLSGEQKKAIVDLLFKTNRKVTVKQLKEDYFKKIECFDSVEISGVEDRFNASLGTYHDLLKIIKDKDFLDNEENEDILEDIVLTLTLFEDREMIEERLKTYAHLFDDKVMKQLKRRRYTGWGRLSRKLINGIRDKQSGKTILDFLKSDGFANRNFMQLIHDDSLTFKEDIQKAQVSGQGDSLHEHIANLAGSPAIKKGILQTVKVVDELVKVMGRHKPENIVIEMARENQTTQKGQKNSRERMKRIEEGIKELGSQILKEHPVENTQLQNEKLYLYYLQNGRDMYVDQELDINRLSDYDVDHIVPQSFLKDDSIDNKVLTRSDKARGKSDNVPSEEVVKKMKNYWRQLLNAKLITQRKFDNLTKAERGGLSELDKAGFIKRQLVETRQITKHVAQILDSRMNTKYDENDKLIREVKVITLKSKLVSDFRKDFQFYKVREINNYHHAHDAYLNAVVGTALIKKYPKLESEFVYGDYKVYDVRKMIAKSEQEIGKATAKYFFYSNIMNFFKTEITLANGEIRKRPLIETNGETGEIVWDKGRDFATVRKVLSMPQVNIVKKTEVQTGGFSKESILPKRNSDKLIARKKDWDPKKYGGFDSPTVAYSVLVVAKVEKGKSKKLKSVKELLGITIMERSSFEKNPIDFLEAKGYKEVKKDLIIKLPKYSLFELENGRKRMLASAGELQKGNELALPSKYVNFLYLASHYEKLKGSPEDNEQKQLFVEQHKHYLDEIIEQISEFSKRVILADANLDKVLSAYNKHRDKPIREQAENIIHLFTLTNLGAPAAFKYFDTTIDRKRYTSTKEVLDATLIHQSITGLYETRIDLSQLGGDGGGGGGSEAAAKGGGGSGGTLNIEDEYRLHETSKEPDVSLGSTWLSDFPQAWAETGGMGLAVRQAPLIIPLKATSTPVSIKQYPMSQEARLGIKPHIQRLLDQGILVPCQSPWNTPLLPVKKPGTNDYRPVQDLREVNKRVEDIHPTVPNPYNLLSGLPPSHQWYTVLDLKDAFFCLRLHPTSQPLFAFEWRDPEMGISGQLTWTRLPQGFKNSPTLFNEALHRDLAGFRIQHPDLILLQYVDDLLLAATSELDCQQGTRALLQTLGDLGYRASAKKAQICQKQVKYLGYLLKEGQRWLTEARKETVMGQPIPKTPRQLREFLGTAGFCRLWIPGFAEMAAPLYPLTKPGTLFNWGPDQQKAFQEIKQALLTAPALGLPDLTKPFELFVDEKQGYAKGVLTQKLGPWRRPVAYLSKKLDPVAAGWPPCLRMVAAIAVLTKDAGKLTMGQPLVILAPHAVEALVKQPPDRWLSNARMTHYQALLLDTDRVQFGPVVALNPATLLPLPEEGLQHDCLDILAEAHGTRSDLMDQPLPDADHTWYTDGSSFLQEGQRKAGAAVTTETEVIWARALPAGTSAQRAELIALTQALKMAEGKKLNVYTDSRYAFATAHIHGEIYRRRGWLTSEGKEIKNKDEILALLKALFLPKRLSIIHCPGHQKGNSAEARGNRMADQAAREVATRETPETSTLLAGKRTADGSEFEKRTADGSEFESPKKKAKVE

SEQ ID NO: 7677 - protein, 2100 aa, synthetic construct
MPAAKRVKLDGGDKKYSIGLDIGTNSVGWAVITDEYKVPSKKFKVLGNTDRHSIKKNLIGALLFDSGETAEATRLKRTARRRYTRRKNRICYLQEIFSNEMAKVDDSFFHRLEESFLVEEDKKHERHPIFGNIVDEVAYHEKYPTIYHLRKKLVDSTDKADLRLIYLALAHMIKFRGHFLIEGDLNPDNSDVDKLFIQLVQTYNQLFEENPINASGVDAKAILSARLSKSRRLENLIAQLPGEKKNGLFGNLIALSLGLTPNFKSNFDLAEDAKLQLSKDTYDDDLDNLLAQIGDQYADLFLAAKNLSDAILLSDILRVNTEITKAPLSASMIKRYDEHHQDLTLLKALVRQQLPEKYKEIFFDQSKNGYAGYIDGGASQEEFYKFIKPILEKMDGTEELLVKLNREDLLRKQRTFDNGSIPHQIHLGELHAILRRQEDFYPFLKDNREKIEKILTFRIPYYVGPLARGNSRFAWMTRKSEETITPWNFEEVVDKGASAQSFIERMTNFDKNLPNEKVLPKHSLLYEYFTVYNELTKVKYVTEGMRKPAFLSGEQKKAIVDLLFKTNRKVTVKQLKEDYFKKIECFDSVEISGVEDRFNASLGTYHDLLKIIKDKDFLDNEENEDILEDIVLTLTLFEDREMIEERLKTYAHLFDDKVMKQLKRRRYTGWGRLSRKLINGIRDKQSGKTILDFLKSDGFANRNFMQLIHDDSLTFKEDIQKAQVSGQGDSLHEHIANLAGSPAIKKGILQTVKVVDELVKVMGRHKPENIVIEMARENQTTQKGQKNSRERMKRIEEGIKELGSQILKEHPVENTQLQNEKLYLYYLQNGRDMYVDQELDINRLSDYDVDHIVPQSFLKDDSIDNKVLTRSDKARGKSDNVPSEEVVKKMKNYWRQLLNAKLITQRKFDNLTKAERGGLSELDKAGFIKRQLVETRQITKHVAQILDSRMNTKYDENDKLIREVKVITLKSKLVSDFRKDFQFYKVREINNYHHAHDAYLNAVVGTALIKKYPKLESEFVYGDYKVYDVRKMIAKSEQEIGKATAKYFFYSNIMNFFKTEITLANGEIRKRPLIETNGETGEIVWDKGRDFATVRKVLSMPQVNIVKKTEVQTGGFSKESILPKRNSDKLIARKKDWDPKKYGGFDSPTVAYSVLVVAKVEKGKSKKLKSVKELLGITIMERSSFEKNPIDFLEAKGYKEVKKDLIIKLPKYSLFELENGRKRMLASAGELQKGNELALPSKYVNFLYLASHYEKLKGSPEDNEQKQLFVEQHKHYLDEIIEQISEFSKRVILADANLDKVLSAYNKHRDKPIREQAENIIHLFTLTNLGAPAAFKYFDTTIDRKRYTSTKEVLDATLIHQSITGLYETRIDLSQLGGDGGGGGGSEAAAKGGGGSGGTLNIEDEYRLHETSKGPDVPLGSTWLSDFPQAWAETGGMGLAVRQAPLIIPLKATSTPVSIKQYPMSQEARLGIKPHIQRLLDQGILVPCQSPWNTPLLPVKKPGTNDYRPVQDLREVNKRVEDIHPTVPNPYNLLSGLPPSHQWYTVLDLKDAFFCLRLHPTSQSLFAFEWRDPEMGISGQLTWTRLPQGFKNSPTLFNEALHRDLADFRIQHPDLILLQYVDDLLLAATSELDCQQGTRALLQTLGDLGYRASAKKAQICQKQVKYLGYLLKEGQRWLTEARKETVMGQPTPKTPRQLREFLGTAGFCRLWIPGFAEMAAPLYPLTKPGTLFEWGPDQQKAYQEIKQALLTAPALGLPDLTKPFELFVDEKQGYAKGVLTQKLGPWRRPVAYLSKKLDPVAAGWPPCLRMVAAIAVLTKDAGKLTMGQPLVILAPHAVEALVKQPPDRWLSNARMTHYQALLLDTDRVQFGPIVALNPATLLPLPEEGLQHDCLDILAEAHGTRPDLTDQPLPDADHTWYTDGSSFLQEGQRKAGAAVTTETEVVWAKALPAGTSAQRAELIALTQALKMAEGKKLNVYTDSRYAFATAHIHGEIYRRRGWLTSEGKEIKNKDEILALLKALFLPKRLSIIHCPGHQKGNRAEARGNRMADQAAREVATRETPETSTLLAGKRTADGSEFEKRTADGSEFESPKKKAKVE

SEQ ID NO: 7678 - protein, 2120 aa, synthetic construct
MPAAKRVKLDGGDKKYSIGLDIGTNSVGWAVITDEYKVPSKKFKVLGNTDRHSIKKNLIGALLFDSGETAEATRLKRTARRRYTRRKNRICYLQEIFSNEMAKVDDSFFHRLEESFLVEEDKKHERHPIFGNIVDEVAYHEKYPTIYHLRKKLVDSTDKADLRLIYLALAHMIKFRGHFLIEGDLNPDNSDVDKLFIQLVQTYNQLFEENPINASGVDAKAILSARLSKSRRLENLIAQLPGEKKNGLFGNLIALSLGLTPNFKSNFDLAEDAKLQLSKDTYDDDLDNLLAQIGDQYADLFLAAKNLSDAILLSDILRVNTEITKAPLSASMIKRYDEHHQDLTLLKALVRQQLPEKYKEIFFDQSKNGYAGYIDGGASQEEFYKFIKPILEKMDGTEELLVKLNREDLLRKQRTFDNGSIPHQIHLGELHAILRRQEDFYPFLKDNREKIEKILTFRIPYYVGPLARGNSRFAWMTRKSEETITPWNFEEVVDKGASAQSFIERMTNFDKNLPNEKVLPKHSLLYEYFTVYNELTKVKYVTEGMRKPAFLSGEQKKAIVDLLFKTNRKVTVKQLKEDYFKKIECFDSVEISGVEDRFNASLGTYHDLLKIIKDKDFLDNEENEDILEDIVLTLTLFEDREMIEERLKTYAHLFDDKVMKQLKRRRYTGWGRLSRKLINGIRDKQSGKTILDFLKSDGFANRNFMQLIHDDSLTFKEDIQKAQVSGQGDSLHEHIANLAGSPAIKKGILQTVKVVDELVKVMGRHKPENIVIEMARENQTTQKGQKNSRERMKRIEEGIKELGSQILKEHPVENTQLQNEKLYLYYLQNGRDMYVDQELDINRLSDYDVDHIVPQSFLKDDSIDNKVLTRSDKARGKSDNVPSEEVVKKMKNYWRQLLNAKLITQRKFDNLTKAERGGLSELDKAGFIKRQLVETRQITKHVAQILDSRMNTKYDENDKLIREVKVITLKSKLVSDFRKDFQFYKVREINNYHHAHDAYLNAVVGTALIKKYPKLESEFVYGDYKVYDVRKMIAKSEQEIGKATAKYFFYSNIMNFFKTEITLANGEIRKRPLIETNGETGEIVWDKGRDFATVRKVLSMPQVNIVKKTEVQTGGFSKESILPKRNSDKLIARKKDWDPKKYGGFDSPTVAYSVLVVAKVEKGKSKKLKSVKELLGITIMERSSFEKNPIDFLEAKGYKEVKKDLIIKLPKYSLFELENGRKRMLASAGELQKGNELALPSKYVNFLYLASHYEKLKGSPEDNEQKQLFVEQHKHYLDEIIEQISEFSKRVILADANLDKVLSAYNKHRDKPIREQAENIIHLFTLTNLGAPAAFKYFDTTIDRKRYTSTKEVLDATLIHQSITGLYETRIDLSQLGGDGGGGGGSEAAAKGGGGSGGVQEISDSRPMLHIYLNGRRFLGLLDTGADKTCIAGRDWPANWPIHQTESSLQGLGMACGVARSSQPLRWQHEDKSGIIHPFVIPTLPFTLWGRDIMKDIKVRLMTDSPDDSQDLMIGAIESNLFADQISWKSDQPVWLNQWPLKQEKLQALQQLVTEQLQLGHLEESNSPWNTPVFVIKKKSGKWRLLQDLRAVNATMHDMGALQPGLPSPPAVPKGWEIIIIDLQDCFFNIKLHPEDCKRFAFSVPSPNFKRPYQRFQWKVLPQGMKNSPTLCQKFVDKAILTVRDKYQDSYIVHYMDDILLAHPSRSIVDEILTSMIQALNKHGLVVSTEKIQKYDNLKYLGTHIQGDSVSYQKLQIRTDKLRTLNDFQKLLGNINWIRPFLKLTTGELKPLFEILNPDSNPISTRKLTPEACKALQLMNERLSTARVKRLDLSQPWSLCILKTEYTPTACLWQDGVVEWIHLPHISPKVITPYDIFCTQLIIKGRHRSKELFSKDPDYIVVPYTKVQFDLLLQEKEDWPISLLGFLGEVHFHLPKDPLLTFTLQTAIIFPHMTSTTPLEKGIVIFTDGSANGRSVTYIQGREPIIKENTQNTAQQAEIVAVITAFEEVSQPFNLYTDSKYVTGLFPEIETATLSPRTKIYTELKHLQRLIHKRQEKFYIGHIRGHTGLPGPLAQGNAYADSLTRILTAAGKRTADGSEFEKRTADGSEFESPKKKAKVE

SEQ ID NO: 7679 - protein, 2098 aa, synthetic construct
MPAAKRVKLDGGDKKYSIGLDIGTNSVGWAVITDEYKVPSKKFKVLGNTDRHSIKKNLIGALLFDSGETAEATRLKRTARRRYTRRKNRICYLQEIFSNEMAKVDDSFFHRLEESFLVEEDKKHERHPIFGNIVDEVAYHEKYPTIYHLRKKLVDSTDKADLRLIYLALAHMIKFRGHFLIEGDLNPDNSDVDKLFIQLVQTYNQLFEENPINASGVDAKAILSARLSKSRRLENLIAQLPGEKKNGLFGNLIALSLGLTPNFKSNFDLAEDAKLQLSKDTYDDDLDNLLAQIGDQYADLFLAAKNLSDAILLSDILRVNTEITKAPLSASMIKRYDEHHQDLTLLKALVRQQLPEKYKEIFFDQSKNGYAGYIDGGASQEEFYKFIKPILEKMDGTEELLVKLNREDLLRKQRTFDNGSIPHQIHLGELHAILRRQEDFYPFLKDNREKIEKILTFRIPYYVGPLARGNSRFAWMTRKSEETITPWNFEEVVDKGASAQSFIERMTNFDKNLPNEKVLPKHSLLYEYFTVYNELTKVKYVTEGMRKPAFLSGEQKKAIVDLLFKTNRKVTVKQLKEDYFKKIECFDSVEISGVEDRFNASLGTYHDLLKIIKDKDFLDNEENEDILEDIVLTLTLFEDREMIEERLKTYAHLFDDKVMKQLKRRRYTGWGRLSRKLINGIRDKQSGKTILDFLKSDGFANRNFMQLIHDDSLTFKEDIQKAQVSGQGDSLHEHIANLAGSPAIKKGILQTVKVVDELVKVMGRHKPENIVIEMARENQTTQKGQKNSRERMKRIEEGIKELGSQILKEHPVENTQLQNEKLYLYYLQNGRDMYVDQELDINRLSDYDVDHIVPQSFLKDDSIDNKVLTRSDKARGKSDNVPSEEVVKKMKNYWRQLLNAKLITQRKFDNLTKAERGGLSELDKAGFIKRQLVETRQITKHVAQILDSRMNTKYDENDKLIREVKVITLKSKLVSDFRKDFQFYKVREINNYHHAHDAYLNAVVGTALIKKYPKLESEFVYGDYKVYDVRKMIAKSEQEIGKATAKYFFYSNIMNFFKTEITLANGEIRKRPLIETNGETGEIVWDKGRDFATVRKVLSMPQVNIVKKTEVQTGGFSKESILPKRNSDKLIARKKDWDPKKYGGFDSPTVAYSVLVVAKVEKGKSKKLKSVKELLGITIMERSSFEKNPIDFLEAKGYKEVKKDLIIKLPKYSLFELENGRKRMLASAGELQKGNELALPSKYVNFLYLASHYEKLKGSPEDNEQKQLFVEQHKHYLDEIIEQISEFSKRVILADANLDKVLSAYNKHRDKPIREQAENIIHLFTLTNLGAPAAFKYFDTTIDRKRYTSTKEVLDATLIHQSITGLYETRIDLSQLGGDGGGGGGSEAAAKGGGGSGGVLNLEEEYRLHEKPVPSSIDPSWLQLFPTVWAERAGMGLANQVPPVVVELRSGASPVAVRQYPMSKEAREGIRPHIQRFLDLGVLVPCQSPWNTPLLPVKKPGTNDYRPVQDLREINKRVQDIHPTVPNPYNLLSSLPPSHTWYSVLDLKDAFFCLKLHPNSQPLFAFEWRDPEKGNTGQLTWTRLPQGFKNSPTLFNEALHRDLAPFRALNPQVVLLQYVDDLLVAAPTYRDCKEGTQKLLQELSKLGYRVSAKKAQLCQKEVTYLGYLLKEGKRWLTPARKATVMKIPPPTTPRQVREFLGTAGFCRLWIPGFASLAAPLYPLTKPSIPFIWTEEHQKAFDRIKEALLSAPALALPDLTKPFTLYVDERAGVARGVLTQTLGPWRRPVAYLSKKLDPVASGWPTCLKAVAAVALLLKDADKLTLGQNVTVIASHSLESIVRQPPDRWMTNARMTHYQSLLLNERVSFAPPAVLNPATLLPVESEATPVHRCSEILAEETGTRRDLKDQPLPGVPAWYTDGSSFIAEGKRRAGAAIVDGKRTVWASSLPEGTSAQKAELVALTQALRLAEGKDINIYTDSRYAFATAHIHGAIYKQRGWLTSAGKDIKNKEEILALLEAIHLPKRVAIIHCPGHQKGNDPVATGNRRADEAAKQAALSTRVLAETTKPAGKRTADGSEFEKRTADGSEFESPKKKAKVE

SEQ ID NO: 7680 - protein, 2102 aa, synthetic construct
MPAAKRVKLDGGDKKYSIGLDIGTNSVGWAVITDEYKVPSKKFKVLGNTDRHSIKKNLIGALLFDSGETAEATRLKRTARRRYTRRKNRICYLQEIFSNEMAKVDDSFFHRLEESFLVEEDKKHERHPIFGNIVDEVAYHEKYPTIYHLRKKLVDSTDKADLRLIYLALAHMIKFRGHFLIEGDLNPDNSDVDKLFIQLVQTYNQLFEENPINASGVDAKAILSARLSKSRRLENLIAQLPGEKKNGLFGNLIALSLGLTPNFKSNFDLAEDAKLQLSKDTYDDDLDNLLAQIGDQYADLFLAAKNLSDAILLSDILRVNTEITKAPLSASMIKRYDEHHQDLTLLKALVRQQLPEKYKEIFFDQSKNGYAGYIDGGASQEEFYKFIKPILEKMDGTEELLVKLNREDLLRKQRTFDNGSIPHQIHLGELHAILRRQEDFYPFLKDNREKIEKILTFRIPYYVGPLARGNSRFAWMTRKSEETITPWNFEEVVDKGASAQSFIERMTNFDKNLPNEKVLPKHSLLYEYFTVYNELTKVKYVTEGMRKPAFLSGEQKKAIVDLLFKTNRKVTVKQLKEDYFKKIECFDSVEISGVEDRFNASLGTYHDLLKIIKDKDFLDNEENEDILEDIVLTLTLFEDREMIEERLKTYAHLFDDKVMKQLKRRRYTGWGRLSRKLINGIRDKQSGKTILDFLKSDGFANRNFMQLIHDDSLTFKEDIQKAQVSGQGDSLHEHIANLAGSPAIKKGILQTVKVVDELVKVMGRHKPENIVIEMARENQTTQKGQKNSRERMKRIEEGIKELGSQILKEHPVENTQLQNEKLYLYYLQNGRDMYVDQELDINRLSDYDVDHIVPQSFLKDDSIDNKVLTRSDKARGKSDNVPSEEVVKKMKNYWRQLLNAKLITQRKFDNLTKAERGGLSELDKAGFIKRQLVETRQITKHVAQILDSRMNTKYDENDKLIREVKVITLKSKLVSDFRKDFQFYKVREINNYHHAHDAYLNAVVGTALIKKYPKLESEFVYGDYKVYDVRKMIAKSEQEIGKATAKYFFYSNIMNFFKTEITLANGEIRKRPLIETNGETGEIVWDKGRDFATVRKVLSMPQVNIVKKTEVQTGGFSKESILPKRNSDKLIARKKDWDPKKYGGFDSPTVAYSVLVVAKVEKGKSKKLKSVKELLGITIMERSSFEKNPIDFLEAKGYKEVKKDLIIKLPKYSLFELENGRKRMLASAGELQKGNELALPSKYVNFLYLASHYEKLKGSPEDNEQKQLFVEQHKHYLDEIIEQISEFSKRVILADANLDKVLSAYNKHRDKPIREQAENIIHLFTLTNLGAPAAFKYFDTTIDRKRYTSTKEVLDATLIHQSITGLYETRIDLSQLGGDGGEAAAKGGGGSEAAAKGGTAPLEEEYRLFLEAPIQNVTLLEQWKREIPKVWAEINPPGLASTQAPIHVQLLSTALPVRVRQYPITLEAKRSLRETIRKFRAAGILRPVHSPWNTPLLPVRKSGTSEYRMVQDLREVNKRVETIHPTVPNPYTLLSLLPPDRIWYSVLDLKDAFFCIPLAPESQLIFAFEWADAEEGESGQLTWTRLPQGFKNSPTLFDEALNRDLQGFRLDHPSVSLLQYVDDLLIAADTQAACLSATRDLLMTLAELGYRVSGKKAQLCQEEVTYLGFKIHKGSRSLSNSRTQAILQIPVPKTKRQVREFLGTIGYCRLWIPGFAELAQPLYAATRGGNDPLVWGEKEEEAFQSLKLALTQPPALALPSLDKPFQLFVEETSGAAKGVLTQALGPWKRPVAYLSKRLDPVAAGWPRCLRAIAAAALLTREASKLTFGQDIEITSSHNLESLLRSPPDKWLTNARITQYQVLLLDPPRVRFKQTAALNPATLLPETDDTLPIHHCLDTLDSLTSTRPDLTDQPLAQAEATLFTDGSSYIRDGKRYAGAAVVTLDSVIWAEPLPIGTSAQKAELIALTKALEWSKDKSVNIYTDSRYAFATLHVHGMIYRERGLLTAGGKAIKNAPEILALLTAVWLPKRVAVMHCKGHQKDDAPTSTGNRRADEVAREVAIRPLSTQATISAGKRTADGSEFEKRTADGSEFESPKKKAKVE

SEQ ID NO: 7681 - protein, 2098 aa, synthetic construct
MPAAKRVKLDGGDKKYSIGLDIGTNSVGWAVITDEYKVPSKKFKVLGNTDRHSIKKNLIGALLFDSGETAEATRLKRTARRRYTRRKNRICYLQEIFSNEMAKVDDSFFHRLEESFLVEEDKKHERHPIFGNIVDEVAYHEKYPTIYHLRKKLVDSTDKADLRLIYLALAHMIKFRGHFLIEGDLNPDNSDVDKLFIQLVQTYNQLFEENPINASGVDAKAILSARLSKSRRLENLIAQLPGEKKNGLFGNLIALSLGLTPNFKSNFDLAEDAKLQLSKDTYDDDLDNLLAQIGDQYADLFLAAKNLSDAILLSDILRVNTEITKAPLSASMIKRYDEHHQDLTLLKALVRQQLPEKYKEIFFDQSKNGYAGYIDGGASQEEFYKFIKPILEKMDGTEELLVKLNREDLLRKQRTFDNGSIPHQIHLGELHAILRRQEDFYPFLKDNREKIEKILTFRIPYYVGPLARGNSRFAWMTRKSEETITPWNFEEVVDKGASAQSFIERMTNFDKNLPNEKVLPKHSLLYEYFTVYNELTKVKYVTEGMRKPAFLSGEQKKAIVDLLFKTNRKVTVKQLKEDYFKKIECFDSVEISGVEDRFNASLGTYHDLLKIIKDKDFLDNEENEDILEDIVLTLTLFEDREMIEERLKTYAHLFDDKVMKQLKRRRYTGWGRLSRKLINGIRDKQSGKTILDFLKSDGFANRNFMQLIHDDSLTFKEDIQKAQVSGQGDSLHEHIANLAGSPAIKKGILQTVKVVDELVKVMGRHKPENIVIEMARENQTTQKGQKNSRERMKRIEEGIKELGSQILKEHPVENTQLQNEKLYLYYLQNGRDMYVDQELDINRLSDYDVDHIVPQSFLKDDSIDNKVLTRSDKARGKSDNVPSEEVVKKMKNYWRQLLNAKLITQRKFDNLTKAERGGLSELDKAGFIKRQLVETRQITKHVAQILDSRMNTKYDENDKLIREVKVITLKSKLVSDFRKDFQFYKVREINNYHHAHDAYLNAVVGTALIKKYPKLESEFVYGDYKVYDVRKMIAKSEQEIGKATAKYFFYSNIMNFFKTEITLANGEIRKRPLIETNGETGEIVWDKGRDFATVRKVLSMPQVNIVKKTEVQTGGFSKESILPKRNSDKLIARKKDWDPKKYGGFDSPTVAYSVLVVAKVEKGKSKKLKSVKELLGITIMERSSFEKNPIDFLEAKGYKEVKKDLIIKLPKYSLFELENGRKRMLASAGELQKGNELALPSKYVNFLYLASHYEKLKGSPEDNEQKQLFVEQHKHYLDEIIEQISEFSKRVILADANLDKVLSAYNKHRDKPIREQAENIIHLFTLTNLGAPAAFKYFDTTIDRKRYTSTKEVLDATLIHQSITGLYETRIDLSQLGGDGGEAAAKGGGGSEAAAKGGVLNLEEEYRLHEKPVPSSIDPSWLQLFPTVWAERAGMGLANQVPPVVVELRSGASPVAVRQYPMSKEAREGIRPHIQKFLDLGVLVPCRSPWNTPLLPVKKPGTNDYRPVQDLREINKRVQDIHPTVPNPYNLLSSLPPSYTWYSVLDLKDAFFCLRLHPNSQPLFAFEWKDPEKGNTGQLTWTRLPQGFKNSPTLFNEALHRDLAPFRALNPQVVLLQYVDDLLVAAPTYEDCKKGTQKLLQELSKLGYRVSAKKAQLCQREVTYLGYLLKEGKRWLTPARKATVMKIPVPTTPRQVREFLGTAGFCRLWIPGFASLAAPLYPLTKPSIPFIWTEEHQQAFDHIKKALLSAPALALPDLTKPFTLYIDERAGVARGVLTQTLGPWRRPVAYLSKKLDPVASGWPTCLKAVAAVALLLKDADKLTLGQNVTVIASHSLESIVRQPPDRWMTNARMTHYQSLLLNERVSFAPPAVLNPATLLPVESEATPVHRCSEILAEETGTRRDLEDQPLPGVPTWYTDGSSFITEGKRRAGAPIVDGKRTVWASSLPEGTSAQKAELVALTQALRLAEGKNINIYTDSRYAFATAHIHGAIYKQRGWLTSAGKDIKNKEEILALLEAIHLPRRVAIIHCPGHQRGSNPVATGNRRADEAAKQAALSTRVLAGTTKPAGKRTADGSEFEKRTADGSEFESPKKKAKVE

SEQ ID NO: 7682 - protein, 2222 aa, synthetic construct
MPAAKRVKLDGGDKKYSIGLDIGTNSVGWAVITDEYKVPSKKFKVLGNTDRHSIKKNLIGALLFDSGETAEATRLKRTARRRYTRRKNRICYLQEIFSNEMAKVDDSFFHRLEESFLVEEDKKHERHPIFGNIVDEVAYHEKYPTIYHLRKKLVDSTDKADLRLIYLALAHMIKFRGHFLIEGDLNPDNSDVDKLFIQLVQTYNQLFEENPINASGVDAKAILSARLSKSRRLENLIAQLPGEKKNGLFGNLIALSLGLTPNFKSNFDLAEDAKLQLSKDTYDDDLDNLLAQIGDQYADLFLAAKNLSDAILLSDILRVNTEITKAPLSASMIKRYDEHHQDLTLLKALVRQQLPEKYKEIFFDQSKNGYAGYIDGGASQEEFYKFIKPILEKMDGTEELLVKLNREDLLRKQRTFDNGSIPHQIHLGELHAILRRQEDFYPFLKDNREKIEKILTFRIPYYVGPLARGNSRFAWMTRKSEETITPWNFEEVVDKGASAQSFIERMTNFDKNLPNEKVLPKHSLLYEYFTVYNELTKVKYVTEGMRKPAFLSGEQKKAIVDLLFKTNRKVTVKQLKEDYFKKIECFDSVEISGVEDRFNASLGTYHDLLKIIKDKDFLDNEENEDILEDIVLTLTLFEDREMIEERLKTYAHLFDDKVMKQLKRRRYTGWGRLSRKLINGIRDKQSGKTILDFLKSDGFANRNFMQLIHDDSLTFKEDIQKAQVSGQGDSLHEHIANLAGSPAIKKGILQTVKVVDELVKVMGRHKPENIVIEMARENQTTQKGQKNSRERMKRIEEGIKELGSQILKEHPVENTQLQNEKLYLYYLQNGRDMYVDQELDINRLSDYDVDHIVPQSFLKDDSIDNKVLTRSDKARGKSDNVPSEEVVKKMKNYWRQLLNAKLITQRKFDNLTKAERGGLSELDKAGFIKRQLVETRQITKHVAQILDSRMNTKYDENDKLIREVKVITLKSKLVSDFRKDFQFYKVREINNYHHAHDAYLNAVVGTALIKKYPKLESEFVYGDYKVYDVRKMIAKSEQEIGKATAKYFFYSNIMNFFKTEITLANGEIRKRPLIETNGETGEIVWDKGRDFATVRKVLSMPQVNIVKKTEVQTGGFSKESILPKRNSDKLIARKKDWDPKKYGGFDSPTVAYSVLVVAKVEKGKSKKLKSVKELLGITIMERSSFEKNPIDFLEAKGYKEVKKDLIIKLPKYSLFELENGRKRMLASAGELQKGNELALPSKYVNFLYLASHYEKLKGSPEDNEQKQLFVEQHKHYLDEIIEQISEFSKRVILADANLDKVLSAYNKHRDKPIREQAENIIHLFTLTNLGAPAAFKYFDTTIDRKRYTSTKEVLDATLIHQSITGLYETRIDLSQLGGDGGEAAAKGGGGSEAAAKGGTLGDQGSRGSDPLPEPRVTLTVEGIPTEFLVNTGAEHSVLTKPMGKMGSKRTVVAGATGSKVYPWTTKRLLKIGQKQVTHSFLVIPECPAPLLGRDLLTKLKAQIQFSTEGPQVTWEDRPAMCLVLNLEEEYRLHEKPVPPSIDPSWLQLFPMVWAEKAGMGLANQVPPVVVELKSDASPVAVRQYPMSKEAREGIRPHIQRFLDLGILVPCQSPWNTPLLPVKKPGTNDYRPVQDLREVNKRVQDIHPTVPNPYNLLSSLPPSHTWYSVLDLKDAFFCLKLHPNSQPLFAFEWRDPEKGNTGQLTWTRLPQGFKNSPTLFNEALHRDLASFRALNPQVVMLQYVDDLLVAAPTYRDCKEGTRRLLQELSKLGYRVSAKKAQLCREEVTYLGYLLKGGKRWLTPARKATVMKIPTPTTPRQVREFLGTAGFCRLWIPGFASLAAPLYPLTRPKVPFTWTEAHQEAFGRIKEALLSAPALALPDLTKPFALYVDEKEGVARGVLTQTLGPWRRPVAYLSKKLDPVASGWPTCLKAIAAVALLLKDADKLTLGQNVLVIAPHNLESIVRQPPDRWMTNARMTHYQSLLLNERVSFAPPAILNPATLLPVESDDTPIHICSEILAEETGTRPDLRDQPLPGVPAWYTDGSSFIMDGRRQAGAAIVDNKRTVWASNLPEGTSAQKAELIALTQALRLAEGKSINIYTDSRYAFATAHVHGAIYKQRGWLTSAGKDIKNKEEILALLEAIHLPKRVAIIHCPGHQRGTDPVATGNRKADEAAKQAAQSTRILTETTKNAGKRTADGSEFEKRTADGSEFESPKKKAKVE

SEQ ID NO: 7683 - protein, 2100 aa, synthetic construct
MPAAKRVKLDGGDKKYSIGLDIGTNSVGWAVITDEYKVPSKKFKVLGNTDRHSIKKNLIGALLFDSGETAEATRLKRTARRRYTRRKNRICYLQEIFSNEMAKVDDSFFHRLEESFLVEEDKKHERHPIFGNIVDEVAYHEKYPTIYHLRKKLVDSTDKADLRLIYLALAHMIKFRGHFLIEGDLNPDNSDVDKLFIQLVQTYNQLFEENPINASGVDAKAILSARLSKSRRLENLIAQLPGEKKNGLFGNLIALSLGLTPNFKSNFDLAEDAKLQLSKDTYDDDLDNLLAQIGDQYADLFLAAKNLSDAILLSDILRVNTEITKAPLSASMIKRYDEHHQDLTLLKALVRQQLPEKYKEIFFDQSKNGYAGYIDGGASQEEFYKFIKPILEKMDGTEELLVKLNREDLLRKQRTFDNGSIPHQIHLGELHAILRRQEDFYPFLKDNREKIEKILTFRIPYYVGPLARGNSRFAWMTRKSEETITPWNFEEVVDKGASAQSFIERMTNFDKNLPNEKVLPKHSLLYEYFTVYNELTKVKYVTEGMRKPAFLSGEQKKAIVDLLFKTNRKVTVKQLKEDYFKKIECFDSVEISGVEDRFNASLGTYHDLLKIIKDKDFLDNEENEDILEDIVLTLTLFEDREMIEERLKTYAHLFDDKVMKQLKRRRYTGWGRLSRKLINGIRDKQSGKTILDFLKSDGFANRNFMQLIHDDSLTFKEDIQKAQVSGQGDSLHEHIANLAGSPAIKKGILQTVKVVDELVKVMGRHKPENIVIEMARENQTTQKGQKNSRERMKRIEEGIKELGSQILKEHPVENTQLQNEKLYLYYLQNGRDMYVDQELDINRLSDYDVDHIVPQSFLKDDSIDNKVLTRSDKARGKSDNVPSEEVVKKMKNYWRQLLNAKLITQRKFDNLTKAERGGLSELDKAGFIKRQLVETRQITKHVAQILDSRMNTKYDENDKLIREVKVITLKSKLVSDFRKDFQFYKVREINNYHHAHDAYLNAVVGTALIKKYPKLESEFVYGDYKVYDVRKMIAKSEQEIGKATAKYFFYSNIMNFFKTEITLANGEIRKRPLIETNGETGEIVWDKGRDFATVRKVLSMPQVNIVKKTEVQTGGFSKESILPKRNSDKLIARKKDWDPKKYGGFDSPTVAYSVLVVAKVEKGKSKKLKSVKELLGITIMERSSFEKNPIDFLEAKGYKEVKKDLIIKLPKYSLFELENGRKRMLASAGELQKGNELALPSKYVNFLYLASHYEKLKGSPEDNEQKQLFVEQHKHYLDEIIEQISEFSKRVILADANLDKVLSAYNKHRDKPIREQAENIIHLFTLTNLGAPAAFKYFDTTIDRKRYTSTKEVLDATLIHQSITGLYETRIDLSQLGGDGGEAAAKGGGGSEAAAKGGTLNLEDEYRLYETSAEPEVSPGSTWLSDFPQAWAETGGMGLAVRQAPLIIPLKATSTPVSIKQYPMSQEAKLGIKPHIQRLLDQGILVPCQSPWNTPLLPVKKPGTNDYRPVQDLREVNKRVEDIHPTVPNPYNLLSGLPPSHRWYTVLDLKDAFFCLRLHPTSQPLFAFEWRDPGMGISGQLTWTRLPQGFKNSPTLFNEALHRDLADFRIQHPDLILLQYVDDILLAATSELDCQQGTRALLLTLGNLGYRASAKKAQLCQKQVKYLGYLLKEGQRWLTEARKETVMGQPTPKTPRQLREFLGTAGFCRLWIPGFAEMAAPLYPLTKPGTLFNWGPDQQKAYQEIKQALLTAPALGLPDLTKPFELFVDEKQGYAKGVLTQKLGPWRRPVAYLSKKLDPVAAGWPPCLRMVAAIAVLRKDAGKLTMGQPLVILAPHAVEALVKQPPDRWLSNARMTHYQAMLLDTDRVQFGPVVALNPATLLPLPEEGAPHDCLEILAETHGTRPDLTDQPIPDADHTWYTDGSSFLQEGQRKAGAAVTTETEVIWARALPAGTSAQRAELIALTQALKMAEGKRLNVYTDSRYAFATAHIHGEIYRRRGWLTSEGREIKNKSEILALLKALFLPKRLSIIHCLGHQKGDSAEARGNRLADQAAREAAIKTPPDTSTLLAGKRTADGSEFEKRTADGSEFESPKKKAKVE

SEQ ID NO: 7684 - protein, 2100 aa, synthetic construct
MPAAKRVKLDGGDKKYSIGLDIGTNSVGWAVITDEYKVPSKKFKVLGNTDRHSIKKNLIGALLFDSGETAEATRLKRTARRRYTRRKNRICYLQEIFSNEMAKVDDSFFHRLEESFLVEEDKKHERHPIFGNIVDEVAYHEKYPTIYHLRKKLVDSTDKADLRLIYLALAHMIKFRGHFLIEGDLNPDNSDVDKLFIQLVQTYNQLFEENPINASGVDAKAILSARLSKSRRLENLIAQLPGEKKNGLFGNLIALSLGLTPNFKSNFDLAEDAKLQLSKDTYDDDLDNLLAQIGDQYADLFLAAKNLSDAILLSDILRVNTEITKAPLSASMIKRYDEHHQDLTLLKALVRQQLPEKYKEIFFDQSKNGYAGYIDGGASQEEFYKFIKPILEKMDGTEELLVKLNREDLLRKQRTFDNGSIPHQIHLGELHAILRRQEDFYPFLKDNREKIEKILTFRIPYYVGPLARGNSRFAWMTRKSEETITPWNFEEVVDKGASAQSFIERMTNFDKNLPNEKVLPKHSLLYEYFTVYNELTKVKYVTEGMRKPAFLSGEQKKAIVDLLFKTNRKVTVKQLKEDYFKKIECFDSVEISGVEDRFNASLGTYHDLLKIIKDKDFLDNEENEDILEDIVLTLTLFEDREMIEERLKTYAHLFDDKVMKQLKRRRYTGWGRLSRKLINGIRDKQSGKTILDFLKSDGFANRNFMQLIHDDSLTFKEDIQKAQVSGQGDSLHEHIANLAGSPAIKKGILQTVKVVDELVKVMGRHKPENIVIEMARENQTTQKGQKNSRERMKRIEEGIKELGSQILKEHPVENTQLQNEKLYLYYLQNGRDMYVDQELDINRLSDYDVDHIVPQSFLKDDSIDNKVLTRSDKARGKSDNVPSEEVVKKMKNYWRQLLNAKLITQRKFDNLTKAERGGLSELDKAGFIKRQLVETRQITKHVAQILDSRMNTKYDENDKLIREVKVITLKSKLVSDFRKDFQFYKVREINNYHHAHDAYLNAVVGTALIKKYPKLESEFVYGDYKVYDVRKMIAKSEQEIGKATAKYFFYSNIMNFFKTEITLANGEIRKRPLIETNGETGEIVWDKGRDFATVRKVLSMPQVNIVKKTEVQTGGFSKESILPKRNSDKLIARKKDWDPKKYGGFDSPTVAYSVLVVAKVEKGKSKKLKSVKELLGITIMERSSFEKNPIDFLEAKGYKEVKKDLIIKLPKYSLFELENGRKRMLASAGELQKGNELALPSKYVNFLYLASHYEKLKGSPEDNEQKQLFVEQHKHYLDEIIEQISEFSKRVILADANLDKVLSAYNKHRDKPIREQAENIIHLFTLTNLGAPAAFKYFDTTIDRKRYTSTKEVLDATLIHQSITGLYETRIDLSQLGGDGGEAAAKGGGGSEAAAKGGTLGIEDEYRLHETSTEPDVSLGSTWLSDFPQAWAETGGMGLAVRQAPLIIPLKATSTPVSIQQYPMSHEARLGIKPHIQRLLDQGILVPCQSPWNTPLLPVKKPGTNDYRPVQDLREVNKRVEDIHPTVPNPYNLLSGLPPSHQWYTVLDLKDAFFCLRLHPTSQPLFAFEWRDPGMGISGQLTWTRLPQGFKNSPTLFNEALHRDLADFRIQHPDLILLQYVDDILLAATSELDCQQGTRALLQTLGDLGYRASAKKAQICQKQVKYLGYLLREGQRWLTEARKETVMGQPVPKTPRQLREFLGTAGFCRLWIPGFAEMAAPLYPLTKPGTLFSWGPDQQKAYQEIKQALLTAPALGLPDLTKPFELFVDEKQGYAKGVLTQKLGPWRRPVAYLSKKLDPVAAGWPPCLRMVAAIAVLTKDAGKLTMGQPLVILAPHAVEALVKQPPDRWLSNARMTHYQAMLLDTDRVQFGPVVALNPATLLPLPEEGAPHDCLEILAETHGTRPDLTDQPIPDADHTWYTDGSSFLQEGQRKAGAAVTTETEVIWAGALPAGTSAQRAELIALTQALKMAEGKRLNVYTDSRYAFATAHIHGEIYRRRGWLTSEGREIKNKSEILALLKALFLPKRLSIIHCLGHQKGDSAEARGNRLADQAAREAAIKTPPDTSTLLAGKRTADGSEFEKRTADGSEFESPKKKAKVE

SEQ ID NO: 7685 - protein, 2100 aa, synthetic construct
MPAAKRVKLDGGDKKYSIGLDIGTNSVGWAVITDEYKVPSKKFKVLGNTDRHSIKKNLIGALLFDSGETAEATRLKRTARRRYTRRKNRICYLQEIFSNEMAKVDDSFFHRLEESFLVEEDKKHERHPIFGNIVDEVAYHEKYPTIYHLRKKLVDSTDKADLRLIYLALAHMIKFRGHFLIEGDLNPDNSDVDKLFIQLVQTYNQLFEENPINASGVDAKAILSARLSKSRRLENLIAQLPGEKKNGLFGNLIALSLGLTPNFKSNFDLAEDAKLQLSKDTYDDDLDNLLAQIGDQYADLFLAAKNLSDAILLSDILRVNTEITKAPLSASMIKRYDEHHQDLTLLKALVRQQLPEKYKEIFFDQSKNGYAGYIDGGASQEEFYKFIKPILEKMDGTEELLVKLNREDLLRKQRTFDNGSIPHQIHLGELHAILRRQEDFYPFLKDNREKIEKILTFRIPYYVGPLARGNSRFAWMTRKSEETITPWNFEEVVDKGASAQSFIERMTNFDKNLPNEKVLPKHSLLYEYFTVYNELTKVKYVTEGMRKPAFLSGEQKKAIVDLLFKTNRKVTVKQLKEDYFKKIECFDSVEISGVEDRFNASLGTYHDLLKIIKDKDFLDNEENEDILEDIVLTLTLFEDREMIEERLKTYAHLFDDKVMKQLKRRRYTGWGRLSRKLINGIRDKQSGKTILDFLKSDGFANRNFMQLIHDDSLTFKEDIQKAQVSGQGDSLHEHIANLAGSPAIKKGILQTVKVVDELVKVMGRHKPENIVIEMARENQTTQKGQKNSRERMKRIEEGIKELGSQILKEHPVENTQLQNEKLYLYYLQNGRDMYVDQELDINRLSDYDVDHIVPQSFLKDDSIDNKVLTRSDKARGKSDNVPSEEVVKKMKNYWRQLLNAKLITQRKFDNLTKAERGGLSELDKAGFIKRQLVETRQITKHVAQILDSRMNTKYDENDKLIREVKVITLKSKLVSDFRKDFQFYKVREINNYHHAHDAYLNAVVGTALIKKYPKLESEFVYGDYKVYDVRKMIAKSEQEIGKATAKYFFYSNIMNFFKTEITLANGEIRKRPLIETNGETGEIVWDKGRDFATVRKVLSMPQVNIVKKTEVQTGGFSKESILPKRNSDKLIARKKDWDPKKYGGFDSPTVAYSVLVVAKVEKGKSKKLKSVKELLGITIMERSSFEKNPIDFLEAKGYKEVKKDLIIKLPKYSLFELENGRKRMLASAGELQKGNELALPSKYVNFLYLASHYEKLKGSPEDNEQKQLFVEQHKHYLDEIIEQISEFSKRVILADANLDKVLSAYNKHRDKPIREQAENIIHLFTLTNLGAPAAFKYFDTTIDRKRYTSTKEVLDATLIHQSITGLYETRIDLSQLGGDGGEAAAKGGGGSEAAAKGGTLNIEDEYRLHETSKGPDVPLGSTWLSDFPQAWAETGGMGLAVRQAPLIIPLKATSTPVSIKQYPMSQEARLGIKPHIQRLLDQGILVPCQSPWNTPLLPVKKPGTNDYRPVQDLREVNKRVEDIHPTVPNPYNLLSGLPPSHQWYTVLDLKDAFFCLRLHPTSQSLFAFEWRDPEMGISGQLTWTRLPQGFKNSPTLFNEALHRDLADFRIQHPDLILLQYVDDLLLAATSELDCQQGTRALLQTLGDLGYRASAKKAQICQKQVKYLGYLLKEGQRWLTEARKETVMGQPTPKTPRQLREFLGTAGFCRLWIPGFAEMAAPLYPLTKPGTLFEWGPDQQKAYQEIKQALLTAPALGLPDLTKPFELFVDEKQGYAKGVLTQKLGPWRRPVAYLSKKLDPVAAGWPPCLRMVAAIAVLTKDAGKLTMGQPLVILAPHAVEALVKQPPDRWLSNARMTHYQALLLDTDRVQFGPIVALNPATLLPLPEEGLQHDCLDILAEAHGTRPDLTDQPLPDADHTWYTDGSSFLQEGQRKAGAAVTTETEVVWAKALPAGTSAQRAELIALTQALKMAEGKKLNVYTDSRYAFATAHIHGEIYRRRGWLTSEGKEIKNKDEILALLKALFLPKRLSIIHCPGHQKGNRAEARGNRMADQAAREVATRETPETSTLLAGKRTADGSEFEKRTADGSEFESPKKKAKVE

SEQ ID NO: 7686 - protein, 2100 aa, synthetic construct
MPAAKRVKLDGGDKKYSIGLDIGTNSVGWAVITDEYKVPSKKFKVLGNTDRHSIKKNLIGALLFDSGETAEATRLKRTARRRYTRRKNRICYLQEIFSNEMAKVDDSFFHRLEESFLVEEDKKHERHPIFGNIVDEVAYHEKYPTIYHLRKKLVDSTDKADLRLIYLALAHMIKFRGHFLIEGDLNPDNSDVDKLFIQLVQTYNQLFEENPINASGVDAKAILSARLSKSRRLENLIAQLPGEKKNGLFGNLIALSLGLTPNFKSNFDLAEDAKLQLSKDTYDDDLDNLLAQIGDQYADLFLAAKNLSDAILLSDILRVNTEITKAPLSASMIKRYDEHHQDLTLLKALVRQQLPEKYKEIFFDQSKNGYAGYIDGGASQEEFYKFIKPILEKMDGTEELLVKLNREDLLRKQRTFDNGSIPHQIHLGELHAILRRQEDFYPFLKDNREKIEKILTFRIPYYVGPLARGNSRFAWMTRKSEETITPWNFEEVVDKGASAQSFIERMTNFDKNLPNEKVLPKHSLLYEYFTVYNELTKVKYVTEGMRKPAFLSGEQKKAIVDLLFKTNRKVTVKQLKEDYFKKIECFDSVEISGVEDRFNASLGTYHDLLKIIKDKDFLDNEENEDILEDIVLTLTLFEDREMIEERLKTYAHLFDDKVMKQLKRRRYTGWGRLSRKLINGIRDKQSGKTILDFLKSDGFANRNFMQLIHDDSLTFKEDIQKAQVSGQGDSLHEHIANLAGSPAIKKGILQTVKVVDELVKVMGRHKPENIVIEMARENQTTQKGQKNSRERMKRIEEGIKELGSQILKEHPVENTQLQNEKLYLYYLQNGRDMYVDQELDINRLSDYDVDHIVPQSFLKDDSIDNKVLTRSDKARGKSDNVPSEEVVKKMKNYWRQLLNAKLITQRKFDNLTKAERGGLSELDKAGFIKRQLVETRQITKHVAQILDSRMNTKYDENDKLIREVKVITLKSKLVSDFRKDFQFYKVREINNYHHAHDAYLNAVVGTALIKKYPKLESEFVYGDYKVYDVRKMIAKSEQEIGKATAKYFFYSNIMNFFKTEITLANGEIRKRPLIETNGETGEIVWDKGRDFATVRKVLSMPQVNIVKKTEVQTGGFSKESILPKRNSDKLIARKKDWDPKKYGGFDSPTVAYSVLVVAKVEKGKSKKLKSVKELLGITIMERSSFEKNPIDFLEAKGYKEVKKDLIIKLPKYSLFELENGRKRMLASAGELQKGNELALPSKYVNFLYLASHYEKLKGSPEDNEQKQLFVEQHKHYLDEIIEQISEFSKRVILADANLDKVLSAYNKHRDKPIREQAENIIHLFTLTNLGAPAAFKYFDTTIDRKRYTSTKEVLDATLIHQSITGLYETRIDLSQLGGDGGEAAAKGGGGSEAAAKGGTLNIEDEYRLHEISTEPDVSPGSTWLSDFPQAWAETGGMGLAVRQAPLIIPLKATSTPVSIKQYPMSQEAKLGIKPHIQRLLDQGILVPCQSPWNTPLLPVKKPGTNDYRPVQGLREVNKRVEDIHPTVPNPYNLLSGLPTSHRWYTVLDLKDAFFCLRLHPTSQPLFASEWRDPGMGISGQLTWTRLPQGFKNSPTLFNEALHRGLADFRIQHPDLILLQYVDDLLLAATSELDCQQGTRALLKTLGNLGYRASAKKAQICQKQVKYLGYLLREGQRWLTEARKETVMGQPTPKTPRQLREFLGKAGFCRLFIPRFAEMAAPLYPLTKPGTLFNWGPDQQKAYHEIKQALLTAPALGLPDLTKPFELFVDEKQGYAKGVLTQKLGPWRRPVAYLSKKLDPVAAGWPPCLRMVAAIAVLTKDAGKLTMGQPLVILAPHAVEALVKQPPDRWLSNARMTHYQAMLLDTDRVQFGPVVALNPATLLPLPEEGAPHDCLEILAETHGTEPDLTDQPIPDADHTWYTDGSSFLQEGQRKAGAAVTTETEVIWARALPAGTSAQRAELIALTQALKMAEGKRLNVYTDSRYAFATAHIHGEIYKRRGWLTSEGREIKNKSEILALLKALFLPKRLSIIHCLGHQKGDSAEARGNRLADQAAREAAIKTPPDTSTLLAGKRTADGSEFEKRTADGSEFESPKKKAKVE

SEQ ID NO: 7687 - protein, 2098 aa, synthetic construct
MPAAKRVKLDGGDKKYSIGLDIGTNSVGWAVITDEYKVPSKKFKVLGNTDRHSIKKNLIGALLFDSGETAEATRLKRTARRRYTRRKNRICYLQEIFSNEMAKVDDSFFHRLEESFLVEEDKKHERHPIFGNIVDEVAYHEKYPTIYHLRKKLVDSTDKADLRLIYLALAHMIKFRGHFLIEGDLNPDNSDVDKLFIQLVQTYNQLFEENPINASGVDAKAILSARLSKSRRLENLIAQLPGEKKNGLFGNLIALSLGLTPNFKSNFDLAEDAKLQLSKDTYDDDLDNLLAQIGDQYADLFLAAKNLSDAILLSDILRVNTEITKAPLSASMIKRYDEHHQDLTLLKALVRQQLPEKYKEIFFDQSKNGYAGYIDGGASQEEFYKFIKPILEKMDGTEELLVKLNREDLLRKQRTFDNGSIPHQIHLGELHAILRRQEDFYPFLKDNREKIEKILTFRIPYYVGPLARGNSRFAWMTRKSEETITPWNFEEVVDKGASAQSFIERMTNFDKNLPNEKVLPKHSLLYEYFTVYNELTKVKYVTEGMRKPAFLSGEQKKAIVDLLFKTNRKVTVKQLKEDYFKKIECFDSVEISGVEDRFNASLGTYHDLLKIIKDKDFLDNEENEDILEDIVLTLTLFEDREMIEERLKTYAHLFDDKVMKQLKRRRYTGWGRLSRKLINGIRDKQSGKTILDFLKSDGFANRNFMQLIHDDSLTFKEDIQKAQVSGQGDSLHEHIANLAGSPAIKKGILQTVKVVDELVKVMGRHKPENIVIEMARENQTTQKGQKNSRERMKRIEEGIKELGSQILKEHPVENTQLQNEKLYLYYLQNGRDMYVDQELDINRLSDYDVDHIVPQSFLKDDSIDNKVLTRSDKARGKSDNVPSEEVVKKMKNYWRQLLNAKLITQRKFDNLTKAERGGLSELDKAGFIKRQLVETRQITKHVAQILDSRMNTKYDENDKLIREVKVITLKSKLVSDFRKDFQFYKVREINNYHHAHDAYLNAVVGTALIKKYPKLESEFVYGDYKVYDVRKMIAKSEQEIGKATAKYFFYSNIMNFFKTEITLANGEIRKRPLIETNGETGEIVWDKGRDFATVRKVLSMPQVNIVKKTEVQTGGFSKESILPKRNSDKLIARKKDWDPKKYGGFDSPTVAYSVLVVAKVEKGKSKKLKSVKELLGITIMERSSFEKNPIDFLEAKGYKEVKKDLIIKLPKYSLFELENGRKRMLASAGELQKGNELALPSKYVNFLYLASHYEKLKGSPEDNEQKQLFVEQHKHYLDEIIEQISEFSKRVILADANLDKVLSAYNKHRDKPIREQAENIIHLFTLTNLGAPAAFKYFDTTIDRKRYTSTKEVLDATLIHQSITGLYETRIDLSQLGGDGGEAAAKGGGGSEAAAKGGVLNLEEEYRLHEKPVPSSIDPSWLQLFPTVWAERAGMGLANQVPPVVVELRSGASPVAVRQYPMSKEAREGIRPHIQRFLDLGVLVPCQSPWNTPLLPVKKPGTNDYRPVQDLREINKRVQDIHPTVPNPYNLLSSLPPSHTWYSVLDLKDAFFCLKLHPNSQPLFAFEWRDPEKGNTGQLTWTRLPQGFKNSPTLFNEALHRDLAPFRALNPQVVLLQYVDDLLVAAPTYRDCKEGTQKLLQELSKLGYRVSAKKAQLCQKEVTYLGYLLKEGKRWLTPARKATVMKIPPPTTPRQVREFLGTAGFCRLWIPGFASLAAPLYPLTKPSIPFIWTEEHQKAFDRIKEALLSAPALALPDLTKPFTLYVDERAGVARGVLTQTLGPWRRPVAYLSKKLDPVASGWPTCLKAVAAVALLLKDADKLTLGQNVTVIASHSLESIVRQPPDRWMTNARMTHYQSLLLNERVSFAPPAVLNPATLLPVESEATPVHRCSEILAEETGTRRDLKDQPLPGVPAWYTDGSSFIAEGKRRAGAAIVDGKRTVWASSLPEGTSAQKAELVALTQALRLAEGKDINIYTDSRYAFATAHIHGAIYKQRGWLTSAGKDIKNKEEILALLEAIHLPKRVAIIHCPGHQKGNDPVATGNRRADEAAKQAALSTRVLAETTKPAGKRTADGSEFEKRTADGSEFESPKKKAKVE

SEQ ID NO: 7688 - protein, 2100 aa, synthetic construct
MPAAKRVKLDGGDKKYSIGLDIGTNSVGWAVITDEYKVPSKKFKVLGNTDRHSIKKNLIGALLFDSGETAEATRLKRTARRRYTRRKNRICYLQEIFSNEMAKVDDSFFHRLEESFLVEEDKKHERHPIFGNIVDEVAYHEKYPTIYHLRKKLVDSTDKADLRLIYLALAHMIKFRGHFLIEGDLNPDNSDVDKLFIQLVQTYNQLFEENPINASGVDAKAILSARLSKSRRLENLIAQLPGEKKNGLFGNLIALSLGLTPNFKSNFDLAEDAKLQLSKDTYDDDLDNLLAQIGDQYADLFLAAKNLSDAILLSDILRVNTEITKAPLSASMIKRYDEHHQDLTLLKALVRQQLPEKYKEIFFDQSKNGYAGYIDGGASQEEFYKFIKPILEKMDGTEELLVKLNREDLLRKQRTFDNGSIPHQIHLGELHAILRRQEDFYPFLKDNREKIEKILTFRIPYYVGPLARGNSRFAWMTRKSEETITPWNFEEVVDKGASAQSFIERMTNFDKNLPNEKVLPKHSLLYEYFTVYNELTKVKYVTEGMRKPAFLSGEQKKAIVDLLFKTNRKVTVKQLKEDYFKKIECFDSVEISGVEDRFNASLGTYHDLLKIIKDKDFLDNEENEDILEDIVLTLTLFEDREMIEERLKTYAHLFDDKVMKQLKRRRYTGWGRLSRKLINGIRDKQSGKTILDFLKSDGFANRNFMQLIHDDSLTFKEDIQKAQVSGQGDSLHEHIANLAGSPAIKKGILQTVKVVDELVKVMGRHKPENIVIEMARENQTTQKGQKNSRERMKRIEEGIKELGSQILKEHPVENTQLQNEKLYLYYLQNGRDMYVDQELDINRLSDYDVDHIVPQSFLKDDSIDNKVLTRSDKARGKSDNVPSEEVVKKMKNYWRQLLNAKLITQRKFDNLTKAERGGLSELDKAGFIKRQLVETRQITKHVAQILDSRMNTKYDENDKLIREVKVITLKSKLVSDFRKDFQFYKVREINNYHHAHDAYLNAVVGTALIKKYPKLESEFVYGDYKVYDVRKMIAKSEQEIGKATAKYFFYSNIMNFFKTEITLANGEIRKRPLIETNGETGEIVWDKGRDFATVRKVLSMPQVNIVKKTEVQTGGFSKESILPKRNSDKLIARKKDWDPKKYGGFDSPTVAYSVLVVAKVEKGKSKKLKSVKELLGITIMERSSFEKNPIDFLEAKGYKEVKKDLIIKLPKYSLFELENGRKRMLASAGELQKGNELALPSKYVNFLYLASHYEKLKGSPEDNEQKQLFVEQHKHYLDEIIEQISEFSKRVILADANLDKVLSAYNKHRDKPIREQAENIIHLFTLTNLGAPAAFKYFDTTIDRKRYTSTKEVLDATLIHQSITGLYETRIDLSQLGGDGGEAAAKGGGGSEAAAKGGTLNIEDEYRLHETSKEPDVPLGSTWLSDFPQAWAETGGMGLAVRQAPLIIPLKATSTPVSIKQYPMSQEARLGIKPHIQRLLDQGILVPCQSPWNTPLLPVKKPGTNDYRPVQDLREVNKRVEDIHPTVPNPYNLLSGLPPSHQWYTVLDLKDAFFCLRLHPTSQPLFAFEWRDPEMGISGQLTWTRLPQGFKNSPTLFDEALHRDLADFRIQHPDLILLQYVDDLLLAATSEQDCQRGTRALLQTLGNLGYRASAKKAQICQKQVKYLGYLLKEGQRWLTEARKETVMGQPTPKTPRQLREFLGTAGFCRLWIPGFAEMAAPLYPLTKTGTLFNWGPDQQKAYQEIKQALLTAPALGLPDLTKPFELFVDEKQGYAKGVLTQKLGPWRRPVAYLSKKLDPVAAGWPPCLRMVAAIAVLTKDAGKLTMGQPLVILAPHAVEALVKQPPDRWLSNARMTHYQAMLLDTDRVQFGPVVALNPATLLPLPEKEAPHDCLEILAETHGTRPDLTDQPIPDADYTWYTDGSSFLQEGQRRAGAAVTTETEVIWARALPAGTSAQRAELIALTQALKMAEGKKLNVYTDSRYAFATAHVHGEIYRRRGLLTSEGREIKNKNEILALLKALFLPKRLSIIHCPGHQKGNSAEARGNRMADQAAREAAMKAVLETSTLLAGKRTADGSEFEKRTADGSEFESPKKKAKVE

SEQ ID NO: 7689 - protein, 2103 aa, synthetic construct
MPAAKRVKLDGGDKKYSIGLDIGTNSVGWAVITDEYKVPSKKFKVLGNTDRHSIKKNLIGALLFDSGETAEATRLKRTARRRYTRRKNRICYLQEIFSNEMAKVDDSFFHRLEESFLVEEDKKHERHPIFGNIVDEVAYHEKYPTIYHLRKKLVDSTDKADLRLIYLALAHMIKFRGHFLIEGDLNPDNSDVDKLFIQLVQTYNQLFEENPINASGVDAKAILSARLSKSRRLENLIAQLPGEKKNGLFGNLIALSLGLTPNFKSNFDLAEDAKLQLSKDTYDDDLDNLLAQIGDQYADLFLAAKNLSDAILLSDILRVNTEITKAPLSASMIKRYDEHHQDLTLLKALVRQQLPEKYKEIFFDQSKNGYAGYIDGGASQEEFYKFIKPILEKMDGTEELLVKLNREDLLRKQRTFDNGSIPHQIHLGELHAILRRQEDFYPFLKDNREKIEKILTFRIPYYVGPLARGNSRFAWMTRKSEETITPWNFEEVVDKGASAQSFIERMTNFDKNLPNEKVLPKHSLLYEYFTVYNELTKVKYVTEGMRKPAFLSGEQKKAIVDLLFKTNRKVTVKQLKEDYFKKIECFDSVEISGVEDRFNASLGTYHDLLKIIKDKDFLDNEENEDILEDIVLTLTLFEDREMIEERLKTYAHLFDDKVMKQLKRRRYTGWGRLSRKLINGIRDKQSGKTILDFLKSDGFANRNFMQLIHDDSLTFKEDIQKAQVSGQGDSLHEHIANLAGSPAIKKGILQTVKVVDELVKVMGRHKPENIVIEMARENQTTQKGQKNSRERMKRIEEGIKELGSQILKEHPVENTQLQNEKLYLYYLQNGRDMYVDQELDINRLSDYDVDHIVPQSFLKDDSIDNKVLTRSDKARGKSDNVPSEEVVKKMKNYWRQLLNAKLITQRKFDNLTKAERGGLSELDKAGFIKRQLVETRQITKHVAQILDSRMNTKYDENDKLIREVKVITLKSKLVSDFRKDFQFYKVREINNYHHAHDAYLNAVVGTALIKKYPKLESEFVYGDYKVYDVRKMIAKSEQEIGKATAKYFFYSNIMNFFKTEITLANGEIRKRPLIETNGETGEIVWDKGRDFATVRKVLSMPQVNIVKKTEVQTGGFSKESILPKRNSDKLIARKKDWDPKKYGGFDSPTVAYSVLVVAKVEKGKSKKLKSVKELLGITIMERSSFEKNPIDFLEAKGYKEVKKDLIIKLPKYSLFELENGRKRMLASAGELQKGNELALPSKYVNFLYLASHYEKLKGSPEDNEQKQLFVEQHKHYLDEIIEQISEFSKRVILADANLDKVLSAYNKHRDKPIREQAENIIHLFTLTNLGAPAAFKYFDTTIDRKRYTSTKEVLDATLIHQSITGLYETRIDLSQLGGDGGSGSETPGTSESATPESGGTAPLEEEYRLFLEAPIQNVTLLEQWKREIPKVWAEINPPGLASTQAPIHVQLLSTALPVRVRQYPITLEAKRSLRETIRKFRAAGILRPVHSPWNTPLLPVRKSGTSEYRMVQDLREVNKRVETIHPTVPNPYTLLSLLPPDRIWYSVLDLKDAFFCIPLAPESQLIFAFEWADAEEGESGQLTWTRLPQGFKNSPTLFNEALNRDLQGFRLDHPSVSLLQYVDDLLIAADTQAACLSATRDLLMTLAELGYRVSGKKAQLCQEEVTYLGFKIHKGSRSLSNSRTQAILQIPVPKTKRQVREFLGTIGYCRLWIPGFAELAQPLYAATRPGNDPLVWGEKEEEAFQSLKLALTQPPALALPSLDKPFQLFVEETSGAAKGVLTQALGPWKRPVAYLSKRLDPVAAGWPRCLRAIAAAALLTREASKLTFGQDIEITSSHNLESLLRSPPDKWLTNARITQYQVLLLDPPRVRFKQTAALNPATLLPETDDTLPIHHCLDTLDSLTSTRPDLTDQPLAQAEATLFTDGSSYIRDGKRYAGAAVVTLDSVIWAEPLPIGTSAQKAELIALTKALEWSKDKSVNIYTDSRYAFATLHVHGMIYRERGWLTAGGKAIKNAPEILALLTAVWLPKRVAVMHCKGHQKDDAPTSTGNRRADEVAREVAIRPLSTQATISAGKRTADGSEFEKRTADGSEFESPKKKAKVE

SEQ ID NO: 7690 - protein, 2178 aa, synthetic construct
MPAAKRVKLDGGDKKYSIGLDIGTNSVGWAVITDEYKVPSKKFKVLGNTDRHSIKKNLIGALLFDSGETAEATRLKRTARRRYTRRKNRICYLQEIFSNEMAKVDDSFFHRLEESFLVEEDKKHERHPIFGNIVDEVAYHEKYPTIYHLRKKLVDSTDKADLRLIYLALAHMIKFRGHFLIEGDLNPDNSDVDKLFIQLVQTYNQLFEENPINASGVDAKAILSARLSKSRRLENLIAQLPGEKKNGLFGNLIALSLGLTPNFKSNFDLAEDAKLQLSKDTYDDDLDNLLAQIGDQYADLFLAAKNLSDAILLSDILRVNTEITKAPLSASMIKRYDEHHQDLTLLKALVRQQLPEKYKEIFFDQSKNGYAGYIDGGASQEEFYKFIKPILEKMDGTEELLVKLNREDLLRKQRTFDNGSIPHQIHLGELHAILRRQEDFYPFLKDNREKIEKILTFRIPYYVGPLARGNSRFAWMTRKSEETITPWNFEEVVDKGASAQSFIERMTNFDKNLPNEKVLPKHSLLYEYFTVYNELTKVKYVTEGMRKPAFLSGEQKKAIVDLLFKTNRKVTVKQLKEDYFKKIECFDSVEISGVEDRFNASLGTYHDLLKIIKDKDFLDNEENEDILEDIVLTLTLFEDREMIEERLKTYAHLFDDKVMKQLKRRRYTGWGRLSRKLINGIRDKQSGKTILDFLKSDGFANRNFMQLIHDDSLTFKEDIQKAQVSGQGDSLHEHIANLAGSPAIKKGILQTVKVVDELVKVMGRHKPENIVIEMARENQTTQKGQKNSRERMKRIEEGIKELGSQILKEHPVENTQLQNEKLYLYYLQNGRDMYVDQELDINRLSDYDVDHIVPQSFLKDDSIDNKVLTRSDKARGKSDNVPSEEVVKKMKNYWRQLLNAKLITQRKFDNLTKAERGGLSELDKAGFIKRQLVETRQITKHVAQILDSRMNTKYDENDKLIREVKVITLKSKLVSDFRKDFQFYKVREINNYHHAHDAYLNAVVGTALIKKYPKLESEFVYGDYKVYDVRKMIAKSEQEIGKATAKYFFYSNIMNFFKTEITLANGEIRKRPLIETNGETGEIVWDKGRDFATVRKVLSMPQVNIVKKTEVQTGGFSKESILPKRNSDKLIARKKDWDPKKYGGFDSPTVAYSVLVVAKVEKGKSKKLKSVKELLGITIMERSSFEKNPIDFLEAKGYKEVKKDLIIKLPKYSLFELENGRKRMLASAGELQKGNELALPSKYVNFLYLASHYEKLKGSPEDNEQKQLFVEQHKHYLDEIIEQISEFSKRVILADANLDKVLSAYNKHRDKPIREQAENIIHLFTLTNLGAPAAFKYFDTTIDRKRYTSTKEVLDATLIHQSITGLYETRIDLSQLGGDGGSGSETPGTSESATPESGGMDLLKPLTVERKGVKIKGYWNSQADITCVPKDLLQGEEPVRQQNVTTIHGTQEGDVYYVNLKIDGRRINTEVIGTTLDYAIITPGDVPWILKKPLELTIKLDLEEQQGTLLNNSILSKKGKEELKQLFEKYSALWQSWENQVGHRRIRPHKIATGTVKPTPQKQYHINPKAKPDIQIVINDLLKQGVLIQKESTMNTPVYPVPKPNGRWRMVLDYRAVNKVTPLIAVQNQHSYGILGSLFKGRYKTTIDLSNGFWAHPIVPEDYWITAFTWQGKQYCWTVLPQGFLNSPGLFTGDVVDLLQGIPNVEVYVDDVYISHDSEKEHLEYLDILFNRLKEAGYIISLKKSNIANSIVDFLGFQITNEGRGLTDTFKEKLENITAPTTLKQLQSILGLLNFARNFIPDFTELIAPLYALIPKSTKNYVPWQIEHSTTLETLITKLNGAEYLQGRKGDKTLIMKVNASYTTGYIRYYNEGEKKPISYVSIVFSKTELKFTELEKLLTTVHKGLLKALDLSMGQNIHVYSPIVSMQNIQKTPQTAKKALASRWLSWLSYLEDPRIRFFYDPQMPALKDLPAVDTGKDNKKHPSNFQHIFYTDGSAITSPTKEGHLNAGMGIVYFINKDGNLQKQQEWSISLGNHTAQFAEIAAFEFALKKCLPLGGNILVVTDSNYVAKAYNEELDVWASNGFVNNRKKPLKHISKWKSVADLKRLRPDVVVTHEPGHQKLDSSPHAYGNNLADQLATQASFKVHAGKRTADGSEFEKRTADGSEFESPKKKAKVE

SEQ ID NO: 7691 - protein, 2100 aa, synthetic construct
MPAAKRVKLDGGDKKYSIGLDIGTNSVGWAVITDEYKVPSKKFKVLGNTDRHSIKKNLIGALLFDSGETAEATRLKRTARRRYTRRKNRICYLQEIFSNEMAKVDDSFFHRLEESFLVEEDKKHERHPIFGNIVDEVAYHEKYPTIYHLRKKLVDSTDKADLRLIYLALAHMIKFRGHFLIEGDLNPDNSDVDKLFIQLVQTYNQLFEENPINASGVDAKAILSARLSKSRRLENLIAQLPGEKKNGLFGNLIALSLGLTPNFKSNFDLAEDAKLQLSKDTYDDDLDNLLAQIGDQYADLFLAAKNLSDAILLSDILRVNTEITKAPLSASMIKRYDEHHQDLTLLKALVRQQLPEKYKEIFFDQSKNGYAGYIDGGASQEEFYKFIKPILEKMDGTEELLVKLNREDLLRKQRTFDNGSIPHQIHLGELHAILRRQEDFYPFLKDNREKIEKILTFRIPYYVGPLARGNSRFAWMTRKSEETITPWNFEEVVDKGASAQSFIERMTNFDKNLPNEKVLPKHSLLYEYFTVYNELTKVKYVTEGMRKPAFLSGEQKKAIVDLLFKTNRKVTVKQLKEDYFKKIECFDSVEISGVEDRFNASLGTYHDLLKIIKDKDFLDNEENEDILEDIVLTLTLFEDREMIEERLKTYAHLFDDKVMKQLKRRRYTGWGRLSRKLINGIRDKQSGKTILDFLKSDGFANRNFMQLIHDDSLTFKEDIQKAQVSGQGDSLHEHIANLAGSPAIKKGILQTVKVVDELVKVMGRHKPENIVIEMARENQTTQKGQKNSRERMKRIEEGIKELGSQILKEHPVENTQLQNEKLYLYYLQNGRDMYVDQELDINRLSDYDVDHIVPQSFLKDDSIDNKVLTRSDKARGKSDNVPSEEVVKKMKNYWRQLLNAKLITQRKFDNLTKAERGGLSELDKAGFIKRQLVETRQITKHVAQILDSRMNTKYDENDKLIREVKVITLKSKLVSDFRKDFQFYKVREINNYHHAHDAYLNAVVGTALIKKYPKLESEFVYGDYKVYDVRKMIAKSEQEIGKATAKYFFYSNIMNFFKTEITLANGEIRKRPLIETNGETGEIVWDKGRDFATVRKVLSMPQVNIVKKTEVQTGGFSKESILPKRNSDKLIARKKDWDPKKYGGFDSPTVAYSVLVVAKVEKGKSKKLKSVKELLGITIMERSSFEKNPIDFLEAKGYKEVKKDLIIKLPKYSLFELENGRKRMLASAGELQKGNELALPSKYVNFLYLASHYEKLKGSPEDNEQKQLFVEQHKHYLDEIIEQISEFSKRVILADANLDKVLSAYNKHRDKPIREQAENIIHLFTLTNLGAPAAFKYFDTTIDRKRYTSTKEVLDATLIHQSITGLYETRIDLSQLGGDGGSGSETPGTSESATPESGGTLQLEEEYRLFEPESTQKQEMDIWLKNFPQAWAETGGMGTAHCQAPVLIQLKATATPISIRQYPMPHEAYQGIKPHIRRMLDQGILKPCQSPWNTPLLPVKKPGTEDYRPVQDLREVNKRVEDIHPTVPNPYNLLSTLPPSHPWYTVLDLKDAFFCLRLHSESQLLFAFEWRDPEIGLSGQLTWTRLPQGFKNSPTLFNEALHSDLADFRVRYPALVLLQYVDDLLLAAATRTECLEGTKALLETLGNKGYRASAKKAQICLQEVTYLGYSLKDGQRWLTKARKEAILSIPVPKNSRQVREFLGTAGYCRLWIPGFAELAAPLYPLTRPGTLFQWGTEQQLAFEDIKKALLSSPALGLPDITKPFELFIDENSGFAKGVLVQKLGPWKRPVAYLSKKLDTVASGWPPCLRMVAAIAILVKDAGKLTLGQPLTILTSHPVEALVRQPPNKWLSNARMTHYQAMLLDAERVHFGPTVSLNPATLLPLPSGGNHHDCLQILAETHGTRPDLTDQPLPDADLTWYTDGSSFIRNGEREAGAAVTTESEVIWAAPLPPGTSAQRAELIALTQALKMAEGKKLTVYTDSRYAFATTHVHGEIYRRRGWLTSEGKEIKNKNEILALLEALFLPKRLSIIHCPGHQKGDSPQAKGNRLADDTAKKAATETHSSLTVLPAGKRTADGSEFEKRTADGSEFESPKKKAKVE

SEQ ID NO: 7692 - protein, 2011 aa, synthetic construct
MPAAKRVKLDGGDKKYSIGLDIGTNSVGWAVITDEYKVPSKKFKVLGNTDRHSIKKNLIGALLFDSGETAEATRLKRTARRRYTRRKNRICYLQEIFSNEMAKVDDSFFHRLEESFLVEEDKKHERHPIFGNIVDEVAYHEKYPTIYHLRKKLVDSTDKADLRLIYLALAHMIKFRGHFLIEGDLNPDNSDVDKLFIQLVQTYNQLFEENPINASGVDAKAILSARLSKSRRLENLIAQLPGEKKNGLFGNLIALSLGLTPNFKSNFDLAEDAKLQLSKDTYDDDLDNLLAQIGDQYADLFLAAKNLSDAILLSDILRVNTEITKAPLSASMIKRYDEHHQDLTLLKALVRQQLPEKYKEIFFDQSKNGYAGYIDGGASQEEFYKFIKPILEKMDGTEELLVKLNREDLLRKQRTFDNGSIPHQIHLGELHAILRRQEDFYPFLKDNREKIEKILTFRIPYYVGPLARGNSRFAWMTRKSEETITPWNFEEVVDKGASAQSFIERMTNFDKNLPNEKVLPKHSLLYEYFTVYNELTKVKYVTEGMRKPAFLSGEQKKAIVDLLFKTNRKVTVKQLKEDYFKKIECFDSVEISGVEDRFNASLGTYHDLLKIIKDKDFLDNEENEDILEDIVLTLTLFEDREMIEERLKTYAHLFDDKVMKQLKRRRYTGWGRLSRKLINGIRDKQSGKTILDFLKSDGFANRNFMQLIHDDSLTFKEDIQKAQVSGQGDSLHEHIANLAGSPAIKKGILQTVKVVDELVKVMGRHKPENIVIEMARENQTTQKGQKNSRERMKRIEEGIKELGSQILKEHPVENTQLQNEKLYLYYLQNGRDMYVDQELDINRLSDYDVDHIVPQSFLKDDSIDNKVLTRSDKARGKSDNVPSEEVVKKMKNYWRQLLNAKLITQRKFDNLTKAERGGLSELDKAGFIKRQLVETRQITKHVAQILDSRMNTKYDENDKLIREVKVITLKSKLVSDFRKDFQFYKVREINNYHHAHDAYLNAVVGTALIKKYPKLESEFVYGDYKVYDVRKMIAKSEQEIGKATAKYFFYSNIMNFFKTEITLANGEIRKRPLIETNGETGEIVWDKGRDFATVRKVLSMPQVNIVKKTEVQTGGFSKESILPKRNSDKLIARKKDWDPKKYGGFDSPTVAYSVLVVAKVEKGKSKKLKSVKELLGITIMERSSFEKNPIDFLEAKGYKEVKKDLIIKLPKYSLFELENGRKRMLASAGELQKGNELALPSKYVNFLYLASHYEKLKGSPEDNEQKQLFVEQHKHYLDEIIEQISEFSKRVILADANLDKVLSAYNKHRDKPIREQAENIIHLFTLTNLGAPAAFKYFDTTIDRKRYTSTKEVLDATLIHQSITGLYETRIDLSQLGGDGGSGSETPGTSESATPESGGPLGTSDSPVTHADPIDWKSEEPVWVDQWPLTQEKLSAAQQLVQEQLRLGHIEPSTSAWNSPIFVIKKKSGKWRLLQDLRKVNETMMHMGALQPGLPTPSPIPDKSYIIVIDLKDCFYTIPLAPQDCKRFAFSLPSVNFKEPMQRYQWRVLPQGMTNSPTLCQKFVATAIAPVRQRFPQLYLVHYMDDILLAHTDEHLLYQAFSILKQHLSLNGLVIADEKIQTHFPYNYLGFSLYPRVYNTQLVKLQTDHLKTLNDFQKLLGDINWIRPYLKLPTYTLQPLFDILKGDSDPASPRTLSLEGRTALQSIEEAIRQQQITYCDYQRSWGLYILPTPRAPTGVLYQDKPLRWIYLSATPTKHLLPYYELVAKIIAKGRHEAIQYFGMEPPFICVPYALEQQDWLFQFSDNWSIAFANYPGQITHHYPSDKLLQFASSHAFIFPKIVRRQPIPEATLIFTDGSSNGTAALIINHQTYYAQTSFSSAQVVELFAVHQALLTVPTSFNLFTDSSYVVGALQMIETVPIIGTTSPEVLNLFTLIQQVLHCRQHPCFFGHIRAHSTLPGALVQGNHTADVLTKQVFFQSAGKRTADGSEFEKRTADGSEFESPKKKAKVE

SEQ ID NO: 7693 - protein, 2223 aa, synthetic construct
MPAAKRVKLDGGDKKYSIGLDIGTNSVGWAVITDEYKVPSKKFKVLGNTDRHSIKKNLIGALLFDSGETAEATRLKRTARRRYTRRKNRICYLQEIFSNEMAKVDDSFFHRLEESFLVEEDKKHERHPIFGNIVDEVAYHEKYPTIYHLRKKLVDSTDKADLRLIYLALAHMIKFRGHFLIEGDLNPDNSDVDKLFIQLVQTYNQLFEENPINASGVDAKAILSARLSKSRRLENLIAQLPGEKKNGLFGNLIALSLGLTPNFKSNFDLAEDAKLQLSKDTYDDDLDNLLAQIGDQYADLFLAAKNLSDAILLSDILRVNTEITKAPLSASMIKRYDEHHQDLTLLKALVRQQLPEKYKEIFFDQSKNGYAGYIDGGASQEEFYKFIKPILEKMDGTEELLVKLNREDLLRKQRTFDNGSIPHQIHLGELHAILRRQEDFYPFLKDNREKIEKILTFRIPYYVGPLARGNSRFAWMTRKSEETITPWNFEEVVDKGASAQSFIERMTNFDKNLPNEKVLPKHSLLYEYFTVYNELTKVKYVTEGMRKPAFLSGEQKKAIVDLLFKTNRKVTVKQLKEDYFKKIECFDSVEISGVEDRFNASLGTYHDLLKIIKDKDFLDNEENEDILEDIVLTLTLFEDREMIEERLKTYAHLFDDKVMKQLKRRRYTGWGRLSRKLINGIRDKQSGKTILDFLKSDGFANRNFMQLIHDDSLTFKEDIQKAQVSGQGDSLHEHIANLAGSPAIKKGILQTVKVVDELVKVMGRHKPENIVIEMARENQTTQKGQKNSRERMKRIEEGIKELGSQILKEHPVENTQLQNEKLYLYYLQNGRDMYVDQELDINRLSDYDVDHIVPQSFLKDDSIDNKVLTRSDKARGKSDNVPSEEVVKKMKNYWRQLLNAKLITQRKFDNLTKAERGGLSELDKAGFIKRQLVETRQITKHVAQILDSRMNTKYDENDKLIREVKVITLKSKLVSDFRKDFQFYKVREINNYHHAHDAYLNAVVGTALIKKYPKLESEFVYGDYKVYDVRKMIAKSEQEIGKATAKYFFYSNIMNFFKTEITLANGEIRKRPLIETNGETGEIVWDKGRDFATVRKVLSMPQVNIVKKTEVQTGGFSKESILPKRNSDKLIARKKDWDPKKYGGFDSPTVAYSVLVVAKVEKGKSKKLKSVKELLGITIMERSSFEKNPIDFLEAKGYKEVKKDLIIKLPKYSLFELENGRKRMLASAGELQKGNELALPSKYVNFLYLASHYEKLKGSPEDNEQKQLFVEQHKHYLDEIIEQISEFSKRVILADANLDKVLSAYNKHRDKPIREQAENIIHLFTLTNLGAPAAFKYFDTTIDRKRYTSTKEVLDATLIHQSITGLYETRIDLSQLGGDGGSGSETPGTSESATPESGGTLGDQGSRGSDPLPEPRVTLTVEGIPTEFLVNTGAEHSVLTKPMGKMGSKRTVVAGATGSKVYPWTTKRLLKIGQKQVTHSFLVIPECPAPLLGRDLLTKLKAQIQFSTEGPQVTWEDRPAMCLVLNLEEEYRLHEKPVPPSIDPSWLQLFPMVWAEKAGMGLANQVPPVVVELKSDASPVAVRQYPMSKEAREGIRPHIQRFLDLGILVPCQSPWNTPLLPVKKPGTNDYRPVQDLREVNKRVQDIHPTVPNPYNLLSSLPPSHTWYSVLDLKDAFFCLKLHPNSQPLFAFEWRDPEKGNTGQLTWTRLPQGFKNSPTLFDEALHRDLASFRALNPQVVMLQYVDDLLVAAPTYRDCKEGTRRLLQELSKLGYRVSAKKAQLCREEVTYLGYLLKGGKRWLTPARKATVMKIPTPTTPRQVREFLGTAGFCRLWIPGFASLAAPLYPLTREKVPFTWTEAHQEAFGRIKEALLSAPALALPDLTKPFALYVDEKEGVARGVLTQTLGPWRRPVAYLSKKLDPVASGWPTCLKAIAAVALLLKDADKLTLGQNVLVIAPHNLESIVRQPPDRWMTNARMTHYQSLLLNERVSFAPPAILNPATLLPVESDDTPIHICSEILAEETGTRPDLRDQPLPGVPAWYTDGSSFIMDGRRQAGAAIVDNKRTVWASNLPEGTSAQKAELIALTQALRLAEGKSINIYTDSRYAFATAHVHGAIYKQRGLLTSAGKDIKNKEEILALLEAIHLPKRVAIIHCPGHQRGTDPVATGNRKADEAAKQAAQSTRILTETTKNAGKRTADGSEFEKRTADGSEFESPKKKAKVE

SEQ ID NO: 7694 - protein, 2132 aa, synthetic construct
MPAAKRVKLDGGDKKYSIGLDIGTNSVGWAVITDEYKVPSKKFKVLGNTDRHSIKKNLIGALLFDSGETAEATRLKRTARRRYTRRKNRICYLQEIFSNEMAKVDDSFFHRLEESFLVEEDKKHERHPIFGNIVDEVAYHEKYPTIYHLRKKLVDSTDKADLRLIYLALAHMIKFRGHFLIEGDLNPDNSDVDKLFIQLVQTYNQLFEENPINASGVDAKAILSARLSKSRRLENLIAQLPGEKKNGLFGNLIALSLGLTPNFKSNFDLAEDAKLQLSKDTYDDDLDNLLAQIGDQYADLFLAAKNLSDAILLSDILRVNTEITKAPLSASMIKRYDEHHQDLTLLKALVRQQLPEKYKEIFFDQSKNGYAGYIDGGASQEEFYKFIKPILEKMDGTEELLVKLNREDLLRKQRTFDNGSIPHQIHLGELHAILRRQEDFYPFLKDNREKIEKILTFRIPYYVGPLARGNSRFAWMTRKSEETITPWNFEEVVDKGASAQSFIERMTNFDKNLPNEKVLPKHSLLYEYFTVYNELTKVKYVTEGMRKPAFLSGEQKKAIVDLLFKTNRKVTVKQLKEDYFKKIECFDSVEISGVEDRFNASLGTYHDLLKIIKDKDFLDNEENEDILEDIVLTLTLFEDREMIEERLKTYAHLFDDKVMKQLKRRRYTGWGRLSRKLINGIRDKQSGKTILDFLKSDGFANRNFMQLIHDDSLTFKEDIQKAQVSGQGDSLHEHIANLAGSPAIKKGILQTVKVVDELVKVMGRHKPENIVIEMARENQTTQKGQKNSRERMKRIEEGIKELGSQILKEHPVENTQLQNEKLYLYYLQNGRDMYVDQELDINRLSDYDVDHIVPQSFLKDDSIDNKVLTRSDKARGKSDNVPSEEVVKKMKNYWRQLLNAKLITQRKFDNLTKAERGGLSELDKAGFIKRQLVETRQITKHVAQILDSRMNTKYDENDKLIREVKVITLKSKLVSDFRKDFQFYKVREINNYHHAHDAYLNAVVGTALIKKYPKLESEFVYGDYKVYDVRKMIAKSEQEIGKATAKYFFYSNIMNFFKTEITLANGEIRKRPLIETNGETGEIVWDKGRDFATVRKVLSMPQVNIVKKTEVQTGGFSKESILPKRNSDKLIARKKDWDPKKYGGFDSPTVAYSVLVVAKVEKGKSKKLKSVKELLGITIMERSSFEKNPIDFLEAKGYKEVKKDLIIKLPKYSLFELENGRKRMLASAGELQKGNELALPSKYVNFLYLASHYEKLKGSPEDNEQKQLFVEQHKHYLDEIIEQISEFSKRVILADANLDKVLSAYNKHRDKPIREQAENIIHLFTLTNLGAPAAFKYFDTTIDRKRYTSTKEVLDATLIHQSITGLYETRIDLSQLGGDGGSGSETPGTSESATPESGGLLGRDLLTKLKAQIQFSTEGPQVTWEDRPAMCLVLNLEEEYRLHEKPVPPSIDPSWLQLFPMVWAEKAGMGLANQVPPVVVELKSDASPVAVRQYPMSKEAREGIRPHIQRFLDLGILVPCQSPWNTPLLPVKKPGTNDYRPVQDLREVNKRVQDIHPTVPNPYNLLSSLPPSHTWYSVLDLKDAFFCLKLHPNSQPLFAFEWRDPEKGNTGQLTWTRLPQGFKNSPTLFNEALHRDLASFRALNPQVVMLQYVDDLLVAAPTYRDCKEGTRRLLQELSKLGYRVSAKKAQLCREEVTYLGYLLKGGKRWLTPARKATVMKIPTPTTPRQVREFLGKAGFCRLFIPGFASLAAPLYPLTRPKVPFTWTEAHQEAFGRIKEALLSAPALALPDLTKPFALYVDEKEGVARGVLTQTLGPWRRPVAYLSKKLDPVASGWPTCLKAIAAVALLLKDADKLTLGQNVLVIAPHNLESIVRQPPDRWMTNARMTHYQSLLLNERVSFAPPAILNPATLLPVESDDTPIHICSEILAEETGTRPDLRDQPLPGVPAWYTDGSSFIMDGRRQAGAAIVDNKRTVWASNLPEGTSAQKAELIALTQALRLAEGKSINIYTDSRYAFATAHVHGAIYKQRGWLTSAGKDIKNKEEILALLEAIHLPKRVAIIHCPGHQRGTDPVATGNRKADEAAKQAAQSTRILTETTKNAGKRTADGSEFEKRTADGSEFESPKKKAKVE

SEQ ID NO: 7695 - protein, 2223 aa, synthetic construct
MPAAKRVKLDGGDKKYSIGLDIGTNSVGWAVITDEYKVPSKKFKVLGNTDRHSIKKNLIGALLFDSGETAEATRLKRTARRRYTRRKNRICYLQEIFSNEMAKVDDSFFHRLEESFLVEEDKKHERHPIFGNIVDEVAYHEKYPTIYHLRKKLVDSTDKADLRLIYLALAHMIKFRGHFLIEGDLNPDNSDVDKLFIQLVQTYNQLFEENPINASGVDAKAILSARLSKSRRLENLIAQLPGEKKNGLFGNLIALSLGLTPNFKSNFDLAEDAKLQLSKDTYDDDLDNLLAQIGDQYADLFLAAKNLSDAILLSDILRVNTEITKAPLSASMIKRYDEHHQDLTLLKALVRQQLPEKYKEIFFDQSKNGYAGYIDGGASQEEFYKFIKPILEKMDGTEELLVKLNREDLLRKQRTFDNGSIPHQIHLGELHAILRRQEDFYPFLKDNREKIEKILTFRIPYYVGPLARGNSRFAWMTRKSEETITPWNFEEVVDKGASAQSFIERMTNFDKNLPNEKVLPKHSLLYEYFTVYNELTKVKYVTEGMRKPAFLSGEQKKAIVDLLFKTNRKVTVKQLKEDYFKKIECFDSVEISGVEDRFNASLGTYHDLLKIIKDKDFLDNEENEDILEDIVLTLTLFEDREMIEERLKTYAHLFDDKVMKQLKRRRYTGWGRLSRKLINGIRDKQSGKTILDFLKSDGFANRNFMQLIHDDSLTFKEDIQKAQVSGQGDSLHEHIANLAGSPAIKKGILQTVKVVDELVKVMGRHKPENIVIEMARENQTTQKGQKNSRERMKRIEEGIKELGSQILKEHPVENTQLQNEKLYLYYLQNGRDMYVDQELDINRLSDYDVDHIVPQSFLKDDSIDNKVLTRSDKARGKSDNVPSEEVVKKMKNYWRQLLNAKLITQRKFDNLTKAERGGLSELDKAGFIKRQLVETRQITKHVAQILDSRMNTKYDENDKLIREVKVITLKSKLVSDFRKDFQFYKVREINNYHHAHDAYLNAVVGTALIKKYPKLESEFVYGDYKVYDVRKMIAKSEQEIGKATAKYFFYSNIMNFFKTEITLANGEIRKRPLIETNGETGEIVWDKGRDFATVRKVLSMPQVNIVKKTEVQTGGFSKESILPKRNSDKLIARKKDWDPKKYGGFDSPTVAYSVLVVAKVEKGKSKKLKSVKELLGITIMERSSFEKNPIDFLEAKGYKEVKKDLIIKLPKYSLFELENGRKRMLASAGELQKGNELALPSKYVNFLYLASHYEKLKGSPEDNEQKQLFVEQHKHYLDEIIEQISEFSKRVILADANLDKVLSAYNKHRDKPIREQAENIIHLFTLTNLGAPAAFKYFDTTIDRKRYTSTKEVLDATLIHQSITGLYETRIDLSQLGGDGGSGSETPGTSESATPESGGTLGDQGSRGSDPLPEPRVTLTVEGIPTEFLVNTGAEHSVLTKPMGKMGSKRTVVAGATGSKVYPWTTKRLLKIGQKQVTHSFLVIPECPAPLLGRDLLTKLKAQIQFSTEGPQVTWEDRPAMCLVLNLEEEYRLHEKPVPPSIDPSWLQLFPMVWAEKAGMGLANQVPPVVVELKSDASPVAVRQYPMSKEAREGIRPHIQRFLDLGILVPCQSPWNTPLLPVKKPGTNDYRPVQDLREVNKRVQDIHPTVPNPYNLLSSLPPSHTWYSVLDLKDAFFCLKLHPNSQPLFAFEWRDPEKGNTGQLTWTRLPQGFKNSPTLFNEALHRDLASFRALNPQVVMLQYVDDLLVAAPTYRDCKEGTRRLLQELSKLGYRVSAKKAQLCREEVTYLGYLLKGGKRWLTPARKATVMKIPTPTTPRQVREFLGTAGFCRLWIPGFASLAAPLYPLTRPKVPFTWTEAHQEAFGRIKEALLSAPALALPDLTKPFALYVDEKEGVARGVLTQTLGPWRRPVAYLSKKLDPVASGWPTCLKAIAAVALLLKDADKLTLGQNVLVIAPHNLESIVRQPPDRWMTNARMTHYQSLLLNERVSFAPPAILNPATLLPVESDDTPIHICSEILAEETGTRPDLRDQPLPGVPAWYTDGSSFIMDGRRQAGAAIVDNKRTVWASNLPEGTSAQKAELIALTQALRLAEGKSINIYTDSRYAFATAHVHGAIYKQRGWLTSAGKDIKNKEEILALLEAIHLPKRVAIIHCPGHQRGTDPVATGNRKADEAAKQAAQSTRILTETTKNAGKRTADGSEFEKRTADGSEFESPKKKAKVE

SEQ ID NO: 7696 - protein, 2101 aa, synthetic construct
MPAAKRVKLDGGDKKYSIGLDIGTNSVGWAVITDEYKVPSKKFKVLGNTDRHSIKKNLIGALLFDSGETAEATRLKRTARRRYTRRKNRICYLQEIFSNEMAKVDDSFFHRLEESFLVEEDKKHERHPIFGNIVDEVAYHEKYPTIYHLRKKLVDSTDKADLRLIYLALAHMIKFRGHFLIEGDLNPDNSDVDKLFIQLVQTYNQLFEENPINASGVDAKAILSARLSKSRRLENLIAQLPGEKKNGLFGNLIALSLGLTPNFKSNFDLAEDAKLQLSKDTYDDDLDNLLAQIGDQYADLFLAAKNLSDAILLSDILRVNTEITKAPLSASMIKRYDEHHQDLTLLKALVRQQLPEKYKEIFFDQSKNGYAGYIDGGASQEEFYKFIKPILEKMDGTEELLVKLNREDLLRKQRTFDNGSIPHQIHLGELHAILRRQEDFYPFLKDNREKIEKILTFRIPYYVGPLARGNSRFAWMTRKSEETITPWNFEEVVDKGASAQSFIERMTNFDKNLPNEKVLPKHSLLYEYFTVYNELTKVKYVTEGMRKPAFLSGEQKKAIVDLLFKTNRKVTVKQLKEDYFKKIECFDSVEISGVEDRFNASLGTYHDLLKIIKDKDFLDNEENEDILEDIVLTLTLFEDREMIEERLKTYAHLFDDKVMKQLKRRRYTGWGRLSRKLINGIRDKQSGKTILDFLKSDGFANRNFMQLIHDDSLTFKEDIQKAQVSGQGDSLHEHIANLAGSPAIKKGILQTVKVVDELVKVMGRHKPENIVIEMARENQTTQKGQKNSRERMKRIEEGIKELGSQILKEHPVENTQLQNEKLYLYYLQNGRDMYVDQELDINRLSDYDVDHIVPQSFLKDDSIDNKVLTRSDKARGKSDNVPSEEVVKKMKNYWRQLLNAKLITQRKFDNLTKAERGGLSELDKAGFIKRQLVETRQITKHVAQILDSRMNTKYDENDKLIREVKVITLKSKLVSDFRKDFQFYKVREINNYHHAHDAYLNAVVGTALIKKYPKLESEFVYGDYKVYDVRKMIAKSEQEIGKATAKYFFYSNIMNFFKTEITLANGEIRKRPLIETNGETGEIVWDKGRDFATVRKVLSMPQVNIVKKTEVQTGGFSKESILPKRNSDKLIARKKDWDPKKYGGFDSPTVAYSVLVVAKVEKGKSKKLKSVKELLGITIMERSSFEKNPIDFLEAKGYKEVKKDLIIKLPKYSLFELENGRKRMLASAGELQKGNELALPSKYVNFLYLASHYEKLKGSPEDNEQKQLFVEQHKHYLDEIIEQISEFSKRVILADANLDKVLSAYNKHRDKPIREQAENIIHLFTLTNLGAPAAFKYFDTTIDRKRYTSTKEVLDATLIHQSITGLYETRIDLSQLGGDGGSGSETPGTSESATPESGGTLNLEDEYRLYETSAEPEVSPGSTWLSDFPQAWAETGGMGLAVRQAPLIIPLKATSTPVSIKQYPMSQEAKLGIKPHIQRLLDQGILVPCQSPWNTPLLPVKKPGTNDYRPVQDLREVNKRVEDIHPTVPNPYNLLSGLPPSHRWYTVLDLKDAFFCLRLHPTSQPLFAFEWRDPGMGISGQLTWTRLPQGFKNSPTLFNEALHRDLADFRIQHPDLILLQYVDDILLAATSELDCQQGTRALLLTLGNLGYRASAKKAQLCQKQVKYLGYLLKEGQRWLTEARKETVMGQPTPKTPRQLREFLGTAGFCRLWIPGFAEMAAPLYPLTKPGTLFNWGPDQQKAYQEIKQALLTAPALGLPDLTKPFELFVDEKQGYAKGVLTQKLGPWRRPVAYLSKKLDPVAAGWPPCLRMVAAIAVLRKDAGKLTMGQPLVILAPHAVEALVKQPPDRWLSNARMTHYQAMLLDTDRVQFGPVVALNPATLLPLPEEGAPHDCLEILAETHGTRPDLTDQPIPDADHTWYTDGSSFLQEGQRKAGAAVTTETEVIWARALPAGTSAQRAELIALTQALKMAEGKRLNVYTDSRYAFATAHIHGEIYRRRGWLTSEGREIKNKSEILALLKALFLPKRLSIIHCLGHQKGDSAEARGNRLADQAAREAAIKTPPDTSTLLAGKRTADGSEFEKRTADGSEFESPKKKAKVE

SEQ ID NO: 7697 - protein, 2101 aa, synthetic construct
MPAAKRVKLDGGDKKYSIGLDIGTNSVGWAVITDEYKVPSKKFKVLGNTDRHSIKKNLIGALLFDSGETAEATRLKRTARRRYTRRKNRICYLQEIFSNEMAKVDDSFFHRLEESFLVEEDKKHERHPIFGNIVDEVAYHEKYPTIYHLRKKLVDSTDKADLRLIYLALAHMIKFRGHFLIEGDLNPDNSDVDKLFIQLVQTYNQLFEENPINASGVDAKAILSARLSKSRRLENLIAQLPGEKKNGLFGNLIALSLGLTPNFKSNFDLAEDAKLQLSKDTYDDDLDNLLAQIGDQYADLFLAAKNLSDAILLSDILRVNTEITKAPLSASMIKRYDEHHQDLTLLKALVRQQLPEKYKEIFFDQSKNGYAGYIDGGASQEEFYKFIKPILEKMDGTEELLVKLNREDLLRKQRTFDNGSIPHQIHLGELHAILRRQEDFYPFLKDNREKIEKILTFRIPYYVGPLARGNSRFAWMTRKSEETITPWNFEEVVDKGASAQSFIERMTNFDKNLPNEKVLPKHSLLYEYFTVYNELTKVKYVTEGMRKPAFLSGEQKKAIVDLLFKTNRKVTVKQLKEDYFKKIECFDSVEISGVEDRFNASLGTYHDLLKIIKDKDFLDNEENEDILEDIVLTLTLFEDREMIEERLKTYAHLFDDKVMKQLKRRRYTGWGRLSRKLINGIRDKQSGKTILDFLKSDGFANRNFMQLIHDDSLTFKEDIQKAQVSGQGDSLHEHIANLAGSPAIKKGILQTVKVVDELVKVMGRHKPENIVIEMARENQTTQKGQKNSRERMKRIEEGIKELGSQILKEHPVENTQLQNEKLYLYYLQNGRDMYVDQELDINRLSDYDVDHIVPQSFLKDDSIDNKVLTRSDKARGKSDNVPSEEVVKKMKNYWRQLLNAKLITQRKFDNLTKAERGGLSELDKAGFIKRQLVETRQITKHVAQILDSRMNTKYDENDKLIREVKVITLKSKLVSDFRKDFQFYKVREINNYHHAHDAYLNAVVGTALIKKYPKLESEFVYGDYKVYDVRKMIAKSEQEIGKATAKYFFYSNIMNFFKTEITLANGEIRKRPLIETNGETGEIVWDKGRDFATVRKVLSMPQVNIVKKTEVQTGGFSKESILPKRNSDKLIARKKDWDPKKYGGFDSPTVAYSVLVVAKVEKGKSKKLKSVKELLGITIMERSSFEKNPIDFLEAKGYKEVKKDLIIKLPKYSLFELENGRKRMLASAGELQKGNELALPSKYVNFLYLASHYEKLKGSPEDNEQKQLFVEQHKHYLDEIIEQISEFSKRVILADANLDKVLSAYNKHRDKPIREQAENIIHLFTLTNLGAPAAFKYFDTTIDRKRYTSTKEVLDATLIHQSITGLYETRIDLSQLGGDGGSGSETPGTSESATPESGGTLNLEDEYRLYETSAEPEVSPGSTWLSDFPQAWAETGGMGLAVRQAPLIIPLKATSTPVSIKQYPMSQEAKLGIKPHIQRLLDQGILVPCQSPWNTPLLPVKKPGTNDYRPVQDLREVNKRVEDIHPTVPNPYNLLSGLPPSHRWYTVLDLKDAFFCLRLHPTSQPLFAFEWRDPGMGISGQLTWTRLPQGFKNSPTLFNEALHRDLADFRIQHPDLILLQYVDDILLAATSELDCQQGTRALLLTLGNLGYRASAKKAQLCQKQVKYLGYLLKEGQRWLTEARKETVMGQPTPKTPRQLREFLGKAGFCRLFIPGFAEMAAPLYPLTKPGTLFNWGPDQQKAYQEIKQALLTAPALGLPDLTKPFELFVDEKQGYAKGVLTQKLGPWRRPVAYLSKKLDPVAAGWPPCLRMVAAIAVLRKDAGKLTMGQPLVILAPHAVEALVKQPPDRWLSNARMTHYQAMLLDTDRVQFGPVVALNPATLLPLPEEGAPHDCLEILAETHGTRPDLTDQPIPDADHTWYTDGSSFLQEGQRKAGAAVTTETEVIWARALPAGTSAQRAELIALTQALKMAEGKRLNVYTDSRYAFATAHIHGEIYRRRGWLTSEGREIKNKSEILALLKALFLPKRLSIIHCLGHQKGDSAEARGNRLADQAAREAAIKTPPDTSTLLAGKRTADGSEFEKRTADGSEFESPKKKAKVE

SEQ ID NO: 7698 - protein, 2101 aa, synthetic construct
MPAAKRVKLDGGDKKYSIGLDIGTNSVGWAVITDEYKVPSKKFKVLGNTDRHSIKKNLIGALLFDSGETAEATRLKRTARRRYTRRKNRICYLQEIFSNEMAKVDDSFFHRLEESFLVEEDKKHERHPIFGNIVDEVAYHEKYPTIYHLRKKLVDSTDKADLRLIYLALAHMIKFRGHFLIEGDLNPDNSDVDKLFIQLVQTYNQLFEENPINASGVDAKAILSARLSKSRRLENLIAQLPGEKKNGLFGNLIALSLGLTPNFKSNFDLAEDAKLQLSKDTYDDDLDNLLAQIGDQYADLFLAAKNLSDAILLSDILRVNTEITKAPLSASMIKRYDEHHQDLTLLKALVRQQLPEKYKEIFFDQSKNGYAGYIDGGASQEEFYKFIKPILEKMDGTEELLVKLNREDLLRKQRTFDNGSIPHQIHLGELHAILRRQEDFYPFLKDNREKIEKILTFRIPYYVGPLARGNSRFAWMTRKSEETITPWNFEEVVDKGASAQSFIERMTNFDKNLPNEKVLPKHSLLYEYFTVYNELTKVKYVTEGMRKPAFLSGEQKKAIVDLLFKTNRKVTVKQLKEDYFKKIECFDSVEISGVEDRFNASLGTYHDLLKIIKDKDFLDNEENEDILEDIVLTLTLFEDREMIEERLKTYAHLFDDKVMKQLKRRRYTGWGRLSRKLINGIRDKQSGKTILDFLKSDGFANRNFMQLIHDDSLTFKEDIQKAQVSGQGDSLHEHIANLAGSPAIKKGILQTVKVVDELVKVMGRHKPENIVIEMARENQTTQKGQKNSRERMKRIEEGIKELGSQILKEHPVENTQLQNEKLYLYYLQNGRDMYVDQELDINRLSDYDVDHIVPQSFLKDDSIDNKVLTRSDKARGKSDNVPSEEVVKKMKNYWRQLLNAKLITQRKFDNLTKAERGGLSELDKAGFIKRQLVETRQITKHVAQILDSRMNTKYDENDKLIREVKVITLKSKLVSDFRKDFQFYKVREINNYHHAHDAYLNAVVGTALIKKYPKLESEFVYGDYKVYDVRKMIAKSEQEIGKATAKYFFYSNIMNFFKTEITLANGEIRKRPLIETNGETGEIVWDKGRDFATVRKVLSMPQVNIVKKTEVQTGGFSKESILPKRNSDKLIARKKDWDPKKYGGFDSPTVAYSVLVVAKVEKGKSKKLKSVKELLGITIMERSSFEKNPIDFLEAKGYKEVKKDLIIKLPKYSLFELENGRKRMLASAGELQKGNELALPSKYVNFLYLASHYEKLKGSPEDNEQKQLFVEQHKHYLDEIIEQISEFSKRVILADANLDKVLSAYNKHRDKPIREQAENIIHLFTLTNLGAPAAFKYFDTTIDRKRYTSTKEVLDATLIHQSITGLYETRIDLSQLGGDGGSGSETPGTSESATPESGGTLGIEDEYRLHETSTEPDVSLGSTWLSDFPQAWAETGGMGLAVRQAPLIIPLKATSTPVSIQQYPMSHEARLGIKPHIQRLLDQGILVPCQSPWNTPLLPVKKPGTNDYRPVQDLREVNKRVEDIHPTVPNPYNLLSGLPPSHQWYTVLDLKDAFFCLRLHPTSQPLFAFEWRDPGMGISGQLTWTRLPQGFKNSPTLFNEALHRDLADFRIQHPDLILLQYVDDILLAATSELDCQQGTRALLQTLGDLGYRASAKKAQICQKQVKYLGYLLREGQRWLTEARKETVMGQPVPKTPRQLREFLGTAGFCRLWIPGFAEMAAPLYPLTKPGTLFSWGPDQQKAYQEIKQALLTAPALGLPDLTKPFELFVDEKQGYAKGVLTQKLGPWRRPVAYLSKKLDPVAAGWPPCLRMVAAIAVLTKDAGKLTMGQPLVILAPHAVEALVKQPPDRWLSNARMTHYQAMLLDTDRVQFGPVVALNPATLLPLPEEGAPHDCLEILAETHGTRPDLTDQPIPDADHTWYTDGSSFLQEGQRKAGAAVTTETEVIWAGALPAGTSAQRAELIALTQALKMAEGKRLNVYTDSRYAFATAHIHGEIYRRRGWLTSEGREIKNKSEILALLKALFLPKRLSIIHCLGHQKGDSAEARGNRLADQAAREAAIKTPPDTSTLLAGKRTADGSEFEKRTADGSEFESPKKKAKVE

SEQ ID NO: 7699 - protein, 2101 aa, synthetic construct
MPAAKRVKLDGGDKKYSIGLDIGTNSVGWAVITDEYKVPSKKFKVLGNTDRHSIKKNLIGALLFDSGETAEATRLKRTARRRYTRRKNRICYLQEIFSNEMAKVDDSFFHRLEESFLVEEDKKHERHPIFGNIVDEVAYHEKYPTIYHLRKKLVDSTDKADLRLIYLALAHMIKFRGHFLIEGDLNPDNSDVDKLFIQLVQTYNQLFEENPINASGVDAKAILSARLSKSRRLENLIAQLPGEKKNGLFGNLIALSLGLTPNFKSNFDLAEDAKLQLSKDTYDDDLDNLLAQIGDQYADLFLAAKNLSDAILLSDILRVNTEITKAPLSASMIKRYDEHHQDLTLLKALVRQQLPEKYKEIFFDQSKNGYAGYIDGGASQEEFYKFIKPILEKMDGTEELLVKLNREDLLRKQRTFDNGSIPHQIHLGELHAILRRQEDFYPFLKDNREKIEKILTFRIPYYVGPLARGNSRFAWMTRKSEETITPWNFEEVVDKGASAQSFIERMTNFDKNLPNEKVLPKHSLLYEYFTVYNELTKVKYVTEGMRKPAFLSGEQKKAIVDLLFKTNRKVTVKQLKEDYFKKIECFDSVEISGVEDRFNASLGTYHDLLKIIKDKDFLDNEENEDILEDIVLTLTLFEDREMIEERLKTYAHLFDDKVMKQLKRRRYTGWGRLSRKLINGIRDKQSGKTILDFLKSDGFANRNFMQLIHDDSLTFKEDIQKAQVSGQGDSLHEHIANLAGSPAIKKGILQTVKVVDELVKVMGRHKPENIVIEMARENQTTQKGQKNSRERMKRIEEGIKELGSQILKEHPVENTQLQNEKLYLYYLQNGRDMYVDQELDINRLSDYDVDHIVPQSFLKDDSIDNKVLTRSDKARGKSDNVPSEEVVKKMKNYWRQLLNAKLITQRKFDNLTKAERGGLSELDKAGFIKRQLVETRQITKHVAQILDSRMNTKYDENDKLIREVKVITLKSKLVSDFRKDFQFYKVREINNYHHAHDAYLNAVVGTALIKKYPKLESEFVYGDYKVYDVRKMIAKSEQEIGKATAKYFFYSNIMNFFKTEITLANGEIRKRPLIETNGETGEIVWDKGRDFATVRKVLSMPQVNIVKKTEVQTGGFSKESILPKRNSDKLIARKKDWDPKKYGGFDSPTVAYSVLVVAKVEKGKSKKLKSVKELLGITIMERSSFEKNPIDFLEAKGYKEVKKDLIIKLPKYSLFELENGRKRMLASAGELQKGNELALPSKYVNFLYLASHYEKLKGSPEDNEQKQLFVEQHKHYLDEIIEQISEFSKRVILADANLDKVLSAYNKHRDKPIREQAENIIHLFTLTNLGAPAAFKYFDTTIDRKRYTSTKEVLDATLIHQSITGLYETRIDLSQLGGDGGSGSETPGTSESATPESGGTLNIEDEYRLHETSKEPDVSLGSTWLSDFPQAWAETGGMGLAVRQAPLIIPLKATSTPVSIKQYPMSQEARLGIKPHIQRLLDQGILVPCQSPWNTPLLPVKKPGTNDYRPVQDLREVNKRVEDIHPTVPNPYNLLSGLPPSHQWYTVLDLKDAFFCLRLHPTSQPLFAFEWRDPEMGISGQLTWTRLPQGFKNSPTLFNEALHRDLAGFRIQHPDLILLQYVDDLLLAATSELDCQQGTRALLQTLGDLGYRASAKKAQICQKQVKYLGYLLKEGQRWLTEARKETVMGQPIPKTPRQLREFLGTAGFCRLWIPGFAEMAAPLYPLTKPGTLFNWGPDQQKAFQEIKQALLTAPALGLPDLTKPFELFVDEKQGYAKGVLTQKLGPWRRPVAYLSKKLDPVAAGWPPCLRMVAAIAVLTKDAGKLTMGQPLVILAPHAVEALVKQPPDRWLSNARMTHYQALLLDTDRVQFGPVVALNPATLLPLPEEGLQHDCLDILAEAHGTRSDLMDQPLPDADHTWYTDGSSFLQEGQRKAGAAVTTETEVIWARALPAGTSAQRAELIALTQALKMAEGKKLNVYTDSRYAFATAHIHGEIYRRRGWLTSEGKEIKNKDEILALLKALFLPKRLSIIHCPGHQKGNSAEARGNRMADQAAREVATRETPETSTLLAGKRTADGSEFEKRTADGSEFESPKKKAKVE

SEQ ID NO: 7700 - protein, 2101 aa, synthetic construct
MPAAKRVKLDGGDKKYSIGLDIGTNSVGWAVITDEYKVPSKKFKVLGNTDRHSIKKNLIGALLFDSGETAEATRLKRTARRRYTRRKNRICYLQEIFSNEMAKVDDSFFHRLEESFLVEEDKKHERHPIFGNIVDEVAYHEKYPTIYHLRKKLVDSTDKADLRLIYLALAHMIKFRGHFLIEGDLNPDNSDVDKLFIQLVQTYNQLFEENPINASGVDAKAILSARLSKSRRLENLIAQLPGEKKNGLFGNLIALSLGLTPNFKSNFDLAEDAKLQLSKDTYDDDLDNLLAQIGDQYADLFLAAKNLSDAILLSDILRVNTEITKAPLSASMIKRYDEHHQDLTLLKALVRQQLPEKYKEIFFDQSKNGYAGYIDGGASQEEFYKFIKPILEKMDGTEELLVKLNREDLLRKQRTFDNGSIPHQIHLGELHAILRRQEDFYPFLKDNREKIEKILTFRIPYYVGPLARGNSRFAWMTRKSEETITPWNFEEVVDKGASAQSFIERMTNFDKNLPNEKVLPKHSLLYEYFTVYNELTKVKYVTEGMRKPAFLSGEQKKAIVDLLFKTNRKVTVKQLKEDYFKKIECFDSVEISGVEDRFNASLGTYHDLLKIIKDKDFLDNEENEDILEDIVLTLTLFEDREMIEERLKTYAHLFDDKVMKQLKRRRYTGWGRLSRKLINGIRDKQSGKTILDFLKSDGFANRNFMQLIHDDSLTFKEDIQKAQVSGQGDSLHEHIANLAGSPAIKKGILQTVKVVDELVKVMGRHKPENIVIEMARENQTTQKGQKNSRERMKRIEEGIKELGSQILKEHPVENTQLQNEKLYLYYLQNGRDMYVDQELDINRLSDYDVDHIVPQSFLKDDSIDNKVLTRSDKARGKSDNVPSEEVVKKMKNYWRQLLNAKLITQRKFDNLTKAERGGLSELDKAGFIKRQLVETRQITKHVAQILDSRMNTKYDENDKLIREVKVITLKSKLVSDFRKDFQFYKVREINNYHHAHDAYLNAVVGTALIKKYPKLESEFVYGDYKVYDVRKMIAKSEQEIGKATAKYFFYSNIMNFFKTEITLANGEIRKRPLIETNGETGEIVWDKGRDFATVRKVLSMPQVNIVKKTEVQTGGFSKESILPKRNSDKLIARKKDWDPKKYGGFDSPTVAYSVLVVAKVEKGKSKKLKSVKELLGITIMERSSFEKNPIDFLEAKGYKEVKKDLIIKLPKYSLFELENGRKRMLASAGELQKGNELALPSKYVNFLYLASHYEKLKGSPEDNEQKQLFVEQHKHYLDEIIEQISEFSKRVILADANLDKVLSAYNKHRDKPIREQAENIIHLFTLTNLGAPAAFKYFDTTIDRKRYTSTKEVLDATLIHQSITGLYETRIDLSQLGGDGGSGSETPGTSESATPESGGTLNIEDEYRLHETSKGPDVPLGSTWLSDFPQAWAETGGMGLAVRQAPLIIPLKATSTPVSIKQYPMSQEARLGIKPHIQRLLDQGILVPCQSPWNTPLLPVKKPGTNDYRPVQDLREVNKRVEDIHPTVPNPYNLLSGLPPSHQWYTVLDLKDAFFCLRLHPTSQSLFAFEWRDPEMGISGQLTWTRLPQGFKNSPTLFDEALHRDLADFRIQHPDLILLQYVDDLLLAATSELDCQQGTRALLQTLGDLGYRASAKKAQICQKQVKYLGYLLKEGQRWLTEARKETVMGQPTPKTPRQLREFLGTAGFCRLWIPGFAEMAAPLYPLTKTGTLFEWGPDQQKAYQEIKQALLTAPALGLPDLTKPFELFVDEKQGYAKGVLTQKLGPWRRPVAYLSKKLDPVAAGWPPCLRMVAAIAVLTKDAGKLTMGQPLVILAPHAVEALVKQPPDRWLSNARMTHYQALLLDTDRVQFGPIVALNPATLLPLPEEGLQHDCLDILAEAHGTRPDLTDQPLPDADHTWYTDGSSFLQEGQRKAGAAVTTETEVVWAKALPAGTSAQRAELIALTQALKMAEGKKLNVYTDSRYAFATAHIHGEIYRRRGLLTSEGKEIKNKDEILALLKALFLPKRLSIIHCPGHQKGNRAEARGNRMADQAAREVATRETPETSTLLAGKRTADGSEFEKRTADGSEFESPKKKAKVE

SEQ ID NO: 7701 - protein, 2095 aa, synthetic construct
MPAAKRVKLDGGDKKYSIGLDIGTNSVGWAVITDEYKVPSKKFKVLGNTDRHSIKKNLIGALLFDSGETAEATRLKRTARRRYTRRKNRICYLQEIFSNEMAKVDDSFFHRLEESFLVEEDKKHERHPIFGNIVDEVAYHEKYPTIYHLRKKLVDSTDKADLRLIYLALAHMIKFRGHFLIEGDLNPDNSDVDKLFIQLVQTYNQLFEENPINASGVDAKAILSARLSKSRRLENLIAQLPGEKKNGLFGNLIALSLGLTPNFKSNFDLAEDAKLQLSKDTYDDDLDNLLAQIGDQYADLFLAAKNLSDAILLSDILRVNTEITKAPLSASMIKRYDEHHQDLTLLKALVRQQLPEKYKEIFFDQSKNGYAGYIDGGASQEEFYKFIKPILEKMDGTEELLVKLNREDLLRKQRTFDNGSIPHQIHLGELHAILRRQEDFYPFLKDNREKIEKILTFRIPYYVGPLARGNSRFAWMTRKSEETITPWNFEEVVDKGASAQSFIERMTNFDKNLPNEKVLPKHSLLYEYFTVYNELTKVKYVTEGMRKPAFLSGEQKKAIVDLLFKTNRKVTVKQLKEDYFKKIECFDSVEISGVEDRFNASLGTYHDLLKIIKDKDFLDNEENEDILEDIVLTLTLFEDREMIEERLKTYAHLFDDKVMKQLKRRRYTGWGRLSRKLINGIRDKQSGKTILDFLKSDGFANRNFMQLIHDDSLTFKEDIQKAQVSGQGDSLHEHIANLAGSPAIKKGILQTVKVVDELVKVMGRHKPENIVIEMARENQTTQKGQKNSRERMKRIEEGIKELGSQILKEHPVENTQLQNEKLYLYYLQNGRDMYVDQELDINRLSDYDVDHIVPQSFLKDDSIDNKVLTRSDKARGKSDNVPSEEVVKKMKNYWRQLLNAKLITQRKFDNLTKAERGGLSELDKAGFIKRQLVETRQITKHVAQILDSRMNTKYDENDKLIREVKVITLKSKLVSDFRKDFQFYKVREINNYHHAHDAYLNAVVGTALIKKYPKLESEFVYGDYKVYDVRKMIAKSEQEIGKATAKYFFYSNIMNFFKTEITLANGEIRKRPLIETNGETGEIVWDKGRDFATVRKVLSMPQVNIVKKTEVQTGGFSKESILPKRNSDKLIARKKDWDPKKYGGFDSPTVAYSVLVVAKVEKGKSKKLKSVKELLGITIMERSSFEKNPIDFLEAKGYKEVKKDLIIKLPKYSLFELENGRKRMLASAGELQKGNELALPSKYVNFLYLASHYEKLKGSPEDNEQKQLFVEQHKHYLDEIIEQISEFSKRVILADANLDKVLSAYNKHRDKPIREQAENIIHLFTLTNLGAPAAFKYFDTTIDRKRYTSTKEVLDATLIHQSITGLYETRIDLSQLGGDGGSGSETPGTSESATPESGGTLQLDDEYRLYSPLVKPDQNIQFWLEQFPQAWAETAGMGLAKQVPPQVIQLKASATPVSVRQYPLSKEAQEGIRPHVQRLIQQGILVPVQSPWNTPLLPVRKPGTNDYRPVQDLREVNKRVQDIHPTVPNPYNLLCALPPQRSWYTVLDLKDAFFCLRLHPTSQPLFAFEWRDPGTGRTGQLTWTRLPQGFKNSPTIFDEALHRDLANFRIQHPQVTLLQYVDDLLLAGATKQDCLEGTKALLLELSDLGYRASAKKAQICRREVTYLGYSLRDGQRWLTEARKKTVVQIPAPTTAKQVREFLGTAGFCRLWIPGFATLAAPLYPLTKEKGEFSWAPEHQKAFDAIKKALLSAPALALPDVTKPFTLYVDERKGVARGVLTQTLGPWRRPVAYLSKKLDPVASGWPVCLKAIAAVAILVKDADKLTLGQNITVIAPHALENIVRQPPDRWMTNARMTHYQSLLLTERVTFAPPAALNPATLLPEETDEPVTHDCHQLLIEETGVRKDLTDIPLTGEVLTWFTDGSSYVVEGKRMAGAAVVDGTRTIWASSLPEGTSAQKAELMALTQALRLAEGKSINIYTDSRYAFATAHVHGAIYKQRGLLTSAGREIKNKEEILSLLEALHLPKRLAIIHCPGHQKAKDPISRGNQMADRVAKQAAQGVNLLAGKRTADGSEFEKRTADGSEFESPKKKAKVE

SEQ ID NO: 7702 - protein, 2095 aa, synthetic construct; identical to SEQ ID NO: 7701

SEQ ID NO: 7703 - protein, 2181 aa, synthetic construct
MPAAKRVKLDGGDKKYSIGLDIGTNSVGWAVITDEYKVPSKKFKVLGNTDRHSIKKNLIGALLFDSGETAEATRLKRTARRRYTRRKNRICYLQEIFSNEMAKVDDSFFHRLEESFLVEEDKKHERHPIFGNIVDEVAYHEKYPTIYHLRKKLVDSTDKADLRLIYLALAHMIKFRGHFLIEGDLNPDNSDVDKLFIQLVQTYNQLFEENPINASGVDAKAILSARLSKSRRLENLIAQLPGEKKNGLFGNLIALSLGLTPNFKSNFDLAEDAKLQLSKDTYDDDLDNLLAQIGDQYADLFLAAKNLSDAILLSDILRVNTEITKAPLSASMIKRYDEHHQDLTLLKALVRQQLPEKYKEIFFDQSKNGYAGYIDGGASQEEFYKFIKPILEKMDGTEELLVKLNREDLLRKQRTFDNGSIPHQIHLGELHAILRRQEDFYPFLKDNREKIEKILTFRIPYYVGPLARGNSRFAWMTRKSEETITPWNFEEVVDKGASAQSFIERMTNFDKNLPNEKVLPKHSLLYEYFTVYNELTKVKYVTEGMRKPAFLSGEQKKAIVDLLFKTNRKVTVKQLKEDYFKKIECFDSVEISGVEDRFNASLGTYHDLLKIIKDKDFLDNEENEDILEDIVLTLTLFEDREMIEERLKTYAHLFDDKVMKQLKRRRYTGWGRLSRKLINGIRDKQSGKTILDFLKSDGFANRNFMQLIHDDSLTFKEDIQKAQVSGQGDSLHEHIANLAGSPAIKKGILQTVKVVDELVKVMGRHKPENIVIEMARENQTTQKGQKNSRERMKRIEEGIKELGSQILKEHPVENTQLQNEKLYLYYLQNGRDMYVDQELDINRLSDYDVDHIVPQSFLKDDSIDNKVLTRSDKARGKSDNVPSEEVVKKMKNYWRQLLNAKLITQRKFDNLTKAERGGLSELDKAGFIKRQLVETRQITKHVAQILDSRMNTKYDENDKLIREVKVITLKSKLVSDFRKDFQFYKVREINNYHHAHDAYLNAVVGTALIKKYPKLESEFVYGDYKVYDVRKMIAKSEQEIGKATAKYFFYSNIMNFFKTEITLANGEIRKRPLIETNGETGEIVWDKGRDFATVRKVLSMPQVNIVKKTEVQTGGFSKESILPKRNSDKLIARKKDWDPKKYGGFDSPTVAYSVLVVAKVEKGKSKKLKSVKELLGITIMERSSFEKNPIDFLEAKGYKEVKKDLIIKLPKYSLFELENGRKRMLASAGELQKGNELALPSKYVNFLYLASHYEKLKGSPEDNEQKQLFVEQHKHYLDEIIEQISEFSKRVILADANLDKVLSAYNKHRDKPIREQAENIIHLFTLTNLGAPAAFKYFDTTIDRKRYTSTKEVLDATLIHQSITGLYETRIDLSQLGGDGGSGSETPGTSESATPESGGMDPLQLLQPLEAEIKGTKLKAHWNSGATITCVPEAFLEDERPIQTMLIKTIHGEKQQDVYYLTFKVQGRKVEAEVLASPYDYILLNPSDVPWLMKKPLQLTVLVPLHEYQERLLQQTALPKEQKELLQKLFLKYDALWQHWENQVGHRRIKPHNIATGTLAPRPQKQYPINPKAKPSIQIVIDDLLKQGVLIQQNSTMNTPVYPVPKPDGKWRMVLDYREVNKTIPLIAAQNQHSAGILSSIYRGKYKTTLDLTNGFWAHPITPESYWLTAFTWQGKQYCWTRLPQGFLNSPALFNADVVDLLKEIPNVQAYVDDIYISHDDPQEHLEQLEKIFSILLNAGYVVSLKKSEIAQREVEFLGFNITKEGRGLTDTFKQKLLNITPPKDLKQLQSILGLLNFARNFIPNYSELVKPLYTIVAPANGKFISWTEDNSNQLQHIISVLNQADNLEERNPETRLIIKVNSSPSAGYIRYYNEGSKRPIMYVNYIFSKAEAKFTQTEKLLTTMHKGLIKAMDLAMGQEILVYSPIVSMTKIQRTPLPERKALPVRWITWMTYLEDPRIQFHYDKSLPELQQIPNVTEDVIAKTKHPSEFAMVFYTDGSAIKHPDVNKSHSAGMGIAQVQFIPEYKIVHQWSIPLGDHTAQLAEIAAVEFACKKALKISGPVLIVTDSFYVAESANKELPYWKSNGFLNNKKKPLRHVSKWKSIAECLQLKPDIIIMHEKGHQQPMTTLHTEGNNLADKLATQGSYVVHAGKRTADGSEFEKRTADGSEFESPKKKAKVE

SEQ ID NO: 7704 - protein, 2092 aa, synthetic construct
MPAAKRVKLDGGDKKYSIGLDIGTNSVGWAVITDEYKVPSKKFKVLGNTDRHSIKKNLIGALLFDSGETAEATRLKRTARRRYTRRKNRICYLQEIFSNEMAKVDDSFFHRLEESFLVEEDKKHERHPIFGNIVDEVAYHEKYPTIYHLRKKLVDSTDKADLRLIYLALAHMIKFRGHFLIEGDLNPDNSDVDKLFIQLVQTYNQLFEENPINASGVDAKAILSARLSKSRRLENLIAQLPGEKKNGLFGNLIALSLGLTPNFKSNFDLAEDAKLQLSKDTYDDDLDNLLAQIGDQYADLFLAAKNLSDAILLSDILRVNTEITKAPLSASMIKRYDEHHQDLTLLKALVRQQLPEKYKEIFFDQSKNGYAGYIDGGASQEEFYKFIKPILEKMDGTEELLVKLNREDLLRKQRTFDNGSIPHQIHLGELHAILRRQEDFYPFLKDNREKIEKILTFRIPYYVGPLARGNSRFAWMTRKSEETITPWNFEEVVDKGASAQSFIERMTNFDKNLPNEKVLPKHSLLYEYFTVYNELTKVKYVTEGMRKPAFLSGEQKKAIVDLLFKTNRKVTVKQLKEDYFKKIECFDSVEISGVEDRFNASLGTYHDLLKIIKDKDFLDNEENEDILEDIVLTLTLFEDREMIEERLKTYAHLFDDKVMKQLKRRRYTGWGRLSRKLINGIRDKQSGKTILDFLKSDGFANRNFMQLIHDDSLTFKEDIQKAQVSGQGDSLHEHIANLAGSPAIKKGILQTVKVVDELVKVMGRHKPENIVIEMARENQTTQKGQKNSRERMKRIEEGIKELGSQILKEHPVENTQLQNEKLYLYYLQNGRDMYVDQELDINRLSDYDVDHIVPQSFLKDDSIDNKVLTRSDKARGKSDNVPSEEVVKKMKNYWRQLLNAKLITQRKFDNLTKAERGGLSELDKAGFIKRQLVETRQITKHVAQILDSRMNTKYDENDKLIREVKVITLKSKLVSDFRKDFQFYKVREINNYHHAHDAYLNAVVGTALIKKYPKLESEFVYGDYKVYDVRKMIAKSEQEIGKATAKYFFYSNIMNFFKTEITLANGEIRKRPLIETNGETGEIVWDKGRDFATVRKVLSMPQVNIVKKTEVQTGGFSKESILPKRNSDKLIARKKDWDPKKYGGFDSPTVAYSVLVVAKVEKGKSKKLKSVKELLGITIMERSSFEKNPIDFLEAKGYKEVKKDLIIKLPKYSLFELENGRKRMLASAGELQKGNELALPSKYVNFLYLASHYEKLKGSPEDNEQKQLFVEQHKHYLDEIIEQISEFSKRVILADANLDKVLSAYNKHRDKPIREQAENIIHLFTLTNLGAPAAFKYFDTTIDRKRYTSTKEVLDATLIHQSITGLYETRIDLSQLGGDGGSGSETPGTSESATPESGGIPWLMKKPLQLTTLVPLQEYEERLLKQTMLTGSYKEKLQSLFLKYDALWQHWENQVGHRRIKPHHIATGTVNPRPQKQYPINPKAKASIQTVINDLLKQGVLIQQNSIMNTPVYPVPKPDGKWRMVLDYREVNKTIPLIAAQNQHSAGILSSIFRGKYKTTLDLSNGFWAHSITPESYWLTAFTWLGQQYCWTRLPQGFLNSPALFTADVVDLLKEVPNVQVYVDDIYISHDDPREHLEQLEKVFSLLLNAGYVVSLKKSEIAQHEVEFLGFNITKEGRGLTETFKQKLLNITPPRDLKQLQSILGLLNFARNFIPNFSELVKPLYNIIATANGKYITWTTDNSQQLQNIISMLNSAENLEERNPEVRLIMKVNTSPSAGYIRFYNEFAKRPIMYLNYVYTKAEVKFTNTEKLLTTIHKGLIKALDLGMGQEILVYSPIVSMTKIQKTPLPERKALPIRWITWMSYLEDPRIQFHYDKTLPELQQVPTVTDDIIAKIKHPSEFSMVFYTDGSAIKHPNVNKSHNAGMGIAQVQFKPEFTVINTWSIPLGDHTAQLAEVAAVEFACKKALKIDGPVLIVTDSFYVAESVNKELPYWQSNGFFNNKKKPLKHVSKWKSIADCIQLKPDIIIIHEKGHQPTASTFHTEGNNLADKLATQGSYVVNAGKRTADGSEFEKRTADGSEFESPKKKAKVE

SEQ ID NO: 7705 - protein, 2181 aa, synthetic construct
MPAAKRVKLDGGDKKYSIGLDIGTNSVGWAVITDEYKVPSKKFKVLGNTDRHSIKKNLIGALLFDSGETAEATRLKRTARRRYTRRKNRICYLQEIFSNEMAKVDDSFFHRLEESFLVEEDKKHERHPIFGNIVDEVAYHEKYPTIYHLRKKLVDSTDKADLRLIYLALAHMIKFRGHFLIEGDLNPDNSDVDKLFIQLVQTYNQLFEENPINASGVDAKAILSARLSKSRRLENLIAQLPGEKKNGLFGNLIALSLGLTPNFKSNFDLAEDAKLQLSKDTYDDDLDNLLAQIGDQYADLFLAAKNLSDAILLSDILRVNTEITKAPLSASMIKRYDEHHQDLTLLKALVRQQLPEKYKEIFFDQSKNGYAGYIDGGASQEEFYKFIKPILEKMDGTEELLVKLNREDLLRKQRTFDNGSIPHQIHLGELHAILRRQEDFYPFLKDNREKIEKILTFRIPYYVGPLARGNSRFAWMTRKSEETITPWNFEEVVDKGASAQSFIERMTNFDKNLPNEKVLPKHSLLYEYFTVYNELTKVKYVTEGMRKPAFLSGEQKKAIVDLLFKTNRKVTVKQLKEDYFKKIECFDSVEISGVEDRFNASLGTYHDLLKIIKDKDFLDNEENEDILEDIVLTLTLFEDREMIEERLKTYAHLFDDKVMKQLKRRRYTGWGRLSRKLINGIRDKQSGKTILDFLKSDGFANRNFMQLIHDDSLTFKEDIQKAQVSGQGDSLHEHIANLAGSPAIKKGILQTVKVVDELVKVMGRHKPENIVIEMARENQTTQKGQKNSRERMKRIEEGIKELGSQILKEHPVENTQLQNEKLYLYYLQNGRDMYVDQELDINRLSDYDVDHIVPQSFLKDDSIDNKVLTRSDKARGKSDNVPSEEVVKKMKNYWRQLLNAKLITQRKFDNLTKAERGGLSELDKAGFIKRQLVETRQITKHVAQILDSRMNTKYDENDKLIREVKVITLKSKLVSDFRKDFQFYKVREINNYHHAHDAYLNAVVGTALIKKYPKLESEFVYGDYKVYDVRKMIAKSEQEIGKATAKYFFYSNIMNFFKTEITLANGEIRKRPLIETNGETGEIVWDKGRDFATVRKVLSMPQVNIVKKTEVQTGGFSKESILPKRNSDKLIARKKDWDPKKYGGFDSPTVAYSVLVVAKVEKGKSKKLKSVKELLGITIMERSSFEKNPIDFLEAKGYKEVKKDLIIKLPKYSLFELENGRKRMLASAGELQKGNELALPSKYVNFLYLASHYEKLKGSPEDNEQKQLFVEQHKHYLDEIIEQISEFSKRVILADANLDKVLSAYNKHRDKPIREQAENIIHLFTLTNLGAPAAFKYFDTTIDRKRYTSTKEVLDATLIHQSITGLYETRIDLSQLGGDGGSGSETPGTSESATPESGGMDPLQLLQPLEAEIKGTKLKAHWNSGATITCVPQAFLEEEVPIKNIWIKTIHGEKEQPVYYLTFKIQGRKVEAEVISSPYDYILVSPSDIPWLMKKPLQLTTLVPLQEYEERLLKQTMLTGSYKEKLQSLFLKYDALWQHWENQVGHRRIKPHHIATGTVNPRPQKQYPINPKAKASIQTVINDLLKQGVLIQQNSIMNTPVYPVPKPDGKWRMVLDYREVNKTIPLIAAQNQHSAGILSSIFRGKYKTTLDLSNGFWAHSITPESYWLTAFTWLGQQYCWTRLPQGFLNSPALFNADVVDLLKEVPNVQVYVDDIYISHDDPREHLEQLEKVFSLLLNAGYVVSLKKSEIAQHEVEFLGFNITKEGRGLTETFKQKLLNITPPRDLKQLQSILGLLNFARNFIPNFSELVKPLYNIIATAPGKYITWTTDNSQQLQNIISMLNSAENLEERNPEVRLIMKVNTSPSAGYIRFYNEFAKRPIMYLNYVYTKAEVKFTNTEKLLTTIHKGLIKALDLGMGQEILVYSPIVSMTKIQKTPLPERKALPIRWITWMSYLEDPRIQFHYDKTLPELQQVPTVTDDIIAKIKHPSEFSMVFYTDGSAIKHPNVNKSHNAGMGIAQVQFKPEFTVINTWSIPLGDHTAQLAEVAAVEFACKKALKIDGPVLIVTDSFYVAESVNKELPYWQSNGFFNNKKKPLKHVSKWKSIADCIQLKPDIIIIHEKGHQPTASTFHTEGNNLADKLATQGSYVVNAGKRTADGSEFEKRTADGSEFESPKKKAKVE

SEQ ID NO: 7706 - protein, 2101 aa, synthetic construct
MPAAKRVKLDGGDKKYSIGLDIGTNSVGWAVITDEYKVPSKKFKVLGNTDRHSIKKNLIGALLFDSGETAEATRLKRTARRRYTRRKNRICYLQEIFSNEMAKVDDSFFHRLEESFLVEEDKKHERHPIFGNIVDEVAYHEKYPTIYHLRKKLVDSTDKADLRLIYLALAHMIKFRGHFLIEGDLNPDNSDVDKLFIQLVQTYNQLFEENPINASGVDAKAILSARLSKSRRLENLIAQLPGEKKNGLFGNLIALSLGLTPNFKSNFDLAEDAKLQLSKDTYDDDLDNLLAQIGDQYADLFLAAKNLSDAILLSDILRVNTEITKAPLSASMIKRYDEHHQDLTLLKALVRQQLPEKYKEIFFDQSKNGYAGYIDGGASQEEFYKFIKPILEKMDGTEELLVKLNREDLLRKQRTFDNGSIPHQIHLGELHAILRRQEDFYPFLKDNREKIEKILTFRIPYYVGPLARGNSRFAWMTRKSEETITPWNFEEVVDKGASAQSFIERMTNFDKNLPNEKVLPKHSLLYEYFTVYNELTKVKYVTEGMRKPAFLSGEQKKAIVDLLFKTNRKVTVKQLKEDYFKKIECFDSVEISGVEDRFNASLGTYHDLLKIIKDKDFLDNEENEDILEDIVLTLTLFEDREMIEERLKTYAHLFDDKVMKQLKRRRYTGWGRLSRKLINGIRDKQSGKTILDFLKSDGFANRNFMQLIHDDSLTFKEDIQKAQVSGQGDSLHEHIANLAGSPAIKKGILQTVKVVDELVKVMGRHKPENIVIEMARENQTTQKGQKNSRERMKRIEEGIKELGSQILKEHPVENTQLQNEKLYLYYLQNGRDMYVDQELDINRLSDYDVDHIVPQSFLKDDSIDNKVLTRSDKARGKSDNVPSEEVVKKMKNYWRQLLNAKLITQRKFDNLTKAERGGLSELDKAGFIKRQLVETRQITKHVAQILDSRMNTKYDENDKLIREVKVITLKSKLVSDFRKDFQFYKVREINNYHHAHDAYLNAVVGTALIKKYPKLESEFVYGDYKVYDVRKMIAKSEQEIGKATAKYFFYSNIMNFFKTEITLANGEIRKRPLIETNGETGEIVWDKGRDFATVRKVLSMPQVNIVKKTEVQTGGFSKESILPKRNSDKLIARKKDWDPKKYGGFDSPTVAYSVLVVAKVEKGKSKKLKSVKELLGITIMERSSFEKNPIDFLEAKGYKEVKKDLIIKLPKYSLFELENGRKRMLASAGELQKGNELALPSKYVNFLYLASHYEKLKGSPEDNEQKQLFVEQHKHYLDEIIEQISEFSKRVILADANLDKVLSAYNKHRDKPIREQAENIIHLFTLTNLGAPAAFKYFDTTIDRKRYTSTKEVLDATLIHQSITGLYETRIDLSQLGGDGGSGSETPGTSESATPESGGTLNIEDEYRLHETSKEPDVPLGSTWLSDFPQAWAETGGMGLAVRQAPLIIPLKATSTPVSIKQYPMSQEARLGIKPHIQRLLDQGILVPCQSPWNTPLLPVKKPGTNDYRPVQDLREVNKRVEDIHPTVPNPYNLLSGLPPSHQWYTVLDLKDAFFCLRLHPTSQPLFAFEWRDPEMGISGQLTWTRLPQGFKNSPTLFNEALHRDLADFRIQHPDLILLQYVDDLLLAATSEQDCQRGTRALLQTLGNLGYRASAKKAQICQKQVKYLGYLLKEGQRWLTEARKETVMGQPTPKTPRQLREFLGTAGFCRLWIPGFAEMAAPLYPLTKPGTLFNWGPDQQKAYQEIKQALLTAPALGLPDLTKPFELFVDEKQGYAKGVLTQKLGPWRRPVAYLSKKLDPVAAGWPPCLRMVAAIAVLTKDAGKLTMGQPLVILAPHAVEALVKQPPDRWLSNARMTHYQAMLLDTDRVQFGPVVALNPATLLPLPEKEAPHDCLEILAETHGTRPDLTDQPIPDADYTWYTDGSSFLQEGQRRAGAAVTTETEVIWARALPAGTSAQRAELIALTQALKMAEGKKLNVYTDSRYAFATAHVHGEIYRRRGWLTSEGREIKNKNEILALLKALFLPKRLSIIHCPGHQKGNSAEARGNRMADQAAREAAMKAVLETSTLLAGKRTADGSEFEKRTADGSEFESPKKKAKVE

SEQ ID NO: 7707 - protein, 2099 aa, synthetic construct
MPAAKRVKLDGGDKKYSIGLDIGTNSVGWAVITDEYKVPSKKFKVLGNTDRHSIKKNLIGALLFDSGETAEATRLKRTARRRYTRRKNRICYLQEIFSNEMAKVDDSFFHRLEESFLVEEDKKHERHPIFGNIVDEVAYHEKYPTIYHLRKKLVDSTDKADLRLIYLALAHMIKFRGHFLIEGDLNPDNSDVDKLFIQLVQTYNQLFEENPINASGVDAKAILSARLSKSRRLENLIAQLPGEKKNGLFGNLIALSLGLTPNFKSNFDLAEDAKLQLSKDTYDDDLDNLLAQIGDQYADLFLAAKNLSDAILLSDILRVNTEITKAPLSASMIKRYDEHHQDLTLLKALVRQQLPEKYKEIFFDQSKNGYAGYIDGGASQEEFYKFIKPILEKMDGTEELLVKLNREDLLRKQRTFDNGSIPHQIHLGELHAILRRQEDFYPFLKDNREKIEKILTFRIPYYVGPLARGNSRFAWMTRKSEETITPWNFEEVVDKGASAQSFIERMTNFDKNLPNEKVLPKHSLLYEYFTVYNELTKVKYVTEGMRKPAFLSGEQKKAIVDLLFKTNRKVTVKQLKEDYFKKIECFDSVEISGVEDRFNASLGTYHDLLKIIKDKDFLDNEENEDILEDIVLTLTLFEDREMIEERLKTYAHLFDDKVMKQLKRRRYTGWGRLSRKLINGIRDKQSGKTILDFLKSDGFANRNFMQLIHDDSLTFKEDIQKAQVSGQGDSLHEHIANLAGSPAIKKGILQTVKVVDELVKVMGRHKPENIVIEMARENQTTQKGQKNSRERMKRIEEGIKELGSQILKEHPVENTQLQNEKLYLYYLQNGRDMYVDQELDINRLSDYDVDHIVPQSFLKDDSIDNKVLTRSDKARGKSDNVPSEEVVKKMKNYWRQLLNAKLITQRKFDNLTKAERGGLSELDKAGFIKRQLVETRQITKHVAQILDSRMNTKYDENDKLIREVKVITLKSKLVSDFRKDFQFYKVREINNYHHAHDAYLNAVVGTALIKKYPKLESEFVYGDYKVYDVRKMIAKSEQEIGKATAKYFFYSNIMNFFKTEITLANGEIRKRPLIETNGETGEIVWDKGRDFATVRKVLSMPQVNIVKKTEVQTGGFSKESILPKRNSDKLIARKKDWDPKKYGGFDSPTVAYSVLVVAKVEKGKSKKLKSVKELLGITIMERSSFEKNPIDFLEAKGYKEVKKDLIIKLPKYSLFELENGRKRMLASAGELQKGNELALPSKYVNFLYLASHYEKLKGSPEDNEQKQLFVEQHKHYLDEIIEQISEFSKRVILADANLDKVLSAYNKHRDKPIREQAENIIHLFTLTNLGAPAAFKYFDTTIDRKRYTSTKEVLDATLIHQSITGLYETRIDLSQLGGDGGGSAGSAAGSGEFGGTAPLEEEYRLFLEAPIQNVTLLEQWKREIPKVWAEINPPGLASTQAPIHVQLLSTALPVRVRQYPITLEAKRSLRETIRKFRAAGILRPVHSPWNTPLLPVRKSGTSEYRMVQDLREVNKRVETIHPTVPNPYTLLSLLPPDRIWYSVLDLKDAFFCIPLAPESQLIFAFEWADAEEGESGQLTWTRLPQGFKNSPTLFNEALNRDLQGFRLDHPSVSLLQYVDDLLIAADTQAACLSATRDLLMTLAELGYRVSGKKAQLCQEEVTYLGFKIHKGSRSLSNSRTQAILQIPVPKTKRQVREFLGTIGYCRLWIPGFAELAQPLYAATRPGNDPLVWGEKEEEAFQSLKLALTQPPALALPSLDKPFQLFVEETSGAAKGVLTQALGPWKRPVAYLSKRLDPVAAGWPRCLRAIAAAALLTREASKLTFGQDIEITSSHNLESLLRSPPDKWLTNARITQYQVLLLDPPRVRFKQTAALNPATLLPETDDTLPIHHCLDTLDSLTSTRPDLTDQPLAQAEATLFTDGSSYIRDGKRYAGAAVVTLDSVIWAEPLPIGTSAQKAELIALTKALEWSKDKSVNIYTDSRYAFATLHVHGMIYRERGWLTAGGKAIKNAPEILALLTAVWLPKRVAVMHCKGHQKDDAPTSTGNRRADEVAREVAIRPLSTQATISAGKRTADGSEFEKRTADGSEFESPKKKAKVE

SEQ ID NO: 7708 - protein, 2002 aa, synthetic construct
MPAAKRVKLDGGDKKYSIGLDIGTNSVGWAVITDEYKVPSKKFKVLGNTDRHSIKKNLIGALLFDSGETAEATRLKRTARRRYTRRKNRICYLQEIFSNEMAKVDDSFFHRLEESFLVEEDKKHERHPIFGNIVDEVAYHEKYPTIYHLRKKLVDSTDKADLRLIYLALAHMIKFRGHFLIEGDLNPDNSDVDKLFIQLVQTYNQLFEENPINASGVDAKAILSARLSKSRRLENLIAQLPGEKKNGLFGNLIALSLGLTPNFKSNFDLAEDAKLQLSKDTYDDDLDNLLAQIGDQYADLFLAAKNLSDAILLSDILRVNTEITKAPLSASMIKRYDEHHQDLTLLKALVRQQLPEKYKEIFFDQSKNGYAGYIDGGASQEEFYKFIKPILEKMDGTEELLVKLNREDLLRKQRTFDNGSIPHQIHLGELHAILRRQEDFYPFLKDNREKIEKILTFRIPYYVGPLARGNSRFAWMTRKSEETITPWNFEEVVDKGASAQSFIERMTNFDKNLPNEKVLPKHSLLYEYFTVYNELTKVKYVTEGMRKPAFLSGEQKKAIVDLLFKTNRKVTVKQLKEDYFKKIECFDSVEISGVEDRFNASLGTYHDLLKIIKDKDFLDNEENEDILEDIVLTLTLFEDREMIEERLKTYAHLFDDKVMKQLKRRRYTGWGRLSRKLINGIRDKQSGKTILDFLKSDGFANRNFMQLIHDDSLTFKEDIQKAQVSGQGDSLHEHIANLAGSPAIKKGILQTVKVVDELVKVMGRHKPENIVIEMARENQTTQKGQKNSRERMKRIEEGIKELGSQILKEHPVENTQLQNEKLYLYYLQNGRDMYVDQELDINRLSDYDVDHIVPQSFLKDDSIDNKVLTRSDKARGKSDNVPSEEVVKKMKNYWRQLLNAKLITQRKFDNLTKAERGGLSELDKAGFIKRQLVETRQITKHVAQILDSRMNTKYDENDKLIREVKVITLKSKLVSDFRKDFQFYKVREINNYHHAHDAYLNAVVGTALIKKYPKLESEFVYGDYKVYDVRKMIAKSEQEIGKATAKYFFYSNIMNFFKTEITLANGEIRKRPLIETNGETGEIVWDKGRDFATVRKVLSMPQVNIVKKTEVQTGGFSKESILPKRNSDKLIARKKDWDPKKYGGFDSPTVAYSVLVVAKVEKGKSKKLKSVKELLGITIMERSSFEKNPIDFLEAKGYKEVKKDLIIKLPKYSLFELENGRKRMLASAGELQKGNELALPSKYVNFLYLASHYEKLKGSPEDNEQKQLFVEQHKHYLDEIIEQISEFSKRVILADANLDKVLSAYNKHRDKPIREQAENIIHLFTLTNLGAPAAFKYFDTTIDRKRYTSTKEVLDATLIHQSITGLYETRIDLSQLGGDGGGSAGSAAGSGEFGGGVLDTPPSHIGLEHLPPPPEVPQFPLNLERLQALQDLVHRSLEAGYISPWDGPGNNPVFPVRKPNGAWRFVHDLRATNALTKPIPALSPGPPDLTAPPTHPPHIICLDLKDAFFQIPVEDRFRFYLSFTLPSPGGLQPHRRFAWRVLPQGFINSPALFQRALQEPLRQVSAAFSQSLLVSYMDDILYASPTEEQRSQCYQALAARLRDLGFQVASEKTSQTPSPVPFLGQMVHEQIVTYQSLPTLQISSPISLHQLQAVLGDLQWVSRGTPTTRRPLQLLYSSLKRHHDPRAIIQLSPEQLQGIAELRQALSHNARSRYNEQEPLLAYVHLTRAGSTLVLFQKGAQFPLAYFQTPLTDNQASPWGLLLLLGCQYLQTQALSSYAKPILKYYHNLPKTSLDNWIQSSEDPRVQELLQLWPQISSQGIQPPGPWKTLITRAEVFLTPQFSPDPIPAALCLFSDGATGRGAYCLWKDHLLDFQAVPAPESAQKGELAGLLAGLAAAPPEPVNIWVDSKYLYSLLRTWVLGAWLQPDPVPSYALLYKSLLRHPAIVVGHVRSHSSASHPIASLNNYVDQLAGKRTADGSEFEKRTADGSEFESPKKKAKVE

SEQ ID NO: 7709 - protein, 2088 aa, synthetic construct
MPAAKRVKLDGGDKKYSIGLDIGTNSVGWAVITDEYKVPSKKFKVLGNTDRHSIKKNLIGALLFDSGETAEATRLKRTARRRYTRRKNRICYLQEIFSNEMAKVDDSFFHRLEESFLVEEDKKHERHPIFGNIVDEVAYHEKYPTIYHLRKKLVDSTDKADLRLIYLALAHMIKFRGHFLIEGDLNPDNSDVDKLFIQLVQTYNQLFEENPINASGVDAKAILSARLSKSRRLENLIAQLPGEKKNGLFGNLIALSLGLTPNFKSNFDLAEDAKLQLSKDTYDDDLDNLLAQIGDQYADLFLAAKNLSDAILLSDILRVNTEITKAPLSASMIKRYDEHHQDLTLLKALVRQQLPEKYKEIFFDQSKNGYAGYIDGGASQEEFYKFIKPILEKMDGTEELLVKLNREDLLRKQRTFDNGSIPHQIHLGELHAILRRQEDFYPFLKDNREKIEKILTFRIPYYVGPLARGNSRFAWMTRKSEETITPWNFEEVVDKGASAQSFIERMTNFDKNLPNEKVLPKHSLLYEYFTVYNELTKVKYVTEGMRKPAFLSGEQKKAIVDLLFKTNRKVTVKQLKEDYFKKIECFDSVEISGVEDRFNASLGTYHDLLKIIKDKDFLDNEENEDILEDIVLTLTLFEDREMIEERLKTYAHLFDDKVMKQLKRRRYTGWGRLSRKLINGIRDKQSGKTILDFLKSDGFANRNFMQLIHDDSLTFKEDIQKAQVSGQGDSLHEHIANLAGSPAIKKGILQTVKVVDELVKVMGRHKPENIVIEMARENQTTQKGQKNSRERMKRIEEGIKELGSQILKEHPVENTQLQNEKLYLYYLQNGRDMYVDQELDINRLSDYDVDHIVPQSFLKDDSIDNKVLTRSDKARGKSDNVPSEEVVKKMKNYWRQLLNAKLITQRKFDNLTKAERGGLSELDKAGFIKRQLVETRQITKHVAQILDSRMNTKYDENDKLIREVKVITLKSKLVSDFRKDFQFYKVREINNYHHAHDAYLNAVVGTALIKKYPKLESEFVYGDYKVYDVRKMIAKSEQEIGKATAKYFFYSNIMNFFKTEITLANGEIRKRPLIETNGETGEIVWDKGRDFATVRKVLSMPQVNIVKKTEVQTGGFSKESILPKRNSDKLIARKKDWDPKKYGGFDSPTVAYSVLVVAKVEKGKSKKLKSVKELLGITIMERSSFEKNPIDFLEAKGYKEVKKDLIIKLPKYSLFELENGRKRMLASAGELQKGNELALPSKYVNFLYLASHYEKLKGSPEDNEQKQLFVEQHKHYLDEIIEQISEFSKRVILADANLDKVLSAYNKHRDKPIREQAENIIHLFTLTNLGAPAAFKYFDTTIDRKRYTSTKEVLDATLIHQSITGLYETRIDLSQLGGDGGGSAGSAAGSGEFGGVPWILKKPLELTIKLDLEEQQGTLLNNSILSKKGKEELKQLFEKYSALWQSWENQVGHRRIRPHKIATGTVKPTPQKQYHINPKAKPDIQIVINDLLKQGVLIQKESTMNTPVYPVPKPNGRWRMVLDYRAVNKVTPLIAVQNQHSYGILGSLFKGRYKTTIDLSNGFWAHPIVPEDYWITAFTWQGKQYCWTVLPQGFLNSPGLFTGDVVDLLQGIPNVEVYVDDVYISHDSEKEHLEYLDILFNRLKEAGYIISLKKSNIANSIVDFLGFQITNEGRGLTDTFKEKLENITAPTTLKQLQSILGLLNFARNFIPDFTELIAPLYALIPKSTKNYVPWQIEHSTTLETLITKLNGAEYLQGRKGDKTLIMKVNASYTTGYIRYYNEGEKKPISYVSIVFSKTELKFTELEKLLTTVHKGLLKALDLSMGQNIHVYSPIVSMQNIQKTPQTAKKALASRWLSWLSYLEDPRIRFFYDPQMPALKDLPAVDTGKDNKKHPSNFQHIFYTDGSAITSPTKEGHLNAGMGIVYFINKDGNLQKQQEWSISLGNHTAQFAEIAAFEFALKKCLPLGGNILVVTDSNYVAKAYNEELDVWASNGFVNNRKKPLKHISKWKSVADLKRLRPDVVVTHEPGHQKLDSSPHAYGNNLADQLATQASFKVHAGKRTADGSEFEKRTADGSEFESPKKKAKVE

SEQ ID NO: 7710 - protein, 2088 aa, synthetic construct
MPAAKRVKLDGGDKKYSIGLDIGTNSVGWAVITDEYKVPSKKFKVLGNTDRHSIKKNLIGALLFDSGETAEATRLKRTARRRYTRRKNRICYLQEIFSNEMAKVDDSFFHRLEESFLVEEDKKHERHPIFGNIVDEVAYHEKYPTIYHLRKKLVDSTDKADLRLIYLALAHMIKFRGHFLIEGDLNPDNSDVDKLFIQLVQTYNQLFEENPINASGVDAKAILSARLSKSRRLENLIAQLPGEKKNGLFGNLIALSLGLTPNFKSNFDLAEDAKLQLSKDTYDDDLDNLLAQIGDQYADLFLAAKNLSDAILLSDILRVNTEITKAPLSASMIKRYDEHHQDLTLLKALVRQQLPEKYKEIFFDQSKNGYAGYIDGGASQEEFYKFIKPILEKMDGTEELLVKLNREDLLRKQRTFDNGSIPHQIHLGELHAILRRQEDFYPFLKDNREKIEKILTFRIPYYVGPLARGNSRFAWMTRKSEETITPWNFEEVVDKGASAQSFIERMTNFDKNLPNEKVLPKHSLLYEYFTVYNELTKVKYVTEGMRKPAFLSGEQKKAIVDLLFKTNRKVTVKQLKEDYFKKIECFDSVEISGVEDRFNASLGTYHDLLKIIKDKDFLDNEENEDILEDIVLTLTLFEDREMIEERLKTYAHLFDDKVMKQLKRRRYTGWGRLSRKLINGIRDKQSGKTILDFLKSDGFANRNFMQLIHDDSLTFKEDIQKAQVSGQGDSLHEHIANLAGSPAIKKGILQTVKVVDELVKVMGRHKPENIVIEMARENQTTQKGQKNSRERMKRIEEGIKELGSQILKEHPVENTQLQNEKLYLYYLQNGRDMYVDQELDINRLSDYDVDHIVPQSFLKDDSIDNKVLTRSDKARGKSDNVPSEEVVKKMKNYWRQLLNAKLITQRKFDNLTKAERGGLSELDKAGFIKRQLVETRQITKHVAQILDSRMNTKYDENDKLIREVKVITLKSKLVSDFRKDFQFYKVREINNYHHAHDAYLNAVVGTALIKKYPKLESEFVYGDYKVYDVRKMIAKSEQEIGKATAKYFFYSNIMNFFKTEITLANGEIRKRPLIETNGETGEIVWDKGRDFATVRKVLSMPQVNIVKKTEVQTGGFSKESILPKRNSDKLIARKKDWDPKKYGGFDSPTVAYSVLVVAKVEKGKSKKLKSVKELLGITIMERSSFEKNPIDFLEAKGYKEVKKDLIIKLPKYSLFELENGRKRMLASAGELQKGNELALPSKYVNFLYLASHYEKLKGSPEDNEQKQLFVEQHKHYLDEIIEQISEFSKRVILADANLDKVLSAYNKHRDKPIREQAENIIHLFTLTNLGAPAAFKYFDTTIDRKRYTSTKEVLDATLIHQSITGLYETRIDLSQLGGDGGGSAGSAAGSGEFGGVPWILKKPLELTIKLDLEEQQGTLLNNSILSKKGKEELKQLFEKYSALWQSWENQVGHRRIRPHKIATGTVKPTPQKQYHINPKAKPDIQIVINDLLKQGVLIQKESTMNTPVYPVPKPNGRWRMVLDYRAVNKVTPLIAVQNQHSYGILGSLFKGRYKTTIDLSNGFWAHPIVPEDYWITAFTWQGKQYCWTVLPQGFLNSPGLFNGDVVDLLQGIPNVEVYVDDVYISHDSEKEHLEYLDILFNRLKEAGYIISLKKSNIANSIVDFLGFQITNEGRGLTDTFKEKLENITAPTTLKQLQSILGLLNFARNFIPDFTELIAPLYALIPKSPKNYVPWQIEHSTTLETLITKLNGAEYLQGRKGDKTLIMKVNASYTTGYIRYYNEGEKKPISYVSIVFSKTELKFTELEKLLTTVHKGLLKALDLSMGQNIHVYSPIVSMQNIQKTPQTAKKALASRWLSWLSYLEDPRIRFFYDPQMPALKDLPAVDTGKDNKKHPSNFQHIFYTDGSAITSPTKEGHLNAGMGIVYFINKDGNLQKQQEWSISLGNHTAQFAEIAAFEFALKKCLPLGGNILVVTDSNYVAKAYNEELDVWASNGFVNNRKKPLKHISKWKSVADLKRLRPDVVVTHEPGHQKLDSSPHAYGNNLADQLATQASFKVHAGKRTADGSEFEKRTADGSEFESPKKKAKVE

SEQ ID NO: 7711 - protein, 2096 aa, synthetic construct
MPAAKRVKLDGGDKKYSIGLDIGTNSVGWAVITDEYKVPSKKFKVLGNTDRHSIKKNLIGALLFDSGETAEATRLKRTARRRYTRRKNRICYLQEIFSNEMAKVDDSFFHRLEESFLVEEDKKHERHPIFGNIVDEVAYHEKYPTIYHLRKKLVDSTDKADLRLIYLALAHMIKFRGHFLIEGDLNPDNSDVDKLFIQLVQTYNQLFEENPINASGVDAKAILSARLSKSRRLENLIAQLPGEKKNGLFGNLIALSLGLTPNFKSNFDLAEDAKLQLSKDTYDDDLDNLLAQIGDQYADLFLAAKNLSDAILLSDILRVNTEITKAPLSASMIKRYDEHHQDLTLLKALVRQQLPEKYKEIFFDQSKNGYAGYIDGGASQEEFYKFIKPILEKMDGTEELLVKLNREDLLRKQRTFDNGSIPHQIHLGELHAILRRQEDFYPFLKDNREKIEKILTFRIPYYVGPLARGNSRFAWMTRKSEETITPWNFEEVVDKGASAQSFIERMTNFDKNLPNEKVLPKHSLLYEYFTVYNELTKVKYVTEGMRKPAFLSGEQKKAIVDLLFKTNRKVTVKQLKEDYFKKIECFDSVEISGVEDRFNASLGTYHDLLKIIKDKDFLDNEENEDILEDIVLTLTLFEDREMIEERLKTYAHLFDDKVMKQLKRRRYTGWGRLSRKLINGIRDKQSGKTILDFLKSDGFANRNFMQLIHDDSLTFKEDIQKAQVSGQGDSLHEHIANLAGSPAIKKGILQTVKVVDELVKVMGRHKPENIVIEMARENQTTQKGQKNSRERMKRIEEGIKELGSQILKEHPVENTQLQNEKLYLYYLQNGRDMYVDQELDINRLSDYDVDHIVPQSFLKDDSIDNKVLTRSDKARGKSDNVPSEEVVKKMKNYWRQLLNAKLITQRKFDNLTKAERGGLSELDKAGFIKRQLVETRQITKHVAQILDSRMNTKYDENDKLIREVKVITLKSKLVSDFRKDFQFYKVREINNYHHAHDAYLNAVVGTALIKKYPKLESEFVYGDYKVYDVRKMIAKSEQEIGKATAKYFFYSNIMNFFKTEITLANGEIRKRPLIETNGETGEIVWDKGRDFATVRKVLSMPQVNIVKKTEVQTGGFSKESILPKRNSDKLIARKKDWDPKKYGGFDSPTVAYSVLVVAKVEKGKSKKLKSVKELLGITIMERSSFEKNPIDFLEAKGYKEVKKDLIIKLPKYSLFELENGRKRMLASAGELQKGNELALPSKYVNFLYLASHYEKLKGSPEDNEQKQLFVEQHKHYLDEIIEQISEFSKRVILADANLDKVLSAYNKHRDKPIREQAENIIHLFTLTNLGAPAAFKYFDTTIDRKRYTSTKEVLDATLIHQSITGLYETRIDLSQLGGDGGGSAGSAAGSGEFGGTLQLEEEYRLFEPESTQKQEMDIWLKNFPQAWAETGGMGTAHCQAPVLIQLKATATPISIRQYPMPHEAYQGIKPHIRRMLDQGILKPCQSPWNTPLLPVKKPGTEDYRPVQDLREVNKRVEDIHPTVPNPYNLLSTLPPSHPWYTVLDLKDAFFCLRLHSESQLLFAFEWRDPEIGLSGQLTWTRLPQGFKNSPTLFNEALHSDLADFRVRYPALVLLQYVDDLLLAAATRTECLEGTKALLETLGNKGYRASAKKAQICLQEVTYLGYSLKDGQRWLTKARKEAILSIPVPKNSRQVREFLGKAGYCRLFIPGFAELAAPLYPLTRPGTLFQWGTEQQLAFEDIKKALLSSPALGLPDITKPFELFIDENSGFAKGVLVQKLGPWKRPVAYLSKKLDTVASGWPPCLRMVAAIAILVKDAGKLTLGQPLTILTSHPVEALVRQPPNKWLSNARMTHYQAMLLDAERVHFGPTVSLNPATLLPLPSGGNHHDCLQILAETHGTRPDLTDQPLPDADLTWYTDGSSFIRNGEREAGAAVTTESEVIWAAPLPPGTSAQRAELIALTQALKMAEGKKLTVYTDSRYAFATTHVHGEIYRRRGWLTSEGKEIKNKNEILALLEALFLPKRLSIIHCPGHQKGDSPQAKGNRLADDTAKKAATETHSSLTVLPAGKRTADGSEFEKRTADGSEFESPKKKAKVE

SEQ ID NO: 7712 - protein, 2095 aa, synthetic construct
MPAAKRVKLDGGDKKYSIGLDIGTNSVGWAVITDEYKVPSKKFKVLGNTDRHSIKKNLIGALLFDSGETAEATRLKRTARRRYTRRKNRICYLQEIFSNEMAKVDDSFFHRLEESFLVEEDKKHERHPIFGNIVDEVAYHEKYPTIYHLRKKLVDSTDKADLRLIYLALAHMIKFRGHFLIEGDLNPDNSDVDKLFIQLVQTYNQLFEENPINASGVDAKAILSARLSKSRRLENLIAQLPGEKKNGLFGNLIALSLGLTPNFKSNFDLAEDAKLQLSKDTYDDDLDNLLAQIGDQYADLFLAAKNLSDAILLSDILRVNTEITKAPLSASMIKRYDEHHQDLTLLKALVRQQLPEKYKEIFFDQSKNGYAGYIDGGASQEEFYKFIKPILEKMDGTEELLVKLNREDLLRKQRTFDNGSIPHQIHLGELHAILRRQEDFYPFLKDNREKIEKILTFRIPYYVGPLARGNSRFAWMTRKSEETITPWNFEEVVDKGASAQSFIERMTNFDKNLPNEKVLPKHSLLYEYFTVYNELTKVKYVTEGMRKPAFLSGEQKKAIVDLLFKTNRKVTVKQLKEDYFKKIECFDSVEISGVEDRFNASLGTYHDLLKIIKDKDFLDNEENEDILEDIVLTLTLFEDREMIEERLKTYAHLFDDKVMKQLKRRRYTGWGRLSRKLINGIRDKQSGKTILDFLKSDGFANRNFMQLIHDDSLTFKEDIQKAQVSGQGDSLHEHIANLAGSPAIKKGILQTVKVVDELVKVMGRHKPENIVIEMARENQTTQKGQKNSRERMKRIEEGIKELGSQILKEHPVENTQLQNEKLYLYYLQNGRDMYVDQELDINRLSDYDVDHIVPQSFLKDDSIDNKVLTRSDKARGKSDNVPSEEVVKKMKNYWRQLLNAKLITQRKFDNLTKAERGGLSELDKAGFIKRQLVETRQITKHVAQILDSRMNTKYDENDKLIREVKVITLKSKLVSDFRKDFQFYKVREINNYHHAHDAYLNAVVGTALIKKYPKLESEFVYGDYKVYDVRKMIAKSEQEIGKATAKYFFYSNIMNFFKTEITLANGEIRKRPLIETNGETGEIVWDKGRDFATVRKVLSMPQVNIVKKTEVQTGGFSKESILPKRNSDKLIARKKDWDPKKYGGFDSPTVAYSVLVVAKVEKGKSKKLKSVKELLGITIMERSSFEKNPIDFLEAKGYKEVKKDLIIKLPKYSLFELENGRKRMLASAGELQKGNELALPSKYVNFLYLASHYEKLKGSPEDNEQKQLFVEQHKHYLDEIIEQISEFSKRVILADANLDKVLSAYNKHRDKPIREQAENIIHLFTLTNLGAPAAFKYFDTTIDRKRYTSTKEVLDATLIHQSITGLYETRIDLSQLGGDGGGSAGSAAGSGEFGGVLNLEEEYRLHEKPVPSSIDPSWLQLFPTVWAERAGMGLANQVPPVVVELRSGASPVAVRQYPMSKEAREGIRPHIQKFLDLGVLVPCRSPWNTPLLPVKKPGTNDYRPVQDLREINKRVQDIHPTVPNPYNLLSSLPPSYTWYSVLDLKDAFFCLRLHPNSQPLFAFEWKDPEKGNTGQLTWTRLPQGFKNSPTLFNEALHRDLAPFRALNPQVVLLQYVDDLLVAAPTYEDCKKGTQKLLQELSKLGYRVSAKKAQLCQREVTYLGYLLKEGKRWLTPARKATVMKIPVPTTPRQVREFLGKAGFCRLFIPGFASLAAPLYPLTKPSIPFIWTEEHQQAFDHIKKALLSAPALALPDLTKPFTLYIDERAGVARGVLTQTLGPWRRPVAYLSKKLDPVASGWPTCLKAVAAVALLLKDADKLTLGQNVTVIASHSLESIVRQPPDRWMTNARMTHYQSLLLNERVSFAPPAVLNPATLLPVESEATPVHRCSEILAEETGTRRDLEDQPLPGVPTWYTDGSSFITEGKRRAGAPIVDGKRTVWASSLPEGTSAQKAELVALTQALRLAEGKNINIYTDSRYAFATAHIHGAIYKQRGWLTSAGKDIKNKEEILALLEAIHLPRRVAIIHCPGHQRGSNPVATGNRRADEAAKQAALSTRVLAGTTKPAGKRTADGSEFEKRTADGSEFESPKKKAKVE

SEQ ID NO: 7713 - protein, 2219 aa, synthetic construct
MPAAKRVKLDGGDKKYSIGLDIGTNSVGWAVITDEYKVPSKKFKVLGNTDRHSIKKNLIGALLFDSGETAEATRLKRTARRRYTRRKNRICYLQEIFSNEMAKVDDSFFHRLEESFLVEEDKKHERHPIFGNIVDEVAYHEKYPTIYHLRKKLVDSTDKADLRLIYLALAHMIKFRGHFLIEGDLNPDNSDVDKLFIQLVQTYNQLFEENPINASGVDAKAILSARLSKSRRLENLIAQLPGEKKNGLFGNLIALSLGLTPNFKSNFDLAEDAKLQLSKDTYDDDLDNLLAQIGDQYADLFLAAKNLSDAILLSDILRVNTEITKAPLSASMIKRYDEHHQDLTLLKALVRQQLPEKYKEIFFDQSKNGYAGYIDGGASQEEFYKFIKPILEKMDGTEELLVKLNREDLLRKQRTFDNGSIPHQIHLGELHAILRRQEDFYPFLKDNREKIEKILTFRIPYYVGPLARGNSRFAWMTRKSEETITPWNFEEVVDKGASAQSFIERMTNFDKNLPNEKVLPKHSLLYEYFTVYNELTKVKYVTEGMRKPAFLSGEQKKAIVDLLFKTNRKVTVKQLKEDYFKKIECFDSVEISGVEDRFNASLGTYHDLLKIIKDKDFLDNEENEDILEDIVLTLTLFEDREMIEERLKTYAHLFDDKVMKQLKRRRYTGWGRLSRKLINGIRDKQSGKTILDFLKSDGFANRNFMQLIHDDSLTFKEDIQKAQVSGQGDSLHEHIANLAGSPAIKKGILQTVKVVDELVKVMGRHKPENIVIEMARENQTTQKGQKNSRERMKRIEEGIKELGSQILKEHPVENTQLQNEKLYLYYLQNGRDMYVDQELDINRLSDYDVDHIVPQSFLKDDSIDNKVLTRSDKARGKSDNVPSEEVVKKMKNYWRQLLNAKLITQRKFDNLTKAERGGLSELDKAGFIKRQLVETRQITKHVAQILDSRMNTKYDENDKLIREVKVITLKSKLVSDFRKDFQFYKVREINNYHHAHDAYLNAVVGTALIKKYPKLESEFVYGDYKVYDVRKMIAKSEQEIGKATAKYFFYSNIMNFFKTEITLANGEIRKRPLIETNGETGEIVWDKGRDFATVRKVLSMPQVNIVKKTEVQTGGFSKESILPKRNSDKLIARKKDWDPKKYGGFDSPTVAYSVLVVAKVEKGKSKKLKSVKELLGITIMERSSFEKNPIDFLEAKGYKEVKKDLIIKLPKYSLFELENGRKRMLASAGELQKGNELALPSKYVNFLYLASHYEKLKGSPEDNEQKQLFVEQHKHYLDEIIEQISEFSKRVILADANLDKVLSAYNKHRDKPIREQAENIIHLFTLTNLGAPAAFKYFDTTIDRKRYTSTKEVLDATLIHQSITGLYETRIDLSQLGGDGGGSAGSAAGSGEFGGTLGDQGSRGSDPLPEPRVTLTVEGIPTEFLVNTGAEHSVLTKPMGKMGSKRTVVAGATGSKVYPWTTKRLLKIGQKQVTHSFLVIPECPAPLLGRDLLTKLKAQIQFSTEGPQVTWEDRPAMCLVLNLEEEYRLHEKPVPPSIDPSWLQLFPMVWAEKAGMGLANQVPPVVVELKSDASPVAVRQYPMSKEAREGIRPHIQRFLDLGILVPCQSPWNTPLLPVKKPGTNDYRPVQDLREVNKRVQDIHPTVPNPYNLLSSLPPSHTWYSVLDLKDAFFCLKLHPNSQPLFAFEWRDPEKGNTGQLTWTRLPQGFKNSPTLFDEALHRDLASFRALNPQVVMLQYVDDLLVAAPTYRDCKEGTRRLLQELSKLGYRVSAKKAQLCREEVTYLGYLLKGGKRWLTPARKATVMKIPTPTTPRQVREFLGTAGFCRLWIPGFASLAAPLYPLTREKVPFTWTEAHQEAFGRIKEALLSAPALALPDLTKPFALYVDEKEGVARGVLTQTLGPWRRPVAYLSKKLDPVASGWPTCLKAIAAVALLLKDADKLTLGQNVLVIAPHNLESIVRQPPDRWMTNARMTHYQSLLLNERVSFAPPAILNPATLLPVESDDTPIHICSEILAEETGTRPDLRDQPLPGVPAWYTDGSSFIMDGRRQAGAAIVDNKRTVWASNLPEGTSAQKAELIALTQALRLAEGKSINIYTDSRYAFATAHVHGAIYKQRGLLTSAGKDIKNKEEILALLEAIHLPKRVAIIHCPGHQRGTDPVATGNRKADEAAKQAAQSTRILTETTKNAGKRTADGSEFEKRTADGSEFESPKKKAKVE

SEQ ID NO: 7714 - protein, 2128 aa, synthetic construct
MPAAKRVKLDGGDKKYSIGLDIGTNSVGWAVITDEYKVPSKKFKVLGNTDRHSIKKNLIGALLFDSGETAEATRLKRTARRRYTRRKNRICYLQEIFSNEMAKVDDSFFHRLEESFLVEEDKKHERHPIFGNIVDEVAYHEKYPTIYHLRKKLVDSTDKADLRLIYLALAHMIKFRGHFLIEGDLNPDNSDVDKLFIQLVQTYNQLFEENPINASGVDAKAILSARLSKSRRLENLIAQLPGEKKNGLFGNLIALSLGLTPNFKSNFDLAEDAKLQLSKDTYDDDLDNLLAQIGDQYADLFLAAKNLSDAILLSDILRVNTEITKAPLSASMIKRYDEHHQDLTLLKALVRQQLPEKYKEIFFDQSKNGYAGYIDGGASQEEFYKFIKPILEKMDGTEELLVKLNREDLLRKQRTFDNGSIPHQIHLGELHAILRRQEDFYPFLKDNREKIEKILTFRIPYYVGPLARGNSRFAWMTRKSEETITPWNFEEVVDKGASAQSFIERMTNFDKNLPNEKVLPKHSLLYEYFTVYNELTKVKYVTEGMRKPAFLSGEQKKAIVDLLFKTNRKVTVKQLKEDYFKKIECFDSVEISGVEDRFNASLGTYHDLLKIIKDKDFLDNEENEDILEDIVLTLTLFEDREMIEERLKTYAHLFDDKVMKQLKRRRYTGWGRLSRKLINGIRDKQSGKTILDFLKSDGFANRNFMQLIHDDSLTFKEDIQKAQVSGQGDSLHEHIANLAGSPAIKKGILQTVKVVDELVKVMGRHKPENIVIEMARENQTTQKGQKNSRERMKRIEEGIKELGSQILKEHPVENTQLQNEKLYLYYLQNGRDMYVDQELDINRLSDYDVDHIVPQSFLKDDSIDNKVLTRSDKARGKSDNVPSEEVVKKMKNYWRQLLNAKLITQRKFDNLTKAERGGLSELDKAGFIKRQLVETRQITKHVAQILDSRMNTKYDENDKLIREVKVITLKSKLVSDFRKDFQFYKVREINNYHHAHDAYLNAVVGTALIKKYPKLESEFVYGDYKVYDVRKMIAKSEQEIGKATAKYFFYSNIMNFFKTEITLANGEIRKRPLIETNGETGEIVWDKGRDFATVRKVLSMPQVNIVKKTEVQTGGFSKESILPKRNSDKLIARKKDWDPKKYGGFDSPTVAYSVLVVAKVEKGKSKKLKSVKELLGITIMERSSFEKNPIDFLEAKGYKEVKKDLIIKLPKYSLFELENGRKRMLASAGELQKGNELALPSKYVNFLYLASHYEKLKGSPEDNEQKQLFVEQHKHYLDEIIEQISEFSKRVILADANLDKVLSAYNKHRDKPIREQAENIIHLFTLTNLGAPAAFKYFDTTIDRKRYTSTKEVLDATLIHQSITGLYETRIDLSQLGGDGGGSAGSAAGSGEFGGLLGRDLLTKLKAQIQFSTEGPQVTWEDRPAMCLVLNLEEEYRLHEKPVPPSIDPSWLQLFPMVWAEKAGMGLANQVPPVVVELKSDASPVAVRQYPMSKEAREGIRPHIQRFLDLGILVPCQSPWNTPLLPVKKPGTNDYRPVQDLREVNKRVQDIHPTVPNPYNLLSSLPPSHTWYSVLDLKDAFFCLKLHPNSQPLFAFEWRDPEKGNTGQLTWTRLPQGFKNSPTLFNEALHRDLASFRALNPQVVMLQYVDDLLVAAPTYRDCKEGTRRLLQELSKLGYRVSAKKAQLCREEVTYLGYLLKGGKRWLTPARKATVMKIPTPTTPRQVREFLGTAGFCRLWIPGFASLAAPLYPLTRPKVPFTWTEAHQEAFGRIKEALLSAPALALPDLTKPFALYVDEKEGVARGVLTQTLGPWRRPVAYLSKKLDPVASGWPTCLKAIAAVALLLKDADKLTLGQNVLVIAPHNLESIVRQPPDRWMTNARMTHYQSLLLNERVSFAPPAILNPATLLPVESDDTPIHICSEILAEETGTRPDLRDQPLPGVPAWYTDGSSFIMDGRRQAGAAIVDNKRTVWASNLPEGTSAQKAELIALTQALRLAEGKSINIYTDSRYAFATAHVHGAIYKQRGWLTSAGKDIKNKEEILALLEAIHLPKRVAIIHCPGHQRGTDPVATGNRKADEAAKQAAQSTRILTETTKNAGKRTADGSEFEKRTADGSEFESPKKKAKVE

SEQ ID NO: 7715 - protein, 2219 aa, synthetic construct
MPAAKRVKLDGGDKKYSIGLDIGTNSVGWAVITDEYKVPSKKFKVLGNTDRHSIKKNLIGALLFDSGETAEATRLKRTARRRYTRRKNRICYLQEIFSNEMAKVDDSFFHRLEESFLVEEDKKHERHPIFGNIVDEVAYHEKYPTIYHLRKKLVDSTDKADLRLIYLALAHMIKFRGHFLIEGDLNPDNSDVDKLFIQLVQTYNQLFEENPINASGVDAKAILSARLSKSRRLENLIAQLPGEKKNGLFGNLIALSLGLTPNFKSNFDLAEDAKLQLSKDTYDDDLDNLLAQIGDQYADLFLAAKNLSDAILLSDILRVNTEITKAPLSASMIKRYDEHHQDLTLLKALVRQQLPEKYKEIFFDQSKNGYAGYIDGGASQEEFYKFIKPILEKMDGTEELLVKLNREDLLRKQRTFDNGSIPHQIHLGELHAILRRQEDFYPFLKDNREKIEKILTFRIPYYVGPLARGNSRFAWMTRKSEETITPWNFEEVVDKGASAQSFIERMTNFDKNLPNEKVLPKHSLLYEYFTVYNELTKVKYVTEGMRKPAFLSGEQKKAIVDLLFKTNRKVTVKQLKEDYFKKIECFDSVEISGVEDRFNASLGTYHDLLKIIKDKDFLDNEENEDILEDIVLTLTLFEDREMIEERLKTYAHLFDDKVMKQLKRRRYTGWGRLSRKLINGIRDKQSGKTILDFLKSDGFANRNFMQLIHDDSLTFKEDIQKAQVSGQGDSLHEHIANLAGSPAIKKGILQTVKVVDELVKVMGRHKPENIVIEMARENQTTQKGQKNSRERMKRIEEGIKELGSQILKEHPVENTQLQNEKLYLYYLQNGRDMYVDQELDINRLSDYDVDHIVPQSFLKDDSIDNKVLTRSDKARGKSDNVPSEEVVKKMKNYWRQLLNAKLITQRKFDNLTKAERGGLSELDKAGFIKRQLVETRQITKHVAQILDSRMNTKYDENDKLIREVKVITLKSKLVSDFRKDFQFYKVREINNYHHAHDAYLNAVVGTALIKKYPKLESEFVYGDYKVYDVRKMIAKSEQEIGKATAKYFFYSNIMNFFKTEITLANGEIRKRPLIETNGETGEIVWDKGRDFATVRKVLSMPQVNIVKKTEVQTGGFSKESILPKRNSDKLIARKKDWDPKKYGGFDSPTVAYSVLVVAKVEKGKSKKLKSVKELLGITIMERSSFEKNPIDFLEAKGYKEVKKDLIIKLPKYSLFELENGRKRMLASAGELQKGNELALPSKYVNFLYLASHYEKLKGSPEDNEQKQLFVEQHKHYLDEIIEQISEFSKRVILADANLDKVLSAYNKHRDKPIREQAENIIHLFTLTNLGAPAAFKYFDTTIDRKRYTSTKEVLDATLIHQSITGLYETRIDLSQLGGDGGGSAGSAAGSGEFGGTLGDQGSRGSDPLPEPRVTLTVEGIPTEFLVNTGAEHSVLTKPMGKMGSKRTVVAGATGSKVYPWTTKRLLKIGQKQVTHSFLVIPECPAPLLGRDLLTKLKAQIQFSTEGPQVTWEDRPAMCLVLNLEEEYRLHEKPVPPSIDPSWLQLFPMVWAEKAGMGLANQVPPVVVELKSDASPVAVRQYPMSKEAREGIRPHIQRFLDLGILVPCQSPWNTPLLPVKKPGTNDYRPVQDLREVNKRVQDIHPTVPNPYNLLSSLPPSHTWYSVLDLKDAFFCLKLHPNSQPLFAFEWRDPEKGNTGQLTWTRLPQGFKNSPTLFNEALHRDLASFRALNPQVVMLQYVDDLLVAAPTYRDCKEGTRRLLQELSKLGYRVSAKKAQLCREEVTYLGYLLKGGKRWLTPARKATVMKIPTPTTPRQVREFLGTAGFCRLWIPGFASLAAPLYPLTRPKVPFTWTEAHQEAFGRIKEALLSAPALALPDLTKPFALYVDEKEGVARGVLTQTLGPWRRPVAYLSKKLDPVASGWPTCLKAIAAVALLLKDADKLTLGQNVLVIAPHNLESIVRQPPDRWMTNARMTHYQSLLLNERVSFAPPAILNPATLLPVESDDTPIHICSEILAEETGTRPDLRDQPLPGVPAWYTDGSSFIMDGRRQAGAAIVDNKRTVWASNLPEGTSAQKAELIALTQALRLAEGKSINIYTDSRYAFATAHVHGAIYKQRGWLTSAGKDIKNKEEILALLEAIHLPKRVAIIHCPGHQRGTDPVATGNRKADEAAKQAAQSTRILTETTKNAGKRTADGSEFEKRTADGSEFESPKKKAKVE

SEQ ID NO: 7716 - protein, 2097 aa, synthetic construct
MPAAKRVKLDGGDKKYSIGLDIGTNSVGWAVITDEYKVPSKKFKVLGNTDRHSIKKNLIGALLFDSGETAEATRLKRTARRRYTRRKNRICYLQEIFSNEMAKVDDSFFHRLEESFLVEEDKKHERHPIFGNIVDEVAYHEKYPTIYHLRKKLVDSTDKADLRLIYLALAHMIKFRGHFLIEGDLNPDNSDVDKLFIQLVQTYNQLFEENPINASGVDAKAILSARLSKSRRLENLIAQLPGEKKNGLFGNLIALSLGLTPNFKSNFDLAEDAKLQLSKDTYDDDLDNLLAQIGDQYADLFLAAKNLSDAILLSDILRVNTEITKAPLSASMIKRYDEHHQDLTLLKALVRQQLPEKYKEIFFDQSKNGYAGYIDGGASQEEFYKFIKPILEKMDGTEELLVKLNREDLLRKQRTFDNGSIPHQIHLGELHAILRRQEDFYPFLKDNREKIEKILTFRIPYYVGPLARGNSRFAWMTRKSEETITPWNFEEVVDKGASAQSFIERMTNFDKNLPNEKVLPKHSLLYEYFTVYNELTKVKYVTEGMRKPAFLSGEQKKAIVDLLFKTNRKVTVKQLKEDYFKKIECFDSVEISGVEDRFNASLGTYHDLLKIIKDKDFLDNEENEDILEDIVLTLTLFEDREMIEERLKTYAHLFDDKVMKQLKRRRYTGWGRLSRKLINGIRDKQSGKTILDFLKSDGFANRNFMQLIHDDSLTFKEDIQKAQVSGQGDSLHEHIANLAGSPAIKKGILQTVKVVDELVKVMGRHKPENIVIEMARENQTTQKGQKNSRERMKRIEEGIKELGSQILKEHPVENTQLQNEKLYLYYLQNGRDMYVDQELDINRLSDYDVDHIVPQSFLKDDSIDNKVLTRSDKARGKSDNVPSEEVVKKMKNYWRQLLNAKLITQRKFDNLTKAERGGLSELDKAGFIKRQLVETRQITKHVAQILDSRMNTKYDENDKLIREVKVITLKSKLVSDFRKDFQFYKVREINNYHHAHDAYLNAVVGTALIKKYPKLESEFVYGDYKVYDVRKMIAKSEQEIGKATAKYFFYSNIMNFFKTEITLANGEIRKRPLIETNGETGEIVWDKGRDFATVRKVLSMPQVNIVKKTEVQTGGFSKESILPKRNSDKLIARKKDWDPKKYGGFDSPTVAYSVLVVAKVEKGKSKKLKSVKELLGITIMERSSFEKNPIDFLEAKGYKEVKKDLIIKLPKYSLFELENGRKRMLASAGELQKGNELALPSKYVNFLYLASHYEKLKGSPEDNEQKQLFVEQHKHYLDEIIEQISEFSKRVILADANLDKVLSAYNKHRDKPIREQAENIIHLFTLTNLGAPAAFKYFDTTIDRKRYTSTKEVLDATLIHQSITGLYETRIDLSQLGGDGGGSAGSAAGSGEFGGTLNLEDEYRLYETSAEPEVSPGSTWLSDFPQAWAETGGMGLAVRQAPLIIPLKATSTPVSIKQYPMSQEAKLGIKPHIQRLLDQGILVPCQSPWNTPLLPVKKPGTNDYRPVQDLREVNKRVEDIHPTVPNPYNLLSGLPPSHRWYTVLDLKDAFFCLRLHPTSQPLFAFEWRDPGMGISGQLTWTRLPQGFKNSPTLFNEALHRDLADFRIQHPDLILLQYVDDILLAATSELDCQQGTRALLLTLGNLGYRASAKKAQLCQKQVKYLGYLLKEGQRWLTEARKETVMGQPTPKTPRQLREFLGTAGFCRLWIPGFAEMAAPLYPLTKPGTLFNWGPDQQKAYQEIKQALLTAPALGLPDLTKPFELFVDEKQGYAKGVLTQKLGPWRRPVAYLSKKLDPVAAGWPPCLRMVAAIAVLRKDAGKLTMGQPLVILAPHAVEALVKQPPDRWLSNARMTHYQAMLLDTDRVQFGPVVALNPATLLPLPEEGAPHDCLEILAETHGTRPDLTDQPIPDADHTWYTDGSSFLQEGQRKAGAAVTTETEVIWARALPAGTSAQRAELIALTQALKMAEGKRLNVYTDSRYAFATAHIHGEIYRRRGWLTSEGREIKNKSEILALLKALFLPKRLSIIHCLGHQKGDSAEARGNRLADQAAREAAIKTPPDTSTLLAGKRTADGSEFEKRTADGSEFESPKKKAKVE

SEQ ID NO: 7717 - protein, 2097 aa, synthetic construct
MPAAKRVKLDGGDKKYSIGLDIGTNSVGWAVITDEYKVPSKKFKVLGNTDRHSIKKNLIGALLFDSGETAEATRLKRTARRRYTRRKNRICYLQEIFSNEMAKVDDSFFHRLEESFLVEEDKKHERHPIFGNIVDEVAYHEKYPTIYHLRKKLVDSTDKADLRLIYLALAHMIKFRGHFLIEGDLNPDNSDVDKLFIQLVQTYNQLFEENPINASGVDAKAILSARLSKSRRLENLIAQLPGEKKNGLFGNLIALSLGLTPNFKSNFDLAEDAKLQLSKDTYDDDLDNLLAQIGDQYADLFLAAKNLSDAILLSDILRVNTEITKAPLSASMIKRYDEHHQDLTLLKALVRQQLPEKYKEIFFDQSKNGYAGYIDGGASQEEFYKFIKPILEKMDGTEELLVKLNREDLLRKQRTFDNGSIPHQIHLGELHAILRRQEDFYPFLKDNREKIEKILTFRIPYYVGPLARGNSRFAWMTRKSEETITPWNFEEVVDKGASAQSFIERMTNFDKNLPNEKVLPKHSLLYEYFTVYNELTKVKYVTEGMRKPAFLSGEQKKAIVDLLFKTNRKVTVKQLKEDYFKKIECFDSVEISGVEDRFNASLGTYHDLLKIIKDKDFLDNEENEDILEDIVLTLTLFEDREMIEERLKTYAHLFDDKVMKQLKRRRYTGWGRLSRKLINGIRDKQSGKTILDFLKSDGFANRNFMQLIHDDSLTFKEDIQKAQVSGQGDSLHEHIANLAGSPAIKKGILQTVKVVDELVKVMGRHKPENIVIEMARENQTTQKGQKNSRERMKRIEEGIKELGSQILKEHPVENTQLQNEKLYLYYLQNGRDMYVDQELDINRLSDYDVDHIVPQSFLKDDSIDNKVLTRSDKARGKSDNVPSEEVVKKMKNYWRQLLNAKLITQRKFDNLTKAERGGLSELDKAGFIKRQLVETRQITKHVAQILDSRMNTKYDENDKLIREVKVITLKSKLVSDFRKDFQFYKVREINNYHHAHDAYLNAVVGTALIKKYPKLESEFVYGDYKVYDVRKMIAKSEQEIGKATAKYFFYSNIMNFFKTEITLANGEIRKRPLIETNGETGEIVWDKGRDFATVRKVLSMPQVNIVKKTEVQTGGFSKESILPKRNSDKLIARKKDWDPKKYGGFDSPTVAYSVLVVAKVEKGKSKKLKSVKELLGITIMERSSFEKNPIDFLEAKGYKEVKKDLIIKLPKYSLFELENGRKRMLASAGELQKGNELALPSKYVNFLYLASHYEKLKGSPEDNEQKQLFVEQHKHYLDEIIEQISEFSKRVILADANLDKVLSAYNKHRDKPIREQAENIIHLFTLTNLGAPAAFKYFDTTIDRKRYTSTKEVLDATLIHQSITGLYETRIDLSQLGGDGGGSAGSAAGSGEFGGTLNIEDEHRLHETSKEPDVSLGSTWLSDFPQAWAETGGMGLAVRQAPLIIPLKATSTPVSIKQYPMSQEARLGIKPHIQRLLDQGILVPCQSPWNTPLLPVKKPGTNDYRPVQDLREVNKRVEDIHPTVPNPYNLLSGLPPSHQWYTVLDLKDAFFCLRLHPTSQPLFAFEWRDPEMGISGQLTWTRLPQGFKNSPTLFDEALHRDLADFRIQHPDLILLQYVDDLLLAATSELDCQQGTRALLQTLGNLGYRASAKKAQICQKQVKYLGYLLKEGQRWLTEARKETVMGQPTPKTPRQLREFLGTAGFCRLWIPGFAEMAAPLYPLTKTGTLFNWGPDQQKAYQEIKQALLTAPALGLPDLTKPFELFVDEKQGYAKGVLTQKLGPWRRPVAYLSKKLDPVAAGWPPCLRMVAAIAVLTKDAGKLTMGQPLVILAPHAVEALVKQPPDRWLSNARMTHYQALLLDTDRVQFGPVVALNPATLLPLPEEGLQHNCLDILAEAHGTRPDLTDQPLPDADHTWYTDGSSLLQEGQRKAGAAVTTETEVIWAKALPAGTSAQRAELIALTQALKMAEGKKLNVYTDSRYAFATAHIHGEIYRRRGLLTSEGKEIKNKDEILALLKALFLPKRLSIIHCPGHQKGHSAEARGNRMADQAARKAAITETPDTSTLLAGKRTADGSEFEKRTADGSEFESPKKKAKVE

SEQ ID NO: 7718 - protein, 2177 aa, synthetic construct
MPAAKRVKLDGGDKKYSIGLDIGTNSVGWAVITDEYKVPSKKFKVLGNTDRHSIKKNLIGALLFDSGETAEATRLKRTARRRYTRRKNRICYLQEIFSNEMAKVDDSFFHRLEESFLVEEDKKHERHPIFGNIVDEVAYHEKYPTIYHLRKKLVDSTDKADLRLIYLALAHMIKFRGHFLIEGDLNPDNSDVDKLFIQLVQTYNQLFEENPINASGVDAKAILSARLSKSRRLENLIAQLPGEKKNGLFGNLIALSLGLTPNFKSNFDLAEDAKLQLSKDTYDDDLDNLLAQIGDQYADLFLAAKNLSDAILLSDILRVNTEITKAPLSASMIKRYDEHHQDLTLLKALVRQQLPEKYKEIFFDQSKNGYAGYIDGGASQEEFYKFIKPILEKMDGTEELLVKLNREDLLRKQRTFDNGSIPHQIHLGELHAILRRQEDFYPFLKDNREKIEKILTFRIPYYVGPLARGNSRFAWMTRKSEETITPWNFEEVVDKGASAQSFIERMTNFDKNLPNEKVLPKHSLLYEYFTVYNELTKVKYVTEGMRKPAFLSGEQKKAIVDLLFKTNRKVTVKQLKEDYFKKIECFDSVEISGVEDRFNASLGTYHDLLKIIKDKDFLDNEENEDILEDIVLTLTLFEDREMIEERLKTYAHLFDDKVMKQLKRRRYTGWGRLSRKLINGIRDKQSGKTILDFLKSDGFANRNFMQLIHDDSLTFKEDIQKAQVSGQGDSLHEHIANLAGSPAIKKGILQTVKVVDELVKVMGRHKPENIVIEMARENQTTQKGQKNSRERMKRIEEGIKELGSQILKEHPVENTQLQNEKLYLYYLQNGRDMYVDQELDINRLSDYDVDHIVPQSFLKDDSIDNKVLTRSDKARGKSDNVPSEEVVKKMKNYWRQLLNAKLITQRKFDNLTKAERGGLSELDKAGFIKRQLVETRQITKHVAQILDSRMNTKYDENDKLIREVKVITLKSKLVSDFRKDFQFYKVREINNYHHAHDAYLNAVVGTALIKKYPKLESEFVYGDYKVYDVRKMIAKSEQEIGKATAKYFFYSNIMNFFKTEITLANGEIRKRPLIETNGETGEIVWDKGRDFATVRKVLSMPQVNIVKKTEVQTGGFSKESILPKRNSDKLIARKKDWDPKKYGGFDSPTVAYSVLVVAKVEKGKSKKLKSVKELLGITIMERSSFEKNPIDFLEAKGYKEVKKDLIIKLPKYSLFELENGRKRMLASAGELQKGNELALPSKYVNFLYLASHYEKLKGSPEDNEQKQLFVEQHKHYLDEIIEQISEFSKRVILADANLDKVLSAYNKHRDKPIREQAENIIHLFTLTNLGAPAAFKYFDTTIDRKRYTSTKEVLDATLIHQSITGLYETRIDLSQLGGDGGGSAGSAAGSGEFGGMDPLQLLQPLEAEIKGTKLKAHWNSGATITCVPQAFLEEEVPIKNIWIKTIHGEKEQPVYYLTFKIQGRKVEAEVISSPYDYILVSPSDIPWLMKKPLQLTTLVPLQEYEERLLKQTMLTGSYKEKLQSLFLKYDALWQHWENQVGHRRIKPHHIATGTVNPRPQKQYPINPKAKASIQTVINDLLKQGVLIQQNSIMNTPVYPVPKPDGKWRMVLDYREVNKTIPLIAAQNQHSAGILSSIFRGKYKTTLDLSNGFWAHSITPESYWLTAFTWLGQQYCWTRLPQGFLNSPALFNADVVDLLKEVPNVQVYVDDIYISHDDPREHLEQLEKVFSLLLNAGYVVSLKKSEIAQHEVEFLGFNITKEGRGLTETFKQKLLNITPPRDLKQLQSILGLLNFARNFIPNFSELVKPLYNIIATAPGKYITWTTDNSQQLQNIISMLNSAENLEERNPEVRLIMKVNTSPSAGYIRFYNEFAKRPIMYLNYVYTKAEVKFTNTEKLLTTIHKGLIKALDLGMGQEILVYSPIVSMTKIQKTPLPERKALPIRWITWMSYLEDPRIQFHYDKTLPELQQVPTVTDDIIAKIKHPSEFSMVFYTDGSAIKHPNVNKSHNAGMGIAQVQFKPEFTVINTWSIPLGDHTAQLAEVAAVEFACKKALKIDGPVLIVTDSFYVAESVNKELPYWQSNGFFNNKKKPLKHVSKWKSIADCIQLKPDIIIIHEKGHQPTASTFHTEGNNLADKLATQGSYVVNAGKRTADGSEFEKRTADGSEFESPKKKAKVE

SEQ ID NO: 7719 - protein, 2097 aa, synthetic construct
MPAAKRVKLDGGDKKYSIGLDIGTNSVGWAVITDEYKVPSKKFKVLGNTDRHSIKKNLIGALLFDSGETAEATRLKRTARRRYTRRKNRICYLQEIFSNEMAKVDDSFFHRLEESFLVEEDKKHERHPIFGNIVDEVAYHEKYPTIYHLRKKLVDSTDKADLRLIYLALAHMIKFRGHFLIEGDLNPDNSDVDKLFIQLVQTYNQLFEENPINASGVDAKAILSARLSKSRRLENLIAQLPGEKKNGLFGNLIALSLGLTPNFKSNFDLAEDAKLQLSKDTYDDDLDNLLAQIGDQYADLFLAAKNLSDAILLSDILRVNTEITKAPLSASMIKRYDEHHQDLTLLKALVRQQLPEKYKEIFFDQSKNGYAGYIDGGASQEEFYKFIKPILEKMDGTEELLVKLNREDLLRKQRTFDNGSIPHQIHLGELHAILRRQEDFYPFLKDNREKIEKILTFRIPYYVGPLARGNSRFAWMTRKSEETITPWNFEEVVDKGASAQSFIERMTNFDKNLPNEKVLPKHSLLYEYFTVYNELTKVKYVTEGMRKPAFLSGEQKKAIVDLLFKTNRKVTVKQLKEDYFKKIECFDSVEISGVEDRFNASLGTYHDLLKIIKDKDFLDNEENEDILEDIVLTLTLFEDREMIEERLKTYAHLFDDKVMKQLKRRRYTGWGRLSRKLINGIRDKQSGKTILDFLKSDGFANRNFMQLIHDDSLTFKEDIQKAQVSGQGDSLHEHIANLAGSPAIKKGILQTVKVVDELVKVMGRHKPENIVIEMARENQTTQKGQKNSRERMKRIEEGIKELGSQILKEHPVENTQLQNEKLYLYYLQNGRDMYVDQELDINRLSDYDVDHIVPQSFLKDDSIDNKVLTRSDKARGKSDNVPSEEVVKKMKNYWRQLLNAKLITQRKFDNLTKAERGGLSELDKAGFIKRQLVETRQITKHVAQILDSRMNTKYDENDKLIREVKVITLKSKLVSDFRKDFQFYKVREINNYHHAHDAYLNAVVGTALIKKYPKLESEFVYGDYKVYDVRKMIAKSEQEIGKATAKYFFYSNIMNFFKTEITLANGEIRKRPLIETNGETGEIVWDKGRDFATVRKVLSMPQVNIVKKTEVQTGGFSKESILPKRNSDKLIARKKDWDPKKYGGFDSPTVAYSVLVVAKVEKGKSKKLKSVKELLGITIMERSSFEKNPIDFLEAKGYKEVKKDLIIKLPKYSLFELENGRKRMLASAGELQKGNELALPSKYVNFLYLASHYEKLKGSPEDNEQKQLFVEQHKHYLDEIIEQISEFSKRVILADANLDKVLSAYNKHRDKPIREQAENIIHLFTLTNLGAPAAFKYFDTTIDRKRYTSTKEVLDATLIHQSITGLYETRIDLSQLGGDGGGSAGSAAGSGEFGGTLNIEDEYRLHETSKEPDVPLGSTWLSDFPQAWAETGGMGLAVRQAPLIIPLKATSTPVSIKQYPMSQEARLGIKPHIQRLLDQGILVPCQSPWNTPLLPVKKPGTNDYRPVQDLREVNKRVEDIHPTVPNPYNLLSGLPPSHQWYTVLDLKDAFFCLRLHPTSQPLFAFEWRDPEMGISGQLTWTRLPQGFKNSPTLFNEALHRDLADFRIQHPDLILLQYVDDLLLAATSEQDCQRGTRALLQTLGNLGYRASAKKAQICQKQVKYLGYLLKEGQRWLTEARKETVMGQPTPKTPRQLREFLGTAGFCRLWIPGFAEMAAPLYPLTKPGTLFNWGPDQQKAYQEIKQALLTAPALGLPDLTKPFELFVDEKQGYAKGVLTQKLGPWRRPVAYLSKKLDPVAAGWPPCLRMVAAIAVLTKDAGKLTMGQPLVILAPHAVEALVKQPPDRWLSNARMTHYQAMLLDTDRVQFGPVVALNPATLLPLPEKEAPHDCLEILAETHGTRPDLTDQPIPDADYTWYTDGSSFLQEGQRRAGAAVTTETEVIWARALPAGTSAQRAELIALTQALKMAEGKKLNVYTDSRYAFATAHVHGEIYRRRGWLTSEGREIKNKNEILALLKALFLPKRLSIIHCPGHQKGNSAEARGNRMADQAAREAAMKAVLETSTLLAGKRTADGSEFEKRTADGSEFESPKKKAKVE

SEQ ID NO: 7720 - protein, 2120 aa, synthetic construct
MPAAKRVKLDGGDKKYSIGLDIGTNSVGWAVITDEYKVPSKKFKVLGNTDRHSIKKNLIGALLFDSGETAEATRLKRTARRRYTRRKNRICYLQEIFSNEMAKVDDSFFHRLEESFLVEEDKKHERHPIFGNIVDEVAYHEKYPTIYHLRKKLVDSTDKADLRLIYLALAHMIKFRGHFLIEGDLNPDNSDVDKLFIQLVQTYNQLFEENPINASGVDAKAILSARLSKSRRLENLIAQLPGEKKNGLFGNLIALSLGLTPNFKSNFDLAEDAKLQLSKDTYDDDLDNLLAQIGDQYADLFLAAKNLSDAILLSDILRVNTEITKAPLSASMIKRYDEHHQDLTLLKALVRQQLPEKYKEIFFDQSKNGYAGYIDGGASQEEFYKFIKPILEKMDGTEELLVKLNREDLLRKQRTFDNGSIPHQIHLGELHAILRRQEDFYPFLKDNREKIEKILTFRIPYYVGPLARGNSRFAWMTRKSEETITPWNFEEVVDKGASAQSFIERMTNFDKNLPNEKVLPKHSLLYEYFTVYNELTKVKYVTEGMRKPAFLSGEQKKAIVDLLFKTNRKVTVKQLKEDYFKKIECFDSVEISGVEDRFNASLGTYHDLLKIIKDKDFLDNEENEDILEDIVLTLTLFEDREMIEERLKTYAHLFDDKVMKQLKRRRYTGWGRLSRKLINGIRDKQSGKTILDFLKSDGFANRNFMQLIHDDSLTFKEDIQKAQVSGQGDSLHEHIANLAGSPAIKKGILQTVKVVDELVKVMGRHKPENIVIEMARENQTTQKGQKNSRERMKRIEEGIKELGSQILKEHPVENTQLQNEKLYLYYLQNGRDMYVDQELDINRLSDYDVDHIVPQSFLKDDSIDNKVLTRSDKARGKSDNVPSEEVVKKMKNYWRQLLNAKLITQRKFDNLTKAERGGLSELDKAGFIKRQLVETRQITKHVAQILDSRMNTKYDENDKLIREVKVITLKSKLVSDFRKDFQFYKVREINNYHHAHDAYLNAVVGTALIKKYPKLESEFVYGDYKVYDVRKMIAKSEQEIGKATAKYFFYSNIMNFFKTEITLANGEIRKRPLIETNGETGEIVWDKGRDFATVRKVLSMPQVNIVKKTEVQTGGFSKESILPKRNSDKLIARKKDWDPKKYGGFDSPTVAYSVLVVAKVEKGKSKKLKSVKELLGITIMERSSFEKNPIDFLEAKGYKEVKKDLIIKLPKYSLFELENGRKRMLASAGELQKGNELALPSKYVNFLYLASHYEKLKGSPEDNEQKQLFVEQHKHYLDEIIEQISEFSKRVILADANLDKVLSAYNKHRDKPIREQAENIIHLFTLTNLGAPAAFKYFDTTIDRKRYTSTKEVLDATLIHQSITGLYETRIDLSQLGGDGGSGGSSGGSSGSETPGTSESATPESSGGSSGGSSGGTAPLEEEYRLFLEAPIQNVTLLEQWKREIPKVWAEINPPGLASTQAPIHVQLLSTALPVRVRQYPITLEAKRSLRETIRKFRAAGILRPVHSPWNTPLLPVRKSGTSEYRMVQDLREVNKRVETIHPTVPNPYTLLSLLPPDRIWYSVLDLKDAFFCIPLAPESQLIFAFEWADAEEGESGQLTWTRLPQGFKNSPTLFDEALNRDLQGFRLDHPSVSLLQYVDDLLIAADTQAACLSATRDLLMTLAELGYRVSGKKAQLCQEEVTYLGFKIHKGSRSLSNSRTQAILQIPVPKTKRQVREFLGTIGYCRLWIPGFAELAQPLYAATRGGNDPLVWGEKEEEAFQSLKLALTQPPALALPSLDKPFQLFVEETSGAAKGVLTQALGPWKRPVAYLSKRLDPVAAGWPRCLRAIAAAALLTREASKLTFGQDIEITSSHNLESLLRSPPDKWLTNARITQYQVLLLDPPRVRFKQTAALNPATLLPETDDTLPIHHCLDTLDSLTSTRPDLTDQPLAQAEATLFTDGSSYIRDGKRYAGAAVVTLDSVIWAEPLPIGTSAQKAELIALTKALEWSKDKSVNIYTDSRYAFATLHVHGMIYRERGLLTAGGKAIKNAPEILALLTAVWLPKRVAVMHCKGHQKDDAPTSTGNRRADEVAREVAIRPLSTQATISAGKRTADGSEFEKRTADGSEFESPKKKAKVE

SEQ ID NO: 7721 - protein, 2120 aa, synthetic construct
MPAAKRVKLDGGDKKYSIGLDIGTNSVGWAVITDEYKVPSKKFKVLGNTDRHSIKKNLIGALLFDSGETAEATRLKRTARRRYTRRKNRICYLQEIFSNEMAKVDDSFFHRLEESFLVEEDKKHERHPIFGNIVDEVAYHEKYPTIYHLRKKLVDSTDKADLRLIYLALAHMIKFRGHFLIEGDLNPDNSDVDKLFIQLVQTYNQLFEENPINASGVDAKAILSARLSKSRRLENLIAQLPGEKKNGLFGNLIALSLGLTPNFKSNFDLAEDAKLQLSKDTYDDDLDNLLAQIGDQYADLFLAAKNLSDAILLSDILRVNTEITKAPLSASMIKRYDEHHQDLTLLKALVRQQLPEKYKEIFFDQSKNGYAGYIDGGASQEEFYKFIKPILEKMDGTEELLVKLNREDLLRKQRTFDNGSIPHQIHLGELHAILRRQEDFYPFLKDNREKIEKILTFRIPYYVGPLARGNSRFAWMTRKSEETITPWNFEEVVDKGASAQSFIERMTNFDKNLPNEKVLPKHSLLYEYFTVYNELTKVKYVTEGMRKPAFLSGEQKKAIVDLLFKTNRKVTVKQLKEDYFKKIECFDSVEISGVEDRFNASLGTYHDLLKIIKDKDFLDNEENEDILEDIVLTLTLFEDREMIEERLKTYAHLFDDKVMKQLKRRRYTGWGRLSRKLINGIRDKQSGKTILDFLKSDGFANRNFMQLIHDDSLTFKEDIQKAQVSGQGDSLHEHIANLAGSPAIKKGILQTVKVVDELVKVMGRHKPENIVIEMARENQTTQKGQKNSRERMKRIEEGIKELGSQILKEHPVENTQLQNEKLYLYYLQNGRDMYVDQELDINRLSDYDVDHIVPQSFLKDDSIDNKVLTRSDKARGKSDNVPSEEVVKKMKNYWRQLLNAKLITQRKFDNLTKAERGGLSELDKAGFIKRQLVETRQITKHVAQILDSRMNTKYDENDKLIREVKVITLKSKLVSDFRKDFQFYKVREINNYHHAHDAYLNAVVGTALIKKYPKLESEFVYGDYKVYDVRKMIAKSEQEIGKATAKYFFYSNIMNFFKTEITLANGEIRKRPLIETNGETGEIVWDKGRDFATVRKVLSMPQVNIVKKTEVQTGGFSKESILPKRNSDKLIARKKDWDPKKYGGFDSPTVAYSVLVVAKVEKGKSKKLKSVKELLGITIMERSSFEKNPIDFLEAKGYKEVKKDLIIKLPKYSLFELENGRKRMLASAGELQKGNELALPSKYVNFLYLASHYEKLKGSPEDNEQKQLFVEQHKHYLDEIIEQISEFSKRVILADANLDKVLSAYNKHRDKPIREQAENIIHLFTLTNLGAPAAFKYFDTTIDRKRYTSTKEVLDATLIHQSITGLYETRIDLSQLGGDGGSGGSSGGSSGSETPGTSESATPESSGGSSGGSSGGTAPLEEEYRLFLEAPIQNVTLLEQWKREIPKVWAEINPPGLASTQAPIHVQLLSTALPVRVRQYPITLEAKRSLRETIRKFRAAGILRPVHSPWNTPLLPVRKSGTSEYRMVQDLREVNKRVETIHPTVPNPYTLLSLLPPDRIWYSVLDLKDAFFCIPLAPESQLIFAFEWADAEEGESGQLTWTRLPQGFKNSPTLFNEALNRDLQGFRLDHPSVSLLQYVDDLLIAADTQAACLSATRDLLMTLAELGYRVSGKKAQLCQEEVTYLGFKIHKGSRSLSNSRTQAILQIPVPKTKRQVREFLGTIGYCRLWIPGFAELAQPLYAATRPGNDPLVWGEKEEEAFQSLKLALTQPPALALPSLDKPFQLFVEETSGAAKGVLTQALGPWKRPVAYLSKRLDPVAAGWPRCLRAIAAAALLTREASKLTFGQDIEITSSHNLESLLRSPPDKWLTNARITQYQVLLLDPPRVRFKQTAALNPATLLPETDDTLPIHHCLDTLDSLTSTRPDLTDQPLAQAEATLFTDGSSYIRDGKRYAGAAVVTLDSVIWAEPLPIGTSAQKAELIALTKALEWSKDKSVNIYTDSRYAFATLHVHGMIYRERGWLTAGGKAIKNAPEILALLTAVWLPKRVAVMHCKGHQKDDAPTSTGNRRADEVAREVAIRPLSTQATISAGKRTADGSEFEKRTADGSEFESPKKKAKVE

SEQ ID NO: 7722 - protein, 2124 aa, synthetic construct
MPAAKRVKLDGGDKKYSIGLDIGTNSVGWAVITDEYKVPSKKFKVLGNTDRHSIKKNLIGALLFDSGETAEATRLKRTARRRYTRRKNRICYLQEIFSNEMAKVDDSFFHRLEESFLVEEDKKHERHPIFGNIVDEVAYHEKYPTIYHLRKKLVDSTDKADLRLIYLALAHMIKFRGHFLIEGDLNPDNSDVDKLFIQLVQTYNQLFEENPINASGVDAKAILSARLSKSRRLENLIAQLPGEKKNGLFGNLIALSLGLTPNFKSNFDLAEDAKLQLSKDTYDDDLDNLLAQIGDQYADLFLAAKNLSDAILLSDILRVNTEITKAPLSASMIKRYDEHHQDLTLLKALVRQQLPEKYKEIFFDQSKNGYAGYIDGGASQEEFYKFIKPILEKMDGTEELLVKLNREDLLRKQRTFDNGSIPHQIHLGELHAILRRQEDFYPFLKDNREKIEKILTFRIPYYVGPLARGNSRFAWMTRKSEETITPWNFEEVVDKGASAQSFIERMTNFDKNLPNEKVLPKHSLLYEYFTVYNELTKVKYVTEGMRKPAFLSGEQKKAIVDLLFKTNRKVTVKQLKEDYFKKIECFDSVEISGVEDRFNASLGTYHDLLKIIKDKDFLDNEENEDILEDIVLTLTLFEDREMIEERLKTYAHLFDDKVMKQLKRRRYTGWGRLSRKLINGIRDKQSGKTILDFLKSDGFANRNFMQLIHDDSLTFKEDIQKAQVSGQGDSLHEHIANLAGSPAIKKGILQTVKVVDELVKVMGRHKPENIVIEMARENQTTQKGQKNSRERMKRIEEGIKELGSQILKEHPVENTQLQNEKLYLYYLQNGRDMYVDQELDINRLSDYDVDHIVPQSFLKDDSIDNKVLTRSDKARGKSDNVPSEEVVKKMKNYWRQLLNAKLITQRKFDNLTKAERGGLSELDKAGFIKRQLVETRQITKHVAQILDSRMNTKYDENDKLIREVKVITLKSKLVSDFRKDFQFYKVREINNYHHAHDAYLNAVVGTALIKKYPKLESEFVYGDYKVYDVRKMIAKSEQEIGKATAKYFFYSNIMNFFKTEITLANGEIRKRPLIETNGETGEIVWDKGRDFATVRKVLSMPQVNIVKKTEVQTGGFSKESILPKRNSDKLIARKKDWDPKKYGGFDSPTVAYSVLVVAKVEKGKSKKLKSVKELLGITIMERSSFEKNPIDFLEAKGYKEVKKDLIIKLPKYSLFELENGRKRMLASAGELQKGNELALPSKYVNFLYLASHYEKLKGSPEDNEQKQLFVEQHKHYLDEIIEQISEFSKRVILADANLDKVLSAYNKHRDKPIREQAENIIHLFTLTNLGAPAAFKYFDTTIDRKRYTSTKEVLDATLIHQSITGLYETRIDLSQLGGDGGSGGSSGGSSGSETPGTSESATPESSGGSSGGSSGGTVSLQDEHRLFDIPVTTSLPDVWLQDFPQAWAETGGLGRAKCQAPIIIDLKPTAVPVSIKQYPMSLEAHMGIRQHIIKFLELGVLRPCRSPWNTPLLPVKKPGTQDYRPVQDLREINKRTVDIHPTVPNPYNLLSTLKPDYSWYTVLDLKDAFFCLPLAPQSQELFAFEWKDPERGISGQLTWTRLPQGFKNSPTLFDEALHRDLTDFRTQHPEVTLLQYVDDLLLAAPTKKACTQGTRHLLQELGEKGYRASAKKAQICQTKVTYLGYILSEGKRWLTPGRIETVARIPPPRNPREVREFLGTAGFCRLWIPGFAELAAPLYALTKESTPFTWQTEHQLAFEALKKALLSAPALGLPDTSKPFTLFLDERQGIAKGVLTQKLGPWKRPVAYLSKKLDPVAAGWPPCLRIMAATAMLVKDSAKLTLGQPLTVITPHTLEAIVRQPPDRWITNARLTHYQALLLDTDRVQFGPPVTLNPATLLPVPENQPSPHDCRQVLAETHGTREDLKDQELPDADHTWYTDGSSYLDSGTRRAGAAVVDGHNTIWAQSLPPGTSAQKAELIALTKALELSKGKKANIYTDSRYAFATAHTHGSIYERRGLLTSEGKEIKNKAEIIALLKALFLPQEVAIIHCPGHQKGQDPVAVGNRQADRVARQAAMAEVLTLATEPDNTSHITAGKRTADGSEFEKRTADGSEFESPKKKAKVE

SEQ ID NO: 7723 - protein, 2124 aa, synthetic construct
MPAAKRVKLDGGDKKYSIGLDIGTNSVGWAVITDEYKVPSKKFKVLGNTDRHSIKKNLIGALLFDSGETAEATRLKRTARRRYTRRKNRICYLQEIFSNEMAKVDDSFFHRLEESFLVEEDKKHERHPIFGNIVDEVAYHEKYPTIYHLRKKLVDSTDKADLRLIYLALAHMIKFRGHFLIEGDLNPDNSDVDKLFIQLVQTYNQLFEENPINASGVDAKAILSARLSKSRRLENLIAQLPGEKKNGLFGNLIALSLGLTPNFKSNFDLAEDAKLQLSKDTYDDDLDNLLAQIGDQYADLFLAAKNLSDAILLSDILRVNTEITKAPLSASMIKRYDEHHQDLTLLKALVRQQLPEKYKEIFFDQSKNGYAGYIDGGASQEEFYKFIKPILEKMDGTEELLVKLNREDLLRKQRTFDNGSIPHQIHLGELHAILRRQEDFYPFLKDNREKIEKILTFRIPYYVGPLARGNSRFAWMTRKSEETITPWNFEEVVDKGASAQSFIERMTNFDKNLPNEKVLPKHSLLYEYFTVYNELTKVKYVTEGMRKPAFLSGEQKKAIVDLLFKTNRKVTVKQLKEDYFKKIECFDSVEISGVEDRFNASLGTYHDLLKIIKDKDFLDNEENEDILEDIVLTLTLFEDREMIEERLKTYAHLFDDKVMKQLKRRRYTGWGRLSRKLINGIRDKQSGKTILDFLKSDGFANRNFMQLIHDDSLTFKEDIQKAQVSGQGDSLHEHIANLAGSPAIKKGILQTVKVVDELVKVMGRHKPENIVIEMARENQTTQKGQKNSRERMKRIEEGIKELGSQILKEHPVENTQLQNEKLYLYYLQNGRDMYVDQELDINRLSDYDVDHIVPQSFLKDDSIDNKVLTRSDKARGKSDNVPSEEVVKKMKNYWRQLLNAKLITQRKFDNLTKAERGGLSELDKAGFIKRQLVETRQITKHVAQILDSRMNTKYDENDKLIREVKVITLKSKLVSDFRKDFQFYKVREINNYHHAHDAYLNAVVGTALIKKYPKLESEFVYGDYKVYDVRKMIAKSEQEIGKATAKYFFYSNIMNFFKTEITLANGEIRKRPLIETNGETGEIVWDKGRDFATVRKVLSMPQVNIVKKTEVQTGGFSKESILPKRNSDKLIARKKDWDPKKYGGFDSPTVAYSVLVVAKVEKGKSKKLKSVKELLGITIMERSSFEKNPIDFLEAKGYKEVKKDLIIKLPKYSLFELENGRKRMLASAGELQKGNELALPSKYVNFLYLASHYEKLKGSPEDNEQKQLFVEQHKHYLDEIIEQISEFSKRVILADANLDKVLSAYNKHRDKPIREQAENIIHLFTLTNLGAPAAFKYFDTTIDRKRYTSTKEVLDATLIHQSITGLYETRIDLSQLGGDGGSGGSSGGSSGSETPGTSESATPESSGGSSGGSSGGTVSLQDEHRLFDIPVTTSLPDVWLQDFPQAWAETGGLGRAKCQAPIIIDLKPTAVPVSIKQYPMSLEAHMGIRQHIIKFLELGVLRPCRSPWNTPLLPVKKPGTQDYRPVQDLREINKRTVDIHPTVPNPYNLLSTLKPDYSWYTVLDLKDAFFCLPLAPQSQELFAFEWKDPERGISGQLTWTRLPQGFKNSPTLFNEALHRDLTDFRTQHPEVTLLQYVDDLLLAAPTKKACTQGTRHLLQELGEKGYRASAKKAQICQTKVTYLGYILSEGKRWLTPGRIETVARIPPPRNPREVREFLGTAGFCRLWIPGFAELAAPLYALTKPSTPFTWQTEHQLAFEALKKALLSAPALGLPDTSKPFTLFLDERQGIAKGVLTQKLGPWKRPVAYLSKKLDPVAAGWPPCLRIMAATAMLVKDSAKLTLGQPLTVITPHTLEAIVRQPPDRWITNARLTHYQALLLDTDRVQFGPPVTLNPATLLPVPENQPSPHDCRQVLAETHGTREDLKDQELPDADHTWYTDGSSYLDSGTRRAGAAVVDGHNTIWAQSLPPGTSAQKAELIALTKALELSKGKKANIYTDSRYAFATAHTHGSIYERRGWLTSEGKEIKNKAEIIALLKALFLPQEVAIIHCPGHQKGQDPVAVGNRQADRVARQAAMAEVLTLATEPDNTSHITAGKRTADGSEFEKRTADGSEFESPKKKAKVE

SEQ ID NO: 7724 - protein, 2109 aa, synthetic construct
MPAAKRVKLDGGDKKYSIGLDIGTNSVGWAVITDEYKVPSKKFKVLGNTDRHSIKKNLIGALLFDSGETAEATRLKRTARRRYTRRKNRICYLQEIFSNEMAKVDDSFFHRLEESFLVEEDKKHERHPIFGNIVDEVAYHEKYPTIYHLRKKLVDSTDKADLRLIYLALAHMIKFRGHFLIEGDLNPDNSDVDKLFIQLVQTYNQLFEENPINASGVDAKAILSARLSKSRRLENLIAQLPGEKKNGLFGNLIALSLGLTPNFKSNFDLAEDAKLQLSKDTYDDDLDNLLAQIGDQYADLFLAAKNLSDAILLSDILRVNTEITKAPLSASMIKRYDEHHQDLTLLKALVRQQLPEKYKEIFFDQSKNGYAGYIDGGASQEEFYKFIKPILEKMDGTEELLVKLNREDLLRKQRTFDNGSIPHQIHLGELHAILRRQEDFYPFLKDNREKIEKILTFRIPYYVGPLARGNSRFAWMTRKSEETITPWNFEEVVDKGASAQSFIERMTNFDKNLPNEKVLPKHSLLYEYFTVYNELTKVKYVTEGMRKPAFLSGEQKKAIVDLLFKTNRKVTVKQLKEDYFKKIECFDSVEISGVEDRFNASLGTYHDLLKIIKDKDFLDNEENEDILEDIVLTLTLFEDREMIEERLKTYAHLFDDKVMKQLKRRRYTGWGRLSRKLINGIRDKQSGKTILDFLKSDGFANRNFMQLIHDDSLTFKEDIQKAQVSGQGDSLHEHIANLAGSPAIKKGILQTVKVVDELVKVMGRHKPENIVIEMARENQTTQKGQKNSRERMKRIEEGIKELGSQILKEHPVENTQLQNEKLYLYYLQNGRDMYVDQELDINRLSDYDVDHIVPQSFLKDDSIDNKVLTRSDKARGKSDNVPSEEVVKKMKNYWRQLLNAKLITQRKFDNLTKAERGGLSELDKAGFIKRQLVETRQITKHVAQILDSRMNTKYDENDKLIREVKVITLKSKLVSDFRKDFQFYKVREINNYHHAHDAYLNAVVGTALIKKYPKLESEFVYGDYKVYDVRKMIAKSEQEIGKATAKYFFYSNIMNFFKTEITLANGEIRKRPLIETNGETGEIVWDKGRDFATVRKVLSMPQVNIVKKTEVQTGGFSKESILPKRNSDKLIARKKDWDPKKYGGFDSPTVAYSVLVVAKVEKGKSKKLKSVKELLGITIMERSSFEKNPIDFLEAKGYKEVKKDLIIKLPKYSLFELENGRKRMLASAGELQKGNELALPSKYVNFLYLASHYEKLKGSPEDNEQKQLFVEQHKHYLDEIIEQISEFSKRVILADANLDKVLSAYNKHRDKPIREQAENIIHLFTLTNLGAPAAFKYFDTTIDRKRYTSTKEVLDATLIHQSITGLYETRIDLSQLGGDGGSGGSSGGSSGSETPGTSESATPESSGGSSGGSSGGVPWILKKPLELTIKLDLEEQQGTLLNNSILSKKGKEELKQLFEKYSALWQSWENQVGHRRIRPHKIATGTVKPTPQKQYHINPKAKPDIQIVINDLLKQGVLIQKESTMNTPVYPVPKPNGRWRMVLDYRAVNKVTPLIAVQNQHSYGILGSLFKGRYKTTIDLSNGFWAHPIVPEDYWITAFTWQGKQYCWTVLPQGFLNSPGLFTGDVVDLLQGIPNVEVYVDDVYISHDSEKEHLEYLDILFNRLKEAGYIISLKKSNIANSIVDFLGFQITNEGRGLTDTFKEKLENITAPTTLKQLQSILGLLNFARNFIPDFTELIAPLYALIPKSTKNYVPWQIEHSTTLETLITKLNGAEYLQGRKGDKTLIMKVNASYTTGYIRYYNEGEKKPISYVSIVFSKTELKFTELEKLLTTVHKGLLKALDLSMGQNIHVYSPIVSMQNIQKTPQTAKKALASRWLSWLSYLEDPRIRFFYDPQMPALKDLPAVDTGKDNKKHPSNFQHIFYTDGSAITSPTKEGHLNAGMGIVYFINKDGNLQKQQEWSISLGNHTAQFAEIAAFEFALKKCLPLGGNILVVTDSNYVAKAYNEELDVWASNGFVNNRKKPLKHISKWKSVADLKRLRPDVVVTHEPGHQKLDSSPHAYGNNLADQLATQASFKVHAGKRTADGSEFEKRTADGSEFESPKKKAKVE

SEQ ID NO: 7725 - protein, 2109 aa, synthetic construct
MPAAKRVKLDGGDKKYSIGLDIGTNSVGWAVITDEYKVPSKKFKVLGNTDRHSIKKNLIGALLFDSGETAEATRLKRTARRRYTRRKNRICYLQEIFSNEMAKVDDSFFHRLEESFLVEEDKKHERHPIFGNIVDEVAYHEKYPTIYHLRKKLVDSTDKADLRLIYLALAHMIKFRGHFLIEGDLNPDNSDVDKLFIQLVQTYNQLFEENPINASGVDAKAILSARLSKSRRLENLIAQLPGEKKNGLFGNLIALSLGLTPNFKSNFDLAEDAKLQLSKDTYDDDLDNLLAQIGDQYADLFLAAKNLSDAILLSDILRVNTEITKAPLSASMIKRYDEHHQDLTLLKALVRQQLPEKYKEIFFDQSKNGYAGYIDGGASQEEFYKFIKPILEKMDGTEELLVKLNREDLLRKQRTFDNGSIPHQIHLGELHAILRRQEDFYPFLKDNREKIEKILTFRIPYYVGPLARGNSRFAWMTRKSEETITPWNFEEVVDKGASAQSFIERMTNFDKNLPNEKVLPKHSLLYEYFTVYNELTKVKYVTEGMRKPAFLSGEQKKAIVDLLFKTNRKVTVKQLKEDYFKKIECFDSVEISGVEDRFNASLGTYHDLLKIIKDKDFLDNEENEDILEDIVLTLTLFEDREMIEERLKTYAHLFDDKVMKQLKRRRYTGWGRLSRKLINGIRDKQSGKTILDFLKSDGFANRNFMQLIHDDSLTFKEDIQKAQVSGQGDSLHEHIANLAGSPAIKKGILQTVKVVDELVKVMGRHKPENIVIEMARENQTTQKGQKNSRERMKRIEEGIKELGSQILKEHPVENTQLQNEKLYLYYLQNGRDMYVDQELDINRLSDYDVDHIVPQSFLKDDSIDNKVLTRSDKARGKSDNVPSEEVVKKMKNYWRQLLNAKLITQRKFDNLTKAERGGLSELDKAGFIKRQLVETRQITKHVAQILDSRMNTKYDENDKLIREVKVITLKSKLVSDFRKDFQFYKVREINNYHHAHDAYLNAVVGTALIKKYPKLESEFVYGDYKVYDVRKMIAKSEQEIGKATAKYFFYSNIMNFFKTEITLANGEIRKRPLIETNGETGEIVWDKGRDFATVRKVLSMPQVNIVKKTEVQTGGFSKESILPKRNSDKLIARKKDWDPKKYGGFDSPTVAYSVLVVAKVEKGKSKKLKSVKELLGITIMERSSFEKNPIDFLEAKGYKEVKKDLIIKLPKYSLFELENGRKRMLASAGELQKGNELALPSKYVNFLYLASHYEKLKGSPEDNEQKQLFVEQHKHYLDEIIEQISEFSKRVILADANLDKVLSAYNKHRDKPIREQAENIIHLFTLTNLGAPAAFKYFDTTIDRKRYTSTKEVLDATLIHQSITGLYETRIDLSQLGGDGGSGGSSGGSSGSETPGTSESATPESSGGSSGGSSGGVPWLTQQPLQLTILVPLQEYQEKILSKTALPEDQKQQLKTLFVKYDNLWQHWENQVGHRKIRPHNIATGDYPPRPQKQYPINPKAKPSIQIVIDDLLKQGVLTPQNSTMNTPVYPVPKPDGRWRMVLDYREVNKTIPLTAAQNQHSAGILATIVRQKYKTTLDLANGFWAHPITPESYWLTAFTWQGKQYCWTRLPQGFLNSPALFNADVVDLLKEIPNVQVYVDDIYLSHDDPKEHVQQLEKVFQILLQAGYVVSLKKSEIGQKTVEFLGFNITKEGRGLTDTFKTKLLNITPPKDLKQLQSILGLLNFARNFIPNFAELVQPLYNLIAPAKGKYIEWSEENTKQLNMVIEALNTASNLEERLPEQRLVIKVNTSPSAGYVRYYNETGKKPIMYLNYVFSKAELKFSMLEKLLTTMHKALIKAMDLAMGQEILVYSPIVSMTKIQKTPLPERKALPIRWITWMTYLEDPRIQFHYDKTLPELKHIPDVYTSSQSPVKHPSQYEGVFYTDGSAIKSPDPTKSNNAGMGIVHATYKPEYQVLNQWSIPLGNHTAQMAEIAAVEFACKKALKIPGPVLVITDSFYVAESANKELPYWKSNGFVNNKKKPLKHISKWKSIAECLSMKPDITIQHEKGISLQIPVFILKGNALADKLATQGSYVVNAGKRTADGSEFEKRTADGSEFESPKKKAKVE

SEQ ID NO: 7726 - protein, 2198 aa, synthetic construct
MPAAKRVKLDGGDKKYSIGLDIGTNSVGWAVITDEYKVPSKKFKVLGNTDRHSIKKNLIGALLFDSGETAEATRLKRTARRRYTRRKNRICYLQEIFSNEMAKVDDSFFHRLEESFLVEEDKKHERHPIFGNIVDEVAYHEKYPTIYHLRKKLVDSTDKADLRLIYLALAHMIKFRGHFLIEGDLNPDNSDVDKLFIQLVQTYNQLFEENPINASGVDAKAILSARLSKSRRLENLIAQLPGEKKNGLFGNLIALSLGLTPNFKSNFDLAEDAKLQLSKDTYDDDLDNLLAQIGDQYADLFLAAKNLSDAILLSDILRVNTEITKAPLSASMIKRYDEHHQDLTLLKALVRQQLPEKYKEIFFDQSKNGYAGYIDGGASQEEFYKFIKPILEKMDGTEELLVKLNREDLLRKQRTFDNGSIPHQIHLGELHAILRRQEDFYPFLKDNREKIEKILTFRIPYYVGPLARGNSRFAWMTRKSEETITPWNFEEVVDKGASAQSFIERMTNFDKNLPNEKVLPKHSLLYEYFTVYNELTKVKYVTEGMRKPAFLSGEQKKAIVDLLFKTNRKVTVKQLKEDYFKKIECFDSVEISGVEDRFNASLGTYHDLLKIIKDKDFLDNEENEDILEDIVLTLTLFEDREMIEERLKTYAHLFDDKVMKQLKRRRYTGWGRLSRKLINGIRDKQSGKTILDFLKSDGFANRNFMQLIHDDSLTFKEDIQKAQVSGQGDSLHEHIANLAGSPAIKKGILQTVKVVDELVKVMGRHKPENIVIEMARENQTTQKGQKNSRERMKRIEEGIKELGSQILKEHPVENTQLQNEKLYLYYLQNGRDMYVDQELDINRLSDYDVDHIVPQSFLKDDSIDNKVLTRSDKARGKSDNVPSEEVVKKMKNYWRQLLNAKLITQRKFDNLTKAERGGLSELDKAGFIKRQLVETRQITKHVAQILDSRMNTKYDENDKLIREVKVITLKSKLVSDFRKDFQFYKVREINNYHHAHDAYLNAVVGTALIKKYPKLESEFVYGDYKVYDVRKMIAKSEQEIGKATAKYFFYSNIMNFFKTEITLANGEIRKRPLIETNGETGEIVWDKGRDFATVRKVLSMPQVNIVKKTEVQTGGFSKESILPKRNSDKLIARKKDWDPKKYGGFDSPTVAYSVLVVAKVEKGKSKKLKSVKELLGITIMERSSFEKNPIDFLEAKGYKEVKKDLIIKLPKYSLFELENGRKRMLASAGELQKGNELALPSKYVNFLYLASHYEKLKGSPEDNEQKQLFVEQHKHYLDEIIEQISEFSKRVILADANLDKVLSAYNKHRDKPIREQAENIIHLFTLTNLGAPAAFKYFDTTIDRKRYTSTKEVLDATLIHQSITGLYETRIDLSQLGGDGGSGGSSGGSSGSETPGTSESATPESSGGSSGGSSGGMNPLQLLQPLPAEIKGTKLLAHWNSGATITCIPESFLEDEQPIKKTLIKTIHGEKQQNVYYVTFKVKGRKVEAEVIASPYEYILLSPTDVPWLTQQPLQLTILVPLQEYQEKILSKTALPEDQKQQLKTLFVKYDNLWQHWENQVGHRKIRPHNIATGDYPPRPQKQYPINPKAKPSIQIVIDDLLKQGVLTPQNSTMNTPVYPVPKPDGRWRMVLDYREVNKTIPLTAAQNQHSAGILATIVRQKYKTTLDLANGFWAHPITPESYWLTAFTWQGKQYCWTRLPQGFLNSPALFNADVVDLLKEIPNVQVYVDDIYLSHDDPKEHVQQLEKVFQILLQAGYVVSLKKSEIGQKTVEFLGFNITKEGRGLTDTFKTKLLNITPPKDLKQLQSILGLLNFARNFIPNFAELVQPLYNLIAPAKGKYIEWSEENTKQLNMVIEALNTASNLEERLPEQRLVIKVNTSPSAGYVRYYNETGKKPIMYLNYVFSKAELKFSMLEKLLTTMHKALIKAMDLAMGQEILVYSPIVSMTKIQKTPLPERKALPIRWITWMTYLEDPRIQFHYDKTLPELKHIPDVYTSSQSPVKHPSQYEGVFYTDGSAIKSPDPTKSNNAGMGIVHATYKPEYQVLNQWSIPLGNHTAQMAEIAAVEFACKKALKIPGPVLVITDSFYVAESANKELPYWKSNGFVNNKKKPLKHISKWKSIAECLSMKPDITIQHEKGISLQIPVFILKGNALADKLATQGSYVVNAGKRTADGSEFEKRTADGSEFESPKKKAKVE

SEQ ID NO: 7727 - protein, 2149 aa, synthetic construct
MPAAKRVKLDGGDKKYSIGLDIGTNSVGWAVITDEYKVPSKKFKVLGNTDRHSIKKNLIGALLFDSGETAEATRLKRTARRRYTRRKNRICYLQEIFSNEMAKVDDSFFHRLEESFLVEEDKKHERHPIFGNIVDEVAYHEKYPTIYHLRKKLVDSTDKADLRLIYLALAHMIKFRGHFLIEGDLNPDNSDVDKLFIQLVQTYNQLFEENPINASGVDAKAILSARLSKSRRLENLIAQLPGEKKNGLFGNLIALSLGLTPNFKSNFDLAEDAKLQLSKDTYDDDLDNLLAQIGDQYADLFLAAKNLSDAILLSDILRVNTEITKAPLSASMIKRYDEHHQDLTLLKALVRQQLPEKYKEIFFDQSKNGYAGYIDGGASQEEFYKFIKPILEKMDGTEELLVKLNREDLLRKQRTFDNGSIPHQIHLGELHAILRRQEDFYPFLKDNREKIEKILTFRIPYYVGPLARGNSRFAWMTRKSEETITPWNFEEVVDKGASAQSFIERMTNFDKNLPNEKVLPKHSLLYEYFTVYNELTKVKYVTEGMRKPAFLSGEQKKAIVDLLFKTNRKVTVKQLKEDYFKKIECFDSVEISGVEDRFNASLGTYHDLLKIIKDKDFLDNEENEDILEDIVLTLTLFEDREMIEERLKTYAHLFDDKVMKQLKRRRYTGWGRLSRKLINGIRDKQSGKTILDFLKSDGFANRNFMQLIHDDSLTFKEDIQKAQVSGQGDSLHEHIANLAGSPAIKKGILQTVKVVDELVKVMGRHKPENIVIEMARENQTTQKGQKNSRERMKRIEEGIKELGSQILKEHPVENTQLQNEKLYLYYLQNGRDMYVDQELDINRLSDYDVDHIVPQSFLKDDSIDNKVLTRSDKARGKSDNVPSEEVVKKMKNYWRQLLNAKLITQRKFDNLTKAERGGLSELDKAGFIKRQLVETRQITKHVAQILDSRMNTKYDENDKLIREVKVITLKSKLVSDFRKDFQFYKVREINNYHHAHDAYLNAVVGTALIKKYPKLESEFVYGDYKVYDVRKMIAKSEQEIGKATAKYFFYSNIMNFFKTEITLANGEIRKRPLIETNGETGEIVWDKGRDFATVRKVLSMPQVNIVKKTEVQTGGFSKESILPKRNSDKLIARKKDWDPKKYGGFDSPTVAYSVLVVAKVEKGKSKKLKSVKELLGITIMERSSFEKNPIDFLEAKGYKEVKKDLIIKLPKYSLFELENGRKRMLASAGELQKGNELALPSKYVNFLYLASHYEKLKGSPEDNEQKQLFVEQHKHYLDEIIEQISEFSKRVILADANLDKVLSAYNKHRDKPIREQAENIIHLFTLTNLGAPAAFKYFDTTIDRKRYTSTKEVLDATLIHQSITGLYETRIDLSQLGGDGGSGGSSGGSSGSETPGTSESATPESSGGSSGGSSGGLLGRDLLTKLKAQIQFSTEGPQVTWEDRPAMCLVLNLEEEYRLHEKPVPPSIDPSWLQLFPMVWAEKAGMGLANQVPPVVVELKSDASPVAVRQYPMSKEAREGIRPHIQRFLDLGILVPCQSPWNTPLLPVKKPGTNDYRPVQDLREVNKRVQDIHPTVPNPYNLLSSLPPSHTWYSVLDLKDAFFCLKLHPNSQPLFAFEWRDPEKGNTGQLTWTRLPQGFKNSPTLFDEALHRDLASFRALNPQVVMLQYVDDLLVAAPTYRDCKEGTRRLLQELSKLGYRVSAKKAQLCREEVTYLGYLLKGGKRWLTPARKATVMKIPTPTTPRQVREFLGTAGFCRLWIPGFASLAAPLYPLTREKVPFTWTEAHQEAFGRIKEALLSAPALALPDLTKPFALYVDEKEGVARGVLTQTLGPWRRPVAYLSKKLDPVASGWPTCLKAIAAVALLLKDADKLTLGQNVLVIAPHNLESIVRQPPDRWMTNARMTHYQSLLLNERVSFAPPAILNPATLLPVESDDTPIHICSEILAEETGTRPDLRDQPLPGVPAWYTDGSSFIMDGRRQAGAAIVDNKRTVWASNLPEGTSAQKAELIALTQALRLAEGKSINIYTDSRYAFATAHVHGAIYKQRGLLTSAGKDIKNKEEILALLEAIHLPKRVAIIHCPGHQRGTDPVATGNRKADEAAKQAAQSTRILTETTKNAGKRTADGSEFEKRTADGSEFESPKKKAKVE

SEQ ID NO: 7728 - protein, 2149 aa, synthetic construct
MPAAKRVKLDGGDKKYSIGLDIGTNSVGWAVITDEYKVPSKKFKVLGNTDRHSIKKNLIGALLFDSGETAEATRLKRTARRRYTRRKNRICYLQEIFSNEMAKVDDSFFHRLEESFLVEEDKKHERHPIFGNIVDEVAYHEKYPTIYHLRKKLVDSTDKADLRLIYLALAHMIKFRGHFLIEGDLNPDNSDVDKLFIQLVQTYNQLFEENPINASGVDAKAILSARLSKSRRLENLIAQLPGEKKNGLFGNLIALSLGLTPNFKSNFDLAEDAKLQLSKDTYDDDLDNLLAQIGDQYADLFLAAKNLSDAILLSDILRVNTEITKAPLSASMIKRYDEHHQDLTLLKALVRQQLPEKYKEIFFDQSKNGYAGYIDGGASQEEFYKFIKPILEKMDGTEELLVKLNREDLLRKQRTFDNGSIPHQIHLGELHAILRRQEDFYPFLKDNREKIEKILTFRIPYYVGPLARGNSRFAWMTRKSEETITPWNFEEVVDKGASAQSFIERMTNFDKNLPNEKVLPKHSLLYEYFTVYNELTKVKYVTEGMRKPAFLSGEQKKAIVDLLFKTNRKVTVKQLKEDYFKKIECFDSVEISGVEDRFNASLGTYHDLLKIIKDKDFLDNEENEDILEDIVLTLTLFEDREMIEERLKTYAHLFDDKVMKQLKRRRYTGWGRLSRKLINGIRDKQSGKTILDFLKSDGFANRNFMQLIHDDSLTFKEDIQKAQVSGQGDSLHEHIANLAGSPAIKKGILQTVKVVDELVKVMGRHKPENIVIEMARENQTTQKGQKNSRERMKRIEEGIKELGSQILKEHPVENTQLQNEKLYLYYLQNGRDMYVDQELDINRLSDYDVDHIVPQSFLKDDSIDNKVLTRSDKARGKSDNVPSEEVVKKMKNYWRQLLNAKLITQRKFDNLTKAERGGLSELDKAGFIKRQLVETRQITKHVAQILDSRMNTKYDENDKLIREVKVITLKSKLVSDFRKDFQFYKVREINNYHHAHDAYLNAVVGTALIKKYPKLESEFVYGDYKVYDVRKMIAKSEQEIGKATAKYFFYSNIMNFFKTEITLANGEIRKRPLIETNGETGEIVWDKGRDFATVRKVLSMPQVNIVKKTEVQTGGFSKESILPKRNSDKLIARKKDWDPKKYGGFDSPTVAYSVLVVAKVEKGKSKKLKSVKELLGITIMERSSFEKNPIDFLEAKGYKEVKKDLIIKLPKYSLFELENGRKRMLASAGELQKGNELALPSKYVNFLYLASHYEKLKGSPEDNEQKQLFVEQHKHYLDEIIEQISEFSKRVILADANLDKVLSAYNKHRDKPIREQAENIIHLFTLTNLGAPAAFKYFDTTIDRKRYTSTKEVLDATLIHQSITGLYETRIDLSQLGGDGGSGGSSGGSSGSETPGTSESATPESSGGSSGGSSGGLLGRDLLTKLKAQIQFSTEGPQVTWEDRPAMCLVLNLEEEYRLHEKPVPPSIDPSWLQLFPMVWAEKAGMGLANQVPPVVVELKSDASPVAVRQYPMSKEAREGIRPHIQRFLDLGILVPCQSPWNTPLLPVKKPGTNDYRPVQDLREVNKRVQDIHPTVPNPYNLLSSLPPSHTWYSVLDLKDAFFCLKLHPNSQPLFAFEWRDPEKGNTGQLTWTRLPQGFKNSPTLFNEALHRDLASFRALNPQVVMLQYVDDLLVAAPTYRDCKEGTRRLLQELSKLGYRVSAKKAQLCREEVTYLGYLLKGGKRWLTPARKATVMKIPTPTTPRQVREFLGKAGFCRLFIPGFASLAAPLYPLTRPKVPFTWTEAHQEAFGRIKEALLSAPALALPDLTKPFALYVDEKEGVARGVLTQTLGPWRRPVAYLSKKLDPVASGWPTCLKAIAAVALLLKDADKLTLGQNVLVIAPHNLESIVRQPPDRWMTNARMTHYQSLLLNERVSFAPPAILNPATLLPVESDDTPIHICSEILAEETGTRPDLRDQPLPGVPAWYTDGSSFIMDGRRQAGAAIVDNKRTVWASNLPEGTSAQKAELIALTQALRLAEGKSINIYTDSRYAFATAHVHGAIYKQRGWLTSAGKDIKNKEEILALLEAIHLPKRVAIIHCPGHQRGTDPVATGNRKADEAAKQAAQSTRILTETTKNAGKRTADGSEFEKRTADGSEFESPKKKAKVE

SEQ ID NO: 7729 - protein, 2118 aa, synthetic construct
MPAAKRVKLDGGDKKYSIGLDIGTNSVGWAVITDEYKVPSKKFKVLGNTDRHSIKKNLIGALLFDSGETAEATRLKRTARRRYTRRKNRICYLQEIFSNEMAKVDDSFFHRLEESFLVEEDKKHERHPIFGNIVDEVAYHEKYPTIYHLRKKLVDSTDKADLRLIYLALAHMIKFRGHFLIEGDLNPDNSDVDKLFIQLVQTYNQLFEENPINASGVDAKAILSARLSKSRRLENLIAQLPGEKKNGLFGNLIALSLGLTPNFKSNFDLAEDAKLQLSKDTYDDDLDNLLAQIGDQYADLFLAAKNLSDAILLSDILRVNTEITKAPLSASMIKRYDEHHQDLTLLKALVRQQLPEKYKEIFFDQSKNGYAGYIDGGASQEEFYKFIKPILEKMDGTEELLVKLNREDLLRKQRTFDNGSIPHQIHLGELHAILRRQEDFYPFLKDNREKIEKILTFRIPYYVGPLARGNSRFAWMTRKSEETITPWNFEEVVDKGASAQSFIERMTNFDKNLPNEKVLPKHSLLYEYFTVYNELTKVKYVTEGMRKPAFLSGEQKKAIVDLLFKTNRKVTVKQLKEDYFKKIECFDSVEISGVEDRFNASLGTYHDLLKIIKDKDFLDNEENEDILEDIVLTLTLFEDREMIEERLKTYAHLFDDKVMKQLKRRRYTGWGRLSRKLINGIRDKQSGKTILDFLKSDGFANRNFMQLIHDDSLTFKEDIQKAQVSGQGDSLHEHIANLAGSPAIKKGILQTVKVVDELVKVMGRHKPENIVIEMARENQTTQKGQKNSRERMKRIEEGIKELGSQILKEHPVENTQLQNEKLYLYYLQNGRDMYVDQELDINRLSDYDVDHIVPQSFLKDDSIDNKVLTRSDKARGKSDNVPSEEVVKKMKNYWRQLLNAKLITQRKFDNLTKAERGGLSELDKAGFIKRQLVETRQITKHVAQILDSRMNTKYDENDKLIREVKVITLKSKLVSDFRKDFQFYKVREINNYHHAHDAYLNAVVGTALIKKYPKLESEFVYGDYKVYDVRKMIAKSEQEIGKATAKYFFYSNIMNFFKTEITLANGEIRKRPLIETNGETGEIVWDKGRDFATVRKVLSMPQVNIVKKTEVQTGGFSKESILPKRNSDKLIARKKDWDPKKYGGFDSPTVAYSVLVVAKVEKGKSKKLKSVKELLGITIMERSSFEKNPIDFLEAKGYKEVKKDLIIKLPKYSLFELENGRKRMLASAGELQKGNELALPSKYVNFLYLASHYEKLKGSPEDNEQKQLFVEQHKHYLDEIIEQISEFSKRVILADANLDKVLSAYNKHRDKPIREQAENIIHLFTLTNLGAPAAFKYFDTTIDRKRYTSTKEVLDATLIHQSITGLYETRIDLSQLGGDGGSGGSSGGSSGSETPGTSESATPESSGGSSGGSSGGTLNLEDEYRLYETSAEPEVSPGSTWLSDFPQAWAETGGMGLAVRQAPLIIPLKATSTPVSIKQYPMSQEAKLGIKPHIQRLLDQGILVPCQSPWNTPLLPVKKPGTNDYRPVQDLREVNKRVEDIHPTVPNPYNLLSGLPPSHRWYTVLDLKDAFFCLRLHPTSQPLFAFEWRDPGMGISGQLTWTRLPQGFKNSPTLFNEALHRDLADFRIQHPDLILLQYVDDILLAATSELDCQQGTRALLLTLGNLGYRASAKKAQLCQKQVKYLGYLLKEGQRWLTEARKETVMGQPTPKTPRQLREFLGKAGFCRLFIPGFAEMAAPLYPLTKPGTLFNWGPDQQKAYQEIKQALLTAPALGLPDLTKPFELFVDEKQGYAKGVLTQKLGPWRRPVAYLSKKLDPVAAGWPPCLRMVAAIAVLRKDAGKLTMGQPLVILAPHAVEALVKQPPDRWLSNARMTHYQAMLLDTDRVQFGPVVALNPATLLPLPEEGAPHDCLEILAETHGTRPDLTDQPIPDADHTWYTDGSSFLQEGQRKAGAAVTTETEVIWARALPAGTSAQRAELIALTQALKMAEGKRLNVYTDSRYAFATAHIHGEIYRRRGWLTSEGREIKNKSEILALLKALFLPKRLSIIHCLGHQKGDSAEARGNRLADQAAREAAIKTPPDTSTLLAGKRTADGSEFEKRTADGSEFESPKKKAKVE

SEQ ID NO: 7730 - protein, 2118 aa, synthetic construct
MPAAKRVKLDGGDKKYSIGLDIGTNSVGWAVITDEYKVPSKKFKVLGNTDRHSIKKNLIGALLFDSGETAEATRLKRTARRRYTRRKNRICYLQEIFSNEMAKVDDSFFHRLEESFLVEEDKKHERHPIFGNIVDEVAYHEKYPTIYHLRKKLVDSTDKADLRLIYLALAHMIKFRGHFLIEGDLNPDNSDVDKLFIQLVQTYNQLFEENPINASGVDAKAILSARLSKSRRLENLIAQLPGEKKNGLFGNLIALSLGLTPNFKSNFDLAEDAKLQLSKDTYDDDLDNLLAQIGDQYADLFLAAKNLSDAILLSDILRVNTEITKAPLSASMIKRYDEHHQDLTLLKALVRQQLPEKYKEIFFDQSKNGYAGYIDGGASQEEFYKFIKPILEKMDGTEELLVKLNREDLLRKQRTFDNGSIPHQIHLGELHAILRRQEDFYPFLKDNREKIEKILTFRIPYYVGPLARGNSRFAWMTRKSEETITPWNFEEVVDKGASAQSFIERMTNFDKNLPNEKVLPKHSLLYEYFTVYNELTKVKYVTEGMRKPAFLSGEQKKAIVDLLFKTNRKVTVKQLKEDYFKKIECFDSVEISGVEDRFNASLGTYHDLLKIIKDKDFLDNEENEDILEDIVLTLTLFEDREMIEERLKTYAHLFDDKVMKQLKRRRYTGWGRLSRKLINGIRDKQSGKTILDFLKSDGFANRNFMQLIHDDSLTFKEDIQKAQVSGQGDSLHEHIANLAGSPAIKKGILQTVKVVDELVKVMGRHKPENIVIEMARENQTTQKGQKNSRERMKRIEEGIKELGSQILKEHPVENTQLQNEKLYLYYLQNGRDMYVDQELDINRLSDYDVDHIVPQSFLKDDSIDNKVLTRSDKARGKSDNVPSEEVVKKMKNYWRQLLNAKLITQRKFDNLTKAERGGLSELDKAGFIKRQLVETRQITKHVAQILDSRMNTKYDENDKLIREVKVITLKSKLVSDFRKDFQFYKVREINNYHHAHDAYLNAVVGTALIKKYPKLESEFVYGDYKVYDVRKMIAKSEQEIGKATAKYFFYSNIMNFFKTEITLANGEIRKRPLIETNGETGEIVWDKGRDFATVRKVLSMPQVNIVKKTEVQTGGFSKESILPKRNSDKLIARKKDWDPKKYGGFDSPTVAYSVLVVAKVEKGKSKKLKSVKELLGITIMERSSFEKNPIDFLEAKGYKEVKKDLIIKLPKYSLFELENGRKRMLASAGELQKGNELALPSKYVNFLYLASHYEKLKGSPEDNEQKQLFVEQHKHYLDEIIEQISEFSKRVILADANLDKVLSAYNKHRDKPIREQAENIIHLFTLTNLGAPAAFKYFDTTIDRKRYTSTKEVLDATLIHQSITGLYETRIDLSQLGGDGGSGGSSGGSSGSETPGTSESATPESSGGSSGGSSGGTLNIEDEYRLHETSKEPDVSLGSTWLSDFPQAWAETGGMGLAVRQAPLIIPLKATSTPVSIKQYPMSQEARLGIKPHIQRLLDQGILVPCQSPWNTPLLPVKKPGTNDYRPVQDLREVNKRVEDIHPTVPNPYNLLSGLPPSHQWYTVLDLKDAFFCLRLHPTSQPLFAFEWRDPEMGISGQLTWTRLPQGFKNSPTLFNEALHRDLAGFRIQHPDLILLQYVDDLLLAATSELDCQQGTRALLQTLGDLGYRASAKKAQICQKQVKYLGYLLKEGQRWLTEARKETVMGQPIPKTPRQLREFLGTAGFCRLWIPGFAEMAAPLYPLTKPGTLFNWGPDQQKAFQEIKQALLTAPALGLPDLTKPFELFVDEKQGYAKGVLTQKLGPWRRPVAYLSKKLDPVAAGWPPCLRMVAAIAVLTKDAGKLTMGQPLVILAPHAVEALVKQPPDRWLSNARMTHYQALLLDTDRVQFGPVVALNPATLLPLPEEGLQHDCLDILAEAHGTRSDLMDQPLPDADHTWYTDGSSFLQEGQRKAGAAVTTETEVIWARALPAGTSAQRAELIALTQALKMAEGKKLNVYTDSRYAFATAHIHGEIYRRRGWLTSEGKEIKNKDEILALLKALFLPKRLSIIHCPGHQKGNSAEARGNRMADQAAREVATRETPETSTLLAGKRTADGSEFEKRTADGSEFESPKKKAKVE

SEQ ID NO: 7731 - protein, 2118 aa, synthetic construct
MPAAKRVKLDGGDKKYSIGLDIGTNSVGWAVITDEYKVPSKKFKVLGNTDRHSIKKNLIGALLFDSGETAEATRLKRTARRRYTRRKNRICYLQEIFSNEMAKVDDSFFHRLEESFLVEEDKKHERHPIFGNIVDEVAYHEKYPTIYHLRKKLVDSTDKADLRLIYLALAHMIKFRGHFLIEGDLNPDNSDVDKLFIQLVQTYNQLFEENPINASGVDAKAILSARLSKSRRLENLIAQLPGEKKNGLFGNLIALSLGLTPNFKSNFDLAEDAKLQLSKDTYDDDLDNLLAQIGDQYADLFLAAKNLSDAILLSDILRVNTEITKAPLSASMIKRYDEHHQDLTLLKALVRQQLPEKYKEIFFDQSKNGYAGYIDGGASQEEFYKFIKPILEKMDGTEELLVKLNREDLLRKQRTFDNGSIPHQIHLGELHAILRRQEDFYPFLKDNREKIEKILTFRIPYYVGPLARGNSRFAWMTRKSEETITPWNFEEVVDKGASAQSFIERMTNFDKNLPNEKVLPKHSLLYEYFTVYNELTKVKYVTEGMRKPAFLSGEQKKAIVDLLFKTNRKVTVKQLKEDYFKKIECFDSVEISGVEDRFNASLGTYHDLLKIIKDKDFLDNEENEDILEDIVLTLTLFEDREMIEERLKTYAHLFDDKVMKQLKRRRYTGWGRLSRKLINGIRDKQSGKTILDFLKSDGFANRNFMQLIHDDSLTFKEDIQKAQVSGQGDSLHEHIANLAGSPAIKKGILQTVKVVDELVKVMGRHKPENIVIEMARENQTTQKGQKNSRERMKRIEEGIKELGSQILKEHPVENTQLQNEKLYLYYLQNGRDMYVDQELDINRLSDYDVDHIVPQSFLKDDSIDNKVLTRSDKARGKSDNVPSEEVVKKMKNYWRQLLNAKLITQRKFDNLTKAERGGLSELDKAGFIKRQLVETRQITKHVAQILDSRMNTKYDENDKLIREVKVITLKSKLVSDFRKDFQFYKVREINNYHHAHDAYLNAVVGTALIKKYPKLESEFVYGDYKVYDVRKMIAKSEQEIGKATAKYFFYSNIMNFFKTEITLANGEIRKRPLIETNGETGEIVWDKGRDFATVRKVLSMPQVNIVKKTEVQTGGFSKESILPKRNSDKLIARKKDWDPKKYGGFDSPTVAYSVLVVAKVEKGKSKKLKSVKELLGITIMERSSFEKNPIDFLEAKGYKEVKKDLIIKLPKYSLFELENGRKRMLASAGELQKGNELALPSKYVNFLYLASHYEKLKGSPEDNEQKQLFVEQHKHYLDEIIEQISEFSKRVILADANLDKVLSAYNKHRDKPIREQAENIIHLFTLTNLGAPAAFKYFDTTIDRKRYTSTKEVLDATLIHQSITGLYETRIDLSQLGGDGGSGGSSGGSSGSETPGTSESATPESSGGSSGGSSGGTLNIEDEHRLHETSKEPDVSLGSTWLSDFPQAWAETGGMGLAVRQAPLIIPLKATSTPVSIKQYPMSQEARLGIKPHIQRLLDQGILVPCQSPWNTPLLPVKKPGTNDYRPVQDLREVNKRVEDIHPTVPNPYNLLSGLPPSHQWYTVLDLKDAFFCLRLHPTSQPLFAFEWRDPEMGISGQLTWTRLPQGFKNSPTLFDEALHRDLADFRIQHPDLILLQYVDDLLLAATSELDCQQGTRALLQTLGNLGYRASAKKAQICQKQVKYLGYLLKEGQRWLTEARKETVMGQPTPKTPRQLREFLGTAGFCRLWIPGFAEMAAPLYPLTKTGTLFNWGPDQQKAYQEIKQALLTAPALGLPDLTKPFELFVDEKQGYAKGVLTQKLGPWRRPVAYLSKKLDPVAAGWPPCLRMVAAIAVLTKDAGKLTMGQPLVILAPHAVEALVKQPPDRWLSNARMTHYQALLLDTDRVQFGPVVALNPATLLPLPEEGLQHNCLDILAEAHGTRPDLTDQPLPDADHTWYTDGSSLLQEGQRKAGAAVTTETEVIWAKALPAGTSAQRAELIALTQALKMAEGKKLNVYTDSRYAFATAHIHGEIYRRRGLLTSEGKEIKNKDEILALLKALFLPKRLSIIHCPGHQKGHSAEARGNRMADQAARKAAITETPDTSTLLAGKRTADGSEFEKRTADGSEFESPKKKAKVE

SEQ ID NO: 7732 - protein, 2118 aa, synthetic construct; identical to SEQ ID NO: 7731

SEQ ID NO: 7733 - protein, 2138 aa, synthetic construct
MPAAKRVKLDGGDKKYSIGLDIGTNSVGWAVITDEYKVPSKKFKVLGNTDRHSIKKNLIGALLFDSGETAEATRLKRTARRRYTRRKNRICYLQEIFSNEMAKVDDSFFHRLEESFLVEEDKKHERHPIFGNIVDEVAYHEKYPTIYHLRKKLVDSTDKADLRLIYLALAHMIKFRGHFLIEGDLNPDNSDVDKLFIQLVQTYNQLFEENPINASGVDAKAILSARLSKSRRLENLIAQLPGEKKNGLFGNLIALSLGLTPNFKSNFDLAEDAKLQLSKDTYDDDLDNLLAQIGDQYADLFLAAKNLSDAILLSDILRVNTEITKAPLSASMIKRYDEHHQDLTLLKALVRQQLPEKYKEIFFDQSKNGYAGYIDGGASQEEFYKFIKPILEKMDGTEELLVKLNREDLLRKQRTFDNGSIPHQIHLGELHAILRRQEDFYPFLKDNREKIEKILTFRIPYYVGPLARGNSRFAWMTRKSEETITPWNFEEVVDKGASAQSFIERMTNFDKNLPNEKVLPKHSLLYEYFTVYNELTKVKYVTEGMRKPAFLSGEQKKAIVDLLFKTNRKVTVKQLKEDYFKKIECFDSVEISGVEDRFNASLGTYHDLLKIIKDKDFLDNEENEDILEDIVLTLTLFEDREMIEERLKTYAHLFDDKVMKQLKRRRYTGWGRLSRKLINGIRDKQSGKTILDFLKSDGFANRNFMQLIHDDSLTFKEDIQKAQVSGQGDSLHEHIANLAGSPAIKKGILQTVKVVDELVKVMGRHKPENIVIEMARENQTTQKGQKNSRERMKRIEEGIKELGSQILKEHPVENTQLQNEKLYLYYLQNGRDMYVDQELDINRLSDYDVDHIVPQSFLKDDSIDNKVLTRSDKARGKSDNVPSEEVVKKMKNYWRQLLNAKLITQRKFDNLTKAERGGLSELDKAGFIKRQLVETRQITKHVAQILDSRMNTKYDENDKLIREVKVITLKSKLVSDFRKDFQFYKVREINNYHHAHDAYLNAVVGTALIKKYPKLESEFVYGDYKVYDVRKMIAKSEQEIGKATAKYFFYSNIMNFFKTEITLANGEIRKRPLIETNGETGEIVWDKGRDFATVRKVLSMPQVNIVKKTEVQTGGFSKESILPKRNSDKLIARKKDWDPKKYGGFDSPTVAYSVLVVAKVEKGKSKKLKSVKELLGITIMERSSFEKNPIDFLEAKGYKEVKKDLIIKLPKYSLFELENGRKRMLASAGELQKGNELALPSKYVNFLYLASHYEKLKGSPEDNEQKQLFVEQHKHYLDEIIEQISEFSKRVILADANLDKVLSAYNKHRDKPIREQAENIIHLFTLTNLGAPAAFKYFDTTIDRKRYTSTKEVLDATLIHQSITGLYETRIDLSQLGGDGGSGGSSGGSSGSETPGTSESATPESSGGSSGGSSGGWVQEISDSRPMLHIYLNGRRFLGLLNTGADKTCIAGRDWPANWPIHQTESSLQGLGMACGVARSSQPLRWQHEDKSGIIHPFVIPTLPFTLWGRDIMKDIKVRLMTDSPDDSQDLMIGAIESNLFADQISWKSDQPVWLNQWPLKQEKLQALQQLVTEQLQLGHLEESNSPWNTPVFVIKKKSGKWRLLQDLRAVNATMHDMGALQPGLPSPVAVPKGWEIIIIDLQDCFFNIKLHPEDCKRFAFSVPSPNFKRPYQRFQWKVLPQGMKNSPTLCQKFVDKAILTVRDKYQDSYIVHYMDDILLAHPSRSIVDEILTSMIQALNKHGLVVSTEKIQKYDNLKYLGTHIQGDSVSYQKLQIRTDKLRTLNDFQKLLGNINWIRPFLKLTTGELKPLFEILNGDSNPISTRKLTPEACKALQLMNERLSTARVKRLDLSQPWSLCILKTEYTPTACLWQDGVVEWIHLPHISPKVITPYDIFCTQLIIKGRHRSKELFSKDPDYIVVPYTKVQFDLLLQEKEDWPISLLGFLGEVHFHLPKDPLLTFTLQTAIIFPHMTSTTPLEKGIVIFTDGSANGRSVTYIQGREPIIKENTQNTAQQAEIVAVITAFEEVSQPFNLYTDSKYVTGLFPEIETATLSPRTKIYTELKHLQRLIHKRQEKFYIGHIRGHTGLPGPLAQGNAYADSLTRILTAGKRTADGSEFEKRTADGSEFESPKKKAKVE

SEQ ID NO: 7734 - protein, 2110 aa, synthetic construct
MPAAKRVKLDGGDKKYSIGLDIGTNSVGWAVITDEYKVPSKKFKVLGNTDRHSIKKNLIGALLFDSGETAEATRLKRTARRRYTRRKNRICYLQEIFSNEMAKVDDSFFHRLEESFLVEEDKKHERHPIFGNIVDEVAYHEKYPTIYHLRKKLVDSTDKADLRLIYLALAHMIKFRGHFLIEGDLNPDNSDVDKLFIQLVQTYNQLFEENPINASGVDAKAILSARLSKSRRLENLIAQLPGEKKNGLFGNLIALSLGLTPNFKSNFDLAEDAKLQLSKDTYDDDLDNLLAQIGDQYADLFLAAKNLSDAILLSDILRVNTEITKAPLSASMIKRYDEHHQDLTLLKALVRQQLPEKYKEIFFDQSKNGYAGYIDGGASQEEFYKFIKPILEKMDGTEELLVKLNREDLLRKQRTFDNGSIPHQIHLGELHAILRRQEDFYPFLKDNREKIEKILTFRIPYYVGPLARGNSRFAWMTRKSEETITPWNFEEVVDKGASAQSFIERMTNFDKNLPNEKVLPKHSLLYEYFTVYNELTKVKYVTEGMRKPAFLSGEQKKAIVDLLFKTNRKVTVKQLKEDYFKKIECFDSVEISGVEDRFNASLGTYHDLLKIIKDKDFLDNEENEDILEDIVLTLTLFEDREMIEERLKTYAHLFDDKVMKQLKRRRYTGWGRLSRKLINGIRDKQSGKTILDFLKSDGFANRNFMQLIHDDSLTFKEDIQKAQVSGQGDSLHEHIANLAGSPAIKKGILQTVKVVDELVKVMGRHKPENIVIEMARENQTTQKGQKNSRERMKRIEEGIKELGSQILKEHPVENTQLQNEKLYLYYLQNGRDMYVDQELDINRLSDYDVDHIVPQSFLKDDSIDNKVLTRSDKARGKSDNVPSEEVVKKMKNYWRQLLNAKLITQRKFDNLTKAERGGLSELDKAGFIKRQLVETRQITKHVAQILDSRMNTKYDENDKLIREVKVITLKSKLVSDFRKDFQFYKVREINNYHHAHDAYLNAVVGTALIKKYPKLESEFVYGDYKVYDVRKMIAKSEQEIGKATAKYFFYSNIMNFFKTEITLANGEIRKRPLIETNGETGEIVWDKGRDFATVRKVLSMPQVNIVKKTEVQTGGFSKESILPKRNSDKLIARKKDWDPKKYGGFDSPTVAYSVLVVAKVEKGKSKKLKSVKELLGITIMERSSFEKNPIDFLEAKGYKEVKKDLIIKLPKYSLFELENGRKRMLASAGELQKGNELALPSKYVNFLYLASHYEKLKGSPEDNEQKQLFVEQHKHYLDEIIEQISEFSKRVILADANLDKVLSAYNKHRDKPIREQAENIIHLFTLTNLGAPAAFKYFDTTIDRKRYTSTKEVLDATLIHQSITGLYETRIDLSQLGGDGGSGGSSGGSSGSETPGTSESATPESSGGSSGGSSGGLDDEYRLYSPLVKPDQNIQFWLEQFPQAWAETAGMGLAKQVPPQVIQLKASATPVSVRQYPLSKEAQEGIRPHVQRLIQQGILVPVQSPWNTPLLPVRKPGTNDYRPVQDLREVNKRVQDIHPTVPNPYNLLCALPPQRSWYTVLDLKDAFFCLRLHPTSQPLFAFEWRDPGTGRTGQLTWTRLPQGFKNSPTIFNEALHRDLANFRIQHPQVTLLQYVDDLLLAGATKQDCLEGTKALLLELSDLGYRASAKKAQICRREVTYLGYSLRDGQRWLTEARKKTVVQIPAPTTAKQVREFLGKAGFCRLFIPGFATLAAPLYPLTKPKGEFSWAPEHQKAFDAIKKALLSAPALALPDVTKPFTLYVDERKGVARGVLTQTLGPWRRPVAYLSKKLDPVASGWPVCLKAIAAVAILVKDADKLTLGQNITVIAPHALENIVRQPPDRWMTNARMTHYQSLLLTERVTFAPPAALNPATLLPEETDEPVTHDCHQLLIEETGVRKDLTDIPLTGEVLTWFTDGSSYVVEGKRMAGAAVVDGTRTIWASSLPEGTSAQKAELMALTQALRLAEGKSINIYTDSRYAFATAHVHGAIYKQRGWLTSAGREIKNKEEILSLLEALHLPKRLAIIHCPGHQKAKDPISRGNQMADRVAKQAAQGVNLLPAGKRTADGSEFEKRTADGSEFESPKKKAKVE

SEQ ID NO: 7735 - protein, 2110 aa, synthetic construct; identical to SEQ ID NO: 7734

SEQ ID NO: 7736 - protein, 2109 aa, synthetic construct
MPAAKRVKLDGGDKKYSIGLDIGTNSVGWAVITDEYKVPSKKFKVLGNTDRHSIKKNLIGALLFDSGETAEATRLKRTARRRYTRRKNRICYLQEIFSNEMAKVDDSFFHRLEESFLVEEDKKHERHPIFGNIVDEVAYHEKYPTIYHLRKKLVDSTDKADLRLIYLALAHMIKFRGHFLIEGDLNPDNSDVDKLFIQLVQTYNQLFEENPINASGVDAKAILSARLSKSRRLENLIAQLPGEKKNGLFGNLIALSLGLTPNFKSNFDLAEDAKLQLSKDTYDDDLDNLLAQIGDQYADLFLAAKNLSDAILLSDILRVNTEITKAPLSASMIKRYDEHHQDLTLLKALVRQQLPEKYKEIFFDQSKNGYAGYIDGGASQEEFYKFIKPILEKMDGTEELLVKLNREDLLRKQRTFDNGSIPHQIHLGELHAILRRQEDFYPFLKDNREKIEKILTFRIPYYVGPLARGNSRFAWMTRKSEETITPWNFEEVVDKGASAQSFIERMTNFDKNLPNEKVLPKHSLLYEYFTVYNELTKVKYVTEGMRKPAFLSGEQKKAIVDLLFKTNRKVTVKQLKEDYFKKIECFDSVEISGVEDRFNASLGTYHDLLKIIKDKDFLDNEENEDILEDIVLTLTLFEDREMIEERLKTYAHLFDDKVMKQLKRRRYTGWGRLSRKLINGIRDKQSGKTILDFLKSDGFANRNFMQLIHDDSLTFKEDIQKAQVSGQGDSLHEHIANLAGSPAIKKGILQTVKVVDELVKVMGRHKPENIVIEMARENQTTQKGQKNSRERMKRIEEGIKELGSQILKEHPVENTQLQNEKLYLYYLQNGRDMYVDQELDINRLSDYDVDHIVPQSFLKDDSIDNKVLTRSDKARGKSDNVPSEEVVKKMKNYWRQLLNAKLITQRKFDNLTKAERGGLSELDKAGFIKRQLVETRQITKHVAQILDSRMNTKYDENDKLIREVKVITLKSKLVSDFRKDFQFYKVREINNYHHAHDAYLNAVVGTALIKKYPKLESEFVYGDYKVYDVRKMIAKSEQEIGKATAKYFFYSNIMNFFKTEITLANGEIRKRPLIETNGETGEIVWDKGRDFATVRKVLSMPQVNIVKKTEVQTGGFSKESILPKRNSDKLIARKKDWDPKKYGGFDSPTVAYSVLVVAKVEKGKSKKLKSVKELLGITIMERSSFEKNPIDFLEAKGYKEVKKDLIIKLPKYSLFELENGRKRMLASAGELQKGNELALPSKYVNFLYLASHYEKLKGSPEDNEQKQLFVEQHKHYLDEIIEQISEFSKRVILADANLDKVLSAYNKHRDKPIREQAENIIHLFTLTNLGAPAAFKYFDTTIDRKRYTSTKEVLDATLIHQSITGLYETRIDLSQLGGDGGSGGSSGGSSGSETPGTSESATPESSGGSSGGSSGGVPWLMKKPLQLTVLVPLHEYQERLLQQTALPKEQKELLQKLFLKYDALWQHWENQVGHRRIKPHNIATGTLAPRPQKQYPINPKAKPSIQIVIDDLLKQGVLIQQNSTMNTPVYPVPKPDGKWRMVLDYREVNKTIPLIAAQNQHSAGILSSIYRGKYKTTLDLTNGFWAHPITPESYWLTAFTWQGKQYCWTRLPQGFLNSPALFTADVVDLLKEIPNVQAYVDDIYISHDDPQEHLEQLEKIFSILLNAGYVVSLKKSEIAQREVEFLGFNITKEGRGLTDTFKQKLLNITPPKDLKQLQSILGLLNFARNFIPNYSELVKPLYTIVANANGKFISWTEDNSNQLQHIISVLNQADNLEERNPETRLIIKVNSSPSAGYIRYYNEGSKRPIMYVNYIFSKAEAKFTQTEKLLTTMHKGLIKAMDLAMGQEILVYSPIVSMTKIQRTPLPERKALPVRWITWMTYLEDPRIQFHYDKSLPELQQIPNVTEDVIAKTKHPSEFAMVFYTDGSAIKHPDVNKSHSAGMGIAQVQFIPEYKIVHQWSIPLGDHTAQLAEIAAVEFACKKALKISGPVLIVTDSFYVAESANKELPYWKSNGFLNNKKKPLRHVSKWKSIAECLQLKPDIIIMHEKGHQQPMTTLHTEGNNLADKLATQGSYVVHAGKRTADGSEFEKRTADGSEFESPKKKAKVE

SEQ ID NO: 7737 - protein, 2109 aa, synthetic construct
MPAAKRVKLDGGDKKYSIGLDIGTNSVGWAVITDEYKVPSKKFKVLGNTDRHSIKKNLIGALLFDSGETAEATRLKRTARRRYTRRKNRICYLQEIFSNEMAKVDDSFFHRLEESFLVEEDKKHERHPIFGNIVDEVAYHEKYPTIYHLRKKLVDSTDKADLRLIYLALAHMIKFRGHFLIEGDLNPDNSDVDKLFIQLVQTYNQLFEENPINASGVDAKAILSARLSKSRRLENLIAQLPGEKKNGLFGNLIALSLGLTPNFKSNFDLAEDAKLQLSKDTYDDDLDNLLAQIGDQYADLFLAAKNLSDAILLSDILRVNTEITKAPLSASMIKRYDEHHQDLTLLKALVRQQLPEKYKEIFFDQSKNGYAGYIDGGASQEEFYKFIKPILEKMDGTEELLVKLNREDLLRKQRTFDNGSIPHQIHLGELHAILRRQEDFYPFLKDNREKIEKILTFRIPYYVGPLARGNSRFAWMTRKSEETITPWNFEEVVDKGASAQSFIERMTNFDKNLPNEKVLPKHSLLYEYFTVYNELTKVKYVTEGMRKPAFLSGEQKKAIVDLLFKTNRKVTVKQLKEDYFKKIECFDSVEISGVEDRFNASLGTYHDLLKIIKDKDFLDNEENEDILEDIVLTLTLFEDREMIEERLKTYAHLFDDKVMKQLKRRRYTGWGRLSRKLINGIRDKQSGKTILDFLKSDGFANRNFMQLIHDDSLTFKEDIQKAQVSGQGDSLHEHIANLAGSPAIKKGILQTVKVVDELVKVMGRHKPENIVIEMARENQTTQKGQKNSRERMKRIEEGIKELGSQILKEHPVENTQLQNEKLYLYYLQNGRDMYVDQELDINRLSDYDVDHIVPQSFLKDDSIDNKVLTRSDKARGKSDNVPSEEVVKKMKNYWRQLLNAKLITQRKFDNLTKAERGGLSELDKAGFIKRQLVETRQITKHVAQILDSRMNTKYDENDKLIREVKVITLKSKLVSDFRKDFQFYKVREINNYHHAHDAYLNAVVGTALIKKYPKLESEFVYGDYKVYDVRKMIAKSEQEIGKATAKYFFYSNIMNFFKTEITLANGEIRKRPLIETNGETGEIVWDKGRDFATVRKVLSMPQVNIVKKTEVQTGGFSKESILPKRNSDKLIARKKDWDPKKYGGFDSPTVAYSVLVVAKVEKGKSKKLKSVKELLGITIMERSSFEKNPIDFLEAKGYKEVKKDLIIKLPKYSLFELENGRKRMLASAGELQKGNELALPSKYVNFLYLASHYEKLKGSPEDNEQKQLFVEQHKHYLDEIIEQISEFSKRVILADANLDKVLSAYNKHRDKPIREQAENIIHLFTLTNLGAPAAFKYFDTTIDRKRYTSTKEVLDATLIHQSITGLYETRIDLSQLGGDGGSGGSSGGSSGSETPGTSESATPESSGGSSGGSSGGVPWLMKKPLQLTVLVPLHEYQERLLQQTALPKEQKELLQKLFLKYDALWQHWENQVGHRRIKPHNIATGTLAPRPQKQYPINPKAKPSIQIVIDDLLKQGVLIQQNSTMNTPVYPVPKPDGKWRMVLDYREVNKTIPLIAAQNQHSAGILSSIYRGKYKTTLDLTNGFWAHPITPESYWLTAFTWQGKQYCWTRLPQGFLNSPALFNADVVDLLKEIPNVQAYVDDIYISHDDPQEHLEQLEKIFSILLNAGYVVSLKKSEIAQREVEFLGFNITKEGRGLTDTFKQKLLNITPPKDLKQLQSILGLLNFARNFIPNYSELVKPLYTIVAPANGKFISWTEDNSNQLQHIISVLNQADNLEERNPETRLIIKVNSSPSAGYIRYYNEGSKRPIMYVNYIFSKAEAKFTQTEKLLTTMHKGLIKAMDLAMGQEILVYSPIVSMTKIQRTPLPERKALPVRWITWMTYLEDPRIQFHYDKSLPELQQIPNVTEDVIAKTKHPSEFAMVFYTDGSAIKHPDVNKSHSAGMGIAQVQFIPEYKIVHQWSIPLGDHTAQLAEIAAVEFACKKALKISGPVLIVTDSFYVAESANKELPYWKSNGFLNNKKKPLRHVSKWKSIAECLQLKPDIIIMHEKGHQQPMTTLHTEGNNLADKLATQGSYVVHAGKRTADGSEFEKRTADGSEFESPKKKAKVE

SEQ ID NO: 7738 - protein, 2198 aa, synthetic construct
MPAAKRVKLDGGDKKYSIGLDIGTNSVGWAVITDEYKVPSKKFKVLGNTDRHSIKKNLIGALLFDSGETAEATRLKRTARRRYTRRKNRICYLQEIFSNEMAKVDDSFFHRLEESFLVEEDKKHERHPIFGNIVDEVAYHEKYPTIYHLRKKLVDSTDKADLRLIYLALAHMIKFRGHFLIEGDLNPDNSDVDKLFIQLVQTYNQLFEENPINASGVDAKAILSARLSKSRRLENLIAQLPGEKKNGLFGNLIALSLGLTPNFKSNFDLAEDAKLQLSKDTYDDDLDNLLAQIGDQYADLFLAAKNLSDAILLSDILRVNTEITKAPLSASMIKRYDEHHQDLTLLKALVRQQLPEKYKEIFFDQSKNGYAGYIDGGASQEEFYKFIKPILEKMDGTEELLVKLNREDLLRKQRTFDNGSIPHQIHLGELHAILRRQEDFYPFLKDNREKIEKILTFRIPYYVGPLARGNSRFAWMTRKSEETITPWNFEEVVDKGASAQSFIERMTNFDKNLPNEKVLPKHSLLYEYFTVYNELTKVKYVTEGMRKPAFLSGEQKKAIVDLLFKTNRKVTVKQLKEDYFKKIECFDSVEISGVEDRFNASLGTYHDLLKIIKDKDFLDNEENEDILEDIVLTLTLFEDREMIEERLKTYAHLFDDKVMKQLKRRRYTGWGRLSRKLINGIRDKQSGKTILDFLKSDGFANRNFMQLIHDDSLTFKEDIQKAQVSGQGDSLHEHIANLAGSPAIKKGILQTVKVVDELVKVMGRHKPENIVIEMARENQTTQKGQKNSRERMKRIEEGIKELGSQILKEHPVENTQLQNEKLYLYYLQNGRDMYVDQELDINRLSDYDVDHIVPQSFLKDDSIDNKVLTRSDKARGKSDNVPSEEVVKKMKNYWRQLLNAKLITQRKFDNLTKAERGGLSELDKAGFIKRQLVETRQITKHVAQILDSRMNTKYDENDKLIREVKVITLKSKLVSDFRKDFQFYKVREINNYHHAHDAYLNAVVGTALIKKYPKLESEFVYGDYKVYDVRKMIAKSEQEIGKATAKYFFYSNIMNFFKTEITLANGEIRKRPLIETNGETGEIVWDKGRDFATVRKVLSMPQVNIVKKTEVQTGGFSKESILPKRNSDKLIARKKDWDPKKYGGFDSPTVAYSVLVVAKVEKGKSKKLKSVKELLGITIMERSSFEKNPIDFLEAKGYKEVKKDLIIKLPKYSLFELENGRKRMLASAGELQKGNELALPSKYVNFLYLASHYEKLKGSPEDNEQKQLFVEQHKHYLDEIIEQISEFSKRVILADANLDKVLSAYNKHRDKPIREQAENIIHLFTLTNLGAPAAFKYFDTTIDRKRYTSTKEVLDATLIHQSITGLYETRIDLSQLGGDGGSGGSSGGSSGSETPGTSESATPESSGGSSGGSSGGMDPLQLLQPLEAEIKGTKLKAHWNSGATITCVPEAFLEDERPIQTMLIKTIHGEKQQDVYYLTFKVQGRKVEAEVLASPYDYILLNPSDVPWLMKKPLQLTVLVPLHEYQERLLQQTALPKEQKELLQKLFLKYDALWQHWENQVGHRRIKPHNIATGTLAPRPQKQYPINPKAKPSIQIVIDDLLKQGVLIQQNSTMNTPVYPVPKPDGKWRMVLDYREVNKTIPLIAAQNQHSAGILSSIYRGKYKTTLDLTNGFWAHPITPESYWLTAFTWQGKQYCWTRLPQGFLNSPALFNADVVDLLKEIPNVQAYVDDIYISHDDPQEHLEQLEKIFSILLNAGYVVSLKKSEIAQREVEFLGFNITKEGRGLTDTFKQKLLNITPPKDLKQLQSILGKLNFARNFIPNYSELVKPLYTIVAPANGKFISWTEDNSNQLQHIISVLNQADNLEERNPETRLIIKVNSSPSAGYIRYYNEGSKRPIMYVNYIFSKAEAKFTQTEKLLTTMHKGLIKAMDLAMGQEILVYSPIVSMTKIQRTPLPERKALPVRWITWMTYLEDPRIQFHYDKSLPELQQIPNVTEDVIAKTKHPSEFAMVFYTDGSAIKHPDVNKSHSAGMGIAQVQFIPEYKIVHQWSIPLGDHTAQLAEIAAVEFACKKALKISGPVLIVTDSFYVAESANKELPYWKSNGFLNNKKKPLRHVSKWKSIAECLQLKPDIIIMHEKGHQQPMTTLHTEGNNLADKLATQGSYVVHAGKRTADGSEFEKRTADGSEFESPKKKAKVE

SEQ ID NO: 7739 - protein, 2109 aa, synthetic construct
MPAAKRVKLDGGDKKYSIGLDIGTNSVGWAVITDEYKVPSKKFKVLGNTDRHSIKKNLIGALLFDSGETAEATRLKRTARRRYTRRKNRICYLQEIFSNEMAKVDDSFFHRLEESFLVEEDKKHERHPIFGNIVDEVAYHEKYPTIYHLRKKLVDSTDKADLRLIYLALAHMIKFRGHFLIEGDLNPDNSDVDKLFIQLVQTYNQLFEENPINASGVDAKAILSARLSKSRRLENLIAQLPGEKKNGLFGNLIALSLGLTPNFKSNFDLAEDAKLQLSKDTYDDDLDNLLAQIGDQYADLFLAAKNLSDAILLSDILRVNTEITKAPLSASMIKRYDEHHQDLTLLKALVRQQLPEKYKEIFFDQSKNGYAGYIDGGASQEEFYKFIKPILEKMDGTEELLVKLNREDLLRKQRTFDNGSIPHQIHLGELHAILRRQEDFYPFLKDNREKIEKILTFRIPYYVGPLARGNSRFAWMTRKSEETITPWNFEEVVDKGASAQSFIERMTNFDKNLPNEKVLPKHSLLYEYFTVYNELTKVKYVTEGMRKPAFLSGEQKKAIVDLLFKTNRKVTVKQLKEDYFKKIECFDSVEISGVEDRFNASLGTYHDLLKIIKDKDFLDNEENEDILEDIVLTLTLFEDREMIEERLKTYAHLFDDKVMKQLKRRRYTGWGRLSRKLINGIRDKQSGKTILDFLKSDGFANRNFMQLIHDDSLTFKEDIQKAQVSGQGDSLHEHIANLAGSPAIKKGILQTVKVVDELVKVMGRHKPENIVIEMARENQTTQKGQKNSRERMKRIEEGIKELGSQILKEHPVENTQLQNEKLYLYYLQNGRDMYVDQELDINRLSDYDVDHIVPQSFLKDDSIDNKVLTRSDKARGKSDNVPSEEVVKKMKNYWRQLLNAKLITQRKFDNLTKAERGGLSELDKAGFIKRQLVETRQITKHVAQILDSRMNTKYDENDKLIREVKVITLKSKLVSDFRKDFQFYKVREINNYHHAHDAYLNAVVGTALIKKYPKLESEFVYGDYKVYDVRKMIAKSEQEIGKATAKYFFYSNIMNFFKTEITLANGEIRKRPLIETNGETGEIVWDKGRDFATVRKVLSMPQVNIVKKTEVQTGGFSKESILPKRNSDKLIARKKDWDPKKYGGFDSPTVAYSVLVVAKVEKGKSKKLKSVKELLGITIMERSSFEKNPIDFLEAKGYKEVKKDLIIKLPKYSLFELENGRKRMLASAGELQKGNELALPSKYVNFLYLASHYEKLKGSPEDNEQKQLFVEQHKHYLDEIIEQISEFSKRVILADANLDKVLSAYNKHRDKPIREQAENIIHLFTLTNLGAPAAFKYFDTTIDRKRYTSTKEVLDATLIHQSITGLYETRIDLSQLGGDGGSGGSSGGSSGSETPGTSESATPESSGGSSGGSSGGIPWLMKKPLQLTTLVPLQEYEERLLKQTMLTGSYKEKLQSLFLKYDALWQHWENQVGHRRIKPHHIATGTVNPRPQKQYPINPKAKASIQTVINDLLKQGVLIQQNSIMNTPVYPVPKPDGKWRMVLDYREVNKTIPLIAAQNQHSAGILSSIFRGKYKTTLDLSNGFWAHSITPESYWLTAFTWLGQQYCWTRLPQGFLNSPALFNADVVDLLKEVPNVQVYVDDIYISHDDPREHLEQLEKVFSLLLNAGYVVSLKKSEIAQHEVEFLGFNITKEGRGLTETFKQKLLNITPPRDLKQLQSILGLLNFARNFIPNFSELVKPLYNIIATAPGKYITWTTDNSQQLQNIISMLNSAENLEERNPEVRLIMKVNTSPSAGYIRFYNEFAKRPIMYLNYVYTKAEVKFTNTEKLLTTIHKGLIKALDLGMGQEILVYSPIVSMTKIQKTPLPERKALPIRWITWMSYLEDPRIQFHYDKTLPELQQVPTVTDDIIAKIKHPSEFSMVFYTDGSAIKHPNVNKSHNAGMGIAQVQFKPEFTVINTWSIPLGDHTAQLAEVAAVEFACKKALKIDGPVLIVTDSFYVAESVNKELPYWQSNGFFNNKKKPLKHVSKWKSIADCIQLKPDIIIIHEKGHQPTASTFHTEGNNLADKLATQGSYVVNAGKRTADGSEFEKRTADGSEFESPKKKAKVE

SEQ ID NO: 7740 - protein, 2198 aa, synthetic construct
MPAAKRVKLDGGDKKYSIGLDIGTNSVGWAVITDEYKVPSKKFKVLGNTDRHSIKKNLIGALLFDSGETAEATRLKRTARRRYTRRKNRICYLQEIFSNEMAKVDDSFFHRLEESFLVEEDKKHERHPIFGNIVDEVAYHEKYPTIYHLRKKLVDSTDKADLRLIYLALAHMIKFRGHFLIEGDLNPDNSDVDKLFIQLVQTYNQLFEENPINASGVDAKAILSARLSKSRRLENLIAQLPGEKKNGLFGNLIALSLGLTPNFKSNFDLAEDAKLQLSKDTYDDDLDNLLAQIGDQYADLFLAAKNLSDAILLSDILRVNTEITKAPLSASMIKRYDEHHQDLTLLKALVRQQLPEKYKEIFFDQSKNGYAGYIDGGASQEEFYKFIKPILEKMDGTEELLVKLNREDLLRKQRTFDNGSIPHQIHLGELHAILRRQEDFYPFLKDNREKIEKILTFRIPYYVGPLARGNSRFAWMTRKSEETITPWNFEEVVDKGASAQSFIERMTNFDKNLPNEKVLPKHSLLYEYFTVYNELTKVKYVTEGMRKPAFLSGEQKKAIVDLLFKTNRKVTVKQLKEDYFKKIECFDSVEISGVEDRFNASLGTYHDLLKIIKDKDFLDNEENEDILEDIVLTLTLFEDREMIEERLKTYAHLFDDKVMKQLKRRRYTGWGRLSRKLINGIRDKQSGKTILDFLKSDGFANRNFMQLIHDDSLTFKEDIQKAQVSGQGDSLHEHIANLAGSPAIKKGILQTVKVVDELVKVMGRHKPENIVIEMARENQTTQKGQKNSRERMKRIEEGIKELGSQILKEHPVENTQLQNEKLYLYYLQNGRDMYVDQELDINRLSDYDVDHIVPQSFLKDDSIDNKVLTRSDKARGKSDNVPSEEVVKKMKNYWRQLLNAKLITQRKFDNLTKAERGGLSELDKAGFIKRQLVETRQITKHVAQILDSRMNTKYDENDKLIREVKVITLKSKLVSDFRKDFQFYKVREINNYHHAHDAYLNAVVGTALIKKYPKLESEFVYGDYKVYDVRKMIAKSEQEIGKATAKYFFYSNIMNFFKTEITLANGEIRKRPLIETNGETGEIVWDKGRDFATVRKVLSMPQVNIVKKTEVQTGGFSKESILPKRNSDKLIARKKDWDPKKYGGFDSPTVAYSVLVVAKVEKGKSKKLKSVKELLGITIMERSSFEKNPIDFLEAKGYKEVKKDLIIKLPKYSLFELENGRKRMLASAGELQKGNELALPSKYVNFLYLASHYEKLKGSPEDNEQKQLFVEQHKHYLDEIIEQISEFSKRVILADANLDKVLSAYNKHRDKPIREQAENIIHLFTLTNLGAPAAFKYFDTTIDRKRYTSTKEVLDATLIHQSITGLYETRIDLSQLGGDGGSGGSSGGSSGSETPGTSESATPESSGGSSGGSSGGMDPLQLLQPLEAEIKGTKLKAHWNSGATITCVPQAFLEEEVPIKNIWIKTIHGEKEQPVYYLTFKIQGRKVEAEVISSPYDYILVSPSDIPWLMKKPLQLTTLVPLQEYEERLLKQTMLTGSYKEKLQSLFLKYDALWQHWENQVGHRRIKPHHIATGTVNPRPQKQYPINPKAKASIQTVINDLLKQGVLIQQNSIMNTPVYPVPKPDGKWRMVLDYREVNKTIPLIAAQNQHSAGILSSIFRGKYKTTLDLSNGFWAHSITPESYWLTAFTWLGQQYCWTRLPQGFLNSPALFNADVVDLLKEVPNVQVYVDDIYISHDDPREHLEQLEKVFSLLLNAGYVVSLKKSEIAQHEVEFLGFNITKEGRGLTETFKQKLLNITPPRDLKQLQSILGLLNFARNFIPNFSELVKPLYNIIATAPGKYITWTTDNSQQLQNIISMLNSAENLEERNPEVRLIMKVNTSPSAGYIRFYNEFAKRPIMYLNYVYTKAEVKFTNTEKLLTTIHKGLIKALDLGMGQEILVYSPIVSMTKIQKTPLPERKALPIRWITWMSYLEDPRIQFHYDKTLPELQQVPTVTDDIIAKIKHPSEFSMVFYTDGSAIKHPNVNKSHNAGMGIAQVQFKPEFTVINTWSIPLGDHTAQLAEVAAVEFACKKALKIDGPVLIVTDSFYVAESVNKELPYWQSNGFFNNKKKPLKHVSKWKSIADCIQLKPDIIIIHEKGHQPTASTFHTEGNNLADKLATQGSYVVNAGKRTADGSEFEKRTADGSEFESPKKKAKVE

SEQ ID NO: 7741 - protein, 2116 aa, synthetic construct
MPAAKRVKLDGGDKKYSIGLDIGTNSVGWAVITDEYKVPSKKFKVLGNTDRHSIKKNLIGALLFDSGETAEATRLKRTARRRYTRRKNRICYLQEIFSNEMAKVDDSFFHRLEESFLVEEDKKHERHPIFGNIVDEVAYHEKYPTIYHLRKKLVDSTDKADLRLIYLALAHMIKFRGHFLIEGDLNPDNSDVDKLFIQLVQTYNQLFEENPINASGVDAKAILSARLSKSRRLENLIAQLPGEKKNGLFGNLIALSLGLTPNFKSNFDLAEDAKLQLSKDTYDDDLDNLLAQIGDQYADLFLAAKNLSDAILLSDILRVNTEITKAPLSASMIKRYDEHHQDLTLLKALVRQQLPEKYKEIFFDQSKNGYAGYIDGGASQEEFYKFIKPILEKMDGTEELLVKLNREDLLRKQRTFDNGSIPHQIHLGELHAILRRQEDFYPFLKDNREKIEKILTFRIPYYVGPLARGNSRFAWMTRKSEETITPWNFEEVVDKGASAQSFIERMTNFDKNLPNEKVLPKHSLLYEYFTVYNELTKVKYVTEGMRKPAFLSGEQKKAIVDLLFKTNRKVTVKQLKEDYFKKIECFDSVEISGVEDRFNASLGTYHDLLKIIKDKDFLDNEENEDILEDIVLTLTLFEDREMIEERLKTYAHLFDDKVMKQLKRRRYTGWGRLSRKLINGIRDKQSGKTILDFLKSDGFANRNFMQLIHDDSLTFKEDIQKAQVSGQGDSLHEHIANLAGSPAIKKGILQTVKVVDELVKVMGRHKPENIVIEMARENQTTQKGQKNSRERMKRIEEGIKELGSQILKEHPVENTQLQNEKLYLYYLQNGRDMYVDQELDINRLSDYDVDHIVPQSFLKDDSIDNKVLTRSDKARGKSDNVPSEEVVKKMKNYWRQLLNAKLITQRKFDNLTKAERGGLSELDKAGFIKRQLVETRQITKHVAQILDSRMNTKYDENDKLIREVKVITLKSKLVSDFRKDFQFYKVREINNYHHAHDAYLNAVVGTALIKKYPKLESEFVYGDYKVYDVRKMIAKSEQEIGKATAKYFFYSNIMNFFKTEITLANGEIRKRPLIETNGETGEIVWDKGRDFATVRKVLSMPQVNIVKKTEVQTGGFSKESILPKRNSDKLIARKKDWDPKKYGGFDSPTVAYSVLVVAKVEKGKSKKLKSVKELLGITIMERSSFEKNPIDFLEAKGYKEVKKDLIIKLPKYSLFELENGRKRMLASAGELQKGNELALPSKYVNFLYLASHYEKLKGSPEDNEQKQLFVEQHKHYLDEIIEQISEFSKRVILADANLDKVLSAYNKHRDKPIREQAENIIHLFTLTNLGAPAAFKYFDTTIDRKRYTSTKEVLDATLIHQSITGLYETRIDLSQLGGDGGSGGSSGGSSGSETPGTSESATPESSGGSSGGSSGGVLNLEEEYRLHEKPVPSSIDPSWLQLFPTVWAERAGMGLANQVPPVVVELRSGASPVAVRQYPMSKEAREGIRPHIQRFLDLGVLVPCQSPWNTPLLPVKKPGTNDYRPVQDLREINKRVQDIHPTVPNPYNLLSSLPPSHTWYSVLDLKDAFFCLKLHPNSQPLFAFEWRDPEKGNTGQLTWTRLPQGFKNSPTLFDEALHRDLAPFRALNPQVVLLQYVDDLLVAAPTYRDCKEGTQKLLQELSKLGYRVSAKKAQLCQKEVTYLGYLLKEGKRWLTPARKATVMKIPPPTTPRQVREFLGTAGFCRLWIPGFASLAAPLYPLTKESIPFIWTEEHQKAFDRIKEALLSAPALALPDLTKPFTLYVDERAGVARGVLTQTLGPWRRPVAYLSKKLDPVASGWPTCLKAVAAVALLLKDADKLTLGQNVTVIASHSLESIVRQPPDRWMTNARMTHYQSLLLNERVSFAPPAVLNPATLLPVESEATPVHRCSEILAEETGTRRDLKDQPLPGVPAWYTDGSSFIAEGKRRAGAAIVDGKRTVWASSLPEGTSAQKAELVALTQALRLAEGKDINIYTDSRYAFATAHIHGAIYKQRGLLTSAGKDIKNKEEILALLEAIHLPKRVAIIHCPGHQKGNDPVATGNRRADEAAKQAALSTRVLAETTKPAGKRTADGSEFEKRTADGSEFESPKKKAKVE

SEQ ID NO: 7742 - protein, 2116 aa, synthetic construct
MPAAKRVKLDGGDKKYSIGLDIGTNSVGWAVITDEYKVPSKKFKVLGNTDRHSIKKNLIGALLFDSGETAEATRLKRTARRRYTRRKNRICYLQEIFSNEMAKVDDSFFHRLEESFLVEEDKKHERHPIFGNIVDEVAYHEKYPTIYHLRKKLVDSTDKADLRLIYLALAHMIKFRGHFLIEGDLNPDNSDVDKLFIQLVQTYNQLFEENPINASGVDAKAILSARLSKSRRLENLIAQLPGEKKNGLFGNLIALSLGLTPNFKSNFDLAEDAKLQLSKDTYDDDLDNLLAQIGDQYADLFLAAKNLSDAILLSDILRVNTEITKAPLSASMIKRYDEHHQDLTLLKALVRQQLPEKYKEIFFDQSKNGYAGYIDGGASQEEFYKFIKPILEKMDGTEELLVKLNREDLLRKQRTFDNGSIPHQIHLGELHAILRRQEDFYPFLKDNREKIEKILTFRIPYYVGPLARGNSRFAWMTRKSEETITPWNFEEVVDKGASAQSFIERMTNFDKNLPNEKVLPKHSLLYEYFTVYNELTKVKYVTEGMRKPAFLSGEQKKAIVDLLFKTNRKVTVKQLKEDYFKKIECFDSVEISGVEDRFNASLGTYHDLLKIIKDKDFLDNEENEDILEDIVLTLTLFEDREMIEERLKTYAHLFDDKVMKQLKRRRYTGWGRLSRKLINGIRDKQSGKTILDFLKSDGFANRNFMQLIHDDSLTFKEDIQKAQVSGQGDSLHEHIANLAGSPAIKKGILQTVKVVDELVKVMGRHKPENIVIEMARENQTTQKGQKNSRERMKRIEEGIKELGSQILKEHPVENTQLQNEKLYLYYLQNGRDMYVDQELDINRLSDYDVDHIVPQSFLKDDSIDNKVLTRSDKARGKSDNVPSEEVVKKMKNYWRQLLNAKLITQRKFDNLTKAERGGLSELDKAGFIKRQLVETRQITKHVAQILDSRMNTKYDENDKLIREVKVITLKSKLVSDFRKDFQFYKVREINNYHHAHDAYLNAVVGTALIKKYPKLESEFVYGDYKVYDVRKMIAKSEQEIGKATAKYFFYSNIMNFFKTEITLANGEIRKRPLIETNGETGEIVWDKGRDFATVRKVLSMPQVNIVKKTEVQTGGFSKESILPKRNSDKLIARKKDWDPKKYGGFDSPTVAYSVLVVAKVEKGKSKKLKSVKELLGITIMERSSFEKNPIDFLEAKGYKEVKKDLIIKLPKYSLFELENGRKRMLASAGELQKGNELALPSKYVNFLYLASHYEKLKGSPEDNEQKQLFVEQHKHYLDEIIEQISEFSKRVILADANLDKVLSAYNKHRDKPIREQAENIIHLFTLTNLGAPAAFKYFDTTIDRKRYTSTKEVLDATLIHQSITGLYETRIDLSQLGGDGGSGGSSGGSSGSETPGTSESATPESSGGSSGGSSGGVLNLEEEYRLHEKPVPSSIDPSWLQLFPTVWAERAGMGLANQVPPVVVELRSGASPVAVRQYPMSKEAREGIRPHIQRFLDLGVLVPCQSPWNTPLLPVKKPGTNDYRPVQDLREINKRVQDIHPTVPNPYNLLSSLPPSHTWYSVLDLKDAFFCLKLHPNSQPLFAFEWRDPEKGNTGQLTWTRLPQGFKNSPTLFNEALHRDLAPFRALNPQVVLLQYVDDLLVAAPTYRDCKEGTQKLLQELSKLGYRVSAKKAQLCQKEVTYLGYLLKEGKRWLTPARKATVMKIPPPTTPRQVREFLGTAGFCRLWIPGFASLAAPLYPLTKPSIPFIWTEEHQKAFDRIKEALLSAPALALPDLTKPFTLYVDERAGVARGVLTQTLGPWRRPVAYLSKKLDPVASGWPTCLKAVAAVALLLKDADKLTLGQNVTVIASHSLESIVRQPPDRWMTNARMTHYQSLLLNERVSFAPPAVLNPATLLPVESEATPVHRCSEILAEETGTRRDLKDQPLPGVPAWYTDGSSFIAEGKRRAGAAIVDGKRTVWASSLPEGTSAQKAELVALTQALRLAEGKDINIYTDSRYAFATAHIHGAIYKQRGWLTSAGKDIKNKEEILALLEAIHLPKRVAIIHCPGHQKGNDPVATGNRRADEAAKQAALSTRVLAETTKPAGKRTADGSEFEKRTADGSEFESPKKKAKVE

SEQ ID NO: 7743 - protein, 2116 aa, synthetic construct
MPAAKRVKLDGGDKKYSIGLDIGTNSVGWAVITDEYKVPSKKFKVLGNTDRHSIKKNLIGALLFDSGETAEATRLKRTARRRYTRRKNRICYLQEIFSNEMAKVDDSFFHRLEESFLVEEDKKHERHPIFGNIVDEVAYHEKYPTIYHLRKKLVDSTDKADLRLIYLALAHMIKFRGHFLIEGDLNPDNSDVDKLFIQLVQTYNQLFEENPINASGVDAKAILSARLSKSRRLENLIAQLPGEKKNGLFGNLIALSLGLTPNFKSNFDLAEDAKLQLSKDTYDDDLDNLLAQIGDQYADLFLAAKNLSDAILLSDILRVNTEITKAPLSASMIKRYDEHHQDLTLLKALVRQQLPEKYKEIFFDQSKNGYAGYIDGGASQEEFYKFIKPILEKMDGTEELLVKLNREDLLRKQRTFDNGSIPHQIHLGELHAILRRQEDFYPFLKDNREKIEKILTFRIPYYVGPLARGNSRFAWMTRKSEETITPWNFEEVVDKGASAQSFIERMTNFDKNLPNEKVLPKHSLLYEYFTVYNELTKVKYVTEGMRKPAFLSGEQKKAIVDLLFKTNRKVTVKQLKEDYFKKIECFDSVEISGVEDRFNASLGTYHDLLKIIKDKDFLDNEENEDILEDIVLTLTLFEDREMIEERLKTYAHLFDDKVMKQLKRRRYTGWGRLSRKLINGIRDKQSGKTILDFLKSDGFANRNFMQLIHDDSLTFKEDIQKAQVSGQGDSLHEHIANLAGSPAIKKGILQTVKVVDELVKVMGRHKPENIVIEMARENQTTQKGQKNSRERMKRIEEGIKELGSQILKEHPVENTQLQNEKLYLYYLQNGRDMYVDQELDINRLSDYDVDHIVPQSFLKDDSIDNKVLTRSDKARGKSDNVPSEEVVKKMKNYWRQLLNAKLITQRKFDNLTKAERGGLSELDKAGFIKRQLVETRQITKHVAQILDSRMNTKYDENDKLIREVKVITLKSKLVSDFRKDFQFYKVREINNYHHAHDAYLNAVVGTALIKKYPKLESEFVYGDYKVYDVRKMIAKSEQEIGKATAKYFFYSNIMNFFKTEITLANGEIRKRPLIETNGETGEIVWDKGRDFATVRKVLSMPQVNIVKKTEVQTGGFSKESILPKRNSDKLIARKKDWDPKKYGGFDSPTVAYSVLVVAKVEKGKSKKLKSVKELLGITIMERSSFEKNPIDFLEAKGYKEVKKDLIIKLPKYSLFELENGRKRMLASAGELQKGNELALPSKYVNFLYLASHYEKLKGSPEDNEQKQLFVEQHKHYLDEIIEQISEFSKRVILADANLDKVLSAYNKHRDKPIREQAENIIHLFTLTNLGAPAAFKYFDTTIDRKRYTSTKEVLDATLIHQSITGLYETRIDLSQLGGDGGSGGSSGGSSGSETPGTSESATPESSGGSSGGSSGGVLNLEEEYRLHEKPVPSSIDPSWLQLFPTVWAERAGMGLANQVPPVVVELRSGASPVAVRQYPMSKEAREGIRPHIQRFLDLGVLVPCQSPWNTPLLPVKKPGTNDYRPVQDLREINKRVQDIHPTVPNPYNLLSSLPPSHTWYSVLDLKDAFFCLKLHPNSQPLFAFEWRDPEKGNTGQLTWTRLPQGFKNSPTLFNEALHRDLAPFRALNPQVVLLQYVDDLLVAAPTYRDCKEGTQKLLQELSKLGYRVSAKKAQLCQKEVTYLGYLLKEGKRWLTPARKATVMKIPPPTTPRQVREFLGKAGFCRLFIPGFASLAAPLYPLTKPSIPFIWTEEHQKAFDRIKEALLSAPALALPDLTKPFTLYVDERAGVARGVLTQTLGPWRRPVAYLSKKLDPVASGWPTCLKAVAAVALLLKDADKLTLGQNVTVIASHSLESIVRQPPDRWMTNARMTHYQSLLLNERVSFAPPAVLNPATLLPVESEATPVHRCSEILAEETGTRRDLKDQPLPGVPAWYTDGSSFIAEGKRRAGAAIVDGKRTVWASSLPEGTSAQKAELVALTQALRLAEGKDINIYTDSRYAFATAHIHGAIYKQRGWLTSAGKDIKNKEEILALLEAIHLPKRVAIIHCPGHQKGNDPVATGNRRADEAAKQAALSTRVLAETTKPAGKRTADGSEFEKRTADGSEFESPKKKAKVE

SEQ ID NO: 7744-8000 - skipped (257 entries)

SEQ ID NO: 8001 - protein, 673 aa, synthetic construct
TAPLEEEYRLFLEAPIQNVTLLEQWKREIPKVWAEINPPGLASTQAPIHVQLLSTALPVRVRQYPITLEAKRSLRETIRKFRAAGILRPVHSPWNTPLLPVRKSGTSEYRMVQDLREVNKRVETIHPTVPNPYTLLSLLPPDRIWYSVLDLKDAFFCIPLAPESQLIFAFEWADAEEGESGQLTWTRLPQGFKNSPTLFDEALNRDLQGFRLDHPSVSLLQYVDDLLIAADTQAACLSATRDLLMTLAELGYRVSGKKAQLCQEEVTYLGFKIHKGSRSLSNSRTQAILQIPVPKTKRQVREFLGTIGYCRLWIPGFAELAQPLYAATRGGNDPLVWGEKEEEAFQSLKLALTQPPALALPSLDKPFQLFVEETSGAAKGVLTQALGPWKRPVAYLSKRLDPVAAGWPRCLRAIAAAALLTREASKLTFGQDIEITSSHNLESLLRSPPDKWLTNARITQYQVLLLDPPRVRFKQTAALNPATLLPETDDTLPIHHCLDTLDSLTSTRPDLTDQPLAQAEATLFTDGSSYIRDGKRYAGAAVVTLDSVIWAEPLPIGTSAQKAELIALTKALEWSKDKSVNIYTDSRYAFATLHVHGMIYRERGLLTAGGKAIKNAPEILALLTAVWLPKRVAVMHCKGHQKDDAPTSTGNRRADEVAREVAIRPLSTQATIS

SEQ ID NO: 8002 - protein, 673 aa, synthetic construct
TAPLEEEYRLFLEAPIQNVTLLEQWKREIPKVWAEINPPGLASTQAPIHVQLLSTALPVRVRQYPITLEAKRSLRETIRKFRAAGILRPVHSPWNTPLLPVRKSGTSEYRMVQDLREVNKRVETIHPTVPNPYTLLSLLPPDRIWYSVLDLKDAFFCIPLAPESQLIFAFEWADAEEGESGQLTWTRLPQGFKNSPTLFNEALNRDLQGFRLDHPSVSLLQYVDDLLIAADTQAACLSATRDLLMTLAELGYRVSGKKAQLCQEEVTYLGFKIHKGSRSLSNSRTQAILQIPVPKTKRQVREFLGTIGYCRLWIPGFAELAQPLYAATRPGNDPLVWGEKEEEAFQSLKLALTQPPALALPSLDKPFQLFVEETSGAAKGVLTQALGPWKRPVAYLSKRLDPVAAGWPRCLRAIAAAALLTREASKLTFGQDIEITSSHNLESLLRSPPDKWLTNARITQYQVLLLDPPRVRFKQTAALNPATLLPETDDTLPIHHCLDTLDSLTSTRPDLTDQPLAQAEATLFTDGSSYIRDGKRYAGAAVVTLDSVIWAEPLPIGTSAQKAELIALTKALEWSKDKSVNIYTDSRYAFATLHVHGMIYRERGWLTAGGKAIKNAPEILALLTAVWLPKRVAVMHCKGHQKDDAPTSTGNRRADEVAREVAIRPLSTQATIS

SEQ ID NO: 8003 - protein, 673 aa, synthetic construct
TAPLEEEYRLFLEAPIQNVTLLEQWKREIPKVWAEINPPGLASTQAPIHVQLLSTALPVRVRQYPITLEAKRSLRETIRKFRAAGILRPVHSPWNTPLLPVRKSGTSEYRMVQDLREVNKRVETIHPTVPNPYTLLSLLPPDRIWYSVLDLKDAFFCIPLAPESQLIFAFEWADAEEGESGQLTWTRLPQGFKNSPTLFNEALNRDLQGFRLDHPSVSLLQYVDDLLIAADTQAACLSATRDLLMTLAELGYRVSGKKAQLCQEEVTYLGFKIHKGSRSLSNSRTQAILQIPVPKTKRQVREFLGKIGYCRLFIPGFAELAQPLYAATRPGNDPLVWGEKEEEAFQSLKLALTQPPALALPSLDKPFQLFVEETSGAAKGVLTQALGPWKRPVAYLSKRLDPVAAGWPRCLRAIAAAALLTREASKLTFGQDIEITSSHNLESLLRSPPDKWLTNARITQYQVLLLDPPRVRFKQTAALNPATLLPETDDTLPIHHCLDTLDSLTSTRPDLTDQPLAQAEATLFTDGSSYIRDGKRYAGAAVVTLDSVIWAEPLPIGTSAQKAELIALTKALEWSKDKSVNIYTDSRYAFATLHVHGMIYRERGWLTAGGKAIKNAPEILALLTAVWLPKRVAVMHCKGHQKDDAPTSTGNRRADEVAREVAIRPLSTQATIS

SEQ ID NO: 8004 - protein, 677 aa, synthetic construct
TVSLQDEHRLFDIPVTTSLPDVWLQDFPQAWAETGGLGRAKCQAPIIIDLKPTAVPVSIKQYPMSLEAHMGIRQHIIKFLELGVLRPCRSPWNTPLLPVKKPGTQDYRPVQDLREINKRTVDIHPTVPNPYNLLSTLKPDYSWYTVLDLKDAFFCLPLAPQSQELFAFEWKDPERGISGQLTWTRLPQGFKNSPTLFDEALHRDLTDFRTQHPEVTLLQYVDDLLLAAPTKKACTQGTRHLLQELGEKGYRASAKKAQICQTKVTYLGYILSEGKRWLTPGRIETVARIPPPRNPREVREFLGTAGFCRLWIPGFAELAAPLYALTKESTPFTWQTEHQLAFEALKKALLSAPALGLPDTSKPFTLFLDERQGIAKGVLTQKLGPWKRPVAYLSKKLDPVAAGWPPCLRIMAATAMLVKDSAKLTLGQPLTVITPHTLEAIVRQPPDRWITNARLTHYQALLLDTDRVQFGPPVTLNPATLLPVPENQPSPHDCRQVLAETHGTREDLKDQELPDADHTWYTDGSSYLDSGTRRAGAAVVDGHNTIWAQSLPPGTSAQKAELIALTKALELSKGKKANIYTDSRYAFATAHTHGSIYERRGLLTSEGKEIKNKAEIIALLKALFLPQEVAIIHCPGHQKGQDPVAVGNRQADRVARQAAMAEVLTLATEPDNTSHIT

SEQ ID NO: 8005 - protein, 677 aa, synthetic construct
TVSLQDEHRLFDIPVTTSLPDVWLQDFPQAWAETGGLGRAKCQAPIIIDLKPTAVPVSIKQYPMSLEAHMGIRQHIIKFLELGVLRPCRSPWNTPLLPVKKPGTQDYRPVQDLREINKRTVDIHPTVPNPYNLLSTLKPDYSWYTVLDLKDAFFCLPLAPQSQELFAFEWKDPERGISGQLTWTRLPQGFKNSPTLFNEALHRDLTDFRTQHPEVTLLQYVDDLLLAAPTKKACTQGTRHLLQELGEKGYRASAKKAQICQTKVTYLGYILSEGKRWLTPGRIETVARIPPPRNPREVREFLGTAGFCRLWIPGFAELAAPLYALTKPSTPFTWQTEHQLAFEALKKALLSAPALGLPDTSKPFTLFLDERQGIAKGVLTQKLGPWKRPVAYLSKKLDPVAAGWPPCLRIMAATAMLVKDSAKLTLGQPLTVITPHTLEAIVRQPPDRWITNARLTHYQALLLDTDRVQFGPPVTLNPATLLPVPENQPSPHDCRQVLAETHGTREDLKDQELPDADHTWYTDGSSYLDSGTRRAGAAVVDGHNTIWAQSLPPGTSAQKAELIALTKALELSKGKKANIYTDSRYAFATAHTHGSIYERRGWLTSEGKEIKNKAEIIALLKALFLPQEVAIIHCPGHQKGQDPVAVGNRQADRVARQAAMAEVLTLATEPDNTSHIT

SEQ ID NO: 8006 - protein, 677 aa, synthetic construct
TVSLQDEHRLFDIPVTTSLPDVWLQDFPQAWAETGGLGRAKCQAPIIIDLKPTAVPVSIKQYPMSLEAHMGIRQHIIKFLELGVLRPCRSPWNTPLLPVKKPGTQDYRPVQDLREINKRTVDIHPTVPNPYNLLSTLKPDYSWYTVLDLKDAFFCLPLAPQSQELFAFEWKDPERGISGQLTWTRLPQGFKNSPTLFNEALHRDLTDFRTQHPEVTLLQYVDDLLLAAPTKKACTQGTRHLLQELGEKGYRASAKKAQICQTKVTYLGYILSEGKRWLTPGRIETVARIPPPRNPREVREFLGKAGFCRLFIPGFAELAAPLYALTKPSTPFTWQTEHQLAFEALKKALLSAPALGLPDTSKPFTLFLDERQGIAKGVLTQKLGPWKRPVAYLSKKLDPVAAGWPPCLRIMAATAMLVKDSAKLTLGQPLTVITPHTLEAIVRQPPDRWITNARLTHYQALLLDTDRVQFGPPVTLNPATLLPVPENQPSPHDCRQVLAETHGTREDLKDQELPDADHTWYTDGSSYLDSGTRRAGAAVVDGHNTIWAQSLPPGTSAQKAELIALTKALELSKGKKANIYTDSRYAFATAHTHGSIYERRGWLTSEGKEIKNKAEIIALLKALFLPQEVAIIHCPGHQKGQDPVAVGNRQADRVARQAAMAEVLTLATEPDNTSHIT

SEQ ID NO: 8007 - protein, 576 aa, synthetic construct
GVLDAPPSHIGLEHLPPPPEVPQFPLNLERLQALQDLVHRSLEAGYISPWDGPGNNPVFPVRKPNGAWRFVHDLRVTNALTKPIPALSPGPPDLTAIPTHLPHIICLDLKDAFFQIPVEDRFRSYFAFTLPTPGGLQPHRRFAWRVLPQGFINSPALFERALQEPLRQVSAAFSQSLLVSYMDDILYVSPTEEQRLQCYQTMAAHLRDLGFQVASEKTRQTPSPVPFLGQMVHERMVTYQSLPTLQISSPISLHQLQTVLGDLQWVSRGTPTTRRPLQLLYSSLKGIDDPRAIIHLSPEQQQGIAELRQALSHNARSRYNEQEPLLAYVHLTRAGSTLVLFQKGAQFPLAYFQTPLTDNQASPWGLLLLLGCQYLQAQALSSYAKTILKYYHNLPKTSLDNWIQSSEDPRVQELLQLWPQISSQGIQPPGPWKTLVTRAEVFLTPQFSPEPIPAALCLFSDGAARRGAYCLWKDHLLDFQAVPAPESAQKGELAGLLAGLAAAPPEPLNIWVDSKYLYSLLRTLVLGAWLQPDPVPSYALLYKSLLRHPAIFVGHVRSHSSASHPIASLNNYVDQL

SEQ ID NO: 8008 - protein, 576 aa, synthetic construct
GVLDAPPSHIGLEHLPPPPEVPQFPLNLERLQALQDLVHRSLEAGYISPWDGPGNNPVFPVRKPNGAWRFVHDLRVTNALTKPIPALSPGPPDLTAIPTHLPHIICLDLKDAFFQIPVEDRFRSYFAFTLPTPGGLQPHRRFAWRVLPQGFINSPALFQRALQEPLRQVSAAFSQSLLVSYMDDILYVSPTEEQRLQCYQTMAAHLRDLGFQVASEKTRQTPSPVPFLGQMVHERMVTYQSLPTLQISSPISLHQLQTVLGDLQWVSRGTPTTRRPLQLLYSSLKPIDDPRAIIHLSPEQQQGIAELRQALSHNARSRYNEQEPLLAYVHLTRAGSTLVLFQKGAQFPLAYFQTPLTDNQASPWGLLLLLGCQYLQAQALSSYAKTILKYYHNLPKTSLDNWIQSSEDPRVQELLQLWPQISSQGIQPPGPWKTLVTRAEVFLTPQFSPEPIPAALCLFSDGAARRGAYCLWKDHLLDFQAVPAPESAQKGELAGLLAGLAAAPPEPLNIWVDSKYLYSLLRTLVLGAWLQPDPVPSYALLYKSLLRHPAIFVGHVRSHSSASHPIASLNNYVDQL

SEQ ID NO: 8009 - protein, 576 aa, synthetic construct
GVLDTPPSHIGLEHLPPPPEVPQFPLNLERLQALQDLVHRSLEAGYISPWDGPGNNPVFPVRKPNGAWRFVHDLRATNALTKPIPALSPGPPDLTAIPTHPPHIICLDLKDAFFQIPVEDRFRFYLSFTLPSPGGLQPHRRFAWRVLPQGFINSPALFERALQEPLRQVSAAFSQSLLVSYMDDILYASPTEEQRSQCYQALAARLRDLGFQVASEKTSQTPSPVPFLGQMVHEQIVTYQSLPTLQISSPISLHQLQAVLGDLQWVSRGTPTTRRPLQLLYSSLKRHHDPRAIIQLSPEQLQGIAELRQALSHNARSRYNEQEPLLAYVHLTRAGSTLVLFQKGAQFPLAYFQTPLTDNQASPWGLLLLLGCQYLQTQALSSYAKPILKYYHNLPKTSLDNWIQSSEDPRVQELLQLWPQISSQGIQPPGPWKTLITRAEVFLTPQFSPDPIPAALCLFSDGATGRGAYCLWKDHLLDFQAVPAPESAQKGELAGLLAGLAAAPPEPVNIWVDSKYLYSLLRTLVLGAWLQPDPVPSYALLYKSLLRHPAIVVGHVRSHSSASHPIASLNNYVDQL

SEQ ID NO: 8010 - protein, 576 aa, synthetic construct
GVLDTPPSHIGLEHLPPPPEVPQFPLNLERLQALQDLVHRSLEAGYISPWDGPGNNPVFPVRKPNGAWRFVHDLRATNALTKPIPALSPGPPDLTAIPTHPPHIICLDLKDAFFQIPVEDRFRFYLSFTLPSPGGLQPHRRFAWRVLPQGFINSPALFNRALQEPLRQVSAAFSQSLLVSYMDDILYASPTEEQRSQCYQALAARLRDLGFQVASEKTSQTPSPVPFLGQMVHEQIVTYQSLPTLQISSPISLHQLQAVLGDLQWVSRGTPTTRRPLQLLYSSLKRHHDPRAIIQLSPEQLQGIAELRQALSHNARSRYNEQEPLLAYVHLTRAGSTLVLFQKGAQFPLAYFQTPLTDNQASPWGLLLLLGCQYLQTQALSSYAKPILKYYHNLPKTSLDNWIQSSEDPRVQELLQLWPQISSQGIQPPGPWKTLITRAEVFLTPQFSPDPIPAALCLFSDGATGRGAYCLWKDHLLDFQAVPAPESAQKGELAGLLAGLAAAPPEPVNIWVDSKYLYSLLRTWVLGAWLQPDPVPSYALLYKSLLRHPAIVVGHVRSHSSASHPIASLNNYVDQL

SEQ ID NO: 8011 - protein, 576 aa, synthetic construct
GVLDTPPSHIGLEHLPPPPEVPQFPLNLERLQALQDLVHRSLEAGYISPWDGPGNNPVFPVRKPNGAWRFVHDLRATNALTKPIPALSPGPPDLTAPPTHPPHIICLDLKDAFFQIPVEDRFRFYLSFTLPSPGGLQPHRRFAWRVLPQGFINSPALFQRALQEPLRQVSAAFSQSLLVSYMDDILYASPTEEQRSQCYQALAARLRDLGFQVASEKTSQTPSPVPFLGQMVHEQIVTYQSLPTLQISSPISLHQLQAVLGDLQWVSRGTPTTRRPLQLLYSSLKRHHDPRAIIQLSPEQLQGIAELRQALSHNARSRYNEQEPLLAYVHLTRAGSTLVLFQKGAQFPLAYFQTPLTDNQASPWGLLLLLGCQYLQTQALSSYAKPILKYYHNLPKTSLDNWIQSSEDPRVQELLQLWPQISSQGIQPPGPWKTLITRAEVFLTPQFSPDPIPAALCLFSDGATGRGAYCLWKDHLLDFQAVPAPESAQKGELAGLLAGLAAAPPEPVNIWVDSKYLYSLLRTWVLGAWLQPDPVPSYALLYKSLLRHPAIVVGHVRSHSSASHPIASLNNYVDQL

SEQ ID NO: 8012 - protein, 748 aa, synthetic construct
MDLLKPLTVERKGVKIKGYWNSQADITCVPKDLLQGEEPVRQQNVTTIHGTQEGDVYYVNLKIDGRRINTEVIGTTLDYAIITPGDVPWILKKPLELTIKLDLEEQQGTLLNNSILSKKGKEELKQLFEKYSALWQSWENQVGHRRIRPHKIATGTVKPTPQKQYHINPKAKPDIQIVINDLLKQGVLIQKESTMNTPVYPVPKPNGRWRMVLDYRAVNKVTPLIAVQNQHSYGILGSLFKGRYKTTIDLSNGFWAHPIVPEDYWITAFTWQGKQYCWTVLPQGFLNSPGLFTGDVVDLLQGIPNVEVYVDDVYISHDSEKEHLEYLDILFNRLKEAGYIISLKKSNIANSIVDFLGFQITNEGRGLTDTFKEKLENITAPTTLKQLQSILGLLNFARNFIPDFTELIAPLYALIPKSTKNYVPWQIEHSTTLETLITKLNGAEYLQGRKGDKTLIMKVNASYTTGYIRYYNEGEKKPISYVSIVFSKTELKFTELEKLLTTVHKGLLKALDLSMGQNIHVYSPIVSMQNIQKTPQTAKKALASRWLSWLSYLEDPRIRFFYDPQMPALKDLPAVDTGKDNKKHPSNFQHIFYTDGSAITSPTKEGHLNAGMGIVYFINKDGNLQKQQEWSISLGNHTAQFAEIAAFEFALKKCLPLGGNILVVTDSNYVAKAYNEELDVWASNGFVNNRKKPLKHISKWKSVADLKRLRPDVVVTHEPGHQKLDSSPHAYGNNLADQLATQASFKVH

SEQ ID NO: 8013 - protein, 748 aa, synthetic construct
MDLLKPLTVERKGVKIKGYWNSQADITCVPKDLLQGEEPVRQQNVTTIHGTQEGDVYYVNLKIDGRRINTEVIGTTLDYAIITPGDVPWILKKPLELTIKLDLEEQQGTLLNNSILSKKGKEELKQLFEKYSALWQSWENQVGHRRIRPHKIATGTVKPTPQKQYHINPKAKPDIQIVINDLLKQGVLIQKESTMNTPVYPVPKPNGRWRMVLDYRAVNKVTPLIAVQNQHSYGILGSLFKGRYKTTIDLSNGFWAHPIVPEDYWITAFTWQGKQYCWTVLPQGFLNSPGLFNGDVVDLLQGIPNVEVYVDDVYISHDSEKEHLEYLDILFNRLKEAGYIISLKKSNIANSIVDFLGFQITNEGRGLTDTFKEKLENITAPTTLKQLQSILGLLNFARNFIPDFTELIAPLYALIPKSPKNYVPWQIEHSTTLETLITKLNGAEYLQGRKGDKTLIMKVNASYTTGYIRYYNEGEKKPISYVSIVFSKTELKFTELEKLLTTVHKGLLKALDLSMGQNIHVYSPIVSMQNIQKTPQTAKKALASRWLSWLSYLEDPRIRFFYDPQMPALKDLPAVDTGKDNKKHPSNFQHIFYTDGSAITSPTKEGHLNAGMGIVYFINKDGNLQKQQEWSISLGNHTAQFAEIAAFEFALKKCLPLGGNILVVTDSNYVAKAYNEELDVWASNGFVNNRKKPLKHISKWKSVADLKRLRPDVVVTHEPGHQKLDSSPHAYGNNLADQLATQASFKVH

SEQ ID NO: 8014 - protein, 748 aa, synthetic construct
MDLLKPLTVERKGVKIKGYWNSQADITCVPKDLLQGEEPVRQQNVTTIHGTQEGDVYYVNLKIDGRRINTEVIGTTLDYAIITPGDVPWILKKPLELTIKLDLEEQQGTLLNNSILSKKGKEELKQLFEKYSALWQSWENQVGHRRIRPHKIATGTVKPTPQKQYHINPKAKPDIQIVINDLLKQGVLIQKESTMNTPVYPVPKPNGRWRMVLDYRAVNKVTPLIAVQNQHSYGILGSLFKGRYKTTIDLSNGFWAHPIVPEDYWITAFTWQGKQYCWTVLPQGFLNSPGLFNGDVVDLLQGIPNVEVYVDDVYISHDSEKEHLEYLDILFNRLKEAGYIISLKKSNIANSIVDFLGFQITNEGRGLTDTFKEKLENITAPTTLKQLQSILGKLNFARNFIPDFTELIAPLYALIPKSPKNYVPWQIEHSTTLETLITKLNGAEYLQGRKGDKTLIMKVNASYTTGYIRYYNEGEKKPISYVSIVFSKTELKFTELEKLLTTVHKGLLKALDLSMGQNIHVYSPIVSMQNIQKTPQTAKKALASRWLSWLSYLEDPRIRFFYDPQMPALKDLPAVDTGKDNKKHPSNFQHIFYTDGSAITSPTKEGHLNAGMGIVYFINKDGNLQKQQEWSISLGNHTAQFAEIAAFEFALKKCLPLGGNILVVTDSNYVAKAYNEELDVWASNGFVNNRKKPLKHISKWKSVADLKRLRPDVVVTHEPGHQKLDSSPHAYGNNLADQLATQASFKVH

SEQ ID NO: 8015 - protein, 662 aa, synthetic construct
VPWILKKPLELTIKLDLEEQQGTLLNNSILSKKGKEELKQLFEKYSALWQSWENQVGHRRIRPHKIATGTVKPTPQKQYHINPKAKPDIQIVINDLLKQGVLIQKESTMNTPVYPVPKPNGRWRMVLDYRAVNKVTPLIAVQNQHSYGILGSLFKGRYKTTIDLSNGFWAHPIVPEDYWITAFTWQGKQYCWTVLPQGFLNSPGLFTGDVVDLLQGIPNVEVYVDDVYISHDSEKEHLEYLDILFNRLKEAGYIISLKKSNIANSIVDFLGFQITNEGRGLTDTFKEKLENITAPTTLKQLQSILGLLNFARNFIPDFTELIAPLYALIPKSTKNYVPWQIEHSTTLETLITKLNGAEYLQGRKGDKTLIMKVNASYTTGYIRYYNEGEKKPISYVSIVFSKTELKFTELEKLLTTVHKGLLKALDLSMGQNIHVYSPIVSMQNIQKTPQTAKKALASRWLSWLSYLEDPRIRFFYDPQMPALKDLPAVDTGKDNKKHPSNFQHIFYTDGSAITSPTKEGHLNAGMGIVYFINKDGNLQKQQEWSISLGNHTAQFAEIAAFEFALKKCLPLGGNILVVTDSNYVAKAYNEELDVWASNGFVNNRKKPLKHISKWKSVADLKRLRPDVVVTHEPGHQKLDSSPHAYGNNLADQLATQASFKVH

SEQ ID NO: 8016 - protein, 662 aa, synthetic construct
VPWILKKPLELTIKLDLEEQQGTLLNNSILSKKGKEELKQLFEKYSALWQSWENQVGHRRIRPHKIATGTVKPTPQKQYHINPKAKPDIQIVINDLLKQGVLIQKESTMNTPVYPVPKPNGRWRMVLDYRAVNKVTPLIAVQNQHSYGILGSLFKGRYKTTIDLSNGFWAHPIVPEDYWITAFTWQGKQYCWTVLPQGFLNSPGLFNGDVVDLLQGIPNVEVYVDDVYISHDSEKEHLEYLDILFNRLKEAGYIISLKKSNIANSIVDFLGFQITNEGRGLTDTFKEKLENITAPTTLKQLQSILGLLNFARNFIPDFTELIAPLYALIPKSPKNYVPWQIEHSTTLETLITKLNGAEYLQGRKGDKTLIMKVNASYTTGYIRYYNEGEKKPISYVSIVFSKTELKFTELEKLLTTVHKGLLKALDLSMGQNIHVYSPIVSMQNIQKTPQTAKKALASRWLSWLSYLEDPRIRFFYDPQMPALKDLPAVDTGKDNKKHPSNFQHIFYTDGSAITSPTKEGHLNAGMGIVYFINKDGNLQKQQEWSISLGNHTAQFAEIAAFEFALKKCLPLGGNILVVTDSNYVAKAYNEELDVWASNGFVNNRKKPLKHISKWKSVADLKRLRPDVVVTHEPGHQKLDSSPHAYGNNLADQLATQASFKVH

SEQ ID NO: 8017 - protein, 662 aa, synthetic construct
VPWILKKPLELTIKLDLEEQQGTLLNNSILSKKGKEELKQLFEKYSALWQSWENQVGHRRIRPHKIATGTVKPTPQKQYHINPKAKPDIQIVINDLLKQGVLIQKESTMNTPVYPVPKPNGRWRMVLDYRAVNKVTPLIAVQNQHSYGILGSLFKGRYKTTIDLSNGFWAHPIVPEDYWITAFTWQGKQYCWTVLPQGFLNSPGLFNGDVVDLLQGIPNVEVYVDDVYISHDSEKEHLEYLDILFNRLKEAGYIISLKKSNIANSIVDFLGFQITNEGRGLTDTFKEKLENITAPTTLKQLQSILGKLNFARNFIPDFTELIAPLYALIPKSPKNYVPWQIEHSTTLETLITKLNGAEYLQGRKGDKTLIMKVNASYTTGYIRYYNEGEKKPISYVSIVFSKTELKFTELEKLLTTVHKGLLKALDLSMGQNIHVYSPIVSMQNIQKTPQTAKKALASRWLSWLSYLEDPRIRFFYDPQMPALKDLPAVDTGKDNKKHPSNFQHIFYTDGSAITSPTKEGHLNAGMGIVYFINKDGNLQKQQEWSISLGNHTAQFAEIAAFEFALKKCLPLGGNILVVTDSNYVAKAYNEELDVWASNGFVNNRKKPLKHISKWKSVADLKRLRPDVVVTHEPGHQKLDSSPHAYGNNLADQLATQASFKVH

SEQ ID NO: 8018 - protein, 670 aa, synthetic construct
TLQLEEEYRLFEPESTQKQEMDIWLKNFPQAWAETGGMGTAHCQAPVLIQLKATATPISIRQYPMPHEAYQGIKPHIRRMLDQGILKPCQSPWNTPLLPVKKPGTEDYRPVQDLREVNKRVEDIHPTVPNPYNLLSTLPPSHPWYTVLDLKDAFFCLRLHSESQLLFAFEWRDPEIGLSGQLTWTRLPQGFKNSPTLFDEALHSDLADFRVRYPALVLLQYVDDLLLAAATRTECLEGTKALLETLGNKGYRASAKKAQICLQEVTYLGYSLKDGQRWLTKARKEAILSIPVPKNSRQVREFLGTAGYCRLWIPGFAELAAPLYPLTRPGTLFQWGTEQQLAFEDIKKALLSSPALGLPDITKPFELFIDENSGFAKGVLVQKLGPWKRPVAYLSKKLDTVASGWPPCLRMVAAIAILVKDAGKLTLGQPLTILTSHPVEALVRQPPNKWLSNARMTHYQAMLLDAERVHFGPTVSLNPATLLPLPSGGNHHDCLQILAETHGTRPDLTDQPLPDADLTWYTDGSSFIRNGEREAGAAVTTESEVIWAAPLPPGTSAQRAELIALTQALKMAEGKKLTVYTDSRYAFATTHVHGEIYRRRGLLTSEGKEIKNKNEILALLEALFLPKRLSIIHCPGHQKGDSPQAKGNRLADDTAKKAATETHSSLTVLP

SEQ ID NO: 8019 - protein, 670 aa, synthetic construct
TLQLEEEYRLFEPESTQKQEMDIWLKNFPQAWAETGGMGTAHCQAPVLIQLKATATPISIRQYPMPHEAYQGIKPHIRRMLDQGILKPCQSPWNTPLLPVKKPGTEDYRPVQDLREVNKRVEDIHPTVPNPYNLLSTLPPSHPWYTVLDLKDAFFCLRLHSESQLLFAFEWRDPEIGLSGQLTWTRLPQGFKNSPTLFNEALHSDLADFRVRYPALVLLQYVDDLLLAAATRTECLEGTKALLETLGNKGYRASAKKAQICLQEVTYLGYSLKDGQRWLTKARKEAILSIPVPKNSRQVREFLGTAGYCRLWIPGFAELAAPLYPLTRPGTLFQWGTEQQLAFEDIKKALLSSPALGLPDITKPFELFIDENSGFAKGVLVQKLGPWKRPVAYLSKKLDTVASGWPPCLRMVAAIAILVKDAGKLTLGQPLTILTSHPVEALVRQPPNKWLSNARMTHYQAMLLDAERVHFGPTVSLNPATLLPLPSGGNHHDCLQILAETHGTRPDLTDQPLPDADLTWYTDGSSFIRNGEREAGAAVTTESEVIWAAPLPPGTSAQRAELIALTQALKMAEGKKLTVYTDSRYAFATTHVHGEIYRRRGWLTSEGKEIKNKNEILALLEALFLPKRLSIIHCPGHQKGDSPQAKGNRLADDTAKKAATETHSSLTVLP

SEQ ID NO: 8020 - protein, 670 aa, synthetic construct
TLQLEEEYRLFEPESTQKQEMDIWLKNFPQAWAETGGMGTAHCQAPVLIQLKATATPISIRQYPMPHEAYQGIKPHIRRMLDQGILKPCQSPWNTPLLPVKKPGTEDYRPVQDLREVNKRVEDIHPTVPNPYNLLSTLPPSHPWYTVLDLKDAFFCLRLHSESQLLFAFEWRDPEIGLSGQLTWTRLPQGFKNSPTLFNEALHSDLADFRVRYPALVLLQYVDDLLLAAATRTECLEGTKALLETLGNKGYRASAKKAQICLQEVTYLGYSLKDGQRWLTKARKEAILSIPVPKNSRQVREFLGKAGYCRLFIPGFAELAAPLYPLTRPGTLFQWGTEQQLAFEDIKKALLSSPALGLPDITKPFELFIDENSGFAKGVLVQKLGPWKRPVAYLSKKLDTVASGWPPCLRMVAAIAILVKDAGKLTLGQPLTILTSHPVEALVRQPPNKWLSNARMTHYQAMLLDAERVHFGPTVSLNPATLLPLPSGGNHHDCLQILAETHGTRPDLTDQPLPDADLTWYTDGSSFIRNGEREAGAAVTTESEVIWAAPLPPGTSAQRAELIALTQALKMAEGKKLTVYTDSRYAFATTHVHGEIYRRRGWLTSEGKEIKNKNEILALLEALFLPKRLSIIHCPGHQKGDSPQAKGNRLADDTAKKAATETHSSLTVLP

SEQ ID NO: 8021 - protein, 751 aa, synthetic construct
MNPLQLLQPLPAEIKGTKLLAHWNSGATITCIPESFLEDEQPIKKTLIKTIHGEKQQNVYYVTFKVKGRKVEAEVIASPYEYILLSPTDVPWLTQQPLQLTILVPLQEYQEKILSKTALPEDQKQQLKTLFVKYDNLWQHWENQVGHRKIRPHNIATGDYPPRPQKQYPINPKAKPSIQIVIDDLLKQGVLTPQNSTMNTPVYPVPKPDGRWRMVLDYREVNKTIPLTAAQNQHSAGILATIVRQKYKTTLDLANGFWAHPITPESYWLTAFTWQGKQYCWTRLPQGFLNSPALFTADVVDLLKEIPNVQVYVDDIYLSHDDPKEHVQQLEKVFQILLQAGYVVSLKKSEIGQKTVEFLGFNITKEGRGLTDTFKTKLLNITPPKDLKQLQSILGLLNFARNFIPNFAELVQPLYNLIASAKGKYIEWSEENTKQLNMVIEALNTASNLEERLPEQRLVIKVNTSPSAGYVRYYNETGKKPIMYLNYVFSKAELKFSMLEKLLTTMHKALIKAMDLAMGQEILVYSPIVSMTKIQKTPLPERKALPIRWITWMTYLEDPRIQFHYDKTLPELKHIPDVYTSSQSPVKHPSQYEGVFYTDGSAIKSPDPTKSNNAGMGIVHATYKPEYQVLNQWSIPLGNHTAQMAEIAAVEFACKKALKIPGPVLVITDSFYVAESANKELPYWKSNGFVNNKKKPLKHISKWKSIAECLSMKPDITIQHEKGISLQIPVFILKGNALADKLATQGSYVVN

SEQ ID NO: 8022 - protein, 751 aa, synthetic construct
MNPLQLLQPLPAEIKGTKLLAHWNSGATITCIPESFLEDEQPIKKTLIKTIHGEKQQNVYYVTFKVKGRKVEAEVIASPYEYILLSPTDVPWLTQQPLQLTILVPLQEYQEKILSKTALPEDQKQQLKTLFVKYDNLWQHWENQVGHRKIRPHNIATGDYPPRPQKQYPINPKAKPSIQIVIDDLLKQGVLTPQNSTMNTPVYPVPKPDGRWRMVLDYREVNKTIPLTAAQNQHSAGILATIVRQKYKTTLDLANGFWAHPITPESYWLTAFTWQGKQYCWTRLPQGFLNSPALFNADVVDLLKEIPNVQVYVDDIYLSHDDPKEHVQQLEKVFQILLQAGYVVSLKKSEIGQKTVEFLGFNITKEGRGLTDTFKTKLLNITPPKDLKQLQSILGLLNFARNFIPNFAELVQPLYNLIAPAKGKYIEWSEENTKQLNMVIEALNTASNLEERLPEQRLVIKVNTSPSAGYVRYYNETGKKPIMYLNYVFSKAELKFSMLEKLLTTMHKALIKAMDLAMGQEILVYSPIVSMTKIQKTPLPERKALPIRWITWMTYLEDPRIQFHYDKTLPELKHIPDVYTSSQSPVKHPSQYEGVFYTDGSAIKSPDPTKSNNAGMGIVHATYKPEYQVLNQWSIPLGNHTAQMAEIAAVEFACKKALKIPGPVLVITDSFYVAESANKELPYWKSNGFVNNKKKPLKHISKWKSIAECLSMKPDITIQHEKGISLQIPVFILKGNALADKLATQGSYVVN

SEQ ID NO: 8023 - protein, 751 aa, synthetic construct
MNPLQLLQPLPAEIKGTKLLAHWNSGATITCIPESFLEDEQPIKKTLIKTIHGEKQQNVYYVTFKVKGRKVEAEVIASPYEYILLSPTDVPWLTQQPLQLTILVPLQEYQEKILSKTALPEDQKQQLKTLFVKYDNLWQHWENQVGHRKIRPHNIATGDYPPRPQKQYPINPKAKPSIQIVIDDLLKQGVLTPQNSTMNTPVYPVPKPDGRWRMVLDYREVNKTIPLTAAQNQHSAGILATIVRQKYKTTLDLANGFWAHPITPESYWLTAFTWQGKQYCWTRLPQGFLNSPALFNADVVDLLKEIPNVQVYVDDIYLSHDDPKEHVQQLEKVFQILLQAGYVVSLKKSEIGQKTVEFLGFNITKEGRGLTDTFKTKLLNITPPKDLKQLQSILGKLNFARNFIPNFAELVQPLYNLIAPAKGKYIEWSEENTKQLNMVIEALNTASNLEERLPEQRLVIKVNTSPSAGYVRYYNETGKKPIMYLNYVFSKAELKFSMLEKLLTTMHKALIKAMDLAMGQEILVYSPIVSMTKIQKTPLPERKALPIRWITWMTYLEDPRIQFHYDKTLPELKHIPDVYTSSQSPVKHPSQYEGVFYTDGSAIKSPDPTKSNNAGMGIVHATYKPEYQVLNQWSIPLGNHTAQMAEIAAVEFACKKALKIPGPVLVITDSFYVAESANKELPYWKSNGFVNNKKKPLKHISKWKSIAECLSMKPDITIQHEKGISLQIPVFILKGNALADKLATQGSYVVN

SEQ ID NO: 8024 - protein, 662 aa, synthetic construct
VPWLTQQPLQLTILVPLQEYQEKILSKTALPEDQKQQLKTLFVKYDNLWQHWENQVGHRKIRPHNIATGDYPPRPQKQYPINPKAKPSIQIVIDDLLKQGVLTPQNSTMNTPVYPVPKPDGRWRMVLDYREVNKTIPLTAAQNQHSAGILATIVRQKYKTTLDLANGFWAHPITPESYWLTAFTWQGKQYCWTRLPQGFLNSPALFTADVVDLLKEIPNVQVYVDDIYLSHDDPKEHVQQLEKVFQILLQAGYVVSLKKSEIGQKTVEFLGFNITKEGRGLTDTFKTKLLNITPPKDLKQLQSILGLLNFARNFIPNFAELVQPLYNLIASAKGKYIEWSEENTKQLNMVIEALNTASNLEERLPEQRLVIKVNTSPSAGYVRYYNETGKKPIMYLNYVFSKAELKFSMLEKLLTTMHKALIKAMDLAMGQEILVYSPIVSMTKIQKTPLPERKALPIRWITWMTYLEDPRIQFHYDKTLPELKHIPDVYTSSQSPVKHPSQYEGVFYTDGSAIKSPDPTKSNNAGMGIVHATYKPEYQVLNQWSIPLGNHTAQMAEIAAVEFACKKALKIPGPVLVITDSFYVAESANKELPYWKSNGFVNNKKKPLKHISKWKSIAECLSMKPDITIQHEKGISLQIPVFILKGNALADKLATQGSYVVN

SEQ ID NO: 8025 - protein, 662 aa, synthetic construct
VPWLTQQPLQLTILVPLQEYQEKILSKTALPEDQKQQLKTLFVKYDNLWQHWENQVGHRKIRPHNIATGDYPPRPQKQYPINPKAKPSIQIVIDDLLKQGVLTPQNSTMNTPVYPVPKPDGRWRMVLDYREVNKTIPLTAAQNQHSAGILATIVRQKYKTTLDLANGFWAHPITPESYWLTAFTWQGKQYCWTRLPQGFLNSPALFNADVVDLLKEIPNVQVYVDDIYLSHDDPKEHVQQLEKVFQILLQAGYVVSLKKSEIGQKTVEFLGFNITKEGRGLTDTFKTKLLNITPPKDLKQLQSILGLLNFARNFIPNFAELVQPLYNLIAPAKGKYIEWSEENTKQLNMVIEALNTASNLEERLPEQRLVIKVNTSPSAGYVRYYNETGKKPIMYLNYVFSKAELKFSMLEKLLTTMHKALIKAMDLAMGQEILVYSPIVSMTKIQKTPLPERKALPIRWITWMTYLEDPRIQFHYDKTLPELKHIPDVYTSSQSPVKHPSQYEGVFYTDGSAIKSPDPTKSNNAGMGIVHATYKPEYQVLNQWSIPLGNHTAQMAEIAAVEFACKKALKIPGPVLVITDSFYVAESANKELPYWKSNGFVNNKKKPLKHISKWKSIAECLSMKPDITIQHEKGISLQIPVFILKGNALADKLATQGSYVVN

SEQ ID NO: 8026 - protein, 662 aa, synthetic construct
VPWLTQQPLQLTILVPLQEYQEKILSKTALPEDQKQQLKTLFVKYDNLWQHWENQVGHRKIRPHNIATGDYPPRPQKQYPINPKAKPSIQIVIDDLLKQGVLTPQNSTMNTPVYPVPKPDGRWRMVLDYREVNKTIPLTAAQNQHSAGILATIVRQKYKTTLDLANGFWAHPITPESYWLTAFTWQGKQYCWTRLPQGFLNSPALFNADVVDLLKEIPNVQVYVDDIYLSHDDPKEHVQQLEKVFQILLQAGYVVSLKKSEIGQKTVEFLGFNITKEGRGLTDTFKTKLLNITPPKDLKQLQSILGKLNFARNFIPNFAELVQPLYNLIAPAKGKYIEWSEENTKQLNMVIEALNTASNLEERLPEQRLVIKVNTSPSAGYVRYYNETGKKPIMYLNYVFSKAELKFSMLEKLLTTMHKALIKAMDLAMGQEILVYSPIVSMTKIQKTPLPERKALPIRWITWMTYLEDPRIQFHYDKTLPELKHIPDVYTSSQSPVKHPSQYEGVFYTDGSAIKSPDPTKSNNAGMGIVHATYKPEYQVLNQWSIPLGNHTAQMAEIAAVEFACKKALKIPGPVLVITDSFYVAESANKELPYWKSNGFVNNKKKPLKHISKWKSIAECLSMKPDITIQHEKGISLQIPVFILKGNALADKLATQGSYVVN

SEQ ID NO: 8027 - protein, 669 aa, synthetic construct
VLNLEEEYRLHEKPVPSSIDPSWLQLFPTVWAERAGMGLANQVPPVVVELRSGASPVAVRQYPMSKEAREGIRPHIQKFLDLGVLVPCRSPWNTPLLPVKKPGTNDYRPVQDLREINKRVQDIHPTVPNPYNLLSSLPPSYTWYSVLDLKDAFFCLRLHPNSQPLFAFEWKDPEKGNTGQLTWTRLPQGFKNSPTLFDEALHRDLAPFRALNPQVVLLQYVDDLLVAAPTYEDCKKGTQKLLQELSKLGYRVSAKKAQLCQREVTYLGYLLKEGKRWLTPARKATVMKIPVPTTPRQVREFLGTAGFCRLWIPGFASLAAPLYPLTKESIPFIWTEEHQQAFDHIKKALLSAPALALPDLTKPFTLYIDERAGVARGVLTQTLGPWRRPVAYLSKKLDPVASGWPTCLKAVAAVALLLKDADKLTLGQNVTVIASHSLESIVRQPPDRWMTNARMTHYQSLLLNERVSFAPPAVLNPATLLPVESEATPVHRCSEILAEETGTRRDLEDQPLPGVPTWYTDGSSFITEGKRRAGAPIVDGKRTVWASSLPEGTSAQKAELVALTQALRLAEGKNINIYTDSRYAFATAHIHGAIYKQRGLLTSAGKDIKNKEEILALLEAIHLPRRVAIIHCPGHQRGSNPVATGNRRADEAAKQAALSTRVLAGTTKP

SEQ ID NO: 8028 - protein, 669 aa, synthetic construct
VLNLEEEYRLHEKPVPSSIDPSWLQLFPTVWAERAGMGLANQVPPVVVELRSGASPVAVRQYPMSKEAREGIRPHIQKFLDLGVLVPCRSPWNTPLLPVKKPGTNDYRPVQDLREINKRVQDIHPTVPNPYNLLSSLPPSYTWYSVLDLKDAFFCLRLHPNSQPLFAFEWKDPEKGNTGQLTWTRLPQGFKNSPTLFNEALHRDLAPFRALNPQVVLLQYVDDLLVAAPTYEDCKKGTQKLLQELSKLGYRVSAKKAQLCQREVTYLGYLLKEGKRWLTPARKATVMKIPVPTTPRQVREFLGTAGFCRLWIPGFASLAAPLYPLTKPSIPFIWTEEHQQAFDHIKKALLSAPALALPDLTKPFTLYIDERAGVARGVLTQTLGPWRRPVAYLSKKLDPVASGWPTCLKAVAAVALLLKDADKLTLGQNVTVIASHSLESIVRQPPDRWMTNARMTHYQSLLLNERVSFAPPAVLNPATLLPVESEATPVHRCSEILAEETGTRRDLEDQPLPGVPTWYTDGSSFITEGKRRAGAPIVDGKRTVWASSLPEGTSAQKAELVALTQALRLAEGKNINIYTDSRYAFATAHIHGAIYKQRGWLTSAGKDIKNKEEILALLEAIHLPRRVAIIHCPGHQRGSNPVATGNRRADEAAKQAALSTRVLAGTTKP

SEQ ID NO: 8029 - protein, 669 aa, synthetic construct
VLNLEEEYRLHEKPVPSSIDPSWLQLFPTVWAERAGMGLANQVPPVVVELRSGASPVAVRQYPMSKEAREGIRPHIQKFLDLGVLVPCRSPWNTPLLPVKKPGTNDYRPVQDLREINKRVQDIHPTVPNPYNLLSSLPPSYTWYSVLDLKDAFFCLRLHPNSQPLFAFEWKDPEKGNTGQLTWTRLPQGFKNSPTLFNEALHRDLAPFRALNPQVVLLQYVDDLLVAAPTYEDCKKGTQKLLQELSKLGYRVSAKKAQLCQREVTYLGYLLKEGKRWLTPARKATVMKIPVPTTPRQVREFLGKAGFCRLFIPGFASLAAPLYPLTKPSIPFIWTEEHQQAFDHIKKALLSAPALALPDLTKPFTLYIDERAGVARGVLTQTLGPWRRPVAYLSKKLDPVASGWPTCLKAVAAVALLLKDADKLTLGQNVTVIASHSLESIVRQPPDRWMTNARMTHYQSLLLNERVSFAPPAVLNPATLLPVESEATPVHRCSEILAEETGTRRDLEDQPLPGVPTWYTDGSSFITEGKRRAGAPIVDGKRTVWASSLPEGTSAQKAELVALTQALRLAEGKNINIYTDSRYAFATAHIHGAIYKQRGWLTSAGKDIKNKEEILALLEAIHLPRRVAIIHCPGHQRGSNPVATGNRRADEAAKQAALSTRVLAGTTKP

SEQ ID NO: 8030 - protein, 588 aa, synthetic construct
AVLGLEHLPRPPQISQFPLNPERLQALQHLVRKALEAGHIEPYTGPGNNPVFPVKKANGTWRFIHDLRATNSLTIDLSSSSPGPPDLSSLPTTLAHLQTIDLRDAFFQIPLPKQFQPYFAFTVPQQCNYGPGTRYAWKVLPQGFKNSPTLFEMQLAHILQPIRQAFPQCTILQYMDDILLASPSHEDLLLLSEATMASLISHGLPVSENKTQQTPGTIKFLGQIISPNHLTYDAVPTVPIRSRWALPELQALLGEIQWVSKGTPTLRQPLHSLYCALQRHTDPRDQIYLNPSQVQSLVQLRQALSQNCRSRLVQTLPLLGAIMLTLTGTTTVVFQSKEQWPLVWLHAPLPHTSQCPWGQLLASAVLLLDKYTLQSYGLLCQTIHHNISTQTFNQFIQTSDHPSVPILLHHSHRFKNLGAQTGELWNTFLKTAAPLAPVKALMPVFTLSPVIINTAPCLFSDGSTSRAAYILWDKQILSQRSFPLPPPHKSAQRAELLGLLHGLSSARSWRCLNIFLDSKYLYHYLRTLALGTFQGRSSQAPFQALLPRLLSRKVVYLHHVRSHTNLPDPISRLNALTDALLITPVLQL

SEQ ID NO: 8031 - protein, 588 aa, synthetic construct
AVLGLEHLPRPPQISQFPLNPERLQALQHLVRKALEAGHIEPYTGPGNNPVFPVKKANGTWRFIHDLRATNSLTIDLSSSSPGPPDLSSLPTTLAHLQTIDLRDAFFQIPLPKQFQPYFAFTVPQQCNYGPGTRYAWKVLPQGFKNSPTLFQMQLAHILQPIRQAFPQCTILQYMDDILLASPSHEDLLLLSEATMASLISHGLPVSENKTQQTPGTIKFLGQIISPNHLTYDAVPTVPIRSRWALPELQALLGEIQWVSKGTPTLRQPLHSLYCALQPHTDPRDQIYLNPSQVQSLVQLRQALSQNCRSRLVQTLPLLGAIMLTLTGTTTVVFQSKEQWPLVWLHAPLPHTSQCPWGQLLASAVLLLDKYTLQSYGLLCQTIHHNISTQTFNQFIQTSDHPSVPILLHHSHRFKNLGAQTGELWNTFLKTAAPLAPVKALMPVFTLSPVIINTAPCLFSDGSTSRAAYILWDKQILSQRSFPLPPPHKSAQRAELLGLLHGLSSARSWRCLNIFLDSKYLYHYLRTLALGTFQGRSSQAPFQALLPRLLSRKVVYLHHVRSHTNLPDPISRLNALTDALLITPVLQL

SEQ ID NO: 8032 - protein, 588 aa, synthetic construct
AVLGLEHLPRPPQISQFPLNPERLQALQHLVRKALEAGHIEPYTGPGNNPVFPVKKANGTWRFIHDLRATNSLTIDLSSSSPGPPDLSSPPTTLAHLQTIDLRDAFFQIPLPKQFQPYFAFTVPQQCNYGPGTRYAWKVLPQGFKNSPTLFQMQLAHILQPIRQAFPQCTILQYMDDILLASPSHEDLLLLSEATMASLISHGLPVSENKTQQTPGTIKFLGQIISPNHLTYDAVPTVPIRSRWALPELQALLGEIQWVSKGTPTLRQPLHSLYCALQPHTDPRDQIYLNPSQVQSLVQLRQALSQNCRSRLVQTLPLLGAIMLTLTGTTTVVFQSKEQWPLVWLHAPLPHTSQCPWGQLLASAVLLLDKYTLQSYGLLCQTIHHNISTQTFNQFIQTSDHPSVPILLHHSHRFKNLGAQTGELWNTFLKTAAPLAPVKALMPVFTLSPVIINTAPCLFSDGSTSRAAYILWDKQILSQRSFPLPPPHKSAQRAELLGLLHGLSSARSWRCLNIFLDSKYLYHYLRTLALGTFQGRSSQAPFQALLPRLLSRKVVYLHHVRSHTNLPDPISRLNALTDALLITPVLQL

SEQ ID NO: 8033 - protein, 588 aa, synthetic construct
AVLGLEHLPRPPEISQFPLNPERLQALQHLVRKALEAGHIEPYTGPGNNPVFPVKKANGTWRFIHDLRATNSLTIDLSSSSPGPPDLSSLPTTLAHLQTIDLKDAFFQIPLPKQFQPYFAFTVPQQCNYGPGTRYAWRVLPQGFKNSPTLFEMQLAHILQPIRQAFPQCTILQYMDDILLASPSHADLQLLSEATMASLISHGLPVSENKTQQTPGTIKFLGQIISPNHLTYDAVPKVPIRSRWALPELQALLGEIQWVSKGTPTLRQPLHSLYCALQRHTDPRDQIYLNPSQVQSLVQLRQALSQNCRSRLVQTLPLLGAIMLTLTGTTTVVFQSKQQWPLVWLHAPLPHTSQCPWGQLLASAVLLLDKYTLQSYGLLCQTIHHNISTQTFNQFIQTSDHPSVPILLHHSHRFKNLGAQTGELWNTFLKTTAPLAPVKALMPVFTLSPVIINTAPCLFSDGSTSQAAYILWDKHILSQRSFPLPPPHKSAQRAELLGLLHGLSSARSWRCLNIFLDSKYLYHYLRTLALGTFQGRSSQAPFQALLPRLLSRKVVYLHHVRSHTNLPDPISRLNALTDALLITPVLQL

SEQ ID NO: 8034 - protein, 588 aa, synthetic construct
AVLGLEHLPRPPEISQFPLNPERLQALQHLVRKALEAGHIEPYTGPGNNPVFPVKKANGTWRFIHDLRATNSLTIDLSSSSPGPPDLSSLPTTLAHLQTIDLKDAFFQIPLPKQFQPYFAFTVPQQCNYGPGTRYAWRVLPQGFKNSPTLFQMQLAHILQPIRQAFPQCTILQYMDDILLASPSHADLQLLSEATMASLISHGLPVSENKTQQTPGTIKFLGQIISPNHLTYDAVPKVPIRSRWALPELQALLGEIQWVSKGTPTLRQPLHSLYCALQPHTDPRDQIYLNPSQVQSLVQLRQALSQNCRSRLVQTLPLLGAIMLTLTGTTTVVFQSKQQWPLVWLHAPLPHTSQCPWGQLLASAVLLLDKYTLQSYGLLCQTIHHNISTQTFNQFIQTSDHPSVPILLHHSHRFKNLGAQTGELWNTFLKTTAPLAPVKALMPVFTLSPVIINTAPCLFSDGSTSQAAYILWDKHILSQRSFPLPPPHKSAQRAELLGLLHGLSSARSWRCLNIFLDSKYLYHYLRTLALGTFQGRSSQAPFQALLPRLLSRKVVYLHHVRSHTNLPDPISRLNALTDALLITPVLQL

SEQ ID NO: 8035 - protein, 583 aa, synthetic construct
GLEHLPRPPEISQFPLNPERLQALQHLVRKALEAGHIEPYTGPGNNPVFPVKKANGTWRFIHDLRATNSLTVDLSSSSPGPPDLSSLPTTLAHLQTIDLKDAFFQIPLPKQFQPYFAFTVPQQCNYGPGTRYAWKVLPQGFKNSPTLFEMQLASILQPIRQAFPQCVILQYMDDILLASPSPEDLQQLSEATMASLISHGLPVSQDKTQQTPGTIKFLGQIISPNHITYDAVPTVPIRSRWALPELQALLGEIQWVSKGTPTLRQPLHSLYCALQGHTDPRDQIYLNPSQVQSLMQLQQALSQNCRSRLAQTLPLLGAIMLTLTGTTTVVFQSKQQWPLVWLHAPLPHTSQCPWGQLLASAVLLLDKYTLQSYGLLCQTIHHNISIQTFNQFIQTSDHPSVPILLHHSHRFKNLGAQTGELWNTFLKTAAPLAPVKALTPVFTLSPIIINTAPCLFSDGSTSQAAYILWDKHILSQRSFPLPPPHKSAQQAELLGLLHGLSSARSWHCLNIFLDSKYLYHYLRTLALGTFQGKSSQAPFQALLPRLLAHKVIYLHHVRSHTNLPDPISKLNALTDALLITPIL

SEQ ID NO: 8036 - protein, 583 aa, synthetic construct
GLEHLPRPPEISQFPLNPERLQALQHLVRKALEAGHIEPYTGPGNNPVFPVKKANGTWRFIHDLRATNSLTVDLSSSSPGPPDLSSLPTTLAHLQTIDLKDAFFQIPLPKQFQPYFAFTVPQQCNYGPGTRYAWKVLPQGFKNSPTLFQMQLASILQPIRQAFPQCVILQYMDDILLASPSPEDLQQLSEATMASLISHGLPVSQDKTQQTPGTIKFLGQIISPNHITYDAVPTVPIRSRWALPELQALLGEIQWVSKGTPTLRQPLHSLYCALQGHTDPRDQIYLNPSQVQSLMQLQQALSQNCRSRLAQTLPLLGAIMLTLTGTTTVVFQSKQQWPLVWLHAPLPHTSQCPWGQLLASAVLLLDKYTLQSYGLLCQTIHHNISIQTFNQFIQTSDHPSVPILLHHSHRFKNLGAQTGELWNTFLKTAAPLAPVKALTPVFTLSPIIINTAPCLFSDGSTSQAAYILWDKHILSQRSFPLPPPHKSAQQAELLGLLHGLSSARSWHCLNIFLDSKYLYHYLRTLAWGTFQGKSSQAPFQALLPRLLAHKVIYLHHVRSHTNLPDPISKLNALTDALLITPIL

SEQ ID NO: 8037 - protein, 583 aa, synthetic construct
GLEHLPRPPEISQFPLNPERLQALQHLVRKALEAGHIEPYTGPGNNPVFPVKKANGTWRFIHDLRATNSLTVDLSSSSPGPPDLSSPPTTLAHLQTIDLKDAFFQIPLPKQFQPYFAFTVPQQCNYGPGTRYAWKVLPQGFKNSPTLFQMQLASILQPIRQAFPQCVILQYMDDILLASPSPEDLQQLSEATMASLISHGLPVSQDKTQQTPGTIKFLGQIISPNHITYDAVPTVPIRSRWALPELQALLGEIQWVSKGTPTLRQPLHSLYCALQGHTDPRDQIYLNPSQVQSLMQLQQALSQNCRSRLAQTLPLLGAIMLTLTGTTTVVFQSKQQWPLVWLHAPLPHTSQCPWGQLLASAVLLLDKYTLQSYGLLCQTIHHNISIQTFNQFIQTSDHPSVPILLHHSHRFKNLGAQTGELWNTFLKTAAPLAPVKALTPVFTLSPIIINTAPCLFSDGSTSQAAYILWDKHILSQRSFPLPPPHKSAQQAELLGLLHGLSSARSWHCLNIFLDSKYLYHYLRTLAWGTFQGKSSQAPFQALLPRLLAHKVIYLHHVRSHTNLPDPISKLNALTDALLITPIL

SEQ ID NO: 8038 - protein, 584 aa, synthetic construct
GLEHLPPPPEVSQFPLNPERLQALTDLVSRALEAKHIEPYQGPGNNPIFPVKKPNGKWRFIHDLRATNSVTRDLASPSPGPPDLTSLPQGLPHLRTIDLTDAFFQIPLPTIFQPYFAFTLPQPNNYGPGTRYSWRVLPQGFKNSPTLFEQQLSHILTPVRKTFPNSLIIQYMDDILLASPAPGELAALTDKVTNALTKEGLPLSPEKTQATPGPIHFLGQVISQDCITYETLPSINVKSTWSLAELQSMLGELQWVSKGTPVLRSSLHQLYLALRGHRDPRDTIKLTSIQVQALRTIQKALTLNCRSRLVNQLPILALIMLRPTGTTAVLFQTKQKWPLVWLHTPHPATSLRPWGQLLANAVIILDKYSLQHYGQVCKSFHHNISNQALTYYLHTSDQSSVAILLQHSHRFHNLGAQPSGPWRSLLQMPQIFQNIDVLRPPFTISPVVINHAPCLFSDGSASKAAFIIWDRQVIHQQVLSLPSTCSAQAGELFGLLAGLQKSQPWVALNIFLDSKFLIGHLRRMALGAFPGPSTQCELHTQLLPLLQGKTVYVHHVRSHTLLQDPISRLNEATDALMLAPLLPL

SEQ ID NO: 8039 - protein, 584 aa, synthetic construct
GLEHLPPPPEVSQFPLNPERLQALTDLVSRALEAKHIEPYQGPGNNPIFPVKKPNGKWRFIHDLRATNSVTRDLASPSPGPPDLTSLPQGLPHLRTIDLTDAFFQIPLPTIFQPYFAFTLPQPNNYGPGTRYSWRVLPQGFKNSPTLFQQQLSHILTPVRKTFPNSLIIQYMDDILLASPAPGELAALTDKVTNALTKEGLPLSPEKTQATPGPIHFLGQVISQDCITYETLPSINVKSTWSLAELQSMLGELQWVSKGTPVLRSSLHQLYLALRGHRDPRDTIKLTSIQVQALRTIQKALTLNCRSRLVNQLPILALIMLRPTGTTAVLFQTKQKWPLVWLHTPHPATSLRPWGQLLANAVIILDKYSLQHYGQVCKSFHHNISNQALTYYLHTSDQSSVAILLQHSHRFHNLGAQPSGPWRSLLQMPQIFQNIDVLRPPFTISPVVINHAPCLFSDGSASKAAFIIWDRQVIHQQVLSLPSTCSAQAGELFGLLAGLQKSQPWVALNIFLDSKFLIGHLRRMAWGAFPGPSTQCELHTQLLPLLQGKTVYVHHVRSHTLLQDPISRLNEATDALMLAPLLPL

SEQ ID NO: 8040 - protein, 584 aa, synthetic construct
GLEHLPPPPEVSQFPLNPERLQALTDLVSRALEAKHIEPYQGPGNNPIFPVKKPNGKWRFIHDLRATNSVTRDLASPSPGPPDLTSPPQGLPHLRTIDLTDAFFQIPLPTIFQPYFAFTLPQPNNYGPGTRYSWRVLPQGFKNSPTLFQQQLSHILTPVRKTFPNSLIIQYMDDILLASPAPGELAALTDKVTNALTKEGLPLSPEKTQATPGPIHFLGQVISQDCITYETLPSINVKSTWSLAELQSMLGELQWVSKGTPVLRSSLHQLYLALRGHRDPRDTIKLTSIQVQALRTIQKALTLNCRSRLVNQLPILALIMLRPTGTTAVLFQTKQKWPLVWLHTPHPATSLRPWGQLLANAVIILDKYSLQHYGQVCKSFHHNISNQALTYYLHTSDQSSVAILLQHSHRFHNLGAQPSGPWRSLLQMPQIFQNIDVLRPPFTISPVVINHAPCLFSDGSASKAAFIIWDRQVIHQQVLSLPSTCSAQAGELFGLLAGLQKSQPWVALNIFLDSKFLIGHLRRMAWGAFPGPSTQCELHTQLLPLLQGKTVYVHHVRSHTLLQDPISRLNEATDALMLAPLLPL

SEQ ID NO: 8041 - protein, 584 aa, synthetic construct
GLEHLPPPPEVSQFPLNPERLQALTDLVSRALEAKHIEPYQGPGNNPIFPVKKPNGKWRFIHDLRATNSLTRDLASPSPGPPDLTSLPQDLPHLRTIDLTDAFFQIPLPAVFQPYFAFTLPQPNNHGPGTRYSWRVLPQGFKNSPTLFEQQLSHILAPVRKAFPNSLIIQYMDDILLASPALRELTALTDKVTNALTKEGLPMSLEKTQATPGSIHFLGQVISPDCITYETLPSIHVKSIWSLAELQSMLGELQWVSKGTPVLRSSLHQLYLALRGHRDPRDTIELTSTQVQALKTIQKALALNCRSRLVSQLPILALIILRPTGTTAVLFQTKQKWPLVWLHTPHPATSLRPWGQLLANAIITLDKYSLQHYGQICKSFHHNISNQALTYYLHTSDQSSVAILLQHSHRFHNLGAQPSGPWRSLLQVPQIFQNIDVLRPPFIISPVVIDHAPCLFSDGATSKAAFILWDKQVIHQQVLPLPSTCSAQAGELFGLLAGLQKSKPWPALNIFLDSKFLIGHLRRMALGAFLGPSTQCDLHARLFPLLQGKTVYVHHVRSHTLLQDPISRLNEATDALMLAPLLPL

SEQ ID NO: 8042 - protein, 584 aa, synthetic construct
GLEHLPPPPEVSQFPLNPERLQALTDLVSRALEAKHIEPYQGPGNNPIFPVKKPNGKWRFIHDLRATNSLTRDLASPSPGPPDLTSLPQDLPHLRTIDLTDAFFQIPLPAVFQPYFAFTLPQPNNHGPGTRYSWRVLPQGFKNSPTLFQQQLSHILAPVRKAFPNSLIIQYMDDILLASPALRELTALTDKVTNALTKEGLPMSLEKTQATPGSIHFLGQVISPDCITYETLPSIHVKSIWSLAELQSMLGELQWVSKGTPVLRSSLHQLYLALRGHRDPRDTIELTSTQVQALKTIQKALALNCRSRLVSQLPILALIILRPTGTTAVLFQTKQKWPLVWLHTPHPATSLRPWGQLLANAIITLDKYSLQHYGQICKSFHHNISNQALTYYLHTSDQSSVAILLQHSHRFHNLGAQPSGPWRSLLQVPQIFQNIDVLRPPFIISPVVIDHAPCLFSDGATSKAAFILWDKQVIHQQVLPLPSTCSAQAGELFGLLAGLQKSKPWPALNIFLDSKFLIGHLRRMAWGAFLGPSTQCDLHARLFPLLQGKTVYVHHVRSHTLLQDPISRLNEATDALMLAPLLPL

SEQ ID NO: 8043 - protein, 584 aa, synthetic construct
GLEHLPPPPEVSQFPLNPERLQALTDLVSRALEAKHIEPYQGPGNNPIFPVKKPNGKWRFIHDLRATNSLTRDLASPSPGPPDLTSPPQDLPHLRTIDLTDAFFQIPLPAVFQPYFAFTLPQPNNHGPGTRYSWRVLPQGFKNSPTLFQQQLSHILAPVRKAFPNSLIIQYMDDILLASPALRELTALTDKVTNALTKEGLPMSLEKTQATPGSIHFLGQVISPDCITYETLPSIHVKSIWSLAELQSMLGELQWVSKGTPVLRSSLHQLYLALRGHRDPRDTIELTSTQVQALKTIQKALALNCRSRLVSQLPILALIILRPTGTTAVLFQTKQKWPLVWLHTPHPATSLRPWGQLLANAIITLDKYSLQHYGQICKSFHHNISNQALTYYLHTSDQSSVAILLQHSHRFHNLGAQPSGPWRSLLQVPQIFQNIDVLRPPFIISPVVIDHAPCLFSDGATSKAAFILWDKQVIHQQVLPLPSTCSAQAGELFGLLAGLQKSKPWPALNIFLDSKFLIGHLRRMAWGAFLGPSTQCDLHARLFPLLQGKTVYVHHVRSHTLLQDPISRLNEATDALMLAPLLPL

SEQ ID NO: 8044 - protein, 584 aa, synthetic construct
HLPPPPQVDQFPLNLPERLQALNDLVSKALEAGHIEPYSGPGNNPVFPVKKPNGKWRFIHDLRATNAITTTLTSPSPGPPDLTSLPTALPHLQTIDLTDAFFQIPLPKQYQPYFAFTIPQPCNYGPGTRYAWTVLPQGFKNSPTLFQQQLAAVLNPMRKMFPTSTIVQYMDDILLASPTNEELQQLSQLTLQALTTHGLPISQEKTQQTPGQIRFLGQVISPNHITYESTPTIPIKSQWTLTELQVILGEIQWVSKGTPILRKHLQSLYSALHPYRDPRACITLTPQQLHALHAIQQALQHNCRGRLNPALPLLGLISLSTSGTTSVIFQPKQNWPLAWLHTPHPPTSLCPWGHLLACTILTLDKYTLQHYGQLCQSFHHNMSKQALCDFLRNSPHPSVGILIHHMGRFHNLGSQPSGPWKTLLHLPTLLQEPRLLRPIFTLSPVVLDTAPCLFSDGSPQKAAYVLWDQTILQQDITPLPSHETHSAQKGELLALICGLRAAKPWPSLNIFLDSKYLIKYLHSLAIGAFLGTSAHQTLQAALPPLLQGKTIYLHHVRSHTNLPDPISTFNEYTDSLILAPLVPL

SEQ ID NO: 8045 - protein, 581 aa, synthetic construct
PLGTSDSPVTHADPIDWKSEEPVWVDQWPLTQEKLSAAQQLVQEQLRLGHIEPSTSAWNSPIFVIKKKSGKWRLLQDLRKVNETMMHMGALQPGLPTPSAIPDKSYIIVIDLKDCFYTIPLAPQDCKRFAFSLPSVNFKEPMQRYQWRVLPQGMTNSPTLCQKFVATAIAPVRQRFPQLYLVHYMDDILLAHTDEHLLYQAFSILKQHLSLNGLVIADEKIQTHFPYNYLGFSLYPRVYNTQLVKLQTDHLKTLNDFQKLLGDINWIRPYLKLPTYTLQPLFDILKGDSDPASPRTLSLEGRTALQSIEEAIRQQQITYCDYQRSWGLYILPTPRAPTGVLYQDKPLRWIYLSATPTKHLLPYYELVAKIIAKGRHEAIQYFGMEPPFICVPYALEQQDWLFQFSDNWSIAFANYPGQITHHYPSDKLLQFASSHAFIFPKIVRRQPIPEATLIFTDGSSNGTAALIINHQTYYAQTSFSSAQVVELFAVHQALLTVPTSFNLFTDSSYVVGALQMIETVPIIGTTSPEVLNLFTLIQQVLHCRQHPCFFGHIRAHSTLPGALVQGNHTADVLTKQVFFQS

SEQ ID NO: 8046 - protein, 581 aa, synthetic construct
PLGTSDSPVTHADPIDWKSEEPVWVDQWPLTQEKLSAAQQLVQEQLRLGHIEPSTSAWNSPIFVIKKKSGKWRLLQDLRKVNETMMHMGALQPGLPTPSPIPDKSYIIVIDLKDCFYTIPLAPQDCKRFAFSLPSVNFKEPMQRYQWRVLPQGMTNSPTLCQKFVATAIAPVRQRFPQLYLVHYMDDILLAHTDEHLLYQAFSILKQHLSLNGLVIADEKIQTHFPYNYLGFSLYPRVYNTQLVKLQTDHLKTLNDFQKLLGDINWIRPYLKLPTYTLQPLFDILKGDSDPASPRTLSLEGRTALQSIEEAIRQQQITYCDYQRSWGLYILPTPRAPTGVLYQDKPLRWIYLSATPTKHLLPYYELVAKIIAKGRHEAIQYFGMEPPFICVPYALEQQDWLFQFSDNWSIAFANYPGQITHHYPSDKLLQFASSHAFIFPKIVRRQPIPEATLIFTDGSSNGTAALIINHQTYYAQTSFSSAQVVELFAVHQALLTVPTSFNLFTDSSYVVGALQMIETVPIIGTTSPEVLNLFTLIQQVLHCRQHPCFFGHIRAHSTLPGALVQGNHTADVLTKQVFFQS

SEQ ID NO: 8047 - protein, 793 aa, synthetic construct
TLGDQGSRGSDPLPEPRVTLTVEGIPTEFLVNTGAEHSVLTKPMGKMGSKRTVVAGATGSKVYPWTTKRLLKIGQKQVTHSFLVIPECPAPLLGRDLLTKLKAQIQFSTEGPQVTWEDRPAMCLVLNLEEEYRLHEKPVPPSIDPSWLQLFPMVWAEKAGMGLANQVPPVVVELKSDASPVAVRQYPMSKEAREGIRPHIQRFLDLGILVPCQSPWNTPLLPVKKPGTNDYRPVQDLREVNKRVQDIHPTVPNPYNLLSSLPPSHTWYSVLDLKDAFFCLKLHPNSQPLFAFEWRDPEKGNTGQLTWTRLPQGFKNSPTLFDEALHRDLASFRALNPQVVMLQYVDDLLVAAPTYRDCKEGTRRLLQELSKLGYRVSAKKAQLCREEVTYLGYLLKGGKRWLTPARKATVMKIPTPTTPRQVREFLGTAGFCRLWIPGFASLAAPLYPLTREKVPFTWTEAHQEAFGRIKEALLSAPALALPDLTKPFALYVDEKEGVARGVLTQTLGPWRRPVAYLSKKLDPVASGWPTCLKAIAAVALLLKDADKLTLGQNVLVIAPHNLESIVRQPPDRWMTNARMTHYQSLLLNERVSFAPPAILNPATLLPVESDDTPIHICSEILAEETGTRPDLRDQPLPGVPAWYTDGSSFIMDGRRQAGAAIVDNKRTVWASNLPEGTSAQKAELIALTQALRLAEGKSINIYTDSRYAFATAHVHGAIYKQRGLLTSAGKDIKNKEEILALLEAIHLPKRVAIIHCPGHQRGTDPVATGNRKADEAAKQAAQSTRILTETTKN

SEQ ID NO: 8048 - protein, 793 aa, synthetic construct
TLGDQGSRGSDPLPEPRVTLTVEGIPTEFLVNTGAEHSVLTKPMGKMGSKRTVVAGATGSKVYPWTTKRLLKIGQKQVTHSFLVIPECPAPLLGRDLLTKLKAQIQFSTEGPQVTWEDRPAMCLVLNLEEEYRLHEKPVPPSIDPSWLQLFPMVWAEKAGMGLANQVPPVVVELKSDASPVAVRQYPMSKEAREGIRPHIQRFLDLGILVPCQSPWNTPLLPVKKPGTNDYRPVQDLREVNKRVQDIHPTVPNPYNLLSSLPPSHTWYSVLDLKDAFFCLKLHPNSQPLFAFEWRDPEKGNTGQLTWTRLPQGFKNSPTLFNEALHRDLASFRALNPQVVMLQYVDDLLVAAPTYRDCKEGTRRLLQELSKLGYRVSAKKAQLCREEVTYLGYLLKGGKRWLTPARKATVMKIPTPTTPRQVREFLGTAGFCRLWIPGFASLAAPLYPLTRPKVPFTWTEAHQEAFGRIKEALLSAPALALPDLTKPFALYVDEKEGVARGVLTQTLGPWRRPVAYLSKKLDPVASGWPTCLKAIAAVALLLKDADKLTLGQNVLVIAPHNLESIVRQPPDRWMTNARMTHYQSLLLNERVSFAPPAILNPATLLPVESDDTPIHICSEILAEETGTRPDLRDQPLPGVPAWYTDGSSFIMDGRRQAGAAIVDNKRTVWASNLPEGTSAQKAELIALTQALRLAEGKSINIYTDSRYAFATAHVHGAIYKQRGWLTSAGKDIKNKEEILALLEAIHLPKRVAIIHCPGHQRGTDPVATGNRKADEAAKQAAQSTRILTETTKN

SEQ ID NO: 8049 - protein, 793 aa, synthetic construct
TLGDQGSRGSDPLPEPRVTLTVEGIPTEFLVNTGAEHSVLTKPMGKMGSKRTVVAGATGSKVYPWTTKRLLKIGQKQVTHSFLVIPECPAPLLGRDLLTKLKAQIQFSTEGPQVTWEDRPAMCLVLNLEEEYRLHEKPVPPSIDPSWLQLFPMVWAEKAGMGLANQVPPVVVELKSDASPVAVRQYPMSKEAREGIRPHIQRFLDLGILVPCQSPWNTPLLPVKKPGTNDYRPVQDLREVNKRVQDIHPTVPNPYNLLSSLPPSHTWYSVLDLKDAFFCLKLHPNSQPLFAFEWRDPEKGNTGQLTWTRLPQGFKNSPTLFNEALHRDLASFRALNPQVVMLQYVDDLLVAAPTYRDCKEGTRRLLQELSKLGYRVSAKKAQLCREEVTYLGYLLKGGKRWLTPARKATVMKIPTPTTPRQVREFLGKAGFCRLFIPGFASLAAPLYPLTRPKVPFTWTEAHQEAFGRIKEALLSAPALALPDLTKPFALYVDEKEGVARGVLTQTLGPWRRPVAYLSKKLDPVASGWPTCLKAIAAVALLLKDADKLTLGQNVLVIAPHNLESIVRQPPDRWMTNARMTHYQSLLLNERVSFAPPAILNPATLLPVESDDTPIHICSEILAEETGTRPDLRDQPLPGVPAWYTDGSSFIMDGRRQAGAAIVDNKRTVWASNLPEGTSAQKAELIALTQALRLAEGKSINIYTDSRYAFATAHVHGAIYKQRGWLTSAGKDIKNKEEILALLEAIHLPKRVAIIHCPGHQRGTDPVATGNRKADEAAKQAAQSTRILTETTKN

SEQ ID NO: 8050 - protein, 702 aa, synthetic construct
LLGRDLLTKLKAQIQFSTEGPQVTWEDRPAMCLVLNLEEEYRLHEKPVPPSIDPSWLQLFPMVWAEKAGMGLANQVPPVVVELKSDASPVAVRQYPMSKEAREGIRPHIQRFLDLGILVPCQSPWNTPLLPVKKPGTNDYRPVQDLREVNKRVQDIHPTVPNPYNLLSSLPPSHTWYSVLDLKDAFFCLKLHPNSQPLFAFEWRDPEKGNTGQLTWTRLPQGFKNSPTLFDEALHRDLASFRALNPQVVMLQYVDDLLVAAPTYRDCKEGTRRLLQELSKLGYRVSAKKAQLCREEVTYLGYLLKGGKRWLTPARKATVMKIPTPTTPRQVREFLGTAGFCRLWIPGFASLAAPLYPLTREKVPFTWTEAHQEAFGRIKEALLSAPALALPDLTKPFALYVDEKEGVARGVLTQTLGPWRRPVAYLSKKLDPVASGWPTCLKAIAAVALLLKDADKLTLGQNVLVIAPHNLESIVRQPPDRWMTNARMTHYQSLLLNERVSFAPPAILNPATLLPVESDDTPIHICSEILAEETGTRPDLRDQPLPGVPAWYTDGSSFIMDGRRQAGAAIVDNKRTVWASNLPEGTSAQKAELIALTQALRLAEGKSINIYTDSRYAFATAHVHGAIYKQRGLLTSAGKDIKNKEEILALLEAIHLPKRVAIIHCPGHQRGTDPVATGNRKADEAAKQAAQSTRILTETTKN

SEQ ID NO: 8051 - protein, 702 aa, synthetic construct
LLGRDLLTKLKAQIQFSTEGPQVTWEDRPAMCLVLNLEEEYRLHEKPVPPSIDPSWLQLFPMVWAEKAGMGLANQVPPVVVELKSDASPVAVRQYPMSKEAREGIRPHIQRFLDLGILVPCQSPWNTPLLPVKKPGTNDYRPVQDLREVNKRVQDIHPTVPNPYNLLSSLPPSHTWYSVLDLKDAFFCLKLHPNSQPLFAFEWRDPEKGNTGQLTWTRLPQGFKNSPTLFNEALHRDLASFRALNPQVVMLQYVDDLLVAAPTYRDCKEGTRRLLQELSKLGYRVSAKKAQLCREEVTYLGYLLKGGKRWLTPARKATVMKIPTPTTPRQVREFLGTAGFCRLWIPGFASLAAPLYPLTRPKVPFTWTEAHQEAFGRIKEALLSAPALALPDLTKPFALYVDEKEGVARGVLTQTLGPWRRPVAYLSKKLDPVASGWPTCLKAIAAVALLLKDADKLTLGQNVLVIAPHNLESIVRQPPDRWMTNARMTHYQSLLLNERVSFAPPAILNPATLLPVESDDTPIHICSEILAEETGTRPDLRDQPLPGVPAWYTDGSSFIMDGRRQAGAAIVDNKRTVWASNLPEGTSAQKAELIALTQALRLAEGKSINIYTDSRYAFATAHVHGAIYKQRGWLTSAGKDIKNKEEILALLEAIHLPKRVAIIHCPGHQRGTDPVATGNRKADEAAKQAAQSTRILTETTKN

SEQ ID NO: 8052 - protein, 702 aa, synthetic construct
LLGRDLLTKLKAQIQFSTEGPQVTWEDRPAMCLVLNLEEEYRLHEKPVPPSIDPSWLQLFPMVWAEKAGMGLANQVPPVVVELKSDASPVAVRQYPMSKEAREGIRPHIQRFLDLGILVPCQSPWNTPLLPVKKPGTNDYRPVQDLREVNKRVQDIHPTVPNPYNLLSSLPPSHTWYSVLDLKDAFFCLKLHPNSQPLFAFEWRDPEKGNTGQLTWTRLPQGFKNSPTLFNEALHRDLASFRALNPQVVMLQYVDDLLVAAPTYRDCKEGTRRLLQELSKLGYRVSAKKAQLCREEVTYLGYLLKGGKRWLTPARKATVMKIPTPTTPRQVREFLGKAGFCRLFIPGFASLAAPLYPLTRPKVPFTWTEAHQEAFGRIKEALLSAPALALPDLTKPFALYVDEKEGVARGVLTQTLGPWRRPVAYLSKKLDPVASGWPTCLKAIAAVALLLKDADKLTLGQNVLVIAPHNLESIVRQPPDRWMTNARMTHYQSLLLNERVSFAPPAILNPATLLPVESDDTPIHICSEILAEETGTRPDLRDQPLPGVPAWYTDGSSFIMDGRRQAGAAIVDNKRTVWASNLPEGTSAQKAELIALTQALRLAEGKSINIYTDSRYAFATAHVHGAIYKQRGWLTSAGKDIKNKEEILALLEAIHLPKRVAIIHCPGHQRGTDPVATGNRKADEAAKQAAQSTRILTETTKN

SEQ ID NO: 8053 - protein, 671 aa, synthetic construct
TLNLEDEYRLYETSAEPEVSPGSTWLSDFPQAWAETGGMGLAVRQAPLIIPLKATSTPVSIKQYPMSQEAKLGIKPHIQRLLDQGILVPCQSPWNTPLLPVKKPGTNDYRPVQDLREVNKRVEDIHPTVPNPYNLLSGLPPSHRWYTVLDLKDAFFCLRLHPTSQPLFAFEWRDPGMGISGQLTWTRLPQGFKNSPTLFDEALHRDLADFRIQHPDLILLQYVDDILLAATSELDCQQGTRALLLTLGNLGYRASAKKAQLCQKQVKYLGYLLKEGQRWLTEARKETVMGQPTPKTPRQLREFLGTAGFCRLWIPGFAEMAAPLYPLTKTGTLFNWGPDQQKAYQEIKQALLTAPALGLPDLTKPFELFVDEKQGYAKGVLTQKLGPWRRPVAYLSKKLDPVAAGWPPCLRMVAAIAVLRKDAGKLTMGQPLVILAPHAVEALVKQPPDRWLSNARMTHYQAMLLDTDRVQFGPVVALNPATLLPLPEEGAPHDCLEILAETHGTRPDLTDQPIPDADHTWYTDGSSFLQEGQRKAGAAVTTETEVIWARALPAGTSAQRAELIALTQALKMAEGKRLNVYTDSRYAFATAHIHGEIYRRRGLLTSEGREIKNKSEILALLKALFLPKRLSIIHCLGHQKGDSAEARGNRLADQAAREAAIKTPPDTSTLL

SEQ ID NO: 8054 - protein, 671 aa, synthetic construct
TLNLEDEYRLYETSAEPEVSPGSTWLSDFPQAWAETGGMGLAVRQAPLIIPLKATSTPVSIKQYPMSQEAKLGIKPHIQRLLDQGILVPCQSPWNTPLLPVKKPGTNDYRPVQDLREVNKRVEDIHPTVPNPYNLLSGLPPSHRWYTVLDLKDAFFCLRLHPTSQPLFAFEWRDPGMGISGQLTWTRLPQGFKNSPTLFNEALHRDLADFRIQHPDLILLQYVDDILLAATSELDCQQGTRALLLTLGNLGYRASAKKAQLCQKQVKYLGYLLKEGQRWLTEARKETVMGQPTPKTPRQLREFLGTAGFCRLWIPGFAEMAAPLYPLTKPGTLFNWGPDQQKAYQEIKQALLTAPALGLPDLTKPFELFVDEKQGYAKGVLTQKLGPWRRPVAYLSKKLDPVAAGWPPCLRMVAAIAVLRKDAGKLTMGQPLVILAPHAVEALVKQPPDRWLSNARMTHYQAMLLDTDRVQFGPVVALNPATLLPLPEEGAPHDCLEILAETHGTRPDLTDQPIPDADHTWYTDGSSFLQEGQRKAGAAVTTETEVIWARALPAGTSAQRAELIALTQALKMAEGKRLNVYTDSRYAFATAHIHGEIYRRRGWLTSEGREIKNKSEILALLKALFLPKRLSIIHCLGHQKGDSAEARGNRLADQAAREAAIKTPPDTSTLL

SEQ ID NO: 8055 - protein, 671 aa, synthetic construct
TLNLEDEYRLYETSAEPEVSPGSTWLSDFPQAWAETGGMGLAVRQAPLIIPLKATSTPVSIKQYPMSQEAKLGIKPHIQRLLDQGILVPCQSPWNTPLLPVKKPGTNDYRPVQDLREVNKRVEDIHPTVPNPYNLLSGLPPSHRWYTVLDLKDAFFCLRLHPTSQPLFAFEWRDPGMGISGQLTWTRLPQGFKNSPTLFNEALHRDLADFRIQHPDLILLQYVDDILLAATSELDCQQGTRALLLTLGNLGYRASAKKAQLCQKQVKYLGYLLKEGQRWLTEARKETVMGQPTPKTPRQLREFLGKAGFCRLFIPGFAEMAAPLYPLTKPGTLFNWGPDQQKAYQEIKQALLTAPALGLPDLTKPFELFVDEKQGYAKGVLTQKLGPWRRPVAYLSKKLDPVAAGWPPCLRMVAAIAVLRKDAGKLTMGQPLVILAPHAVEALVKQPPDRWLSNARMTHYQAMLLDTDRVQFGPVVALNPATLLPLPEEGAPHDCLEILAETHGTRPDLTDQPIPDADHTWYTDGSSFLQEGQRKAGAAVTTETEVIWARALPAGTSAQRAELIALTQALKMAEGKRLNVYTDSRYAFATAHIHGEIYRRRGWLTSEGREIKNKSEILALLKALFLPKRLSIIHCLGHQKGDSAEARGNRLADQAAREAAIKTPPDTSTLL

SEQ ID NO: 8056 - protein, 671 aa, synthetic construct
TLGIEDEYRLHETSTEPDVSLGSTWLSDFPQAWAETGGMGLAVRQAPLIIPLKATSTPVSIQQYPMSHEARLGIKPHIQRLLDQGILVPCQSPWNTPLLPVKKPGTNDYRPVQDLREVNKRVEDIHPTVPNPYNLLSGLPPSHQWYTVLDLKDAFFCLRLHPTSQPLFAFEWRDPGMGISGQLTWTRLPQGFKNSPTLFDEALHRDLADFRIQHPDLILLQYVDDILLAATSELDCQQGTRALLQTLGDLGYRASAKKAQICQKQVKYLGYLLREGQRWLTEARKETVMGQPVPKTPRQLREFLGTAGFCRLWIPGFAEMAAPLYPLTKTGTLFSWGPDQQKAYQEIKQALLTAPALGLPDLTKPFELFVDEKQGYAKGVLTQKLGPWRRPVAYLSKKLDPVAAGWPPCLRMVAAIAVLTKDAGKLTMGQPLVILAPHAVEALVKQPPDRWLSNARMTHYQAMLLDTDRVQFGPVVALNPATLLPLPEEGAPHDCLEILAETHGTRPDLTDQPIPDADHTWYTDGSSFLQEGQRKAGAAVTTETEVIWAGALPAGTSAQRAELIALTQALKMAEGKRLNVYTDSRYAFATAHIHGEIYRRRGLLTSEGREIKNKSEILALLKALFLPKRLSIIHCLGHQKGDSAEARGNRLADQAAREAAIKTPPDTSTLL

SEQ ID NO: 8057 - protein, 671 aa, synthetic construct; identical to SEQ ID NO: 8056

SEQ ID NO: 8058 - protein, 671 aa, synthetic construct
TLGIEDEYRLHETSTEPDVSLGSTWLSDFPQAWAETGGMGLAVRQAPLIIPLKATSTPVSIQQYPMSHEARLGIKPHIQRLLDQGILVPCQSPWNTPLLPVKKPGTNDYRPVQDLREVNKRVEDIHPTVPNPYNLLSGLPPSHQWYTVLDLKDAFFCLRLHPTSQPLFAFEWRDPGMGISGQLTWTRLPQGFKNSPTLFNEALHRDLADFRIQHPDLILLQYVDDILLAATSELDCQQGTRALLQTLGDLGYRASAKKAQICQKQVKYLGYLLREGQRWLTEARKETVMGQPVPKTPRQLREFLGTAGFCRLWIPGFAEMAAPLYPLTKPGTLFSWGPDQQKAYQEIKQALLTAPALGLPDLTKPFELFVDEKQGYAKGVLTQKLGPWRRPVAYLSKKLDPVAAGWPPCLRMVAAIAVLTKDAGKLTMGQPLVILAPHAVEALVKQPPDRWLSNARMTHYQAMLLDTDRVQFGPVVALNPATLLPLPEEGAPHDCLEILAETHGTRPDLTDQPIPDADHTWYTDGSSFLQEGQRKAGAAVTTETEVIWAGALPAGTSAQRAELIALTQALKMAEGKRLNVYTDSRYAFATAHIHGEIYRRRGWLTSEGREIKNKSEILALLKALFLPKRLSIIHCLGHQKGDSAEARGNRLADQAAREAAIKTPPDTSTLL

SEQ ID NO: 8059 - protein, 671 aa, synthetic construct; identical to SEQ ID NO: 8058

SEQ ID NO: 8060 - protein, 671 aa, synthetic construct
LGIEDEYRLHETSTEPDVSLGSTWLSDFPQAWAETGGMGLAVRQAPLIIPLKATSTPVSIQQYPMSHEARLGIKPHIQRLLDQGILVPCQSPWNTPLLPVKKPGTNDYRPVQDLREVNKRVEDIHPTVPNPYNLLSGLPPSHQWYTVLDLKDAFFCLRLHPTSQPLFAFEWRDPGMGISGQLTWTRLPQGFKNSPTLFNEALHRDLADFRIQHPDLILLQYVDDILLAATSELDCQQGTRALLQTLGDLGYRASAKKAQICQKQVKYLGYLLREGQRWLTEARKETVMGQPVPKTPRQLREFLGKAGFCRLFIPGFAEMAAPLYPLTKPGTLFSWGPDQQKAYQEIKQALLTAPALGLPDLTKPFELFVDEKQGYAKGVLTQKLGPWRRPVAYLSKKLDPVAAGWPPCLRMVAAIAVLTKDAGKLTMGQPLVILAPHAVEALVKQPPDRWLSNARMTHYQAMLLDTDRVQFGPVVALNPATLLPLPEEGAPHDCLEILAETHGTRPDLTDQPIPDADHTWYTDGSSFLQEGQRKAGAAVTTETEVIWAGALPAGTSAQRAELIALTQALKMAEGKRLNVYTDSRYAFATAHIHGEIYRRRGWLTSEGREIKNKSEILALLKALFLPKRLSIIHCLGHQKGDSAEARGNRLADQAAREAAIKTPPDTSTLLI

SEQ ID NO: 8061 - protein, 671 aa, synthetic construct; identical to SEQ ID NO: 8060

SEQ ID NO: 8062 - protein, 671 aa, synthetic construct
TLNIEDEYRLHETSKEPDVSLGSTWLSDFPQAWAETGGMGLAVRQAPLIIPLKATSTPVSIKQYPMSQEARLGIKPHIQRLLDQGILVPCQSPWNTPLLPVKKPGTNDYRPVQDLREVNKRVEDIHPTVPNPYNLLSGLPPSHQWYTVLDLKDAFFCLRLHPTSQPLFAFEWRDPEMGISGQLTWTRLPQGFKNSPTLFDEALHRDLAGFRIQHPDLILLQYVDDLLLAATSELDCQQGTRALLQTLGDLGYRASAKKAQICQKQVKYLGYLLKEGQRWLTEARKETVMGQPIPKTPRQLREFLGTAGFCRLWIPGFAEMAAPLYPLTKTGTLFNWGPDQQKAFQEIKQALLTAPALGLPDLTKPFELFVDEKQGYAKGVLTQKLGPWRRPVAYLSKKLDPVAAGWPPCLRMVAAIAVLTKDAGKLTMGQPLVILAPHAVEALVKQPPDRWLSNARMTHYQALLLDTDRVQFGPVVALNPATLLPLPEEGLQHDCLDILAEAHGTRSDLMDQPLPDADHTWYTDGSSFLQEGQRKAGAAVTTETEVIWARALPAGTSAQRAELIALTQALKMAEGKKLNVYTDSRYAFATAHIHGEIYRRRGLLTSEGKEIKNKDEILALLKALFLPKRLSIIHCPGHQKGNSAEARGNRMADQAAREVATRETPETSTLL

SEQ ID NO: 8063 - protein, 671 aa, synthetic construct
TLNIEDEYRLHETSKEPDVSLGSTWLSDFPQAWAETGGMGLAVRQAPLIIPLKATSTPVSIKQYPMSQEARLGIKPHIQRLLDQGILVPCQSPWNTPLLPVKKPGTNDYRPVQDLREVNKRVEDIHPTVPNPYNLLSGLPPSHQWYTVLDLKDAFFCLRLHPTSQPLFAFEWRDPEMGISGQLTWTRLPQGFKNSPTLFNEALHRDLAGFRIQHPDLILLQYVDDLLLAATSELDCQQGTRALLQTLGDLGYRASAKKAQICQKQVKYLGYLLKEGQRWLTEARKETVMGQPIPKTPRQLREFLGTAGFCRLWIPGFAEMAAPLYPLTKPGTLFNWGPDQQKAFQEIKQALLTAPALGLPDLTKPFELFVDEKQGYAKGVLTQKLGPWRRPVAYLSKKLDPVAAGWPPCLRMVAAIAVLTKDAGKLTMGQPLVILAPHAVEALVKQPPDRWLSNARMTHYQALLLDTDRVQFGPVVALNPATLLPLPEEGLQHDCLDILAEAHGTRSDLMDQPLPDADHTWYTDGSSFLQEGQRKAGAAVTTETEVIWARALPAGTSAQRAELIALTQALKMAEGKKLNVYTDSRYAFATAHIHGEIYRRRGWLTSEGKEIKNKDEILALLKALFLPKRLSIIHCPGHQKGNSAEARGNRMADQAAREVATRETPETSTLL

SEQ ID NO: 8064 - protein, 671 aa, synthetic construct
TLNIEDEYRLHETSKEPDVSLGSTWLSDFPQAWAETGGMGLAVRQAPLIIPLKATSTPVSIKQYPMSQEARLGIKPHIQRLLDQGILVPCQSPWNTPLLPVKKPGTNDYRPVQDLREVNKRVEDIHPTVPNPYNLLSGLPPSHQWYTVLDLKDAFFCLRLHPTSQPLFAFEWRDPEMGISGQLTWTRLPQGFKNSPTLFNEALHRDLAGFRIQHPDLILLQYVDDLLLAATSELDCQQGTRALLQTLGDLGYRASAKKAQICQKQVKYLGYLLKEGQRWLTEARKETVMGQPIPKTPRQLREFLGKAGFCRLFIPGFAEMAAPLYPLTKPGTLFNWGPDQQKAFQEIKQALLTAPALGLPDLTKPFELFVDEKQGYAKGVLTQKLGPWRRPVAYLSKKLDPVAAGWPPCLRMVAAIAVLTKDAGKLTMGQPLVILAPHAVEALVKQPPDRWLSNARMTHYQALLLDTDRVQFGPVVALNPATLLPLPEEGLQHDCLDILAEAHGTRSDLMDQPLPDADHTWYTDGSSFLQEGQRKAGAAVTTETEVIWARALPAGTSAQRAELIALTQALKMAEGKKLNVYTDSRYAFATAHIHGEIYRRRGWLTSEGKEIKNKDEILALLKALFLPKRLSIIHCPGHQKGNSAEARGNRMADQAAREVATRETPETSTLL

SEQ ID NO: 8065 - protein, 671 aa, synthetic construct
TLNIEDEYRLHETSKGPDVPLGSTWLSDFPQAWAETGGMGLAFRQAPLIISLKATSTPVSIKQYPMSQEARLGIKPHIQRLLDQGILVPCQSPWNTPLLPVKKPGTNDYRPVQDLREVNKRVEDIHPTVPNPYNLLSGLPPSHQWYTVLDLKDAFFCLRLHPTSQSLFAFEWKDPEMGISGQLTWTRLPQGFKNSPTLFDEALHRDLADFRIQHPDLILLQYVDDLLLAATSELDCQQGTRALLQTLGDLGYRASAKKAQICQKQVKYLGYLLKEGQRWLTEARKETVMGQPTPKTPRQLREFLGTAGLCRLWIPGFAEMAAPLYPLTKTGTLFKWGPDQQKAYQEIKQALLTAPALGLPDLTKPFELFVDEKQGYAKGVLTQKLGPWRRPVAYLSKKLDPVAAGWPPCLRMVAAIAVLTKDVGKLTMGQPLVILAPHAVEALVKQPPDRWLSNARMTHYQALLLDTDRVQFGPIVALNPATLLPLPEEGLQHDCLDILAEAHGTRPDLTDQPLPDADHTWYTDGSSFLQEGQRRAGAAVTTETEVIWAKALPAGTSAQRAELIALTQALKMAAGKKLNVYTDSRYAFATAHIHGEIYRRRGLLTSEGKEIKNKDEILALLKALFLPKRLSIIHCPGHQKGNHAEARGNRMADQAAREVATRETPETSTLL

SEQ ID NO: 8066 - protein, 671 aa, synthetic construct
TLNIEDEYRLHETSKGPDVPLGSTWLSDFPQAWAETGGMGLAFRQAPLIISLKATSTPVSIKQYPMSQEARLGIKPHIQRLLDQGILVPCQSPWNTPLLPVKKPGTNDYRPVQDLREVNKRVEDIHPTVPNPYNLLSGLPPSHQWYTVLDLKDAFFCLRLHPTSQSLFAFEWKDPEMGISGQLTWTRLPQGFKNSPTLFNEALHRDLADFRIQHPDLILLQYVDDLLLAATSELDCQQGTRALLQTLGDLGYRASAKKAQICQKQVKYLGYLLKEGQRWLTEARKETVMGQPTPKTPRQLREFLGTAGLCRLWIPGFAEMAAPLYPLTKPGTLFKWGPDQQKAYQEIKQALLTAPALGLPDLTKPFELFVDEKQGYAKGVLTQKLGPWRRPVAYLSKKLDPVAAGWPPCLRMVAAIAVLTKDVGKLTMGQPLVILAPHAVEALVKQPPDRWLSNARMTHYQALLLDTDRVQFGPIVALNPATLLPLPEEGLQHDCLDILAEAHGTRPDLTDQPLPDADHTWYTDGSSFLQEGQRRAGAAVTTETEVIWAKALPAGTSAQRAELIALTQALKMAAGKKLNVYTDSRYAFATAHIHGEIYRRRGWLTSEGKEIKNKDEILALLKALFLPKRLSIIHCPGHQKGNHAEARGNRMADQAAREVATRETPETSTLL

SEQ ID NO: 8067 - protein, 671 aa, synthetic construct
TLNIEDEYRLHETSKGPDVPLGSTWLSDFPQAWAETGGMGLAFRQAPLIISLKATSTPVSIKQYPMSQEARLGIKPHIQRLLDQGILVPCQSPWNTPLLPVKKPGTNDYRPVQDLREVNKRVEDIHPTVPNPYNLLSGLPPSHQWYTVLDLKDAFFCLRLHPTSQSLFAFEWKDPEMGISGQLTWTRLPQGFKNSPTLFNEALHRDLADFRIQHPDLILLQYVDDLLLAATSELDCQQGTRALLQTLGDLGYRASAKKAQICQKQVKYLGYLLKEGQRWLTEARKETVMGQPTPKTPRQLREFLGKAGLCRLFIPGFAEMAAPLYPLTKPGTLFKWGPDQQKAYQEIKQALLTAPALGLPDLTKPFELFVDEKQGYAKGVLTQKLGPWRRPVAYLSKKLDPVAAGWPPCLRMVAAIAVLTKDVGKLTMGQPLVILAPHAVEALVKQPPDRWLSNARMTHYQALLLDTDRVQFGPIVALNPATLLPLPEEGLQHDCLDILAEAHGTRPDLTDQPLPDADHTWYTDGSSFLQEGQRRAGAAVTTETEVIWAKALPAGTSAQRAELIALTQALKMAAGKKLNVYTDSRYAFATAHIHGEIYRRRGWLTSEGKEIKNKDEILALLKALFLPKRLSIIHCPGHQKGNHAEARGNRMADQAAREVATRETPETSTLL

SEQ ID NO: 8068 - protein, 671 aa, synthetic construct
TLNIEDEYRLHETSKGPDVPLGSTWLSDFPQAWAETGGMGLAVRQAPLIIPLKATSTPVSIKQYPMSQEARLGIKPHIQRLLDQGILVPCQSPWNTPLLPVKKPGTNDYRPVQDLREVNKRVEDIHPTVPNPYNLLSGLPPSHQWYTVLDLKDAFFCLRLHPTSQSLFAFEWRDPEMGISGQLTWTRLPQGFKNSPTLFNEALHRDLADFRIQHPDLILLQYVDDLLLAATSELDCQQGTRALLQTLGDLGYRASAKKAQICQKQVKYLGYLLKEGQRWLTEARKETVMGQPTPKTPRQLREFLGTAGFCRLWIPGFAEMAAPLYPLTKPGTLFEWGPDQQKAYQEIKQALLTAPALGLPDLTKPFELFVDEKQGYAKGVLTQKLGPWRRPVAYLSKKLDPVAAGWPPCLRMVAAIAVLTKDAGKLTMGQPLVILAPHAVEALVKQPPDRWLSNARMTHYQALLLDTDRVQFGPIVALNPATLLPLPEEGLQHDCLDILAEAHGTRPDLTDQPLPDADHTWYTDGSSFLQEGQRKAGAAVTTETEVVWAKALPAGTSAQRAELIALTQALKMAEGKKLNVYTDSRYAFATAHIHGEIYRRRGWLTSEGKEIKNKDEILALLKALFLPKRLSIIHCPGHQKGNRAEARGNRMADQAAREVATRETPETSTLL

SEQ ID NO: 8069 - protein, 671 aa, synthetic construct
TLNIEDEYRLHETSKGPDVPLGSTWLSDFPQAWAETGGMGLAVRQAPLIIPLKATSTPVSIKQYPMSQEARLGIKPHIQRLLDQGILVPCQSPWNTPLLPVKKPGTNDYRPVQDLREVNKRVEDIHPTVPNPYNLLSGLPPSHQWYTVLDLKDAFFCLRLHPTSQSLFAFEWRDPEMGISGQLTWTRLPQGFKNSPTLFNEALHRDLADFRIQHPDLILLQYVDDLLLAATSELDCQQGTRALLQTLGDLGYRASAKKAQICQKQVKYLGYLLKEGQRWLTEARKETVMGQPTPKTPRQLREFLGKAGFCRLFIPGFAEMAAPLYPLTKPGTLFEWGPDQQKAYQEIKQALLTAPALGLPDLTKPFELFVDEKQGYAKGVLTQKLGPWRRPVAYLSKKLDPVAAGWPPCLRMVAAIAVLTKDAGKLTMGQPLVILAPHAVEALVKQPPDRWLSNARMTHYQALLLDTDRVQFGPIVALNPATLLPLPEEGLQHDCLDILAEAHGTRPDLTDQPLPDADHTWYTDGSSFLQEGQRKAGAAVTTETEVVWAKALPAGTSAQRAELIALTQALKMAEGKKLNVYTDSRYAFATAHIHGEIYRRRGWLTSEGKEIKNKDEILALLKALFLPKRLSIIHCPGHQKGNRAEARGNRMADQAAREVATRETPETSTLL

SEQ ID NO: 8070 - protein, 671 aa, synthetic construct; identical to SEQ ID NO: 5003

SEQ ID NO: 8071 - protein, 671 aa, synthetic construct; identical to SEQ ID NO: 5003

SEQ ID NO: 8072 - protein, 671 aa, synthetic construct
TLNIEDEHRLHETSKEPDVSLGSTWLSDFPQAWAETGGMGLAVRQAPLIIPLKATSTPVSIKQYPMSQEARLGIKPHIQRLLDQGILVPCQSPWNTPLLPVKKPGTNDYRPVQDLREVNKRVEDIHPTVPNPYNLLSGLPPSHQWYTVLDLKDAFFCLRLHPTSQPLFAFEWRDPEMGISGQLTWTRLPQGFKNSPTLFNEALHRDLADFRIQHPDLILLQYVDDLLLAATSELDCQQGTRALLQTLGNLGYRASAKKAQICQKQVKYLGYLLKEGQRWLTEARKETVMGQPTPKTPRQLREFLGTAGFCRLWIPGFAEMAAPLYPLTKPGTLFNWGPDQQKAYQEIKQALLTAPALGLPDLTKPFELFVDEKQGYAKGVLTQKLGPWRRPVAYLSKKLDPVAAGWPPCLRMVAAIAVLTKDAGKLTMGQPLVILAPHAVEALVKQPPDRWLSNARMTHYQALLLDTDRVQFGPVVALNPATLLPLPEEGLQHNCLDILAEAHGTRPDLTDQPLPDADHTWYTDGSSLLQEGQRKAGAAVTTETEVIWAKALPAGTSAQRAELIALTQALKMAEGKKLNVYTDSRYAFATAHIHGEIYRRRGWLTSEGKEIKNKDEILALLKALFLPKRLSIIHCPGHQKGHSAEARGNRMADQAARKAAITETPDTSTLL

SEQ ID NO: 8073 - protein, 671 aa, synthetic construct; identical to SEQ ID NO: 8072

SEQ ID NO: 8074 - protein, 671 aa, synthetic construct
TLNIEDEHRLHETSKEPDVSLGSTWLSDFPQAWAETGGMGLAVRQAPLIIPLKATSTPVSIKQYPMSQEARLGIKPHIQRLLDQGILVPCQSPWNTPLLPVKKPGTNDYRPVQDLREVNKRVEDIHPTVPNPYNLLSGLPPSHQWYTVLDLKDAFFCLRLHPTSQPLFAFEWRDPEMGISGQLTWTRLPQGFKNSPTLFNEALHRDLADFRIQHPDLILLQYVDDLLLAATSELDCQQGTRALLQTLGNLGYRASAKKAQICQKQVKYLGYLLKEGQRWLTEARKETVMGQPTPKTPRQLREFLGKAGFCRLFIPGFAEMAAPLYPLTKPGTLFNWGPDQQKAYQEIKQALLTAPALGLPDLTKPFELFVDEKQGYAKGVLTQKLGPWRRPVAYLSKKLDPVAAGWPPCLRMVAAIAVLTKDAGKLTMGQPLVILAPHAVEALVKQPPDRWLSNARMTHYQALLLDTDRVQFGPVVALNPATLLPLPEEGLQHNCLDILAEAHGTRPDLTDQPLPDADHTWYTDGSSLLQEGQRKAGAAVTTETEVIWAKALPAGTSAQRAELIALTQALKMAEGKKLNVYTDSRYAFATAHIHGEIYRRRGWLTSEGKEIKNKDEILALLKALFLPKRLSIIHCPGHQKGHSAEARGNRMADQAARKAAITETPDTSTLL

SEQ ID NO: 8075 - protein, 671 aa, synthetic construct; identical to SEQ ID NO: 8074

SEQ ID NO: 8076 - protein, 691 aa, synthetic construct
TLNIEDEYRLHETSKEPDVSLGSTWLSDFPQAWAETGGMGLAVRQAPLIIPLKATSTPVSIKQYPMSQEARLGIKPHIQRLLDQGILVPCQSPWNTPLLPVKKPGTNDYRPVQDLREVNKRVEDIHPTVPNPYNLLSGLPPSHQWYTVLDLKDAFFCLRLHPTSQPLFAFEWRDPEMGISGQLTWTRLPQGFKNSPTLFNEALHRDLADFRIQHPDLILLQYVDDLLLAATSELDCQQGTRALLQTLGNLGYRASAKKAQICQKQVKYLGYLLKEGQRWLTEARKETVMGQPTPKTPRQLREFLGKAGFCRLFIPGFAEMAAPLYPLTKPGTLFNWGPDQQKAYQEIKQALLTAPALGLPDLTKPFELFVDEKQGYAKGVLTQKLGPWRRPVAYLSKKLDPVAAGWPPCLRMVAAIAVLTKDAGKLTMGQPLVILAPHAVEALVKQPPDRWLSNARMTHYQALLLDTDRVQFGPVVALNPATLLPLPEEGLQHNCLDILAEAHGTRPDLTDQPLPDADHTWYTDGSSLLQEGQRKAGAAVTTETEVIWAKALPAGTSAQRAELIALTQALKMAEGKKLNVYTDSRYAFATAHIHGEIYRRRGWLTSEGKEIKNKDEILALLKALFLPKRLSIIHCPGHQKGHSAEARGNRMADQAARKAAITETPDTSTLLIENSSPSGGSKRTADGSEFE

SEQ ID NO: 8077 - protein, 691 aa, synthetic construct; identical to SEQ ID NO: 8076

SEQ ID NO: 8078 - protein, 671 aa, synthetic construct
TLNIEDEYRLHEISTEPDVSPGSTWLSDFPQAWAETGGMGLAVRQAPLIIPLKATSTPVSIKQYPMSQEAKLGIKPHIQRLLDQGILVPCQSPWNTPLLPVKKPGTNDYRPVQGLREVNKRVEDIHPTVPNPYNLLSGLPTSHRWYTVLDLKDAFFCLRLHPTSQPLFASEWRDPGMGISGQLTWTRLPQGFKNSPTLFDEALHRGLADFRIQHPDLILLQYVDDLLLAATSELDCQQGTRALLKTLGNLGYRASAKKAQICQKQVKYLGYLLREGQRWLTEARKETVMGQPTPKTPRQLREFLGTAGFCRLWIPRFAEMAAPLYPLTKTGTLFNWGPDQQKAYHEIKQALLTAPALGLPDLTKPFELFVDEKQGYAKGVLTQKLGPWRRPVAYLSKKLDPVAAGWPPCLRMVAAIAVLTKDAGKLTMGQPLVILAPHAVEALVKQPPDRWLSNARMTHYQAMLLDTDRVQFGPVVALNPATLLPLPEEGAPHDCLEILAETHGTEPDLTDQPIPDADHTWYTDGSSFLQEGQRKAGAAVTTETEVIWARALPAGTSAQRAELIALTQALKMAEGKRLNVYTDSRYAFATAHIHGEIYKRRGLLTSEGREIKNKSEILALLKALFLPKRLSIIHCLGHQKGDSAEARGNRLADQAAREAAIKTPPDTSTLL

SEQ ID NO: 8079 - protein, 671 aa, synthetic construct
TLNIEDEYRLHEISTEPDVSPGSTWLSDFPQAWAETGGMGLAVRQAPLIIPLKATSTPVSIKQYPMSQEAKLGIKPHIQRLLDQGILVPCQSPWNTPLLPVKKPGTNDYRPVQGLREVNKRVEDIHPTVPNPYNLLSGLPTSHRWYTVLDLKDAFFCLRLHPTSQPLFASEWRDPGMGISGQLTWTRLPQGFKNSPTLFNEALHRGLADFRIQHPDLILLQYVDDLLLAATSELDCQQGTRALLKTLGNLGYRASAKKAQICQKQVKYLGYLLREGQRWLTEARKETVMGQPTPKTPRQLREFLGTAGFCRLWIPRFAEMAAPLYPLTKPGTLFNWGPDQQKAYHEIKQALLTAPALGLPDLTKPFELFVDEKQGYAKGVLTQKLGPWRRPVAYLSKKLDPVAAGWPPCLRMVAAIAVLTKDAGKLTMGQPLVILAPHAVEALVKQPPDRWLSNARMTHYQAMLLDTDRVQFGPVVALNPATLLPLPEEGAPHDCLEILAETHGTEPDLTDQPIPDADHTWYTDGSSFLQEGQRKAGAAVTTETEVIWARALPAGTSAQRAELIALTQALKMAEGKRLNVYTDSRYAFATAHIHGEIYKRRGWLTSEGREIKNKSEILALLKALFLPKRLSIIHCLGHQKGDSAEARGNRLADQAAREAAIKTPPDTSTLL

SEQ ID NO: 8080 - protein, 691 aa, synthetic construct
WVQEISDSRPMLHIYLNGRRFLGLLNTGADKTCIAGRDWPANWPIHQTESSLQGLGMACGVARSSQPLRWQHEDKSGIIHPFVIPTLPFTLWGRDIMKDIKVRLMTDSPDDSQDLMIGAIESNLFADQISWKSDQPVWLNQWPLKQEKLQALQQLVTEQLQLGHLEESNSPWNTPVFVIKKKSGKWRLLQDLRAVNATMHDMGALQPGLPSPVAVPKGWEIIIIDLQDCFFNIKLHPEDCKRFAFSVPSPNFKRPYQRFQWKVLPQGMKNSPTLCQKFVDKAILTVRDKYQDSYIVHYMDDILLAHPSRSIVDEILTSMIQALNKHGLVVSTEKIQKYDNLKYLGTHIQGDSVSYQKLQIRTDKLRTLNDFQKLLGNINWIRPFLKLTTGELKPLFEILNGDSNPISTRKLTPEACKALQLMNERLSTARVKRLDLSQPWSLCILKTEYTPTACLWQDGVVEWIHLPHISPKVITPYDIFCTQLIIKGRHRSKELFSKDPDYIVVPYTKVQFDLLLQEKEDWPISLLGFLGEVHFHLPKDPLLTFTLQTAIIFPHMTSTTPLEKGIVIFTDGSANGRSVTYIQGREPIIKENTQNTAQQAEIVAVITAFEEVSQPFNLYTDSKYVTGLFPEIETATLSPRTKIYTELKHLQRLIHKRQEKFYIGHIRGHTGLPGPLAQGNAYADSLTRILT

SEQ ID NO: 8081 - protein, 691 aa, synthetic construct; identical to SEQ ID NO: 8080

SEQ ID NO: 8082 - protein, 691 aa, synthetic construct
WVQEISDSRPMLHIYLNGRRFLGLLNTGADKTCIAGRDWPANWPIHQTESSLQGLGMACGVARSSQPLRWQHEDKSGIIHPFVIPTLPFTLWGRDIMKDIKVRLMTDSPDDSQDLMIGAIESNLFADQISWKSDQPVWLNQWPLKQEKLQALQQLVTEQLQLGHLEESNSPWNTPVFVIKKKSGKWRLLQDLRAVNATMHDMGALQPGLPSPVAVPKGWEIIIIDLQDCFFNIKLHPEDCKRFAFSVPSPNFKRPYQRFQWKVLPQGMKNSPTLCQKFVDKAILTVRDKYQDSYIVHYMDDILLAHPSRSIVDEILTSMIQALNKHGLVVSTEKIQKYDNLKYLGTHIQGDSVSYQKLQIRTDKLRTLNDFQKLLGNINWIRPFLKLTTGELKPLFEILNPDSNPISTRKLTPEACKALQLMNERLSTARVKRLDLSQPWSLCILKTEYTPTACLWQDGVVEWIHLPHISPKVITPYDIFCTQLIIKGRHRSKELFSKDPDYIVVPYTKVQFDLLLQEKEDWPISLLGFLGEVHFHLPKDPLLTFTLQTAIIFPHMTSTTPLEKGIVIFTDGSANGRSVTYIQGREPIIKENTQNTAQQAEIVAVITAFEEVSQPFNLYTDSKYVTGLFPEIETATLSPRTKIYTELKHLQRLIHKRQEKFYIGHIRGHTGLPGPLAQGNAYADSLTRILT

SEQ ID NO: 8083 - protein, 691 aa, synthetic construct
VQEISDSRPMLHIYLNGRRFLGLLDTGADKTCIAGRDWPANWPIHQTESSLQGLGMACGVARSSQPLRWQHEDKSGIIHPFVIPTLPFTLWGRDIMKDIKVRLMTDSPDDSQDLMIGAIESNLFADQISWKSDQPVWLNQWPLKQEKLQALQQLVTEQLQLGHLEESNSPWNTPVFVIKKKSGKWRLLQDLRAVNATMHDMGALQPGLPSPVAVPKGWEIIIIDLQDCFFNIKLHPEDCKRFAFSVPSPNFKRPYQRFQWKVLPQGMKNSPTLCQKFVDKAILTVRDKYQDSYIVHYMDDILLAHPSRSIVDEILTSMIQALNKHGLVVSTEKIQKYDNLKYLGTHIQGDSVSYQKLQIRTDKLRTLNDFQKLLGNINWIRPFLKLTTGELKPLFEILNPDSNPISTRKLTPEACKALQLMNERLSTARVKRLDLSQPWSLCILKTEYTPTACLWQDGVVEWIHLPHISPKVITPYDIFCTQLIIKGRHRSKELFSKDPDYIVVPYTKVQFDLLLQEKEDWPISLLGFLGEVHFHLPKDPLLTFTLQTAIIFPHMTSTTPLEKGIVIFTDGSANGRSVTYIQGREPIIKENTQNTAQQAEIVAVITAFEEVSQPFNLYTDSKYVTGLFPEIETATLSPRTKIYTELKHLQRLIHKRQEKFYIGHIRGHTGLPGPLAQGNAYADSLTRILTA

SEQ ID NO: 8084 - protein, 691 aa, synthetic construct; identical to SEQ ID NO: 8083

SEQ ID NO: 8085 - protein, 691 aa, synthetic construct
WVQEISDSRPMLHIYLNGRRFLGLLNTGADKTCIAGRDWPANWPIHQTESSLQGLGMACGVARSSQPLRWQHEDKSGIIHPFVIPTLPFTLWGRDIMKDIKVRLMTDSPDDSQDLMIGAIESNLFADQISWKSDQPVWLNQWPLKQEKLQALQQLVTEQLQLGHLEESNSPWNTPVFVIKKKSGKWRLLQDLRAVNATMHDMGALQPGLPSPVAPPKGWEIIIIDLQDCFFNIKLHPEDCKRFAFSVPSPNFKRPYQRFQWKVLPQGMKNSPTLCQKFVDKAILTVRDKYQDSYIVHYMDDILLAHPSRSIVDEILTSMIQALNKHGLVVSTEKIQKYDNLKYLGTHIQGDSVSYQKLQIRTDKLRTLNDFQKLLGNINWIRPFLKLTTGELKPLFEILNPDSNPISTRKLTPEACKALQLMNERLSTARVKRLDLSQPWSLCILKTEYTPTACLWQDGVVEWIHLPHISPKVITPYDIFCTQLIIKGRHRSKELFSKDPDYIVVPYTKVQFDLLLQEKEDWPISLLGFLGEVHFHLPKDPLLTFTLQTAIIFPHMTSTTPLEKGIVIFTDGSANGRSVTYIQGREPIIKENTQNTAQQAEIVAVITAFEEVSQPFNLYTDSKYVTGLFPEIETATLSPRTKIYTELKHLQRLIHKRQEKFYIGHIRGHTGLPGPLAQGNAYADSLTRILT

SEQ ID NO: 8086 - protein, 691 aa, synthetic construct; identical to SEQ ID NO: 8085

SEQ ID NO: 8087 - protein, 691 aa, synthetic construct
VQEISDSRPMLHIYLNGRRFLGLLDTGADKTCIAGRDWPANWPIHQTESSLQGLGMACGVARSSQPLRWQHEDKSGIIHPFVIPTLPFTLWGRDIMKDIKVRLMTDSPDDSQDLMIGAIESNLFADQISWKSDQPVWLNQWPLKQEKLQALQQLVTEQLQLGHLEESNSPWNTPVFVIKKKSGKWRLLQDLRAVNATMHDMGALQPGLPSPPAVPKGWEIIIIDLQDCFFNIKLHPEDCKRFAFSVPSPNFKRPYQRFQWKVLPQGMKNSPTLCQKFVDKAILTVRDKYQDSYIVHYMDDILLAHPSRSIVDEILTSMIQALNKHGLVVSTEKIQKYDNLKYLGTHIQGDSVSYQKLQIRTDKLRTLNDFQKLLGNINWIRPFLKLTTGELKPLFEILNPDSNPISTRKLTPEACKALQLMNERLSTARVKRLDLSQPWSLCILKTEYTPTACLWQDGVVEWIHLPHISPKVITPYDIFCTQLIIKGRHRSKELFSKDPDYIVVPYTKVQFDLLLQEKEDWPISLLGFLGEVHFHLPKDPLLTFTLQTAIIFPHMTSTTPLEKGIVIFTDGSANGRSVTYIQGREPIIKENTQNTAQQAEIVAVITAFEEVSQPFNLYTDSKYVTGLFPEIETATLSPRTKIYTELKHLQRLIHKRQEKFYIGHIRGHTGLPGPLAQGNAYADSLTRILTA

SEQ ID NO: 8088 - protein, 691 aa, synthetic construct; identical to SEQ ID NO: 8087

SEQ ID NO: 8089 - protein, 691 aa, synthetic construct
VQEISDSRPMLHIYLNGRRFLGLLDTGADKTCIAGRDWPANWPIHQTESSLQGLGMACGVARSSQPLRWQHEDKSGIIHPFVIPTLPFTLWGRDIMKDIKVRLMTDSPDDSQDLMIGAIESNLFADQISWKSDQPVWLNQWPLKQEKLQALQQLVTEQLQLGHLEESNSPWNTPVFVIKKKSGKWRLLQDLRAVNATMHDMGALQPGLPSPVAVPKGWEIIIIDLQDCFFNIKLHPEDCKRFAFSVPSPNFKRPYQRFQWKVLPQGMKNSPTLCQKFVDKAILTVRDKYQDSYIVHYMDDILLAHPSRSIVDEILTSMIQALNKHGLVVSTEKIQKYDNLKYLGTHIQGDSVSYQKLQIRTDKLRTLNDFQKLLGNINWIRPFLKLTTGELKPLFEILNGDSNPISTRKLTPEACKALQLMNERLSTARVKRLDLSQPWSLCILKTEYTPTACLWQDGVVEWIHLPHISPKVITPYDIFCTQLIIKGRHRSKELFSKDPDYIVVPYTKVQFDLLLQEKEDWPISLLGFLGEVHFHLPKDPLLTFTLQTAIIFPHMTSTTPLEKGIVIFTDGSANGRSVTYIQGREPIIKENTQNTAQQAEIVAVITAFEEVSQPFNLYTDSKYVTGLFPEIETATLSPRTKIYTELKHLQRLIHKRQEKFYIGHIRGHTGLPGPLAQGNAYADSLTRILTA

SEQ ID NO: 8090 - protein, 691 aa, synthetic construct; identical to SEQ ID NO: 8089

SEQ ID NO: 8091 - protein, 599 aa, synthetic construct
GRDIMKDIKVRLMTDSPDDSQDLMIGAIESNLFADQISWKSDQPVWLNQWPLKQEKLQALQQLVTEQLQLGHLEESNSPWNTPVFVIKKKSGKWRLLQDLRAVNATMHDMGALQPGLPSPVAVPKGWEIIIIDLQDCFFNIKLHPEDCKRFAFSVPSPNFKRPYQRFQWKVLPQGMKNSPTLCQKFVDKAILTVRDKYQDSYIVHYMDDILLAHPSRSIVDEILTSMIQALNKHGLVVSTEKIQKYDNLKYLGTHIQGDSVSYQKLQIRTDKLRTLNDFQKLLGNINWIRPFLKLTTGELKPLFEILNGDSNPISTRKLTPEACKALQLMNERLSTARVKRLDLSQPWSLCILKTEYTPTACLWQDGVVEWIHLPHISPKVITPYDIFCTQLIIKGRHRSKELFSKDPDYIVVPYTKVQFDLLLQEKEDWPISLLGFLGEVHFHLPKDPLLTFTLQTAIIFPHMTSTTPLEKGIVIFTDGSANGRSVTYIQGREPIIKENTQNTAQQAEIVAVITAFEEVSQPFNLYTDSKYVTGLFPEIETATLSPRTKIYTELKHLQRLIHKRQEKFYIGHIRGHTGLPGPLAQGNAYADSLTRILT

SEQ ID NO: 8092 - protein, 599 aa, synthetic construct; identical to SEQ ID NO: 8091

SEQ ID NO: 8093 - protein, 599 aa, synthetic construct
GRDIMKDIKVRLMTDSPDDSQDLMIGAIESNLFADQISWKSDQPVWLNQWPLKQEKLQALQQLVTEQLQLGHLEESNSPWNTPVFVIKKKSGKWRLLQDLRAVNATMHDMGALQPGLPSPVAVPKGWEIIIIDLQDCFFNIKLHPEDCKRFAFSVPSPNFKRPYQRFQWKVLPQGMKNSPTLCQKFVDKAILTVRDKYQDSYIVHYMDDILLAHPSRSIVDEILTSMIQALNKHGLVVSTEKIQKYDNLKYLGTHIQGDSVSYQKLQIRTDKLRTLNDFQKLLGNINWIRPFLKLTTGELKPLFEILNPDSNPISTRKLTPEACKALQLMNERLSTARVKRLDLSQPWSLCILKTEYTPTACLWQDGVVEWIHLPHISPKVITPYDIFCTQLIIKGRHRSKELFSKDPDYIVVPYTKVQFDLLLQEKEDWPISLLGFLGEVHFHLPKDPLLTFTLQTAIIFPHMTSTTPLEKGIVIFTDGSANGRSVTYIQGREPIIKENTQNTAQQAEIVAVITAFEEVSQPFNLYTDSKYVTGLFPEIETATLSPRTKIYTELKHLQRLIHKRQEKFYIGHIRGHTGLPGPLAQGNAYADSLTRILT

SEQ ID NO: 8094 - protein, 599 aa, synthetic construct; identical to SEQ ID NO: 8093

SEQ ID NO: 8095 - protein, 599 aa, synthetic construct
GRDIMKDIKVRLMTDSPDDSQDLMIGAIESNLFADQISWKSDQPVWLNQWPLKQEKLQALQQLVTEQLQLGHLEESNSPWNTPVFVIKKKSGKWRLLQDLRAVNATMHDMGALQPGLPSPVAPPKGWEIIIIDLQDCFFNIKLHPEDCKRFAFSVPSPNFKRPYQRFQWKVLPQGMKNSPTLCQKFVDKAILTVRDKYQDSYIVHYMDDILLAHPSRSIVDEILTSMIQALNKHGLVVSTEKIQKYDNLKYLGTHIQGDSVSYQKLQIRTDKLRTLNDFQKLLGNINWIRPFLKLTTGELKPLFEILNPDSNPISTRKLTPEACKALQLMNERLSTARVKRLDLSQPWSLCILKTEYTPTACLWQDGVVEWIHLPHISPKVITPYDIFCTQLIIKGRHRSKELFSKDPDYIVVPYTKVQFDLLLQEKEDWPISLLGFLGEVHFHLPKDPLLTFTLQTAIIFPHMTSTTPLEKGIVIFTDGSANGRSVTYIQGREPIIKENTQNTAQQAEIVAVITAFEEVSQPFNLYTDSKYVTGLFPEIETATLSPRTKIYTELKHLQRLIHKRQEKFYIGHIRGHTGLPGPLAQGNAYADSLTRILT

SEQ ID NO: 8096 - protein, 599 aa, synthetic construct; identical to SEQ ID NO: 8095

SEQ ID NO: 8097 - protein, 585 aa, synthetic construct
LTAAIDILAPQQCAEPITWKSDEPVWVDQWPLTNDKLAAAQQLVQEQLEAGHITESSSPWNTPIFVIKKKSGKWRLLQDLRAVNATMVLMGALQPGLPSPVAIPQGYLKIIIDLKDCFFSIPLHPSDQKRFAFSLPSTNFKEPMQRFQWKVLPQGMANSPTLCQKYVATAIHKVRHAWKQMYIIHYMDDILIAGKDGQQVLQCFDQLKQELTAAGLHIAPEKVQLQDPYTYLGFELNGPKITNQKAVIRKDKLQTLNDFQKLLGDINWLRPYLKLTTGDLKPLFDTLKGDSDPNSHRSLSKEALASLEKVETAIAEQFVTHINYSLPLIFLIFNTALTPTGLFWQDNPIMWIHLPASPKKVLLPYYDAIADLIILGRDHSKKYFGIEPSTIIQPYSKSQIDWLMQNTEMWPIACASFVGILDNHYPPNKLIQFCKLHTFVFPQIISKTPLNNALLVFTDGSSTGMAAYTLTDTTIKFQTNLNSAQLVELQALIAVLSAFPNQPLNIYTDSAYLAHSIPLLETVAQIKHISETAKLFLQCQQLIYNRSIPFYIGHVRAHSGLPGPIAQGNQRADLATKIVASNINT

SEQ ID NO: 8098 - protein, 585 aa, synthetic construct
LTAAIDILAPQQCAEPITWKSDEPVWVDQWPLTNDKLAAAQQLVQEQLEAGHITESSSPWNTPIFVIKKKSGKWRLLQDLRAVNATMVLMGALQPGLPSPVAPPQGYLKIIIDLKDCFFSIPLHPSDQKRFAFSLPSTNFKEPMQRFQWKVLPQGMANSPTLCQKYVATAIHKVRHAWKQMYIIHYMDDILIAGKDGQQVLQCFDQLKQELTAAGLHIAPEKVQLQDPYTYLGFELNGPKITNQKAVIRKDKLQTLNDFQKLLGDINWLRPYLKLTTGDLKPLFDTLKPDSDPNSHRSLSKEALASLEKVETAIAEQFVTHINYSLPLIFLIFNTALTPTGLFWQDNPIMWIHLPASPKKVLLPYYDAIADLIILGRDHSKKYFGIEPSTIIQPYSKSQIDWLMQNTEMWPIACASFVGILDNHYPPNKLIQFCKLHTFVFPQIISKTPLNNALLVFTDGSSTGMAAYTLTDTTIKFQTNLNSAQLVELQALIAVLSAFPNQPLNIYTDSAYLAHSIPLLETVAQIKHISETAKLFLQCQQLIYNRSIPFYIGHVRAHSGLPGPIAQGNQRADLATKIVASNINT

SEQ ID NO: 8099 - protein, 665 aa, synthetic construct
TLQLDDEYRLYSPLVKPDQNIQFWLEQFPQAWAETAGMGLAKQVPPQVIQLKASATPVSVRQYPLSKEAQEGIRPHVQRLIQQGILVPVQSPWNTPLLPVRKPGTNDYRPVQDLREVNKRVQDIHPTVPNPYNLLCALPPQRSWYTVLDLKDAFFCLRLHPTSQPLFAFEWRDPGTGRTGQLTWTRLPQGFKNSPTIFDEALHRDLANFRIQHPQVTLLQYVDDLLLAGATKQDCLEGTKALLLELSDLGYRASAKKAQICRREVTYLGYSLRDGQRWLTEARKKTVVQIPAPTTAKQVREFLGTAGFCRLWIPGFATLAAPLYPLTKEKGEFSWAPEHQKAFDAIKKALLSAPALALPDVTKPFTLYVDERKGVARGVLTQTLGPWRRPVAYLSKKLDPVASGWPVCLKAIAAVAILVKDADKLTLGQNITVIAPHALENIVRQPPDRWMTNARMTHYQSLLLTERVTFAPPAALNPATLLPEETDEPVTHDCHQLLIEETGVRKDLTDIPLTGEVLTWFTDGSSYVVEGKRMAGAAVVDGTRTIWASSLPEGTSAQKAELMALTQALRLAEGKSINIYTDSRYAFATAHVHGAIYKQRGLLTSAGREIKNKEEILSLLEALHLPKRLAIIHCPGHQKAKDPISRGNQMADRVAKQAAQGVNLL

SEQ ID NO: 8100 - protein, 665 aa, synthetic construct; identical to SEQ ID NO: 8099

SEQ ID NO: 8101 - protein, 665 aa, synthetic construct
TLQLDDEYRLYSPLVKPDQNIQFWLEQFPQAWAETAGMGLAKQVPPQVIQLKASATPVSVRQYPLSKEAQEGIRPHVQRLIQQGILVPVQSPWNTPLLPVRKPGTNDYRPVQDLREVNKRVQDIHPTVPNPYNLLCALPPQRSWYTVLDLKDAFFCLRLHPTSQPLFAFEWRDPGTGRTGQLTWTRLPQGFKNSPTIFNEALHRDLANFRIQHPQVTLLQYVDDLLLAGATKQDCLEGTKALLLELSDLGYRASAKKAQICRREVTYLGYSLRDGQRWLTEARKKTVVQIPAPTTAKQVREFLGTAGFCRLWIPGFATLAAPLYPLTKPKGEFSWAPEHQKAFDAIKKALLSAPALALPDVTKPFTLYVDERKGVARGVLTQTLGPWRRPVAYLSKKLDPVASGWPVCLKAIAAVAILVKDADKLTLGQNITVIAPHALENIVRQPPDRWMTNARMTHYQSLLLTERVTFAPPAALNPATLLPEETDEPVTHDCHQLLIEETGVRKDLTDIPLTGEVLTWFTDGSSYVVEGKRMAGAAVVDGTRTIWASSLPEGTSAQKAELMALTQALRLAEGKSINIYTDSRYAFATAHVHGAIYKQRGWLTSAGREIKNKEEILSLLEALHLPKRLAIIHCPGHQKAKDPISRGNQMADRVAKQAAQGVNLL

SEQ ID NO: 8102 - protein, 665 aa, synthetic construct; identical to SEQ ID NO: 8101

SEQ ID NO: 8103 - protein, 663 aa, synthetic construct
LDDEYRLYSPLVKPDQNIQFWLEQFPQAWAETAGMGLAKQVPPQVIQLKASATPVSVRQYPLSKEAQEGIRPHVQRLIQQGILVPVQSPWNTPLLPVRKPGTNDYRPVQDLREVNKRVQDIHPTVPNPYNLLCALPPQRSWYTVLDLKDAFFCLRLHPTSQPLFAFEWRDPGTGRTGQLTWTRLPQGFKNSPTIFNEALHRDLANFRIQHPQVTLLQYVDDLLLAGATKQDCLEGTKALLLELSDLGYRASAKKAQICRREVTYLGYSLRDGQRWLTEARKKTVVQIPAPTTAKQVREFLGKAGFCRLFIPGFATLAAPLYPLTKPKGEFSWAPEHQKAFDAIKKALLSAPALALPDVTKPFTLYVDERKGVARGVLTQTLGPWRRPVAYLSKKLDPVASGWPVCLKAIAAVAILVKDADKLTLGQNITVIAPHALENIVRQPPDRWMTNARMTHYQSLLLTERVTFAPPAALNPATLLPEETDEPVTHDCHQLLIEETGVRKDLTDIPLTGEVLTWFTDGSSYVVEGKRMAGAAVVDGTRTIWASSLPEGTSAQKAELMALTQALRLAEGKSINIYTDSRYAFATAHVHGAIYKQRGWLTSAGREIKNKEEILSLLEALHLPKRLAIIHCPGHQKAKDPISRGNQMADRVAKQAAQGVNLLP

SEQ ID NO: 8104 - protein, 663 aa, synthetic construct; identical to SEQ ID NO: 8103

SEQ ID NO: 8105 - protein, 751 aa, synthetic construct
MDPLQLLQPLEAEIKGTKLKAHWNSGATITCVPEAFLEDERPIQTMLIKTIHGEKQQDVYYLTFKVQGRKVEAEVLASPYDYILLNPSDVPWLMKKPLQLTVLVPLHEYQERLLQQTALPKEQKELLQKLFLKYDALWQHWENQVGHRRIKPHNIATGTLAPRPQKQYPINPKAKPSIQIVIDDLLKQGVLIQQNSTMNTPVYPVPKPDGKWRMVLDYREVNKTIPLIAAQNQHSAGILSSIYRGKYKTTLDLTNGFWAHPITPESYWLTAFTWQGKQYCWTRLPQGFLNSPALFTADVVDLLKEIPNVQAYVDDIYISHDDPQEHLEQLEKIFSILLNAGYVVSLKKSEIAQREVEFLGFNITKEGRGLTDTFKQKLLNITPPKDLKQLQSILGLLNFARNFIPNYSELVKPLYTIVANANGKFISWTEDNSNQLQHIISVLNQADNLEERNPETRLIIKVNSSPSAGYIRYYNEGSKRPIMYVNYIFSKAEAKFTQTEKLLTTMHKGLIKAMDLAMGQEILVYSPIVSMTKIQRTPLPERKALPVRWITWMTYLEDPRIQFHYDKSLPELQQIPNVTEDVIAKTKHPSEFAMVFYTDGSAIKHPDVNKSHSAGMGIAQVQFIPEYKIVHQWSIPLGDHTAQLAEIAAVEFACKKALKISGPVLIVTDSFYVAESANKELPYWKSNGFLNNKKKPLRHVSKWKSIAECLQLKPDIIIMHEKGHQQPMTTLHTEGNNLADKLATQGSYVVH

SEQ ID NO: 8106 - protein, 751 aa, synthetic construct
MDPLQLLQPLEAEIKGTKLKAHWNSGATITCVPEAFLEDERPIQTMLIKTIHGEKQQDVYYLTFKVQGRKVEAEVLASPYDYILLNPSDVPWLMKKPLQLTVLVPLHEYQERLLQQTALPKEQKELLQKLFLKYDALWQHWENQVGHRRIKPHNIATGTLAPRPQKQYPINPKAKPSIQIVIDDLLKQGVLIQQNSTMNTPVYPVPKPDGKWRMVLDYREVNKTIPLIAAQNQHSAGILSSIYRGKYKTTLDLTNGFWAHPITPESYWLTAFTWQGKQYCWTRLPQGFLNSPALFNADVVDLLKEIPNVQAYVDDIYISHDDPQEHLEQLEKIFSILLNAGYVVSLKKSEIAQREVEFLGFNITKEGRGLTDTFKQKLLNITPPKDLKQLQSILGLLNFARNFIPNYSELVKPLYTIVAPANGKFISWTEDNSNQLQHIISVLNQADNLEERNPETRLIIKVNSSPSAGYIRYYNEGSKRPIMYVNYIFSKAEAKFTQTEKLLTTMHKGLIKAMDLAMGQEILVYSPIVSMTKIQRTPLPERKALPVRWITWMTYLEDPRIQFHYDKSLPELQQIPNVTEDVIAKTKHPSEFAMVFYTDGSAIKHPDVNKSHSAGMGIAQVQFIPEYKIVHQWSIPLGDHTAQLAEIAAVEFACKKALKISGPVLIVTDSFYVAESANKELPYWKSNGFLNNKKKPLRHVSKWKSIAECLQLKPDIIIMHEKGHQQPMTTLHTEGNNLADKLATQGSYVVH

SEQ ID NO: 8107 - protein, 751 aa, synthetic construct
MDPLQLLQPLEAEIKGTKLKAHWNSGATITCVPEAFLEDERPIQTMLIKTIHGEKQQDVYYLTFKVQGRKVEAEVLASPYDYILLNPSDVPWLMKKPLQLTVLVPLHEYQERLLQQTALPKEQKELLQKLFLKYDALWQHWENQVGHRRIKPHNIATGTLAPRPQKQYPINPKAKPSIQIVIDDLLKQGVLIQQNSTMNTPVYPVPKPDGKWRMVLDYREVNKTIPLIAAQNQHSAGILSSIYRGKYKTTLDLTNGFWAHPITPESYWLTAFTWQGKQYCWTRLPQGFLNSPALFNADVVDLLKEIPNVQAYVDDIYISHDDPQEHLEQLEKIFSILLNAGYVVSLKKSEIAQREVEFLGFNITKEGRGLTDTFKQKLLNITPPKDLKQLQSILGKLNFARNFIPNYSELVKPLYTIVAPANGKFISWTEDNSNQLQHIISVLNQADNLEERNPETRLIIKVNSSPSAGYIRYYNEGSKRPIMYVNYIFSKAEAKFTQTEKLLTTMHKGLIKAMDLAMGQEILVYSPIVSMTKIQRTPLPERKALPVRWITWMTYLEDPRIQFHYDKSLPELQQIPNVTEDVIAKTKHPSEFAMVFYTDGSAIKHPDVNKSHSAGMGIAQVQFIPEYKIVHQWSIPLGDHTAQLAEIAAVEFACKKALKISGPVLIVTDSFYVAESANKELPYWKSNGFLNNKKKPLRHVSKWKSIAECLQLKPDIIIMHEKGHQQPMTTLHTEGNNLADKLATQGSYVVH

SEQ ID NO: 8108 - protein, 662 aa, synthetic construct
VPWLMKKPLQLTVLVPLHEYQERLLQQTALPKEQKELLQKLFLKYDALWQHWENQVGHRRIKPHNIATGTLAPRPQKQYPINPKAKPSIQIVIDDLLKQGVLIQQNSTMNTPVYPVPKPDGKWRMVLDYREVNKTIPLIAAQNQHSAGILSSIYRGKYKTTLDLTNGFWAHPITPESYWLTAFTWQGKQYCWTRLPQGFLNSPALFTADVVDLLKEIPNVQAYVDDIYISHDDPQEHLEQLEKIFSILLNAGYVVSLKKSEIAQREVEFLGFNITKEGRGLTDTFKQKLLNITPPKDLKQLQSILGLLNFARNFIPNYSELVKPLYTIVANANGKFISWTEDNSNQLQHIISVLNQADNLEERNPETRLIIKVNSSPSAGYIRYYNEGSKRPIMYVNYIFSKAEAKFTQTEKLLTTMHKGLIKAMDLAMGQEILVYSPIVSMTKIQRTPLPERKALPVRWITWMTYLEDPRIQFHYDKSLPELQQIPNVTEDVIAKTKHPSEFAMVFYTDGSAIKHPDVNKSHSAGMGIAQVQFIPEYKIVHQWSIPLGDHTAQLAEIAAVEFACKKALKISGPVLIVTDSFYVAESANKELPYWKSNGFLNNKKKPLRHVSKWKSIAECLQLKPDIIIMHEKGHQQPMTTLHTEGNNLADKLATQGSYVVH

SEQ ID NO: 8109 - protein, 662 aa, synthetic construct
VPWLMKKPLQLTVLVPLHEYQERLLQQTALPKEQKELLQKLFLKYDALWQHWENQVGHRRIKPHNIATGTLAPRPQKQYPINPKAKPSIQIVIDDLLKQGVLIQQNSTMNTPVYPVPKPDGKWRMVLDYREVNKTIPLIAAQNQHSAGILSSIYRGKYKTTLDLTNGFWAHPITPESYWLTAFTWQGKQYCWTRLPQGFLNSPALFNADVVDLLKEIPNVQAYVDDIYISHDDPQEHLEQLEKIFSILLNAGYVVSLKKSEIAQREVEFLGFNITKEGRGLTDTFKQKLLNITPPKDLKQLQSILGLLNFARNFIPNYSELVKPLYTIVAPANGKFISWTEDNSNQLQHIISVLNQADNLEERNPETRLIIKVNSSPSAGYIRYYNEGSKRPIMYVNYIFSKAEAKFTQTEKLLTTMHKGLIKAMDLAMGQEILVYSPIVSMTKIQRTPLPERKALPVRWITWMTYLEDPRIQFHYDKSLPELQQIPNVTEDVIAKTKHPSEFAMVFYTDGSAIKHPDVNKSHSAGMGIAQVQFIPEYKIVHQWSIPLGDHTAQLAEIAAVEFACKKALKISGPVLIVTDSFYVAESANKELPYWKSNGFLNNKKKPLRHVSKWKSIAECLQLKPDIIIMHEKGHQQPMTTLHTEGNNLADKLATQGSYVVH

SEQ ID NO: 8110 - protein, 662 aa, synthetic construct
VPWLMKKPLQLTVLVPLHEYQERLLQQTALPKEQKELLQKLFLKYDALWQHWENQVGHRRIKPHNIATGTLAPRPQKQYPINPKAKPSIQIVIDDLLKQGVLIQQNSTMNTPVYPVPKPDGKWRMVLDYREVNKTIPLIAAQNQHSAGILSSIYRGKYKTTLDLTNGFWAHPITPESYWLTAFTWQGKQYCWTRLPQGFLNSPALFNADVVDLLKEIPNVQAYVDDIYISHDDPQEHLEQLEKIFSILLNAGYVVSLKKSEIAQREVEFLGFNITKEGRGLTDTFKQKLLNITPPKDLKQLQSILGKLNFARNFIPNYSELVKPLYTIVAPANGKFISWTEDNSNQLQHIISVLNQADNLEERNPETRLIIKVNSSPSAGYIRYYNEGSKRPIMYVNYIFSKAEAKFTQTEKLLTTMHKGLIKAMDLAMGQEILVYSPIVSMTKIQRTPLPERKALPVRWITWMTYLEDPRIQFHYDKSLPELQQIPNVTEDVIAKTKHPSEFAMVFYTDGSAIKHPDVNKSHSAGMGIAQVQFIPEYKIVHQWSIPLGDHTAQLAEIAAVEFACKKALKISGPVLIVTDSFYVAESANKELPYWKSNGFLNNKKKPLRHVSKWKSIAECLQLKPDIIIMHEKGHQQPMTTLHTEGNNLADKLATQGSYVVH

SEQ ID NO: 8111 - protein, 751 aa, synthetic construct
MDPLQLLQPLEAEIKGTKLKAHWNSGATITCVPQAFLEEEVPIKNIWIKTIHGEKEQPVYYLTFKIQGRKVEAEVISSPYDYILVSPSDIPWLMKKPLQLTTLVPLQEYEERLLKQTMLTGSYKEKLQSLFLKYDALWQHWENQVGHRRIKPHHIATGTVNPRPQKQYPINPKAKASIQTVINDLLKQGVLIQQNSIMNTPVYPVPKPDGKWRMVLDYREVNKTIPLIAAQNQHSAGILSSIFRGKYKTTLDLSNGFWAHSITPESYWLTAFTWLGQQYCWTRLPQGFLNSPALFTADVVDLLKEVPNVQVYVDDIYISHDDPREHLEQLEKVFSLLLNAGYVVSLKKSEIAQHEVEFLGFNITKEGRGLTETFKQKLLNITPPRDLKQLQSILGLLNFARNFIPNFSELVKPLYNIIATANGKYITWTTDNSQQLQNIISMLNSAENLEERNPEVRLIMKVNTSPSAGYIRFYNEFAKRPIMYLNYVYTKAEVKFTNTEKLLTTIHKGLIKALDLGMGQEILVYSPIVSMTKIQKTPLPERKALPIRWITWMSYLEDPRIQFHYDKTLPELQQVPTVTDDIIAKIKHPSEFSMVFYTDGSAIKHPNVNKSHNAGMGIAQVQFKPEFTVINTWSIPLGDHTAQLAEVAAVEFACKKALKIDGPVLIVTDSFYVAESVNKELPYWQSNGFFNNKKKPLKHVSKWKSIADCIQLKPDIIIIHEKGHQPTASTFHTEGNNLADKLATQGSYVVN

SEQ ID NO: 8112 - protein, 751 aa, synthetic construct
MDPLQLLQPLEAEIKGTKLKAHWNSGATITCVPQAFLEEEVPIKNIWIKTIHGEKEQPVYYLTFKIQGRKVEAEVISSPYDYILVSPSDIPWLMKKPLQLTTLVPLQEYEERLLKQTMLTGSYKEKLQSLFLKYDALWQHWENQVGHRRIKPHHIATGTVNPRPQKQYPINPKAKASIQTVINDLLKQGVLIQQNSIMNTPVYPVPKPDGKWRMVLDYREVNKTIPLIAAQNQHSAGILSSIFRGKYKTTLDLSNGFWAHSITPESYWLTAFTWLGQQYCWTRLPQGFLNSPALFNADVVDLLKEVPNVQVYVDDIYISHDDPREHLEQLEKVFSLLLNAGYVVSLKKSEIAQHEVEFLGFNITKEGRGLTETFKQKLLNITPPRDLKQLQSILGLLNFARNFIPNFSELVKPLYNIIATAPGKYITWTTDNSQQLQNIISMLNSAENLEERNPEVRLIMKVNTSPSAGYIRFYNEFAKRPIMYLNYVYTKAEVKFTNTEKLLTTIHKGLIKALDLGMGQEILVYSPIVSMTKIQKTPLPERKALPIRWITWMSYLEDPRIQFHYDKTLPELQQVPTVTDDIIAKIKHPSEFSMVFYTDGSAIKHPNVNKSHNAGMGIAQVQFKPEFTVINTWSIPLGDHTAQLAEVAAVEFACKKALKIDGPVLIVTDSFYVAESVNKELPYWQSNGFFNNKKKPLKHVSKWKSIADCIQLKPDIIIIHEKGHQPTASTFHTEGNNLADKLATQGSYVVN

SEQ ID NO: 8113 - protein, 751 aa, synthetic construct
MDPLQLLQPLEAEIKGTKLKAHWNSGATITCVPQAFLEEEVPIKNIWIKTIHGEKEQPVYYLTFKIQGRKVEAEVISSPYDYILVSPSDIPWLMKKPLQLTTLVPLQEYEERLLKQTMLTGSYKEKLQSLFLKYDALWQHWENQVGHRRIKPHHIATGTVNPRPQKQYPINPKAKASIQTVINDLLKQGVLIQQNSIMNTPVYPVPKPDGKWRMVLDYREVNKTIPLIAAQNQHSAGILSSIFRGKYKTTLDLSNGFWAHSITPESYWLTAFTWLGQQYCWTRLPQGFLNSPALFNADVVDLLKEVPNVQVYVDDIYISHDDPREHLEQLEKVFSLLLNAGYVVSLKKSEIAQHEVEFLGFNITKEGRGLTETFKQKLLNITPPRDLKQLQSILGKLNFARNFIPNFSELVKPLYNIIATAPGKYITWTTDNSQQLQNIISMLNSAENLEERNPEVRLIMKVNTSPSAGYIRFYNEFAKRPIMYLNYVYTKAEVKFTNTEKLLTTIHKGLIKALDLGMGQEILVYSPIVSMTKIQKTPLPERKALPIRWITWMSYLEDPRIQFHYDKTLPELQQVPTVTDDIIAKIKHPSEFSMVFYTDGSAIKHPNVNKSHNAGMGIAQVQFKPEFTVINTWSIPLGDHTAQLAEVAAVEFACKKALKIDGPVLIVTDSFYVAESVNKELPYWQSNGFFNNKKKPLKHVSKWKSIADCIQLKPDIIIIHEKGHQPTASTFHTEGNNLADKLATQGSYVVN

SEQ ID NO: 8114 - protein, 662 aa, synthetic construct
IPWLMKKPLQLTTLVPLQEYEERLLKQTMLTGSYKEKLQSLFLKYDALWQHWENQVGHRRIKPHHIATGTVNPRPQKQYPINPKAKASIQTVINDLLKQGVLIQQNSIMNTPVYPVPKPDGKWRMVLDYREVNKTIPLIAAQNQHSAGILSSIFRGKYKTTLDLSNGFWAHSITPESYWLTAFTWLGQQYCWTRLPQGFLNSPALFTADVVDLLKEVPNVQVYVDDIYISHDDPREHLEQLEKVFSLLLNAGYVVSLKKSEIAQHEVEFLGFNITKEGRGLTETFKQKLLNITPPRDLKQLQSILGLLNFARNFIPNFSELVKPLYNIIATANGKYITWTTDNSQQLQNIISMLNSAENLEERNPEVRLIMKVNTSPSAGYIRFYNEFAKRPIMYLNYVYTKAEVKFTNTEKLLTTIHKGLIKALDLGMGQEILVYSPIVSMTKIQKTPLPERKALPIRWITWMSYLEDPRIQFHYDKTLPELQQVPTVTDDIIAKIKHPSEFSMVFYTDGSAIKHPNVNKSHNAGMGIAQVQFKPEFTVINTWSIPLGDHTAQLAEVAAVEFACKKALKIDGPVLIVTDSFYVAESVNKELPYWQSNGFFNNKKKPLKHVSKWKSIADCIQLKPDIIIIHEKGHQPTASTFHTEGNNLADKLATQGSYVVN

SEQ ID NO: 8115 - protein, 662 aa, synthetic construct
IPWLMKKPLQLTTLVPLQEYEERLLKQTMLTGSYKEKLQSLFLKYDALWQHWENQVGHRRIKPHHIATGTVNPRPQKQYPINPKAKASIQTVINDLLKQGVLIQQNSIMNTPVYPVPKPDGKWRMVLDYREVNKTIPLIAAQNQHSAGILSSIFRGKYKTTLDLSNGFWAHSITPESYWLTAFTWLGQQYCWTRLPQGFLNSPALFNADVVDLLKEVPNVQVYVDDIYISHDDPREHLEQLEKVFSLLLNAGYVVSLKKSEIAQHEVEFLGFNITKEGRGLTETFKQKLLNITPPRDLKQLQSILGLLNFARNFIPNFSELVKPLYNIIATAPGKYITWTTDNSQQLQNIISMLNSAENLEERNPEVRLIMKVNTSPSAGYIRFYNEFAKRPIMYLNYVYTKAEVKFTNTEKLLTTIHKGLIKALDLGMGQEILVYSPIVSMTKIQKTPLPERKALPIRWITWMSYLEDPRIQFHYDKTLPELQQVPTVTDDIIAKIKHPSEFSMVFYTDGSAIKHPNVNKSHNAGMGIAQVQFKPEFTVINTWSIPLGDHTAQLAEVAAVEFACKKALKIDGPVLIVTDSFYVAESVNKELPYWQSNGFFNNKKKPLKHVSKWKSIADCIQLKPDIIIIHEKGHQPTASTFHTEGNNLADKLATQGSYVVN

SEQ ID NO: 8116 - protein, 662 aa, synthetic construct
IPWLMKKPLQLTTLVPLQEYEERLLKQTMLTGSYKEKLQSLFLKYDALWQHWENQVGHRRIKPHHIATGTVNPRPQKQYPINPKAKASIQTVINDLLKQGVLIQQNSIMNTPVYPVPKPDGKWRMVLDYREVNKTIPLIAAQNQHSAGILSSIFRGKYKTTLDLSNGFWAHSITPESYWLTAFTWLGQQYCWTRLPQGFLNSPALFNADVVDLLKEVPNVQVYVDDIYISHDDPREHLEQLEKVFSLLLNAGYVVSLKKSEIAQHEVEFLGFNITKEGRGLTETFKQKLLNITPPRDLKQLQSILGKLNFARNFIPNFSELVKPLYNIIATAPGKYITWTTDNSQQLQNIISMLNSAENLEERNPEVRLIMKVNTSPSAGYIRFYNEFAKRPIMYLNYVYTKAEVKFTNTEKLLTTIHKGLIKALDLGMGQEILVYSPIVSMTKIQKTPLPERKALPIRWITWMSYLEDPRIQFHYDKTLPELQQVPTVTDDIIAKIKHPSEFSMVFYTDGSAIKHPNVNKSHNAGMGIAQVQFKPEFTVINTWSIPLGDHTAQLAEVAAVEFACKKALKIDGPVLIVTDSFYVAESVNKELPYWQSNGFFNNKKKPLKHVSKWKSIADCIQLKPDIIIIHEKGHQPTASTFHTEGNNLADKLATQGSYVVN

SEQ ID NO: 8117 - protein, 751 aa, synthetic construct
MNPLQLLQPLPAEVKGTKLLAHWNSGATITCIPESFLEDEQPIKQTLIKTIHGEKQQNVYYLTFKVKGRKVEAEVIASPYEYILLSPTDVPWLTQQPLQLTILVPLQEYQDRILNKTALPEEQKQQLKALFTKYDNLWQHWENQVGHRKIRPHNIATGDYPPRPQKQYPINPKAKPSIQIVIDDLLKQGVLTPQNSTMNTPVYPVPKPDGRWRMVLDYREVNKTIPLTAAQNQHSAGILATIVRQKYKTTLDLANGFWAHPITPDSYWLTAFTWQGKQYCWTRLPQGFLNSPALFTADAVDLLKEVPNVQVYVDDIYLSHDNPHEHIQQLEKVFQILLQAGYVVSLKKSEIGQRTVEFLGFNITKEGRGLTDTFKTKLLNVTPPKDLKQLQSILGLLNFARNFIPNFAELVQTLYNLIASSKGKYIEWTEDNTKQLNKVIEALNTASNLEERLPDQRLVIKVNTSPSAGYVRYYNESGKKPIMYLNYVFSKAELKFSMLEKLLTTMHKALIKAMDLAMGQEILVYSPIVSMTKIQKTPLPERKALPIRWITWMTYLEDPRIQFHYDKTLPELKHIPDVYTSSIPPLKHPSQYEGVFCTDGSAIKSPDPTKSNNAGMGIVHAIYNPEYKILNQWSIPLGHHTAQMAEIAAVEFACKKALKVPGPVLVITDSFYVAESANKELPYWKSNGFVNNKKEPLKHISKWKSIAECLSIKPDITIQHEKGHQPINTSIHTEGNALADKLATQGSYVVN

SEQ ID NO: 8118 - protein, 751 aa, synthetic construct
MNPLQLLQPLPAEVKGTKLLAHWNSGATITCIPESFLEDEQPIKQTLIKTIHGEKQQNVYYLTFKVKGRKVEAEVIASPYEYILLSPTDVPWLTQQPLQLTILVPLQEYQDRILNKTALPEEQKQQLKALFTKYDNLWQHWENQVGHRKIRPHNIATGDYPPRPQKQYPINPKAKPSIQIVIDDLLKQGVLTPQNSTMNTPVYPVPKPDGRWRMVLDYREVNKTIPLTAAQNQHSAGILATIVRQKYKTTLDLANGFWAHPITPDSYWLTAFTWQGKQYCWTRLPQGFLNSPALFNADAVDLLKEVPNVQVYVDDIYLSHDNPHEHIQQLEKVFQILLQAGYVVSLKKSEIGQRTVEFLGFNITKEGRGLTDTFKTKLLNVTPPKDLKQLQSILGLLNFARNFIPNFAELVQTLYNLIASSPGKYIEWTEDNTKQLNKVIEALNTASNLEERLPDQRLVIKVNTSPSAGYVRYYNESGKKPIMYLNYVFSKAELKFSMLEKLLTTMHKALIKAMDLAMGQEILVYSPIVSMTKIQKTPLPERKALPIRWITWMTYLEDPRIQFHYDKTLPELKHIPDVYTSSIPPLKHPSQYEGVFCTDGSAIKSPDPTKSNNAGMGIVHAIYNPEYKILNQWSIPLGHHTAQMAEIAAVEFACKKALKVPGPVLVITDSFYVAESANKELPYWKSNGFVNNKKEPLKHISKWKSIAECLSIKPDITIQHEKGHQPINTSIHTEGNALADKLATQGSYVVN

SEQ ID NO: 8119 - protein, 751 aa, synthetic construct
MNPLQLLQPLPAEVKGTKLLAHWNSGATITCIPESFLEDEQPIKQTLIKTIHGEKQQNVYYLTFKVKGRKVEAEVIASPYEYILLSPTDVPWLTQQPLQLTILVPLQEYQDRILNKTALPEEQKQQLKALFTKYDNLWQHWENQVGHRKIRPHNIATGDYPPRPQKQYPINPKAKPSIQIVIDDLLKQGVLTPQNSTMNTPVYPVPKPDGRWRMVLDYREVNKTIPLTAAQNQHSAGILATIVRQKYKTTLDLANGFWAHPITPDSYWLTAFTWQGKQYCWTRLPQGFLNSPALFNADAVDLLKEVPNVQVYVDDIYLSHDNPHEHIQQLEKVFQILLQAGYVVSLKKSEIGQRTVEFLGFNITKEGRGLTDTFKTKLLNVTPPKDLKQLQSILGKLNFARNFIPNFAELVQTLYNLIASSPGKYIEWTEDNTKQLNKVIEALNTASNLEERLPDQRLVIKVNTSPSAGYVRYYNESGKKPIMYLNYVFSKAELKFSMLEKLLTTMHKALIKAMDLAMGQEILVYSPIVSMTKIQKTPLPERKALPIRWITWMTYLEDPRIQFHYDKTLPELKHIPDVYTSSIPPLKHPSQYEGVFCTDGSAIKSPDPTKSNNAGMGIVHAIYNPEYKILNQWSIPLGHHTAQMAEIAAVEFACKKALKVPGPVLVITDSFYVAESANKELPYWKSNGFVNNKKEPLKHISKWKSIAECLSIKPDITIQHEKGHQPINTSIHTEGNALADKLATQGSYVVN

SEQ ID NO: 8120 - protein, 662 aa, synthetic construct
VPWLTQQPLQLTILVPLQEYQDRILNKTALPEEQKQQLKALFTKYDNLWQHWENQVGHRKIRPHNIATGDYPPRPQKQYPINPKAKPSIQIVIDDLLKQGVLTPQNSTMNTPVYPVPKPDGRWRMVLDYREVNKTIPLTAAQNQHSAGILATIVRQKYKTTLDLANGFWAHPITPDSYWLTAFTWQGKQYCWTRLPQGFLNSPALFTADAVDLLKEVPNVQVYVDDIYLSHDNPHEHIQQLEKVFQILLQAGYVVSLKKSEIGQRTVEFLGFNITKEGRGLTDTFKTKLLNVTPPKDLKQLQSILGLLNFARNFIPNFAELVQTLYNLIASSKGKYIEWTEDNTKQLNKVIEALNTASNLEERLPDQRLVIKVNTSPSAGYVRYYNESGKKPIMYLNYVFSKAELKFSMLEKLLTTMHKALIKAMDLAMGQEILVYSPIVSMTKIQKTPLPERKALPIRWITWMTYLEDPRIQFHYDKTLPELKHIPDVYTSSIPPLKHPSQYEGVFCTDGSAIKSPDPTKSNNAGMGIVHAIYNPEYKILNQWSIPLGHHTAQMAEIAAVEFACKKALKVPGPVLVITDSFYVAESANKELPYWKSNGFVNNKKEPLKHISKWKSIAECLSIKPDITIQHEKGHQPINTSIHTEGNALADKLATQGSYVVN

SEQ ID NO: 8121 - protein, 662 aa, synthetic construct
VPWLTQQPLQLTILVPLQEYQDRILNKTALPEEQKQQLKALFTKYDNLWQHWENQVGHRKIRPHNIATGDYPPRPQKQYPINPKAKPSIQIVIDDLLKQGVLTPQNSTMNTPVYPVPKPDGRWRMVLDYREVNKTIPLTAAQNQHSAGILATIVRQKYKTTLDLANGFWAHPITPDSYWLTAFTWQGKQYCWTRLPQGFLNSPALFNADAVDLLKEVPNVQVYVDDIYLSHDNPHEHIQQLEKVFQILLQAGYVVSLKKSEIGQRTVEFLGFNITKEGRGLTDTFKTKLLNVTPPKDLKQLQSILGLLNFARNFIPNFAELVQTLYNLIASSPGKYIEWTEDNTKQLNKVIEALNTASNLEERLPDQRLVIKVNTSPSAGYVRYYNESGKKPIMYLNYVFSKAELKFSMLEKLLTTMHKALIKAMDLAMGQEILVYSPIVSMTKIQKTPLPERKALPIRWITWMTYLEDPRIQFHYDKTLPELKHIPDVYTSSIPPLKHPSQYEGVFCTDGSAIKSPDPTKSNNAGMGIVHAIYNPEYKILNQWSIPLGHHTAQMAEIAAVEFACKKALKVPGPVLVITDSFYVAESANKELPYWKSNGFVNNKKEPLKHISKWKSIAECLSIKPDITIQHEKGHQPINTSIHTEGNALADKLATQGSYVVN

SEQ ID NO: 8122 - protein, 662 aa, synthetic construct
VPWLTQQPLQLTILVPLQEYQDRILNKTALPEEQKQQLKALFTKYDNLWQHWENQVGHRKIRPHNIATGDYPPRPQKQYPINPKAKPSIQIVIDDLLKQGVLTPQNSTMNTPVYPVPKPDGRWRMVLDYREVNKTIPLTAAQNQHSAGILATIVRQKYKTTLDLANGFWAHPITPDSYWLTAFTWQGKQYCWTRLPQGFLNSPALFNADAVDLLKEVPNVQVYVDDIYLSHDNPHEHIQQLEKVFQILLQAGYVVSLKKSEIGQRTVEFLGFNITKEGRGLTDTFKTKLLNVTPPKDLKQLQSILGKLNFARNFIPNFAELVQTLYNLIASSPGKYIEWTEDNTKQLNKVIEALNTASNLEERLPDQRLVIKVNTSPSAGYVRYYNESGKKPIMYLNYVFSKAELKFSMLEKLLTTMHKALIKAMDLAMGQEILVYSPIVSMTKIQKTPLPERKALPIRWITWMTYLEDPRIQFHYDKTLPELKHIPDVYTSSIPPLKHPSQYEGVFCTDGSAIKSPDPTKSNNAGMGIVHAIYNPEYKILNQWSIPLGHHTAQMAEIAAVEFACKKALKVPGPVLVITDSFYVAESANKELPYWKSNGFVNNKKEPLKHISKWKSIAECLSIKPDITIQHEKGHQPINTSIHTEGNALADKLATQGSYVVN

SEQ ID NO: 8123 - protein, 592 aa, synthetic construct
PRSRAIDIPVPHADKISWKITDPVWVDQWPLTYEKTLAAIALVQEQLAAGHIEPTNSPWNTPIFIIKKKSGSWRLLQDLRAVNKVMVPMGALQPGLPSPVAIPLNYHKIVIDLKDCFFTIPLHPEDRPYFAFSVPQINFQSPMPRYQWKVLPQGMANSPTLCQKFVAAAIAPVRSQWPEAYILHYMDDILLACDSAEAAKACYAHIISCLTSYGLKIAPDKVQVSEPFSYLGFELHHQQVFTPRVCLKTDHLKTLNDFQKLLGDIQWLRPYLKLPTSALVPLNNILKGDPNPLSVRALTPEAKQSLALINKAIQNQSVQQISYNLPLVLLLLPTPHTPTAVFWQPNGTDPTKNGSPLLWLHLPASPSKVLLTYPSLLAMLIIKGRYTGRQLFGRDPHSIIIPYTQDQLTWLLQTSDEWAIALSSFTGDIDNHYPSDPVIQFAKLHQFIFPKITKCAPIPQATLVFTDGSSNGIAAYVIDNQPISIKSPYLSAQLVELYAILQVFTVLAHQPFNLYTDSAYIAQSVPLLETVPFIKSSTNATPLFSKLQQLILNRQHPFFIGHLRAHLNLPGPLAEGNALADAATQIFPIISD

SEQ ID NO: 8124 - protein, 592 aa, synthetic construct
PRSRAIDIPVPHADKISWKITDPVWVDQWPLTYEKTLAAIALVQEQLAAGHIEPTNSPWNTPIFIIKKKSGSWRLLQDLRAVNKVMVPMGALQPGLPSPVAIPLNYHKIVIDLKDCFFTIPLHPEDRPYFAFSVPQINFQSPMPRYQWKVLPQGMANSPTLCQKFVAAAIAPVRSQWPEAYILHYMDDILLACDSAEAAKACYAHIISCLTSYGLKIAPDKVQVSEPFSYLGFELHHQQVFTPRVCLKTDHLKTLNDFQKLLGDIQWLRPYLKLPTSALVPLNNILKPDPNPLSVRALTPEAKQSLALINKAIQNQSVQQISYNLPLVLLLLPTPHTPTAVFWQPNGTDPTKNGSPLLWLHLPASPSKVLLTYPSLLAMLIIKGRYTGRQLFGRDPHSIIIPYTQDQLTWLLQTSDEWAIALSSFTGDIDNHYPSDPVIQFAKLHQFIFPKITKCAPIPQATLVFTDGSSNGIAAYVIDNQPISIKSPYLSAQLVELYAILQVFTVLAHQPFNLYTDSAYIAQSVPLLETVPFIKSSTNATPLFSKLQQLILNRQHPFFIGHLRAHLNLPGPLAEGNALADAATQIFPIISD

SEQ ID NO: 8125 - protein, 592 aa, synthetic construct
PRSRAIDIPVPHADKISWKITDPVWVDQWPLTYEKTLAAIALVQEQLAAGHIEPTNSPWNTPIFIIKKKSGSWRLLQDLRAVNKVMVPMGALQPGLPSPVAPPLNYHKIVIDLKDCFFTIPLHPEDRPYFAFSVPQINFQSPMPRYQWKVLPQGMANSPTLCQKFVAAAIAPVRSQWPEAYILHYMDDILLACDSAEAAKACYAHIISCLTSYGLKIAPDKVQVSEPFSYLGFELHHQQVFTPRVCLKTDHLKTLNDFQKLLGDIQWLRPYLKLPTSALVPLNNILKPDPNPLSVRALTPEAKQSLALINKAIQNQSVQQISYNLPLVLLLLPTPHTPTAVFWQPNGTDPTKNGSPLLWLHLPASPSKVLLTYPSLLAMLIIKGRYTGRQLFGRDPHSIIIPYTQDQLTWLLQTSDEWAIALSSFTGDIDNHYPSDPVIQFAKLHQFIFPKITKCAPIPQATLVFTDGSSNGIAAYVIDNQPISIKSPYLSAQLVELYAILQVFTVLAHQPFNLYTDSAYIAQSVPLLETVPFIKSSTNATPLFSKLQQLILNRQHPFFIGHLRAHLNLPGPLAEGNALADAATQIFPIISD

SEQ ID NO: 8126 - protein, 585 aa, synthetic construct
LATAVDILAPQRYADPITWKSDEPVWVDQWPLTQEKLAAAQQLVQEQLQAGHIIESNSPWNTPIFVIKKKSGKWRLLQDLRAVNATMVLMGALQPGLPSPVAIPQGYFKIVIDLKDCFFTIPLQPVDQKRFAFSLPSTNFKQPMKRYQWKVLPQGMANSPTLCQKYVAAAIEPVRKSWAQMYIIHYMDDILIAGKLGEQVLQCFAQLKQALTTTGLQIAPEKVQLQDPYTYLGFQINGPKITNQKAVIRRDKLQTLNDFQKLLGDINWLRPYLHLTTGDLKPLFDILKGDSNPNSPRSLSEAALASLQKVETAIAEQFVTQIDYTQPLTFLIFNTTLTPTGLFWQNNPVMWVHLPASPKKVLLPYYDAIADLIILGRDNSKKYFGLEPSTIIQPYSKSQIHWLMQNTETWPIACASYAGNIDNHYPPNKLIQFCKLHAVVFPRIISKTPLDNALLVFTDGSSTGIAAYTFEKTTVRFKTSHTSAQLVELQALIAVLSAFPHRALNVYTDSAYLAHSIPLLETVSHIKHISDTAKFFLQCQQLIYNRSIPFYLGHIRAHSGLPGPLSQGNHITDLATKVVATTLTT

SEQ ID NO: 8127 - protein, 585 aa, synthetic construct
LATAVDILAPQRYADPITWKSDEPVWVDQWPLTQEKLAAAQQLVQEQLQAGHIIESNSPWNTPIFVIKKKSGKWRLLQDLRAVNATMVLMGALQPGLPSPVAPPQGYFKIVIDLKDCFFTIPLQPVDQKRFAFSLPSTNFKQPMKRYQWKVLPQGMANSPTLCQKYVAAAIEPVRKSWAQMYIIHYMDDILIAGKLGEQVLQCFAQLKQALTTTGLQIAPEKVQLQDPYTYLGFQINGPKITNQKAVIRRDKLQTLNDFQKLLGDINWLRPYLHLTTGDLKPLFDILKGDSNPNSPRSLSEAALASLQKVETAIAEQFVTQIDYTQPLTFLIFNTTLTPTGLFWQNNPVMWVHLPASPKKVLLPYYDAIADLIILGRDNSKKYFGLEPSTIIQPYSKSQIHWLMQNTETWPIACASYAGNIDNHYPPNKLIQFCKLHAVVFPRIISKTPLDNALLVFTDGSSTGIAAYTFEKTTVRFKTSHTSAQLVELQALIAVLSAFPHRALNVYTDSAYLAHSIPLLETVSHIKHISDTAKFFLQCQQLIYNRSIPFYLGHIRAHSGLPGPLSQGNHITDLATKVVATTLTT

SEQ ID NO: 8128 - protein, 650 aa, synthetic construct
SCQTKNTLNIDEYLLQFPDQLWASLPTDIGRMLVPPITIKIKDNASLPSIRQYPLPKDKTEGLRPLISSLENQGILIKCHSPCNTPIFPIKKAGRDEYRMIHDLRAINNIVAPLTAVVASPTTVLSNLAPSLHWFTVIDLSNAFFSVPIHKDSQYLFAFTFEGHQYTWTVLPQGFIHSPTLFSQALYQSLHKIKFKISSEICIYMDDVLIASKDRDTNLKDTAVMLQHLASEGHKVSKKKLQLCQQEVVYLGQLLTPEGRKILPDRKVTVSQFQQPTTIRQIRAFLGLVGYCRHWIPEFSIHSKFLEKQLKKDTAEPFQLDDQQVEAFNKLKHAITTAPVLVVPDPAKPFQLYTSHSEHASIAVLTQKHAGRTRPIAFLSSKFDAIESGLPPCLKACASIHRSLTQADSFILGAPLIIYTTHAICTLLQRDRSQLVTASRFSKWEADLLRPELTFVACSAVSPAHLYMQSCENNIPPHDCVLLTHTISRPRPDLSDLPIPDPDMTLFSDGSYTTGRGGAAVVMHRPVTDDFIIIHQQPGGASAQTAELLALAAACHLATDKTVNIYTDSRYAYGVVHDFGHLWMHRGFVTSAGTPIKNHKEIEYLLKQIMKPKQVSVIKIEAHTKGVSMEVRGNAAADEAAKNAVFLVQR

SEQ ID NO: 8129 - protein, 650 aa, synthetic construct
SCQTKNTLNIDEYLLQFPDQLWASLPTDIGRMLVPPITIKIKDNASLPSIRQYPLPKDKTEGLRPLISSLENQGILIKCHSPCNTPIFPIKKAGRDEYRMIHDLRAINNIVAPLTAVVASPTTVLSNLAPSLHWFTVIDLSNAFFSVPIHKDSQYLFAFTFEGHQYTWTVLPQGFIHSPTLFNQALYQSLHKIKFKISSEICIYMDDVLIASKDRDTNLKDTAVMLQHLASEGHKVSKKKLQLCQQEVVYLGQLLTPEGRKILPDRKVTVSQFQQPTTIRQIRAFLGLVGYCRHWIPEFSIHSKFLEKQLKPDTAEPFQLDDQQVEAFNKLKHAITTAPVLVVPDPAKPFQLYTSHSEHASIAVLTQKHAGRTRPIAFLSSKFDAIESGLPPCLKACASIHRSLTQADSFILGAPLIIYTTHAICTLLQRDRSQLVTASRFSKWEADLLRPELTFVACSAVSPAHLYMQSCENNIPPHDCVLLTHTISRPRPDLSDLPIPDPDMTLFSDGSYTTGRGGAAVVMHRPVTDDFIIIHQQPGGASAQTAELLALAAACHLATDKTVNIYTDSRYAYGVVHDFGHLWMHRGFVTSAGTPIKNHKEIEYLLKQIMKPKQVSVIKIEAHTKGVSMEVRGNAAADEAAKNAVFLVQR

SEQ ID NO: 8130 - protein, 650 aa, synthetic construct
SCQTKNTLNIDEYLLQFPDQLWASLPTDIGRMLVPPITIKIKDNASLPSIRQYPLPKDKTEGLRPLISSLENQGILIKCHSPCNTPIFPIKKAGRDEYRMIHDLRAINNIVAPLTAVVASPTTVLSNLAPSLHWFTVIDLSNAFFSVPIHKDSQYLFAFTFEGHQYTWTVLPQGFIHSPTLFNQALYQSLHKIKFKISSEICIYMDDVLIASKDRDTNLKDTAVMLQHLASEGHKVSKKKLQLCQQEVVYLGQLLTPEGRKILPDRKVTVSQFQQPTTIRQIRAFLGKVGYCRHFIPEFSIHSKFLEKQLKPDTAEPFQLDDQQVEAFNKLKHAITTAPVLVVPDPAKPFQLYTSHSEHASIAVLTQKHAGRTRPIAFLSSKFDAIESGLPPCLKACASIHRSLTQADSFILGAPLIIYTTHAICTLLQRDRSQLVTASRFSKWEADLLRPELTFVACSAVSPAHLYMQSCENNIPPHDCVLLTHTISRPRPDLSDLPIPDPDMTLFSDGSYTTGRGGAAVVMHRPVTDDFIIIHQQPGGASAQTAELLALAAACHLATDKTVNIYTDSRYAYGVVHDFGHLWMHRGFVTSAGTPIKNHKEIEYLLKQIMKPKQVSVIKIEAHTKGVSMEVRGNAAADEAAKNAVFLVQR

SEQ ID NO: 8131 - protein, 669 aa, synthetic construct
VLNLEEEYRLHEKPVPSSIDPSWLQLFPTVWAERAGMGLANQVPPVVVELRSGASPVAVRQYPMSKEAREGIRPHIQRFLDLGVLVPCQSPWNTPLLPVKKPGTNDYRPVQDLREINKRVQDIHPTVPNPYNLLSSLPPSHTWYSVLDLKDAFFCLKLHPNSQPLFAFEWRDPEKGNTGQLTWTRLPQGFKNSPTLFDEALHRDLAPFRALNPQVVLLQYVDDLLVAAPTYRDCKEGTQKLLQELSKLGYRVSAKKAQLCQKEVTYLGYLLKEGKRWLTPARKATVMKIPPPTTPRQVREFLGTAGFCRLWIPGFASLAAPLYPLTKESIPFIWTEEHQKAFDRIKEALLSAPALALPDLTKPFTLYVDERAGVARGVLTQTLGPWRRPVAYLSKKLDPVASGWPTCLKAVAAVALLLKDADKLTLGQNVTVIASHSLESIVRQPPDRWMTNARMTHYQSLLLNERVSFAPPAVLNPATLLPVESEATPVHRCSEILAEETGTRRDLKDQPLPGVPAWYTDGSSFIAEGKRRAGAAIVDGKRTVWASSLPEGTSAQKAELVALTQALRLAEGKDINIYTDSRYAFATAHIHGAIYKQRGLLTSAGKDIKNKEEILALLEAIHLPKRVAIIHCPGHQKGNDPVATGNRRADEAAKQAALSTRVLAETTKP

SEQ ID NO: 8132 - protein, 669 aa, synthetic construct
VLNLEEEYRLHEKPVPSSIDPSWLQLFPTVWAERAGMGLANQVPPVVVELRSGASPVAVRQYPMSKEAREGIRPHIQRFLDLGVLVPCQSPWNTPLLPVKKPGTNDYRPVQDLREINKRVQDIHPTVPNPYNLLSSLPPSHTWYSVLDLKDAFFCLKLHPNSQPLFAFEWRDPEKGNTGQLTWTRLPQGFKNSPTLFNEALHRDLAPFRALNPQVVLLQYVDDLLVAAPTYRDCKEGTQKLLQELSKLGYRVSAKKAQLCQKEVTYLGYLLKEGKRWLTPARKATVMKIPPPTTPRQVREFLGTAGFCRLWIPGFASLAAPLYPLTKPSIPFIWTEEHQKAFDRIKEALLSAPALALPDLTKPFTLYVDERAGVARGVLTQTLGPWRRPVAYLSKKLDPVASGWPTCLKAVAAVALLLKDADKLTLGQNVTVIASHSLESIVRQPPDRWMTNARMTHYQSLLLNERVSFAPPAVLNPATLLPVESEATPVHRCSEILAEETGTRRDLKDQPLPGVPAWYTDGSSFIAEGKRRAGAAIVDGKRTVWASSLPEGTSAQKAELVALTQALRLAEGKDINIYTDSRYAFATAHIHGAIYKQRGWLTSAGKDIKNKEEILALLEAIHLPKRVAIIHCPGHQKGNDPVATGNRRADEAAKQAALSTRVLAETTKP

SEQ ID NO: 8133 - protein, 669 aa, synthetic construct
VLNLEEEYRLHEKPVPSSIDPSWLQLFPTVWAERAGMGLANQVPPVVVELRSGASPVAVRQYPMSKEAREGIRPHIQRFLDLGVLVPCQSPWNTPLLPVKKPGTNDYRPVQDLREINKRVQDIHPTVPNPYNLLSSLPPSHTWYSVLDLKDAFFCLKLHPNSQPLFAFEWRDPEKGNTGQLTWTRLPQGFKNSPTLFNEALHRDLAPFRALNPQVVLLQYVDDLLVAAPTYRDCKEGTQKLLQELSKLGYRVSAKKAQLCQKEVTYLGYLLKEGKRWLTPARKATVMKIPPPTTPRQVREFLGKAGFCRLFIPGFASLAAPLYPLTKPSIPFIWTEEHQKAFDRIKEALLSAPALALPDLTKPFTLYVDERAGVARGVLTQTLGPWRRPVAYLSKKLDPVASGWPTCLKAVAAVALLLKDADKLTLGQNVTVIASHSLESIVRQPPDRWMTNARMTHYQSLLLNERVSFAPPAVLNPATLLPVESEATPVHRCSEILAEETGTRRDLKDQPLPGVPAWYTDGSSFIAEGKRRAGAAIVDGKRTVWASSLPEGTSAQKAELVALTQALRLAEGKDINIYTDSRYAFATAHIHGAIYKQRGWLTSAGKDIKNKEEILALLEAIHLPKRVAIIHCPGHQKGNDPVATGNRRADEAAKQAALSTRVLAETTKP

SEQ ID NO: 8134 - protein, 671 aa, synthetic construct
TLNIEDEYRLHETSKEPDVPLGSTWLSDFPQAWAETGGMGLAVRQAPLIIPLKATSTPVSIKQYPMSQEARLGIKPHIQRLLDQGILVPCQSPWNTPLLPVKKPGTNDYRPVQDLREVNKRVEDIHPTVPNPYNLLSGLPPSHQWYTVLDLKDAFFCLRLHPTSQPLFAFEWRDPEMGISGQLTWTRLPQGFKNSPTLFDEALHRDLADFRIQHPDLILLQYVDDLLLAATSEQDCQRGTRALLQTLGNLGYRASAKKAQICQKQVKYLGYLLKEGQRWLTEARKETVMGQPTPKTPRQLREFLGTAGFCRLWIPGFAEMAAPLYPLTKTGTLFNWGPDQQKAYQEIKQALLTAPALGLPDLTKPFELFVDEKQGYAKGVLTQKLGPWRRPVAYLSKKLDPVAAGWPPCLRMVAAIAVLTKDAGKLTMGQPLVILAPHAVEALVKQPPDRWLSNARMTHYQAMLLDTDRVQFGPVVALNPATLLPLPEKEAPHDCLEILAETHGTRPDLTDQPIPDADYTWYTDGSSFLQEGQRRAGAAVTTETEVIWARALPAGTSAQRAELIALTQALKMAEGKKLNVYTDSRYAFATAHVHGEIYRRRGLLTSEGREIKNKNEILALLKALFLPKRLSIIHCPGHQKGNSAEARGNRMADQAAREAAMKAVLETSTLL

SEQ ID NO: 8135 - protein, 671 aa, synthetic construct
TLNIEDEYRLHETSKEPDVPLGSTWLSDFPQAWAETGGMGLAVRQAPLIIPLKATSTPVSIKQYPMSQEARLGIKPHIQRLLDQGILVPCQSPWNTPLLPVKKPGTNDYRPVQDLREVNKRVEDIHPTVPNPYNLLSGLPPSHQWYTVLDLKDAFFCLRLHPTSQPLFAFEWRDPEMGISGQLTWTRLPQGFKNSPTLFNEALHRDLADFRIQHPDLILLQYVDDLLLAATSEQDCQRGTRALLQTLGNLGYRASAKKAQICQKQVKYLGYLLKEGQRWLTEARKETVMGQPTPKTPRQLREFLGTAGFCRLWIPGFAEMAAPLYPLTKPGTLFNWGPDQQKAYQEIKQALLTAPALGLPDLTKPFELFVDEKQGYAKGVLTQKLGPWRRPVAYLSKKLDPVAAGWPPCLRMVAAIAVLTKDAGKLTMGQPLVILAPHAVEALVKQPPDRWLSNARMTHYQAMLLDTDRVQFGPVVALNPATLLPLPEKEAPHDCLEILAETHGTRPDLTDQPIPDADYTWYTDGSSFLQEGQRRAGAAVTTETEVIWARALPAGTSAQRAELIALTQALKMAEGKKLNVYTDSRYAFATAHVHGEIYRRRGWLTSEGREIKNKNEILALLKALFLPKRLSIIHCPGHQKGNSAEARGNRMADQAAREAAMKAVLETSTLL

SEQ ID NO: 8136 - protein, 671 aa, synthetic construct
TLNIEDEYRLHETSKEPDVPLGSTWLSDFPQAWAETGGMGLAVRQAPLIIPLKATSTPVSIKQYPMSQEARLGIKPHIQRLLDQGILVPCQSPWNTPLLPVKKPGTNDYRPVQDLREVNKRVEDIHPTVPNPYNLLSGLPPSHQWYTVLDLKDAFFCLRLHPTSQPLFAFEWRDPEMGISGQLTWTRLPQGFKNSPTLFNEALHRDLADFRIQHPDLILLQYVDDLLLAATSEQDCQRGTRALLQTLGNLGYRASAKKAQICQKQVKYLGYLLKEGQRWLTEARKETVMGQPTPKTPRQLREFLGKAGFCRLFIPGFAEMAAPLYPLTKPGTLFNWGPDQQKAYQEIKQALLTAPALGLPDLTKPFELFVDEKQGYAKGVLTQKLGPWRRPVAYLSKKLDPVAAGWPPCLRMVAAIAVLTKDAGKLTMGQPLVILAPHAVEALVKQPPDRWLSNARMTHYQAMLLDTDRVQFGPVVALNPATLLPLPEKEAPHDCLEILAETHGTRPDLTDQPIPDADYTWYTDGSSFLQEGQRRAGAAVTTETEVIWARALPAGTSAQRAELIALTQALKMAEGKKLNVYTDSRYAFATAHVHGEIYRRRGWLTSEGREIKNKNEILALLKALFLPKRLSIIHCPGHQKGNSAEARGNRMADQAAREAAMKAVLETSTLL

SEQ ID NO: 8137 - protein, 677 aa, synthetic construct
TLNIEDEYRLHETSKEPDVSLGSTWLSDFPQAWAETGGMGLAVRQAPLIIPLKATSTPVSIKQYPMSQEARLGIKPHIQRLLDQGILVPCQSPWNTPLLPVKKPGTNDYRPVQDLREVNKRVEDIHPTVPNPYNLLSGLPPSHQWYTVLDLKDAFFCLRLHPTSQPLFAFEWRDPEMGISGQLTWTRLPQGFKNSPTLFNEALHRDLADFRIQHPDLILLQYVDDLLLAATSELDCQQGTRALLQTLGNLGYRASAKKAQICQKQVKYLGYLLKEGQRWLTEARKETVMGQPTPKTPRQLREFLGKAGFCRLFIPGFAEMAAPLYPLTKPGTLFNWGPDQQKAYQEIKQALLTAPALGLPDLTKPFELFVDEKQGYAKGVLTQKLGPWRRPVAYLSKKLDPVAAGWPPCLRMVAAIAVLTKDAGKLTMGQPLVILAPHAVEALVKQPPDRWLSNARMTHYQALLLDTDRVQFGPVVALNPATLLPLPEEGLQHNCLDILAEAHGTRPDLTDQPLPDADHTWYTDGSSLLQEGQRKAGAAVTTETEVIWAKALPAGTSAQRAELIALTQALKMAEGKKLNVYTDSRYAFATAHIHGEIYRRRGWLTSEGKEIKNKDEILALLKALFLPKRLSIIHCPGHQKGHSAEARGNRMADQAARKAAITETPDTSTLLIENSSP

SEQ ID NO: 8138-9010 - skipped (873 entries)

SEQ ID NO: 9011 - protein, 1121 aa, Streptococcus thermophilus
MSDLVLGLDIGIGSVGVGILNKVTGEIIHKNSRIFPAAQAENNLVRRTNRQGRRLARRKKHRRVRLNRLFEESGLITDFTKISINLNPYQLRVKGLTDELSNEELFIALKNMVKHRGISYLDDASDDGNSSVGDYAQIVKENSKQLETKTPGQIQLERYQTYGQLRGDFTVEKDGKKHRLINVFPTSAYRSEALRILQTQQEFNPQITDEFINRYLEILTGKRKYYHGPGNEKSRTDYGRYRTSGETLDNIFGILIGKCTFYPDEFRAAKASYTAQEFNLLNDLNNLTVPTETKKLSKEQKNQIINYVKNEKAMGPAKLFKYIAKLLSCDVADIKGYRIDKSGKAEIHTFEAYRKMKTLETLDIEQMDRETLDKLAYVLTLNTEREGIQEALEHEFADGSFSQKQVDELVQFRKANSSIFGKGWHNFSVKLMMELIPELYETSEEQMTILTRLGKQKTTSSSNKTKYIDEKLLTEEIYNPVVAKSVRQAIKIVNAAIKEYGDFDNIVIEMARETNEDDEKKAIQKIQKANKDEKDAAMLKAANQYNGKAELPHSVFHGHKQLATKIRLWHQQGERCLYTGKTISIHDLINNSNQFEVDHILPLSITFDDSLANKVLVYATANQEKGQRTPYQALDSMDDAWSFRELKAFVRESKTLSNKKKEYLLTEEDISKFDVRKKFIERNLVDTRYASRVVLNALQEHFRAHKIDTKVSVVRGQFTSQLRRHWGIEKTRDTYHHHAVDALIIAASSQLNLWKKQKNTLVSYSEDQLLDIETGELISDDEYKESVFKAPYQHFVDTLKSKEFEDSILFSYQVDSKFNRKISDATIYATRQAKVGKDKADETYVLGKIKDIYTQDGYDAFMKIYKKDKSKFLMYRHDPQTFEKVIEPILENYPNKQINEKGKEVPCNPFLKYKEEHGYIRKYSKKGNGPEIKSLKYYDSKLGNHIDITPKDSNNKVVLQSVSPWRADVYFNKTTGKYEILGLKYADLQFEKGTGTYKISQEKYNDIKKKEGVDSDSEFKFTLYKNDLLLVKDTETKEQQLFRFLSRTMPKQKHYVELKPYDKQKFEGGEALIKVLGNVANSGQCKKGLGKSNISIYKVRTDVLGNQHIIKNEGDKPKLDF

SEQ ID NO: 9012-9033 - skipped (22 entries)

SEQ ID NO: 9034 - protein, 1122 aa, Streptococcus thermophilus
MSDLVLGLDIGIGSVGVGILNKVTGEIIHKNSRIFPAAQAENNLVRRTNRQGRRLARRKKHRRVRLNRLFEESGLITDFTKISINLNPYQLRVKGLTDELSNEELFIALKNMVKHRGISYLDDASDDGNSSVGDYAQIVKENSKQLETKTPGQIQLERYQTYGQLRGDFTVEKDGKKHRLINVFPTSAYRSEALRILQTQQEFNPQITDEFINRYLEILTGKRKYYHGPGNEKSRTDYGRYRTSGETLDNIFGILIGKCTFYPDEFRAAKASYTAQEFNLLNDLNNLTVPTETKKLSKEQKNQIINYVKNEKAMGPAKLFKYIAKLLSCDVADIKGYRIDKSGKAEIHTFEAYRKMKTLETLDIEQMDRETLDKLAYVLTLNTEREGIQEALEHEFADGSFSQKQVDELVQFRKANSSIFGKGWHNFSVKLMMELIPELYETSEEQMTILTRLGKQKTTSSSNKTKYIDEKLLTEEIYNPVVAKSVRQAIKIVNAAIKEYGDFDNIVIEMARETNEDDEKKAIQKIQKANKDEKDAAMLKAANQYNGKAELPHSVFHGHKQLATKIRLWHQQGERCLYTGKTISIHDLINNSNQFEVDHILPLSITFDDSLANKVLVYATANQEKGQRTPYQALDSMDDAWSFRELKAFVRESKTLSNKKKEYLLTEEDISKFDVRKKFIERNLVDTRYASRVVLNALQEHFRAHKIDTKVSVVRGQFTSQLRRHWGIEKTRDTYHHHAVDALIIAASSQLNLWKKQKNTLVSYSEEQLLDIETGELISDDEYKESVFKAPYQHFVDTLKSKEFEDSILFSYQVDSKFNRKISDATIYATRQAKVGKDKKDETYVLGKIKDIYTQDGYDAFMKIYKKDKSKFLMYRHDPQTFEKVIEPILENYPNKQMNEKGKEVPCNPFLKYKEEHGYIRKYSKKGNGPEIKSLKYYDSKLLGNPIDITPENSKNKVVLQSLKPWRTDVYFNKATGKYEILGLKYADLQFEKGTGTYKISQEKYNDIKKKEGVDSDSEFKFTLYKNDLLLVKDTETKEQQLFRFLSRTLPKQKHYVELKPYDKQKFEGGEALIKVLGNVANGGQCIKGLAKSNISIYKVRTDVLGNQHIIKNEGDKPKLDF

SEQ ID NO: 9035 - protein, 1122 aa, Streptococcus thermophilus
MSDLVLGLDIGIGSVGVGILNKVTGEIIHKNSRIFPAAQAENNLVRRTNRQGRRLARRKKHRRVRLNRLFEESGLITDFTKISINLNPYQLRVKGLTDELSNEELFIALKNMVKHRGISYLDDASDDGNSSVGDYAQIVKENSKQLETKTPGQIQLERYQTYGQLRGDFTVEKDGKKHRLINVFPTSAYRSEALRILQTQQEFNPQITDEFINRYLEILTGKRKYYHGPGNEKSRTDYGRYRTSGETLDNIFGILIGKCTFYPDEFRAAKASYTAQEFNLLNDLNNLTVPTETKKLSKEQKNQIINYVKNEKAMGPAKLFKYIAKLLSCDVADIKGYRIDKSGKAEIHTFEAYRKMKTLETLDIEQMDRETLDKLAYVLTLNTEREGIQEALEHEFADGSFSQKQVDELVQFRKANSSIFGKGWHNFSVKLMMELIPELYETSEEQMTILTRLGKQKTTSSSNKTKYIDEKLLTEEIYNPVVAKSVRQAIKIVNAAIKEYGDFDNIVIEMARETNEDDEKKAIQKIQKANKDEKDAAMLKAANQYNGKAELPHSVFHGHKQLATKIRLWHQQGERCLYTGKTISIHDLINNSNQFEVDHILPLSITFDDSLANKVLVYATANQEKGQRTPYQALDSMDDAWSFRELKAFVRESKTLSNKKKEYLLTEEDISKFDVRKKFIERNLVDTRYASRVVLNALQEHFRAHKIDTKVSVVRGQFTSQLRRHWGIEKTRDTYHHHAVDALIIAASSQLNLWKKQKNTLVSYSEEQLLDIETGELISDDEYKESVFKAPYQHFVDTLKSKEFEDSILFSYQVDSKFNRKISDATIYATRQAKVGKDKKDETYVLGKIKDIYTQDGYDAFMKIYKKDKSKFLMYRHDPQTFEKVIEPILENYPNKQMNEKGKEVPCNPFLKYKEEHGYIRKYSKKGNGPEIKSLKYYDSKLLGNPIDITPENSKNKVVLQSLKPWRTDVYFNKNTGKYEILGLKYADLQFEKKTGTYKISQEKYNGIMKEEGVDSDSEFKFTLYKNDLLLVKDTETKEQQLFRFLSRTMPNVKYYVELKPYSKDKFEKNESLIEILGSADKSGRCIKGLGKSNISIYKVRTDVLGNQHIIKNEGDKPKLDF

SEQ ID NO: 9036 - protein, 1120 aa, Streptococcus thermophilus
MSDLVLGLDIGIGSVGVGILNKVTGEIIHKNSRIFPAAQAENNLVRRTNRQGRRLARRKKHRRVRLNRLFEESGLITDFTKISINLNPYQLRVKGLTDELSNEELFIALKNMVKHRGISYLDDASDDGNSSVGDYAQIVKENSKQLETKTPGQIQLERYQTYGQLRGDFTVEKDGKKHRLINVFPTSAYRSEALRILQTQQEFNPQITDEFINRYLEILTGKRKYYHGPGNEKSRTDYGRYRTSGETLDNIFGILIGKCTFYPDEFRAAKASYTAQEFNLLNDLNNLTVPTETKKLSKEQKNQIINYVKNEKAMGPAKLFKYIAKLLSCDVADIKGYRIDKSGKAEIHTFEAYRKMKTLETLDIEQMDRETLDKLAYVLTLNTEREGIQEALEHEFADGSFSQKQVDELVQFRKANSSIFGKGWHNFSVKLMMELIPELYETSEEQMTILTRLGKQKTTSSSNKTKYIDEKLLTEEIYNPVVAKSVRQAIKIVNAAIKEYGDFDNIVIEMARETNEDDEKKAIQKIQKANKDEKDAAMLKAANQYNGKAELPHSVFHGHKQLATKIRLWHQQGERCLYTGKTISIHDLINNSNQFEVDHILPLSITFDDSLANKVLVYATANQEKGQRTPYQALDSMDDAWSFRELKAFVRESKTLSNKKKEYLLTEEDISKFDVRKKFIERNLVDTRYASRVVLNALQEHFRAHKIDTKVSVVRGQFTSQLRRHWGIEKTRDTYHHHAVDALIIAASSQLNLWKKQKNTLVSYSEDQLLDIETGELISDDEYKESVFKAPYQHFVDTLKSKEFEDSILFSYQVDSKFNRKISDATIYATRQAKVGKDKADETYVLGKIKDIYTQDGYDAFMKIYKKDKSKFLMYRHDPQTFEKVIEPILENYPNKQINEKGKEVPCNPFLKYKEEHGYIRKYSKKGNGPEIKSLKYYDSKLGNHIDITPKDSNNKVVLQSLKPWRTDVYFNKNTGKYEILGLKYSDMQFEKGTGKYSISKEQYENIKVREGVDENSEFKFTLYKNDLLLLKDSENGEQILLRFTSRNDTSKHYVELKPYNRQKFEGSEYLIKSLGTVAKGGQCIKGLGKSNISIYKVRTDVLGNQHIIKNEGDKPKLDF

SEQ ID NO: 9037 - protein, 1120 aa, Streptococcus thermophilus
MSDLVLGLDIGIGSVGVGILNKVTGEIIHKNSRIFPAAQAENNLVRRTNRQGRRLARRKKHRRVRLNRLFEESGLITDFTKISINLNPYQLRVKGLTDELSNEELFIALKNMVKHRGISYLDDASDDGNSSVGDYAQIVKENSKQLETKTPGQIQLERYQTYGQLRGDFTVEKDGKKHRLINVFPTSAYRSEALRILQTQQEFNPQITDEFINRYLEILTGKRKYYHGPGNEKSRTDYGRYRTSGETLDNIFGILIGKCTFYPDEFRAAKASYTAQEFNLLNDLNNLTVPTETKKLSKEQKNQIINYVKNEKAMGPAKLFKYIAKLLSCDVADIKGYRIDKSGKAEIHTFEAYRKMKTLETLDIEQMDRETLDKLAYVLTLNTEREGIQEALEHEFADGSFSQKQVDELVQFRKANSSIFGKGWHNFSVKLMMELIPELYETSEEQMTILTRLGKQKTTSSSNKTKYIDEKLLTEEIYNPVVAKSVRQAIKIVNAAIKEYGDFDNIVIEMARETNEDDEKKAIQKIQKANKDEKDAAMLKAANQYNGKAELPHSVFHGHKQLATKIRLWHQQGERCLYTGKTISIHDLINNSNQFEVDHILPLSITFDDSLANKVLVYATANQEKGQRTPYQALDSMDDAWSFRELKAFVRESKTLSNKKKEYLLTEEDISKFDVRKKFIERNLVDTRYASRVVLNALQEHFRAHKIDTKVSVVRGQFTSQLRRHWGIEKTRDTYHHHAVDALIIAASSQLNLWKKQKNTLVSYSEDQLLDIETGELISDDEYKESVFKAPYQHFVDTLKSKEFEDSILFSYQVDSKFNRKISDATIYATRQAKVGKDKADETYVLGKIKDIYTQDGYDAFMKIYKKDKSKFLMYRHDPQTFEKVIEPILENYPNKQINEKGKEVPCNPFLKYKEEHGYIRKYSKKGNGPEIKSLKYYDSKLGNHIDITPKDSNNKVVLQSLKPWRTDVYFNKNTGKYEILGLKYSDMQFEKGTGKYSISKEQYENIKVREGVDENSEFKFTLYKNDLLLLKDSENGEQILLRFTSRNDTSKHYVELKPYNRQKFEGSEYLIKSLGTVVKGGRCIKGLGKSNISIYKVRTDVLGNQHIIKNEGDKPKLDF

SEQ ID NO: 9038-10060 - skipped (1023 entries)

SEQ ID NO: 10061 - DNA, 14 bp, synthetic construct
  source 1..14: mol_type = other DNA
gtctttgtactctg

SEQ ID NO: 10062-10083 - skipped (22 entries)

SEQ ID NO: 10084 - DNA, 14 bp, synthetic construct
  source 1..14: mol_type = other DNA
gtctttgtactctg

SEQ ID NO: 10085 - DNA, 14 bp, synthetic construct
  source 1..14: mol_type = other DNA
gtctttgtactctg

SEQ ID NO: 10086 - DNA, 14 bp, synthetic construct
  source 1..14: mol_type = other DNA
gtctttgtactctg

SEQ ID NO: 10087 - DNA, 14 bp, synthetic construct
  source 1..14: mol_type = other DNA
gtctttgtactctg

SEQ ID NO: 10088-10160 - skipped (73 entries)

SEQ ID NO: 10161 - DNA, 66 bp, synthetic construct
  source 1..66: mol_type = other DNA
cagaagctacaaagataaggcttcatgccgaaatcaacaccctgtcattttatggcagggtgtttt

SEQ ID NO: 10162-10183 - skipped (22 entries)

SEQ ID NO: 10184 - DNA, 66 bp, synthetic construct; identical to SEQ ID NO: 10161
  source 1..66: mol_type = other DNA

SEQ ID NO: 10185 - DNA, 66 bp, synthetic construct; identical to SEQ ID NO: 10161
  source 1..66: mol_type = other DNA

SEQ ID NO: 10186 - DNA, 66 bp, synthetic construct; identical to SEQ ID NO: 10161
  source 1..66: mol_type = other DNA

SEQ ID NO: 10187 - DNA, 66 bp, synthetic construct; identical to SEQ ID NO: 10161
  source 1..66: mol_type = other DNA

SEQ ID NO: 10188-11000 - skipped (813 entries)

SEQ ID NO: 11001 - protein, 1367 aa, synthetic construct
DKKYSIGLDIGTNSVGWAVITDEYKVPSKKFKVLGNTDRHSIKKNLIGALLFDSGETAEATRLKRTARRRYTRRKNRICYLQEIFSNEMAKVDDSFFHRLEESFLVEEDKKHERHPIFGNIVDEVAYHEKYPTIYHLRKKLVDSTDKADLRLIYLALAHMIKFRGHFLIEGDLNPDNSDVDKLFIQLVQTYNQLFEENPINASGVDAKAILSARLSKSRRLENLIAQLPGEKKNGLFGNLIALSLGLTPNFKSNFDLAEDAKLQLSKDTYDDDLDNLLAQIGDQYADLFLAAKNLSDAILLSDILRVNTEITKAPLSASMIKRYDEHHQDLTLLKALVRQQLPEKYKEIFFDQSKNGYAGYIDGGASQEEFYKFIKPILEKMDGTEELLVKLNREDLLRKQRTFDNGSIPHQIHLGELHAILRRQEDFYPFLKDNREKIEKILTFRIPYYVGPLARGNSRFAWMTRKSEETITPWNFEEVVDKGASAQSFIERMTNFDKNLPNEKVLPKHSLLYEYFTVYNELTKVKYVTEGMRKPAFLSGEQKKAIVDLLFKTNRKVTVKQLKEDYFKKIECFDSVEISGVEDRFNASLGTYHDLLKIIKDKDFLDNEENEDILEDIVLTLTLFEDREMIEERLKTYAHLFDDKVMKQLKRRRYTGWGRLSRKLINGIRDKQSGKTILDFLKSDGFANRNFMQLIHDDSLTFKEDIQKAQVSGQGDSLHEHIANLAGSPAIKKGILQTVKVVDELVKVMGRHKPENIVIEMARENQTTQKGQKNSRERMKRIEEGIKELGSQILKEHPVENTQLQNEKLYLYYLQNGRDMYVDQELDINRLSDYDVDAIVPQSFLKDDSIDNKVLTRSDKNRGKSDNVPSEEVVKKMKNYWRQLLNAKLITQRKFDNLTKAERGGLSELDKAGFIKRQLVETRQITKHVAQILDSRMNTKYDENDKLIREVKVITLKSKLVSDFRKDFQFYKVREINNYHHAHDAYLNAVVGTALIKKYPKLESEFVYGDYKVYDVRKMIAKSEQEIGKATAKYFFYSNIMNFFKTEITLANGEIRKRPLIETNGETGEIVWDKGRDFATVRKVLSMPQVNIVKKTEVQTGGFSKESILPKRNSDKLIARKKDWDPKKYGGFDSPTVAYSVLVVAKVEKGKSKKLKSVKELLGITIMERSSFEKNPIDFLEAKGYKEVKKDLIIKLPKYSLFELENGRKRMLASAGELQKGNELALPSKYVNFLYLASHYEKLKGSPEDNEQKQLFVEQHKHYLDEIIEQISEFSKRVILADANLDKVLSAYNKHRDKPIREQAENIIHLFTLTNLGAPAAFKYFDTTIDRKRYTSTKEVLDATLIHQSITGLYETRIDLSQLGGD

SEQ ID NO: 11002 - protein, 33 aa, synthetic construct; identical to SEQ ID NO: 5006

SEQ ID NO: 11003 - skipped

SEQ ID NO: 11004 - DNA, 62 bp, synthetic construct
  source 1..62: mol_type = other DNA
cactcctccccatcctctccctctgtccctctgtccctctgaccctgcactgtcccagcacc

SEQ ID NO: 11005 - DNA, 122 bp, synthetic construct
  source 1..122: mol_type = other DNA
caggacacagccttggatcaggacagagacttgggggccatcctgcccctccaacccgacatgtgtacctcagctttttccctcacttgcatcaataaagcttctgtgtttggaacagctaa

SEQ ID NO: 11006 - RNA, 47 nt, synthetic construct
  source 1..47: mol_type = other RNA
gggaaataagagagaaaagaagagtaagaagaaatataagagccacc

SEQ ID NO: 11007 - RNA, 110 nt, synthetic construct
  source 1..110: mol_type = other RNA
tgataataggctggagcctcggtggccatgcttcttgccccttgggcctccccccagcccctcctccccttcctgcacccgtacccccgtggtctttgaataaagtctga

SEQ ID NO: 11008 - RNA, 47 nt, synthetic construct; identical to SEQ ID NO: 11006
  source 1..47: mol_type = other RNA

SEQ ID NO: 11009 - RNA, 110 nt, synthetic construct; identical to SEQ ID NO: 11007
  source 1..110: mol_type = other RNA

SEQ ID NO: 11010-11094 - skipped (85 entries)

SEQ ID NO: 11095 - protein, 9 aa, synthetic construct
PAAKRVKLD

SEQ ID NO: 11096 - protein, 1367 aa, synthetic construct
DKKYSIGLDIGTNSVGWAVITDEYKVPSKKFKVLGNTDRHSIKKNLIGALLFDSGETAEATRLKRTARRRYTRRKNRICYLQEIFSNEMAKVDDSFFHRLEESFLVEEDKKHERHPIFGNIVDEVAYHEKYPTIYHLRKKLVDSTDKADLRLIYLALAHMIKFRGHFLIEGDLNPDNSDVDKLFIQLVQTYNQLFEENPINASGVDAKAILSARLSKSRRLENLIAQLPGEKKNGLFGNLIALSLGLTPNFKSNFDLAEDAKLQLSKDTYDDDLDNLLAQIGDQYADLFLAAKNLSDAILLSDILRVNTEITKAPLSASMIKRYDEHHQDLTLLKALVRQQLPEKYKEIFFDQSKNGYAGYIDGGASQEEFYKFIKPILEKMDGTEELLVKLNREDLLRKQRTFDNGSIPHQIHLGELHAILRRQEDFYPFLKDNREKIEKILTFRIPYYVGPLARGNSRFAWMTRKSEETITPWNFEEVVDKGASAQSFIERMTNFDKNLPNEKVLPKHSLLYEYFTVYNELTKVKYVTEGMRKPAFLSGEQKKAIVDLLFKTNRKVTVKQLKEDYFKKIECFDSVEISGVEDRFNASLGTYHDLLKIIKDKDFLDNEENEDILEDIVLTLTLFEDREMIEERLKTYAHLFDDKVMKQLKRRRYTGWGRLSRKLINGIRDKQSGKTILDFLKSDGFANRNFMQLIHDDSLTFKEDIQKAQVSGQGDSLHEHIANLAGSPAIKKGILQTVKVVDELVKVMGRHKPENIVIEMARENQTTQKGQKNSRERMKRIEEGIKELGSQILKEHPVENTQLQNEKLYLYYLQNGRDMYVDQELDINRLSDYDVDHIVPQSFLKDDSIDNKVLTRSDKARGKSDNVPSEEVVKKMKNYWRQLLNAKLITQRKFDNLTKAERGGLSELDKAGFIKRQLVETRQITKHVAQILDSRMNTKYDENDKLIREVKVITLKSKLVSDFRKDFQFYKVREINNYHHAHDAYLNAVVGTALIKKYPKLESEFVYGDYKVYDVRKMIAKSEQEIGKATAKYFFYSNIMNFFKTEITLANGEIRKRPLIETNGETGEIVWDKGRDFATVRKVLSMPQVNIVKKTEVQTGGFSKESILPKRNSDKLIARKKDWDPKKYGGFDSPTVAYSVLVVAKVEKGKSKKLKSVKELLGITIMERSSFEKNPIDFLEAKGYKEVKKDLIIKLPKYSLFELENGRKRMLASAGELQKGNELALPSKYVNFLYLASHYEKLKGSPEDNEQKQLFVEQHKHYLDEIIEQISEFSKRVILADANLDKVLSAYNKHRDKPIREQAENIIHLFTLTNLGAPAAFKYFDTTIDRKRYTSTKEVLDATLIHQSITGLYETRIDLSQLGGD

SEQ ID NO: 11097 - protein, 10 aa, synthetic construct
KRTADGSEFE

SEQ ID NO: 11098 - protein, 19 aa, synthetic construct
KRTADGSEFESPKKKAKVE

SEQ ID NO: 11099 - protein, 29 aa, synthetic construct
KRTADGSEFEKRTADGSEFESPKKKAKVE

SEQ ID NO: 11100-15400 - skipped (4301 entries)

SEQ ID NO: 15401 - protein, 46 aa, synthetic construct; identical to SEQ ID NO: 5217

SEQ ID NO: 15402 - protein, 46 aa, synthetic construct; identical to SEQ ID NO: 5217

SEQ ID NO: 15403 - protein, 46 aa, synthetic construct; identical to SEQ ID NO: 5217

SEQ ID NO: 15404 - protein, 46 aa, synthetic construct; identical to SEQ ID NO: 5217

SEQ ID NO: 15405 - protein, 20 aa, synthetic construct
GGGGSGGGGSGGGGSGGGGS

SEQ ID NO: 15406 - protein, 30 aa, synthetic construct; identical to SEQ ID NO: 5112

SEQ ID NO: 15407 - protein, 30 aa, synthetic construct; identical to SEQ ID NO: 5112

SEQ ID NO: 15408 - protein, 18 aa, synthetic construct
GSSGSSGSSGSSGSSGSS

SEQ ID NO: 15409 - protein, 20 aa, synthetic construct
EAAAKEAAAKEAAAKEAAAK

SEQ ID NO: 15410 - protein, 30 aa, synthetic construct; identical to SEQ ID NO: 5130

SEQ ID NO: 15411 - protein, 11 aa, synthetic construct
PAPAPAPAPAP

SEQ ID NO: 15412 - protein, 13 aa, synthetic construct
PAPAPAPAPAPAP

SEQ ID NO: 15413 - protein, 13 aa, synthetic construct
PAPAPAPAPAPAP

SEQ ID NO: 15414 - protein, 13 aa, synthetic construct
PAPAPAPAPAPAP

SEQ ID NO: 15415 - protein, 13 aa, synthetic construct
PAPAPAPAPAPAP

SEQ ID NO: 15416 - protein, 13 aa, synthetic construct
PAPAPAPAPAPAP

SEQ ID NO: 15417 - protein, 8 aa, synthetic construct
EAAAKGGG

SEQ ID NO: 15418 - protein, 8 aa, synthetic construct
EAAAKGGG

SEQ ID NO: 15419 - protein, 6 aa, synthetic construct
PAPGGG

SEQ ID NO: 15420 - protein, 9 aa, synthetic construct
GGGGSSGGS

SEQ ID NO: 15421 - protein, 11 aa, synthetic construct
GGGGGSEAAAK

SEQ ID NO: 15422 - protein, 11 aa, synthetic construct
GGGEAAAKGGS

SEQ ID NO: 15423 - protein, 11 aa, synthetic construct
GGGEAAAKGGS

SEQ ID NO: 15424 - protein, 11 aa, synthetic construct
GGGEAAAKGGS

SEQ ID NO: 15425 - protein, 9 aa, synthetic construct
GGSGGGPAP

SEQ ID NO: 15426 - protein, 9 aa, synthetic construct
PAPGGSGGG

SEQ ID NO: 15427 - protein, 9 aa, synthetic construct
PAPGGSGGG

SEQ ID NO: 15428 - protein, 11 aa, synthetic construct
GGSEAAAKPAP

SEQ ID NO: 15429 - protein, 11 aa, synthetic construct
GGSPAPEAAAK

SEQ ID NO: 15430 - protein, 11 aa, synthetic construct
GGSPAPEAAAK

SEQ ID NO: 15431 - protein, 11 aa, synthetic construct
EAAAKGGSPAP

SEQ ID NO: 15432 - protein, 11 aa, synthetic construct
EAAAKGGSPAP

SEQ ID NO: 15433 - protein, 11 aa, synthetic construct
EAAAKPAPGGS

SEQ ID NO: 15434 - protein, 11 aa, synthetic construct
EAAAKPAPGGS

SEQ ID NO: 15435 - protein, 11 aa, synthetic construct
GGGGSSEAAAK

SEQ ID NO: 15436 - protein, 11 aa, synthetic construct
GGGGSSEAAAK

SEQ ID NO: 15437 - protein, 11 aa, synthetic construct
GSSGGGEAAAK

SEQ ID NO: 15438 - protein, 11 aa, synthetic construct
GSSGGGEAAAK

SEQ ID NO: 15439 - protein, 11 aa, synthetic construct
GSSEAAAKGGG

SEQ ID NO: 15440 - protein, 9 aa, synthetic construct
GSSGGGPAP

SEQ ID NO: 15441 - protein, 9 aa, synthetic construct
GSSPAPGGG

SEQ ID NO: 15442 - protein, 9 aa, synthetic construct
PAPGGGGSS

SEQ ID NO: 15443 - protein, 11 aa, synthetic construct
GGGEAAAKPAP

SEQ ID NO: 15444 - protein, 11 aa, synthetic construct
GGGEAAAKPAP

SEQ ID NO: 15445 - protein, 11 aa, synthetic construct
GGGPAPEAAAK

SEQ ID NO: 15446 - protein, 11 aa, synthetic construct
GSSEAAAKPAP

SEQ ID NO: 15447 - protein, 11 aa, synthetic construct
GSSEAAAKPAP

SEQ ID NO: 15448 - protein, 11 aa, synthetic construct
GSSPAPEAAAK

SEQ ID NO: 15449 - protein, 11 aa, synthetic construct
GSSPAPEAAAK

SEQ ID NO: 15450 - protein, 11 aa, synthetic construct
GSSPAPEAAAK

SEQ ID NO: 15451 - protein, 11 aa, synthetic construct
PAPGSSEAAAK

SEQ ID NO: 15452 - protein, 11 aa, synthetic construct
PAPGSSEAAAK

SEQ ID NO: 15453 - protein, 46 aa, synthetic construct; identical to SEQ ID NO: 5217

SEQ ID NO: 15454 - protein, 46 aa, synthetic construct; identical to SEQ ID NO: 5217

SEQ ID NO: 15455 - protein, 46 aa, synthetic construct; identical to SEQ ID NO: 5217

SEQ ID NO: 15456 - protein, 46 aa, synthetic construct; identical to SEQ ID NO: 5217

SEQ ID NO: 15457 - protein, 46 aa, synthetic construct; identical to SEQ ID NO: 5217

SEQ ID NO: 15458 - protein, 46 aa, synthetic construct; identical to SEQ ID NO: 5217

SEQ ID NO: 15459 - protein, 46 aa, synthetic construct; identical to SEQ ID NO: 5217

SEQ ID NO: 15460 - protein, 16 aa, synthetic construct
SGSETPGTSESATPES

SEQ ID NO: 15461-17128 - skipped (1668 entries)

SEQ ID NO: 17129 - DNA, 20 bp, synthetic construct
  source 1..20: mol_type = other DNA
aggctgtgctgaccatcgac

SEQ ID NO: 17130-17142 - skipped (13 entries)

SEQ ID NO: 17143 - DNA, 20 bp, synthetic construct
  source 1..20: mol_type = other DNA
aaggctgtgctgaccatcga

SEQ ID NO: 17144-17166 - skipped (23 entries)

SEQ ID NO: 17167 - DNA, 20 bp, synthetic construct
  source 1..20: mol_type = other DNA
cataaggctgtgctgaccat

SEQ ID NO: 17168-17459 - skipped (292 entries)

SEQ ID NO: 17460 - DNA, 20 bp, synthetic construct
  source 1..20: mol_type = other DNA
atagacatgggtatggcctc

SEQ ID NO: 17461-17471 - skipped (11 entries)

SEQ ID NO: 17472 - DNA, 20 bp, synthetic construct
  source 1..20: mol_type = other DNA
gatagacatgggtatggcct

SEQ ID NO: 17473-17749 - skipped (277 entries)

SEQ ID NO: 17750 - DNA, 20 bp, synthetic construct
  source 1..20: mol_type = other DNA
ctcgaggcctgggatcagcc

SEQ ID NO: 17751-18082 - skipped (332 entries)

SEQ ID NO: 18083 - DNA, 20 bp, synthetic construct
  source 1..20: mol_type = other DNA
attttgttcaatcattaaga

SEQ ID NO: 18084-18192 - skipped (109 entries)

SEQ ID NO: 18193 - DNA, 55 bp, synthetic construct
  source 1..55: mol_type = other DNA
catgggtatggcctctaaaaacatggccccagcagcttcagtccctttctcgtcg

SEQ ID NO: 18194-18343 - skipped (150 entries)

SEQ ID NO: 18344 - DNA, 17 bp, synthetic construct
  source 1..17: mol_type = other DNA
atggtcagcacagcctt

SEQ ID NO: 18345-18796 - skipped (452 entries)

SEQ ID NO: 18797 - DNA, 20 bp, synthetic construct
  source 1..20: mol_type = other DNA
aaggctcacgtggacacctc

SEQ ID NO: 18798-19098 - skipped (301 entries)

SEQ ID NO: 19099 - DNA, 146 bp, synthetic construct
  source 1..146: mol_type = other DNA
aaggctgtgctgaccatcgagtctttgtactctggtaccagaagctacaaagataaggcttcatgccgaaatcaacaccctgtcattttatggcagggtgttttgccccagcagcttcagtccctttctcgtcgatggtcagcaca

SEQ ID NO: 19100-19249 - skipped (150 entries)

SEQ ID NO: 19250 - DNA, 86 bp, synthetic construct
  source 1..86: mol_type = other DNA
  misc_difference 1: note = a, c, t, g, unknown or other
nagtctttgtactctggtaccagaagctacaaagataaggcttcatgccgaaatcaacaccctgtcattttatggcagggtgtttt

SEQ ID NO: 19251-19447 - skipped (197 entries)

SEQ ID NO: 19448 - DNA, 17 bp, synthetic construct
  source 1..17: mol_type = other DNA
atggtcagcacagcctt

SEQ ID NO: 19449-19478 - skipped (30 entries)

SEQ ID NO: 19479 - DNA, 55 bp, synthetic construct
  source 1..55: mol_type = other DNA
catgggtatggcctctaaaaacatggccccagcagcttcagtccccttttcgtcg

SEQ ID NO: 19480-19524 - skipped (45 entries)

SEQ ID NO: 19525 - protein, 33 aa, synthetic construct; identical to SEQ ID NO: 5006

SEQ ID NO: 19526 - protein, 2146 aa, synthetic construct
PAAKRVKLDGGKRTADGSEFESPKKKRKVDKKYSIGLDIGTNSVGWAVITDEYKVPSKKFKVLGNTDRHSIKKNLIGALLFDSGETAEATRLKRTARRRYTRRKNRICYLQEIFSNEMAKVDDSFFHRLEESFLVEEDKKHERHPIFGNIVDEVAYHEKYPTIYHLRKKLVDSTDKADLRLIYLALAHMIKFRGHFLIEGDLNPDNSDVDKLFIQLVQTYNQLFEENPINASGVDAKAILSARLSKSRRLENLIAQLPGEKKNGLFGNLIALSLGLTPNFKSNFDLAEDAKLQLSKDTYDDDLDNLLAQIGDQYADLFLAAKNLSDAILLSDILRVNTEITKAPLSASMIKRYDEHHQDLTLLKALVRQQLPEKYKEIFFDQSKNGYAGYIDGGASQEEFYKFIKPILEKMDGTEELLVKLNREDLLRKQRTFDNGSIPHQIHLGELHAILRRQEDFYPFLKDNREKIEKILTFRIPYYVGPLARGNSRFAWMTRKSEETITPWNFEEVVDKGASAQSFIERMTNFDKNLPNEKVLPKHSLLYEYFTVYNELTKVKYVTEGMRKPAFLSGEQKKAIVDLLFKTNRKVTVKQLKEDYFKKIECFDSVEISGVEDRFNASLGTYHDLLKIIKDKDFLDNEENEDILEDIVLTLTLFEDREMIEERLKTYAHLFDDKVMKQLKRRRYTGWGRLSRKLINGIRDKQSGKTILDFLKSDGFANRNFMQLIHDDSLTFKEDIQKAQVSGQGDSLHEHIANLAGSPAIKKGILQTVKVVDELVKVMGRHKPENIVIEMARENQTTQKGQKNSRERMKRIEEGIKELGSQILKEHPVENTQLQNEKLYLYYLQNGRDMYVDQELDINRLSDYDVDAIVPQSFLKDDSIDNKVLTRSDKNRGKSDNVPSEEVVKKMKNYWRQLLNAKLITQRKFDNLTKAERGGLSELDKAGFIKRQLVETRQITKHVAQILDSRMNTKYDENDKLIREVKVITLKSKLVSDFRKDFQFYKVREINNYHHAHDAYLNAVVGTALIKKYPKLESEFVYGDYKVYDVRKMIAKSEQEIGKATAKYFFYSNIMNFFKTEITLANGEIRKRPLIETNGETGEIVWDKGRDFATVRKVLSMPQVNIVKKTEVQTGGFSKESILPKRNSDKLIARKKDWDPKKYGGFDSPTVAYSVLVVAKVEKGKSKKLKSVKELLGITIMERSSFEKNPIDFLEAKGYKEVKKDLIIKLPKYSLFELENGRKRMLASAGELQKGNELALPSKYVNFLYLASHYEKLKGSPEDNEQKQLFVEQHKHYLDEIIEQISEFSKRVILADANLDKVLSAYNKHRDKPIREQAENIIHLFTLTNLGAPAAFKYFDTTIDRKRYTSTKEVLDATLIHQSITGLYETRIDLSQLGGDSGGSSGGSSGSETPGTSESATPESSGGSSGGSSTLNIEDEYRLHETSKEPDVSLGSTWLSDFPQAWAETGGMGLAVRQAPLIIPLKATSTPVSIKQYPMSQEARLGIKPHIQRLLDQGILVPCQSPWNTPLLPVKKPGTNDYRPVQDLREVNKRVEDIHPTVPNPYNLLSGLPPSHQWYTVLDLKDAFFCLRLHPTSQPLFAFEWRDPEMGISGQLTWTRLPQGFKNSPTLFNEALHRDLADFRIQHPDLILLQYVDDLLLAATSELDCQQGTRALLQTLGNLGYRASAKKAQICQKQVKYLGYLLKEGQRWLTEARKETVMGQPTPKTPRQLREFLGKAGFCRLFIPGFAEMAAPLYPLTKPGTLFNWGPDQQKAYQEIKQALLTAPALGLPDLTKPFELFVDEKQGYAKGVLTQKLGPWRRPVAYLSKKLDPVAAGWPPCLRMVAAIAVLTKDAGKLTMGQPLVILAPHAVEALVKQPPDRWLSNARMTHYQALLLDTDRVQFGPVVALNPATLLPLPEEGLQHNCLDILAEAHGTRPDLTDQPLPDADHTWYTDGSSLLQEGQRKAGAAVTTETEVIWAKALPAGTSAQRAELIALTQALKMAEGKKLNVYTDSRYAFATAHIHGEIYRRRGWLTSEGKEIKNKDEILALLKALFLPKRLSIIHCPGHQKGHSAEARGNRMADQAARKAAITETPDTSTLLIENSSPSGGSKRTADGSEKRTADSQHSTPPKTKRKVEFEPKKKRKV

SEQ ID NO: 19527 - RNA, 136 nt, synthetic construct
  source 1..136: mol_type = other RNA
tcccctccaggccgtgcatagttttagagctagaaatagcaagttaaaataaggctagtccgttatcaacttgaaaaagtggcaccgagtcggtcctctcgtcgatggtcagcacagctttatgcacggcctggag

SEQ ID NO: 19528 - RNA, 100 nt, synthetic construct
  source 1..100: mol_type = other RNA
ggtttgttgaacttgacctgttttagagctagaaatagcaagttaaaataaggctagtccgttatcaacttgaaaaagtggcaccgagtcggtgcttttt

SEQ ID NO: 19529-20063 - skipped (535 entries)

SEQ ID NO: 20064 - DNA, 20 bp, synthetic construct
  source 1..20: mol_type = other DNA
aaggctgtgctgaccatcga

SEQ ID NO: 20065 - DNA, 21 bp, synthetic construct
  source 1..21: mol_type = other DNA
gaaggctgtgctgaccatcga

SEQ ID NO: 20066 - DNA, 20 bp, synthetic construct
  source 1..20: mol_type = other DNA
aaggctcacgtggacacctc

SEQ ID NO: 20067 - DNA, 21 bp, synthetic construct
  source 1..21: mol_type = other DNA
gaaggctcacgtggacacctc

SEQ ID NO: 20068 - DNA, 20 bp, synthetic construct
  source 1..20: mol_type = other DNA
taccaagtctcccctcttca

SEQ ID NO: 20069 - DNA, 21 bp, synthetic construct
  source 1..21: mol_type = other DNA
gtaccaagtctcccctcttca

SEQ ID NO: 20070-20182 - skipped (113 entries)

SEQ ID NO: 20183 - DNA, 14 bp, synthetic construct
  source 1..14: mol_type = other DNA
gtctttgtactctg

SEQ ID NO: 20184 - DNA, 14 bp, synthetic construct
  source 1..14: mol_type = other DNA
gtctttgtactctg

SEQ ID NO: 20185 - DNA, 14 bp, synthetic construct
  source 1..14: mol_type = other DNA
gtctttgtactctg

SEQ ID NO: 20186 - DNA, 14 bp, synthetic construct
  source 1..14: mol_type = other DNA
gtctttgtactctg

SEQ ID NO: 20187 - DNA, 14 bp, synthetic construct
  source 1..14: mol_type = other DNA
gtctttgtactctg

SEQ ID NO: 20188 - DNA, 14 bp, synthetic construct
  source 1..14: mol_type = other DNA
gtctttgtactctg

SEQ ID NO: 20189-20420 - skipped (232 entries)

SEQ ID NO: 20421 - DNA, 66 bp, synthetic construct; identical to SEQ ID NO: 10161
  source 1..66: mol_type = other DNA

SEQ ID NO: 20422 - DNA, 66 bp, synthetic construct; identical to SEQ ID NO: 10161
  source 1..66: mol_type = other DNA

SEQ ID NO: 20423 - DNA, 66 bp, synthetic construct; identical to SEQ ID NO: 10161
  source 1..66: mol_type = other DNA

SEQ ID NO: 20424 - DNA, 66 bp, synthetic construct; identical to SEQ ID NO: 10161
  source 1..66: mol_type = other DNA

SEQ ID NO: 20425 - DNA, 66 bp, synthetic construct; identical to SEQ ID NO: 10161
  source 1..66: mol_type = other DNA

SEQ ID NO: 20426 - DNA, 66 bp, synthetic construct; identical to SEQ ID NO: 10161
  source 1..66: mol_type = other DNA

SEQ ID NO: 20427-20539 - skipped (113 entries)

SEQ ID NO: 20540 - DNA, 84 bp, synthetic construct
  source 1..84: mol_type = other DNA
gtctttgtactctggtaccagaagctacaaagataaggcttcatgccgaaatcaacaccctgtcattttatggcagggtgtttt

SEQ ID NO: 20541 - DNA, 84 bp, synthetic construct; identical to SEQ ID NO: 20540
  source 1..84: mol_type = other DNA

SEQ ID NO: 20542 - DNA, 84 bp, synthetic construct; identical to SEQ ID NO: 20540
  source 1..84: mol_type = other DNA

SEQ ID NO: 20543 - DNA, 84 bp, synthetic construct; identical to SEQ ID NO: 20540
  source 1..84: mol_type = other DNA

SEQ ID NO: 20544 - DNA, 84 bp, synthetic construct; identical to SEQ ID NO: 20540
  source 1..84: mol_type = other DNA

SEQ ID NO: 20545 - DNA, 84 bp, synthetic construct; identical to SEQ ID NO: 20540
  source 1..84: mol_type = other DNA

SEQ ID NO: 20546-20815 - skipped (270 entries)

SEQ ID NO: 20816 - DNA, 20 bp, synthetic construct
  source 1..20: mol_type = other DNA
aaggctgtgctgaccatcga

SEQ ID NO: 20817 - DNA, 20 bp, synthetic construct
  source 1..20: mol_type = other DNA
aaggctgtgctgaccatcga

SEQ ID NO: 20818 - DNA, 20 bp, synthetic construct
  source 1..20: mol_type = other DNA
aaggctgtgctgaccatcga

SEQ ID NO: 20819 - DNA, 20 bp, synthetic construct
  source 1..20: mol_type = other DNA
aaggctgtgctgaccatcga

SEQ ID NO: 20820 - DNA, 20 bp, synthetic construct
  source 1..20: mol_type = other DNA
aaggctgtgctgaccatcga

SEQ ID NO: 20821 - DNA, 20 bp, synthetic construct
  source 1..20: mol_type = other DNA
aaggctgtgctgaccatcga

SEQ ID NO: 20822 - DNA, 20 bp, synthetic construct
  source 1..20: mol_type = other DNA
aaggctgtgctgaccatcga

SEQ ID NO: 20823 - DNA, 20 bp, synthetic construct
  source 1..20: mol_type = other DNA
aaggctgtgctgaccatcga

SEQ ID NO: 20824 - DNA, 20 bp, synthetic construct
  source 1..20: mol_type = other DNA
aaggctgtgctgaccatcga

SEQ ID NO: 20825 - DNA, 20 bp, synthetic construct
  source 1..20: mol_type = other DNA
aaggctgtgctgaccatcga

SEQ ID NO: 20826 - DNA, 20 bp, synthetic construct
  source 1..20: mol_type = other DNA
aaggctgtgctgaccatcga

SEQ ID NO: 20827 - DNA, 20 bp, synthetic construct
  source 1..20: mol_type = other DNA
aaggctgtgctgaccatcga

SEQ ID NO: 20828 - DNA, 20 bp, synthetic construct
  source 1..20: mol_type = other DNA
aaggctgtgctgaccatcga

SEQ ID NO: 20829 - DNA, 20 bp, synthetic construct
  source 1..20: mol_type = other DNA
aaggctgtgctgaccatcga

SEQ ID NO: 20830 - DNA, 20 bp, synthetic construct
  source 1..20: mol_type = other DNA
aaggctgtgctgaccatcga

SEQ ID NO: 20831 - DNA, 20 bp, synthetic construct
  source 1..20: mol_type = other DNA
aaggctgtgctgaccatcga

SEQ ID NO: 20832 - DNA, 20 bp, synthetic construct
  source 1..20: mol_type = other DNA
aaggctgtgctgaccatcga

SEQ ID NO: 20833 - DNA, 20 bp, synthetic construct
  source 1..20: mol_type = other DNA
aaggctgtgctgaccatcga

SEQ ID NO: 20834 - DNA, 20 bp, synthetic construct
  source 1..20: mol_type = other DNA
aaggctgtgctgaccatcga

SEQ ID NO: 20835 - DNA, 20 bp, synthetic construct
  source 1..20: mol_type = other DNA
aaggctgtgctgaccatcga

SEQ ID NO: 20836 - DNA, 20 bp, synthetic construct
  source 1..20: mol_type = other DNA
aaggctgtgctgaccatcga

SEQ ID NO: 20837 - DNA, 20 bp, synthetic construct
  source 1..20: mol_type = other DNA
aaggctgtgctgaccatcga

SEQ ID NO: 20838 - DNA, 20 bp, synthetic construct
  source 1..20: mol_type = other DNA
aaggctgtgctgaccatcga

SEQ ID NO: 20839 - DNA, 20 bp, synthetic construct
  source 1..20: mol_type = other DNA
aaggctgtgctgaccatcga

SEQ ID NO: 20840 - DNA, 20 bp, synthetic construct
  source 1..20: mol_type = other DNA
aaggctgtgctgaccatcga

SEQ ID NO: 20841 - DNA, 20 bp, synthetic construct
  source 1..20: mol_type = other DNA
aaggctgtgctgaccatcga

SEQ ID NO: 20842 - DNA, 20 bp, synthetic construct
  source 1..20: mol_type = other DNA
aaggctgtgctgaccatcga

SEQ ID NO: 20843 - DNA, 20 bp, synthetic construct
  source 1..20: mol_type = other DNA
aaggctgtgctgaccatcga

SEQ ID NO: 20844 - DNA, 20 bp, synthetic construct
  source 1..20: mol_type = other DNA
aaggctgtgctgaccatcga

SEQ ID NO: 20845 - DNA, 20 bp, synthetic construct
  source 1..20: mol_type = other DNA
aaggctgtgctgaccatcga

SEQ ID NO: 20846 - DNA, 20 bp, synthetic construct
  source 1..20: mol_type = other DNA
aaggctgtgctgaccatcga

SEQ ID NO: 20847 - DNA, 20 bp, synthetic construct
  source 1..20: mol_type = other DNA
aaggctgtgctgaccatcga

SEQ ID NO: 20848 - DNA, 20 bp, synthetic construct
  source 1..20: mol_type = other DNA
aaggctgtgctgaccatcga

SEQ ID NO: 20849 - DNA, 20 bp, synthetic construct
  source 1..20: mol_type = other DNA
aaggctgtgctgaccatcga

SEQ ID NO: 20850 - DNA, 20 bp, synthetic construct
  source 1..20: mol_type = other DNA
aaggctgtgctgaccatcga

SEQ ID NO: 20851 - DNA, 20 bp, synthetic construct
  source 1..20: mol_type = other DNA
aaggctgtgctgaccatcga

SEQ ID NO: 20852 - DNA, 20 bp, synthetic construct
  source 1..20: mol_type = other DNA
aaggctgtgctgaccatcga

SEQ ID NO: 20853 - DNA, 20 bp, synthetic construct
  source 1..20: mol_type = other DNA
aaggctgtgctgaccatcga

SEQ ID NO: 20854 - DNA, 20 bp, synthetic construct
  source 1..20: mol_type = other DNA
aaggctgtgctgaccatcga

SEQ ID NO: 20855 - DNA, 20 bp, synthetic construct
  source 1..20: mol_type = other DNA
aaggctgtgctgaccatcga

SEQ ID NO: 20856 - DNA, 20 bp, synthetic construct
  source 1..20: mol_type = other DNA
aaggctgtgctgaccatcga

SEQ ID NO: 20857 - DNA, 20 bp, synthetic construct
  source 1..20: mol_type = other DNA
aaggctgtgctgaccatcga

SEQ ID NO: 20858 - DNA, 20 bp, synthetic construct
  source 1..20: mol_type = other DNA
aaggctgtgctgaccatcga

SEQ ID NO: 20859 - DNA, 20 bp, synthetic construct
  source 1..20: mol_type = other DNA
aaggctgtgctgaccatcga

SEQ ID NO: 20860 - DNA, 20 bp, synthetic construct
  source 1..20: mol_type = other DNA
aaggctgtgctgaccatcga

SEQ ID NO: 20861 - DNA, 20 bp, synthetic construct
  source 1..20: mol_type = other DNA
aaggctgtgctgaccatcga

SEQ ID NO: 20862 - DNA, 20 bp, synthetic construct
  source 1..20: mol_type = other DNA
aaggctgtgctgaccatcga

SEQ ID NO: 20863 - DNA, 20 bp, synthetic construct
  source 1..20: mol_type = other DNA
aaggctgtgctgaccatcga

SEQ ID NO: 20864 - DNA, 20 bp, synthetic construct
  source 1..20: mol_type = other DNA
aaggctgtgctgaccatcga

SEQ ID NO: 20865 - DNA, 20 bp, synthetic construct
  source 1..20: mol_type = other DNA
aaggctgtgctgaccatcga

SEQ ID NO: 20866 - DNA, 20 bp, synthetic construct
  source 1..20: mol_type = other DNA
aaggctgtgctgaccatcga

SEQ ID NO: 20867 - DNA, 20 bp, synthetic construct
  source 1..20: mol_type = other DNA
aaggctgtgctgaccatcga

SEQ ID NO: 20868 - DNA, 20 bp, synthetic construct
  source 1..20: mol_type = other DNA
aaggctgtgctgaccatcga

SEQ ID NO: 20869 - DNA, 20 bp, synthetic construct
  source 1..20: mol_type = other DNA
aaggctgtgctgaccatcga

SEQ ID NO: 20870 - DNA, 20 bp, synthetic construct
  source 1..20: mol_type = other DNA
aaggctgtgctgaccatcga

SEQ ID NO: 20871 - DNA, 20 bp, synthetic construct
  source 1..20: mol_type = other DNA
aaggctgtgctgaccatcga

SEQ ID NO: 20872 - DNA, 20 bp, synthetic construct
  source 1..20: mol_type = other DNA
aaggctgtgctgaccatcga

SEQ ID NO: 20873 - DNA, 20 bp, synthetic construct
  source 1..20: mol_type = other DNA
aaggctgtgctgaccatcga

SEQ ID NO: 20874 - DNA, 20 bp, synthetic construct
  source 1..20: mol_type = other DNA
aaggctgtgctgaccatcga

SEQ ID NO: 20875 - DNA, 20 bp, synthetic construct
  source 1..20: mol_type = other DNA
aaggctgtgctgaccatcga

SEQ ID NO: 20876 - DNA, 20 bp, synthetic construct
  source 1..20: mol_type = other DNA
aaggctgtgctgaccatcga

SEQ ID NO: 20877 - DNA, 20 bp, synthetic construct
  source 1..20: mol_type = other DNA
aaggctgtgctgaccatcga

SEQ ID NO: 20878 - DNA, 20 bp, synthetic construct
  source 1..20: mol_type = other DNA
aaggctgtgctgaccatcga

SEQ ID NO: 20879 - DNA, 20 bp, synthetic construct
  source 1..20: mol_type = other DNA
aaggctgtgctgaccatcga

SEQ ID NO: 20880 - DNA, 20 bp, synthetic construct
  source 1..20: mol_type = other DNA
aaggctgtgctgaccatcga

SEQ ID NO: 20881 - DNA, 20 bp, synthetic construct
  source 1..20: mol_type = other DNA
aaggctgtgctgaccatcga

SEQ ID NO: 20882 - DNA, 20 bp, synthetic construct
  source 1..20: mol_type = other DNA
aaggctgtgctgaccatcga

SEQ ID NO: 20883 - DNA, 20 bp, synthetic construct
  source 1..20: mol_type = other DNA
aaggctgtgctgaccatcga

SEQ ID NO: 20884 - DNA, 20 bp, synthetic construct
  source 1..20: mol_type = other DNA
aaggctgtgctgaccatcga

SEQ ID NO: 20885 - DNA, 20 bp, synthetic construct
  source 1..20: mol_type = other DNA
aaggctgtgctgaccatcga

SEQ ID NO: 20886 - DNA, 20 bp, synthetic construct
  source 1..20: mol_type = other DNA
aaggctgtgctgaccatcga

SEQ ID NO: 20887 - DNA, 20 bp, synthetic construct
  source 1..20: mol_type = other DNA
aaggctgtgctgaccatcga

SEQ ID NO: 20888 - DNA, 20 bp, synthetic construct
  source 1..20: mol_type = other DNA
aaggctgtgctgaccatcga

SEQ ID NO: 20889 - DNA, 20 bp, synthetic construct
  source 1..20: mol_type = other DNA
aaggctgtgctgaccatcga

SEQ ID NO: 20890 - DNA, 20 bp, synthetic construct
  source 1..20: mol_type = other DNA
aaggctgtgctgaccatcga

SEQ ID NO: 20891 - DNA, 20 bp, synthetic construct
  source 1..20: mol_type = other DNA
aaggctgtgctgaccatcga

SEQ ID NO: 20892 - DNA, 20 bp, synthetic construct
  source 1..20: mol_type = other DNA
aaggctgtgctgaccatcga

SEQ ID NO: 20893 - DNA, 20 bp, synthetic construct
  source 1..20: mol_type = other DNA
aaggctgtgctgaccatcga

SEQ ID NO: 20894 - DNA, 20 bp, synthetic construct
  source 1..20: mol_type = other DNA
aaggctgtgctgaccatcga

SEQ ID NO: 20895 - DNA, 20 bp, synthetic construct
  source 1..20: mol_type = other DNA
aaggctgtgctgaccatcga

SEQ ID NO: 20896 - DNA, 20 bp, synthetic construct
  source 1..20: mol_type = other DNA
aaggctgtgctgaccatcga

SEQ ID NO: 20897 - DNA, 20 bp, synthetic construct
  source 1..20: mol_type = other DNA
aaggctgtgctgaccatcga

SEQ ID NO: 20898 - DNA, 20 bp, synthetic construct
  source 1..20: mol_type = other DNA
aaggctgtgctgaccatcga

SEQ ID NO: 20899 - DNA, 20 bp, synthetic construct
  source 1..20: mol_type = other DNA
aaggctgtgctgaccatcga

SEQ ID NO: 20900 - DNA, 20 bp, synthetic construct
  source 1..20: mol_type = other DNA
aaggctgtgctgaccatcga

SEQ ID NO: 20901 - DNA, 20 bp, synthetic construct
  source 1..20: mol_type = other DNA
aaggctgtgctgaccatcga

SEQ ID NO: 20902 - DNA, 20 bp, synthetic construct
  source 1..20: mol_type = other DNA
aaggctgtgctgaccatcga

SEQ ID NO: 20903 - DNA, 20 bp, synthetic construct
  source 1..20: mol_type = other DNA
aaggctgtgctgaccatcga

SEQ ID NO: 20904 - DNA, 20 bp, synthetic construct
  source 1..20: mol_type = other DNA
aaggctgtgctgaccatcga

SEQ ID NO: 20905 - DNA, 20 bp, synthetic construct
  source 1..20: mol_type = other DNA
aaggctgtgctgaccatcga

SEQ ID NO: 20906-21625 - skipped (720 entries)

SEQ ID NO: 21626 - DNA, 17 bp, synthetic construct
  source 1..17: mol_type = other DNA
atggtcagcacagcctt

SEQ ID NO: 21627 - DNA, 16 bp, synthetic construct
  source 1..16: mol_type = other DNA
atggtcagcacagcct

SEQ ID NO: 21628 - DNA, 15 bp, synthetic construct
  source 1..15: mol_type = other DNA
atggtcagcacagcc

SEQ ID NO: 21629 - DNA, 14 bp, synthetic construct
  source 1..14: mol_type = other DNA
atggtcagcacagc

SEQ ID NO: 21630 - DNA, 13 bp, synthetic construct
  source 1..13: mol_type = other DNA
atggtcagcacag

SEQ ID NO: 21631 - DNA, 12 bp, synthetic construct
  source 1..12: mol_type = other DNA
atggtcagcaca

SEQ ID NO: 21632 - DNA, 11 bp, synthetic construct
  source 1..11: mol_type = other DNA
atggtcagcac

SEQ ID NO: 21633 - DNA, 10 bp, synthetic construct
  source 1..10: mol_type = other DNA
atggtcagca

SEQ ID NO: 21634-21635 - skipped (2 entries)

SEQ ID NO: 21636 - DNA, 17 bp, synthetic construct
  source 1..17: mol_type = other DNA
atggtcagcacagcctt

SEQ ID NO: 21637 - DNA, 16 bp, synthetic construct
  source 1..16: mol_type = other DNA
atggtcagcacagcct

SEQ ID NO: 21638 - DNA, 15 bp, synthetic construct
  source 1..15: mol_type = other DNA
atggtcagcacagcc

SEQ ID NO: 21639 - DNA, 14 bp, synthetic construct
  source 1..14: mol_type = other DNA
atggtcagcacagc

SEQ ID NO: 21640 - DNA, 13 bp, synthetic construct
  source 1..13: mol_type = other DNA
atggtcagcacag

SEQ ID NO: 21641 - DNA, 12 bp, synthetic construct
  source 1..12: mol_type = other DNA
atggtcagcaca

SEQ ID NO: 21642 - DNA, 11 bp, synthetic construct
  source 1..11: mol_type = other DNA
atggtcagcac

SEQ ID NO: 21643 - DNA, 10 bp, synthetic construct
  source 1..10: mol_type = other DNA
atggtcagca

SEQ ID NO: 21644-21645 - skipped (2 entries)

SEQ ID NO: 21646 - DNA, 17 bp, synthetic construct
  source 1..17: mol_type = other DNA
atggtcagcacagcctt

SEQ ID NO: 21647 - DNA, 16 bp, synthetic construct
  source 1..16: mol_type = other DNA
atggtcagcacagcct

SEQ ID NO: 21648 - DNA, 15 bp, synthetic construct
  source 1..15: mol_type = other DNA
atggtcagcacagcc

SEQ ID NO: 21649 - DNA, 14 bp, synthetic construct
  source 1..14: mol_type = other DNA
atggtcagcacagc

SEQ ID NO: 21650 - DNA, 13 bp, synthetic construct
  source 1..13: mol_type = other DNA
atggtcagcacag

SEQ ID NO: 21651 - DNA, 12 bp, synthetic construct
  source 1..12: mol_type = other DNA
atggtcagcaca

SEQ ID NO: 21652 - DNA, 11 bp, synthetic construct
  source 1..11: mol_type = other DNA
atggtcagcac

SEQ ID NO: 21653 - DNA, 10 bp, synthetic construct
  source 1..10: mol_type = other DNA
atggtcagca

SEQ ID NO: 21654-21655 - skipped (2 entries)

SEQ ID NO: 21656 - DNA, 17 bp, synthetic construct
  source 1..17: mol_type = other DNA
atggtcagcacagcctt

SEQ ID NO: 21657 - DNA, 16 bp, synthetic construct
  source 1..16: mol_type = other DNA
atggtcagcacagcct

SEQ ID NO: 21658 - DNA, 15 bp, synthetic construct
  source 1..15: mol_type = other DNA
atggtcagcacagcc

SEQ ID NO: 21659 - DNA, 14 bp, synthetic construct
  source 1..14: mol_type = other DNA
atggtcagcacagc

SEQ ID NO: 21660 - DNA, 13 bp, synthetic construct
  source 1..13: mol_type = other DNA
atggtcagcacag

SEQ ID NO: 21661 - DNA, 12 bp, synthetic construct
  source 1..12: mol_type = other DNA
atggtcagcaca

SEQ ID NO: 21662 - DNA, 11 bp, synthetic construct
  source 1..11: mol_type = other DNA
atggtcagcac

SEQ ID NO: 21663 - DNA, 10 bp, synthetic construct
  source 1..10: mol_type = other DNA
atggtcagca

SEQ ID NO: 21664-21665 - skipped (2 entries)

SEQ ID NO: 21666 - DNA, 17 bp, synthetic construct
  source 1..17: mol_type = other DNA
atggtcagcacagcctt

SEQ ID NO: 21667 - DNA, 16 bp, synthetic construct
  source 1..16: mol_type = other DNA
atggtcagcacagcct

SEQ ID NO: 21668 - DNA, 15 bp, synthetic construct
  source 1..15: mol_type = other DNA
atggtcagcacagcc

SEQ ID NO: 21669 - DNA, 14 bp, synthetic construct
  source 1..14: mol_type = other DNA
atggtcagcacagc

SEQ ID NO: 21670 - DNA, 13 bp, synthetic construct
  source 1..13: mol_type = other DNA
atggtcagcacag

SEQ ID NO: 21671 - DNA, 12 bp, synthetic construct
  source 1..12: mol_type = other DNA
atggtcagcaca

SEQ ID NO: 21672 - DNA, 11 bp, synthetic construct
  source 1..11: mol_type = other DNA
atggtcagcac

SEQ ID NO: 21673 - DNA, 10 bp, synthetic construct
  source 1..10: mol_type = other DNA
atggtcagca

SEQ ID NO: 21674-21675 - skipped (2 entries)

SEQ ID NO: 21676 - DNA, 17 bp, synthetic construct
  source 1..17: mol_type = other DNA
atggtcagcacagcctt

SEQ ID NO: 21677 - DNA, 16 bp, synthetic construct
  source 1..16: mol_type = other DNA
atggtcagcacagcct

SEQ ID NO: 21678 - DNA, 15 bp, synthetic construct
  source 1..15: mol_type = other DNA
atggtcagcacagcc

SEQ ID NO: 21679 - DNA, 14 bp, synthetic construct
  source 1..14: mol_type = other DNA
atggtcagcacagc

SEQ ID NO: 21680 - DNA, 13 bp, synthetic construct
  source 1..13: mol_type = other DNA
atggtcagcacag

SEQ ID NO: 21681 - DNA, 12 bp, synthetic construct
  source 1..12: mol_type = other DNA
atggtcagcaca

SEQ ID NO: 21682 - DNA, 11 bp, synthetic construct
  source 1..11: mol_type = other DNA
atggtcagcac

SEQ ID NO: 21683 - DNA, 10 bp, synthetic construct
  source 1..10: mol_type = other DNA
atggtcagca

SEQ ID NO: 21684-21685 - skipped (2 entries)

SEQ ID NO: 21686 - DNA, 17 bp, synthetic construct
  source 1..17: mol_type = other DNA
atggtcagcacagcctt

SEQ ID NO: 21687 - DNA, 16 bp, synthetic construct
  source 1..16: mol_type = other DNA
atggtcagcacagcct

SEQ ID NO: 21688 - DNA, 15 bp, synthetic construct
  source 1..15: mol_type = other DNA
atggtcagcacagcc

SEQ ID NO: 21689 - DNA, 14 bp, synthetic construct
  source 1..14: mol_type = other DNA
atggtcagcacagc

SEQ ID NO: 21690 - DNA, 13 bp, synthetic construct
  source 1..13: mol_type = other DNA
atggtcagcacag

SEQ ID NO: 21691 - DNA, 12 bp, synthetic construct
  source 1..12: mol_type = other DNA
atggtcagcaca

SEQ ID NO: 21692 - DNA, 11 bp, synthetic construct
  source 1..11: mol_type = other DNA
atggtcagcac

SEQ ID NO: 21693 - DNA, 10 bp, synthetic construct
  source 1..10: mol_type = other DNA
atggtcagca

SEQ ID NO: 21694-21695 - skipped (2 entries)

SEQ ID NO: 21696 - DNA, 17 bp, synthetic construct
  source 1..17: mol_type = other DNA
atggtcagcacagcctt

SEQ ID NO: 21697 - DNA, 16 bp, synthetic construct
  source 1..16: mol_type = other DNA
atggtcagcacagcct

SEQ ID NO: 21698 - DNA, 15 bp, synthetic construct
  source 1..15: mol_type = other DNA
atggtcagcacagcc

SEQ ID NO: 21699 - DNA, 14 bp, synthetic construct
  source 1..14: mol_type = other DNA
atggtcagcacagc

SEQ ID NO: 21700 - DNA, 13 bp, synthetic construct
  source 1..13: mol_type = other DNA
atggtcagcacag

SEQ ID NO: 21701 - DNA, 12 bp, synthetic construct
  source 1..12: mol_type = other DNA
atggtcagcaca

SEQ ID NO: 21702 - DNA, 11 bp, synthetic construct
  source 1..11: mol_type = other DNA
atggtcagcac

SEQ ID NO: 21703 - DNA, 10 bp, synthetic construct
  source 1..10: mol_type = other DNA
atggtcagca

SEQ ID NO: 21704-21705 - skipped (2 entries)

SEQ ID NO: 21706 - DNA, 17 bp, synthetic construct
  source 1..17: mol_type = other DNA
atggtcagcacagcctt

SEQ ID NO: 21707 - DNA, 16 bp, synthetic construct
  source 1..16: mol_type = other DNA
atggtcagcacagcct

SEQ ID NO: 21708 - DNA, 15 bp, synthetic construct
  source 1..15: mol_type = other DNA
atggtcagcacagcc

SEQ ID NO: 21709 - DNA, 14 bp, synthetic construct
  source 1..14: mol_type = other DNA
atggtcagcacagc

SEQ ID NO: 21710 - DNA, 13 bp, synthetic construct
  source 1..13: mol_type = other DNA
atggtcagcacag

SEQ ID NO: 21711 - DNA, 12 bp, synthetic construct
  source 1..12: mol_type = other DNA
atggtcagcaca

SEQ ID NO: 21712 - DNA, 11 bp, synthetic construct
  source 1..11: mol_type = other DNA
atggtcagcac

SEQ ID NO: 21713 - DNA, 10 bp, synthetic construct
  source 1..10: mol_type = other DNA
atggtcagca

SEQ ID NO: 21714-22435 - skipped (722 entries)

SEQ ID NO: 22436 - DNA, 35 bp, synthetic construct
  source 1..35: mol_type = other DNA
acatggccccagcagcttcagtccctttctcgtcg

SEQ ID NO: 22437 - DNA, 35 bp, synthetic construct; identical to SEQ ID NO: 22436
  source 1..35: mol_type = other DNA

SEQ ID NO: 22438 - DNA, 35 bp, synthetic construct; identical to SEQ ID NO: 22436
  source 1..35: mol_type = other DNA

SEQ ID NO: 22439 - DNA, 35 bp, synthetic construct; identical to SEQ ID NO: 22436
  source 1..35: mol_type = other DNA

SEQ ID NO: 22440 - DNA, 35 bp, synthetic construct; identical to SEQ ID NO: 22436
  source 1..35: mol_type = other DNA

SEQ ID NO: 22441 - DNA, 35 bp, synthetic construct; identical to SEQ ID NO: 22436
  source 1..35: mol_type = other DNA

SEQ ID NO: 22442 - DNA, 35 bp, synthetic construct; identical to SEQ ID NO: 22436
  source 1..35: mol_type = other DNA

SEQ ID NO: 22443 - DNA, 35 bp, synthetic construct; identical to SEQ ID NO: 22436
  source 1..35: mol_type = other DNA

SEQ ID NO: 22444 - DNA, 35 bp, synthetic construct; identical to SEQ ID NO: 22436
  source 1..35: mol_type = other DNA

SEQ ID NO: 22445 - DNA, 35 bp, synthetic construct; identical to SEQ ID NO: 22436
  source 1..35: mol_type = other DNA

SEQ ID NO: 22446 - DNA, 30 bp, synthetic construct
  source 1..30: mol_type = other DNA
gccccagcagcttcagtccctttctcgtcg

SEQ ID NO: 22447 - DNA, 30 bp, synthetic construct; identical to SEQ ID NO: 22446
  source 1..30: mol_type = other DNA

SEQ ID NO: 22448 - DNA, 30 bp, synthetic construct; identical to SEQ ID NO: 22446
  source 1..30: mol_type = other DNA

SEQ ID NO: 22449 - DNA, 30 bp, synthetic construct; identical to SEQ ID NO: 22446
  source 1..30: mol_type = other DNA

SEQ ID NO: 22450 - DNA, 30 bp, synthetic construct; identical to SEQ ID NO: 22446
  source 1..30: mol_type = other DNA

SEQ ID NO: 22451 - DNA, 30 bp, synthetic construct; identical to SEQ ID NO: 22446
  source 1..30: mol_type = other DNA

SEQ ID NO: 22452 - DNA, 30 bp, synthetic construct; identical to SEQ ID NO: 22446
  source 1..30: mol_type = other DNA

SEQ ID NO: 22453 - DNA, 30 bp, synthetic construct; identical to SEQ ID NO: 22446
  source 1..30: mol_type = other DNA

SEQ ID NO: 22454 - DNA, 30 bp, synthetic construct; identical to SEQ ID NO: 22446
  source 1..30: mol_type = other DNA

SEQ ID NO: 22455 - DNA, 30 bp, synthetic construct; identical to SEQ ID NO: 22446
  source 1..30: mol_type = other DNA

SEQ ID NO: 22456 - DNA, 25 bp, synthetic construct
  source 1..25: mol_type = other DNA
agcagcttcagtccctttctcgtcg

SEQ ID NO: 22457 - DNA, 25 bp, synthetic construct
  source 1..25: mol_type = other DNA
agcagcttcagtccctttctcgtcg

SEQ ID NO: 22458 - DNA, 25 bp, synthetic construct
  source 1..25: mol_type = other DNA
agcagcttcagtccctttctcgtcg

SEQ ID NO: 22459 - DNA, 25 bp, synthetic construct
  source 1..25: mol_type = other DNA
agcagcttcagtccctttctcgtcg

SEQ ID NO: 22460 - DNA, 25 bp, synthetic construct
  source 1..25: mol_type = other DNA
agcagcttcagtccctttctcgtcg

SEQ ID NO: 22461 - DNA, 25 bp, synthetic construct
  source 1..25: mol_type = other DNA
agcagcttcagtccctttctcgtcg

SEQ ID NO: 22462 - DNA, 25 bp, synthetic construct
  source 1..25: mol_type = other DNA
agcagcttcagtccctttctcgtcg

SEQ ID NO: 22463 - DNA, 25 bp, synthetic construct
  source 1..25: mol_type = other DNA
agcagcttcagtccctttctcgtcg

SEQ ID NO: 22464 - DNA, 25 bp, synthetic construct
  source 1..25: mol_type = other DNA
agcagcttcagtccctttctcgtcg

SEQ ID NO: 22465 - DNA, 25 bp, synthetic construct
  source 1..25: mol_type = other DNA
agcagcttcagtccctttctcgtcg

SEQ ID NO: 22466 - DNA, 19 bp, synthetic construct
  source 1..19: mol_type = other DNA
ttcagtccctttctcgtcg

SEQ ID NO: 22467 - DNA, 19 bp, synthetic construct
  source 1..19: mol_type = other DNA
ttcagtccctttctcgtcg

SEQ ID NO: 22468 - DNA, 19 bp, synthetic construct
  source 1..19: mol_type = other DNA
ttcagtccctttctcgtcg

SEQ ID NO: 22469 - DNA, 19 bp, synthetic construct
  source 1..19: mol_type = other DNA
ttcagtccctttctcgtcg

SEQ ID NO: 22470 - DNA, 19 bp, synthetic construct
  source 1..19: mol_type = other DNA
ttcagtccctttctcgtcg

SEQ ID NO: 22471 - DNA, 19 bp, synthetic construct
  source 1..19: mol_type = other DNA
ttcagtccctttctcgtcg

SEQ ID NO: 22472 - DNA, 19 bp, synthetic construct
  source 1..19: mol_type = other DNA
ttcagtccctttctcgtcg

SEQ ID NO: 22473 - DNA, 19 bp, synthetic construct
  source 1..19: mol_type = other DNA
ttcagtccctttctcgtcg

SEQ ID NO: 22474 - DNA, 19 bp, synthetic construct
  source 1..19: mol_type = other DNA
ttcagtccctttctcgtcg

SEQ ID NO: 22475 - DNA, 19 bp, synthetic construct
  source 1..19: mol_type = other DNA
ttcagtccctttctcgtcg

SEQ ID NO: 22476 - DNA, 16 bp, synthetic construct
  source 1..16: mol_type = other DNA
agtccctttctcgtcg

SEQ ID NO: 22477 - DNA, 16 bp, synthetic construct
  source 1..16: mol_type = other DNA
agtccctttctcgtcg

SEQ ID NO: 22478 - DNA, 16 bp, synthetic construct
  source 1..16: mol_type = other DNA
agtccctttctcgtcg

SEQ ID NO: 22479 - DNA, 16 bp, synthetic construct
  source 1..16: mol_type = other DNA
agtccctttctcgtcg

SEQ ID NO: 22480 - DNA, 16 bp, synthetic construct
  source 1..16: mol_type = other DNA
agtccctttctcgtcg

SEQ ID NO: 22481 - DNA, 16 bp, synthetic construct
  source 1..16: mol_type = other DNA
agtccctttctcgtcg

SEQ ID NO: 22482 - DNA, 16 bp, synthetic construct
  source 1..16: mol_type = other DNA
agtccctttctcgtcg

SEQ ID NO: 22483 - DNA, 16 bp, synthetic construct
  source 1..16: mol_type = other DNA
agtccctttctcgtcg

SEQ ID NO: 22484 - DNA, 16 bp, synthetic construct
  source 1..16: mol_type = other DNA
agtccctttctcgtcg

SEQ ID NO: 22485 - DNA, 16 bp, synthetic construct
  source 1..16: mol_type = other DNA
agtccctttctcgtcg

SEQ ID NO: 22486 - DNA, 14 bp, synthetic construct
  source 1..14: mol_type = other DNA
tccctttctcgtcg

SEQ ID NO: 22487 - DNA, 14 bp, synthetic construct
  source 1..14: mol_type = other DNA
tccctttctcgtcg

SEQ ID NO: 22488 - DNA, 14 bp, synthetic construct
  source 1..14: mol_type = other DNA
tccctttctcgtcg

SEQ ID NO: 22489 - DNA, 14 bp, synthetic construct
  source 1..14: mol_type = other DNA
tccctttctcgtcg

SEQ ID NO: 22490 - DNA, 14 bp, synthetic construct
  source 1..14: mol_type = other DNA
tccctttctcgtcg

SEQ ID NO: 22491 - DNA, 14 bp, synthetic construct
  source 1..14: mol_type = other DNA
tccctttctcgtcg

SEQ ID NO: 22492 - DNA, 14 bp, synthetic construct
  source 1..14: mol_type = other DNA
tccctttctcgtcg

SEQ ID NO: 22493 - DNA, 14 bp, synthetic construct
  source 1..14: mol_type = other DNA
tccctttctcgtcg

SEQ ID NO: 22494 - DNA, 14 bp, synthetic construct
  source 1..14: mol_type = other DNA
tccctttctcgtcg

SEQ ID NO: 22495 - DNA, 14 bp, synthetic construct
  source 1..14: mol_type = other DNA
tccctttctcgtcg

SEQ ID NO: 22496 - DNA, 12 bp, synthetic construct
  source 1..12: mol_type = other DNA
cctttctcgtcg

SEQ ID NO: 22497 - DNA, 12 bp, synthetic construct
  source 1..12: mol_type = other DNA
cctttctcgtcg

SEQ ID NO: 22498 - DNA, 12 bp, synthetic construct
  source 1..12: mol_type = other DNA
cctttctcgtcg

SEQ ID NO: 22499 - DNA, 12 bp, synthetic construct
  source 1..12: mol_type = other DNA
cctttctcgtcg

SEQ ID NO: 22500 - DNA, 12 bp, synthetic construct
  source 1..12: mol_type = other DNA
cctttctcgtcg

SEQ ID NO: 22501 - DNA, 12 bp, synthetic construct
  source 1..12: mol_type = other DNA
cctttctcgtcg

SEQ ID NO: 22502 - DNA, 12 bp, synthetic construct
  source 1..12: mol_type = other DNA
cctttctcgtcg

SEQ ID NO: 22503 - DNA, 12 bp, synthetic construct
  source 1..12: mol_type = other DNA
cctttctcgtcg

SEQ ID NO: 22504 - DNA, 12 bp, synthetic construct
  source 1..12: mol_type = other DNA
cctttctcgtcg

SEQ ID NO: 22505 - DNA, 12 bp, synthetic construct
  source 1..12: mol_type = other DNA
cctttctcgtcg

SEQ ID NO: 22506 - DNA, 10 bp, synthetic construct
  source 1..10: mol_type = other DNA
tttctcgtcg

SEQ ID NO: 22507 - DNA, 10 bp, synthetic construct
  source 1..10: mol_type = other DNA
tttctcgtcg

SEQ ID NO: 22508 - DNA, 10 bp, synthetic construct
  source 1..10: mol_type = other DNA
tttctcgtcg

SEQ ID NO: 22509 - DNA, 10 bp, synthetic construct
  source 1..10: mol_type = other DNA
tttctcgtcg

SEQ ID NO: 22510 - DNA, 10 bp, synthetic construct
  source 1..10: mol_type = other DNA
tttctcgtcg

SEQ ID NO: 22511 - DNA, 10 bp, synthetic construct
  source 1..10: mol_type = other DNA
tttctcgtcg

SEQ ID NO: 22512 - DNA, 10 bp, synthetic construct
  source 1..10: mol_type = other DNA
tttctcgtcg

SEQ ID NO: 22513 - DNA, 10 bp, synthetic construct
  source 1..10: mol_type = other DNA
tttctcgtcg

SEQ ID NO: 22514 - DNA, 10 bp, synthetic construct
  source 1..10: mol_type = other DNA
tttctcgtcg

SEQ ID NO: 22515 - DNA, 10 bp, synthetic construct
  source 1..10: mol_type = other DNA
tttctcgtcg

SEQ ID NO: 22516-23245 - skipped (730 entries)

SEQ ID NO: 23246 - DNA, 156 bp, synthetic construct
  source 1..156: mol_type = other DNA
aaggctgtgctgaccatcgagtctttgtactctggtaccagaagctacaaagataaggcttcatgccgaaatcaacaccctgtcattttatggcagggtgttttacatggccccagcagcttcagtccctttctcgtcgatggtcagcacagcctt

SEQ ID NO: 23247 - DNA, 155 bp, synthetic construct
  source 1..155: mol_type = other DNA
aaggctgtgctgaccatcgagtctttgtactctggtaccagaagctacaaagataaggcttcatgccgaaatcaacaccctgtcattttatggcagggtgttttacatggccccagcagcttcagtccctttctcgtcgatggtcagcacagcct

SEQ ID NO: 23248 - DNA, 154 bp, synthetic construct
  source 1..154: mol_type = other DNA
aaggctgtgctgaccatcgagtctttgtactctggtaccagaagctacaaagataaggcttcatgccgaaatcaacaccctgtcattttatggcagggtgttttacatggccccagcagcttcagtccctttctcgtcgatggtcagcacagcc

SEQ ID NO: 23249 - DNA, 153 bp, synthetic construct
  source 1..153: mol_type = other DNA
aaggctgtgctgaccatcgagtctttgtactctggtaccagaagctacaaagataaggcttcatgccgaaatcaacaccctgtcattttatggcagggtgttttacatggccccagcagcttcagtccctttctcgtcgatggtcagcacagc

SEQ ID NO: 23250 - DNA, 152 bp, synthetic construct
  source 1..152: mol_type = other DNA
aaggctgtgctgaccatcgagtctttgtactctggtaccagaagctacaaagataaggcttcatgccgaaatcaacaccctgtcattttatggcagggtgttttacatggccccagcagcttcagtccctttctcgtcgatggtcagcacag

SEQ ID NO: 23251 - DNA, 151 bp, synthetic construct
  source 1..151: mol_type = other DNA
aaggctgtgctgaccatcgagtctttgtactctggtaccagaagctacaaagataaggcttcatgccgaaatcaacaccctgtcattttatggcagggtgttttacatggccccagcagcttcagtccctttctcgtcgatggtcagcaca

SEQ ID NO: 23252 - DNA, 150 bp, synthetic construct
  source 1..150: mol_type = other DNA
aaggctgtgctgaccatcgagtctttgtactctggtaccagaagctacaaagataaggcttcatgccgaaatcaacaccctgtcattttatggcagggtgttttacatggccccagcagcttcagtccctttctcgtcgatggtcagcac

SEQ ID NO: 23253 - DNA, 149 bp, synthetic construct
  source 1..149: mol_type = other DNA
aaggctgtgctgaccatcgagtctttgtactctggtaccagaagctacaaagataaggcttcatgccgaaatcaacaccctgtcattttatggcagggtgttttacatggccccagcagcttcagtccctttctcgtcgatggtcagca

SEQ ID NO: 23254 - DNA, 148 bp, synthetic construct
  source 1..148: mol_type = other DNA
aaggctgtgctgaccatcgagtctttgtactctggtaccagaagctacaaagataaggcttcatgccgaaatcaacaccctgtcattttatggcagggtgttttacatggccccagcagcttcagtccctttctcgtcgatggtcagc

SEQ ID NO: 23255 - DNA, 147 bp, synthetic construct
  source 1..147: mol_type = other DNA
aaggctgtgctgaccatcgagtctttgtactctggtaccagaagctacaaagataaggcttcatgccgaaatcaacaccctgtcattttatggcagggtgttttacatggccccagcagcttcagtccctttctcgtcgatggtcag

SEQ ID NO: 23256 - DNA, 151 bp, synthetic construct
  source 1..151: mol_type = other DNA
aaggctgtgctgaccatcgagtctttgtactctggtaccagaagctacaaagataaggcttcatgccgaaatcaacaccctgtcattttatggcagggtgttttgccccagcagcttcagtccctttctcgtcgatggtcagcacagcctt

SEQ ID NO: 23257 - DNA, 150 bp, synthetic construct
  source 1..150: mol_type = other DNA
aaggctgtgctgaccatcgagtctttgtactctggtaccagaagctacaaagataaggcttcatgccgaaatcaacaccctgtcattttatggcagggtgttttgccccagcagcttcagtccctttctcgtcgatggtcagcacagcct

SEQ ID NO: 23258 - DNA, 149 bp, synthetic construct
  source 1..149: mol_type = other DNA
aaggctgtgctgaccatcgagtctttgtactctggtaccagaagctacaaagataaggcttcatgccgaaatcaacaccctgtcattttatggcagggtgttttgccccagcagcttcagtccctttctcgtcgatggtcagcacagcc

SEQ ID NO: 23259 - DNA, 148 bp, synthetic construct
  source 1..148: mol_type = other DNA
aaggctgtgctgaccatcgagtctttgtactctggtaccagaagctacaaagataaggcttcatgccgaaatcaacaccctgtcattttatggcagggtgttttgccccagcagcttcagtccctttctcgtcgatggtcagcacagc

SEQ ID NO: 23260 - DNA, 147 bp, synthetic construct
  source 1..147: mol_type = other DNA
aaggctgtgctgaccatcgagtctttgtactctggtaccagaagctacaaagataaggcttcatgccgaaatcaacaccctgtcattttatggcagggtgttttgccccagcagcttcagtccctttctcgtcgatggtcagcacag

SEQ ID NO: 23261 - DNA, 146 bp, synthetic construct; identical to SEQ ID NO: 19099
  source 1..146: mol_type = other DNA

SEQ ID NO: 23262 - DNA, 145 bp, synthetic construct
  source 1..145: mol_type = other DNA
aaggctgtgctgaccatcgagtctttgtactctggtaccagaagctacaaagataaggcttcatgccgaaatcaacaccctgtcattttatggcagggtgttttgccccagcagcttcagtccctttctcgtcgatggtcagcac

SEQ ID NO: 23263 - DNA, 144 bp, synthetic construct
  source 1..144: mol_type = other DNA
aaggctgtgctgaccatcgagtctttgtactctggtaccagaagctacaaagataaggcttcatgccgaaatcaacaccctgtcattttatggcagggtgttttgccccagcagcttcagtccctttctcgtcgatggtcagca

SEQ ID NO: 23264 - DNA, 143 bp, synthetic construct
  source 1..143: mol_type = other DNA
aaggctgtgctgaccatcgagtctttgtactctggtaccagaagctacaaagataaggcttcatgccgaaatcaacaccctgtcattttatggcagggtgttttgccccagcagcttcagtccctttctcgtcgatggtcagc

SEQ ID NO: 23265 - DNA, 142 bp, synthetic construct
  source 1..142: mol_type = other DNA
aaggctgtgctgaccatcgagtctttgtactctggtaccagaagctacaaagataaggcttcatgccgaaatcaacaccctgtcattttatggcagggtgttttgccccagcagcttcagtccctttctcgtcgatggtcag

SEQ ID NO: 23266 - DNA, 146 bp, synthetic construct
  source 1..146: mol_type = other DNA
aaggctgtgctgaccatcgagtctttgtactctggtaccagaagctacaaagataaggcttcatgccgaaatcaacaccctgtcattttatggcagggtgttttagcagcttcagtccctttctcgtcgatggtcagcacagcctt

SEQ ID NO: 23267 - DNA, 145 bp, synthetic construct
  source 1..145: mol_type = other DNA
aaggctgtgctgaccatcgagtctttgtactctggtaccagaagctacaaagataaggcttcatgccgaaatcaacaccctgtcattttatggcagggtgttttagcagcttcagtccctttctcgtcgatggtcagcacagcct

SEQ ID NO: 23268 - DNA, 144 bp, synthetic construct
  source 1..144: mol_type = other DNA
aaggctgtgctgaccatcgagtctttgtactctggtaccagaagctacaaagataaggcttcatgccgaaatcaacaccctgtcattttatggcagggtgttttagcagcttcagtccctttctcgtcgatggtcagcacagcc

SEQ ID NO: 23269 - DNA, 143 bp, synthetic construct
  source 1..143: mol_type = other DNA
aaggctgtgctgaccatcgagtctttgtactctggtaccagaagctacaaagataaggcttcatgccgaaatcaacaccctgtcattttatggcagggtgttttagcagcttcagtccctttctcgtcgatggtcagcacagc

SEQ ID NO: 23270 - DNA, 142 bp, synthetic construct
  source 1..142: mol_type = other DNA
aaggctgtgctgaccatcgagtctttgtactctggtaccagaagctacaaagataaggcttcatgccgaaatcaacaccctgtcattttatggcagggtgttttagcagcttcagtccctttctcgtcgatggtcagcacag

SEQ ID NO: 23271 - DNA, 141 bp, synthetic construct
  source 1..141: mol_type = other DNA
aaggctgtgctgaccatcgagtctttgtactctggtaccagaagctacaaagataaggcttcatgccgaaatcaacaccctgtcattttatggcagggtgttttagcagcttcagtccctttctcgtcgatggtcagcaca

SEQ ID NO: 23272 - DNA, 140 bp, synthetic construct
  source 1..140: mol_type = other DNA
aaggctgtgctgaccatcgagtctttgtactctggtaccagaagctacaaagataaggcttcatgccgaaatcaacaccctgtcattttatggcagggtgttttagcagcttcagtccctttctcgtcgatggtcagcac

SEQ ID NO: 23273 - DNA, 139 bp, synthetic construct
  source 1..139: mol_type = other DNA
aaggctgtgctgaccatcgagtctttgtactctggtaccagaagctacaaagataaggcttcatgccgaaatcaacaccctgtcattttatggcagggtgttttagcagcttcagtccctttctcgtcgatggtcagca

SEQ ID NO: 23274 - DNA, 138 bp, synthetic construct
  source 1..138: mol_type = other DNA
aaggctgtgctgaccatcgagtctttgtactctggtaccagaagctacaaagataaggcttcatgccgaaatcaacaccctgtcattttatggcagggtgttttagcagcttcagtccctttctcgtcgatggtcagc

SEQ ID NO: 23275 - DNA, 137 bp, synthetic construct
  source 1..137: mol_type = other DNA
aaggctgtgctgaccatcgagtctttgtactctggtaccagaagctacaaagataaggcttcatgccgaaatcaacaccctgtcattttatggcagggtgttttagcagcttcagtccctttctcgtcgatggtcag

SEQ ID NO: 23276 - DNA, 140 bp, synthetic construct
  source 1..140: mol_type = other DNA
aaggctgtgctgaccatcgagtctttgtactctggtaccagaagctacaaagataaggcttcatgccgaaatcaacaccctgtcattttatggcagggtgttttttcagtccctttctcgtcgatggtcagcacagcctt

SEQ ID NO: 23277 - DNA, 139 bp, synthetic construct
  source 1..139: mol_type = other DNA
aaggctgtgctgaccatcgagtctttgtactctggtaccagaagctacaaagataaggcttcatgccgaaatcaacaccctgtcattttatggcagggtgttttttcagtccctttctcgtcgatggtcagcacagcct

SEQ ID NO: 23278 - DNA, 138 bp, synthetic construct
  source 1..138: mol_type = other DNA
aaggctgtgctgaccatcgagtctttgtactctggtaccagaagctacaaagataaggcttcatgccgaaatcaacaccctgtcattttatggcagggtgttttttcagtccctttctcgtcgatggtcagcacagcc

SEQ ID NO: 23279 - DNA, 137 bp, synthetic construct
  source 1..137: mol_type = other DNA
aaggctgtgctgaccatcgagtctttgtactctggtaccagaagctacaaagataaggcttcatgccgaaatcaacaccctgtcattttatggcagggtgttttttcagtccctttctcgtcgatggtcagcacagc

SEQ ID NO: 23280 - DNA, 136 bp, synthetic construct
  source 1..136: mol_type = other DNA
aaggctgtgctgaccatcgagtctttgtactctggtaccagaagctacaaagataaggcttcatgccgaaatcaacaccctgtcattttatggcagggtgttttttcagtccctttctcgtcgatggtcagcacag

SEQ ID NO: 23281 - DNA, 135 bp, synthetic construct
  source 1..135: mol_type = other DNA
aaggctgtgctgaccatcgagtctttgtactctggtaccagaagctacaaagataaggcttcatgccgaaatcaacaccctgtcattttatggcagggtgttttttcagtccctttctcgtcgatggtcagcaca

SEQ ID NO: 23282 - DNA, 134 bp, synthetic construct
  source 1..134: mol_type = other DNA
aaggctgtgctgaccatcgagtctttgtactctggtaccagaagctacaaagataaggcttcatgccgaaatcaacaccctgtcattttatggcagggtgttttttcagtccctttctcgtcgatggtcagcac

SEQ ID NO: 23283 - DNA, 133 bp, synthetic construct
  source 1..133: mol_type = other DNA
aaggctgtgctgaccatcgagtctttgtactctggtaccagaagctacaaagataaggcttcatgccgaaatcaacaccctgtcattttatggcagggtgttttttcagtccctttctcgtcgatggtcagca

SEQ ID NO: 23284 - DNA, 132 bp, synthetic construct
  source 1..132: mol_type = other DNA
aaggctgtgctgaccatcgagtctttgtactctggtaccagaagctacaaagataaggcttcatgccgaaatcaacaccctgtcattttatggcagggtgttttttcagtccctttctcgtcgatggtcagc

SEQ ID NO: 23285 - DNA, 131 bp, synthetic construct
  source 1..131: mol_type = other DNA
aaggctgtgctgaccatcgagtctttgtactctggtaccagaagctacaaagataaggcttcatgccgaaatcaacaccctgtcattttatggcagggtgttttttcagtccctttctcgtcgatggtcag

SEQ ID NO: 23286 - DNA, 137 bp, synthetic construct
  source 1..137: mol_type = other DNA
aaggctgtgctgaccatcgagtctttgtactctggtaccagaagctacaaagataaggcttcatgccgaaatcaacaccctgtcattttatggcagggtgttttagtccctttctcgtcgatggtcagcacagcctt

SEQ ID NO: 23287 - DNA, 136 bp, synthetic construct
  source 1..136: mol_type = other DNA
aaggctgtgctgaccatcgagtctttgtactctggtaccagaagctacaaagataaggcttcatgccgaaatcaacaccctgtcattttatggcagggtgttttagtccctttctcgtcgatggtcagcacagcct

SEQ ID NO: 23288 - DNA, 135 bp, synthetic construct
  source 1..135: mol_type = other DNA
aaggctgtgctgaccatcgagtctttgtactctggtaccagaagctacaaagataaggcttcatgccgaaatcaacaccctgtcattttatggcagggtgttttagtccctttctcgtcgatggtcagcacagcc

SEQ ID NO: 23289 - DNA, 134 bp, synthetic construct
  source 1..134: mol_type = other DNA
aaggctgtgctgaccatcgagtctttgtactctggtaccagaagctacaaagataaggcttcatgccgaaatcaacaccctgtcattttatggcagggtgttttagtccctttctcgtcgatggtcagcacagc

SEQ ID NO: 23290 - DNA, 133 bp, synthetic construct
  source 1..133: mol_type = other DNA
aaggctgtgctgaccatcgagtctttgtactctggtaccagaagctacaaagataaggcttcatgccgaaatcaacaccctgtcattttatggcagggtgttttagtccctttctcgtcgatggtcagcacag

SEQ ID NO: 23291 - DNA, 132 bp, synthetic construct
  source 1..132: mol_type = other DNA
aaggctgtgctgaccatcgagtctttgtactctggtaccagaagctacaaagataaggcttcatgccgaaatcaacaccctgtcattttatggcagggtgttttagtccctttctcgtcgatggtcagcaca

SEQ ID NO: 23292 - DNA, 131 bp, synthetic construct
  source 1..131: mol_type = other DNA
aaggctgtgctgaccatcgagtctttgtactctggtaccagaagctacaaagataaggcttcatgccgaaatcaacaccctgtcattttatggcagggtgttttagtccctttctcgtcgatggtcagcac

SEQ ID NO: 23293 - DNA, 130 bp, synthetic construct
  source 1..130: mol_type = other DNA
aaggctgtgctgaccatcgagtctttgtactctggtaccagaagctacaaagataaggcttcatgccgaaatcaacaccctgtcattttatggcagggtgttttagtccctttctcgtcgatggtcagca

SEQ ID NO: 23294 - DNA, 129 bp, synthetic construct
  source 1..129: mol_type = other DNA
aaggctgtgctgaccatcgagtctttgtactctggtaccagaagctacaaagataaggcttcatgccgaaatcaacaccctgtcattttatggcagggtgttttagtccctttctcgtcgatggtcagc

SEQ ID NO: 23295 - DNA, 128 bp, synthetic construct
  source 1..128: mol_type = other DNA
aaggctgtgctgaccatcgagtctttgtactctggtaccagaagctacaaagataaggcttcatgccgaaatcaacaccctgtcattttatggcagggtgttttagtccctttctcgtcgatggtcag

SEQ ID NO: 23296 - DNA, 135 bp, synthetic construct
  source 1..135: mol_type = other DNA
aaggctgtgctgaccatcgagtctttgtactctggtaccagaagctacaaagataaggcttcatgccgaaatcaacaccctgtcattttatggcagggtgtttttccctttctcgtcgatggtcagcacagcctt

SEQ ID NO: 23297 - DNA, 134 bp, synthetic construct
  source 1..134: mol_type = other DNA
aaggctgtgctgaccatcgagtctttgtactctggtaccagaagctacaaagataaggcttcatgccgaaatcaacaccctgtcattttatggcagggtgtttttccctttctcgtcgatggtcagcacagcct

SEQ ID NO: 23298 - DNA, 133 bp, synthetic construct
  source 1..133: mol_type = other DNA
aaggctgtgctgaccatcgagtctttgtactctggtaccagaagctacaaagataaggcttcatgccgaaatcaacaccctgtcattttatggcagggtgtttttccctttctcgtcgatggtcagcacagcc

SEQ ID NO: 23299 - DNA, 132 bp, synthetic construct
  source 1..132: mol_type = other DNA
aaggctgtgctgaccatcgagtctttgtactctggtaccagaagctacaaagataaggcttcatgccgaaatcaacaccctgtcattttatggcagggtgtttttccctttctcgtcgatggtcagcacagc

SEQ ID NO: 23300 - DNA, 131 bp, synthetic construct
  source 1..131: mol_type = other DNA
aaggctgtgctgaccatcgagtctttgtactctggtaccagaagctacaaagataaggcttcatgccgaaatcaacaccctgtcattttatggcagggtgtttttccctttctcgtcgatggtcagcacag

SEQ ID NO: 23301 - DNA, 130 bp, synthetic construct
  source 1..130: mol_type = other DNA
aaggctgtgctgaccatcgagtctttgtactctggtaccagaagctacaaagataaggcttcatgccgaaatcaacaccctgtcattttatggcagggtgtttttccctttctcgtcgatggtcagcaca

SEQ ID NO: 23302 - DNA, 129 bp, synthetic construct
  source 1..129: mol_type = other DNA
aaggctgtgctgaccatcgagtctttgtactctggtaccagaagctacaaagataaggcttcatgccgaaatcaacaccctgtcattttatggcagggtgtttttccctttctcgtcgatggtcagcac

SEQ ID NO: 23303 - DNA, 128 bp, synthetic construct
  source 1..128: mol_type = other DNA
aaggctgtgctgaccatcgagtctttgtactctggtaccagaagctacaaagataaggcttcatgccgaaatcaacaccctgtcattttatggcagggtgtttttccctttctcgtcgatggtcagca

SEQ ID NO: 23304 - DNA, 127 bp, synthetic construct
  source 1..127: mol_type = other DNA
aaggctgtgctgaccatcgagtctttgtactctggtaccagaagctacaaagataaggcttcatgccgaaatcaacaccctgtcattttatggcagggtgtttttccctttctcgtcgatggtcagc

SEQ ID NO: 23305 - DNA, 126 bp, synthetic construct
  source 1..126: mol_type = other DNA
aaggctgtgctgaccatcgagtctttgtactctggtaccagaagctacaaagataaggcttcatgccgaaatcaacaccctgtcattttatggcagggtgtttttccctttctcgtcgatggtcag

SEQ ID NO: 23306 - DNA, 133 bp, synthetic construct
  source 1..133: mol_type = other DNA
aaggctgtgctgaccatcgagtctttgtactctggtaccagaagctacaaagataaggcttcatgccgaaatcaacaccctgtcattttatggcagggtgttttcctttctcgtcgatggtcagcacagcctt

SEQ ID NO: 23307 - DNA, 132 bp, synthetic construct
  source 1..132: mol_type = other DNA
aaggctgtgctgaccatcgagtctttgtactctggtaccagaagctacaaagataaggcttcatgccgaaatcaacaccctgtcattttatggcagggtgttttcctttctcgtcgatggtcagcacagcct

SEQ ID NO: 23308 - DNA, 131 bp, synthetic construct
  source 1..131: mol_type = other DNA
aaggctgtgctgaccatcgagtctttgtactctggtaccagaagctacaaagataaggcttcatgccgaaatcaacaccctgtcattttatggcagggtgttttcctttctcgtcgatggtcagcacagcc

SEQ ID NO: 23309 - DNA, 130 bp, synthetic construct
  source 1..130: mol_type = other DNA
aaggctgtgctgaccatcgagtctttgtactctggtaccagaagctacaaagataaggcttcatgccgaaatcaacaccctgtcattttatggcagggtgttttcctttctcgtcgatggtcagcacagc

SEQ ID NO: 23310 - DNA, 129 bp, synthetic construct
  source 1..129: mol_type = other DNA
aaggctgtgctgaccatcgagtctttgtactctggtaccagaagctacaaagataaggcttcatgccgaaatcaacaccctgtcattttatggcagggtgttttcctttctcgtcgatggtcagcacag

SEQ ID NO: 23311 - DNA, 128 bp, synthetic construct
  source 1..128: mol_type = other DNA
aaggctgtgctgaccatcgagtctttgtactctggtaccagaagctacaaagataaggcttcatgccgaaatcaacaccctgtcattttatggcagggtgttttcctttctcgtcgatggtcagcaca

SEQ ID NO: 23312 - DNA, 127 bp, synthetic construct
  source 1..127: mol_type = other DNA
aaggctgtgctgaccatcgagtctttgtactctggtaccagaagctacaaagataaggcttcatgccgaaatcaacaccctgtcattttatggcagggtgttttcctttctcgtcgatggtcagcac

SEQ ID NO: 23313 - DNA, 126 bp, synthetic construct
  source 1..126: mol_type = other DNA
aaggctgtgctgaccatcgagtctttgtactctggtaccagaagctacaaagataaggcttcatgccgaaatcaacaccctgtcattttatggcagggtgttttcctttctcgtcgatggtcagca

SEQ ID NO: 23314 - DNA, 125 bp, synthetic construct
  source 1..125: mol_type = other DNA
aaggctgtgctgaccatcgagtctttgtactctggtaccagaagctacaaagataaggcttcatgccgaaatcaacaccctgtcattttatggcagggtgttttcctttctcgtcgatggtcagc

SEQ ID NO: 23315 - DNA, 124 bp, synthetic construct
  source 1..124: mol_type = other DNA
aaggctgtgctgaccatcgagtctttgtactctggtaccagaagctacaaagataaggcttcatgccgaaatcaacaccctgtcattttatggcagggtgttttcctttctcgtcgatggtcag

SEQ ID NO: 23316 - DNA, 131 bp, synthetic construct
  source 1..131: mol_type = other DNA
aaggctgtgctgaccatcgagtctttgtactctggtaccagaagctacaaagataaggcttcatgccgaaatcaacaccctgtcattttatggcagggtgtttttttctcgtcgatggtcagcacagcctt

SEQ ID NO: 23317 - DNA, 130 bp, synthetic construct
  source 1..130: mol_type = other DNA
aaggctgtgctgaccatcgagtctttgtactctggtaccagaagctacaaagataaggcttcatgccgaaatcaacaccctgtcattttatggcagggtgtttttttctcgtcgatggtcagcacagcct

SEQ ID NO: 23318 - DNA, 129 bp, synthetic construct
  source 1..129: mol_type = other DNA
aaggctgtgctgaccatcgagtctttgtactctggtaccagaagctacaaagataaggcttcatgccgaaatcaacaccctgtcattttatggcagggtgtttttttctcgtcgatggtcagcacagcc

SEQ ID NO: 23319 - DNA, 128 bp, synthetic construct
  source 1..128: mol_type = other DNA
aaggctgtgctgaccatcgagtctttgtactctggtaccagaagctacaaagataaggcttcatgccgaaatcaacaccctgtcattttatggcagggtgtttttttctcgtcgatggtcagcacagc

SEQ ID NO: 23320 - DNA, 127 bp, synthetic construct
  source 1..127: mol_type = other DNA
aaggctgtgctgaccatcgagtctttgtactctggtaccagaagctacaaagataaggcttcatgccgaaatcaacaccctgtcattttatggcagggtgtttttttctcgtcgatggtcagcacag

SEQ ID NO: 23321 - DNA, 126 bp, synthetic construct
  source 1..126: mol_type = other DNA
aaggctgtgctgaccatcgagtctttgtactctggtaccagaagctacaaagataaggcttcatgccgaaatcaacaccctgtcattttatggcagggtgtttttttctcgtcgatggtcagcaca

SEQ ID NO: 23322 - DNA, 125 bp, synthetic construct
  source 1..125: mol_type = other DNA
aaggctgtgctgaccatcgagtctttgtactctggtaccagaagctacaaagataaggcttcatgccgaaatcaacaccctgtcattttatggcagggtgtttttttctcgtcgatggtcagcac

SEQ ID NO: 23323 - DNA, 124 bp, synthetic construct
  source 1..124: mol_type = other DNA
aaggctgtgctgaccatcgagtctttgtactctggtaccagaagctacaaagataaggcttcatgccgaaatcaacaccctgtcattttatggcagggtgtttttttctcgtcgatggtcagca

SEQ ID NO: 23324 - DNA, 123 bp, synthetic construct
  source 1..123: mol_type = other DNA
aaggctgtgctgaccatcgagtctttgtactctggtaccagaagctacaaagataaggcttcatgccgaaatcaacaccctgtcattttatggcagggtgtttttttctcgtcgatggtcagc

SEQ ID NO: 23325 - DNA, 122 bp, synthetic construct
  source 1..122: mol_type = other DNA
aaggctgtgctgaccatcgagtctttgtactctggtaccagaagctacaaagataaggcttcatgccgaaatcaacaccctgtcattttatggcagggtgtttttttctcgtcgatggtcag

SEQ ID NO: 23326 - DNA, 129 bp, synthetic construct
  source 1..129: mol_type = other DNA
aaggctgtgctgaccatcgagtctttgtactctggtaccagaagctacaaagataaggcttcatgccgaaatcaacaccctgtcattttatggcagggtgtttttctcgtcgatggtcagcacagcctt

SEQ ID NO: 23327 - DNA, 128 bp, synthetic construct
  source 1..128: mol_type = other DNA
aaggctgtgctgaccatcgagtctttgtactctggtaccagaagctacaaagataaggcttcatgccgaaatcaacaccctgtcattttatggcagggtgtttttctcgtcgatggtcagcacagcct

SEQ ID NO: 23328 - DNA, 127 bp, synthetic construct
  source 1..127: mol_type = other DNA
aaggctgtgctgaccatcgagtctttgtactctggtaccagaagctacaaagataaggcttcatgccgaaatcaacaccctgtcattttatggcagggtgtttttctcgtcgatggtcagcacagcc

SEQ ID NO: 23329 - DNA, 126 bp, synthetic construct
  source 1..126: mol_type = other DNA
aaggctgtgctgaccatcgagtctttgtactctggtaccagaagctacaaagataaggcttcatgccgaaatcaacaccctgtcattttatggcagggtgtttttctcgtcgatggtcagcacagc

SEQ ID NO: 23330 - DNA, 125 bp, synthetic construct
  source 1..125: mol_type = other DNA
aaggctgtgctgaccatcgagtctttgtactctggtaccagaagctacaaagataaggcttcatgccgaaatcaacaccctgtcattttatggcagggtgtttttctcgtcgatggtcagcacag

SEQ ID NO: 23331 - DNA, 124 bp, synthetic construct
  source 1..124: mol_type = other DNA
aaggctgtgctgaccatcgagtctttgtactctggtaccagaagctacaaagataaggcttcatgccgaaatcaacaccctgtcattttatggcagggtgtttttctcgtcgatggtcagcaca

SEQ ID NO: 23332 - DNA, 123 bp, synthetic construct
  source 1..123: mol_type = other DNA
aaggctgtgctgaccatcgagtctttgtactctggtaccagaagctacaaagataaggcttcatgccgaaatcaacaccctgtcattttatggcagggtgtttttctcgtcgatggtcagcac

SEQ ID NO: 23333 - DNA, 122 bp, synthetic construct
  source 1..122: mol_type = other DNA
aaggctgtgctgaccatcgagtctttgtactctggtaccagaagctacaaagataaggcttcatgccgaaatcaacaccctgtcattttatggcagggtgtttttctcgtcgatggtcagca

SEQ ID NO: 23334 - DNA, 121 bp, synthetic construct
  source 1..121: mol_type = other DNA
aaggctgtgctgaccatcgagtctttgtactctggtaccagaagctacaaagataaggcttcatgccgaaatcaacaccctgtcattttatggcagggtgtttttctcgtcgatggtcagc

SEQ ID NO: 23335 - DNA, 120 bp, synthetic construct
  source 1..120: mol_type = other DNA
aaggctgtgctgaccatcgagtctttgtactctggtaccagaagctacaaagataaggcttcatgccgaaatcaacaccctgtcattttatggcagggtgtttttctcgtcgatggtcag

SEQ ID NO: 23336-23816 - skipped (481 entries)

SEQ ID NO: 23817 - protein, 1120 aa, synthetic construct
SDLVLGLDIGIGSVGVGILNKVTGEIIHKNSRIFPAAQAENNLVRRTNRQGRRLARRKKHRRVRLNRLFEESGLITDFTKISINLNPYQLRVKGLTDELSNEELFIALKNMVKHRGISYLDDASDDGNSSVGDYAQIVKENSKQLETKTPGQIQLERYQTYGQLRGDFTVEKDGKKHRLINVFPTSAYRSEALRILQTQQEFNPQITDEFINRYLEILTGKRKYYHGPGNEKSRTDYGRYRTSGETLDNIFGILIGKCTFYPDEFRAAKASYTAQEFNLLNDLNNLTVPTETKKLSKEQKNQIINYVKNEKAMGPAKLFKYIAKLLSCDVADIKGYRIDKSGKAEIHTFEAYRKMKTLETLDIEQMDRETLDKLAYVLTLNTEREGIQEALEHEFADGSFSQKQVDELVQFRKANSSIFGKGWHNFSVKLMMELIPELYETSEEQMTILTRLGKQKTTSSSNKTKYIDEKLLTEEIYNPVVAKSVRQAIKIVNAAIKEYGDFDNIVIEMARETNEDDEKKAIQKIQKANKDEKDAAMLKAANQYNGKAELPHSVFHGHKQLATKIRLWHQQGERCLYTGKTISIHDLINNSNQFEVDHILPLSITFDDSLANKVLVYATANQEKGQRTPYQALDSMDDAWSFRELKAFVRESKTLSNKKKEYLLTEEDISKFDVRKKFIERNLVDTRYASRVVLNALQEHFRAHKIDTKVSVVRGQFTSQLRRHWGIEKTRDTYHHHAVDALIIAASSQLNLWKKQKNTLVSYSEDQLLDIETGELISDDEYKESVFKAPYQHFVDTLKSKEFEDSILFSYQVDSKFNRKISDATIYATRQAKVGKDKADETYVLGKIKDIYTQDGYDAFMKIYKKDKSKFLMYRHDPQTFEKVIEPILENYPNKQINEKGKEVPCNPFLKYKEEHGYIRKYSKKGNGPEIKSLKYYDSKLGNHIDITPKDSNNKVVLQSVSPWRADVYFNKTTGKYEILGLKYADLQFEKGTGTYKISQEKYNDIKKKEGVDSDSEFKFTLYKNDLLLVKDTETKEQQLFRFLSRTMPKQKHYVELKPYDKQKFEGGEALIKVLGNVANSGQCKKGLGKSNISIYKVRTDVLGNQHIIKNEGDKPKLDF

SEQ ID NO: 23818 - protein, 1120 aa, synthetic construct
SDLVLGLDIGIGSVGVGILNKVTGEIIHKNSRIFPAAQAENNLVRRTNRQGRRLARRKKHRRVRLNRLFEESGLITDFTKISINLNPYQLRVKGLTDELSNEELFIALKNMVKHRGISYLDDASDDGNSSVGDYAQIVKENSKQLETKTPGQIQLERYQTYGQLRGDFTVEKDGKKHRLINVFPTSAYRSEALRILQTQQEFNPQITDEFINRYLEILTGKRKYYHGPGNEKSRTDYGRYRTSGETLDNIFGILIGKCTFYPDEFRAAKASYTAQEFNLLNDLNNLTVPTETKKLSKEQKNQIINYVKNEKAMGPAKLFKYIAKLLSCDVADIKGYRIDKSGKAEIHTFEAYRKMKTLETLDIEQMDRETLDKLAYVLTLNTEREGIQEALEHEFADGSFSQKQVDELVQFRKANSSIFGKGWHNFSVKLMMELIPELYETSEEQMTILTRLGKQKTTSSSNKTKYIDEKLLTEEIYNPVVAKSVRQAIKIVNAAIKEYGDFDNIVIEMARETNEDDEKKAIQKIQKANKDEKDAAMLKAANQYNGKAELPHSVFHGHKQLATKIRLWHQQGERCLYTGKTISIHDLINNSNQFEVDHILPLSITFDDSLANKVLVYATAAQEKGQRTPYQALDSMDDAWSFRELKAFVRESKTLSNKKKEYLLTEEDISKFDVRKKFIERNLVDTRYASRVVLNALQEHFRAHKIDTKVSVVRGQFTSQLRRHWGIEKTRDTYHHHAVDALIIAASSQLNLWKKQKNTLVSYSEDQLLDIETGELISDDEYKESVFKAPYQHFVDTLKSKEFEDSILFSYQVDSKFNRKISDATIYATRQAKVGKDKADETYVLGKIKDIYTQDGYDAFMKIYKKDKSKFLMYRHDPQTFEKVIEPILENYPNKQINEKGKEVPCNPFLKYKEEHGYIRKYSKKGNGPEIKSLKYYDSKLGNHIDITPKDSNNKVVLQSVSPWRADVYFNKTTGKYEILGLKYADLQFEKGTGTYKISQEKYNDIKKKEGVDSDSEFKFTLYKNDLLLVKDTETKEQQLFRFLSRTMPKQKHYVELKPYDKQKFEGGEALIKVLGNVANSGQCKKGLGKSNISIYKVRTDVLGNQHIIKNEGDKPKLDF

SEQ ID NO: 23819-24338 - skipped (520 entries)

SEQ ID NO: 24339 - RNA, 156 nt, synthetic construct
  source 1..156: mol_type = other RNA
  modified_base 1: mod_base = OTHER; note = 2'-O-methyl modified nucleotide with phosphorothioate linkage
  modified_base 2: mod_base = OTHER; note = 2'-O-methyl modified nucleotide with phosphorothioate linkage
  modified_base 3: mod_base = OTHER; note = 2'-O-methyl modified nucleotide with phosphorothioate linkage
  modified_base 153: mod_base = OTHER; note = Nucleotide with phosphorothioate linkage
  modified_base 154: mod_base = OTHER; note = 2'-O-methyl modified nucleotide with phosphorothioate linkage
  modified_base 155: mod_base = OTHER; note = 2'-O-methyl modified nucleotide with phosphorothioate linkage
  modified_base 156: mod_base = OTHER; note = 2'-O-methyl modified nucleotide
aaggctgtgctgaccatcgagtctttgtactctggtaccagaagctacaaagataaggcttcatgccgaaatcaacaccctgtcattttatggcagggtgttttacatggccccagcagcttcagtccctttctcgtcgatggtcagcacagcctt

SEQ ID NO: 24340 - RNA, 155 nt, synthetic construct
  source 1..155: mol_type = other RNA
  modified_base 1: mod_base = OTHER; note = 2'-O-methyl modified nucleotide with phosphorothioate linkage
  modified_base 2: mod_base = OTHER; note = 2'-O-methyl modified nucleotide with phosphorothioate linkage
  modified_base 3: mod_base = OTHER; note = 2'-O-methyl modified nucleotide with phosphorothioate linkage
  modified_base 152: mod_base = OTHER; note = Nucleotide with phosphorothioate linkage
  modified_base 153: mod_base = OTHER; note = 2'-O-methyl modified nucleotide with phosphorothioate linkage
  modified_base 154: mod_base = OTHER; note = 2'-O-methyl modified nucleotide with phosphorothioate linkage
  modified_base 155: mod_base = OTHER; note = 2'-O-methyl modified nucleotide
aaggctgtgctgaccatcgagtctttgtactctggtaccagaagctacaaagataaggcttcatgccgaaatcaacaccctgtcattttatggcagggtgttttacatggccccagcagcttcagtccctttctcgtcgatggtcagcacagcct

SEQ ID NO: 24341 - RNA, 154 nt, synthetic construct
  source 1..154: mol_type = other RNA
  modified_base 1: mod_base = OTHER; note = 2'-O-methyl modified nucleotide with phosphorothioate linkage
  modified_base 2: mod_base = OTHER; note = 2'-O-methyl modified nucleotide with phosphorothioate linkage
  modified_base 3: mod_base = OTHER; note = 2'-O-methyl modified nucleotide with phosphorothioate linkage
  modified_base 151: mod_base = OTHER; note = Nucleotide with phosphorothioate linkage
  modified_base 152: mod_base = OTHER; note = 2'-O-methyl modified nucleotide with phosphorothioate linkage
  modified_base 153: mod_base = OTHER; note = 2'-O-methyl modified nucleotide with phosphorothioate linkage
  modified_base 154: mod_base = OTHER; note = 2'-O-methyl modified nucleotide
aaggctgtgctgaccatcgagtctttgtactctggtaccagaagctacaaagataaggcttcatgccgaaatcaacaccctgtcattttatggcagggtgttttacatggccccagcagcttcagtccctttctcgtcgatggtcagcacagcc

SEQ ID NO: 24342 - RNA, 153 nt, synthetic construct
  source 1..153: mol_type = other RNA
  modified_base 1: mod_base = OTHER; note = 2'-O-methyl modified nucleotide with phosphorothioate linkage
  modified_base 2: mod_base = OTHER; note = 2'-O-methyl modified nucleotide with phosphorothioate linkage
  modified_base 3: mod_base = OTHER; note = 2'-O-methyl modified nucleotide with phosphorothioate linkage
  modified_base 150: mod_base = OTHER; note = Nucleotide with phosphorothioate linkage
  modified_base 151: mod_base = OTHER; note = 2'-O-methyl modified nucleotide with phosphorothioate linkage
  modified_base 152: mod_base = OTHER; note = 2'-O-methyl modified nucleotide with phosphorothioate linkage
  modified_base 153: mod_base = OTHER; note = 2'-O-methyl modified nucleotide
aaggctgtgctgaccatcgagtctttgtactctggtaccagaagctacaaagataaggcttcatgccgaaatcaacaccctgtcattttatggcagggtgttttacatggccccagcagcttcagtccctttctcgtcgatggtcagcacagc

SEQ ID NO: 24343 - RNA, 152 nt, synthetic construct
  source 1..152: mol_type = other RNA
  modified_base 1: mod_base = OTHER; note = 2'-O-methyl modified nucleotide with phosphorothioate linkage
  modified_base 2: mod_base = OTHER; note = 2'-O-methyl modified nucleotide with phosphorothioate linkage
  modified_base 3: mod_base = OTHER; note = 2'-O-methyl modified nucleotide with phosphorothioate linkage
  modified_base 149: mod_base = OTHER; note = Nucleotide with phosphorothioate linkage
  modified_base 150: mod_base = OTHER; note = 2'-O-methyl modified nucleotide with phosphorothioate linkage
  modified_base 151: mod_base = OTHER; note = 2'-O-methyl modified nucleotide with phosphorothioate linkage
  modified_base 152: mod_base = OTHER; note = 2'-O-methyl modified nucleotide
aaggctgtgctgaccatcgagtctttgtactctggtaccagaagctacaaagataaggcttcatgccgaaatcaacaccctgtcattttatggcagggtgttttacatggccccagcagcttcagtccctttctcgtcgatggtcagcacag

SEQ ID NO: 24344 - RNA, 151 nt, synthetic construct
  source 1..151: mol_type = other RNA
  modified_base 1: mod_base = OTHER; note = 2'-O-methyl modified nucleotide with phosphorothioate linkage
  modified_base 2: mod_base = OTHER; note = 2'-O-methyl modified nucleotide with phosphorothioate linkage
  modified_base 3: mod_base = OTHER; note = 2'-O-methyl modified nucleotide with phosphorothioate linkage
  modified_base 148: mod_base = OTHER; note = Nucleotide with phosphorothioate linkage
  modified_base 149: mod_base = OTHER; note = 2'-O-methyl modified nucleotide with phosphorothioate linkage
  modified_base 150: mod_base = OTHER; note = 2'-O-methyl modified nucleotide with phosphorothioate linkage
  modified_base 151: mod_base = OTHER; note = 2'-O-methyl modified nucleotide
aaggctgtgctgaccatcgagtctttgtactctggtaccagaagctacaaagataaggcttcatgccgaaatcaacaccctgtcattttatggcagggtgttttacatggccccagcagcttcagtccctttctcgtcgatggtcagcaca

SEQ ID NO: 24345 - RNA, 150 nt, synthetic construct
  source 1..150: mol_type = other RNA
  modified_base 1: mod_base = OTHER; note = 2'-O-methyl modified nucleotide with phosphorothioate linkage
  modified_base 2: mod_base = OTHER; note = 2'-O-methyl modified nucleotide with phosphorothioate linkage
  modified_base 3: mod_base = OTHER; note = 2'-O-methyl modified nucleotide with phosphorothioate linkage
  modified_base 147: mod_base = OTHER; note = Nucleotide with phosphorothioate linkage
  modified_base 148: mod_base = OTHER; note = 2'-O-methyl modified nucleotide with phosphorothioate linkage
  modified_base 149: mod_base = OTHER; note = 2'-O-methyl modified nucleotide with phosphorothioate linkage
  modified_base 150: mod_base = OTHER; note = 2'-O-methyl modified nucleotide
aaggctgtgctgaccatcgagtctttgtactctggtaccagaagctacaaagataaggcttcatgccgaaatcaacaccctgtcattttatggcagggtgttttacatggccccagcagcttcagtccctttctcgtcgatggtcagcac

SEQ ID NO: 24346 - RNA, 149 nt, synthetic construct
  source 1..149: mol_type = other RNA
  modified_base 1: mod_base = OTHER; note = 2'-O-methyl modified nucleotide with phosphorothioate linkage
  modified_base 2: mod_base = OTHER; note = 2'-O-methyl modified nucleotide with phosphorothioate linkage
  modified_base 3: mod_base = OTHER; note = 2'-O-methyl modified nucleotide with phosphorothioate linkage
  modified_base 146: mod_base = OTHER; note = Nucleotide with phosphorothioate linkage
  modified_base 147: mod_base = OTHER; note = 2'-O-methyl modified nucleotide with phosphorothioate linkage
  modified_base 148: mod_base = OTHER; note = 2'-O-methyl modified nucleotide with phosphorothioate linkage
  modified_base 149: mod_base = OTHER; note = 2'-O-methyl modified nucleotide
aaggctgtgctgaccatcgagtctttgtactctggtaccagaagctacaaagataaggcttcatgccgaaatcaacaccctgtcattttatggcagggtgttttacatggccccagcagcttcagtccctttctcgtcgatggtcagca

SEQ ID NO: 24347 - RNA, 148 nt, synthetic construct
  source 1..148: mol_type = other RNA
  modified_base 1: mod_base = OTHER; note = 2'-O-methyl modified nucleotide with phosphorothioate linkage
  modified_base 2: mod_base = OTHER; note = 2'-O-methyl modified nucleotide with phosphorothioate linkage
  modified_base 3: mod_base = OTHER; note = 2'-O-methyl modified nucleotide with phosphorothioate linkage
  modified_base 145: mod_base = OTHER; note = Nucleotide with phosphorothioate linkage
  modified_base 146: mod_base = OTHER; note = 2'-O-methyl modified nucleotide with phosphorothioate linkage
  modified_base 147: mod_base = OTHER; note = 2'-O-methyl modified nucleotide with phosphorothioate linkage
  modified_base 148: mod_base = OTHER; note = 2'-O-methyl modified nucleotide
aaggctgtgctgaccatcgagtctttgtactctggtaccagaagctacaaagataaggcttcatgccgaaatcaacaccctgtcattttatggcagggtgttttacatggccccagcagcttcagtccctttctcgtcgatggtcagc

SEQ ID NO: 24348 - RNA, 147 nt, synthetic construct
  source 1..147: mol_type = other RNA
  modified_base 1: mod_base = OTHER; note = 2'-O-methyl modified nucleotide with phosphorothioate linkage
  modified_base 2: mod_base = OTHER; note = 2'-O-methyl modified nucleotide with phosphorothioate linkage
  modified_base 3: mod_base = OTHER; note = 2'-O-methyl modified nucleotide with phosphorothioate linkage
  modified_base 144: mod_base = OTHER; note = Nucleotide with phosphorothioate linkage
  modified_base 145: mod_base = OTHER; note = 2'-O-methyl modified nucleotide with phosphorothioate linkage
  modified_base 146: mod_base = OTHER; note = 2'-O-methyl modified nucleotide with phosphorothioate linkage
  modified_base 147: mod_base = OTHER; note = 2'-O-methyl modified nucleotide
aaggctgtgctgaccatcgagtctttgtactctggtaccagaagctacaaagataaggcttcatgccgaaatcaacaccctgtcattttatggcagggtgttttacatggccccagcagcttcagtccctttctcgtcgatggtcag

SEQ ID NO: 24349 - RNA, 151 nt, synthetic construct
  source 1..151: mol_type = other RNA
  modified_base 1: mod_base = OTHER; note = 2'-O-methyl modified nucleotide with phosphorothioate linkage
  modified_base 2: mod_base = OTHER; note = 2'-O-methyl modified nucleotide with phosphorothioate linkage
  modified_base 3: mod_base = OTHER; note = 2'-O-methyl modified nucleotide with phosphorothioate linkage
  modified_base 148: mod_base = OTHER; note = Nucleotide with phosphorothioate linkage
  modified_base 149: mod_base = OTHER; note = 2'-O-methyl modified nucleotide with phosphorothioate linkage
  modified_base 150: mod_base = OTHER; note = 2'-O-methyl modified nucleotide with phosphorothioate linkage
  modified_base 151: mod_base = OTHER; note = 2'-O-methyl modified nucleotide
aaggctgtgctgaccatcgagtctttgtactctggtaccagaagctacaaagataaggcttcatgccgaaatcaacaccctgtcattttatggcagggtgttttgccccagcagcttcagtccctttctcgtcgatggtcagcacagcctt

SEQ ID NO: 24350 - RNA, 150 nt, synthetic construct
  source 1..150: mol_type = other RNA
  modified_base 1: mod_base = OTHER; note = 2'-O-methyl modified nucleotide with phosphorothioate linkage
  modified_base 2: mod_base = OTHER; note = 2'-O-methyl modified nucleotide with phosphorothioate linkage
  modified_base 3: mod_base = OTHER; note = 2'-O-methyl modified nucleotide with phosphorothioate linkage
  modified_base 147: mod_base = OTHER; note = Nucleotide with phosphorothioate linkage
  modified_base 148: mod_base = OTHER; note = 2'-O-methyl modified nucleotide with phosphorothioate linkage
  modified_base 149: mod_base = OTHER; note = 2'-O-methyl modified nucleotide with phosphorothioate linkage
  modified_base 150: mod_base = OTHER; note = 2'-O-methyl modified nucleotide
aaggctgtgctgaccatcgagtctttgtactctggtaccagaagctacaaagataaggcttcatgccgaaatcaacaccctgtcattttatggcagggtgttttgccccagcagcttcagtccctttctcgtcgatggtcagcacagcct

SEQ ID NO: 24351 - RNA, 149 nt, synthetic construct
  source 1..149: mol_type = other RNA
  modified_base 1: mod_base = OTHER; note = 2'-O-methyl modified nucleotide with phosphorothioate linkage
  modified_base 2: mod_base = OTHER; note = 2'-O-methyl modified nucleotide with phosphorothioate linkage
  modified_base 3: mod_base = OTHER; note = 2'-O-methyl modified nucleotide with phosphorothioate linkage
  modified_base 146: mod_base = OTHER; note = Nucleotide with phosphorothioate linkage
  modified_base 147: mod_base = OTHER; note = 2'-O-methyl modified nucleotide with phosphorothioate linkage
  modified_base 148: mod_base = OTHER; note = 2'-O-methyl modified nucleotide with phosphorothioate linkage
  modified_base 149: mod_base = OTHER; note = 2'-O-methyl modified nucleotide
aaggctgtgctgaccatcgagtctttgtactctggtaccagaagctacaaagataaggcttcatgccgaaatcaacaccctgtcattttatggcagggtgttttgccccagcagcttcagtccctttctcgtcgatggtcagcacagcc

SEQ ID NO: 24352 - RNA, 148 nt, synthetic construct
  source 1..148: mol_type = other RNA
  modified_base 1: mod_base = OTHER; note = 2'-O-methyl modified nucleotide with phosphorothioate linkage
  modified_base 2: mod_base = OTHER; note = 2'-O-methyl modified nucleotide with phosphorothioate linkage
  modified_base 3: mod_base = OTHER; note = 2'-O-methyl modified nucleotide with phosphorothioate linkage
  modified_base 145: mod_base = OTHER; note = Nucleotide with phosphorothioate linkage
  modified_base 146: mod_base = OTHER; note = 2'-O-methyl modified nucleotide with phosphorothioate linkage
  modified_base 147: mod_base = OTHER; note = 2'-O-methyl modified nucleotide with phosphorothioate linkage
  modified_base 148: mod_base = OTHER; note = 2'-O-methyl modified nucleotide
aaggctgtgctgaccatcgagtctttgtactctggtaccagaagctacaaagataaggcttcatgccgaaatcaacaccctgtcattttatggcagggtgttttgccccagcagcttcagtccctttctcgtcgatggtcagcacagc

SEQ ID NO: 24353 - RNA, 147 nt, synthetic construct
  source 1..147: mol_type = other RNA
  modified_base 1: mod_base = OTHER; note = 2'-O-methyl modified nucleotide with phosphorothioate linkage
  modified_base 2: mod_base = OTHER; note = 2'-O-methyl modified nucleotide with phosphorothioate linkage
  modified_base 3: mod_base = OTHER; note = 2'-O-methyl modified nucleotide with phosphorothioate linkage
  modified_base 144: mod_base = OTHER; note = Nucleotide with phosphorothioate linkage
  modified_base 145: mod_base = OTHER; note = 2'-O-methyl modified nucleotide with phosphorothioate linkage
  modified_base 146: mod_base = OTHER; note = 2'-O-methyl modified nucleotide with phosphorothioate linkage
  modified_base 147: mod_base = OTHER; note = 2'-O-methyl modified nucleotide
aaggctgtgctgaccatcgagtctttgtactctggtaccagaagctacaaagataaggcttcatgccgaaatcaacaccctgtcattttatggcagggtgttttgccccagcagcttcagtccctttctcgtcgatggtcagcacag

SEQ ID NO: 24354 - RNA, 146 nt, synthetic construct
  source 1..146: mol_type = other RNA
  modified_base 1: mod_base = OTHER; note = 2'-O-methyl modified nucleotide with phosphorothioate linkage
  modified_base 2: mod_base = OTHER; note = 2'-O-methyl modified nucleotide with phosphorothioate linkage
  modified_base 3: mod_base = OTHER; note = 2'-O-methyl modified nucleotide with phosphorothioate linkage
  modified_base 143: mod_base = OTHER; note = Nucleotide with phosphorothioate linkage
  modified_base 144: mod_base = OTHER; note = 2'-O-methyl modified nucleotide with phosphorothioate linkage
  modified_base 145: mod_base = OTHER; note = 2'-O-methyl modified nucleotide with phosphorothioate linkage
  modified_base 146: mod_base = OTHER; note = 2'-O-methyl modified nucleotide
aaggctgtgctgaccatcgagtctttgtactctggtaccagaagctacaaagataaggcttcatgccgaaatcaacaccctgtcattttatggcagggtgttttgccccagcagcttcagtccctttctcgtcgatggtcagcaca

SEQ ID NO: 24355 - RNA, 145 nt, synthetic construct
  source 1..145: mol_type = other RNA
  modified_base 1: mod_base = OTHER; note = 2'-O-methyl modified nucleotide with phosphorothioate linkage
  modified_base 2: mod_base = OTHER; note = 2'-O-methyl modified nucleotide with phosphorothioate linkage
  modified_base 3: mod_base = OTHER; note = 2'-O-methyl modified nucleotide with phosphorothioate linkage
  modified_base 142: mod_base = OTHER; note = Nucleotide with phosphorothioate linkage
  modified_base 143: mod_base = OTHER; note = 2'-O-methyl modified nucleotide with phosphorothioate linkage
  modified_base 144: mod_base = OTHER; note = 2'-O-methyl modified nucleotide with phosphorothioate linkage
  modified_base 145: mod_base = OTHER; note = 2'-O-methyl modified nucleotide
aaggctgtgctgaccatcgagtctttgtactctggtaccagaagctacaaagataaggcttcatgccgaaatcaacaccctgtcattttatggcagggtgttttgccccagcagcttcagtccctttctcgtcgatggtcagcac

SEQ ID NO: 24356 - RNA, 144 nt, synthetic construct
  source 1..144: mol_type = other RNA
  modified_base 1: mod_base = OTHER; note = 2'-O-methyl modified nucleotide with phosphorothioate linkage
  modified_base 2: mod_base = OTHER; note = 2'-O-methyl modified nucleotide with phosphorothioate linkage
  modified_base 3: mod_base = OTHER; note = 2'-O-methyl modified nucleotide with phosphorothioate linkage
  modified_base 141: mod_base = OTHER; note = Nucleotide with phosphorothioate linkage
  modified_base 142: mod_base = OTHER; note = 2'-O-methyl modified nucleotide with phosphorothioate linkage
  modified_base 143: mod_base = OTHER; note = 2'-O-methyl modified nucleotide with phosphorothioate linkage
  modified_base 144: mod_base = OTHER; note = 2'-O-methyl modified nucleotide
aaggctgtgctgaccatcgagtctttgtactctggtaccagaagctacaaagataaggcttcatgccgaaatcaacaccctgtcattttatggcagggtgttttgccccagcagcttcagtccctttctcgtcgatggtcagca

SEQ ID NO: 24357 - RNA, 143 nt, synthetic construct
  source 1..143: mol_type = other RNA
  modified_base 1: mod_base = OTHER; note = 2'-O-methyl modified nucleotide with phosphorothioate linkage
  modified_base 2: mod_base = OTHER; note = 2'-O-methyl modified nucleotide with phosphorothioate linkage
  modified_base 3: mod_base = OTHER; note = 2'-O-methyl modified nucleotide with phosphorothioate linkage
  modified_base 140: mod_base = OTHER; note = Nucleotide with phosphorothioate linkage
  modified_base 141: mod_base = OTHER; note = 2'-O-methyl modified nucleotide with phosphorothioate linkage
  modified_base 142: mod_base = OTHER; note = 2'-O-methyl modified nucleotide with phosphorothioate linkage
  modified_base 143: mod_base = OTHER; note = 2'-O-methyl modified nucleotide
aaggctgtgctgaccatcgagtctttgtactctggtaccagaagctacaaagataaggcttcatgccgaaatcaacaccctgtcattttatggcagggtgttttgccccagcagcttcagtccctttctcgtcgatggtcagc

SEQ ID NO: 24358 - RNA, 142 nt, synthetic construct
  source 1..142: mol_type = other RNA
  modified_base 1: mod_base = OTHER; note = 2'-O-methyl modified nucleotide with phosphorothioate linkage
  modified_base 2: mod_base = OTHER; note = 2'-O-methyl modified nucleotide with phosphorothioate linkage
  modified_base 3: mod_base = OTHER; note = 2'-O-methyl modified nucleotide with phosphorothioate linkage
  modified_base 139: mod_base = OTHER; note = Nucleotide with phosphorothioate linkage
  modified_base 140: mod_base = OTHER; note = 2'-O-methyl modified nucleotide with phosphorothioate linkage
  modified_base 141: mod_base = OTHER; note = 2'-O-methyl modified nucleotide with phosphorothioate linkage
  modified_base 142: mod_base = OTHER; note = 2'-O-methyl modified nucleotide
aaggctgtgctgaccatcgagtctttgtactctggtaccagaagctacaaagataaggcttcatgccgaaatcaacaccctgtcattttatggcagggtgttttgccccagcagcttcagtccctttctcgtcgatggtcag

SEQ ID NO: 24359 - RNA, 146 nt, synthetic construct
  source 1..146: mol_type = other RNA
  modified_base 1: mod_base = OTHER; note = 2'-O-methyl modified nucleotide with phosphorothioate linkage
  modified_base 2: mod_base = OTHER; note = 2'-O-methyl modified nucleotide with phosphorothioate linkage
  modified_base 3: mod_base = OTHER; note = 2'-O-methyl modified nucleotide with phosphorothioate linkage
  modified_base 143: mod_base = OTHER; note = Nucleotide with phosphorothioate linkage
  modified_base 144: mod_base = OTHER; note = 2'-O-methyl modified nucleotide with phosphorothioate linkage
  modified_base 145: mod_base = OTHER; note = 2'-O-methyl modified nucleotide with phosphorothioate linkage
  modified_base 146: mod_base = OTHER; note = 2'-O-methyl modified nucleotide
aaggctgtgctgaccatcgagtctttgtactctggtaccagaagctacaaagataaggcttcatgccgaaatcaacaccctgtcattttatggcagggtgttttagcagcttcagtccctttctcgtcgatggtcagcacagcctt

SEQ ID NO: 24360 - RNA, 145 nt, synthetic construct
  source 1..145: mol_type = other RNA
  modified_base 1: mod_base = OTHER; note = 2'-O-methyl modified nucleotide with phosphorothioate linkage
  modified_base 2: mod_base = OTHER; note = 2'-O-methyl modified nucleotide with phosphorothioate linkage
  modified_base 3: mod_base = OTHER; note = 2'-O-methyl modified nucleotide with phosphorothioate linkage
  modified_base 142: mod_base = OTHER; note = Nucleotide with phosphorothioate linkage
  modified_base 143: mod_base = OTHER; note = 2'-O-methyl modified nucleotide with phosphorothioate linkage
  modified_base 144: mod_base = OTHER; note = 2'-O-methyl modified nucleotide with phosphorothioate linkage
  modified_base 145: mod_base = OTHER; note = 2'-O-methyl modified nucleotide
aaggctgtgctgaccatcgagtctttgtactctggtaccagaagctacaaagataaggcttcatgccgaaatcaacaccctgtcattttatggcagggtgttttagcagcttcagtccctttctcgtcgatggtcagcacagcct

SEQ ID NO: 24361 - RNA, 144 nt, synthetic construct
  source 1..144: mol_type = other RNA
  modified_base 1: mod_base = OTHER; note = 2'-O-methyl modified nucleotide with phosphorothioate linkage
  modified_base 2: mod_base = OTHER; note = 2'-O-methyl modified nucleotide with phosphorothioate linkage
  modified_base 3: mod_base = OTHER; note = 2'-O-methyl modified nucleotide with phosphorothioate linkage
  modified_base 141: mod_base = OTHER; note = Nucleotide with phosphorothioate linkage
  modified_base 142: mod_base = OTHER; note = 2'-O-methyl modified nucleotide with phosphorothioate linkage
  modified_base 143: mod_base = OTHER; note = 2'-O-methyl modified nucleotide with phosphorothioate linkage
  modified_base 144: mod_base = OTHER; note = 2'-O-methyl modified nucleotide
aaggctgtgctgaccatcgagtctttgtactctggtaccagaagctacaaagataaggcttcatgccgaaatcaacaccctgtcattttatggcagggtgttttagcagcttcagtccctttctcgtcgatggtcagcacagcc

SEQ ID NO: 24362 - RNA, 143 nt, synthetic construct
  source 1..143: mol_type = other RNA
  modified_base 1: mod_base = OTHER; note = 2'-O-methyl modified nucleotide with phosphorothioate linkage
  modified_base 2: mod_base = OTHER; note = 2'-O-methyl modified nucleotide with phosphorothioate linkage
  modified_base 3: mod_base = OTHER; note = 2'-O-methyl modified nucleotide with phosphorothioate linkage
  modified_base 140: mod_base = OTHER; note = Nucleotide with phosphorothioate linkage
  modified_base 141: mod_base = OTHER; note = 2'-O-methyl modified nucleotide with phosphorothioate linkage
  modified_base 142: mod_base = OTHER; note = 2'-O-methyl modified nucleotide with phosphorothioate linkage
  modified_base 143: mod_base = OTHER; note = 2'-O-methyl modified nucleotide
aaggctgtgctgaccatcgagtctttgtactctggtaccagaagctacaaagataaggcttcatgccgaaatcaacaccctgtcattttatggcagggtgttttagcagcttcagtccctttctcgtcgatggtcagcacagc

SEQ ID NO: 24363 - RNA, 142 nt, synthetic construct
  source 1..142: mol_type = other RNA
  modified_base 1: mod_base = OTHER; note = 2'-O-methyl modified nucleotide with phosphorothioate linkage
  modified_base 2: mod_base = OTHER; note = 2'-O-methyl modified nucleotide with phosphorothioate linkage
  modified_base 3: mod_base = OTHER; note = 2'-O-methyl modified nucleotide with phosphorothioate linkage
  modified_base 139: mod_base = OTHER; note = Nucleotide with phosphorothioate linkage
  modified_base 140: mod_base = OTHER; note = 2'-O-methyl modified nucleotide with phosphorothioate linkage
  modified_base 141: mod_base = OTHER; note = 2'-O-methyl modified nucleotide with phosphorothioate linkage
  modified_base 142: mod_base = OTHER; note = 2'-O-methyl modified nucleotide
aaggctgtgctgaccatcgagtctttgtactctggtaccagaagctacaaagataaggcttcatgccgaaatcaacaccctgtcattttatggcagggtgttttagcagcttcagtccctttctcgtcgatggtcagcacag

SEQ ID NO: 24364 - RNA, 141 nt, synthetic construct
  source 1..141: mol_type = other RNA
  modified_base 1: mod_base = OTHER; note = 2'-O-methyl modified nucleotide with phosphorothioate linkage
  modified_base 2: mod_base = OTHER; note = 2'-O-methyl modified nucleotide with phosphorothioate linkage
  modified_base 3: mod_base = OTHER; note = 2'-O-methyl modified nucleotide with phosphorothioate linkage
  modified_base 138: mod_base = OTHER; note = Nucleotide with phosphorothioate linkage
  modified_base 139: mod_base = OTHER; note = 2'-O-methyl modified nucleotide with phosphorothioate linkage
  modified_base 140: mod_base = OTHER; note = 2'-O-methyl modified nucleotide with phosphorothioate linkage
  modified_base 141: mod_base = OTHER; note = 2'-O-methyl modified nucleotide
aaggctgtgctgaccatcgagtctttgtactctggtaccagaagctacaaagataaggcttcatgccgaaatcaacaccctgtcattttatggcagggtgttttagcagcttcagtccctttctcgtcgatggtcagcaca

SEQ ID NO: 24365 - RNA, 140 nt, synthetic construct
  source 1..140: mol_type = other RNA
  modified_base 1: mod_base = OTHER; note = 2'-O-methyl modified nucleotide with phosphorothioate linkage
  modified_base 2: mod_base = OTHER; note = 2'-O-methyl modified nucleotide with phosphorothioate linkage
  modified_base 3: mod_base = OTHER; note = 2'-O-methyl modified nucleotide with phosphorothioate linkage
  modified_base 137: mod_base = OTHER; note = Nucleotide with phosphorothioate linkage
  modified_base 138: mod_base = OTHER; note = 2'-O-methyl modified nucleotide with phosphorothioate linkage
  modified_base 139: mod_base = OTHER; note = 2'-O-methyl modified nucleotide with phosphorothioate linkage
  modified_base 140: mod_base = OTHER; note = 2'-O-methyl modified nucleotide
aaggctgtgctgaccatcgagtctttgtactctggtaccagaagctacaaagataaggcttcatgccgaaatcaacaccctgtcattttatggcagggtgttttagcagcttcagtccctttctcgtcgatggtcagcac

SEQ ID NO: 24366 - RNA, 139 nt, synthetic construct
  source 1..139: mol_type = other RNA
  modified_base 1: mod_base = OTHER; note = 2'-O-methyl modified nucleotide with phosphorothioate linkage
  modified_base 2: mod_base = OTHER; note = 2'-O-methyl modified nucleotide with phosphorothioate linkage
  modified_base 3: mod_base = OTHER; note = 2'-O-methyl modified nucleotide with phosphorothioate linkage
  modified_base 136: mod_base = OTHER; note = Nucleotide with phosphorothioate linkage
  modified_base 137: mod_base = OTHER; note = 2'-O-methyl modified nucleotide with phosphorothioate linkage
  modified_base 138: mod_base = OTHER; note = 2'-O-methyl modified nucleotide with phosphorothioate linkage
  modified_base 139: mod_base = OTHER; note = 2'-O-methyl modified nucleotide
aaggctgtgctgaccatcgagtctttgtactctggtaccagaagctacaaagataaggcttcatgccgaaatcaacaccctgtcattttatggcagggtgttttagcagcttcagtccctttctcgtcgatggtcagca

SEQ ID NO: 24367 - RNA, 138 nt, synthetic construct
  source 1..138: mol_type = other RNA
  modified_base 1: mod_base = OTHER; note = 2'-O-methyl modified nucleotide with phosphorothioate linkage
  modified_base 2: mod_base = OTHER; note = 2'-O-methyl modified nucleotide with phosphorothioate linkage
  modified_base 3: mod_base = OTHER; note = 2'-O-methyl modified nucleotide with phosphorothioate linkage
  modified_base 135: mod_base = OTHER; note = Nucleotide with phosphorothioate linkage
  modified_base 136: mod_base = OTHER; note = 2'-O-methyl modified nucleotide with phosphorothioate linkage
  modified_base 137: mod_base = OTHER; note = 2'-O-methyl modified nucleotide with phosphorothioate linkage
  modified_base 138: mod_base = OTHER; note = 2'-O-methyl modified nucleotide
aaggctgtgctgaccatcgagtctttgtactctggtaccagaagctacaaagataaggcttcatgccgaaatcaacaccctgtcattttatggcagggtgttttagcagcttcagtccctttctcgtcgatggtcagc

SEQ ID NO: 24368 - RNA, 137 nt, synthetic construct
  source 1..137: mol_type = other RNA
  modified_base 1: mod_base = OTHER; note = 2'-O-methyl modified nucleotide with phosphorothioate linkage
  modified_base 2: mod_base = OTHER; note = 2'-O-methyl modified nucleotide with phosphorothioate linkage
  modified_base 3: mod_base = OTHER; note = 2'-O-methyl modified nucleotide with phosphorothioate linkage
  modified_base 134: mod_base = OTHER; note = Nucleotide with phosphorothioate linkage
  modified_base 135: mod_base = OTHER; note = 2'-O-methyl modified nucleotide with phosphorothioate linkage
  modified_base 136: mod_base = OTHER; note = 2'-O-methyl modified nucleotide with phosphorothioate linkage
  modified_base 137: mod_base = OTHER; note = 2'-O-methyl modified nucleotide
aaggctgtgctgaccatcgagtctttgtactctggtaccagaagctacaaagataaggcttcatgccgaaatcaacaccctgtcattttatggcagggtgttttagcagcttcagtccctttctcgtcgatggtcag

SEQ ID NO: 24369 - RNA, 140 nt, synthetic construct
  source 1..140: mol_type = other RNA
  modified_base 1: mod_base = OTHER; note = 2'-O-methyl modified nucleotide with phosphorothioate linkage
  modified_base 2: mod_base = OTHER; note = 2'-O-methyl modified nucleotide with phosphorothioate linkage
  modified_base 3: mod_base = OTHER; note = 2'-O-methyl modified nucleotide with phosphorothioate linkage
  modified_base 137: mod_base = OTHER; note = Nucleotide with phosphorothioate linkage
  modified_base 138: mod_base = OTHER; note = 2'-O-methyl modified nucleotide with phosphorothioate linkage
  modified_base 139: mod_base = OTHER; note = 2'-O-methyl modified nucleotide with phosphorothioate linkage
  modified_base 140: mod_base = OTHER; note = 2'-O-methyl modified nucleotide
aaggctgtgctgaccatcgagtctttgtactctggtaccagaagctacaaagataaggcttcatgccgaaatcaacaccctgtcattttatggcagggtgttttttcagtccctttctcgtcgatggtcagcacagcctt

SEQ ID NO: 24370 - RNA, 139 nt, synthetic construct
  source 1..139: mol_type = other RNA
  modified_base 1: mod_base = OTHER; note = 2'-O-methyl modified nucleotide with phosphorothioate linkage
  modified_base 2: mod_base = OTHER; note = 2'-O-methyl modified nucleotide with phosphorothioate linkage
  modified_base 3: mod_base = OTHER; note = 2'-O-methyl modified nucleotide with phosphorothioate linkage
  modified_base 136: mod_base = OTHER; note = Nucleotide with phosphorothioate linkage
  modified_base 137: mod_base = OTHER; note = 2'-O-methyl modified nucleotide with phosphorothioate linkage
  modified_base 138: mod_base = OTHER; note = 2'-O-methyl modified nucleotide with phosphorothioate linkage
  modified_base 139: mod_base = OTHER; note = 2'-O-methyl modified nucleotide
aaggctgtgctgaccatcgagtctttgtactctggtaccagaagctacaaagataaggcttcatgccgaaatcaacaccctgtcattttatggcagggtgttttttcagtccctttctcgtcgatggtcagcacagcct

SEQ ID NO: 24371 - RNA, 138 nt, synthetic construct
  source 1..138: mol_type = other RNA
  modified_base 1: mod_base = OTHER; note = 2'-O-methyl modified nucleotide with phosphorothioate linkage
  modified_base 2: mod_base = OTHER; note = 2'-O-methyl modified nucleotide with phosphorothioate linkage
  modified_base 3: mod_base = OTHER; note = 2'-O-methyl modified nucleotide with phosphorothioate linkage
  modified_base 135: mod_base = OTHER; note = Nucleotide with phosphorothioate linkage
  modified_base 136: mod_base = OTHER; note = 2'-O-methyl modified nucleotide with phosphorothioate linkage
  modified_base 137: mod_base = OTHER; note = 2'-O-methyl modified nucleotide with phosphorothioate linkage
  modified_base 138: mod_base = OTHER; note = 2'-O-methyl modified nucleotide
aaggctgtgctgaccatcgagtctttgtactctggtaccagaagctacaaagataaggcttcatgccgaaatcaacaccctgtcattttatggcagggtgttttttcagtccctttctcgtcgatggtcagcacagcc

SEQ ID NO: 24372 - RNA, 137 nt, synthetic construct
  source 1..137: mol_type = other RNA
  modified_base 1: mod_base = OTHER; note = 2'-O-methyl modified nucleotide with phosphorothioate linkage
  modified_base 2: mod_base = OTHER; note = 2'-O-methyl modified nucleotide with phosphorothioate linkage
  modified_base 3: mod_base = OTHER; note = 2'-O-methyl modified nucleotide with phosphorothioate linkage
  modified_base 134: mod_base = OTHER; note = Nucleotide with phosphorothioate linkage
  modified_base 135: mod_base = OTHER; note = 2'-O-methyl modified nucleotide with phosphorothioate linkage
  modified_base 136: mod_base = OTHER; note = 2'-O-methyl modified nucleotide with phosphorothioate linkage
  modified_base 137: mod_base = OTHER; note = 2'-O-methyl modified nucleotide
aaggctgtgctgaccatcgagtctttgtactctggtaccagaagctacaaagataaggcttcatgccgaaatcaacaccctgtcattttatggcagggtgttttttcagtccctttctcgtcgatggtcagcacagc

SEQ ID NO: 24373 - RNA, 136 nt, synthetic construct
  source 1..136: mol_type = other RNA
  modified_base 1: mod_base = OTHER; note = 2'-O-methyl modified nucleotide with phosphorothioate linkage
  modified_base 2: mod_base = OTHER; note = 2'-O-methyl modified nucleotide with phosphorothioate linkage
  modified_base 3: mod_base = OTHER; note = 2'-O-methyl modified nucleotide with phosphorothioate linkage
  modified_base 133: mod_base = OTHER; note = Nucleotide with phosphorothioate linkage
  modified_base 134: mod_base = OTHER; note = 2'-O-methyl modified nucleotide with phosphorothioate linkage
  modified_base 135: mod_base = OTHER; note = 2'-O-methyl modified nucleotide with phosphorothioate linkage
  modified_base 136: mod_base = OTHER; note = 2'-O-methyl modified nucleotide
aaggctgtgctgaccatcgagtctttgtactctggtaccagaagctacaaagataaggcttcatgccgaaatcaacaccctgtcattttatggcagggtgttttttcagtccctttctcgtcgatggtcagcacag

SEQ ID NO: 24374 - RNA, 135 nt, synthetic construct
  source 1..135: mol_type = other RNA
  modified_base 1: mod_base = OTHER; note = 2'-O-methyl modified nucleotide with phosphorothioate linkage
  modified_base 2: mod_base = OTHER; note = 2'-O-methyl modified nucleotide with phosphorothioate linkage
  modified_base 3: mod_base = OTHER; note = 2'-O-methyl modified nucleotide with phosphorothioate linkage
  modified_base 132: mod_base = OTHER; note = Nucleotide with phosphorothioate linkage
  modified_base 133: mod_base = OTHER; note = 2'-O-methyl modified nucleotide with phosphorothioate linkage
  modified_base 134: mod_base = OTHER; note = 2'-O-methyl modified nucleotide with phosphorothioate linkage
  modified_base 135: mod_base = OTHER; note = 2'-O-methyl modified nucleotide
aaggctgtgctgaccatcgagtctttgtactctggtaccagaagctacaaagataaggcttcatgccgaaatcaacaccctgtcattttatggcagggtgttttttcagtccctttctcgtcgatggtcagcaca

SEQ ID NO: 24375 - RNA, 134 nt, synthetic construct
  source 1..134: mol_type = other RNA
  modified_base 1: mod_base = OTHER; note = 2'-O-methyl modified nucleotide with phosphorothioate linkage
  modified_base 2: mod_base = OTHER; note = 2'-O-methyl modified nucleotide with phosphorothioate linkage
  modified_base 3: mod_base = OTHER; note = 2'-O-methyl modified nucleotide with phosphorothioate linkage
  modified_base 131: mod_base = OTHER; note = Nucleotide with phosphorothioate linkage
  modified_base 132: mod_base = OTHER; note = 2'-O-methyl modified nucleotide with phosphorothioate linkage
  modified_base 133: mod_base = OTHER; note = 2'-O-methyl modified nucleotide with phosphorothioate linkage
  modified_base 134: mod_base = OTHER; note = 2'-O-methyl modified nucleotide
aaggctgtgctgaccatcgagtctttgtactctggtaccagaagctacaaagataaggcttcatgccgaaatcaacaccctgtcattttatggcagggtgttttttcagtccctttctcgtcgatggtcagcac

SEQ ID NO: 24376 - RNA, 133 nt, synthetic construct
  source 1..133: mol_type = other RNA
  modified_base 1: mod_base = OTHER; note = 2'-O-methyl modified nucleotide with phosphorothioate linkage
  modified_base 2: mod_base = OTHER; note = 2'-O-methyl modified nucleotide with phosphorothioate linkage
  modified_base 3: mod_base = OTHER; note = 2'-O-methyl modified nucleotide with phosphorothioate linkage
  modified_base 130: mod_base = OTHER; note = Nucleotide with phosphorothioate linkage
  modified_base 131: mod_base = OTHER; note = 2'-O-methyl modified nucleotide with phosphorothioate linkage
  modified_base 132: mod_base = OTHER; note = 2'-O-methyl modified nucleotide with phosphorothioate linkage
  modified_base 133: mod_base = OTHER; note = 2'-O-methyl modified nucleotide
aaggctgtgctgaccatcgagtctttgtactctggtaccagaagctacaaagataaggcttcatgccgaaatcaacaccctgtcattttatggcagggtgttttttcagtccctttctcgtcgatggtcagca

SEQ ID NO: 24377 - RNA, 132 nt, synthetic construct
  source 1..132: mol_type = other RNA
  modified_base 1: mod_base = OTHER; note = 2'-O-methyl modified nucleotide with phosphorothioate linkage
  modified_base 2: mod_base = OTHER; note = 2'-O-methyl modified nucleotide with phosphorothioate linkage
  modified_base 3: mod_base = OTHER; note = 2'-O-methyl modified nucleotide with phosphorothioate linkage
  modified_base 129: mod_base = OTHER; note = Nucleotide with phosphorothioate linkage
  modified_base 130: mod_base = OTHER; note = 2'-O-methyl modified nucleotide with phosphorothioate linkage
  modified_base 131: mod_base = OTHER; note = 2'-O-methyl modified nucleotide with phosphorothioate linkage
  modified_base 132: mod_base = OTHER; note = 2'-O-methyl modified nucleotide
aaggctgtgctgaccatcgagtctttgtactctggtaccagaagctacaaagataaggcttcatgccgaaatcaacaccctgtcattttatggcagggtgttttttcagtccctttctcgtcgatggtcagc

SEQ ID NO: 24378 - RNA, 131 nt, synthetic construct
  source 1..131: mol_type = other RNA
  modified_base 1: mod_base = OTHER; note = 2'-O-methyl modified nucleotide with phosphorothioate linkage
  modified_base 2: mod_base = OTHER; note = 2'-O-methyl modified nucleotide with phosphorothioate linkage
  modified_base 3: mod_base = OTHER; note = 2'-O-methyl modified nucleotide with phosphorothioate linkage
  modified_base 128: mod_base = OTHER; note = Nucleotide with phosphorothioate linkage
  modified_base 129: mod_base = OTHER; note = 2'-O-methyl modified nucleotide with phosphorothioate linkage
  modified_base 130: mod_base = OTHER; note = 2'-O-methyl modified nucleotide with phosphorothioate linkage
  modified_base 131: mod_base = OTHER; note = 2'-O-methyl modified nucleotide
aaggctgtgctgaccatcgagtctttgtactctggtaccagaagctacaaagataaggcttcatgccgaaatcaacaccctgtcattttatggcagggtgttttttcagtccctttctcgtcgatggtcag

SEQ ID NO: 24379 - RNA, 137 nt, synthetic construct
  source 1..137: mol_type = other RNA
  modified_base 1: mod_base = OTHER; note = 2'-O-methyl modified nucleotide with phosphorothioate linkage
  modified_base 2: mod_base = OTHER; note = 2'-O-methyl modified nucleotide with phosphorothioate linkage
  modified_base 3: mod_base = OTHER; note = 2'-O-methyl modified nucleotide with phosphorothioate linkage
  modified_base 134: mod_base = OTHER; note = Nucleotide with phosphorothioate linkage
  modified_base 135: mod_base = OTHER; note = 2'-O-methyl modified nucleotide with phosphorothioate linkage
  modified_base 136: mod_base = OTHER; note = 2'-O-methyl modified nucleotide with phosphorothioate linkage
  modified_base 137: mod_base = OTHER; note = 2'-O-methyl modified nucleotide
aaggctgtgctgaccatcgagtctttgtactctggtaccagaagctacaaagataaggcttcatgccgaaatcaacaccctgtcattttatggcagggtgttttagtccctttctcgtcgatggtcagcacagcctt

SEQ ID NO: 24380 - RNA, 136 nt, synthetic construct
  source 1..136: mol_type = other RNA
  modified_base 1: mod_base = OTHER; note = 2'-O-methyl modified nucleotide with phosphorothioate linkage
  modified_base 2: mod_base = OTHER; note = 2'-O-methyl modified nucleotide with phosphorothioate linkage
  modified_base 3: mod_base = OTHER; note = 2'-O-methyl modified nucleotide with phosphorothioate linkage
  modified_base 133: mod_base = OTHER; note = Nucleotide with phosphorothioate linkage
  modified_base 134: mod_base = OTHER; note = 2'-O-methyl modified nucleotide with phosphorothioate linkage
  modified_base 135: mod_base = OTHER; note = 2'-O-methyl modified nucleotide with phosphorothioate linkage
  modified_base 136: mod_base = OTHER; note = 2'-O-methyl modified nucleotide
aaggctgtgctgaccatcgagtctttgtactctggtaccagaagctacaaagataaggcttcatgccgaaatcaacaccctgtcattttatggcagggtgttttagtccctttctcgtcgatggtcagcacagcct

SEQ ID NO: 24381 - RNA, 135 nt, synthetic construct
  source 1..135: mol_type = other RNA
  modified_base 1: mod_base = OTHER; note = 2'-O-methyl modified nucleotide with phosphorothioate linkage
  modified_base 2: mod_base = OTHER; note = 2'-O-methyl modified nucleotide with phosphorothioate linkage
  modified_base 3: mod_base = OTHER; note = 2'-O-methyl modified nucleotide with phosphorothioate linkage
  modified_base 132: mod_base = OTHER; note = Nucleotide with phosphorothioate linkage
  modified_base 133: mod_base = OTHER; note = 2'-O-methyl modified nucleotide with phosphorothioate linkage
  modified_base 134: mod_base = OTHER; note = 2'-O-methyl modified nucleotide with phosphorothioate linkage
  modified_base 135: mod_base = OTHER; note = 2'-O-methyl modified nucleotide
aaggctgtgctgaccatcgagtctttgtactctggtaccagaagctacaaagataaggcttcatgccgaaatcaacaccctgtcattttatggcagggtgttttagtccctttctcgtcgatggtcagcacagcc

SEQ ID NO: 24382 - RNA, 134 nt, synthetic construct
  source 1..134: mol_type = other RNA
  modified_base 1: mod_base = OTHER; note = 2'-O-methyl modified nucleotide with phosphorothioate linkage
  modified_base 2: mod_base = OTHER; note = 2'-O-methyl modified nucleotide with phosphorothioate linkage
  modified_base 3: mod_base = OTHER; note = 2'-O-methyl modified nucleotide with phosphorothioate linkage
  modified_base 131: mod_base = OTHER; note = Nucleotide with phosphorothioate linkage
  modified_base 132: mod_base = OTHER; note = 2'-O-methyl modified nucleotide with phosphorothioate linkage
  modified_base 133: mod_base = OTHER; note = 2'-O-methyl modified nucleotide with phosphorothioate linkage
  modified_base 134: mod_base = OTHER; note = 2'-O-methyl modified nucleotide
aaggctgtgctgaccatcgagtctttgtactctggtaccagaagctacaaagataaggcttcatgccgaaatcaacaccctgtcattttatggcagggtgttttagtccctttctcgtcgatggtcagcacagc

SEQ ID NO: 24383 - RNA, 133 nt, synthetic construct
  source 1..133: mol_type = other RNA
  modified_base 1: mod_base = OTHER; note = 2'-O-methyl modified nucleotide with phosphorothioate linkage
  modified_base 2: mod_base = OTHER; note = 2'-O-methyl modified nucleotide with phosphorothioate linkage
  modified_base 3: mod_base = OTHER; note = 2'-O-methyl modified nucleotide with phosphorothioate linkage
  modified_base 130: mod_base = OTHER; note = Nucleotide with phosphorothioate linkage
  modified_base 131: mod_base = OTHER; note = 2'-O-methyl modified nucleotide with phosphorothioate linkage
  modified_base 132: mod_base = OTHER; note = 2'-O-methyl modified nucleotide with phosphorothioate linkage
  modified_base 133: mod_base = OTHER; note = 2'-O-methyl modified nucleotide
aaggctgtgctgaccatcgagtctttgtactctggtaccagaagctacaaagataaggcttcatgccgaaatcaacaccctgtcattttatggcagggtgttttagtccctttctcgtcgatggtcagcacag

SEQ ID NO: 24384 - RNA, 132 nt, synthetic construct
  source 1..132: mol_type = other RNA
  modified_base 1: mod_base = OTHER; note = 2'-O-methyl modified nucleotide with phosphorothioate linkage
  modified_base 2: mod_base = OTHER; note = 2'-O-methyl modified nucleotide with phosphorothioate linkage
  modified_base 3: mod_base = OTHER; note = 2'-O-methyl modified nucleotide with phosphorothioate linkage
  modified_base 129: mod_base = OTHER; note = Nucleotide with phosphorothioate linkage
  modified_base 130: mod_base = OTHER; note = 2'-O-methyl modified nucleotide with phosphorothioate linkage
  modified_base 131: mod_base = OTHER; note = 2'-O-methyl modified nucleotide with phosphorothioate linkage
  modified_base 132: mod_base = OTHER; note = 2'-O-methyl modified nucleotide
aaggctgtgctgaccatcgagtctttgtactctggtaccagaagctacaaagataaggcttcatgccgaaatcaacaccctgtcattttatggcagggtgttttagtccctttctcgtcgatggtcagcaca

SEQ ID NO: 24385 - RNA, 131 nt, synthetic construct
  source 1..131: mol_type = other RNA
  modified_base 1: mod_base = OTHER; note = 2'-O-methyl modified nucleotide with phosphorothioate linkage
  modified_base 2: mod_base = OTHER; note = 2'-O-methyl modified nucleotide with phosphorothioate linkage
  modified_base 3: mod_base = OTHER; note = 2'-O-methyl modified nucleotide with phosphorothioate linkage
  modified_base 128: mod_base = OTHER; note = Nucleotide with phosphorothioate linkage
  modified_base 129: mod_base = OTHER; note = 2'-O-methyl modified nucleotide with phosphorothioate linkage
  modified_base 130: mod_base = OTHER; note = 2'-O-methyl modified nucleotide with phosphorothioate linkage
  modified_base 131: mod_base = OTHER; note = 2'-O-methyl modified nucleotide
aaggctgtgctgaccatcgagtctttgtactctggtaccagaagctacaaagataaggcttcatgccgaaatcaacaccctgtcattttatggcagggtgttttagtccctttctcgtcgatggtcagcac

SEQ ID NO: 24386 - RNA, 130 nt, synthetic construct
  source 1..130: mol_type = other RNA
  modified_base 1: mod_base = OTHER; note = 2'-O-methyl modified nucleotide with phosphorothioate linkage
  modified_base 2: mod_base = OTHER; note = 2'-O-methyl modified nucleotide with phosphorothioate linkage
  modified_base 3: mod_base = OTHER; note = 2'-O-methyl modified nucleotide with phosphorothioate linkage
  modified_base 127: mod_base = OTHER; note = Nucleotide with phosphorothioate linkage
  modified_base 128: mod_base = OTHER; note = 2'-O-methyl modified nucleotide with phosphorothioate linkage
  modified_base 129: mod_base = OTHER; note = 2'-O-methyl modified nucleotide with phosphorothioate linkage
  modified_base 130: mod_base = OTHER; note = 2'-O-methyl modified nucleotide
aaggctgtgctgaccatcgagtctttgtactctggtaccagaagctacaaagataaggcttcatgccgaaatcaacaccctgtcattttatggcagggtgttttagtccctttctcgtcgatggtcagca

SEQ ID NO: 24387 - RNA, 129 nt, synthetic construct
  source 1..129: mol_type = other RNA
  modified_base 1: mod_base = OTHER; note = 2'-O-methyl modified nucleotide with phosphorothioate linkage
  modified_base 2: mod_base = OTHER; note = 2'-O-methyl modified nucleotide with phosphorothioate linkage
  modified_base 3: mod_base = OTHER; note = 2'-O-methyl modified nucleotide with phosphorothioate linkage
  modified_base 126: mod_base = OTHER; note = Nucleotide with phosphorothioate linkage
  modified_base 127: mod_base = OTHER; note = 2'-O-methyl modified nucleotide with phosphorothioate linkage
  modified_base 128: mod_base = OTHER; note = 2'-O-methyl modified nucleotide with phosphorothioate linkage
  modified_base 129: mod_base = OTHER; note = 2'-O-methyl modified nucleotide
aaggctgtgctgaccatcgagtctttgtactctggtaccagaagctacaaagataaggcttcatgccgaaatcaacaccctgtcattttatggcagggtgttttagtccctttctcgtcgatggtcagc

SEQ ID NO: 24388 - RNA, 128 nt, synthetic construct
  source 1..128: mol_type = other RNA
  modified_base 1: mod_base = OTHER; note = 2'-O-methyl modified nucleotide with phosphorothioate linkage
  modified_base 2: mod_base = OTHER; note = 2'-O-methyl modified nucleotide with phosphorothioate linkage
  modified_base 3: mod_base = OTHER; note = 2'-O-methyl modified nucleotide with phosphorothioate linkage
  modified_base 125: mod_base = OTHER; note = Nucleotide with phosphorothioate linkage
  modified_base 126: mod_base = OTHER; note = 2'-O-methyl modified nucleotide with phosphorothioate linkage
  modified_base 127: mod_base = OTHER; note = 2'-O-methyl modified nucleotide with phosphorothioate linkage
  modified_base 128: mod_base = OTHER; note = 2'-O-methyl modified nucleotide
aaggctgtgctgaccatcgagtctttgtactctggtaccagaagctacaaagataaggcttcatgccgaaatcaacaccctgtcattttatggcagggtgttttagtccctttctcgtcgatggtcag

SEQ ID NO: 24389 - RNA, 135 nt, synthetic construct
  source 1..135: mol_type = other RNA
  modified_base 1: mod_base = OTHER; note = 2'-O-methyl modified nucleotide with phosphorothioate linkage
  modified_base 2: mod_base = OTHER; note = 2'-O-methyl modified nucleotide with phosphorothioate linkage
  modified_base 3: mod_base = OTHER; note = 2'-O-methyl modified nucleotide with phosphorothioate linkage
  modified_base 132: mod_base = OTHER; note = Nucleotide with phosphorothioate linkage
  modified_base 133: mod_base = OTHER; note = 2'-O-methyl modified nucleotide with phosphorothioate linkage
  modified_base 134: mod_base = OTHER; note = 2'-O-methyl modified nucleotide with phosphorothioate linkage
  modified_base 135: mod_base = OTHER; note = 2'-O-methyl modified nucleotide
aaggctgtgctgaccatcgagtctttgtactctggtaccagaagctacaaagataaggcttcatgccgaaatcaacaccctgtcattttatggcagggtgtttttccctttctcgtcgatggtcagcacagcctt

SEQ ID NO: 24390 - RNA, 134 nt, synthetic construct
  source 1..134: mol_type = other RNA
  modified_base 1: mod_base = OTHER; note = 2'-O-methyl modified nucleotide with phosphorothioate linkage
  modified_base 2: mod_base = OTHER; note = 2'-O-methyl modified nucleotide with phosphorothioate linkage
  modified_base 3: mod_base = OTHER; note = 2'-O-methyl modified nucleotide with phosphorothioate linkage
  modified_base 131: mod_base = OTHER; note = Nucleotide with phosphorothioate linkage
  modified_base 132: mod_base = OTHER; note = 2'-O-methyl modified nucleotide with phosphorothioate linkage
  modified_base 133: mod_base = OTHER; note = 2'-O-methyl modified nucleotide with phosphorothioate linkage
  modified_base 134: mod_base = OTHER; note = 2'-O-methyl modified nucleotide
aaggctgtgctgaccatcgagtctttgtactctggtaccagaagctacaaagataaggcttcatgccgaaatcaacaccctgtcattttatggcagggtgtttttccctttctcgtcgatggtcagcacagcct

SEQ ID NO: 24391 - RNA, 133 nt, synthetic construct
  source 1..133: mol_type = other RNA
  modified_base 1: mod_base = OTHER; note = 2'-O-methyl modified nucleotide with phosphorothioate linkage
  modified_base 2: mod_base = OTHER; note = 2'-O-methyl modified nucleotide with phosphorothioate linkage
  modified_base 3: mod_base = OTHER; note = 2'-O-methyl modified nucleotide with phosphorothioate linkage
  modified_base 130: mod_base = OTHER; note = Nucleotide with phosphorothioate linkage
  modified_base 131: mod_base = OTHER; note = 2'-O-methyl modified nucleotide with phosphorothioate linkage
  modified_base 132: mod_base = OTHER; note = 2'-O-methyl modified nucleotide with phosphorothioate linkage
  modified_base 133: mod_base = OTHER; note = 2'-O-methyl modified nucleotide
aaggctgtgctgaccatcgagtctttgtactctggtaccagaagctacaaagataaggcttcatgccgaaatcaacaccctgtcattttatggcagggtgtttttccctttctcgtcgatggtcagcacagcc

SEQ ID NO: 24392 - RNA, 132 nt, synthetic construct
  source 1..132: mol_type = other RNA
  modified_base 1: mod_base = OTHER; note = 2'-O-methyl modified nucleotide with phosphorothioate linkage
  modified_base 2: mod_base = OTHER; note = 2'-O-methyl modified nucleotide with phosphorothioate linkage
  modified_base 3: mod_base = OTHER; note = 2'-O-methyl modified nucleotide with phosphorothioate linkage
  modified_base 129: mod_base = OTHER; note = Nucleotide with phosphorothioate linkage
  modified_base 130: mod_base = OTHER; note = 2'-O-methyl modified nucleotide with phosphorothioate linkage
  modified_base 131: mod_base = OTHER; note = 2'-O-methyl modified nucleotide with phosphorothioate linkage
  modified_base 132: mod_base = OTHER; note = 2'-O-methyl modified nucleotide
aaggctgtgctgaccatcgagtctttgtactctggtaccagaagctacaaagataaggcttcatgccgaaatcaacaccctgtcattttatggcagggtgtttttccctttctcgtcgatggtcagcacagc

SEQ ID NO: 24393 - RNA, 131 nt, synthetic construct
  source 1..131: mol_type = other RNA
  modified_base 1: mod_base = OTHER; note = 2'-O-methyl modified nucleotide with phosphorothioate linkage
  modified_base 2: mod_base = OTHER; note = 2'-O-methyl modified nucleotide with phosphorothioate linkage
  modified_base 3: mod_base = OTHER; note = 2'-O-methyl modified nucleotide with phosphorothioate linkage
  modified_base 128: mod_base = OTHER; note = Nucleotide with phosphorothioate linkage
  modified_base 129: mod_base = OTHER; note = 2'-O-methyl modified nucleotide with phosphorothioate linkage
  modified_base 130: mod_base = OTHER; note = 2'-O-methyl modified nucleotide with phosphorothioate linkage
  modified_base 131: mod_base = OTHER; note = 2'-O-methyl modified nucleotide
aaggctgtgctgaccatcgagtctttgtactctggtaccagaagctacaaagataaggcttcatgccgaaatcaacaccctgtcattttatggcagggtgtttttccctttctcgtcgatggtcagcacag

SEQ ID NO: 24394 - RNA, 130 nt, synthetic construct
  source 1..130: mol_type = other RNA
  modified_base 1: mod_base = OTHER; note = 2'-O-methyl modified nucleotide with phosphorothioate linkage
  modified_base 2: mod_base = OTHER; note = 2'-O-methyl modified nucleotide with phosphorothioate linkage
  modified_base 3: mod_base = OTHER; note = 2'-O-methyl modified nucleotide with phosphorothioate linkage
  modified_base 127: mod_base = OTHER; note = Nucleotide with phosphorothioate linkage
  modified_base 128: mod_base = OTHER; note = 2'-O-methyl modified nucleotide with phosphorothioate linkage
  modified_base 129: mod_base = OTHER; note = 2'-O-methyl modified nucleotide with phosphorothioate linkage
  modified_base 130: mod_base = OTHER; note = 2'-O-methyl modified nucleotide
aaggctgtgctgaccatcgagtctttgtactctggtaccagaagctacaaagataaggcttcatgccgaaatcaacaccctgtcattttatggcagggtgtttttccctttctcgtcgatggtcagcaca

SEQ ID NO: 24395 - RNA, 129 nt, synthetic construct
  source 1..129: mol_type = other RNA
  modified_base 1: mod_base = OTHER; note = 2'-O-methyl modified nucleotide with phosphorothioate linkage
  modified_base 2: mod_base = OTHER; note = 2'-O-methyl modified nucleotide with phosphorothioate linkage
  modified_base 3: mod_base = OTHER; note = 2'-O-methyl modified nucleotide with phosphorothioate linkage
  modified_base 126: mod_base = OTHER; note = Nucleotide with phosphorothioate linkage
  modified_base 127: mod_base = OTHER; note = 2'-O-methyl modified nucleotide with phosphorothioate linkage
  modified_base 128: mod_base = OTHER; note = 2'-O-methyl modified nucleotide with phosphorothioate linkage
  modified_base 129: mod_base = OTHER; note = 2'-O-methyl modified nucleotide
aaggctgtgctgaccatcgagtctttgtactctggtaccagaagctacaaagataaggcttcatgccgaaatcaacaccctgtcattttatggcagggtgtttttccctttctcgtcgatggtcagcac

SEQ ID NO: 24396 - RNA, 128 nt, synthetic construct
  source 1..128: mol_type = other RNA
  modified_base 1: mod_base = OTHER; note = 2'-O-methyl modified nucleotide with phosphorothioate linkage
  modified_base 2: mod_base = OTHER; note = 2'-O-methyl modified nucleotide with phosphorothioate linkage
  modified_base 3: mod_base = OTHER; note = 2'-O-methyl modified nucleotide with phosphorothioate linkage
  modified_base 125: mod_base = OTHER; note = Nucleotide with phosphorothioate linkage
  modified_base 126: mod_base = OTHER; note = 2'-O-methyl modified nucleotide with phosphorothioate linkage
  modified_base 127: mod_base = OTHER; note = 2'-O-methyl modified nucleotide with phosphorothioate linkage
  modified_base 128: mod_base = OTHER; note = 2'-O-methyl modified nucleotide
aaggctgtgctgaccatcgagtctttgtactctggtaccagaagctacaaagataaggcttcatgccgaaatcaacaccctgtcattttatggcagggtgtttttccctttctcgtcgatggtcagca

SEQ ID NO: 24397 - RNA, 127 nt, synthetic construct
  source 1..127: mol_type = other RNA
  modified_base 1: mod_base = OTHER; note = 2'-O-methyl modified nucleotide with phosphorothioate linkage
  modified_base 2: mod_base = OTHER; note = 2'-O-methyl modified nucleotide with phosphorothioate linkage
  modified_base 3: mod_base = OTHER; note = 2'-O-methyl modified nucleotide with phosphorothioate linkage
  modified_base 124: mod_base = OTHER; note = Nucleotide with phosphorothioate linkage
  modified_base 125: mod_base = OTHER; note = 2'-O-methyl modified nucleotide with phosphorothioate linkage
  modified_base 126: mod_base = OTHER; note = 2'-O-methyl modified nucleotide with phosphorothioate linkage
  modified_base 127: mod_base = OTHER; note = 2'-O-methyl modified nucleotide
aaggctgtgctgaccatcgagtctttgtactctggtaccagaagctacaaagataaggcttcatgccgaaatcaacaccctgtcattttatggcagggtgtttttccctttctcgtcgatggtcagc

SEQ ID NO: 24398 - RNA, 126 nt, synthetic construct
  source 1..126: mol_type = other RNA
  modified_base 1: mod_base = OTHER; note = 2'-O-methyl modified nucleotide with phosphorothioate linkage
  modified_base 2: mod_base = OTHER; note = 2'-O-methyl modified nucleotide with phosphorothioate linkage
  modified_base 3: mod_base = OTHER; note = 2'-O-methyl modified nucleotide with phosphorothioate linkage
  modified_base 123: mod_base = OTHER; note = Nucleotide with phosphorothioate linkage
  modified_base 124: mod_base = OTHER; note = 2'-O-methyl modified nucleotide with phosphorothioate linkage
  modified_base 125: mod_base = OTHER; note = 2'-O-methyl modified nucleotide with phosphorothioate linkage
  modified_base 126: mod_base = OTHER; note = 2'-O-methyl modified nucleotide
aaggctgtgctgaccatcgagtctttgtactctggtaccagaagctacaaagataaggcttcatgccgaaatcaacaccctgtcattttatggcagggtgtttttccctttctcgtcgatggtcag

SEQ ID NO: 24399 - RNA, 133 nt, synthetic construct
  source 1..133: mol_type = other RNA
  modified_base 1: mod_base = OTHER; note = 2'-O-methyl modified nucleotide with phosphorothioate linkage
  modified_base 2: mod_base = OTHER; note = 2'-O-methyl modified nucleotide with phosphorothioate linkage
  modified_base 3: mod_base = OTHER; note = 2'-O-methyl modified nucleotide with phosphorothioate linkage
  modified_base 130: mod_base = OTHER; note = Nucleotide with phosphorothioate linkage
  modified_base 131: mod_base = OTHER; note = 2'-O-methyl modified nucleotide with phosphorothioate linkage
  modified_base 132: mod_base = OTHER; note = 2'-O-methyl modified nucleotide with phosphorothioate linkage
  modified_base 133: mod_base = OTHER; note = 2'-O-methyl modified nucleotide
aaggctgtgctgaccatcgagtctttgtactctggtaccagaagctacaaagataaggcttcatgccgaaatcaacaccctgtcattttatggcagggtgttttcctttctcgtcgatggtcagcacagcctt

SEQ ID NO: 24400 - RNA, 132 nt, synthetic construct
  source 1..132: mol_type = other RNA
  modified_base 1: mod_base = OTHER; note = 2'-O-methyl modified nucleotide with phosphorothioate linkage
  modified_base 2: mod_base = OTHER; note = 2'-O-methyl modified nucleotide with phosphorothioate linkage
  modified_base 3: mod_base = OTHER; note = 2'-O-methyl modified nucleotide with phosphorothioate linkage
  modified_base 129: mod_base = OTHER; note = Nucleotide with phosphorothioate linkage
  modified_base 130: mod_base = OTHER; note = 2'-O-methyl modified nucleotide with phosphorothioate linkage
  modified_base 131: mod_base = OTHER; note = 2'-O-methyl modified nucleotide with phosphorothioate linkage
  modified_base 132: mod_base = OTHER; note = 2'-O-methyl modified nucleotide
aaggctgtgctgaccatcgagtctttgtactctggtaccagaagctacaaagataaggcttcatgccgaaatcaacaccctgtcattttatggcagggtgttttcctttctcgtcgatggtcagcacagcct

SEQ ID NO: 24401 - RNA, 131 nt, synthetic construct
  source 1..131: mol_type = other RNA
  modified_base 1: mod_base = OTHER; note = 2'-O-methyl modified nucleotide with phosphorothioate linkage
  modified_base 2: mod_base = OTHER; note = 2'-O-methyl modified nucleotide with phosphorothioate linkage
  modified_base 3: mod_base = OTHER; note = 2'-O-methyl modified nucleotide with phosphorothioate linkage
  modified_base 128: mod_base = OTHER; note = Nucleotide with phosphorothioate linkage
  modified_base 129: mod_base = OTHER; note = 2'-O-methyl modified nucleotide with phosphorothioate linkage
  modified_base 130: mod_base = OTHER; note = 2'-O-methyl modified nucleotide with phosphorothioate linkage
  modified_base 131: mod_base = OTHER; note = 2'-O-methyl modified nucleotide
aaggctgtgctgaccatcgagtctttgtactctggtaccagaagctacaaagataaggcttcatgccgaaatcaacaccctgtcattttatggcagggtgttttcctttctcgtcgatggtcagcacagcc

SEQ ID NO: 24402 - RNA, 130 nt, synthetic construct
  source 1..130: mol_type = other RNA
  modified_base 1: mod_base = OTHER; note = 2'-O-methyl modified nucleotide with phosphorothioate linkage
  modified_base 2: mod_base = OTHER; note = 2'-O-methyl modified nucleotide with phosphorothioate linkage
  modified_base 3: mod_base = OTHER; note = 2'-O-methyl modified nucleotide with phosphorothioate linkage
  modified_base 127: mod_base = OTHER; note = Nucleotide with phosphorothioate linkage
  modified_base 128: mod_base = OTHER; note = 2'-O-methyl modified nucleotide with phosphorothioate linkage
  modified_base 129: mod_base = OTHER; note = 2'-O-methyl modified nucleotide with phosphorothioate linkage
  modified_base 130: mod_base = OTHER; note = 2'-O-methyl modified nucleotide
aaggctgtgctgaccatcgagtctttgtactctggtaccagaagctacaaagataaggcttcatgccgaaatcaacaccctgtcattttatggcagggtgttttcctttctcgtcgatggtcagcacagc

SEQ ID NO: 24403 - RNA, 129 nt, synthetic construct
  source 1..129: mol_type = other RNA
  modified_base 1: mod_base = OTHER; note = 2'-O-methyl modified nucleotide with phosphorothioate linkage
  modified_base 2: mod_base = OTHER; note = 2'-O-methyl modified nucleotide with phosphorothioate linkage
  modified_base 3: mod_base = OTHER; note = 2'-O-methyl modified nucleotide with phosphorothioate linkage
  modified_base 126: mod_base = OTHER; note = Nucleotide with phosphorothioate linkage
  modified_base 127: mod_base = OTHER; note = 2'-O-methyl modified nucleotide with phosphorothioate linkage
  modified_base 128: mod_base = OTHER; note = 2'-O-methyl modified nucleotide with phosphorothioate linkage
  modified_base 129: mod_base = OTHER; note = 2'-O-methyl modified nucleotide
aaggctgtgctgaccatcgagtctttgtactctggtaccagaagctacaaagataaggcttcatgccgaaatcaacaccctgtcattttatggcagggtgttttcctttctcgtcgatggtcagcacag

SEQ ID NO: 24404 - RNA, 128 nt, synthetic construct
  source 1..128: mol_type = other RNA
  modified_base 1: mod_base = OTHER; note = 2'-O-methyl modified nucleotide with phosphorothioate linkage
  modified_base 2: mod_base = OTHER; note = 2'-O-methyl modified nucleotide with phosphorothioate linkage
  modified_base 3: mod_base = OTHER; note = 2'-O-methyl modified nucleotide with phosphorothioate linkage
  modified_base 125: mod_base = OTHER; note = Nucleotide with phosphorothioate linkage
  modified_base 126: mod_base = OTHER; note = 2'-O-methyl modified nucleotide with phosphorothioate linkage
  modified_base 127: mod_base = OTHER; note = 2'-O-methyl modified nucleotide with phosphorothioate linkage
  modified_base 128: mod_base = OTHER; note = 2'-O-methyl modified nucleotide
aaggctgtgctgaccatcgagtctttgtactctggtaccagaagctacaaagataaggcttcatgccgaaatcaacaccctgtcattttatggcagggtgttttcctttctcgtcgatggtcagcaca

SEQ ID NO: 24405 - RNA, 127 nt, synthetic construct
  source 1..127: mol_type = other RNA
  modified_base 1: mod_base = OTHER; note = 2'-O-methyl modified nucleotide with phosphorothioate linkage
  modified_base 2: mod_base = OTHER; note = 2'-O-methyl modified nucleotide with phosphorothioate linkage
  modified_base 3: mod_base = OTHER; note = 2'-O-methyl modified nucleotide with phosphorothioate linkage
  modified_base 124: mod_base = OTHER; note = Nucleotide with phosphorothioate linkage
  modified_base 125: mod_base = OTHER; note = 2'-O-methyl modified nucleotide with phosphorothioate linkage
  modified_base 126: mod_base = OTHER; note = 2'-O-methyl modified nucleotide with phosphorothioate linkage
  modified_base 127: mod_base = OTHER; note = 2'-O-methyl modified nucleotide
aaggctgtgctgaccatcgagtctttgtactctggtaccagaagctacaaagataaggcttcatgccgaaatcaacaccctgtcattttatggcagggtgttttcctttctcgtcgatggtcagcac

SEQ ID NO: 24406 - RNA, 126 nt, synthetic construct
  source 1..126: mol_type = other RNA
  modified_base 1: mod_base = OTHER; note = 2'-O-methyl modified nucleotide with phosphorothioate linkage
  modified_base 2: mod_base = OTHER; note = 2'-O-methyl modified nucleotide with phosphorothioate linkage
  modified_base 3: mod_base = OTHER; note = 2'-O-methyl modified nucleotide with phosphorothioate linkage
  modified_base 123: mod_base = OTHER; note = Nucleotide with phosphorothioate linkage
  modified_base 124: mod_base = OTHER; note = 2'-O-methyl modified nucleotide with phosphorothioate linkage
  modified_base 125: mod_base = OTHER; note = 2'-O-methyl modified nucleotide with phosphorothioate linkage
  modified_base 126: mod_base = OTHER; note = 2'-O-methyl modified nucleotide
aaggctgtgctgaccatcgagtctttgtactctggtaccagaagctacaaagataaggcttcatgccgaaatcaacaccctgtcattttatggcagggtgttttcctttctcgtcgatggtcagca

SEQ ID NO: 24407 - RNA, 125 nt, synthetic construct
  source 1..125: mol_type = other RNA
  modified_base 1: mod_base = OTHER; note = 2'-O-methyl modified nucleotide with phosphorothioate linkage
  modified_base 2: mod_base = OTHER; note = 2'-O-methyl modified nucleotide with phosphorothioate linkage
  modified_base 3: mod_base = OTHER; note = 2'-O-methyl modified nucleotide with phosphorothioate linkage
  modified_base 122: mod_base = OTHER; note = Nucleotide with phosphorothioate linkage
  modified_base 123: mod_base = OTHER; note = 2'-O-methyl modified nucleotide with phosphorothioate linkage
  modified_base 124: mod_base = OTHER; note = 2'-O-methyl modified nucleotide with phosphorothioate linkage
  modified_base 125: mod_base = OTHER; note = 2'-O-methyl modified nucleotide
aaggctgtgctgaccatcgagtctttgtactctggtaccagaagctacaaagataaggcttcatgccgaaatcaacaccctgtcattttatggcagggtgttttcctttctcgtcgatggtcagc

SEQ ID NO: 24408 - RNA, 124 nt, synthetic construct
  source 1..124: mol_type = other RNA
  modified_base 1: mod_base = OTHER; note = 2'-O-methyl modified nucleotide with phosphorothioate linkage
  modified_base 2: mod_base = OTHER; note = 2'-O-methyl modified nucleotide with phosphorothioate linkage
  modified_base 3: mod_base = OTHER; note = 2'-O-methyl modified nucleotide with phosphorothioate linkage
  modified_base 121: mod_base = OTHER; note = Nucleotide with phosphorothioate linkage
  modified_base 122: mod_base = OTHER; note = 2'-O-methyl modified nucleotide with phosphorothioate linkage
  modified_base 123: mod_base = OTHER; note = 2'-O-methyl modified nucleotide with phosphorothioate linkage
  modified_base 124: mod_base = OTHER; note = 2'-O-methyl modified nucleotide
aaggctgtgctgaccatcgagtctttgtactctggtaccagaagctacaaagataaggcttcatgccgaaatcaacaccctgtcattttatggcagggtgttttcctttctcgtcgatggtcag

SEQ ID NO: 24409 - RNA, 131 nt, synthetic construct
  source 1..131: mol_type = other RNA
  modified_base 1: mod_base = OTHER; note = 2'-O-methyl modified nucleotide with phosphorothioate linkage
  modified_base 2: mod_base = OTHER; note = 2'-O-methyl modified nucleotide with phosphorothioate linkage
  modified_base 3: mod_base = OTHER; note = 2'-O-methyl modified nucleotide with phosphorothioate linkage
  modified_base 128: mod_base = OTHER; note = Nucleotide with phosphorothioate linkage
  modified_base 129: mod_base = OTHER; note = 2'-O-methyl modified nucleotide with phosphorothioate linkage
  modified_base 130: mod_base = OTHER; note = 2'-O-methyl modified nucleotide with phosphorothioate linkage
  modified_base 131: mod_base = OTHER; note = 2'-O-methyl modified nucleotide
aaggctgtgctgaccatcgagtctttgtactctggtaccagaagctacaaagataaggcttcatgccgaaatcaacaccctgtcattttatggcagggtgtttttttctcgtcgatggtcagcacagcctt

SEQ ID NO: 24410 - RNA, 130 nt, synthetic construct
  source 1..130: mol_type = other RNA
  modified_base 1: mod_base = OTHER; note = 2'-O-methyl modified nucleotide with phosphorothioate linkage
  modified_base 2: mod_base = OTHER; note = 2'-O-methyl modified nucleotide with phosphorothioate linkage
  modified_base 3: mod_base = OTHER; note = 2'-O-methyl modified nucleotide with phosphorothioate linkage
  modified_base 127: mod_base = OTHER; note = Nucleotide with phosphorothioate linkage
  modified_base 128: mod_base = OTHER; note = 2'-O-methyl modified nucleotide with phosphorothioate linkage
  modified_base 129: mod_base = OTHER; note = 2'-O-methyl modified nucleotide with phosphorothioate linkage
  modified_base 130: mod_base = OTHER; note = 2'-O-methyl modified nucleotide
aaggctgtgctgaccatcgagtctttgtactctggtaccagaagctacaaagataaggcttcatgccgaaatcaacaccctgtcattttatggcagggtgtttttttctcgtcgatggtcagcacagcct

SEQ ID NO: 24411 - RNA, 129 nt, synthetic construct
  source 1..129: mol_type = other RNA
  modified_base 1: mod_base = OTHER; note = 2'-O-methyl modified nucleotide with phosphorothioate linkage
  modified_base 2: mod_base = OTHER; note = 2'-O-methyl modified nucleotide with phosphorothioate linkage
  modified_base 3: mod_base = OTHER; note = 2'-O-methyl modified nucleotide with phosphorothioate linkage
  modified_base 126: mod_base = OTHER; note = Nucleotide with phosphorothioate linkage
  modified_base 127: mod_base = OTHER; note = 2'-O-methyl modified nucleotide with phosphorothioate linkage
  modified_base 128: mod_base = OTHER; note = 2'-O-methyl modified nucleotide with phosphorothioate linkage
  modified_base 129: mod_base = OTHER; note = 2'-O-methyl modified nucleotide
aaggctgtgctgaccatcgagtctttgtactctggtaccagaagctacaaagataaggcttcatgccgaaatcaacaccctgtcattttatggcagggtgtttttttctcgtcgatggtcagcacagcc

SEQ ID NO: 24412 - RNA, 128 nt, synthetic construct
  source 1..128: mol_type = other RNA
  modified_base 1: mod_base = OTHER; note = 2'-O-methyl modified nucleotide with phosphorothioate linkage
  modified_base 2: mod_base = OTHER; note = 2'-O-methyl modified nucleotide with phosphorothioate linkage
  modified_base 3: mod_base = OTHER; note = 2'-O-methyl modified nucleotide with phosphorothioate linkage
  modified_base 125: mod_base = OTHER; note = Nucleotide with phosphorothioate linkage
  modified_base 126: mod_base = OTHER; note = 2'-O-methyl modified nucleotide with phosphorothioate linkage
  modified_base 127: mod_base = OTHER; note = 2'-O-methyl modified nucleotide with phosphorothioate linkage
  modified_base 128: mod_base = OTHER; note = 2'-O-methyl modified nucleotide
aaggctgtgctgaccatcgagtctttgtactctggtaccagaagctacaaagataaggcttcatgccgaaatcaacaccctgtcattttatggcagggtgtttttttctcgtcgatggtcagcacagc

SEQ ID NO: 24413 - RNA, 127 nt, synthetic construct
  source 1..127: mol_type = other RNA
  modified_base 1: mod_base = OTHER; note = 2'-O-methyl modified nucleotide with phosphorothioate linkage
  modified_base 2: mod_base = OTHER; note = 2'-O-methyl modified nucleotide with phosphorothioate linkage
  modified_base 3: mod_base = OTHER; note = 2'-O-methyl modified nucleotide with phosphorothioate linkage
  modified_base 124: mod_base = OTHER; note = Nucleotide with phosphorothioate linkage
  modified_base 125: mod_base = OTHER; note = 2'-O-methyl modified nucleotide with phosphorothioate linkage
  modified_base 126: mod_base = OTHER; note = 2'-O-methyl modified nucleotide with phosphorothioate linkage
  modified_base 127: mod_base = OTHER; note = 2'-O-methyl modified nucleotide
aaggctgtgctgaccatcgagtctttgtactctggtaccagaagctacaaagataaggcttcatgccgaaatcaacaccctgtcattttatggcagggtgtttttttctcgtcgatggtcagcacag

SEQ ID NO: 24414 - RNA, 126 nt, synthetic construct
  source 1..126: mol_type = other RNA
  modified_base 1: mod_base = OTHER; note = 2'-O-methyl modified nucleotide with phosphorothioate linkage
  modified_base 2: mod_base = OTHER; note = 2'-O-methyl modified nucleotide with phosphorothioate linkage
  modified_base 3: mod_base = OTHER; note = 2'-O-methyl modified nucleotide with phosphorothioate linkage
  modified_base 123: mod_base = OTHER; note = Nucleotide with phosphorothioate linkage
  modified_base 124: mod_base = OTHER; note = 2'-O-methyl modified nucleotide with phosphorothioate linkage
  modified_base 125: mod_base = OTHER; note = 2'-O-methyl modified nucleotide with phosphorothioate linkage
  modified_base 126: mod_base = OTHER; note = 2'-O-methyl modified nucleotide
aaggctgtgctgaccatcgagtctttgtactctggtaccagaagctacaaagataaggcttcatgccgaaatcaacaccctgtcattttatggcagggtgtttttttctcgtcgatggtcagcaca

SEQ ID NO: 24415 - RNA, 125 nt, synthetic construct
  source 1..125: mol_type = other RNA
  modified_base 1: mod_base = OTHER; note = 2'-O-methyl modified nucleotide with phosphorothioate linkage
  modified_base 2: mod_base = OTHER; note = 2'-O-methyl modified nucleotide with phosphorothioate linkage
  modified_base 3: mod_base = OTHER; note = 2'-O-methyl modified nucleotide with phosphorothioate linkage
  modified_base 122: mod_base = OTHER; note = Nucleotide with phosphorothioate linkage
  modified_base 123: mod_base = OTHER; note = 2'-O-methyl modified nucleotide with phosphorothioate linkage
  modified_base 124: mod_base = OTHER; note = 2'-O-methyl modified nucleotide with phosphorothioate linkage
  modified_base 125: mod_base = OTHER; note = 2'-O-methyl modified nucleotide
aaggctgtgctgaccatcgagtctttgtactctggtaccagaagctacaaagataaggcttcatgccgaaatcaacaccctgtcattttatggcagggtgtttttttctcgtcgatggtcagcac

SEQ ID NO: 24416 - RNA, 124 nt, synthetic construct
  source 1..124: mol_type = other RNA
  modified_base 1: mod_base = OTHER; note = 2'-O-methyl modified nucleotide with phosphorothioate linkage
  modified_base 2: mod_base = OTHER; note = 2'-O-methyl modified nucleotide with phosphorothioate linkage
  modified_base 3: mod_base = OTHER; note = 2'-O-methyl modified nucleotide with phosphorothioate linkage
  modified_base 121: mod_base = OTHER; note = Nucleotide with phosphorothioate linkage
  modified_base 122: mod_base = OTHER; note = 2'-O-methyl modified nucleotide with phosphorothioate linkage
  modified_base 123: mod_base = OTHER; note = 2'-O-methyl modified nucleotide with phosphorothioate linkage
  modified_base 124: mod_base = OTHER; note = 2'-O-methyl modified nucleotide
aaggctgtgctgaccatcgagtctttgtactctggtaccagaagctacaaagataaggcttcatgccgaaatcaacaccctgtcattttatggcagggtgtttttttctcgtcgatggtcagca

SEQ ID NO: 24417 - RNA, 123 nt, synthetic construct
  source 1..123: mol_type = other RNA
  modified_base 1: mod_base = OTHER; note = 2'-O-methyl modified nucleotide with phosphorothioate linkage
  modified_base 2: mod_base = OTHER; note = 2'-O-methyl modified nucleotide with phosphorothioate linkage
  modified_base 3: mod_base = OTHER; note = 2'-O-methyl modified nucleotide with phosphorothioate linkage
  modified_base 120: mod_base = OTHER; note = Nucleotide with phosphorothioate linkage
  modified_base 121: mod_base = OTHER; note = 2'-O-methyl modified nucleotide with phosphorothioate linkage
  modified_base 122: mod_base = OTHER; note = 2'-O-methyl modified nucleotide with phosphorothioate linkage
  modified_base 123: mod_base = OTHER; note = 2'-O-methyl modified nucleotide
aaggctgtgctgaccatcgagtctttgtactctggtaccagaagctacaaagataaggcttcatgccgaaatcaacaccctgtcattttatggcagggtgtttttttctcgtcgatggtcagc

SEQ ID NO: 24418 - RNA, 122 nt, synthetic construct
  source 1..122: mol_type = other RNA
  modified_base 1: mod_base = OTHER; note = 2'-O-methyl modified nucleotide with phosphorothioate linkage
  modified_base 2: mod_base = OTHER; note = 2'-O-methyl modified nucleotide with phosphorothioate linkage
  modified_base 3: mod_base = OTHER; note = 2'-O-methyl modified nucleotide with phosphorothioate linkage
  modified_base 119: mod_base = OTHER; note = Nucleotide with phosphorothioate linkage
  modified_base 120: mod_base = OTHER; note = 2'-O-methyl modified nucleotide with phosphorothioate linkage
  modified_base 121: mod_base = OTHER; note = 2'-O-methyl modified nucleotide with phosphorothioate linkage
  modified_base 122: mod_base = OTHER; note = 2'-O-methyl modified nucleotide
aaggctgtgctgaccatcgagtctttgtactctggtaccagaagctacaaagataaggcttcatgccgaaatcaacaccctgtcattttatggcagggtgtttttttctcgtcgatggtcag

SEQ ID NO: 24419 - RNA, 129 nt, synthetic construct
  source 1..129: mol_type = other RNA
  modified_base 1: mod_base = OTHER; note = 2'-O-methyl modified nucleotide with phosphorothioate linkage
  modified_base 2: mod_base = OTHER; note = 2'-O-methyl modified nucleotide with phosphorothioate linkage
  modified_base 3: mod_base = OTHER; note = 2'-O-methyl modified nucleotide with phosphorothioate linkage
  modified_base 126: mod_base = OTHER; note = Nucleotide with phosphorothioate linkage
  modified_base 127: mod_base = OTHER; note = 2'-O-methyl modified nucleotide with phosphorothioate linkage
  modified_base 128: mod_base = OTHER; note = 2'-O-methyl modified nucleotide with phosphorothioate linkage
  modified_base 129: mod_base = OTHER; note = 2'-O-methyl modified nucleotide
aaggctgtgctgaccatcgagtctttgtactctggtaccagaagctacaaagataaggcttcatgccgaaatcaacaccctgtcattttatggcagggtgtttttctcgtcgatggtcagcacagcctt

SEQ ID NO: 24420 - RNA, 128 nt, synthetic construct
  source 1..128: mol_type = other RNA
  modified_base 1: mod_base = OTHER; note = 2'-O-methyl modified nucleotide with phosphorothioate linkage
  modified_base 2: mod_base = OTHER; note = 2'-O-methyl modified nucleotide with phosphorothioate linkage
  modified_base 3: mod_base = OTHER; note = 2'-O-methyl modified nucleotide with phosphorothioate linkage
  modified_base 125: mod_base = OTHER; note = Nucleotide with phosphorothioate linkage
  modified_base 126: mod_base = OTHER; note = 2'-O-methyl modified nucleotide with phosphorothioate linkage
  modified_base 127: mod_base = OTHER; note = 2'-O-methyl modified nucleotide with phosphorothioate linkage
  modified_base 128: mod_base = OTHER; note = 2'-O-methyl modified nucleotide
aaggctgtgctgaccatcgagtctttgtactctggtaccagaagctacaaagataaggcttcatgccgaaatcaacaccctgtcattttatggcagggtgtttttctcgtcgatggtcagcacagcct

SEQ ID NO: 24421 - RNA, 127 nt, synthetic construct
  source 1..127: mol_type = other RNA
  modified_base 1: mod_base = OTHER; note = 2'-O-methyl modified nucleotide with phosphorothioate linkage
  modified_base 2: mod_base = OTHER; note = 2'-O-methyl modified nucleotide with phosphorothioate linkage
  modified_base 3: mod_base = OTHER; note = 2'-O-methyl modified nucleotide with phosphorothioate linkage
  modified_base 124: mod_base = OTHER; note = Nucleotide with phosphorothioate linkage
  modified_base 125: mod_base = OTHER; note = 2'-O-methyl modified nucleotide with phosphorothioate linkage
  modified_base 126: mod_base = OTHER; note = 2'-O-methyl modified nucleotide with phosphorothioate linkage
  modified_base 127: mod_base = OTHER; note = 2'-O-methyl modified nucleotide
aaggctgtgctgaccatcgagtctttgtactctggtaccagaagctacaaagataaggcttcatgccgaaatcaacaccctgtcattttatggcagggtgtttttctcgtcgatggtcagcacagcc

SEQ ID NO: 24422 - RNA, 126 nt, synthetic construct
  source 1..126: mol_type = other RNA
  modified_base 1: mod_base = OTHER; note = 2'-O-methyl modified nucleotide with phosphorothioate linkage
  modified_base 2: mod_base = OTHER; note = 2'-O-methyl modified nucleotide with phosphorothioate linkage
  modified_base 3: mod_base = OTHER; note = 2'-O-methyl modified nucleotide with phosphorothioate linkage
  modified_base 123: mod_base = OTHER; note = Nucleotide with phosphorothioate linkage
  modified_base 124: mod_base = OTHER; note = 2'-O-methyl modified nucleotide with phosphorothioate linkage
  modified_base 125: mod_base = OTHER; note = 2'-O-methyl modified nucleotide with phosphorothioate linkage
  modified_base 126: mod_base = OTHER; note = 2'-O-methyl modified nucleotide
aaggctgtgctgaccatcgagtctttgtactctggtaccagaagctacaaagataaggcttcatgccgaaatcaacaccctgtcattttatggcagggtgtttttctcgtcgatggtcagcacagc

SEQ ID NO: 24423 - RNA, 125 nt, synthetic construct
  source 1..125: mol_type = other RNA
  modified_base 1: mod_base = OTHER; note = 2'-O-methyl modified nucleotide with phosphorothioate linkage
  modified_base 2: mod_base = OTHER; note = 2'-O-methyl modified nucleotide with phosphorothioate linkage
  modified_base 3: mod_base = OTHER; note = 2'-O-methyl modified nucleotide with phosphorothioate linkage
  modified_base 122: mod_base = OTHER; note = Nucleotide with phosphorothioate linkage
  modified_base 123: mod_base = OTHER; note = 2'-O-methyl modified nucleotide with phosphorothioate linkage
  modified_base 124: mod_base = OTHER; note = 2'-O-methyl modified nucleotide with phosphorothioate linkage
  modified_base 125: mod_base = OTHER; note = 2'-O-methyl modified nucleotide
aaggctgtgctgaccatcgagtctttgtactctggtaccagaagctacaaagataaggcttcatgccgaaatcaacaccctgtcattttatggcagggtgtttttctcgtcgatggtcagcacag

SEQ ID NO: 24424 - RNA, 124 nt, synthetic construct
  source 1..124: mol_type = other RNA
  modified_base 1: mod_base = OTHER; note = 2'-O-methyl modified nucleotide with phosphorothioate linkage
  modified_base 2: mod_base = OTHER; note = 2'-O-methyl modified nucleotide with phosphorothioate linkage
  modified_base 3: mod_base = OTHER; note = 2'-O-methyl modified nucleotide with phosphorothioate linkage
  modified_base 121: mod_base = OTHER; note = Nucleotide with phosphorothioate linkage
  modified_base 122: mod_base = OTHER; note = 2'-O-methyl modified nucleotide with phosphorothioate linkage
  modified_base 123: mod_base = OTHER; note = 2'-O-methyl modified nucleotide with phosphorothioate linkage
  modified_base 124: mod_base = OTHER; note = 2'-O-methyl modified nucleotide
aaggctgtgctgaccatcgagtctttgtactctggtaccagaagctacaaagataaggcttcatgccgaaatcaacaccctgtcattttatggcagggtgtttttctcgtcgatggtcagcaca

SEQ ID NO: 24425 - RNA, 123 nt, synthetic construct
  source 1..123: mol_type = other RNA
  modified_base 1: mod_base = OTHER; note = 2'-O-methyl modified nucleotide with phosphorothioate linkage
  modified_base 2: mod_base = OTHER; note = 2'-O-methyl modified nucleotide with phosphorothioate linkage
  modified_base 3: mod_base = OTHER; note = 2'-O-methyl modified nucleotide with phosphorothioate linkage
  modified_base 120: mod_base = OTHER; note = Nucleotide with phosphorothioate linkage
  modified_base 121: mod_base = OTHER; note = 2'-O-methyl modified nucleotide with phosphorothioate linkage
  modified_base 122: mod_base = OTHER; note = 2'-O-methyl modified nucleotide with phosphorothioate linkage
  modified_base 123: mod_base = OTHER; note = 2'-O-methyl modified nucleotide
aaggctgtgctgaccatcgagtctttgtactctggtaccagaagctacaaagataaggcttcatgccgaaatcaacaccctgtcattttatggcagggtgtttttctcgtcgatggtcagcac

SEQ ID NO: 24426 - RNA, 122 nt, synthetic construct
  source 1..122: mol_type = other RNA
  modified_base 1: mod_base = OTHER; note = 2'-O-methyl modified nucleotide with phosphorothioate linkage
  modified_base 2: mod_base = OTHER; note = 2'-O-methyl modified nucleotide with phosphorothioate linkage
  modified_base 3: mod_base = OTHER; note = 2'-O-methyl modified nucleotide with phosphorothioate linkage
  modified_base 119: mod_base = OTHER; note = Nucleotide with phosphorothioate linkage
  modified_base 120: mod_base = OTHER; note = 2'-O-methyl modified nucleotide with phosphorothioate linkage
  modified_base 121: mod_base = OTHER; note = 2'-O-methyl modified nucleotide with phosphorothioate linkage
  modified_base 122: mod_base = OTHER; note = 2'-O-methyl modified nucleotide
aaggctgtgctgaccatcgagtctttgtactctggtaccagaagctacaaagataaggcttcatgccgaaatcaacaccctgtcattttatggcagggtgtttttctcgtcgatggtcagca

SEQ ID NO: 24427 - RNA, 121 nt, synthetic construct
  source 1..121: mol_type = other RNA
  modified_base 1: mod_base = OTHER; note = 2'-O-methyl modified nucleotide with phosphorothioate linkage
  modified_base 2: mod_base = OTHER; note = 2'-O-methyl modified nucleotide with phosphorothioate linkage
  modified_base 3: mod_base = OTHER; note = 2'-O-methyl modified nucleotide with phosphorothioate linkage
  modified_base 118: mod_base = OTHER; note = Nucleotide with phosphorothioate linkage
  modified_base 119: mod_base = OTHER; note = 2'-O-methyl modified nucleotide with phosphorothioate linkage
  modified_base 120: mod_base = OTHER; note = 2'-O-methyl modified nucleotide with phosphorothioate linkage
  modified_base 121: mod_base = OTHER; note = 2'-O-methyl modified nucleotide
aaggctgtgctgaccatcgagtctttgtactctggtaccagaagctacaaagataaggcttcatgccgaaatcaacaccctgtcattttatggcagggtgtttttctcgtcgatggtcagc

SEQ ID NO: 24428 - RNA, 120 nt, synthetic construct
  source 1..120: mol_type = other RNA
  modified_base 1: mod_base = OTHER; note = 2'-O-methyl modified nucleotide with phosphorothioate linkage
  modified_base 2: mod_base = OTHER; note = 2'-O-methyl modified nucleotide with phosphorothioate linkage
  modified_base 3: mod_base = OTHER; note = 2'-O-methyl modified nucleotide with phosphorothioate linkage
  modified_base 117: mod_base = OTHER; note = Nucleotide with phosphorothioate linkage
  modified_base 118: mod_base = OTHER; note = 2'-O-methyl modified nucleotide with phosphorothioate linkage
  modified_base 119: mod_base = OTHER; note = 2'-O-methyl modified nucleotide with phosphorothioate linkage
  modified_base 120: mod_base = OTHER; note = 2'-O-methyl modified nucleotide
aaggctgtgctgaccatcgagtctttgtactctggtaccagaagctacaaagataaggcttcatgccgaaatcaacaccctgtcattttatggcagggtgtttttctcgtcgatggtcag

SEQ ID NO: 24429-25148 - skipped (720 entries)

SEQ ID NO: 25149 - RNA, 156 nt, synthetic construct; identical to SEQ ID NO: 24339
  source 1..156: mol_type = other RNA

SEQ ID NO: 25150 - RNA, 155 nt, synthetic construct; identical to SEQ ID NO: 24340
  source 1..155: mol_type = other RNA

SEQ ID NO: 25151 - RNA, 154 nt, synthetic construct; identical to SEQ ID NO: 24341
  source 1..154: mol_type = other RNA

SEQ ID NO: 25152 - RNA, 153 nt, synthetic construct; identical to SEQ ID NO: 24342
  source 1..153: mol_type = other RNA

SEQ ID NO: 25153 - RNA, 152 nt, synthetic construct; identical to SEQ ID NO: 24343
  source 1..152: mol_type = other RNA

SEQ ID NO: 25154 - RNA, 151 nt, synthetic construct; identical to SEQ ID NO: 24344
  source 1..151: mol_type = other RNA

SEQ ID NO: 25155 - RNA, 150 nt, synthetic construct; identical to SEQ ID NO: 24345
  source 1..150: mol_type = other RNA

SEQ ID NO: 25156 - RNA, 149 nt, synthetic construct; identical to SEQ ID NO: 24346
  source 1..149: mol_type = other RNA

SEQ ID NO: 25157 - RNA, 148 nt, synthetic construct; identical to SEQ ID NO: 24347
  source 1..148: mol_type = other RNA

SEQ ID NO: 25158 - RNA, 147 nt, synthetic construct; identical to SEQ ID NO: 24348
  source 1..147: mol_type = other RNA

SEQ ID NO: 25159 - RNA, 151 nt, synthetic construct; identical to SEQ ID NO: 24349
  source 1..151: mol_type = other RNA

SEQ ID NO: 25160 - RNA, 150 nt, synthetic construct; identical to SEQ ID NO: 24350
  source 1..150: mol_type = other RNA

SEQ ID NO: 25161 - RNA, 149 nt, synthetic construct; identical to SEQ ID NO: 24351
  source 1..149: mol_type = other RNA

SEQ ID NO: 25162 - RNA, 148 nt, synthetic construct; identical to SEQ ID NO: 24352
  source 1..148: mol_type = other RNA

SEQ ID NO: 25163 - RNA, 147 nt, synthetic construct; identical to SEQ ID NO: 24353
  source 1..147: mol_type = other RNA

SEQ ID NO: 25164 - RNA, 146 nt, synthetic construct; identical to SEQ ID NO: 24354
  source 1..146: mol_type = other RNA

SEQ ID NO: 25165 - RNA, 145 nt, synthetic construct; identical to SEQ ID NO: 24355
  source 1..145: mol_type = other RNA

SEQ ID NO: 25166 - RNA, 144 nt, synthetic construct; identical to SEQ ID NO: 24356
  source 1..144: mol_type = other RNA

SEQ ID NO: 25167 - RNA, 143 nt, synthetic construct; identical to SEQ ID NO: 24357
  source 1..143: mol_type = other RNA

SEQ ID NO: 25168 - RNA, 142 nt, synthetic construct; identical to SEQ ID NO: 24358
  source 1..142: mol_type = other RNA

SEQ ID NO: 25169 - RNA, 146 nt, synthetic construct; identical to SEQ ID NO: 24359
  source 1..146: mol_type = other RNA

SEQ ID NO: 25170 - RNA, 145 nt, synthetic construct; identical to SEQ ID NO: 24360
  source 1..145: mol_type = other RNA

SEQ ID NO: 25171 - RNA, 144 nt, synthetic construct; identical to SEQ ID NO: 24361
  source 1..144: mol_type = other RNA

SEQ ID NO: 25172 - RNA, 143 nt, synthetic construct; identical to SEQ ID NO: 24362
  source 1..143: mol_type = other RNA

SEQ ID NO: 25173 - RNA, 142 nt, synthetic construct; identical to SEQ ID NO: 24363
  source 1..142: mol_type = other RNA

SEQ ID NO: 25174 - RNA, 141 nt, synthetic construct; identical to SEQ ID NO: 24364
  source 1..141: mol_type = other RNA

SEQ ID NO: 25175 - RNA, 140 nt, synthetic construct; identical to SEQ ID NO: 24365
  source 1..140: mol_type = other RNA

SEQ ID NO: 25176 - RNA, 139 nt, synthetic construct; identical to SEQ ID NO: 24366
  source 1..139: mol_type = other RNA

SEQ ID NO: 25177 - RNA, 138 nt, synthetic construct; identical to SEQ ID NO: 24367
  source 1..138: mol_type = other RNA

SEQ ID NO: 25178 - RNA, 137 nt, synthetic construct; identical to SEQ ID NO: 24368
  source 1..137: mol_type = other RNA

SEQ ID NO: 25179 - RNA, 140 nt, synthetic construct; identical to SEQ ID NO: 24369
  source 1..140: mol_type = other RNA

SEQ ID NO: 25180 - RNA, 139 nt, synthetic construct; identical to SEQ ID NO: 24370
  source 1..139: mol_type = other RNA

SEQ ID NO: 25181 - RNA, 138 nt, synthetic construct; identical to SEQ ID NO: 24371
  source 1..138: mol_type = other RNA

SEQ ID NO: 25182 - RNA, 137 nt, synthetic construct; identical to SEQ ID NO: 24372
  source 1..137: mol_type = other RNA

SEQ ID NO: 25183 - RNA, 136 nt, synthetic construct; identical to SEQ ID NO: 24373
  source 1..136: mol_type = other RNA

SEQ ID NO: 25184 - RNA, 135 nt, synthetic construct; identical to SEQ ID NO: 24374
  source 1..135: mol_type = other RNA

SEQ ID NO: 25185 - RNA, 134 nt, synthetic construct; identical to SEQ ID NO: 24375
  source 1..134: mol_type = other RNA

SEQ ID NO: 25186 - RNA, 133 nt, synthetic construct; identical to SEQ ID NO: 24376
  source 1..133: mol_type = other RNA

SEQ ID NO: 25187 - RNA, 132 nt, synthetic construct; identical to SEQ ID NO: 24377
  source 1..132: mol_type = other RNA

SEQ ID NO: 25188 - RNA, 131 nt, synthetic construct; identical to SEQ ID NO: 24378
  source 1..131: mol_type = other RNA

SEQ ID NO: 25189 - RNA, 137 nt, synthetic construct; identical to SEQ ID NO: 24379
  source 1..137: mol_type = other RNA

SEQ ID NO: 25190 - RNA, 136 nt, synthetic construct; identical to SEQ ID NO: 24380
  source 1..136: mol_type = other RNA

SEQ ID NO: 25191 - RNA, 135 nt, synthetic construct; identical to SEQ ID NO: 24381
  source 1..135: mol_type = other RNA

SEQ ID NO: 25192 - RNA, 134 nt, synthetic construct; identical to SEQ ID NO: 24382
  source 1..134: mol_type = other RNA

SEQ ID NO: 25193 - RNA, 133 nt, synthetic construct; identical to SEQ ID NO: 24383
  source 1..133: mol_type = other RNA

SEQ ID NO: 25194 - RNA, 132 nt, synthetic construct; identical to SEQ ID NO: 24384
  source 1..132: mol_type = other RNA

SEQ ID NO: 25195 - RNA, 131 nt, synthetic construct; identical to SEQ ID NO: 24385
  source 1..131: mol_type = other RNA

SEQ ID NO: 25196 - RNA, 130 nt, synthetic construct; identical to SEQ ID NO: 24386
  source 1..130: mol_type = other RNA

SEQ ID NO: 25197 - RNA, 129 nt, synthetic construct; identical to SEQ ID NO: 24387
  source 1..129: mol_type = other RNA

SEQ ID NO: 25198 - RNA, 128 nt, synthetic construct; identical to SEQ ID NO: 24388
  source 1..128: mol_type = other RNA

SEQ ID NO: 25199 - RNA, 135 nt, synthetic construct; identical to SEQ ID NO: 24389
  source 1..135: mol_type = other RNA

SEQ ID NO: 25200 - RNA, 134 nt, synthetic construct; identical to SEQ ID NO: 24390
  source 1..134: mol_type = other RNA

SEQ ID NO: 25201 - RNA, 133 nt, synthetic construct; identical to SEQ ID NO: 24391
  source 1..133: mol_type = other RNA

SEQ ID NO: 25202 - RNA, 132 nt, synthetic construct; identical to SEQ ID NO: 24392
  source 1..132: mol_type = other RNA

SEQ ID NO: 25203 - RNA, 131 nt, synthetic construct; identical to SEQ ID NO: 24393
  source 1..131: mol_type = other RNA

SEQ ID NO: 25204 - RNA, 130 nt, synthetic construct; identical to SEQ ID NO: 24394
  source 1..130: mol_type = other RNA

SEQ ID NO: 25205 - RNA, 129 nt, synthetic construct; identical to SEQ ID NO: 24395
  source 1..129: mol_type = other RNA

SEQ ID NO: 25206 - RNA, 128 nt, synthetic construct; identical to SEQ ID NO: 24396
  source 1..128: mol_type = other RNA

SEQ ID NO: 25207 - RNA, 127 nt, synthetic construct; identical to SEQ ID NO: 24397
  source 1..127: mol_type = other RNA

SEQ ID NO: 25208 - RNA, 126 nt, synthetic construct; identical to SEQ ID NO: 24398
  source 1..126: mol_type = other RNA

SEQ ID NO: 25209 - RNA, 133 nt, synthetic construct; identical to SEQ ID NO: 24399
  source 1..133: mol_type = other RNA

SEQ ID NO: 25210 - RNA, 132 nt, synthetic construct; identical to SEQ ID NO: 24400
  source 1..132: mol_type = other RNA

SEQ ID NO: 25211 - RNA, 131 nt, synthetic construct; identical to SEQ ID NO: 24401
  source 1..131: mol_type = other RNA

SEQ ID NO: 25212 - RNA, 130 nt, synthetic construct; identical to SEQ ID NO: 24402
  source 1..130: mol_type = other RNA

SEQ ID NO: 25213 - RNA, 129 nt, synthetic construct; identical to SEQ ID NO: 24403
  source 1..129: mol_type = other RNA

SEQ ID NO: 25214 - RNA, 128 nt, synthetic construct; identical to SEQ ID NO: 24404
  source 1..128: mol_type = other RNA

SEQ ID NO: 25215 - RNA, 127 nt, synthetic construct; identical to SEQ ID NO: 24405
  source 1..127: mol_type = other RNA

SEQ ID NO: 25216 - RNA, 126 nt, synthetic construct; identical to SEQ ID NO: 24406
  source 1..126: mol_type = other RNA

SEQ ID NO: 25217 - RNA, 125 nt, synthetic construct; identical to SEQ ID NO: 24407
  source 1..125: mol_type = other RNA

SEQ ID NO: 25218 - RNA, 124 nt, synthetic construct; identical to SEQ ID NO: 24408
  source 1..124: mol_type = other RNA

SEQ ID NO: 25219 - RNA, 131 nt, synthetic construct; identical to SEQ ID NO: 24409
  source 1..131: mol_type = other RNA

SEQ ID NO: 25220 - RNA, 130 nt, synthetic construct; identical to SEQ ID NO: 24410
  source 1..130: mol_type = other RNA

SEQ ID NO: 25221 - RNA, 129 nt, synthetic construct; identical to SEQ ID NO: 24411
  source 1..129: mol_type = other RNA

SEQ ID NO: 25222 - RNA, 128 nt, synthetic construct; identical to SEQ ID NO: 24412
  source 1..128: mol_type = other RNA

SEQ ID NO: 25223 - RNA, 127 nt, synthetic construct; identical to SEQ ID NO: 24413
  source 1..127: mol_type = other RNA

SEQ ID NO: 25224 - RNA, 126 nt, synthetic construct; identical to SEQ ID NO: 24414
  source 1..126: mol_type = other RNA

SEQ ID NO: 25225 - RNA, 125 nt, synthetic construct; identical to SEQ ID NO: 24415
  source 1..125: mol_type = other RNA

SEQ ID NO: 25226 - RNA, 124 nt, synthetic construct; identical to SEQ ID NO: 24416
  source 1..124: mol_type = other RNA

SEQ ID NO: 25227 - RNA, 123 nt, synthetic construct; identical to SEQ ID NO: 24417
  source 1..123: mol_type = other RNA

SEQ ID NO: 25228 - RNA, 122 nt, synthetic construct; identical to SEQ ID NO: 24418
  source 1..122: mol_type = other RNA

SEQ ID NO: 25229 - RNA, 129 nt, synthetic construct; identical to SEQ ID NO: 24419
  source 1..129: mol_type = other RNA

SEQ ID NO: 25230 - RNA, 128 nt, synthetic construct; identical to SEQ ID NO: 24420
  source 1..128: mol_type = other RNA

SEQ ID NO: 25231 - RNA, 127 nt, synthetic construct; identical to SEQ ID NO: 24421
  source 1..127: mol_type = other RNA

SEQ ID NO: 25232 - RNA, 126 nt, synthetic construct; identical to SEQ ID NO: 24422
  source 1..126: mol_type = other RNA

SEQ ID NO: 25233 - RNA, 125 nt, synthetic construct; identical to SEQ ID NO: 24423
  source 1..125: mol_type = other RNA

SEQ ID NO: 25234 - RNA, 124 nt, synthetic construct; identical to SEQ ID NO: 24424
  source 1..124: mol_type = other RNA

SEQ ID NO: 25235 - RNA, 123 nt, synthetic construct; identical to SEQ ID NO: 24425
  source 1..123: mol_type = other RNA

SEQ ID NO: 25236 - RNA, 122 nt, synthetic construct; identical to SEQ ID NO: 24426
  source 1..122: mol_type = other RNA

SEQ ID NO: 25237 - RNA, 121 nt, synthetic construct; identical to SEQ ID NO: 24427
  source 1..121: mol_type = other RNA

SEQ ID NO: 25238 - RNA, 120 nt, synthetic construct; identical to SEQ ID NO: 24428
  source 1..120: mol_type = other RNA

SEQ ID NO: 25239-25998 - skipped (760 entries)

SEQ ID NO: 25999 - RNA, 84 nt, synthetic construct
  source 1..84: mol_type = other RNA
gtctttgtactctggtaccagaagctacaaagataaggcttcatgccgaaatcaacaccctgtcattttatggcagggtgtttt

SEQ ID NO: 26000 - RNA, 54 nt, synthetic construct
  source 1..54: mol_type = other RNA
gtctttgtactctggtaccagaagctacaaagataaggcttcatgccgaaatca

SEQ ID NO: 26001 - RNA, 20 nt, synthetic construct
  source 1..20: mol_type = other RNA
aaggctgtgctgaccatcga

SEQ ID NO: 26002 - protein, 1875 aa, synthetic construct
MPAAKRVKLDGGSDLVLGLDIGIGSVGVGILNKVTGEIIHKNSRIFPAAQAENNLVRRTNRQGRRLARRKKHRRVRLNRLFEESGLITDFTKISINLNPYQLRVKGLTDELSNEELFIALKNMVKHRGISYLDDASDDGNSSVGDYAQIVKENSKQLETKTPGQIQLERYQTYGQLRGDFTVEKDGKKHRLINVFPTSAYRSEALRILQTQQEFNPQITDEFINRYLEILTGKRKYYHGPGNEKSRTDYGRYRTSGETLDNIFGILIGKCTFYPDEFRAAKASYTAQEFNLLNDLNNLTVPTETKKLSKEQKNQIINYVKNEKAMGPAKLFKYIAKLLSCDVADIKGYRIDKSGKAEIHTFEAYRKMKTLETLDIEQMDRETLDKLAYVLTLNTEREGIQEALEHEFADGSFSQKQVDELVQFRKANSSIFGKGWHNFSVKLMMELIPELYETSEEQMTILTRLGKQKTTSSSNKTKYIDEKLLTEEIYNPVVAKSVRQAIKIVNAAIKEYGDFDNIVIEMARETNEDDEKKAIQKIQKANKDEKDAAMLKAANQYNGKAELPHSVFHGHKQLATKIRLWHQQGERCLYTGKTISIHDLINNSNQFEVDHILPLSITFDDSLANKVLVYATAAQEKGQRTPYQALDSMDDAWSFRELKAFVRESKTLSNKKKEYLLTEEDISKFDVRKKFIERNLVDTRYASRVVLNALQEHFRAHKIDTKVSVVRGQFTSQLRRHWGIEKTRDTYHHHAVDALIIAASSQLNLWKKQKNTLVSYSEDQLLDIETGELISDDEYKESVFKAPYQHFVDTLKSKEFEDSILFSYQVDSKFNRKISDATIYATRQAKVGKDKADETYVLGKIKDIYTQDGYDAFMKIYKKDKSKFLMYRHDPQTFEKVIEPILENYPNKQINEKGKEVPCNPFLKYKEEHGYIRKYSKKGNGPEIKSLKYYDSKLGNHIDITPKDSNNKVVLQSVSPWRADVYFNKTTGKYEILGLKYADLQFEKGTGTYKISQEKYNDIKKKEGVDSDSEFKFTLYKNDLLLVKDTETKEQQLFRFLSRTMPKQKHYVELKPYDKQKFEGGEALIKVLGNVANSGQCKKGLGKSNISIYKVRTDVLGNQHIIKNEGDKPKLDFSGGSSGGSSGSETPGTSESATPESSGGSSGGSSTLNIEDEYRLHETSKEPDVSLGSTWLSDFPQAWAETGGMGLAVRQAPLIIPLKATSTPVSIKQYPMSQEARLGIKPHIQRLLDQGILVPCQSPWNTPLLPVKKPGTNDYRPVQDLREVNKRVEDIHPTVPNPYNLLSGLPPSHQWYTVLDLKDAFFCLRLHPTSQPLFAFEWRDPEMGISGQLTWTRLPQGFKNSPTLFNEALHRDLADFRIQHPDLILLQYVDDLLLAATSELDCQQGTRALLQTLGNLGYRASAKKAQICQKQVKYLGYLLKEGQRWLTEARKETVMGQPTPKTPRQLREFLGKAGFCRLFIPGFAEMAAPLYPLTKPGTLFNWGPDQQKAYQEIKQALLTAPALGLPDLTKPFELFVDEKQGYAKGVLTQKLGPWRRPVAYLSKKLDPVAAGWPPCLRMVAAIAVLTKDAGKLTMGQPLVILAPHAVEALVKQPPDRWLSNARMTHYQALLLDTDRVQFGPVVALNPATLLPLPEEGLQHNCLDILAEAHGTRPDLTDQPLPDADHTWYTDGSSLLQEGQRKAGAAVTTETEVIWAKALPAGTSAQRAELIALTQALKMAEGKKLNVYTDSRYAFATAHIHGEIYRRRGWLTSEGKEIKNKDEILALLKALFLPKRLSIIHCPGHQKGHSAEARGNRMADQAARKAAITETPDTSTLLIENSSPSGGSKRTADGSEFEKRTADGSEFESPKKKAKVE

SEQ ID NO: 26003 - protein, 12 aa, synthetic construct
MPAAKRVKLDGG

SEQ ID NO: 26004 - protein, 1875 aa, synthetic construct; identical to SEQ ID NO: 26002

SEQ ID NO: 26005 - skipped

SEQ ID NO: 26006 - protein, 681 aa, synthetic construct
TLNIEDEYRLHETSKEPDVSLGSTWLSDFPQAWAETGGMGLAVRQAPLIIPLKATSTPVSIKQYPMSQEARLGIKPHIQRLLDQGILVPCQSPWNTPLLPVKKPGTNDYRPVQDLREVNKRVEDIHPTVPNPYNLLSGLPPSHQWYTVLDLKDAFFCLRLHPTSQPLFAFEWRDPEMGISGQLTWTRLPQGFKNSPTLFNEALHRDLADFRIQHPDLILLQYVDDLLLAATSELDCQQGTRALLQTLGNLGYRASAKKAQICQKQVKYLGYLLKEGQRWLTEARKETVMGQPTPKTPRQLREFLGKAGFCRLFIPGFAEMAAPLYPLTKPGTLFNWGPDQQKAYQEIKQALLTAPALGLPDLTKPFELFVDEKQGYAKGVLTQKLGPWRRPVAYLSKKLDPVAAGWPPCLRMVAAIAVLTKDAGKLTMGQPLVILAPHAVEALVKQPPDRWLSNARMTHYQALLLDTDRVQFGPVVALNPATLLPLPEEGLQHNCLDILAEAHGTRPDLTDQPLPDADHTWYTDGSSLLQEGQRKAGAAVTTETEVIWAKALPAGTSAQRAELIALTQALKMAEGKKLNVYTDSRYAFATAHIHGEIYRRRGWLTSEGKEIKNKDEILALLKALFLPKRLSIIHCPGHQKGHSAEARGNRMADQAARKAAITETPDTSTLLIENSSPSGGS

SEQ ID NO: 26007-27000 - skipped (994 entries)

SEQ ID NO: 27001 - RNA, 92 nt, synthetic construct
  source 1..92: mol_type = other RNA
  modified_base 1: mod_base = OTHER; note = 2'-O-methyl modified nucleotide with phosphorothioate linkage
  modified_base 2: mod_base = OTHER; note = 2'-O-methyl modified nucleotide with phosphorothioate linkage
  modified_base 3: mod_base = OTHER; note = 2'-O-methyl modified nucleotide with phosphorothioate linkage
  modified_base 89: mod_base = OTHER; note = Nucleotide with phosphorothioate linkage
  modified_base 90: mod_base = OTHER; note = 2'-O-methyl modified nucleotide with phosphorothioate linkage
  modified_base 91: mod_base = OTHER; note = 2'-O-methyl modified nucleotide with phosphorothioate linkage
  modified_base 92: mod_base = OTHER; note = 2'-O-methyl modified nucleotide
aaggctgtgctgaccatcgagtctttgtactctggtaccagaagctacaaagataaggcttcatgccgaaatcatttctcgtcgatggtcag

SEQ ID NO: 27002 - RNA, 92 nt, synthetic construct; identical to SEQ ID NO: 27001
  source 1..92: mol_type = other RNA
  modified_base 1: mod_base = OTHER; note = 2'-O-methyl modified nucleotide with phosphorothioate linkage
  modified_base 2: mod_base = OTHER; note = 2'-O-methyl modified nucleotide with phosphorothioate linkage
  modified_base 3: mod_base = OTHER; note = 2'-O-methyl modified nucleotide with phosphorothioate linkage
  modified_base 21: mod_base = OTHER; note = 2'-O-methyl modified nucleotide
  modified_base 22: mod_base = OTHER; note = 2'-O-methyl modified nucleotide
  modified_base 23: mod_base = OTHER; note = 2'-O-methyl modified nucleotide
  modified_base 89: mod_base = OTHER; note = Nucleotide with phosphorothioate linkage
  modified_base 90: mod_base = OTHER; note = 2'-O-methyl modified nucleotide with phosphorothioate linkage
  modified_base 91: mod_base = OTHER; note = 2'-O-methyl modified nucleotide with phosphorothioate linkage
  modified_base 92: mod_base = OTHER; note = 2'-O-methyl modified nucleotide

SEQ ID NO: 27003 - RNA, 92 nt, synthetic construct; identical to SEQ ID NO: 27001
  source 1..92: mol_type = other RNA
  modified_base 1: mod_base = OTHER; note = 2'-O-methyl modified nucleotide with phosphorothioate linkage
  modified_base 2: mod_base = OTHER; note = 2'-O-methyl modified nucleotide with phosphorothioate linkage
  modified_base 3: mod_base = OTHER; note = 2'-O-methyl modified nucleotide with phosphorothioate linkage
  modified_base 24: mod_base = OTHER; note = 2'-O-methyl modified nucleotide
  modified_base 25: mod_base = OTHER; note = 2'-O-methyl modified nucleotide
  modified_base 26: mod_base = OTHER; note = 2'-O-methyl modified nucleotide
  modified_base 89: mod_base = OTHER; note = Nucleotide with phosphorothioate linkage
  modified_base 90: mod_base = OTHER; note = 2'-O-methyl modified nucleotide with phosphorothioate linkage
  modified_base 91: mod_base = OTHER; note = 2'-O-methyl modified nucleotide with phosphorothioate linkage
  modified_base 92: mod_base = OTHER; note = 2'-O-methyl modified nucleotide

SEQ ID NO: 27004 - RNA, 92 nt, synthetic construct; identical to SEQ ID NO: 27001
  source 1..92: mol_type = other RNA
  modified_base 1: mod_base = OTHER; note = 2'-O-methyl modified nucleotide with phosphorothioate linkage
  modified_base 2: mod_base = OTHER; note = 2'-O-methyl modified nucleotide with phosphorothioate linkage
  modified_base 3: mod_base = OTHER; note = 2'-O-methyl modified nucleotide with phosphorothioate linkage
  modified_base 27: mod_base = OTHER; note = 2'-O-methyl modified nucleotide
  modified_base 28: mod_base = OTHER; note = 2'-O-methyl modified nucleotide
  modified_base 29: mod_base = OTHER; note = 2'-O-methyl modified nucleotide
  modified_base 89: mod_base = OTHER; note = Nucleotide with phosphorothioate linkage
  modified_base 90: mod_base = OTHER; note = 2'-O-methyl modified nucleotide with phosphorothioate linkage
  modified_base 91: mod_base = OTHER; note = 2'-O-methyl modified nucleotide with phosphorothioate linkage
  modified_base 92: mod_base = OTHER; note = 2'-O-methyl modified nucleotide

SEQ ID NO: 27005 - RNA, 92 nt, synthetic construct; identical to SEQ ID NO: 27001
  source 1..92: mol_type = other RNA
  modified_base 1: mod_base = OTHER; note = 2'-O-methyl modified nucleotide with phosphorothioate linkage
  modified_base 2: mod_base = OTHER; note = 2'-O-methyl modified nucleotide with phosphorothioate linkage
  modified_base 3: mod_base = OTHER; note = 2'-O-methyl modified nucleotide with phosphorothioate linkage
  modified_base 30: mod_base = OTHER; note = 2'-O-methyl modified nucleotide
  modified_base 31: mod_base = OTHER; note = 2'-O-methyl modified nucleotide
  modified_base 32: mod_base = OTHER; note = 2'-O-methyl modified nucleotide
  modified_base 89: mod_base = OTHER; note = Nucleotide with phosphorothioate linkage
  modified_base 90: mod_base = OTHER; note = 2'-O-methyl modified nucleotide with phosphorothioate linkage
  modified_base 91: mod_base = OTHER; note = 2'-O-methyl modified nucleotide with phosphorothioate linkage
  modified_base 92: mod_base = OTHER; note = 2'-O-methyl modified nucleotide

SEQ ID NO: 27006 - RNA, 92 nt, synthetic construct; identical to SEQ ID NO: 27001
  source 1..92: mol_type = other RNA
  modified_base 1: mod_base = OTHER; note = 2'-O-methyl modified nucleotide with phosphorothioate linkage
  modified_base 2: mod_base = OTHER; note = 2'-O-methyl modified nucleotide with phosphorothioate linkage
  modified_base 3: mod_base = OTHER; note = 2'-O-methyl modified nucleotide with phosphorothioate linkage
  modified_base 33: mod_base = OTHER; note = 2'-O-methyl modified nucleotide
  modified_base 34: mod_base = OTHER; note = 2'-O-methyl modified nucleotide
  modified_base 35: mod_base = OTHER; note = 2'-O-methyl modified nucleotide
  modified_base 89: mod_base = OTHER; note = Nucleotide with phosphorothioate linkage
  modified_base 90: mod_base = OTHER; note = 2'-O-methyl modified nucleotide with phosphorothioate linkage
  modified_base 91: mod_base = OTHER; note = 2'-O-methyl modified nucleotide with phosphorothioate linkage
  modified_base 92: mod_base = OTHER; note = 2'-O-methyl modified nucleotide

SEQ ID NO: 27007 - RNA, 92 nt, synthetic construct; identical to SEQ ID NO: 27001
  source 1..92: mol_type = other RNA
  modified_base 1: mod_base = OTHER; note = 2'-O-methyl modified nucleotide with phosphorothioate linkage
  modified_base 2: mod_base = OTHER; note = 2'-O-methyl modified nucleotide with phosphorothioate linkage
  modified_base 3: mod_base = OTHER; note = 2'-O-methyl modified nucleotide with phosphorothioate linkage
  modified_base 36: mod_base = OTHER; note = 2'-O-methyl modified nucleotide
  modified_base 37: mod_base = OTHER; note = 2'-O-methyl modified nucleotide
  modified_base 38: mod_base = OTHER; note = 2'-O-methyl modified nucleotide
  modified_base 89: mod_base = OTHER; note = Nucleotide with phosphorothioate linkage
  modified_base 90: mod_base = OTHER; note = 2'-O-methyl modified nucleotide with phosphorothioate linkage
  modified_base 91: mod_base = OTHER; note = 2'-O-methyl modified nucleotide with phosphorothioate linkage
  modified_base 92: mod_base = OTHER; note = 2'-O-methyl modified nucleotide

SEQ ID NO: 27008 - RNA, 92 nt, synthetic construct; identical to SEQ ID NO: 27001
  source 1..92: mol_type = other RNA
  modified_base 1: mod_base = OTHER; note = 2'-O-methyl modified nucleotide with phosphorothioate linkage
  modified_base 2: mod_base = OTHER; note = 2'-O-methyl modified nucleotide with phosphorothioate linkage
  modified_base 3: mod_base = OTHER; note = 2'-O-methyl modified nucleotide with phosphorothioate linkage
  modified_base 39: mod_base = OTHER; note = 2'-O-methyl modified nucleotide
  modified_base 40: mod_base = OTHER; note = 2'-O-methyl modified nucleotide
  modified_base 41: mod_base = OTHER; note = 2'-O-methyl modified nucleotide
  modified_base 89: mod_base = OTHER; note = Nucleotide with phosphorothioate linkage
  modified_base 90: mod_base = OTHER; note = 2'-O-methyl modified nucleotide with phosphorothioate linkage
  modified_base 91: mod_base = OTHER; note = 2'-O-methyl modified nucleotide with phosphorothioate linkage
  modified_base 92: mod_base = OTHER; note = 2'-O-methyl modified nucleotide

SEQ ID NO: 27009 - RNA, 92 nt, synthetic construct; identical to SEQ ID NO: 27001
  source 1..92: mol_type = other RNA
  modified_base 1: mod_base = OTHER; note = 2'-O-methyl modified nucleotide with phosphorothioate linkage
  modified_base 2: mod_base = OTHER; note = 2'-O-methyl modified nucleotide with phosphorothioate linkage
  modified_base 3: mod_base = OTHER; note = 2'-O-methyl modified nucleotide with phosphorothioate linkage
  modified_base 42: mod_base = OTHER; note = 2'-O-methyl modified nucleotide
  modified_base 43: mod_base = OTHER; note = 2'-O-methyl modified nucleotide
  modified_base 44: mod_base = OTHER; note = 2'-O-methyl modified nucleotide
  modified_base 89: mod_base = OTHER; note = Nucleotide with phosphorothioate linkage
  modified_base 90: mod_base = OTHER; note = 2'-O-methyl modified nucleotide with phosphorothioate linkage
  modified_base 91: mod_base = OTHER; note = 2'-O-methyl modified nucleotide with phosphorothioate linkage
  modified_base 92: mod_base = OTHER; note = 2'-O-methyl modified nucleotide

SEQ ID NO: 27010 - RNA, 92 nt, synthetic construct; identical to SEQ ID NO: 27001
  source 1..92: mol_type = other RNA
  modified_base 1: mod_base = OTHER; note = 2'-O-methyl modified nucleotide with phosphorothioate linkage
  modified_base 2: mod_base = OTHER; note = 2'-O-methyl modified nucleotide with phosphorothioate linkage
  modified_base 3: mod_base = OTHER; note = 2'-O-methyl modified nucleotide with phosphorothioate linkage
  modified_base 45: mod_base = OTHER; note = 2'-O-methyl modified nucleotide
  modified_base 46: mod_base = OTHER; note = 2'-O-methyl modified nucleotide
  modified_base 47: mod_base = OTHER; note = 2'-O-methyl modified nucleotide
  modified_base 89: mod_base = OTHER; note = Nucleotide with phosphorothioate linkage
  modified_base 90: mod_base = OTHER; note = 2'-O-methyl modified nucleotide with phosphorothioate linkage
  modified_base 91: mod_base = OTHER; note = 2'-O-methyl modified nucleotide with phosphorothioate linkage
  modified_base 92: mod_base = OTHER; note = 2'-O-methyl modified nucleotide

SEQ ID NO: 27011 - RNA, 92 nt, synthetic construct; identical to SEQ ID NO: 27001
  source 1..92: mol_type = other RNA
  modified_base 1: mod_base = OTHER; note = 2'-O-methyl modified nucleotide with phosphorothioate linkage
  modified_base 2: mod_base = OTHER; note = 2'-O-methyl modified nucleotide with phosphorothioate linkage
  modified_base 3: mod_base = OTHER; note = 2'-O-methyl modified nucleotide with phosphorothioate linkage
  modified_base 48: mod_base = OTHER; note = 2'-O-methyl modified nucleotide
  modified_base 49: mod_base = OTHER; note = 2'-O-methyl modified nucleotide
  modified_base 50: mod_base = OTHER; note = 2'-O-methyl modified nucleotide
  modified_base 89: mod_base = OTHER; note = Nucleotide with phosphorothioate linkage
  modified_base 90: mod_base = OTHER; note = 2'-O-methyl modified nucleotide with phosphorothioate linkage
  modified_base 91: mod_base = OTHER; note = 2'-O-methyl modified nucleotide with phosphorothioate linkage
  modified_base 92: mod_base = OTHER; note = 2'-O-methyl modified nucleotide

SEQ ID NO: 27012 - RNA, 92 nt, synthetic construct; identical to SEQ ID NO: 27001
  source 1..92: mol_type = other RNA
  modified_base 1: mod_base = OTHER; note = 2'-O-methyl modified nucleotide with phosphorothioate linkage
  modified_base 2: mod_base = OTHER; note = 2'-O-methyl modified nucleotide with phosphorothioate linkage
  modified_base 3: mod_base = OTHER; note = 2'-O-methyl modified nucleotide with phosphorothioate linkage
  modified_base 51: mod_base = OTHER; note = 2'-O-methyl modified nucleotide
  modified_base 52: mod_base = OTHER; note = 2'-O-methyl modified nucleotide
  modified_base 53: mod_base = OTHER; note = 2'-O-methyl modified nucleotide
  modified_base 89: mod_base = OTHER; note = Nucleotide with phosphorothioate linkage
  modified_base 90: mod_base = OTHER; note = 2'-O-methyl modified nucleotide with phosphorothioate linkage
  modified_base 91: mod_base = OTHER; note = 2'-O-methyl modified nucleotide with phosphorothioate linkage
  modified_base 92: mod_base = OTHER; note = 2'-O-methyl modified nucleotide

SEQ ID NO: 27013 - RNA, 92 nt, synthetic construct; identical to SEQ ID NO: 27001
  source 1..92: mol_type = other RNA
  modified_base 1: mod_base = OTHER; note = 2'-O-methyl modified nucleotide with phosphorothioate linkage
  modified_base 2: mod_base = OTHER; note = 2'-O-methyl modified nucleotide with phosphorothioate linkage
  modified_base 3: mod_base = OTHER; note = 2'-O-methyl modified nucleotide with phosphorothioate linkage
  modified_base 54: mod_base = OTHER; note = 2'-O-methyl modified nucleotide
  modified_base 55: mod_base = OTHER; note = 2'-O-methyl modified nucleotide
  modified_base 56: mod_base = OTHER; note = 2'-O-methyl modified nucleotide
  modified_base 89: mod_base = OTHER; note = Nucleotide with phosphorothioate linkage
  modified_base 90: mod_base = OTHER; note = 2'-O-methyl modified nucleotide with phosphorothioate linkage
  modified_base 91: mod_base = OTHER; note = 2'-O-methyl modified nucleotide with phosphorothioate linkage
  modified_base 92: mod_base = OTHER; note = 2'-O-methyl modified nucleotide

SEQ ID NO: 27014 - RNA, 92 nt, synthetic construct; identical to SEQ ID NO: 27001
  source 1..92: mol_type = other RNA
  modified_base 1: mod_base = OTHER; note = 2'-O-methyl modified nucleotide with phosphorothioate linkage
  modified_base 2: mod_base = OTHER; note = 2'-O-methyl modified nucleotide with phosphorothioate linkage
  modified_base 3: mod_base = OTHER; note = 2'-O-methyl modified nucleotide with phosphorothioate linkage
  modified_base 57: mod_base = OTHER; note = 2'-O-methyl modified nucleotide
  modified_base 58: mod_base = OTHER; note = 2'-O-methyl modified nucleotide
  modified_base 59: mod_base = OTHER; note = 2'-O-methyl modified nucleotide
  modified_base 89: mod_base = OTHER; note = Nucleotide with phosphorothioate linkage
  modified_base 90: mod_base = OTHER; note = 2'-O-methyl modified nucleotide with phosphorothioate linkage
  modified_base 91: mod_base = OTHER; note = 2'-O-methyl modified nucleotide with phosphorothioate linkage
  modified_base 92: mod_base = OTHER; note = 2'-O-methyl modified nucleotide

SEQ ID NO: 27015 - RNA, 92 nt, synthetic construct; identical to SEQ ID NO: 27001
  source 1..92: mol_type = other RNA
  modified_base 1: mod_base = OTHER; note = 2'-O-methyl modified nucleotide with phosphorothioate linkage
  modified_base 2: mod_base = OTHER; note = 2'-O-methyl modified nucleotide with phosphorothioate linkage
  modified_base 3: mod_base = OTHER; note = 2'-O-methyl modified nucleotide with phosphorothioate linkage
  modified_base 60: mod_base = OTHER; note = 2'-O-methyl modified nucleotide
  modified_base 61: mod_base = OTHER; note = 2'-O-methyl modified nucleotide
  modified_base 62: mod_base = OTHER; note = 2'-O-methyl modified nucleotide
  modified_base 89: mod_base = OTHER; note = Nucleotide with phosphorothioate linkage
  modified_base 90: mod_base = OTHER; note = 2'-O-methyl modified nucleotide with phosphorothioate linkage
  modified_base 91: mod_base = OTHER; note = 2'-O-methyl modified nucleotide with phosphorothioate linkage
  modified_base 92: mod_base = OTHER; note = 2'-O-methyl modified nucleotide

SEQ ID NO: 27016 - RNA, 92 nt, synthetic construct; identical to SEQ ID NO: 27001
  source 1..92: mol_type = other RNA
  modified_base 1: mod_base = OTHER; note = 2'-O-methyl modified nucleotide with phosphorothioate linkage
  modified_base 2: mod_base = OTHER; note = 2'-O-methyl modified nucleotide with phosphorothioate linkage
  modified_base 3: mod_base = OTHER; note = 2'-O-methyl modified nucleotide with phosphorothioate linkage
  modified_base 63: mod_base = OTHER; note = 2'-O-methyl modified nucleotide
  modified_base 64: mod_base = OTHER; note = 2'-O-methyl modified nucleotide
  modified_base 65: mod_base = OTHER; note = 2'-O-methyl modified nucleotide
  modified_base 89: mod_base = OTHER; note = Nucleotide with phosphorothioate linkage
  modified_base 90: mod_base = OTHER; note = 2'-O-methyl modified nucleotide with phosphorothioate linkage
  modified_base 91: mod_base = OTHER; note = 2'-O-methyl modified nucleotide with phosphorothioate linkage
  modified_base 92: mod_base = OTHER; note = 2'-O-methyl modified nucleotide

SEQ ID NO: 27017 - RNA, 92 nt, synthetic construct; identical to SEQ ID NO: 27001
  source 1..92: mol_type = other RNA
  modified_base 1: mod_base = OTHER; note = 2'-O-methyl modified nucleotide with phosphorothioate linkage
  modified_base 2: mod_base = OTHER; note = 2'-O-methyl modified nucleotide with phosphorothioate linkage
  modified_base 3: mod_base = OTHER; note = 2'-O-methyl modified nucleotide with phosphorothioate linkage
  modified_base 66: mod_base = OTHER; note = 2'-O-methyl modified nucleotide
  modified_base 67: mod_base = OTHER; note = 2'-O-methyl modified nucleotide
  modified_base 68: mod_base = OTHER; note = 2'-O-methyl modified nucleotide
  modified_base 89: mod_base = OTHER; note = Nucleotide with phosphorothioate linkage
  modified_base 90: mod_base = OTHER; note = 2'-O-methyl modified nucleotide with phosphorothioate linkage
  modified_base 91: mod_base = OTHER; note = 2'-O-methyl modified nucleotide with phosphorothioate linkage
  modified_base 92: mod_base = OTHER; note = 2'-O-methyl modified nucleotide

SEQ ID NO: 27018 - RNA, 92 nt, synthetic construct; identical to SEQ ID NO: 27001
  source 1..92: mol_type = other RNA
  modified_base 1: mod_base = OTHER; note = 2'-O-methyl modified nucleotide with phosphorothioate linkage
  modified_base 2: mod_base = OTHER; note = 2'-O-methyl modified nucleotide with phosphorothioate linkage
  modified_base 3: mod_base = OTHER; note = 2'-O-methyl modified nucleotide with phosphorothioate linkage
  modified_base 69: mod_base = OTHER; note = 2'-O-methyl modified nucleotide
  modified_base 70: mod_base = OTHER; note = 2'-O-methyl modified nucleotide
  modified_base 71: mod_base = OTHER; note = 2'-O-methyl modified nucleotide
  modified_base 89: mod_base = OTHER; note = Nucleotide with phosphorothioate linkage
  modified_base 90: mod_base = OTHER; note = 2'-O-methyl modified nucleotide with phosphorothioate linkage
  modified_base 91: mod_base = OTHER; note = 2'-O-methyl modified nucleotide with phosphorothioate linkage
  modified_base 92: mod_base = OTHER; note = 2'-O-methyl modified nucleotide

SEQ ID NO: 27019 - RNA, 92 nt, synthetic construct; identical to SEQ ID NO: 27001
  source 1..92: mol_type = other RNA
  modified_base 1: mod_base = OTHER; note = 2'-O-methyl modified nucleotide with phosphorothioate linkage
  modified_base 2: mod_base = OTHER; note = 2'-O-methyl modified nucleotide with phosphorothioate linkage
  modified_base 3: mod_base = OTHER; note = 2'-O-methyl modified nucleotide with phosphorothioate linkage
  modified_base 72: mod_base = OTHER; note = 2'-O-methyl modified nucleotide
  modified_base 73: mod_base = OTHER; note = 2'-O-methyl modified nucleotide
  modified_base 74: mod_base = OTHER; note = 2'-O-methyl modified nucleotide
  modified_base 89: mod_base = OTHER; note = Nucleotide with phosphorothioate linkage
  modified_base 90: mod_base = OTHER; note = 2'-O-methyl modified nucleotide with phosphorothioate linkage
  modified_base 91: mod_base = OTHER; note = 2'-O-methyl modified nucleotide with phosphorothioate linkage
  modified_base 92: mod_base = OTHER; note = 2'-O-methyl modified nucleotide

SEQ ID NO: 27020 - RNA, 92 nt, synthetic construct; identical to SEQ ID NO: 27001
  source 1..92: mol_type = other RNA
  modified_base 1: mod_base = OTHER; note = 2'-O-methyl modified nucleotide with phosphorothioate linkage
  modified_base 2: mod_base = OTHER; note = 2'-O-methyl modified nucleotide with phosphorothioate linkage
  modified_base 3: mod_base = OTHER; note = 2'-O-methyl modified nucleotide with phosphorothioate linkage
  modified_base 30: mod_base = OTHER; note = 2'-O-methyl modified nucleotide
  modified_base 31: mod_base = OTHER; note = 2'-O-methyl modified nucleotide
  modified_base 32: mod_base = OTHER; note = 2'-O-methyl modified nucleotide
  modified_base 33: mod_base = OTHER; note = 2'-O-methyl modified nucleotide
  modified_base 34: mod_base = OTHER; note = 2'-O-methyl modified nucleotide
  modified_base 35: mod_base = OTHER; note = 2'-O-methyl modified nucleotide
  modified_base 36: mod_base = OTHER; note = 2'-O-methyl modified nucleotide
  modified_base 37: mod_base = OTHER; note = 2'-O-methyl modified nucleotide
  modified_base 38: mod_base = OTHER; note = 2'-O-methyl modified nucleotide
  modified_base 39: mod_base = OTHER; note = 2'-O-methyl modified nucleotide
  modified_base 40: mod_base = OTHER; note = 2'-O-methyl modified nucleotide
  modified_base 41: mod_base = OTHER; note = 2'-O-methyl modified nucleotide
  modified_base 42: mod_base = OTHER; note = 2'-O-methyl modified nucleotide
  modified_base 43: mod_base = OTHER; note = 2'-O-methyl modified nucleotide
  modified_base 44: mod_base = OTHER; note = 2'-O-methyl modified nucleotide
  modified_base 45: mod_base = OTHER; note = 2'-O-methyl modified nucleotide
  modified_base 89: mod_base = OTHER; note = Nucleotide with phosphorothioate linkage
  modified_base 90: mod_base = OTHER; note = 2'-O-methyl modified nucleotide with phosphorothioate linkage
  modified_base 91: mod_base = OTHER; note = 2'-O-methyl modified nucleotide with phosphorothioate linkage
  modified_base 92: mod_base = OTHER; note = 2'-O-methyl modified nucleotide

SEQ ID NO: 27021 - RNA, 92 nt, synthetic construct; identical to SEQ ID NO: 27001
  source 1..92: mol_type = other RNA
  modified_base 1: mod_base = OTHER; note = 2'-O-methyl modified nucleotide with phosphorothioate linkage
  modified_base 2: mod_base = OTHER; note = 2'-O-methyl modified nucleotide with phosphorothioate linkage
  modified_base 3: mod_base = OTHER; note = 2'-O-methyl modified nucleotide with phosphorothioate linkage
  modified_base 30: mod_base = OTHER; note = 2'-O-methyl modified nucleotide
  modified_base 31: mod_base = OTHER; note = 2'-O-methyl modified nucleotide
  modified_base 32: mod_base = OTHER; note = 2'-O-methyl modified nucleotide
  modified_base 33: mod_base = OTHER; note = 2'-O-methyl modified nucleotide
  modified_base 34: mod_base = OTHER; note = 2'-O-methyl modified nucleotide
  modified_base 35: mod_base = OTHER; note = 2'-O-methyl modified nucleotide
  modified_base 36: mod_base = OTHER; note = 2'-O-methyl modified nucleotide
  modified_base 37: mod_base = OTHER; note = 2'-O-methyl modified nucleotide
  modified_base 38: mod_base = OTHER; note = 2'-O-methyl modified nucleotide
  modified_base 39: mod_base = OTHER; note = 2'-O-methyl modified nucleotide
  modified_base 40: mod_base = OTHER; note = 2'-O-methyl modified nucleotide
  modified_base 41: mod_base = OTHER; note = 2'-O-methyl modified nucleotide
  modified_base 42: mod_base = OTHER; note = 2'-O-methyl modified nucleotide
  modified_base 43: mod_base = OTHER; note = 2'-O-methyl modified nucleotide
  modified_base 44: mod_base = OTHER; note = 2'-O-methyl modified nucleotide
  modified_base 45: mod_base = OTHER; note = 2'-O-methyl modified nucleotide
  modified_base 68: mod_base = OTHER; note = 2'-O-methyl modified nucleotide
  modified_base 69: mod_base = OTHER; note = 2'-O-methyl modified nucleotide
  modified_base 70: mod_base = OTHER; note = 2'-O-methyl modified nucleotide
  modified_base 71: mod_base = OTHER; note = 2'-O-methyl modified nucleotide
  modified_base 72: mod_base = OTHER; note = 2'-O-methyl modified nucleotide
  modified_base 73: mod_base = OTHER; note = 2'-O-methyl modified nucleotide
  modified_base 74: mod_base = OTHER; note = 2'-O-methyl modified nucleotide
  modified_base 89: mod_base = OTHER; note = Nucleotide with phosphorothioate linkage
  modified_base 90: mod_base = OTHER; note = 2'-O-methyl modified nucleotide with phosphorothioate linkage
  modified_base 91: mod_base = OTHER; note = 2'-O-methyl modified nucleotide with phosphorothioate linkage
  modified_base 92: mod_base = OTHER; note = 2'-O-methyl modified nucleotide

SEQ ID NO: 27022 - RNA, 92 nt, synthetic construct; identical to SEQ ID NO: 27001
  source 1..92: mol_type = other RNA
  modified_base 1: mod_base = OTHER; note = 2'-O-methyl modified nucleotide with phosphorothioate linkage
  modified_base 2: mod_base = OTHER; note = 2'-O-methyl modified nucleotide with phosphorothioate linkage
  modified_base 3: mod_base = OTHER; note = 2'-O-methyl modified nucleotide with phosphorothioate linkage
  modified_base 30: mod_base = OTHER; note = 2'-O-methyl modified nucleotide
  modified_base 31: mod_base = OTHER; note = 2'-O-methyl modified nucleotide
  modified_base 32: mod_base = OTHER; note = 2'-O-methyl modified nucleotide
  modified_base 33: mod_base = OTHER; note = 2'-O-methyl modified nucleotide
  modified_base 34: mod_base = OTHER; note = 2'-O-methyl modified nucleotide
  modified_base 35: mod_base = OTHER; note = 2'-O-methyl modified nucleotide
  modified_base 36: mod_base = OTHER; note = 2'-O-methyl modified nucleotide
  modified_base 37: mod_base = OTHER; note = 2'-O-methyl modified nucleotide
  modified_base 38: mod_base = OTHER; note = 2'-O-methyl modified nucleotide
  modified_base 39: mod_base = OTHER; note = 2'-O-methyl modified nucleotide
  modified_base 40: mod_base = OTHER; note = 2'-O-methyl modified nucleotide
  modified_base 41: mod_base = OTHER; note = 2'-O-methyl modified nucleotide
  modified_base 42: mod_base = OTHER; note = 2'-O-methyl modified nucleotide
  modified_base 43: mod_base = OTHER; note = 2'-O-methyl modified nucleotide
  modified_base 44: mod_base = OTHER; note = 2'-O-methyl modified nucleotide
  modified_base 45: mod_base = OTHER; note = 2'-O-methyl modified nucleotide
  modified_base 69: mod_base = OTHER; note = 2'-O-methyl modified nucleotide
  modified_base 70: mod_base = OTHER; note = 2'-O-methyl modified nucleotide
  modified_base 71: mod_base = OTHER; note = 2'-O-methyl modified nucleotide
  modified_base 72: mod_base = OTHER; note = 2'-O-methyl modified nucleotide
  modified_base 73: mod_base = OTHER; note = 2'-O-methyl modified nucleotide
  modified_base 74: mod_base = OTHER; note = 2'-O-methyl modified nucleotide
  modified_base 89: mod_base = OTHER; note = Nucleotide with phosphorothioate linkage
  modified_base 90: mod_base = OTHER; note = 2'-O-methyl modified nucleotide with phosphorothioate linkage
  modified_base 91: mod_base = OTHER; note = 2'-O-methyl modified nucleotide with phosphorothioate linkage
  modified_base 92: mod_base = OTHER; note = 2'-O-methyl modified nucleotide

SEQ ID NO: 27023 - RNA, 92 nt, synthetic construct; identical to SEQ ID NO: 27001
  source 1..92: mol_type = other RNA
  modified_base 1: mod_base = OTHER; note = 2'-O-methyl modified nucleotide with phosphorothioate linkage
  modified_base 2: mod_base = OTHER; note = 2'-O-methyl modified nucleotide with phosphorothioate linkage
  modified_base 3: mod_base = OTHER; note = 2'-O-methyl modified nucleotide with phosphorothioate linkage
  modified_base 30: mod_base = OTHER; note = 2'-O-methyl modified nucleotide
  modified_base 31: mod_base = OTHER; note = 2'-O-methyl modified nucleotide
  modified_base 32: mod_base = OTHER; note = 2'-O-methyl modified nucleotide
  modified_base 33: mod_base = OTHER; note = 2'-O-methyl modified nucleotide
  modified_base 34: mod_base = OTHER; note = 2'-O-methyl modified nucleotide
  modified_base 35: mod_base = OTHER; note = 2'-O-methyl modified nucleotide
  modified_base 36: mod_base = OTHER; note = 2'-O-methyl modified nucleotide
  modified_base 37: mod_base = OTHER; note = 2'-O-methyl modified nucleotide
  modified_base 38: mod_base = OTHER; note = 2'-O-methyl modified nucleotide
  modified_base 39: mod_base = OTHER; note = 2'-O-methyl modified nucleotide
  modified_base 40: mod_base = OTHER; note = 2'-O-methyl modified nucleotide
  modified_base 41: mod_base = OTHER; note = 2'-O-methyl modified nucleotide
  modified_base 42: mod_base = OTHER; note = 2'-O-methyl modified nucleotide
  modified_base 43: mod_base = OTHER; note = 2'-O-methyl modified nucleotide
  modified_base 44: mod_base = OTHER; note = 2'-O-methyl modified nucleotide
  modified_base 45: mod_base = OTHER; note = 2'-O-methyl modified nucleotide
  modified_base 70: mod_base = OTHER; note = 2'-O-methyl modified nucleotide
  modified_base 71: mod_base = OTHER; note = 2'-O-methyl modified nucleotide
  modified_base 72: mod_base = OTHER; note = 2'-O-methyl modified nucleotide
  modified_base 73: mod_base = OTHER; note = 2'-O-methyl modified nucleotide
  modified_base 74: mod_base = OTHER; note = 2'-O-methyl modified nucleotide
  modified_base 89: mod_base = OTHER; note = Nucleotide with phosphorothioate linkage
  modified_base 90: mod_base = OTHER; note = 2'-O-methyl modified nucleotide with phosphorothioate linkage
  modified_base 91: mod_base = OTHER; note = 2'-O-methyl modified nucleotide with phosphorothioate linkage
  modified_base 92: mod_base = OTHER; note = 2'-O-methyl modified nucleotide

SEQ ID NO: 27024 - RNA, 92 nt, synthetic construct; identical to SEQ ID NO: 27001
  source 1..92: mol_type = other RNA
  modified_base 1: mod_base = OTHER; note = 2'-O-methyl modified nucleotide with phosphorothioate linkage
  modified_base 2: mod_base = OTHER; note = 2'-O-methyl modified nucleotide with phosphorothioate linkage
  modified_base 3: mod_base = OTHER; note = 2'-O-methyl modified nucleotide with phosphorothioate linkage
  modified_base 30: mod_base = OTHER; note = 2'-O-methyl modified nucleotide
  modified_base 31: mod_base = OTHER; note = 2'-O-methyl modified nucleotide
  modified_base 32: mod_base = OTHER; note = 2'-O-methyl modified nucleotide
  modified_base 33: mod_base = OTHER; note = 2'-O-methyl modified nucleotide
  modified_base 34: mod_base = OTHER; note = 2'-O-methyl modified nucleotide
  modified_base 35: mod_base = OTHER; note = 2'-O-methyl modified nucleotide
  modified_base 36: mod_base = OTHER; note = 2'-O-methyl modified nucleotide
  modified_base 37: mod_base = OTHER; note = 2'-O-methyl modified nucleotide
  modified_base 38: mod_base = OTHER; note = 2'-O-methyl modified nucleotide
  modified_base 39: mod_base = OTHER; note = 2'-O-methyl modified nucleotide
  modified_base 40: mod_base = OTHER; note = 2'-O-methyl modified nucleotide
  modified_base 41: mod_base = OTHER; note = 2'-O-methyl modified nucleotide
  modified_base 42: mod_base = OTHER; note = 2'-O-methyl modified nucleotide
  modified_base 43: mod_base = OTHER; note = 2'-O-methyl modified nucleotide
  modified_base 44: mod_base = OTHER; note = 2'-O-methyl modified nucleotide
  modified_base 45: mod_base = OTHER; note = 2'-O-methyl modified nucleotide
  modified_base 71: mod_base = OTHER; note = 2'-O-methyl modified nucleotide
  modified_base 72: mod_base = OTHER; note = 2'-O-methyl modified nucleotide
  modified_base 73: mod_base = OTHER; note = 2'-O-methyl modified nucleotide
  modified_base 74: mod_base = OTHER; note = 2'-O-methyl modified nucleotide
  modified_base 89: mod_base = OTHER; note = Nucleotide with phosphorothioate linkage
  modified_base 90: mod_base = OTHER; note = 2'-O-methyl modified nucleotide with phosphorothioate linkage
  modified_base 91: mod_base = OTHER; note = 2'-O-methyl modified nucleotide with phosphorothioate linkage
  modified_base 92: mod_base = OTHER; note = 2'-O-methyl modified nucleotide

SEQ ID NO: 27025 - RNA, 92 nt, synthetic construct; identical to SEQ ID NO: 27001
  source 1..92: mol_type = other RNA
  modified_base 1: mod_base = OTHER; note = 2'-O-methyl modified nucleotide with phosphorothioate linkage
  modified_base 2: mod_base = OTHER; note = 2'-O-methyl modified nucleotide with phosphorothioate linkage
  modified_base 3: mod_base = OTHER; note = 2'-O-methyl modified nucleotide with phosphorothioate linkage
  modified_base 21: mod_base = OTHER; note = 2'-O-methyl modified nucleotide
  modified_base 26: mod_base = OTHER; note = 2'-O-methyl modified nucleotide
  modified_base 27: mod_base = OTHER; note = 2'-O-methyl modified nucleotide
  modified_base 28: mod_base = OTHER; note = 2'-O-methyl modified nucleotide
  modified_base 29: mod_base = OTHER; note = 2'-O-methyl modified nucleotide
  modified_base 30: mod_base = OTHER; note = 2'-O-methyl modified nucleotide
  modified_base 31: mod_base = OTHER; note = 2'-O-methyl modified nucleotide
  modified_base 32: mod_base = OTHER; note = 2'-O-methyl modified nucleotide
  modified_base 33: mod_base = OTHER; note = 2'-O-methyl modified nucleotide
  modified_base 34: mod_base = OTHER; note = 2'-O-methyl modified nucleotide
  modified_base 35: mod_base = OTHER; note = 2'-O-methyl modified nucleotide
  modified_base 36: mod_base = OTHER; note = 2'-O-methyl modified nucleotide
  modified_base 37: mod_base = OTHER; note = 2'-O-methyl modified nucleotide
  modified_base 38: mod_base = OTHER; note = 2'-O-methyl modified nucleotide
  modified_base 39: mod_base = OTHER; note = 2'-O-methyl modified nucleotide
  modified_base 40: mod_base = OTHER; note = 2'-O-methyl modified nucleotide
  modified_base 41: mod_base = OTHER; note = 2'-O-methyl modified nucleotide
  modified_base 42: mod_base = OTHER; note = 2'-O-methyl modified nucleotide
  modified_base 43: mod_base = OTHER; note = 2'-O-methyl modified nucleotide
  modified_base 44: mod_base = OTHER; note = 2'-O-methyl modified nucleotide
  modified_base 45: mod_base = OTHER; note = 2'-O-methyl modified nucleotide
  modified_base 68: mod_base = OTHER; note = 2'-O-methyl modified nucleotide
  modified_base 69: mod_base = OTHER; note = 2'-O-methyl modified nucleotide
  modified_base 70: mod_base = OTHER; note = 2'-O-methyl modified nucleotide
  modified_base 71: mod_base = OTHER; note = 2'-O-methyl modified nucleotide
  modified_base 72: mod_base = OTHER; note = 2'-O-methyl modified nucleotide
  modified_base 73: mod_base = OTHER; note = 2'-O-methyl modified nucleotide
  modified_base 74: mod_base = OTHER; note = 2'-O-methyl modified nucleotide
  modified_base 89: mod_base = OTHER; note = Nucleotide with phosphorothioate linkage
  modified_base 90: mod_base = OTHER; note = 2'-O-methyl modified nucleotide with phosphorothioate linkage
  modified_base 91: mod_base = OTHER; note = 2'-O-methyl modified nucleotide with phosphorothioate linkage
  modified_base 92: mod_base = OTHER; note = 2'-O-methyl modified nucleotide

SEQ ID NO: 27026 - RNA, 92 nt, synthetic construct; identical to SEQ ID NO: 27001
  source 1..92: mol_type = other RNA
  modified_base 1: mod_base = OTHER; note = 2'-O-methyl modified nucleotide with phosphorothioate linkage
  modified_base 2: mod_base = OTHER; note = 2'-O-methyl modified nucleotide with phosphorothioate linkage
  modified_base 3: mod_base = OTHER; note = 2'-O-methyl modified nucleotide with phosphorothioate linkage
  modified_base 21: mod_base = OTHER; note = 2'-O-methyl modified nucleotide
  modified_base 26: mod_base = OTHER; note = 2'-O-methyl modified nucleotide
  modified_base 27: mod_base = OTHER; note = 2'-O-methyl modified nucleotide
  modified_base 28: mod_base = OTHER; note = 2'-O-methyl modified nucleotide
  modified_base 29: mod_base = OTHER; note = 2'-O-methyl modified nucleotide
  modified_base 30: mod_base = OTHER; note = 2'-O-methyl modified nucleotide
  modified_base 31: mod_base = OTHER; note = 2'-O-methyl modified nucleotide
  modified_base 32: mod_base = OTHER; note = 2'-O-methyl modified nucleotide
  modified_base 33: mod_base = OTHER; note = 2'-O-methyl modified nucleotide
  modified_base 34: mod_base = OTHER; note = 2'-O-methyl modified nucleotide
  modified_base 35: mod_base = OTHER; note = 2'-O-methyl modified nucleotide
  modified_base 36: mod_base = OTHER; note = 2'-O-methyl modified nucleotide
  modified_base 37: mod_base = OTHER; note = 2'-O-methyl modified nucleotide
  modified_base 38: mod_base = OTHER; note = 2'-O-methyl modified nucleotide
  modified_base 39: mod_base = OTHER; note = 2'-O-methyl modified nucleotide
  modified_base 40: mod_base = OTHER; note = 2'-O-methyl modified nucleotide
  modified_base 41: mod_base = OTHER; note = 2'-O-methyl modified nucleotide
  modified_base 42: mod_base = OTHER; note = 2'-O-methyl modified nucleotide
  modified_base 43: mod_base = OTHER; note = 2'-O-methyl modified nucleotide
  modified_base 44: mod_base = OTHER; note = 2'-O-methyl modified nucleotide
  modified_base 45: mod_base = OTHER; note = 2'-O-methyl modified nucleotide
  modified_base 52: mod_base = OTHER; note = 2'-O-methyl modified nucleotide
  modified_base 53: mod_base = OTHER; note = 2'-O-methyl modified nucleotide
  modified_base 54: mod_base = OTHER; note = 2'-O-methyl modified nucleotide
  modified_base 59: mod_base = OTHER; note = 2'-O-methyl modified nucleotide
  modified_base 60: mod_base = OTHER; note = 2'-O-methyl modified nucleotide
  modified_base 61: mod_base = OTHER; note = 2'-O-methyl modified nucleotide
  modified_base 68: mod_base = OTHER; note = 2'-O-methyl modified nucleotide
  modified_base 69: mod_base = OTHER; note = 2'-O-methyl modified nucleotide
  modified_base 70: mod_base = OTHER; note = 2'-O-methyl modified nucleotide
  modified_base 71: mod_base = OTHER; note = 2'-O-methyl modified nucleotide
  modified_base 72: mod_base = OTHER; note = 2'-O-methyl modified nucleotide
  modified_base 73: mod_base = OTHER; note = 2'-O-methyl modified nucleotide
  modified_base 74: mod_base = OTHER; note = 2'-O-methyl modified nucleotide
  modified_base 89: mod_base = OTHER; note = Nucleotide with phosphorothioate linkage
  modified_base 90: mod_base = OTHER; note = 2'-O-methyl modified nucleotide with phosphorothioate linkage
  modified_base 91: mod_base = OTHER; note = 2'-O-methyl modified nucleotide with phosphorothioate linkage
  modified_base 92: mod_base = OTHER; note = 2'-O-methyl modified nucleotide

SEQ ID NO: 27027 - RNA, 92 nt, synthetic construct; identical to SEQ ID NO: 27001
  source 1..92: mol_type = other RNA
  modified_base 1: mod_base = OTHER; note = 2'-O-methyl modified nucleotide with phosphorothioate linkage
  modified_base 2: mod_base = OTHER; note = 2'-O-methyl modified nucleotide with phosphorothioate linkage
  modified_base 3: mod_base = OTHER; note = 2'-O-methyl modified nucleotide with phosphorothioate linkage
  modified_base 32: mod_base = OTHER; note = 2'-O-methyl modified nucleotide
  modified_base 33: mod_base = OTHER; note = 2'-O-methyl modified nucleotide
  modified_base 34: mod_base = OTHER; note = 2'-O-methyl modified nucleotide
  modified_base 35: mod_base = OTHER; note = 2'-O-methyl modified nucleotide
  modified_base 36: mod_base = OTHER; note = 2'-O-methyl modified nucleotide
  modified_base 37: mod_base = OTHER; note = 2'-O-methyl modified nucleotide
  modified_base 38: mod_base = OTHER; note = 2'-O-methyl modified nucleotide
  modified_base 39: mod_base = OTHER; note = 2'-O-methyl modified nucleotide
  modified_base 40: mod_base = OTHER; note = 2'-O-methyl modified nucleotide
  modified_base 41: mod_base = OTHER; note = 2'-O-methyl modified nucleotide
  modified_base 89: mod_base = OTHER; note = Nucleotide with phosphorothioate linkage
  modified_base 90: mod_base = OTHER; note = 2'-O-methyl modified nucleotide with phosphorothioate linkage
  modified_base 91: mod_base = OTHER; note = 2'-O-methyl modified nucleotide with phosphorothioate linkage
  modified_base 92: mod_base = OTHER; note = 2'-O-methyl modified nucleotide

SEQ ID NO: 27028 - RNA, 92 nt, synthetic construct; identical to SEQ ID NO: 27001
  source 1..92: mol_type = other RNA
  modified_base 1: mod_base = OTHER; note = 2'-O-methyl modified nucleotide with phosphorothioate linkage
  modified_base 2: mod_base = OTHER; note = 2'-O-methyl modified nucleotide with phosphorothioate linkage
  modified_base 3: mod_base = OTHER; note = 2'-O-methyl modified nucleotide with phosphorothioate linkage
  modified_base 24: mod_base = OTHER; note = 2'-O-methyl modified nucleotide
  modified_base 25: mod_base = OTHER; note = 2'-O-methyl modified nucleotide
  modified_base 26: mod_base = OTHER; note = 2'-O-methyl modified nucleotide
  modified_base 27: mod_base = OTHER; note = 2'-O-methyl modified nucleotide
  modified_base 28: mod_base = OTHER; note = 2'-O-methyl modified nucleotide
  modified_base 29: mod_base = OTHER; note = 2'-O-methyl modified nucleotide
  modified_base 30: mod_base = OTHER; note = 2'-O-methyl modified nucleotide
  modified_base 31: mod_base = OTHER; note = 2'-O-methyl modified nucleotide
  modified_base 32: mod_base = OTHER; note = 2'-O-methyl modified nucleotide
  modified_base 33: mod_base = OTHER; note = 2'-O-methyl modified nucleotide
  modified_base 34: mod_base = OTHER; note = 2'-O-methyl modified nucleotide
  modified_base 35: mod_base = OTHER; note = 2'-O-methyl modified nucleotide
  modified_base 36: mod_base = OTHER; note = 2'-O-methyl modified nucleotide
  modified_base 37: mod_base = OTHER; note = 2'-O-methyl modified nucleotide
  modified_base 38: mod_base = OTHER; note = 2'-O-methyl modified nucleotide
  modified_base 39: mod_base = OTHER; note = 2'-O-methyl modified nucleotide
  modified_base 40: mod_base = OTHER; note = 2'-O-methyl modified nucleotide
  modified_base 41: mod_base = OTHER; note = 2'-O-methyl modified nucleotide
  modified_base 42: mod_base = OTHER; note = 2'-O-methyl modified nucleotide
  modified_base 43: mod_base = OTHER; note = 2'-O-methyl modified nucleotide
  modified_base 44: mod_base = OTHER; note = 2'-O-methyl modified nucleotide
  modified_base 45: mod_base = OTHER; note = 2'-O-methyl modified nucleotide
  modified_base 46: mod_base = OTHER; note = 2'-O-methyl modified nucleotide
  modified_base 47: mod_base = OTHER; note = 2'-O-methyl modified nucleotide
  modified_base 48: mod_base = OTHER; note = 2'-O-methyl modified nucleotide
  modified_base 49: mod_base = OTHER; note = 2'-O-methyl modified nucleotide
  modified_base 50: mod_base = OTHER; note = 2'-O-methyl modified nucleotide
  modified_base 51: mod_base = OTHER; note = 2'-O-methyl modified nucleotide
  modified_base 52: mod_base = OTHER; note = 2'-O-methyl modified nucleotide
  modified_base 53: mod_base = OTHER; note = 2'-O-methyl modified nucleotide
  modified_base 54: mod_base = OTHER; note = 2'-O-methyl modified nucleotide
  modified_base 55: mod_base = OTHER; note = 2'-O-methyl modified nucleotide
  modified_base 56: mod_base = OTHER; note = 2'-O-methyl modified nucleotide
  modified_base 57: mod_base = OTHER; note = 2'-O-methyl modified nucleotide
  modified_base 58: mod_base = OTHER; note = 2'-O-methyl modified nucleotide
  modified_base 59: mod_base = OTHER; note = 2'-O-methyl modified nucleotide
  modified_base 60: mod_base = OTHER; note = 2'-O-methyl modified nucleotide
  modified_base 61: mod_base = OTHER; note = 2'-O-methyl modified nucleotide
  modified_base 62: mod_base = OTHER; note = 2'-O-methyl modified nucleotide
  modified_base 89: mod_base = OTHER; note = Nucleotide with phosphorothioate linkage
  modified_base 90: mod_base = OTHER; note = 2'-O-methyl modified nucleotide with phosphorothioate linkage
  modified_base 91: mod_base = OTHER; note = 2'-O-methyl modified nucleotide with phosphorothioate linkage
  modified_base 92: mod_base = OTHER; note = 2'-O-methyl modified nucleotide

SEQ ID NO: 27029 - RNA, 92 nt, synthetic construct; identical to SEQ ID NO: 27001
  source 1..92: mol_type = other RNA
  modified_base 1: mod_base = OTHER; note = 2'-O-methyl modified nucleotide with phosphorothioate linkage
  modified_base 2: mod_base = OTHER; note = 2'-O-methyl modified nucleotide with phosphorothioate linkage
  modified_base 3: mod_base = OTHER; note = 2'-O-methyl modified nucleotide with phosphorothioate linkage
  modified_base 24: mod_base = OTHER; note = 2'-O-methyl modified nucleotide
  modified_base 25: mod_base = OTHER; note = 2'-O-methyl modified nucleotide
  modified_base 26: mod_base = OTHER; note = 2'-O-methyl modified nucleotide
  modified_base 33: mod_base = OTHER; note = 2'-O-methyl modified nucleotide
  modified_base 34: mod_base = OTHER; note = 2'-O-methyl modified nucleotide
  modified_base 35: mod_base = OTHER; note = 2'-O-methyl modified nucleotide
  modified_base 36: mod_base = OTHER; note = 2'-O-methyl modified nucleotide
  modified_base 37: mod_base = OTHER; note = 2'-O-methyl modified nucleotide
  modified_base 38: mod_base = OTHER; note = 2'-O-methyl modified nucleotide
  modified_base 39: mod_base = OTHER; note = 2'-O-methyl modified nucleotide
  modified_base 40: mod_base = OTHER; note = 2'-O-methyl modified nucleotide
  modified_base 41: mod_base = OTHER; note = 2'-O-methyl modified nucleotide
  modified_base 42: mod_base = OTHER; note = 2'-O-methyl modified nucleotide
  modified_base 43: mod_base = OTHER; note = 2'-O-methyl modified nucleotide
  modified_base 44: mod_base = OTHER; note = 2'-O-methyl modified nucleotide
  modified_base 54: mod_base = OTHER; note = 2'-O-methyl modified nucleotide
  modified_base 55: mod_base = OTHER; note = 2'-O-methyl modified nucleotide
  modified_base 56: mod_base = OTHER; note = 2'-O-methyl modified nucleotide
  modified_base 57: mod_base = OTHER; note = 2'-O-methyl modified nucleotide
  modified_base 58: mod_base = OTHER; note = 2'-O-methyl modified nucleotide
  modified_base 59: mod_base = OTHER; note = 2'-O-methyl modified nucleotide
  modified_base 60: mod_base = OTHER; note = 2'-O-methyl modified nucleotide
  modified_base 61: mod_base = OTHER; note = 2'-O-methyl modified nucleotide
  modified_base 62: mod_base = OTHER; note = 2'-O-methyl modified nucleotide
  modified_base 89: mod_base = OTHER; note = Nucleotide with phosphorothioate linkage
  modified_base 90: mod_base = OTHER; note = 2'-O-methyl modified nucleotide with phosphorothioate linkage
  modified_base 91: mod_base = OTHER; note = 2'-O-methyl modified nucleotide with phosphorothioate linkage
  modified_base 92: mod_base = OTHER; note = 2'-O-methyl modified nucleotide

SEQ ID NO: 27030 - RNA, 92 nt, synthetic construct; identical to SEQ ID NO: 27001
  source 1..92: mol_type = other RNA
  modified_base 1: mod_base = OTHER; note = 2'-O-methyl modified nucleotide with phosphorothioate linkage
  modified_base 2: mod_base = OTHER; note = 2'-O-methyl modified nucleotide with phosphorothioate linkage
  modified_base 3: mod_base = OTHER; note = 2'-O-methyl modified nucleotide with phosphorothioate linkage
  modified_base 32: mod_base = OTHER; note = 2'-O-methyl modified nucleotide
  modified_base 33: mod_base = OTHER; note = 2'-O-methyl modified nucleotide
  modified_base 34: mod_base = OTHER; note = 2'-O-methyl modified nucleotide
  modified_base 35: mod_base = OTHER; note = 2'-O-methyl modified nucleotide
  modified_base 36: mod_base = OTHER; note = 2'-O-methyl modified nucleotide
  modified_base 37: mod_base = OTHER; note = 2'-O-methyl modified nucleotide
  modified_base 38: mod_base = OTHER; note = 2'-O-methyl modified nucleotide
  modified_base 39: mod_base = OTHER; note = 2'-O-methyl modified nucleotide
  modified_base 40: mod_base = OTHER; note = 2'-O-methyl modified nucleotide
  modified_base 41: mod_base = OTHER; note = 2'-O-methyl modified nucleotide
  modified_base 74: mod_base = OTHER; note = 2'-O-methyl modified nucleotide
  modified_base 89: mod_base = OTHER; note = Nucleotide with phosphorothioate linkage
  modified_base 90: mod_base = OTHER; note = 2'-O-methyl modified nucleotide with phosphorothioate linkage
  modified_base 91: mod_base = OTHER; note = 2'-O-methyl modified nucleotide with phosphorothioate linkage
  modified_base 92: mod_base = OTHER; note = 2'-O-methyl modified nucleotide

SEQ ID NO: 27031 - RNA, 92 nt, synthetic construct; identical to SEQ ID NO: 27001
  source 1..92: mol_type = other RNA
  modified_base 1: mod_base = OTHER; note = 2'-O-methyl modified nucleotide with phosphorothioate linkage
  modified_base 2: mod_base = OTHER; note = 2'-O-methyl modified nucleotide with phosphorothioate linkage
  modified_base 3: mod_base = OTHER; note = 2'-O-methyl modified nucleotide with phosphorothioate linkage
  modified_base 32: mod_base = OTHER; note = 2'-O-methyl modified nucleotide
  modified_base 33: mod_base = OTHER; note = 2'-O-methyl modified nucleotide
  modified_base 34: mod_base = OTHER; note = 2'-O-methyl modified nucleotide
  modified_base 35: mod_base = OTHER; note = 2'-O-methyl modified nucleotide
  modified_base 36: mod_base = OTHER; note = 2'-O-methyl modified nucleotide
  modified_base 37: mod_base = OTHER; note = 2'-O-methyl modified nucleotide
  modified_base 38: mod_base = OTHER; note = 2'-O-methyl modified nucleotide
  modified_base 39: mod_base = OTHER; note = 2'-O-methyl modified nucleotide
  modified_base 40: mod_base = OTHER; note = 2'-O-methyl modified nucleotide
  modified_base 41: mod_base = OTHER; note = 2'-O-methyl modified nucleotide
  modified_base 73: mod_base = OTHER; note = 2'-O-methyl modified nucleotide
  modified_base 89: mod_base = OTHER; note = Nucleotide with phosphorothioate linkage
  modified_base 90: mod_base = OTHER; note = 2'-O-methyl modified nucleotide with phosphorothioate linkage
  modified_base 91: mod_base = OTHER; note = 2'-O-methyl modified nucleotide with phosphorothioate linkage
  modified_base 92: mod_base = OTHER; note = 2'-O-methyl modified nucleotide

SEQ ID NO: 27032 - RNA, 92 nt, synthetic construct; identical to SEQ ID NO: 27001
  source 1..92: mol_type = other RNA
  modified_base 1: mod_base = OTHER; note = 2'-O-methyl modified nucleotide with phosphorothioate linkage
  modified_base 2: mod_base = OTHER; note = 2'-O-methyl modified nucleotide with phosphorothioate linkage
  modified_base 3: mod_base = OTHER; note = 2'-O-methyl modified nucleotide with phosphorothioate linkage
  modified_base 32: mod_base = OTHER; note = 2'-O-methyl modified nucleotide
  modified_base 33: mod_base = OTHER; note = 2'-O-methyl modified nucleotide
  modified_base 34: mod_base = OTHER; note = 2'-O-methyl modified nucleotide
  modified_base 35: mod_base = OTHER; note = 2'-O-methyl modified nucleotide
  modified_base 36: mod_base = OTHER; note = 2'-O-methyl modified nucleotide
  modified_base 37: mod_base = OTHER; note = 2'-O-methyl modified nucleotide
  modified_base 38: mod_base = OTHER; note = 2'-O-methyl modified nucleotide
  modified_base 39: mod_base = OTHER; note = 2'-O-methyl modified nucleotide
  modified_base 40: mod_base = OTHER; note = 2'-O-methyl modified nucleotide
  modified_base 41: mod_base = OTHER; note = 2'-O-methyl modified nucleotide
  modified_base 72: mod_base = OTHER; note = 2'-O-methyl modified nucleotide
  modified_base 89: mod_base = OTHER; note = Nucleotide with phosphorothioate linkage
  modified_base 90: mod_base = OTHER; note = 2'-O-methyl modified nucleotide with phosphorothioate linkage
  modified_base 91: mod_base = OTHER; note = 2'-O-methyl modified nucleotide with phosphorothioate linkage
  modified_base 92: mod_base = OTHER; note = 2'-O-methyl modified nucleotide

SEQ ID NO: 27033 - RNA, 92 nt, synthetic construct; identical to SEQ ID NO: 27001
  source 1..92: mol_type = other RNA
  modified_base 1: mod_base = OTHER; note = 2'-O-methyl modified nucleotide with phosphorothioate linkage
  modified_base 2: mod_base = OTHER; note = 2'-O-methyl modified nucleotide with phosphorothioate linkage
  modified_base 3: mod_base = OTHER; note = 2'-O-methyl modified nucleotide with phosphorothioate linkage
  modified_base 32: mod_base = OTHER; note = 2'-O-methyl modified nucleotide
  modified_base 33: mod_base = OTHER; note = 2'-O-methyl modified nucleotide
  modified_base 34: mod_base = OTHER; note = 2'-O-methyl modified nucleotide
  modified_base 35: mod_base = OTHER; note = 2'-O-methyl modified nucleotide
  modified_base 36: mod_base = OTHER; note = 2'-O-methyl modified nucleotide
  modified_base 37: mod_base = OTHER; note = 2'-O-methyl modified nucleotide
  modified_base 38: mod_base = OTHER; note = 2'-O-methyl modified nucleotide
  modified_base 39: mod_base = OTHER; note = 2'-O-methyl modified nucleotide
  modified_base 40: mod_base = OTHER; note = 2'-O-methyl modified nucleotide
  modified_base 41: mod_base = OTHER; note = 2'-O-methyl modified nucleotide
  modified_base 73: mod_base = OTHER; note = 2'-O-methyl modified nucleotide
  modified_base 74: mod_base = OTHER; note = 2'-O-methyl modified nucleotide
  modified_base 89: mod_base = OTHER; note = Nucleotide with phosphorothioate linkage
  modified_base 90: mod_base = OTHER; note = 2'-O-methyl modified nucleotide with phosphorothioate linkage
  modified_base 91: mod_base = OTHER; note = 2'-O-methyl modified nucleotide with phosphorothioate linkage
  modified_base 92: mod_base = OTHER; note = 2'-O-methyl modified nucleotide

SEQ ID NO: 27034 - RNA, 92 nt, synthetic construct; identical to SEQ ID NO: 27001
  source 1..92: mol_type = other RNA
  modified_base 1: mod_base = OTHER; note = 2'-O-methyl modified nucleotide with phosphorothioate linkage
  modified_base 2: mod_base = OTHER; note = 2'-O-methyl modified nucleotide with phosphorothioate linkage
  modified_base 3: mod_base = OTHER; note = 2'-O-methyl modified nucleotide with phosphorothioate linkage
  modified_base 24: mod_base = OTHER; note = 2'-O-methyl modified nucleotide
  modified_base 26: mod_base = OTHER; note = 2'-O-methyl modified nucleotide
  modified_base 28: mod_base = OTHER; note = 2'-O-methyl modified nucleotide
  modified_base 30: mod_base = OTHER; note = 2'-O-methyl modified nucleotide
  modified_base 32: mod_base = OTHER; note = 2'-O-methyl modified nucleotide
  modified_base 33: mod_base = OTHER; note = 2'-O-methyl modified nucleotide
  modified_base 34: mod_base = OTHER; note = 2'-O-methyl modified nucleotide
  modified_base 35: mod_base = OTHER; note = 2'-O-methyl modified nucleotide
  modified_base 36: mod_base = OTHER; note = 2'-O-methyl modified nucleotide
  modified_base 37: mod_base = OTHER; note = 2'-O-methyl modified nucleotide
  modified_base 38: mod_base = OTHER; note = 2'-O-methyl modified nucleotide
  modified_base 39: mod_base = OTHER; note = 2'-O-methyl modified nucleotide
  modified_base 40: mod_base = OTHER; note = 2'-O-methyl modified nucleotide
  modified_base 41: mod_base = OTHER; note = 2'-O-methyl modified nucleotide
  modified_base 43: mod_base = OTHER; note = 2'-O-methyl modified nucleotide
  modified_base 45: mod_base = OTHER; note = 2'-O-methyl modified nucleotide
  modified_base 47: mod_base = OTHER; note = 2'-O-methyl modified nucleotide
  modified_base 49: mod_base = OTHER; note = 2'-O-methyl modified nucleotide
  modified_base 51: mod_base = OTHER; note = 2'-O-methyl modified nucleotide
  modified_base 53: mod_base = OTHER; note = 2'-O-methyl modified nucleotide
  modified_base 55: mod_base = OTHER; note = 2'-O-methyl modified nucleotide
  modified_base 57: mod_base = OTHER; note = 2'-O-methyl modified nucleotide
  modified_base 59: mod_base = OTHER; note = 2'-O-methyl modified nucleotide
  modified_base 61: mod_base = OTHER; note = 2'-O-methyl modified nucleotide
  modified_base 89: mod_base = OTHER; note = Nucleotide with phosphorothioate linkage
  modified_base 90: mod_base = OTHER; note = 2'-O-methyl modified nucleotide with phosphorothioate linkage
  modified_base 91: mod_base = OTHER; note = 2'-O-methyl modified nucleotide with phosphorothioate linkage
  modified_base 92: mod_base = OTHER; note = 2'-O-methyl modified nucleotide

SEQ ID NO: 27035 - RNA, 92 nt, synthetic construct
  source 1..92: mol_type = other RNA
  modified_base 1: mod_base = OTHER; note = 2'-O-methyl modified nucleotide with phosphorothioate linkage
  modified_base 2: mod_base = OTHER; note = 2'-O-methyl modified nucleotide with phosphorothioate linkage
  modified_base 3: mod_base = OTHER; note = 2'-O-methyl modified nucleotide with phosphorothioate linkage
  modified_base 24: mod_base = OTHER; note = 2'-O-methyl modified nucleotide
  modified_base 26: mod_base = OTHER; note = 2'-O-methyl modified nucleotide
  modified_base 28: mod_base = OTHER; note = 2'-O-methyl modified nucleotide
  modified_base 30: mod_base = OTHER; note = 2'-O-methyl modified nucleotide
  modified_base 32: mod_base = OTHER; note = 2'-O-methyl modified nucleotide
  modified_base 33: mod_base = OTHER; note = 2'-O-methyl modified nucleotide
  modified_base 34: mod_base = OTHER; note = 2'-O-methyl modified nucleotide
  modified_base 35: mod_base = OTHER; note = 2'-O-methyl modified nucleotide
  modified_base 36: mod_base = OTHER; note = 2'-O-methyl modified nucleotide
  modified_base 37: mod_base = OTHER; note = 2'-O-methyl modified nucleotide
  modified_base 38: mod_base = OTHER; note = 2'-O-methyl modified nucleotide
  modified_base 39: mod_base = OTHER; note = 2'-O-methyl modified nucleotide
  modified_base 40: mod_base = OTHER; note = 2'-O-methyl modified nucleotide
  modified_base 41: mod_base = OTHER; note = 2'-O-methyl modified nucleotide
  modified_base 42: mod_base = OTHER; note = 2'-O-methyl modified nucleotide
  modified_base 44: mod_base = OTHER; note = 2'-O-methyl modified nucleotide
  modified_base 46: mod_base = OTHER; note = 2'-O-methyl modified nucleotide
  modified_base 48: mod_base = OTHER; note = 2'-O-methyl modified nucleotide
  modified_base 50: mod_base = OTHER; note = 2'-O-methyl modified nucleotide
  modified_base 52: mod_base = OTHER; note = 2'-O-methyl modified nucleotide
  modified_base 54: mod_base = OTHER; note = 2'-O-methyl modified nucleotide
  modified_base 56: mod_base = OTHER; note = 2'-O-methyl modified nucleotide
  modified_base 58: mod_base = OTHER; note = 2'-O-methyl modified nucleotide
  modified_base 60: mod_base = OTHER; note = 2'-O-methyl modified nucleotide
  modified_base 62: mod_base = OTHER; note = 2'-O-methyl modified nucleotide
  modified_base 89: mod_base = OTHER; note = Nucleotide with phosphorothioate linkage
  modified_base 90: mod_base = OTHER; note = 2'-O-methyl modified nucleotide with phosphorothioate linkage
  modified_base 91: mod_base = OTHER; note = 2'-O-methyl modified nucleotide with phosphorothioate linkage
  modified_base 92: mod_base = OTHER; note = 2'-O-methyl modified nucleotide
aaggctgtgctgaccatcgagtctttgtactctggtaccagaacctacaaagataaggcttcatgccgaaatcatttctcgtcgatggtcag

SEQ ID NO: 27036 - RNA, 92 nt, synthetic construct; identical to SEQ ID NO: 27001
  source 1..92: mol_type = other RNA
  modified_base 1: mod_base = OTHER; note = 2'-O-methyl modified nucleotide with phosphorothioate linkage
  modified_base 2: mod_base = OTHER; note = 2'-O-methyl modified nucleotide with phosphorothioate linkage
  modified_base 3: mod_base = OTHER; note = 2'-O-methyl modified nucleotide with phosphorothioate linkage
  modified_base 25: mod_base = OTHER; note = 2'-O-methyl modified nucleotide
  modified_base 27: mod_base = OTHER; note = 2'-O-methyl modified nucleotide
  modified_base 29: mod_base = OTHER; note = 2'-O-methyl modified nucleotide
  modified_base 31: mod_base = OTHER; note = 2'-O-methyl modified nucleotide
  modified_base 32: mod_base = OTHER; note = 2'-O-methyl modified nucleotide
  modified_base 33: mod_base = OTHER; note = 2'-O-methyl modified nucleotide
  modified_base 34: mod_base = OTHER; note = 2'-O-methyl modified nucleotide
  modified_base 35: mod_base = OTHER; note = 2'-O-methyl modified nucleotide
  modified_base 36: mod_base = OTHER; note = 2'-O-methyl modified nucleotide
  modified_base 37: mod_base = OTHER; note = 2'-O-methyl modified nucleotide
  modified_base 38: mod_base = OTHER; note = 2'-O-methyl modified nucleotide
  modified_base 39: mod_base = OTHER; note = 2'-O-methyl modified nucleotide
  modified_base 40: mod_base = OTHER; note = 2'-O-methyl modified nucleotide
  modified_base 41: mod_base = OTHER; note = 2'-O-methyl modified nucleotide
  modified_base 43: mod_base = OTHER; note = 2'-O-methyl modified nucleotide
  modified_base 45: mod_base = OTHER; note = 2'-O-methyl modified nucleotide
  modified_base 47: mod_base = OTHER; note = 2'-O-methyl modified nucleotide
  modified_base 49: mod_base = OTHER; note = 2'-O-methyl modified nucleotide
  modified_base 51: mod_base = OTHER; note = 2'-O-methyl modified nucleotide
  modified_base 53: mod_base = OTHER; note = 2'-O-methyl modified nucleotide
  modified_base 55: mod_base = OTHER; note = 2'-O-methyl modified nucleotide
  modified_base 57: mod_base = OTHER; note = 2'-O-methyl modified nucleotide
  modified_base 59: mod_base = OTHER; note = 2'-O-methyl modified nucleotide
  modified_base 61: mod_base = OTHER; note = 2'-O-methyl modified nucleotide
  modified_base 89: mod_base = OTHER; note = Nucleotide with phosphorothioate linkage
  modified_base 90: mod_base = OTHER; note = 2'-O-methyl modified nucleotide with phosphorothioate linkage
  modified_base 91: mod_base = OTHER; note = 2'-O-methyl modified nucleotide with phosphorothioate linkage
  modified_base 92: mod_base = OTHER; note = 2'-O-methyl modified nucleotide

SEQ ID NO: 27037 - RNA, 92 nt, synthetic construct; identical to SEQ ID NO: 27001
  source 1..92: mol_type = other RNA
  modified_base 1: mod_base = OTHER; note = 2'-O-methyl modified nucleotide with phosphorothioate linkage
  modified_base 2: mod_base = OTHER; note = 2'-O-methyl modified nucleotide with phosphorothioate linkage
  modified_base 3: mod_base = OTHER; note = 2'-O-methyl modified nucleotide with phosphorothioate linkage
  modified_base 25: mod_base = OTHER; note = 2'-O-methyl modified nucleotide
  modified_base 27: mod_base = OTHER; note = 2'-O-methyl modified nucleotide
  modified_base 29: mod_base = OTHER; note = 2'-O-methyl modified nucleotide
  modified_base 31: mod_base = OTHER; note = 2'-O-methyl modified nucleotide
  modified_base 32: mod_base = OTHER; note = 2'-O-methyl modified nucleotide
  modified_base 33: mod_base = OTHER; note = 2'-O-methyl modified nucleotide
  modified_base 34: mod_base = OTHER; note = 2'-O-methyl modified nucleotide
  modified_base 35: mod_base = OTHER; note = 2'-O-methyl modified nucleotide
  modified_base 36: mod_base = OTHER; note = 2'-O-methyl modified nucleotide
  modified_base 37: mod_base = OTHER; note = 2'-O-methyl modified nucleotide
  modified_base 38: mod_base = OTHER; note = 2'-O-methyl modified nucleotide
  modified_base 39: mod_base = OTHER; note = 2'-O-methyl modified nucleotide
  modified_base 40: mod_base = OTHER; note = 2'-O-methyl modified nucleotide
  modified_base 41: mod_base = OTHER; note = 2'-O-methyl modified nucleotide
  modified_base 42: mod_base = OTHER; note = 2'-O-methyl modified nucleotide
  modified_base 44: mod_base = OTHER; note = 2'-O-methyl modified nucleotide
  modified_base 46: mod_base = OTHER; note = 2'-O-methyl modified nucleotide
  modified_base 48: mod_base = OTHER; note = 2'-O-methyl modified nucleotide
  modified_base 50: mod_base = OTHER; note = 2'-O-methyl modified nucleotide
  modified_base 52: mod_base = OTHER; note = 2'-O-methyl modified nucleotide
  modified_base 54: mod_base = OTHER; note = 2'-O-methyl modified nucleotide
  modified_base 56: mod_base = OTHER; note = 2'-O-methyl modified nucleotide
  modified_base 58: mod_base = OTHER; note = 2'-O-methyl modified nucleotide
  modified_base 60: mod_base = OTHER; note = 2'-O-methyl modified nucleotide
  modified_base 62: mod_base = OTHER; note = 2'-O-methyl modified nucleotide
  modified_base 89: mod_base = OTHER; note = Nucleotide with phosphorothioate linkage
  modified_base 90: mod_base = OTHER; note = 2'-O-methyl modified nucleotide with phosphorothioate linkage
  modified_base 91: mod_base = OTHER; note = 2'-O-methyl modified nucleotide with phosphorothioate linkage
  modified_base 92: mod_base = OTHER; note = 2'-O-methyl modified nucleotide

SEQ ID NO: 27038 - RNA, 92 nt, synthetic construct; identical to SEQ ID NO: 27001
  source 1..92: mol_type = other RNA
  modified_base 1: mod_base = OTHER; note = 2'-O-methyl modified nucleotide with phosphorothioate linkage
  modified_base 2: mod_base = OTHER; note = 2'-O-methyl modified nucleotide with phosphorothioate linkage
  modified_base 3: mod_base = OTHER; note = 2'-O-methyl modified nucleotide with phosphorothioate linkage
  modified_base 24: mod_base = OTHER; note = 2'-O-methyl modified nucleotide
  modified_base 25: mod_base = OTHER; note = 2'-O-methyl modified nucleotide
  modified_base 26: mod_base = OTHER; note = 2'-O-methyl modified nucleotide
  modified_base 32: mod_base = OTHER; note = 2'-O-methyl modified nucleotide
  modified_base 33: mod_base = OTHER; note = 2'-O-methyl modified nucleotide
  modified_base 34: mod_base = OTHER; note = 2'-O-methyl modified nucleotide
  modified_base 35: mod_base = OTHER; note = 2'-O-methyl modified nucleotide
  modified_base 36: mod_base = OTHER; note = 2'-O-methyl modified nucleotide
  modified_base 37: mod_base = OTHER; note = 2'-O-methyl modified nucleotide
  modified_base 38: mod_base = OTHER; note = 2'-O-methyl modified nucleotide
  modified_base 39: mod_base = OTHER; note = 2'-O-methyl modified nucleotide
  modified_base 40: mod_base = OTHER; note = 2'-O-methyl modified nucleotide
  modified_base 41: mod_base = OTHER; note = 2'-O-methyl modified nucleotide
  modified_base 89: mod_base = OTHER; note = Nucleotide with phosphorothioate linkage
  modified_base 90: mod_base = OTHER; note = 2'-O-methyl modified nucleotide with phosphorothioate linkage
  modified_base 91: mod_base = OTHER; note = 2'-O-methyl modified nucleotide with phosphorothioate linkage
  modified_base 92: mod_base = OTHER; note = 2'-O-methyl modified nucleotide

SEQ ID NO: 27039 - RNA, 92 nt, synthetic construct; identical to SEQ ID NO: 27001
  source 1..92: mol_type = other RNA
  modified_base 1: mod_base = OTHER; note = 2'-O-methyl modified nucleotide with phosphorothioate linkage
  modified_base 2: mod_base = OTHER; note = 2'-O-methyl modified nucleotide with phosphorothioate linkage
  modified_base 3: mod_base = OTHER; note = 2'-O-methyl modified nucleotide with phosphorothioate linkage
  modified_base 27: mod_base = OTHER; note = 2'-O-methyl modified nucleotide
  modified_base 28: mod_base = OTHER; note = 2'-O-methyl modified nucleotide
  modified_base 29: mod_base = OTHER; note = 2'-O-methyl modified nucleotide
  modified_base 30: mod_base = OTHER; note = 2'-O-methyl modified nucleotide
  modified_base 31: mod_base = OTHER; note = 2'-O-methyl modified nucleotide
  modified_base 32: mod_base = OTHER; note = 2'-O-methyl modified nucleotide
  modified_base 33: mod_base = OTHER; note = 2'-O-methyl modified nucleotide
  modified_base 34: mod_base = OTHER; note = 2'-O-methyl modified nucleotide
  modified_base 35: mod_base = OTHER; note = 2'-O-methyl modified nucleotide
  modified_base 36: mod_base = OTHER; note = 2'-O-methyl modified nucleotide
  modified_base 37: mod_base = OTHER; note = 2'-O-methyl modified nucleotide
  modified_base 38: mod_base = OTHER; note = 2'-O-methyl modified nucleotide
  modified_base 39: mod_base = OTHER; note = 2'-O-methyl modified nucleotide
  modified_base 40: mod_base = OTHER; note = 2'-O-methyl modified nucleotide
  modified_base 41: mod_base = OTHER; note = 2'-O-methyl modified nucleotide
  modified_base 42: mod_base = OTHER; note = 2'-O-methyl modified nucleotide
  modified_base 43: mod_base = OTHER; note = 2'-O-methyl modified nucleotide
  modified_base 44: mod_base = OTHER; note = 2'-O-methyl modified nucleotide
  modified_base 89: mod_base = OTHER; note = Nucleotide with phosphorothioate linkage
  modified_base 90: mod_base = OTHER; note = 2'-O-methyl modified nucleotide with phosphorothioate linkage
  modified_base 91: mod_base = OTHER; note = 2'-O-methyl modified nucleotide with phosphorothioate linkage
  modified_base 92: mod_base = OTHER; note = 2'-O-methyl modified nucleotide

SEQ ID NO: 27040 - RNA, 92 nt, synthetic construct; identical to SEQ ID NO: 27001
  source 1..92: mol_type = other RNA
  modified_base 1: mod_base = OTHER; note = 2'-O-methyl modified nucleotide with phosphorothioate linkage
  modified_base 2: mod_base = OTHER; note = 2'-O-methyl modified nucleotide with phosphorothioate linkage
  modified_base 3: mod_base = OTHER; note = 2'-O-methyl modified nucleotide with phosphorothioate linkage
  modified_base 32: mod_base = OTHER; note = 2'-O-methyl modified nucleotide
  modified_base 33: mod_base = OTHER; note = 2'-O-methyl modified nucleotide
  modified_base 34: mod_base = OTHER; note = 2'-O-methyl modified nucleotide
  modified_base 35: mod_base = OTHER; note = 2'-O-methyl modified nucleotide
  modified_base 36: mod_base = OTHER; note = 2'-O-methyl modified nucleotide
  modified_base 37: mod_base = OTHER; note = 2'-O-methyl modified nucleotide
  modified_base 38: mod_base = OTHER; note = 2'-O-methyl modified nucleotide
  modified_base 39: mod_base = OTHER; note = 2'-O-methyl modified nucleotide
  modified_base 40: mod_base = OTHER; note = 2'-O-methyl modified nucleotide
  modified_base 41: mod_base = OTHER; note = 2'-O-methyl modified nucleotide
  modified_base 45: mod_base = OTHER; note = 2'-O-methyl modified nucleotide
  modified_base 46: mod_base = OTHER; note = 2'-O-methyl modified nucleotide
  modified_base 47: mod_base = OTHER; note = 2'-O-methyl modified nucleotide
  modified_base 48: mod_base = OTHER; note = 2'-O-methyl modified nucleotide
  modified_base 49: mod_base = OTHER; note = 2'-O-methyl modified nucleotide
  modified_base 50: mod_base = OTHER; note = 2'-O-methyl modified nucleotide
  modified_base 51: mod_base = OTHER; note = 2'-O-methyl modified nucleotide
  modified_base 52: mod_base = OTHER; note = 2'-O-methyl modified nucleotide
  modified_base 53: mod_base = OTHER; note = 2'-O-methyl modified nucleotide
  modified_base 89: mod_base = OTHER; note = Nucleotide with phosphorothioate linkage
  modified_base 90: mod_base = OTHER; note = 2'-O-methyl modified nucleotide with phosphorothioate linkage
  modified_base 91: mod_base = OTHER; note = 2'-O-methyl modified nucleotide with phosphorothioate linkage
  modified_base 92: mod_base = OTHER; note = 2'-O-methyl modified nucleotide

SEQ ID NO: 27041 - RNA, 92 nt, synthetic construct; identical to SEQ ID NO: 27001
  source 1..92: mol_type = other RNA
  modified_base 1: mod_base = OTHER; note = 2'-O-methyl modified nucleotide with phosphorothioate linkage
  modified_base 2: mod_base = OTHER; note = 2'-O-methyl modified nucleotide with phosphorothioate linkage
  modified_base 3: mod_base = OTHER; note = 2'-O-methyl modified nucleotide with phosphorothioate linkage
  modified_base 32: mod_base = OTHER; note = 2'-O-methyl modified nucleotide
  modified_base 33: mod_base = OTHER; note = 2'-O-methyl modified nucleotide
  modified_base 34: mod_base = OTHER; note = 2'-O-methyl modified nucleotide
  modified_base 35: mod_base = OTHER; note = 2'-O-methyl modified nucleotide
  modified_base 36: mod_base = OTHER; note = 2'-O-methyl modified nucleotide
  modified_base 37: mod_base = OTHER; note = 2'-O-methyl modified nucleotide
  modified_base 38: mod_base = OTHER; note = 2'-O-methyl modified nucleotide
  modified_base 39: mod_base = OTHER; note = 2'-O-methyl modified nucleotide
  modified_base 40: mod_base = OTHER; note = 2'-O-methyl modified nucleotide
  modified_base 41: mod_base = OTHER; note = 2'-O-methyl modified nucleotide
  modified_base 54: mod_base = OTHER; note = 2'-O-methyl modified nucleotide
  modified_base 55: mod_base = OTHER; note = 2'-O-methyl modified nucleotide
  modified_base 56: mod_base = OTHER; note = 2'-O-methyl modified nucleotide
  modified_base 57: mod_base = OTHER; note = 2'-O-methyl modified nucleotide
  modified_base 58: mod_base = OTHER; note = 2'-O-methyl modified nucleotide
  modified_base 59: mod_base = OTHER; note = 2'-O-methyl modified nucleotide
  modified_base 60: mod_base = OTHER; note = 2'-O-methyl modified nucleotide
  modified_base 61: mod_base = OTHER; note = 2'-O-methyl modified nucleotide
  modified_base 62: mod_base = OTHER; note = 2'-O-methyl modified nucleotide
  modified_base 89: mod_base = OTHER; note = Nucleotide with phosphorothioate linkage
  modified_base 90: mod_base = OTHER; note = 2'-O-methyl modified nucleotide with phosphorothioate linkage
  modified_base 91: mod_base = OTHER; note = 2'-O-methyl modified nucleotide with phosphorothioate linkage
  modified_base 92: mod_base = OTHER; note = 2'-O-methyl modified nucleotide

SEQ ID NO: 27042 - RNA, 92 nt, synthetic construct; identical to SEQ ID NO: 27001
  source 1..92: mol_type = other RNA
  modified_base 1: mod_base = OTHER; note = 2'-O-methyl modified nucleotide with phosphorothioate linkage
  modified_base 2: mod_base = OTHER; note = 2'-O-methyl modified nucleotide with phosphorothioate linkage
  modified_base 3: mod_base = OTHER; note = 2'-O-methyl modified nucleotide with phosphorothioate linkage
  modified_base 24: mod_base = OTHER; note = 2'-O-methyl modified nucleotide
  modified_base 25: mod_base = OTHER; note = 2'-O-methyl modified nucleotide
  modified_base 26: mod_base = OTHER; note = 2'-O-methyl modified nucleotide
  modified_base 27: mod_base = OTHER; note = 2'-O-methyl modified nucleotide
  modified_base 28: mod_base = OTHER; note = 2'-O-methyl modified nucleotide
  modified_base 29: mod_base = OTHER; note = 2'-O-methyl modified nucleotide
  modified_base 30: mod_base = OTHER; note = 2'-O-methyl modified nucleotide
  modified_base 31: mod_base = OTHER; note = 2'-O-methyl modified nucleotide
  modified_base 32: mod_base = OTHER; note = 2'-O-methyl modified nucleotide
  modified_base 33: mod_base = OTHER; note = 2'-O-methyl modified nucleotide
  modified_base 34: mod_base = OTHER; note = 2'-O-methyl modified nucleotide
  modified_base 35: mod_base = OTHER; note = 2'-O-methyl modified nucleotide
  modified_base 36: mod_base = OTHER; note = 2'-O-methyl modified nucleotide
  modified_base 37: mod_base = OTHER; note = 2'-O-methyl modified nucleotide
  modified_base 38: mod_base = OTHER; note = 2'-O-methyl modified nucleotide
  modified_base 39: mod_base = OTHER; note = 2'-O-methyl modified nucleotide
  modified_base 40: mod_base = OTHER; note = 2'-O-methyl modified nucleotide
  modified_base 41: mod_base = OTHER; note = 2'-O-methyl modified nucleotide
  modified_base 42: mod_base = OTHER; note = 2'-O-methyl modified nucleotide
  modified_base 43: mod_base = OTHER; note = 2'-O-methyl modified nucleotide
  modified_base 44: mod_base = OTHER; note = 2'-O-methyl modified nucleotide
  modified_base 89: mod_base = OTHER; note = Nucleotide with phosphorothioate linkage
  modified_base 90: mod_base = OTHER; note = 2'-O-methyl modified nucleotide with phosphorothioate linkage
  modified_base 91: mod_base = OTHER; note = 2'-O-methyl modified nucleotide with phosphorothioate linkage
  modified_base 92: mod_base = OTHER; note = 2'-O-methyl modified nucleotide

SEQ ID NO: 27043 - RNA, 92 nt, synthetic construct; identical to SEQ ID NO: 27001
  source 1..92: mol_type = other RNA
  modified_base 1: mod_base = OTHER; note = 2'-O-methyl modified nucleotide with phosphorothioate linkage
  modified_base 2: mod_base = OTHER; note = 2'-O-methyl modified nucleotide with phosphorothioate linkage
  modified_base 3: mod_base = OTHER; note = 2'-O-methyl modified nucleotide with phosphorothioate linkage
  modified_base 24: mod_base = OTHER; note = 2'-O-methyl modified nucleotide
  modified_base 25: mod_base = OTHER; note = 2'-O-methyl modified nucleotide
  modified_base 26: mod_base = OTHER; note = 2'-O-methyl modified nucleotide
  modified_base 32: mod_base = OTHER; note = 2'-O-methyl modified nucleotide
  modified_base 33: mod_base = OTHER; note = 2'-O-methyl modified nucleotide
  modified_base 34: mod_base = OTHER; note = 2'-O-methyl modified nucleotide
  modified_base 35: mod_base = OTHER; note = 2'-O-methyl modified nucleotide
  modified_base 36: mod_base = OTHER; note = 2'-O-methyl modified nucleotide
  modified_base 37: mod_base = OTHER; note = 2'-O-methyl modified nucleotide
  modified_base 38: mod_base = OTHER; note = 2'-O-methyl modified nucleotide
  modified_base 39: mod_base = OTHER; note = 2'-O-methyl modified nucleotide
  modified_base 40: mod_base = OTHER; note = 2'-O-methyl modified nucleotide
  modified_base 41: mod_base = OTHER; note = 2'-O-methyl modified nucleotide
  modified_base 45: mod_base = OTHER; note = 2'-O-methyl modified nucleotide
  modified_base 46: mod_base = OTHER; note = 2'-O-methyl modified nucleotide
  modified_base 47: mod_base = OTHER; note = 2'-O-methyl modified nucleotide
  modified_base 48: mod_base = OTHER; note = 2'-O-methyl modified nucleotide
  modified_base 49: mod_base = OTHER; note = 2'-O-methyl modified nucleotide
  modified_base 50: mod_base = OTHER; note = 2'-O-methyl modified nucleotide
  modified_base 51: mod_base = OTHER; note = 2'-O-methyl modified nucleotide
  modified_base 52: mod_base = OTHER; note = 2'-O-methyl modified nucleotide
  modified_base 53: mod_base = OTHER; note = 2'-O-methyl modified nucleotide
  modified_base 89: mod_base = OTHER; note = Nucleotide with phosphorothioate linkage
  modified_base 90: mod_base = OTHER; note = 2'-O-methyl modified nucleotide with phosphorothioate linkage
  modified_base 91: mod_base = OTHER; note = 2'-O-methyl modified nucleotide with phosphorothioate linkage
  modified_base 92: mod_base = OTHER; note = 2'-O-methyl modified nucleotide

SEQ ID NO: 27044 - RNA, 92 nt, synthetic construct; identical to SEQ ID NO: 27001
  source 1..92: mol_type = other RNA
  modified_base 1: mod_base = OTHER; note = 2'-O-methyl modified nucleotide with phosphorothioate linkage
  modified_base 2: mod_base = OTHER; note = 2'-O-methyl modified nucleotide with phosphorothioate linkage
  modified_base 3: mod_base = OTHER; note = 2'-O-methyl modified nucleotide with phosphorothioate linkage
  modified_base 24: mod_base = OTHER; note = 2'-O-methyl modified nucleotide
  modified_base 25: mod_base = OTHER; note = 2'-O-methyl modified nucleotide
  modified_base 26: mod_base = OTHER; note = 2'-O-methyl modified nucleotide
  modified_base 32: mod_base = OTHER; note = 2'-O-methyl modified nucleotide
  modified_base 33: mod_base = OTHER; note = 2'-O-methyl modified nucleotide
  modified_base 34: mod_base = OTHER; note = 2'-O-methyl modified nucleotide
  modified_base 35: mod_base = OTHER; note = 2'-O-methyl modified nucleotide
  modified_base 36: mod_base = OTHER; note = 2'-O-methyl modified nucleotide
  modified_base 37: mod_base = OTHER; note = 2'-O-methyl modified nucleotide
  modified_base 38: mod_base = OTHER; note = 2'-O-methyl modified nucleotide
  modified_base 39: mod_base = OTHER; note = 2'-O-methyl modified nucleotide
  modified_base 40: mod_base = OTHER; note = 2'-O-methyl modified nucleotide
  modified_base 41: mod_base = OTHER; note = 2'-O-methyl modified nucleotide
  modified_base 54: mod_base = OTHER; note = 2'-O-methyl modified nucleotide
  modified_base 55: mod_base = OTHER; note = 2'-O-methyl modified nucleotide
  modified_base 56: mod_base = OTHER; note = 2'-O-methyl modified nucleotide
  modified_base 57: mod_base = OTHER; note = 2'-O-methyl modified nucleotide
  modified_base 58: mod_base = OTHER; note = 2'-O-methyl modified nucleotide
  modified_base 59: mod_base = OTHER; note = 2'-O-methyl modified nucleotide
  modified_base 60: mod_base = OTHER; note = 2'-O-methyl modified nucleotide
  modified_base 61: mod_base = OTHER; note = 2'-O-methyl modified nucleotide
  modified_base 62: mod_base = OTHER; note = 2'-O-methyl modified nucleotide
  modified_base 89: mod_base = OTHER; note = Nucleotide with phosphorothioate linkage
  modified_base 90: mod_base = OTHER; note = 2'-O-methyl modified nucleotide with phosphorothioate linkage
  modified_base 91: mod_base = OTHER; note = 2'-O-methyl modified nucleotide with phosphorothioate linkage
  modified_base 92: mod_base = OTHER; note = 2'-O-methyl modified nucleotide

SEQ ID NO: 27045 - RNA, 92 nt, synthetic construct; identical to SEQ ID NO: 27001
  source 1..92: mol_type = other RNA
  modified_base 1: mod_base = OTHER; note = 2'-O-methyl modified nucleotide with phosphorothioate linkage
  modified_base 2: mod_base = OTHER; note = 2'-O-methyl modified nucleotide with phosphorothioate linkage
  modified_base 3: mod_base = OTHER; note = 2'-O-methyl modified nucleotide with phosphorothioate linkage
  modified_base 27: mod_base = OTHER; note = 2'-O-methyl modified nucleotide
  modified_base 28: mod_base = OTHER; note = 2'-O-methyl modified nucleotide
  modified_base 29: mod_base = OTHER; note = 2'-O-methyl modified nucleotide
  modified_base 30: mod_base = OTHER; note = 2'-O-methyl modified nucleotide
  modified_base 31: mod_base = OTHER; note = 2'-O-methyl modified nucleotide
  modified_base 32: mod_base = OTHER; note = 2'-O-methyl modified nucleotide
  modified_base 33: mod_base = OTHER; note = 2'-O-methyl modified nucleotide
  modified_base 34: mod_base = OTHER; note = 2'-O-methyl modified nucleotide
  modified_base 35: mod_base = OTHER; note = 2'-O-methyl modified nucleotide
  modified_base 36: mod_base = OTHER; note = 2'-O-methyl modified nucleotide
  modified_base 37: mod_base = OTHER; note = 2'-O-methyl modified nucleotide
  modified_base 38: mod_base = OTHER; note = 2'-O-methyl modified nucleotide
  modified_base 39: mod_base = OTHER; note = 2'-O-methyl modified nucleotide
  modified_base 40: mod_base = OTHER; note = 2'-O-methyl modified nucleotide
  modified_base 41: mod_base = OTHER; note = 2'-O-methyl modified nucleotide
  modified_base 42: mod_base = OTHER; note = 2'-O-methyl modified nucleotide
  modified_base 43: mod_base = OTHER; note = 2'-O-methyl modified nucleotide
  modified_base 44: mod_base = OTHER; note = 2'-O-methyl modified nucleotide
  modified_base 45: mod_base = OTHER; note = 2'-O-methyl modified nucleotide
  modified_base 46: mod_base = OTHER; note = 2'-O-methyl modified nucleotide
  modified_base 47: mod_base = OTHER; note = 2'-O-methyl modified nucleotide
  modified_base 48: mod_base = OTHER; note = 2'-O-methyl modified nucleotide
  modified_base 49: mod_base = OTHER; note = 2'-O-methyl modified nucleotide
  modified_base 50: mod_base = OTHER; note = 2'-O-methyl modified nucleotide
  modified_base 51: mod_base = OTHER; note = 2'-O-methyl modified nucleotide
  modified_base 52: mod_base = OTHER; note = 2'-O-methyl modified nucleotide
  modified_base 53: mod_base = OTHER; note = 2'-O-methyl modified nucleotide
  modified_base 89: mod_base = OTHER; note = Nucleotide with phosphorothioate linkage
  modified_base 90: mod_base = OTHER; note = 2'-O-methyl modified nucleotide with phosphorothioate linkage
  modified_base 91: mod_base = OTHER; note = 2'-O-methyl modified nucleotide with phosphorothioate linkage
  modified_base 92: mod_base = OTHER; note = 2'-O-methyl modified nucleotide

SEQ ID NO: 27046 - RNA, 92 nt, synthetic construct; identical to SEQ ID NO: 27001
  source 1..92: mol_type = other RNA
  modified_base 1: mod_base = OTHER; note = 2'-O-methyl modified nucleotide with phosphorothioate linkage
  modified_base 2: mod_base = OTHER; note = 2'-O-methyl modified nucleotide with phosphorothioate linkage
  modified_base 3: mod_base = OTHER; note = 2'-O-methyl modified nucleotide with phosphorothioate linkage
  modified_base 27: mod_base = OTHER; note = 2'-O-methyl modified nucleotide
  modified_base 28: mod_base = OTHER; note = 2'-O-methyl modified nucleotide
  modified_base 29: mod_base = OTHER; note = 2'-O-methyl modified nucleotide
  modified_base 30: mod_base = OTHER; note = 2'-O-methyl modified nucleotide
  modified_base 31: mod_base = OTHER; note = 2'-O-methyl modified nucleotide
  modified_base 32: mod_base = OTHER; note = 2'-O-methyl modified nucleotide
  modified_base 33: mod_base = OTHER; note = 2'-O-methyl modified nucleotide
  modified_base 34: mod_base = OTHER; note = 2'-O-methyl modified nucleotide
  modified_base 35: mod_base = OTHER; note = 2'-O-methyl modified nucleotide
  modified_base 36: mod_base = OTHER; note = 2'-O-methyl modified nucleotide
  modified_base 37: mod_base = OTHER; note = 2'-O-methyl modified nucleotide
  modified_base 38: mod_base = OTHER; note = 2'-O-methyl modified nucleotide
  modified_base 39: mod_base = OTHER; note = 2'-O-methyl modified nucleotide
  modified_base 40: mod_base = OTHER; note = 2'-O-methyl modified nucleotide
  modified_base 41: mod_base = OTHER; note = 2'-O-methyl modified nucleotide
  modified_base 42: mod_base = OTHER; note = 2'-O-methyl modified nucleotide
  modified_base 43: mod_base = OTHER; note = 2'-O-methyl modified nucleotide
  modified_base 44: mod_base = OTHER; note = 2'-O-methyl modified nucleotide
  modified_base 54: mod_base = OTHER; note = 2'-O-methyl modified nucleotide
  modified_base 55: mod_base = OTHER; note = 2'-O-methyl modified nucleotide
  modified_base 56: mod_base = OTHER; note = 2'-O-methyl modified nucleotide
  modified_base 57: mod_base = OTHER; note = 2'-O-methyl modified nucleotide
  modified_base 58: mod_base = OTHER; note = 2'-O-methyl modified nucleotide
  modified_base 59: mod_base = OTHER; note = 2'-O-methyl modified nucleotide
  modified_base 60: mod_base = OTHER; note = 2'-O-methyl modified nucleotide
  modified_base 61: mod_base = OTHER; note = 2'-O-methyl modified nucleotide
  modified_base 62: mod_base = OTHER; note = 2'-O-methyl modified nucleotide
  modified_base 89: mod_base = OTHER; note = Nucleotide with phosphorothioate linkage
  modified_base 90: mod_base = OTHER; note = 2'-O-methyl modified nucleotide with phosphorothioate linkage
  modified_base 91: mod_base = OTHER; note = 2'-O-methyl modified nucleotide with phosphorothioate linkage
  modified_base 92: mod_base = OTHER; note = 2'-O-methyl modified nucleotide

SEQ ID NO: 27047 - RNA, 92 nt, synthetic construct; identical to SEQ ID NO: 27001
  source 1..92: mol_type = other RNA
  modified_base 1: mod_base = OTHER; note = 2'-O-methyl modified nucleotide with phosphorothioate linkage
  modified_base 2: mod_base = OTHER; note = 2'-O-methyl modified nucleotide with phosphorothioate linkage
  modified_base 3: mod_base = OTHER; note = 2'-O-methyl modified nucleotide with phosphorothioate linkage
  modified_base 32: mod_base = OTHER; note = 2'-O-methyl modified nucleotide
  modified_base 33: mod_base = OTHER; note = 2'-O-methyl modified nucleotide
  modified_base 34: mod_base = OTHER; note = 2'-O-methyl modified nucleotide
  modified_base 35: mod_base = OTHER; note = 2'-O-methyl modified nucleotide
  modified_base 36: mod_base = OTHER; note = 2'-O-methyl modified nucleotide
  modified_base 37: mod_base = OTHER; note = 2'-O-methyl modified nucleotide
  modified_base 38: mod_base = OTHER; note = 2'-O-methyl modified nucleotide
  modified_base 39: mod_base = OTHER; note = 2'-O-methyl modified nucleotide
  modified_base 40: mod_base = OTHER; note = 2'-O-methyl modified nucleotide
  modified_base 41: mod_base = OTHER; note = 2'-O-methyl modified nucleotide
  modified_base 45: mod_base = OTHER; note = 2'-O-methyl modified nucleotide
  modified_base 46: mod_base = OTHER; note = 2'-O-methyl modified nucleotide
  modified_base 47: mod_base = OTHER; note = 2'-O-methyl modified nucleotide
  modified_base 48: mod_base = OTHER; note = 2'-O-methyl modified nucleotide
  modified_base 49: mod_base = OTHER; note = 2'-O-methyl modified nucleotide
  modified_base 50: mod_base = OTHER; note = 2'-O-methyl modified nucleotide
  modified_base 51: mod_base = OTHER; note = 2'-O-methyl modified nucleotide
  modified_base 52: mod_base = OTHER; note = 2'-O-methyl modified nucleotide
  modified_base 53: mod_base = OTHER; note = 2'-O-methyl modified nucleotide
  modified_base 54: mod_base = OTHER; note = 2'-O-methyl modified nucleotide
  modified_base 55: mod_base = OTHER; note = 2'-O-methyl modified nucleotide
  modified_base 56: mod_base = OTHER; note = 2'-O-methyl modified nucleotide
  modified_base 57: mod_base = OTHER; note = 2'-O-methyl modified nucleotide
  modified_base 58: mod_base = OTHER; note = 2'-O-methyl modified nucleotide
  modified_base 59: mod_base = OTHER; note = 2'-O-methyl modified nucleotide
  modified_base 60: mod_base = OTHER; note = 2'-O-methyl modified nucleotide
  modified_base 61: mod_base = OTHER; note = 2'-O-methyl modified nucleotide
  modified_base 62: mod_base = OTHER; note = 2'-O-methyl modified nucleotide
  modified_base 89: mod_base = OTHER; note = Nucleotide with phosphorothioate linkage
  modified_base 90: mod_base = OTHER; note = 2'-O-methyl modified nucleotide with phosphorothioate linkage
  modified_base 91: mod_base = OTHER; note = 2'-O-methyl modified nucleotide with phosphorothioate linkage
  modified_base 92: mod_base = OTHER; note = 2'-O-methyl modified nucleotide

SEQ ID NO: 27048 - RNA, 92 nt, synthetic construct; identical to SEQ ID NO: 27001
  source 1..92: mol_type = other RNA
  modified_base 1: mod_base = OTHER; note = 2'-O-methyl modified nucleotide with phosphorothioate linkage
  modified_base 2: mod_base = OTHER; note = 2'-O-methyl modified nucleotide with phosphorothioate linkage
  modified_base 3: mod_base = OTHER; note = 2'-O-methyl modified nucleotide with phosphorothioate linkage
  modified_base 24: mod_base = OTHER; note = 2'-O-methyl modified nucleotide
  modified_base 25: mod_base = OTHER; note = 2'-O-methyl modified nucleotide
  modified_base 26: mod_base = OTHER; note = 2'-O-methyl modified nucleotide
  modified_base 27: mod_base = OTHER; note = 2'-O-methyl modified nucleotide
  modified_base 28: mod_base = OTHER; note = 2'-O-methyl modified nucleotide
  modified_base 29: mod_base = OTHER; note = 2'-O-methyl modified nucleotide
  modified_base 30: mod_base = OTHER; note = 2'-O-methyl modified nucleotide
  modified_base 31: mod_base = OTHER; note = 2'-O-methyl modified nucleotide
  modified_base 32: mod_base = OTHER; note = 2'-O-methyl modified nucleotide
  modified_base 33: mod_base = OTHER; note = 2'-O-methyl modified nucleotide
  modified_base 34: mod_base = OTHER; note = 2'-O-methyl modified nucleotide
  modified_base 35: mod_base = OTHER; note = 2'-O-methyl modified nucleotide
  modified_base 36: mod_base = OTHER; note = 2'-O-methyl modified nucleotide
  modified_base 37: mod_base = OTHER; note = 2'-O-methyl modified nucleotide
  modified_base 38: mod_base = OTHER; note = 2'-O-methyl modified nucleotide
  modified_base 39: mod_base = OTHER; note = 2'-O-methyl modified nucleotide
  modified_base 40: mod_base = OTHER; note = 2'-O-methyl modified nucleotide
  modified_base 41: mod_base = OTHER; note = 2'-O-methyl modified nucleotide
  modified_base 42: mod_base = OTHER; note = 2'-O-methyl modified nucleotide
  modified_base 43: mod_base = OTHER; note = 2'-O-methyl modified nucleotide
  modified_base 44: mod_base = OTHER; note = 2'-O-methyl modified nucleotide
  modified_base 45: mod_base = OTHER; note = 2'-O-methyl modified nucleotide
  modified_base 46: mod_base = OTHER; note = 2'-O-methyl modified nucleotide
  modified_base 47: mod_base = OTHER; note = 2'-O-methyl modified nucleotide
  modified_base 48: mod_base = OTHER; note = 2'-O-methyl modified nucleotide
  modified_base 49: mod_base = OTHER; note = 2'-O-methyl modified nucleotide
  modified_base 50: mod_base = OTHER; note = 2'-O-methyl modified nucleotide
  modified_base 51: mod_base = OTHER; note = 2'-O-methyl modified nucleotide
  modified_base 52: mod_base = OTHER; note = 2'-O-methyl modified nucleotide
  modified_base 53: mod_base = OTHER; note = 2'-O-methyl modified nucleotide
  modified_base 89: mod_base = OTHER; note = Nucleotide with phosphorothioate linkage
  modified_base 90: mod_base = OTHER; note = 2'-O-methyl modified nucleotide with phosphorothioate linkage
  modified_base 91: mod_base = OTHER; note = 2'-O-methyl modified nucleotide with phosphorothioate linkage
  modified_base 92: mod_base = OTHER; note = 2'-O-methyl modified nucleotide

SEQ ID NO: 27049 - RNA, 92 nt, synthetic construct; identical to SEQ ID NO: 27001
  source 1..92: mol_type = other RNA
  modified_base 1: mod_base = OTHER; note = 2'-O-methyl modified nucleotide with phosphorothioate linkage
  modified_base 2: mod_base = OTHER; note = 2'-O-methyl modified nucleotide with phosphorothioate linkage
  modified_base 3: mod_base = OTHER; note = 2'-O-methyl modified nucleotide with phosphorothioate linkage
  modified_base 24: mod_base = OTHER; note = 2'-O-methyl modified nucleotide
  modified_base 25: mod_base = OTHER; note = 2'-O-methyl modified nucleotide
  modified_base 26: mod_base = OTHER; note = 2'-O-methyl modified nucleotide
  modified_base 32: mod_base = OTHER; note = 2'-O-methyl modified nucleotide
  modified_base 33: mod_base = OTHER; note = 2'-O-methyl modified nucleotide
  modified_base 34: mod_base = OTHER; note = 2'-O-methyl modified nucleotide
  modified_base 35: mod_base = OTHER; note = 2'-O-methyl modified nucleotide
  modified_base 36: mod_base = OTHER; note = 2'-O-methyl modified nucleotide
  modified_base 37: mod_base = OTHER; note = 2'-O-methyl modified nucleotide
  modified_base 38: mod_base = OTHER; note = 2'-O-methyl modified nucleotide
  modified_base 39: mod_base = OTHER; note = 2'-O-methyl modified nucleotide
  modified_base 40: mod_base = OTHER; note = 2'-O-methyl modified nucleotide
  modified_base 41: mod_base = OTHER; note = 2'-O-methyl modified nucleotide
  modified_base 45: mod_base = OTHER; note = 2'-O-methyl modified nucleotide
  modified_base 46: mod_base = OTHER; note = 2'-O-methyl modified nucleotide
  modified_base 47: mod_base = OTHER; note = 2'-O-methyl modified nucleotide
  modified_base 48: mod_base = OTHER; note = 2'-O-methyl modified nucleotide
  modified_base 49: mod_base = OTHER; note = 2'-O-methyl modified nucleotide
  modified_base 50: mod_base = OTHER; note = 2'-O-methyl modified nucleotide
  modified_base 51: mod_base = OTHER; note = 2'-O-methyl modified nucleotide
  modified_base 52: mod_base = OTHER; note = 2'-O-methyl modified nucleotide
  modified_base 53: mod_base = OTHER; note = 2'-O-methyl modified nucleotide
  modified_base 54: mod_base = OTHER; note = 2'-O-methyl modified nucleotide
  modified_base 55: mod_base = OTHER; note = 2'-O-methyl modified nucleotide
  modified_base 56: mod_base = OTHER; note = 2'-O-methyl modified nucleotide
  modified_base 57: mod_base = OTHER; note = 2'-O-methyl modified nucleotide
  modified_base 58: mod_base = OTHER; note = 2'-O-methyl modified nucleotide
  modified_base 59: mod_base = OTHER; note = 2'-O-methyl modified nucleotide
  modified_base 60: mod_base = OTHER; note = 2'-O-methyl modified nucleotide
  modified_base 61: mod_base = OTHER; note = 2'-O-methyl modified nucleotide
  modified_base 62: mod_base = OTHER; note = 2'-O-methyl modified nucleotide
  modified_base 89: mod_base = OTHER; note = Nucleotide with phosphorothioate linkage
  modified_base 90: mod_base = OTHER; note = 2'-O-methyl modified nucleotide with phosphorothioate linkage
  modified_base 91: mod_base = OTHER; note = 2'-O-methyl modified nucleotide with phosphorothioate linkage
  modified_base 92: mod_base = OTHER; note = 2'-O-methyl modified nucleotide

SEQ ID NO: 27050 - RNA, 92 nt, synthetic construct; identical to SEQ ID NO: 27001
  source 1..92: mol_type = other RNA
  modified_base 1: mod_base = OTHER; note = 2'-O-methyl modified nucleotide with phosphorothioate linkage
  modified_base 2: mod_base = OTHER; note = 2'-O-methyl modified nucleotide with phosphorothioate linkage
  modified_base 3: mod_base = OTHER; note = 2'-O-methyl modified nucleotide with phosphorothioate linkage
  modified_base 24: mod_base = OTHER; note = 2'-O-methyl modified nucleotide
  modified_base 25: mod_base = OTHER; note = 2'-O-methyl modified nucleotide
  modified_base 26: mod_base = OTHER; note = 2'-O-methyl modified nucleotide
  modified_base 27: mod_base = OTHER; note = 2'-O-methyl modified nucleotide
  modified_base 28: mod_base = OTHER; note = 2'-O-methyl modified nucleotide
  modified_base 29: mod_base = OTHER; note = 2'-O-methyl modified nucleotide
  modified_base 30: mod_base = OTHER; note = 2'-O-methyl modified nucleotide
  modified_base 31: mod_base = OTHER; note = 2'-O-methyl modified nucleotide
  modified_base 32: mod_base = OTHER; note = 2'-O-methyl modified nucleotide
  modified_base 33: mod_base = OTHER; note = 2'-O-methyl modified nucleotide
  modified_base 34: mod_base = OTHER; note = 2'-O-methyl modified nucleotide
  modified_base 35: mod_base = OTHER; note = 2'-O-methyl modified nucleotide
  modified_base 36: mod_base = OTHER; note = 2'-O-methyl modified nucleotide
  modified_base 37: mod_base = OTHER; note = 2'-O-methyl modified nucleotide
  modified_base 38: mod_base = OTHER; note = 2'-O-methyl modified nucleotide
  modified_base 39: mod_base = OTHER; note = 2'-O-methyl modified nucleotide
  modified_base 40: mod_base = OTHER; note = 2'-O-methyl modified nucleotide
  modified_base 41: mod_base = OTHER; note = 2'-O-methyl modified nucleotide
  modified_base 42: mod_base = OTHER; note = 2'-O-methyl modified nucleotide
  modified_base 43: mod_base = OTHER; note = 2'-O-methyl modified nucleotide
  modified_base 44: mod_base = OTHER; note = 2'-O-methyl modified nucleotide
  modified_base 54: mod_base = OTHER; note = 2'-O-methyl modified nucleotide
  modified_base 55: mod_base = OTHER; note = 2'-O-methyl modified nucleotide
  modified_base 56: mod_base = OTHER; note = 2'-O-methyl modified nucleotide
  modified_base 57: mod_base = OTHER; note = 2'-O-methyl modified nucleotide
  modified_base 58: mod_base = OTHER; note = 2'-O-methyl modified nucleotide
  modified_base 59: mod_base = OTHER; note = 2'-O-methyl modified nucleotide
  modified_base 60: mod_base = OTHER; note = 2'-O-methyl modified nucleotide
  modified_base 61: mod_base = OTHER; note = 2'-O-methyl modified nucleotide
  modified_base 62: mod_base = OTHER; note = 2'-O-methyl modified nucleotide
  modified_base 89: mod_base = OTHER; note = Nucleotide with phosphorothioate linkage
  modified_base 90: mod_base = OTHER; note = 2'-O-methyl modified nucleotide with phosphorothioate linkage
  modified_base 91: mod_base = OTHER; note = 2'-O-methyl modified nucleotide with phosphorothioate linkage
  modified_base 92: mod_base = OTHER; note = 2'-O-methyl modified nucleotide

SEQ ID NO: 27051 - RNA, 92 nt, synthetic construct; identical to SEQ ID NO: 27001
  source 1..92: mol_type = other RNA
  modified_base 1: mod_base = OTHER; note = 2'-O-methyl modified nucleotide with phosphorothioate linkage
  modified_base 2: mod_base = OTHER; note = 2'-O-methyl modified nucleotide with phosphorothioate linkage
  modified_base 3: mod_base = OTHER; note = 2'-O-methyl modified nucleotide with phosphorothioate linkage
  modified_base 27: mod_base = OTHER; note = 2'-O-methyl modified nucleotide
  modified_base 28: mod_base = OTHER; note = 2'-O-methyl modified nucleotide
  modified_base 29: mod_base = OTHER; note = 2'-O-methyl modified nucleotide
  modified_base 30: mod_base = OTHER; note = 2'-O-methyl modified nucleotide
  modified_base 31: mod_base = OTHER; note = 2'-O-methyl modified nucleotide
  modified_base 32: mod_base = OTHER; note = 2'-O-methyl modified nucleotide
  modified_base 33: mod_base = OTHER; note = 2'-O-methyl modified nucleotide
  modified_base 34: mod_base = OTHER; note = 2'-O-methyl modified nucleotide
  modified_base 35: mod_base = OTHER; note = 2'-O-methyl modified nucleotide
  modified_base 36: mod_base = OTHER; note = 2'-O-methyl modified nucleotide
  modified_base 37: mod_base = OTHER; note = 2'-O-methyl modified nucleotide
  modified_base 38: mod_base = OTHER; note = 2'-O-methyl modified nucleotide
  modified_base 39: mod_base = OTHER; note = 2'-O-methyl modified nucleotide
  modified_base 40: mod_base = OTHER; note = 2'-O-methyl modified nucleotide
  modified_base 41: mod_base = OTHER; note = 2'-O-methyl modified nucleotide
  modified_base 42: mod_base = OTHER; note = 2'-O-methyl modified nucleotide
  modified_base 43: mod_base = OTHER; note = 2'-O-methyl modified nucleotide
  modified_base 44: mod_base = OTHER; note = 2'-O-methyl modified nucleotide
  modified_base 45: mod_base = OTHER; note = 2'-O-methyl modified nucleotide
  modified_base 46: mod_base = OTHER; note = 2'-O-methyl modified nucleotide
  modified_base 47: mod_base = OTHER; note = 2'-O-methyl modified nucleotide
  modified_base 48: mod_base = OTHER; note = 2'-O-methyl modified nucleotide
  modified_base 49: mod_base = OTHER; note = 2'-O-methyl modified nucleotide
  modified_base 50: mod_base = OTHER; note = 2'-O-methyl modified nucleotide
  modified_base 51: mod_base = OTHER; note = 2'-O-methyl modified nucleotide
  modified_base 52: mod_base = OTHER; note = 2'-O-methyl modified nucleotide
  modified_base 53: mod_base = OTHER; note = 2'-O-methyl modified nucleotide
  modified_base 54: mod_base = OTHER; note = 2'-O-methyl modified nucleotide
  modified_base 55: mod_base = OTHER; note = 2'-O-methyl modified nucleotide
  modified_base 56: mod_base = OTHER; note = 2'-O-methyl modified nucleotide
  modified_base 57: mod_base = OTHER; note = 2'-O-methyl modified nucleotide
  modified_base 58: mod_base = OTHER; note = 2'-O-methyl modified nucleotide
  modified_base 59: mod_base = OTHER; note = 2'-O-methyl modified nucleotide
  modified_base 60: mod_base = OTHER; note = 2'-O-methyl modified nucleotide
  modified_base 61: mod_base = OTHER; note = 2'-O-methyl modified nucleotide
  modified_base 62: mod_base = OTHER; note = 2'-O-methyl modified nucleotide
  modified_base 89: mod_base = OTHER; note = Nucleotide with phosphorothioate linkage
  modified_base 90: mod_base = OTHER; note = 2'-O-methyl modified nucleotide with phosphorothioate linkage
  modified_base 91: mod_base = OTHER; note = 2'-O-methyl modified nucleotide with phosphorothioate linkage
  modified_base 92: mod_base = OTHER; note = 2'-O-methyl modified nucleotide

SEQ ID NO: 27052 - RNA, 92 nt, synthetic construct; identical to SEQ ID NO: 27001
  source 1..92: mol_type = other RNA
  modified_base 1: mod_base = OTHER; note = 2'-O-methyl modified nucleotide with phosphorothioate linkage
  modified_base 2: mod_base = OTHER; note = 2'-O-methyl modified nucleotide with phosphorothioate linkage
  modified_base 3: mod_base = OTHER; note = 2'-O-methyl modified nucleotide with phosphorothioate linkage
  modified_base 32: mod_base = OTHER; note = 2'-O-methyl modified nucleotide
  modified_base 33: mod_base = OTHER; note = 2'-O-methyl modified nucleotide
  modified_base 34: mod_base = OTHER; note = 2'-O-methyl modified nucleotide
  modified_base 35: mod_base = OTHER; note = 2'-O-methyl modified nucleotide
  modified_base 36: mod_base = OTHER; note = 2'-O-methyl modified nucleotide
  modified_base 37: mod_base = OTHER; note = 2'-O-methyl modified nucleotide
  modified_base 38: mod_base = OTHER; note = 2'-O-methyl modified nucleotide
  modified_base 39: mod_base = OTHER; note = 2'-O-methyl modified nucleotide
  modified_base 40: mod_base = OTHER; note = 2'-O-methyl modified nucleotide
  modified_base 41: mod_base = OTHER; note = 2'-O-methyl modified nucleotide
  modified_base 63: mod_base = OTHER; note = 2'-O-methyl modified nucleotide
  modified_base 64: mod_base = OTHER; note = 2'-O-methyl modified nucleotide
  modified_base 89: mod_base = OTHER; note = Nucleotide with phosphorothioate linkage
  modified_base 90: mod_base = OTHER; note = 2'-O-methyl modified nucleotide with phosphorothioate linkage
  modified_base 91: mod_base = OTHER; note = 2'-O-methyl modified nucleotide with phosphorothioate linkage
  modified_base 92: mod_base = OTHER; note = 2'-O-methyl modified nucleotide

SEQ ID NO: 27053 - RNA, 92 nt, synthetic construct; identical to SEQ ID NO: 27001
  source 1..92: mol_type = other RNA
  modified_base 1: mod_base = OTHER; note = 2'-O-methyl modified nucleotide with phosphorothioate linkage
  modified_base 2: mod_base = OTHER; note = 2'-O-methyl modified nucleotide with phosphorothioate linkage
  modified_base 3: mod_base = OTHER; note = 2'-O-methyl modified nucleotide with phosphorothioate linkage
  modified_base 32: mod_base = OTHER; note = 2'-O-methyl modified nucleotide
  modified_base 33: mod_base = OTHER; note = 2'-O-methyl modified nucleotide
  modified_base 34: mod_base = OTHER; note = 2'-O-methyl modified nucleotide
  modified_base 35: mod_base = OTHER; note = 2'-O-methyl modified nucleotide
  modified_base 36: mod_base = OTHER; note = 2'-O-methyl modified nucleotide
  modified_base 37: mod_base = OTHER; note = 2'-O-methyl modified nucleotide
  modified_base 38: mod_base = OTHER; note = 2'-O-methyl modified nucleotide
  modified_base 39: mod_base = OTHER; note = 2'-O-methyl modified nucleotide
  modified_base 40: mod_base = OTHER; note = 2'-O-methyl modified nucleotide
  modified_base 41: mod_base = OTHER; note = 2'-O-methyl modified nucleotide
  modified_base 63: mod_base = OTHER; note = 2'-O-methyl modified nucleotide
  modified_base 89: mod_base = OTHER; note = Nucleotide with phosphorothioate linkage
  modified_base 90: mod_base = OTHER; note = 2'-O-methyl modified nucleotide with phosphorothioate linkage
  modified_base 91: mod_base = OTHER; note = 2'-O-methyl modified nucleotide with phosphorothioate linkage
  modified_base 92: mod_base = OTHER; note = 2'-O-methyl modified nucleotide

SEQ ID NO: 27054 - RNA, 92 nt, synthetic construct; identical to SEQ ID NO: 27001
  source 1..92: mol_type = other RNA
  modified_base 1: mod_base = OTHER; note = 2'-O-methyl modified nucleotide with phosphorothioate linkage
  modified_base 2: mod_base = OTHER; note = 2'-O-methyl modified nucleotide with phosphorothioate linkage
  modified_base 3: mod_base = OTHER; note = 2'-O-methyl modified nucleotide with phosphorothioate linkage
  modified_base 32: mod_base = OTHER; note = 2'-O-methyl modified nucleotide
  modified_base 33: mod_base = OTHER; note = 2'-O-methyl modified nucleotide
  modified_base 34: mod_base = OTHER; note = 2'-O-methyl modified nucleotide
  modified_base 35: mod_base = OTHER; note = 2'-O-methyl modified nucleotide
  modified_base 36: mod_base = OTHER; note = 2'-O-methyl modified nucleotide
  modified_base 37: mod_base = OTHER; note = 2'-O-methyl modified nucleotide
  modified_base 38: mod_base = OTHER; note = 2'-O-methyl modified nucleotide
  modified_base 39: mod_base = OTHER; note = 2'-O-methyl modified nucleotide
  modified_base 40: mod_base = OTHER; note = 2'-O-methyl modified nucleotide
  modified_base 41: mod_base = OTHER; note = 2'-O-methyl modified nucleotide
  modified_base 64: mod_base = OTHER; note = 2'-O-methyl modified nucleotide
  modified_base 89: mod_base = OTHER; note = Nucleotide with phosphorothioate linkage
  modified_base 90: mod_base = OTHER; note = 2'-O-methyl modified nucleotide with phosphorothioate linkage
  modified_base 91: mod_base = OTHER; note = 2'-O-methyl modified nucleotide with phosphorothioate linkage
  modified_base 92: mod_base = OTHER; note = 2'-O-methyl modified nucleotide

SEQ ID NO: 27055 - RNA, 92 nt, synthetic construct; identical to SEQ ID NO: 27001
  source 1..92: mol_type = other RNA
  modified_base 1: mod_base = OTHER; note = 2'-O-methyl modified nucleotide with phosphorothioate linkage
  modified_base 2: mod_base = OTHER; note = 2'-O-methyl modified nucleotide with phosphorothioate linkage
  modified_base 3: mod_base = OTHER; note = 2'-O-methyl modified nucleotide with phosphorothioate linkage
  modified_base 32: mod_base = OTHER; note = 2'-O-methyl modified nucleotide
  modified_base 33: mod_base = OTHER; note = 2'-O-methyl modified nucleotide
  modified_base 34: mod_base = OTHER; note = 2'-O-methyl modified nucleotide
  modified_base 35: mod_base = OTHER; note = 2'-O-methyl modified nucleotide
  modified_base 36: mod_base = OTHER; note = 2'-O-methyl modified nucleotide
  modified_base 37: mod_base = OTHER; note = 2'-O-methyl modified nucleotide
  modified_base 38: mod_base = OTHER; note = 2'-O-methyl modified nucleotide
  modified_base 39: mod_base = OTHER; note = 2'-O-methyl modified nucleotide
  modified_base 40: mod_base = OTHER; note = 2'-O-methyl modified nucleotide
  modified_base 41: mod_base = OTHER; note = 2'-O-methyl modified nucleotide
  modified_base 65: mod_base = OTHER; note = 2'-O-methyl modified nucleotide
  modified_base 89: mod_base = OTHER; note = Nucleotide with phosphorothioate linkage
  modified_base 90: mod_base = OTHER; note = 2'-O-methyl modified nucleotide with phosphorothioate linkage
  modified_base 91: mod_base = OTHER; note = 2'-O-methyl modified nucleotide with phosphorothioate linkage
  modified_base 92: mod_base = OTHER; note = 2'-O-methyl modified nucleotide

SEQ ID NO: 27056 - RNA, 92 nt, synthetic construct; identical to SEQ ID NO: 27001
  source 1..92: mol_type = other RNA
  modified_base 1: mod_base = OTHER; note = 2'-O-methyl modified nucleotide with phosphorothioate linkage
  modified_base 2: mod_base = OTHER; note = 2'-O-methyl modified nucleotide with phosphorothioate linkage
  modified_base 3: mod_base = OTHER; note = 2'-O-methyl modified nucleotide with phosphorothioate linkage
  modified_base 32: mod_base = OTHER; note = 2'-O-methyl modified nucleotide
  modified_base 33: mod_base = OTHER; note = 2'-O-methyl modified nucleotide
  modified_base 34: mod_base = OTHER; note = 2'-O-methyl modified nucleotide
  modified_base 35: mod_base = OTHER; note = 2'-O-methyl modified nucleotide
  modified_base 36: mod_base = OTHER; note = 2'-O-methyl modified nucleotide
  modified_base 37: mod_base = OTHER; note = 2'-O-methyl modified nucleotide
  modified_base 38: mod_base = OTHER; note = 2'-O-methyl modified nucleotide
  modified_base 39: mod_base = OTHER; note = 2'-O-methyl modified nucleotide
  modified_base 40: mod_base = OTHER; note = 2'-O-methyl modified nucleotide
  modified_base 41: mod_base = OTHER; note = 2'-O-methyl modified nucleotide
  modified_base 66: mod_base = OTHER; note = 2'-O-methyl modified nucleotide
  modified_base 89: mod_base = OTHER; note = Nucleotide with phosphorothioate linkage
  modified_base 90: mod_base = OTHER; note = 2'-O-methyl modified nucleotide with phosphorothioate linkage
  modified_base 91: mod_base = OTHER; note = 2'-O-methyl modified nucleotide with phosphorothioate linkage
  modified_base 92: mod_base = OTHER; note = 2'-O-methyl modified nucleotide

SEQ ID NO: 27057 - RNA, 92 nt, synthetic construct; identical to SEQ ID NO: 27001
  source 1..92: mol_type = other RNA
  modified_base 1: mod_base = OTHER; note = 2'-O-methyl modified nucleotide with phosphorothioate linkage
  modified_base 2: mod_base = OTHER; note = 2'-O-methyl modified nucleotide with phosphorothioate linkage
  modified_base 3: mod_base = OTHER; note = 2'-O-methyl modified nucleotide with phosphorothioate linkage
  modified_base 32: mod_base = OTHER; note = 2'-O-methyl modified nucleotide
  modified_base 33: mod_base = OTHER; note = 2'-O-methyl modified nucleotide
  modified_base 34: mod_base = OTHER; note = 2'-O-methyl modified nucleotide
  modified_base 35: mod_base = OTHER; note = 2'-O-methyl modified nucleotide
  modified_base 36: mod_base = OTHER; note = 2'-O-methyl modified nucleotide
  modified_base 37: mod_base = OTHER; note = 2'-O-methyl modified nucleotide
  modified_base 38: mod_base = OTHER; note = 2'-O-methyl modified nucleotide
  modified_base 39: mod_base = OTHER; note = 2'-O-methyl modified nucleotide
  modified_base 40: mod_base = OTHER; note = 2'-O-methyl modified nucleotide
  modified_base 41: mod_base = OTHER; note = 2'-O-methyl modified nucleotide
  modified_base 67: mod_base = OTHER; note = 2'-O-methyl modified nucleotide
  modified_base 89: mod_base = OTHER; note = Nucleotide with phosphorothioate linkage
  modified_base 90: mod_base = OTHER; note = 2'-O-methyl modified nucleotide with phosphorothioate linkage
  modified_base 91: mod_base = OTHER; note = 2'-O-methyl modified nucleotide with phosphorothioate linkage
  modified_base 92: mod_base = OTHER; note = 2'-O-methyl modified nucleotide

SEQ ID NO: 27058 - RNA, 92 nt, synthetic construct; identical to SEQ ID NO: 27001
  source 1..92: mol_type = other RNA
  modified_base 1: mod_base = OTHER; note = 2'-O-methyl modified nucleotide with phosphorothioate linkage
  modified_base 2: mod_base = OTHER; note = 2'-O-methyl modified nucleotide with phosphorothioate linkage
  modified_base 3: mod_base = OTHER; note = 2'-O-methyl modified nucleotide with phosphorothioate linkage
  modified_base 32: mod_base = OTHER; note = 2'-O-methyl modified nucleotide
  modified_base 33: mod_base = OTHER; note = 2'-O-methyl modified nucleotide
  modified_base 34: mod_base = OTHER; note = 2'-O-methyl modified nucleotide
  modified_base 35: mod_base = OTHER; note = 2'-O-methyl modified nucleotide
  modified_base 36: mod_base = OTHER; note = 2'-O-methyl modified nucleotide
  modified_base 37: mod_base = OTHER; note = 2'-O-methyl modified nucleotide
  modified_base 38: mod_base = OTHER; note = 2'-O-methyl modified nucleotide
  modified_base 39: mod_base = OTHER; note = 2'-O-methyl modified nucleotide
  modified_base 40: mod_base = OTHER; note = 2'-O-methyl modified nucleotide
  modified_base 41: mod_base = OTHER; note = 2'-O-methyl modified nucleotide
  modified_base 68: mod_base = OTHER; note = 2'-O-methyl modified nucleotide
  modified_base 89: mod_base = OTHER; note = Nucleotide with phosphorothioate linkage
  modified_base 90: mod_base = OTHER; note = 2'-O-methyl modified nucleotide with phosphorothioate linkage
  modified_base 91: mod_base = OTHER; note = 2'-O-methyl modified nucleotide with phosphorothioate linkage
  modified_base 92: mod_base = OTHER; note = 2'-O-methyl modified nucleotide

SEQ ID NO: 27059 - RNA, 92 nt, synthetic construct; identical to SEQ ID NO: 27001
  source 1..92: mol_type = other RNA
  modified_base 1: mod_base = OTHER; note = 2'-O-methyl modified nucleotide with phosphorothioate linkage
  modified_base 2: mod_base = OTHER; note = 2'-O-methyl modified nucleotide with phosphorothioate linkage
  modified_base 3: mod_base = OTHER; note = 2'-O-methyl modified nucleotide with phosphorothioate linkage
  modified_base 32: mod_base = OTHER; note = 2'-O-methyl modified nucleotide
  modified_base 33: mod_base = OTHER; note = 2'-O-methyl modified nucleotide
  modified_base 34: mod_base = OTHER; note = 2'-O-methyl modified nucleotide
  modified_base 35: mod_base = OTHER; note = 2'-O-methyl modified nucleotide
  modified_base 36: mod_base = OTHER; note = 2'-O-methyl modified nucleotide
  modified_base 37: mod_base = OTHER; note = 2'-O-methyl modified nucleotide
  modified_base 38: mod_base = OTHER; note = 2'-O-methyl modified nucleotide
  modified_base 39: mod_base = OTHER; note = 2'-O-methyl modified nucleotide
  modified_base 40: mod_base = OTHER; note = 2'-O-methyl modified nucleotide
  modified_base 41: mod_base = OTHER; note = 2'-O-methyl modified nucleotide
  modified_base 69: mod_base = OTHER; note = 2'-O-methyl modified nucleotide
  modified_base 89: mod_base = OTHER; note = Nucleotide with phosphorothioate linkage
  modified_base 90: mod_base = OTHER; note = 2'-O-methyl modified nucleotide with phosphorothioate linkage
  modified_base 91: mod_base = OTHER; note = 2'-O-methyl modified nucleotide with phosphorothioate linkage
  modified_base 92: mod_base = OTHER; note = 2'-O-methyl modified nucleotide

SEQ ID NO: 27060 - RNA, 92 nt, synthetic construct; identical to SEQ ID NO: 27001
  source 1..92: mol_type = other RNA
  modified_base 1: mod_base = OTHER; note = 2'-O-methyl modified nucleotide with phosphorothioate linkage
  modified_base 2: mod_base = OTHER; note = 2'-O-methyl modified nucleotide with phosphorothioate linkage
  modified_base 3: mod_base = OTHER; note = 2'-O-methyl modified nucleotide with phosphorothioate linkage
  modified_base 32: mod_base = OTHER; note = 2'-O-methyl modified nucleotide
  modified_base 33: mod_base = OTHER; note = 2'-O-methyl modified nucleotide
  modified_base 34: mod_base = OTHER; note = 2'-O-methyl modified nucleotide
  modified_base 35: mod_base = OTHER; note = 2'-O-methyl modified nucleotide
  modified_base 36: mod_base = OTHER; note = 2'-O-methyl modified nucleotide
  modified_base 37: mod_base = OTHER; note = 2'-O-methyl modified nucleotide
  modified_base 38: mod_base = OTHER; note = 2'-O-methyl modified nucleotide
  modified_base 39: mod_base = OTHER; note = 2'-O-methyl modified nucleotide
  modified_base 40: mod_base = OTHER; note = 2'-O-methyl modified nucleotide
  modified_base 41: mod_base = OTHER; note = 2'-O-methyl modified nucleotide
  modified_base 70: mod_base = OTHER; note = 2'-O-methyl modified nucleotide
  modified_base 89: mod_base = OTHER; note = Nucleotide with phosphorothioate linkage
  modified_base 90: mod_base = OTHER; note = 2'-O-methyl modified nucleotide with phosphorothioate linkage
  modified_base 91: mod_base = OTHER; note = 2'-O-methyl modified nucleotide with phosphorothioate linkage
  modified_base 92: mod_base = OTHER; note = 2'-O-methyl modified nucleotide

SEQ ID NO: 27061 - RNA, 92 nt, synthetic construct; identical to SEQ ID NO: 27001
  source 1..92: mol_type = other RNA
  modified_base 1: mod_base = OTHER; note = 2'-O-methyl modified nucleotide with phosphorothioate linkage
  modified_base 2: mod_base = OTHER; note = 2'-O-methyl modified nucleotide with phosphorothioate linkage
  modified_base 3: mod_base = OTHER; note = 2'-O-methyl modified nucleotide with phosphorothioate linkage
  modified_base 32: mod_base = OTHER; note = 2'-O-methyl modified nucleotide
  modified_base 33: mod_base = OTHER; note = 2'-O-methyl modified nucleotide
  modified_base 34: mod_base = OTHER; note = 2'-O-methyl modified nucleotide
  modified_base 35: mod_base = OTHER; note = 2'-O-methyl modified nucleotide
  modified_base 36: mod_base = OTHER; note = 2'-O-methyl modified nucleotide
  modified_base 37: mod_base = OTHER; note = 2'-O-methyl modified nucleotide
  modified_base 38: mod_base = OTHER; note = 2'-O-methyl modified nucleotide
  modified_base 39: mod_base = OTHER; note = 2'-O-methyl modified nucleotide
  modified_base 40: mod_base = OTHER; note = 2'-O-methyl modified nucleotide
  modified_base 41: mod_base = OTHER; note = 2'-O-methyl modified nucleotide
  modified_base 71: mod_base = OTHER; note = 2'-O-methyl modified nucleotide
  modified_base 89: mod_base = OTHER; note = Nucleotide with phosphorothioate linkage
  modified_base 90: mod_base = OTHER; note = 2'-O-methyl modified nucleotide with phosphorothioate linkage
  modified_base 91: mod_base = OTHER; note = 2'-O-methyl modified nucleotide with phosphorothioate linkage
  modified_base 92: mod_base = OTHER; note = 2'-O-methyl modified nucleotide

SEQ ID NO: 27062 - RNA, 92 nt, synthetic construct; identical to SEQ ID NO: 27001
  source 1..92: mol_type = other RNA
  modified_base 1: mod_base = OTHER; note = 2'-O-methyl modified nucleotide with phosphorothioate linkage
  modified_base 2: mod_base = OTHER; note = 2'-O-methyl modified nucleotide with phosphorothioate linkage
  modified_base 3: mod_base = OTHER; note = 2'-O-methyl modified nucleotide with phosphorothioate linkage
  modified_base 32: mod_base = OTHER; note = 2'-O-methyl modified nucleotide
  modified_base 33: mod_base = OTHER; note = 2'-O-methyl modified nucleotide
  modified_base 34: mod_base = OTHER; note = 2'-O-methyl modified nucleotide
  modified_base 35: mod_base = OTHER; note = 2'-O-methyl modified nucleotide
  modified_base 36: mod_base = OTHER; note = 2'-O-methyl modified nucleotide
  modified_base 37: mod_base = OTHER; note = 2'-O-methyl modified nucleotide
  modified_base 38: mod_base = OTHER; note = 2'-O-methyl modified nucleotide
  modified_base 39: mod_base = OTHER; note = 2'-O-methyl modified nucleotide
  modified_base 40: mod_base = OTHER; note = 2'-O-methyl modified nucleotide
  modified_base 41: mod_base = OTHER; note = 2'-O-methyl modified nucleotide
  modified_base 72: mod_base = OTHER; note = 2'-O-methyl modified nucleotide
  modified_base 89: mod_base = OTHER; note = Nucleotide with phosphorothioate linkage
  modified_base 90: mod_base = OTHER; note = 2'-O-methyl modified nucleotide with phosphorothioate linkage
  modified_base 91: mod_base = OTHER; note = 2'-O-methyl modified nucleotide with phosphorothioate linkage
  modified_base 92: mod_base = OTHER; note = 2'-O-methyl modified nucleotide

SEQ ID NO: 27063-27090 - skipped (28 entries)

SEQ ID NO: 27091 - RNA, 93 nt, synthetic construct
  source 1..93: mol_type = other RNA
  modified_base 1: mod_base = OTHER; note = 2'-O-methyl modified nucleotide with phosphorothioate linkage
  modified_base 2: mod_base = OTHER; note = 2'-O-methyl modified nucleotide with phosphorothioate linkage
  modified_base 3: mod_base = OTHER; note = 2'-O-methyl modified nucleotide with phosphorothioate linkage
  modified_base 90: mod_base = OTHER; note = Nucleotide with phosphorothioate linkage
  modified_base 91: mod_base = OTHER; note = 2'-O-methyl modified nucleotide with phosphorothioate linkage
  modified_base 92: mod_base = OTHER; note = 2'-O-methyl modified nucleotide with phosphorothioate linkage
  modified_base 93: mod_base = OTHER; note = 2'-O-methyl modified nucleotide
aaggctgtgctgaccatcgagtctttgtactctggtaccagaagctacaaagataaggcttcatgccgaaatcatttctcgtcgatggtcagc

SEQ ID NO: 27092 - RNA, 93 nt, synthetic construct
  source 1..93: mol_type = other RNA
  modified_base 1: mod_base = OTHER; note = 2'-O-methyl modified nucleotide with phosphorothioate linkage
  modified_base 2: mod_base = OTHER; note = 2'-O-methyl modified nucleotide with phosphorothioate linkage
  modified_base 3: mod_base = OTHER; note = 2'-O-methyl modified nucleotide with phosphorothioate linkage
  modified_base 90: mod_base = OTHER; note = Nucleotide with phosphorothioate linkage
  modified_base 91: mod_base = OTHER; note = 2'-O-methyl modified nucleotide with phosphorothioate linkage
  modified_base 92: mod_base = OTHER; note = 2'-O-methyl modified nucleotide with phosphorothioate linkage
  modified_base 93: mod_base = OTHER; note = 2'-O-methyl modified nucleotide
aaggctgtgctgaccatcgagtctttgtactctgaatacagaagctacaaagataaggcttcatgccgaaatcatttctcgtcgatggtcagc

SEQ ID NO: 27093 - RNA, 93 nt, synthetic construct
  source 1..93: mol_type = other RNA
  modified_base 1: mod_base = OTHER; note = 2'-O-methyl modified nucleotide with phosphorothioate linkage
  modified_base 2: mod_base = OTHER; note = 2'-O-methyl modified nucleotide with phosphorothioate linkage
  modified_base 3: mod_base = OTHER; note = 2'-O-methyl modified nucleotide with phosphorothioate linkage
  modified_base 90: mod_base = OTHER; note = Nucleotide with phosphorothioate linkage
  modified_base 91: mod_base = OTHER; note = 2'-O-methyl modified nucleotide with phosphorothioate linkage
  modified_base 92: mod_base = OTHER; note = 2'-O-methyl modified nucleotide with phosphorothioate linkage
  modified_base 93: mod_base = OTHER; note = 2'-O-methyl modified nucleotide
aaggctgtgctgaccatcgagtctttgtactctgagtacagaagctacaaagataaggcttcatgccgaaatcatttctcgtcgatggtcagc

SEQ ID NO: 27094 - RNA, 93 nt, synthetic construct
  source 1..93: mol_type = other RNA
  modified_base 1: mod_base = OTHER; note = 2'-O-methyl modified nucleotide with phosphorothioate linkage
  modified_base 2: mod_base = OTHER; note = 2'-O-methyl modified nucleotide with phosphorothioate linkage
  modified_base 3: mod_base = OTHER; note = 2'-O-methyl modified nucleotide with phosphorothioate linkage
  modified_base 90: mod_base = OTHER; note = Nucleotide with phosphorothioate linkage
  modified_base 91: mod_base = OTHER; note = 2'-O-methyl modified nucleotide with phosphorothioate linkage
  modified_base 92: mod_base = OTHER; note = 2'-O-methyl modified nucleotide with phosphorothioate linkage
  modified_base 93: mod_base = OTHER; note = 2'-O-methyl modified nucleotide
aaggctgtgctgaccatcgagtctttgtactctgactacagaagctacaaagataaggcttcatgccgaaatcatttctcgtcgatggtcagc

SEQ ID NO: 27095 - RNA, 93 nt, synthetic construct
  source 1..93: mol_type = other RNA
  modified_base 1: mod_base = OTHER; note = 2'-O-methyl modified nucleotide with phosphorothioate linkage
  modified_base 2: mod_base = OTHER; note = 2'-O-methyl modified nucleotide with phosphorothioate linkage
  modified_base 3: mod_base = OTHER; note = 2'-O-methyl modified nucleotide with phosphorothioate linkage
  modified_base 90: mod_base = OTHER; note = Nucleotide with phosphorothioate linkage
  modified_base 91: mod_base = OTHER; note = 2'-O-methyl modified nucleotide with phosphorothioate linkage
  modified_base 92: mod_base = OTHER; note = 2'-O-methyl modified nucleotide with phosphorothioate linkage
  modified_base 93: mod_base = OTHER; note = 2'-O-methyl modified nucleotide
aaggctgtgctgaccatcgagtctttgtactctgattacagaagctacaaagataaggcttcatgccgaaatcatttctcgtcgatggtcagc

SEQ ID NO: 27096 - RNA, 93 nt, synthetic construct
  source 1..93: mol_type = other RNA
  modified_base 1: mod_base = OTHER; note = 2'-O-methyl modified nucleotide with phosphorothioate linkage
  modified_base 2: mod_base = OTHER; note = 2'-O-methyl modified nucleotide with phosphorothioate linkage
  modified_base 3: mod_base = OTHER; note = 2'-O-methyl modified nucleotide with phosphorothioate linkage
  modified_base 90: mod_base = OTHER; note = Nucleotide with phosphorothioate linkage
  modified_base 91: mod_base = OTHER; note = 2'-O-methyl modified nucleotide with phosphorothioate linkage
  modified_base 92: mod_base = OTHER; note = 2'-O-methyl modified nucleotide with phosphorothioate linkage
  modified_base 93: mod_base = OTHER; note = 2'-O-methyl modified nucleotide
aaggctgtgctgaccatcgagtctttgtactctgaacacagaagctacaaagataaggcttcatgccgaaatcatttctcgtcgatggtcagc

SEQ ID NO: 27097 - RNA, 93 nt, synthetic construct
  source 1..93: mol_type = other RNA
  modified_base 1: mod_base = OTHER; note = 2'-O-methyl modified nucleotide with phosphorothioate linkage
  modified_base 2: mod_base = OTHER; note = 2'-O-methyl modified nucleotide with phosphorothioate linkage
  modified_base 3: mod_base = OTHER; note = 2'-O-methyl modified nucleotide with phosphorothioate linkage
  modified_base 90: mod_base = OTHER; note = Nucleotide with phosphorothioate linkage
  modified_base 91: mod_base = OTHER; note = 2'-O-methyl modified nucleotide with phosphorothioate linkage
  modified_base 92: mod_base = OTHER; note = 2'-O-methyl modified nucleotide with phosphorothioate linkage
  modified_base 93: mod_base = OTHER; note = 2'-O-methyl modified nucleotide
aaggctgtgctgaccatcgagtctttgtactctgagcacagaagctacaaagataaggcttcatgccgaaatcatttctcgtcgatggtcagc

SEQ ID NO: 27098 - RNA, 93 nt, synthetic construct
  source 1..93: mol_type = other RNA
  modified_base 1: mod_base = OTHER; note = 2'-O-methyl modified nucleotide with phosphorothioate linkage
  modified_base 2: mod_base = OTHER; note = 2'-O-methyl modified nucleotide with phosphorothioate linkage
  modified_base 3: mod_base = OTHER; note = 2'-O-methyl modified nucleotide with phosphorothioate linkage
  modified_base 90: mod_base = OTHER; note = Nucleotide with phosphorothioate linkage
  modified_base 91: mod_base = OTHER; note = 2'-O-methyl modified nucleotide with phosphorothioate linkage
  modified_base 92: mod_base = OTHER; note = 2'-O-methyl modified nucleotide with phosphorothioate linkage
  modified_base 93: mod_base = OTHER; note = 2'-O-methyl modified nucleotide
aaggctgtgctgaccatcgagtctttgtactctgaccacagaagctacaaagataaggcttcatgccgaaatcatttctcgtcgatggtcagc

SEQ ID NO: 27099 - RNA, 93 nt, synthetic construct
  source 1..93: mol_type = other RNA
  modified_base 1: mod_base = OTHER; note = 2'-O-methyl modified nucleotide with phosphorothioate linkage
  modified_base 2: mod_base = OTHER; note = 2'-O-methyl modified nucleotide with phosphorothioate linkage
  modified_base 3: mod_base = OTHER; note = 2'-O-methyl modified nucleotide with phosphorothioate linkage
  modified_base 90: mod_base = OTHER; note = Nucleotide with phosphorothioate linkage
  modified_base 91: mod_base = OTHER; note = 2'-O-methyl modified nucleotide with phosphorothioate linkage
  modified_base 92: mod_base = OTHER; note = 2'-O-methyl modified nucleotide with phosphorothioate linkage
  modified_base 93: mod_base = OTHER; note = 2'-O-methyl modified nucleotide
aaggctgtgctgaccatcgagtctttgtactctgatcacagaagctacaaagataaggcttcatgccgaaatcatttctcgtcgatggtcagc

SEQ ID NO: 27100 - RNA, 93 nt, synthetic construct
  source 1..93: mol_type = other RNA
  modified_base 1: mod_base = OTHER; note = 2'-O-methyl modified nucleotide with phosphorothioate linkage
  modified_base 2: mod_base = OTHER; note = 2'-O-methyl modified nucleotide with phosphorothioate linkage
  modified_base 3: mod_base = OTHER; note = 2'-O-methyl modified nucleotide with phosphorothioate linkage
  modified_base 90: mod_base = OTHER; note = Nucleotide with phosphorothioate linkage
  modified_base 91: mod_base = OTHER; note = 2'-O-methyl modified nucleotide with phosphorothioate linkage
  modified_base 92: mod_base = OTHER; note = 2'-O-methyl modified nucleotide with phosphorothioate linkage
  modified_base 93: mod_base = OTHER; note = 2'-O-methyl modified nucleotide
aaggctgtgctgaccatcgagtctttgtactctgcttgcagaagctacaaagataaggcttcatgccgaaatcatttctcgtcgatggtcagc

SEQ ID NO: 27101 - RNA, 93 nt, synthetic construct
  source 1..93: mol_type = other RNA
  modified_base 1: mod_base = OTHER; note = 2'-O-methyl modified nucleotide with phosphorothioate linkage
  modified_base 2: mod_base = OTHER; note = 2'-O-methyl modified nucleotide with phosphorothioate linkage
  modified_base 3: mod_base = OTHER; note = 2'-O-methyl modified nucleotide with phosphorothioate linkage
  modified_base 90: mod_base = OTHER; note = Nucleotide with phosphorothioate linkage
  modified_base 91: mod_base = OTHER; note = 2'-O-methyl modified nucleotide with phosphorothioate linkage
  modified_base 92: mod_base = OTHER; note = 2'-O-methyl modified nucleotide with phosphorothioate linkage
  modified_base 93: mod_base = OTHER; note = 2'-O-methyl modified nucleotide
aaggctgtgctgaccatcgagtctttgtactctgctcgcagaagctacaaagataaggcttcatgccgaaatcatttctcgtcgatggtcagc

SEQ ID NO: 27102 - RNA, 93 nt, synthetic construct
  source 1..93: mol_type = other RNA
  modified_base 1: mod_base = OTHER; note = 2'-O-methyl modified nucleotide with phosphorothioate linkage
  modified_base 2: mod_base = OTHER; note = 2'-O-methyl modified nucleotide with phosphorothioate linkage
  modified_base 3: mod_base = OTHER; note = 2'-O-methyl modified nucleotide with phosphorothioate linkage
  modified_base 90: mod_base = OTHER; note = Nucleotide with phosphorothioate linkage
  modified_base 91: mod_base = OTHER; note = 2'-O-methyl modified nucleotide with phosphorothioate linkage
  modified_base 92: mod_base = OTHER; note = 2'-O-methyl modified nucleotide with phosphorothioate linkage
  modified_base 93: mod_base = OTHER; note = 2'-O-methyl modified nucleotide
aaggctgtgctgaccatcgagtctttgtactctggaaacagaagctacaaagataaggcttcatgccgaaatcatttctcgtcgatggtcagc

SEQ ID NO: 27103 - RNA, 93 nt, synthetic construct
  source 1..93: mol_type = other RNA
  modified_base 1: mod_base = OTHER; note = 2'-O-methyl modified nucleotide with phosphorothioate linkage
  modified_base 2: mod_base = OTHER; note = 2'-O-methyl modified nucleotide with phosphorothioate linkage
  modified_base 3: mod_base = OTHER; note = 2'-O-methyl modified nucleotide with phosphorothioate linkage
  modified_base 90: mod_base = OTHER; note = Nucleotide with phosphorothioate linkage
  modified_base 91: mod_base = OTHER; note = 2'-O-methyl modified nucleotide with phosphorothioate linkage
  modified_base 92: mod_base = OTHER; note = 2'-O-methyl modified nucleotide with phosphorothioate linkage
  modified_base 93: mod_base = OTHER; note = 2'-O-methyl modified nucleotide
aaggctgtgctgaccatcgagtctttgtactctgggaacagaagctacaaagataaggcttcatgccgaaatcatttctcgtcgatggtcagc

SEQ ID NO: 27104 - RNA, 93 nt, synthetic construct
  source 1..93: mol_type = other RNA
  modified_base 1: mod_base = OTHER; note = 2'-O-methyl modified nucleotide with phosphorothioate linkage
  modified_base 2: mod_base = OTHER; note = 2'-O-methyl modified nucleotide with phosphorothioate linkage
  modified_base 3: mod_base = OTHER; note = 2'-O-methyl modified nucleotide with phosphorothioate linkage
  modified_base 90: mod_base = OTHER; note = Nucleotide with phosphorothioate linkage
  modified_base 91: mod_base = OTHER; note = 2'-O-methyl modified nucleotide with phosphorothioate linkage
  modified_base 92: mod_base = OTHER; note = 2'-O-methyl modified nucleotide with phosphorothioate linkage
  modified_base 93: mod_base = OTHER; note = 2'-O-methyl modified nucleotide
aaggctgtgctgaccatcgagtctttgtactctggcaacagaagctacaaagataaggcttcatgccgaaatcatttctcgtcgatggtcagc

SEQ ID NO: 27105 - RNA, 93 nt, synthetic construct
  source 1..93: mol_type = other RNA
  modified_base 1: mod_base = OTHER; note = 2'-O-methyl modified nucleotide with phosphorothioate linkage
  modified_base 2: mod_base = OTHER; note = 2'-O-methyl modified nucleotide with phosphorothioate linkage
  modified_base 3: mod_base = OTHER; note = 2'-O-methyl modified nucleotide with phosphorothioate linkage
  modified_base 90: mod_base = OTHER; note = Nucleotide with phosphorothioate linkage
  modified_base 91: mod_base = OTHER; note = 2'-O-methyl modified nucleotide with phosphorothioate linkage
  modified_base 92: mod_base = OTHER; note = 2'-O-methyl modified nucleotide with phosphorothioate linkage
  modified_base 93: mod_base = OTHER; note = 2'-O-methyl modified nucleotide
aaggctgtgctgaccatcgagtctttgtactctggtaacagaagctacaaagataaggcttcatgccgaaatcatttctcgtcgatggtcagc

SEQ ID NO: 27106 - RNA, 93 nt, synthetic construct
  source 1..93: mol_type = other RNA
  modified_base 1: mod_base = OTHER; note = 2'-O-methyl modified nucleotide with phosphorothioate linkage
  modified_base 2: mod_base = OTHER; note = 2'-O-methyl modified nucleotide with phosphorothioate linkage
  modified_base 3: mod_base = OTHER; note = 2'-O-methyl modified nucleotide with phosphorothioate linkage
  modified_base 90: mod_base = OTHER; note = Nucleotide with phosphorothioate linkage
  modified_base 91: mod_base = OTHER; note = 2'-O-methyl modified nucleotide with phosphorothioate linkage
  modified_base 92: mod_base = OTHER; note = 2'-O-methyl modified nucleotide with phosphorothioate linkage
  modified_base 93: mod_base = OTHER; note = 2'-O-methyl modified nucleotide
aaggctgtgctgaccatcgagtctttgtactctggagacagaagctacaaagataaggcttcatgccgaaatcatttctcgtcgatggtcagc

SEQ ID NO: 27107 - RNA, 93 nt, synthetic construct
  source 1..93: mol_type = other RNA
  modified_base 1: mod_base = OTHER; note = 2'-O-methyl modified nucleotide with phosphorothioate linkage
  modified_base 2: mod_base = OTHER; note = 2'-O-methyl modified nucleotide with phosphorothioate linkage
  modified_base 3: mod_base = OTHER; note = 2'-O-methyl modified nucleotide with phosphorothioate linkage
  modified_base 90: mod_base = OTHER; note = Nucleotide with phosphorothioate linkage
  modified_base 91: mod_base = OTHER; note = 2'-O-methyl modified nucleotide with phosphorothioate linkage
  modified_base 92: mod_base = OTHER; note = 2'-O-methyl modified nucleotide with phosphorothioate linkage
  modified_base 93: mod_base = OTHER; note = 2'-O-methyl modified nucleotide
aaggctgtgctgaccatcgagtctttgtactctggggacagaagctacaaagataaggcttcatgccgaaatcatttctcgtcgatggtcagc

SEQ ID NO: 27108 - RNA, 93 nt, synthetic construct
  source 1..93: mol_type = other RNA
  modified_base 1: mod_base = OTHER; note = 2'-O-methyl modified nucleotide with phosphorothioate linkage
  modified_base 2: mod_base = OTHER; note = 2'-O-methyl modified nucleotide with phosphorothioate linkage
  modified_base 3: mod_base = OTHER; note = 2'-O-methyl modified nucleotide with phosphorothioate linkage
  modified_base 90: mod_base = OTHER; note = Nucleotide with phosphorothioate linkage
  modified_base 91: mod_base = OTHER; note = 2'-O-methyl modified nucleotide with phosphorothioate linkage
  modified_base 92: mod_base = OTHER; note = 2'-O-methyl modified nucleotide with phosphorothioate linkage
  modified_base 93: mod_base = OTHER; note = 2'-O-methyl modified nucleotide
aaggctgtgctgaccatcgagtctttgtactctggcgacagaagctacaaagataaggcttcatgccgaaatcatttctcgtcgatggtcagc

SEQ ID NO: 27109 - RNA, 93 nt, synthetic construct
  source 1..93: mol_type = other RNA
  modified_base 1: mod_base = OTHER; note = 2'-O-methyl modified nucleotide with phosphorothioate linkage
  modified_base 2: mod_base = OTHER; note = 2'-O-methyl modified nucleotide with phosphorothioate linkage
  modified_base 3: mod_base = OTHER; note = 2'-O-methyl modified nucleotide with phosphorothioate linkage
  modified_base 90: mod_base = OTHER; note = Nucleotide with phosphorothioate linkage
  modified_base 91: mod_base = OTHER; note = 2'-O-methyl modified nucleotide with phosphorothioate linkage
  modified_base 92: mod_base = OTHER; note = 2'-O-methyl modified nucleotide with phosphorothioate linkage
  modified_base 93: mod_base = OTHER; note = 2'-O-methyl modified nucleotide
aaggctgtgctgaccatcgagtctttgtactctggtgacagaagctacaaagataaggcttcatgccgaaatcatttctcgtcgatggtcagc

SEQ ID NO: 27110 - RNA, 93 nt, synthetic construct
  source 1..93: mol_type = other RNA
  modified_base 1: mod_base = OTHER; note = 2'-O-methyl modified nucleotide with phosphorothioate linkage
  modified_base 2: mod_base = OTHER; note = 2'-O-methyl modified nucleotide with phosphorothioate linkage
  modified_base 3: mod_base = OTHER; note = 2'-O-methyl modified nucleotide with phosphorothioate linkage
  modified_base 90: mod_base = OTHER; note = Nucleotide with phosphorothioate linkage
  modified_base 91: mod_base = OTHER; note = 2'-O-methyl modified nucleotide with phosphorothioate linkage
  modified_base 92: mod_base = OTHER; note = 2'-O-methyl modified nucleotide with phosphorothioate linkage
  modified_base 93: mod_base = OTHER; note = 2'-O-methyl modified nucleotide
aaggctgtgctgaccatcgagtctttgtactctgtaaccagaagctacaaagataaggcttcatgccgaaatcatttctcgtcgatggtcagc

SEQ ID NO: 27111 - RNA, 93 nt, synthetic construct
  source 1..93: mol_type = other RNA
  modified_base 1: mod_base = OTHER; note = 2'-O-methyl modified nucleotide with phosphorothioate linkage
  modified_base 2: mod_base = OTHER; note = 2'-O-methyl modified nucleotide with phosphorothioate linkage
  modified_base 3: mod_base = OTHER; note = 2'-O-methyl modified nucleotide with phosphorothioate linkage
  modified_base 90: mod_base = OTHER; note = Nucleotide with phosphorothioate linkage
  modified_base 91: mod_base = OTHER; note = 2'-O-methyl modified nucleotide with phosphorothioate linkage
  modified_base 92: mod_base = OTHER; note = 2'-O-methyl modified nucleotide with phosphorothioate linkage
  modified_base 93: mod_base = OTHER; note = 2'-O-methyl modified nucleotide
aaggctgtgctgaccatcgagtctttgtactctgtgaccagaagctacaaagataaggcttcatgccgaaatcatttctcgtcgatggtcagc

SEQ ID NO: 27112 - RNA, 93 nt, synthetic construct
  source 1..93: mol_type = other RNA
  modified_base 1: mod_base = OTHER; note = 2'-O-methyl modified nucleotide with phosphorothioate linkage
  modified_base 2: mod_base = OTHER; note = 2'-O-methyl modified nucleotide with phosphorothioate linkage
  modified_base 3: mod_base = OTHER; note = 2'-O-methyl modified nucleotide with phosphorothioate linkage
  modified_base 90: mod_base = OTHER; note = Nucleotide with phosphorothioate linkage
  modified_base 91: mod_base = OTHER; note = 2'-O-methyl modified nucleotide with phosphorothioate linkage
  modified_base 92: mod_base = OTHER; note = 2'-O-methyl modified nucleotide with phosphorothioate linkage
  modified_base 93: mod_base = OTHER; note = 2'-O-methyl modified nucleotide
aaggctgtgctgaccatcgagtctttgtactctgtcaccagaagctacaaagataaggcttcatgccgaaatcatttctcgtcgatggtcagc

SEQ ID NO: 27113 - RNA, 93 nt, synthetic construct
  source 1..93: mol_type = other RNA
  modified_base 1: mod_base = OTHER; note = 2'-O-methyl modified nucleotide with phosphorothioate linkage
  modified_base 2: mod_base = OTHER; note = 2'-O-methyl modified nucleotide with phosphorothioate linkage
  modified_base 3: mod_base = OTHER; note = 2'-O-methyl modified nucleotide with phosphorothioate linkage
  modified_base 90: mod_base = OTHER; note = Nucleotide with phosphorothioate linkage
  modified_base 91: mod_base = OTHER; note = 2'-O-methyl modified nucleotide with phosphorothioate linkage
  modified_base 92: mod_base = OTHER; note = 2'-O-methyl modified nucleotide with phosphorothioate linkage
  modified_base 93: mod_base = OTHER; note = 2'-O-methyl modified nucleotide
aaggctgtgctgaccatcgagtctttgtactctgttaccagaagctacaaagataaggcttcatgccgaaatcatttctcgtcgatggtcagc

SEQ ID NO: 27114 - RNA, 93 nt, synthetic construct
  source 1..93: mol_type = other RNA
  modified_base 1: mod_base = OTHER; note = 2'-O-methyl modified nucleotide with phosphorothioate linkage
  modified_base 2: mod_base = OTHER; note = 2'-O-methyl modified nucleotide with phosphorothioate linkage
  modified_base 3: mod_base = OTHER; note = 2'-O-methyl modified nucleotide with phosphorothioate linkage
  modified_base 90: mod_base = OTHER; note = Nucleotide with phosphorothioate linkage
  modified_base 91: mod_base = OTHER; note = 2'-O-methyl modified nucleotide with phosphorothioate linkage
  modified_base 92: mod_base = OTHER; note = 2'-O-methyl modified nucleotide with phosphorothioate linkage
  modified_base 93: mod_base = OTHER; note = 2'-O-methyl modified nucleotide
aaggctgtgctgaccatcgagtctttgtactctgtacgcagaagctacaaagataaggcttcatgccgaaatcatttctcgtcgatggtcagc

SEQ ID NO: 27115 - RNA, 93 nt, synthetic construct
  source 1..93: mol_type = other RNA
  modified_base 1: mod_base = OTHER; note = 2'-O-methyl modified nucleotide with phosphorothioate linkage
  modified_base 2: mod_base = OTHER; note = 2'-O-methyl modified nucleotide with phosphorothioate linkage
  modified_base 3: mod_base = OTHER; note = 2'-O-methyl modified nucleotide with phosphorothioate linkage
  modified_base 90: mod_base = OTHER; note = Nucleotide with phosphorothioate linkage
  modified_base 91: mod_base = OTHER; note = 2'-O-methyl modified nucleotide with phosphorothioate linkage
  modified_base 92: mod_base = OTHER; note = 2'-O-methyl modified nucleotide with phosphorothioate linkage
  modified_base 93: mod_base = OTHER; note = 2'-O-methyl modified nucleotide
aaggctgtgctgaccatcgagtctttgtactctgtgcgcagaagctacaaagataaggcttcatgccgaaatcatttctcgtcgatggtcagc

SEQ ID NO: 27116 - RNA, 93 nt, synthetic construct
  source 1..93: mol_type = other RNA
  modified_base 1: mod_base = OTHER; note = 2'-O-methyl modified nucleotide with phosphorothioate linkage
  modified_base 2: mod_base = OTHER; note = 2'-O-methyl modified nucleotide with phosphorothioate linkage
  modified_base 3: mod_base = OTHER; note = 2'-O-methyl modified nucleotide with phosphorothioate linkage
  modified_base 90: mod_base = OTHER; note = Nucleotide with phosphorothioate linkage
  modified_base 91: mod_base = OTHER; note = 2'-O-methyl modified nucleotide with phosphorothioate linkage
  modified_base 92: mod_base = OTHER; note = 2'-O-methyl modified nucleotide with phosphorothioate linkage
  modified_base 93: mod_base = OTHER; note = 2'-O-methyl modified nucleotide
aaggctgtgctgaccatcgagtctttgtactctgtccgcagaagctacaaagataaggcttcatgccgaaatcatttctcgtcgatggtcagc

SEQ ID NO: 27117 - RNA, 93 nt, synthetic construct
  source 1..93: mol_type = other RNA
  modified_base 1: mod_base = OTHER; note = 2'-O-methyl modified nucleotide with phosphorothioate linkage
  modified_base 2: mod_base = OTHER; note = 2'-O-methyl modified nucleotide with phosphorothioate linkage
  modified_base 3: mod_base = OTHER; note = 2'-O-methyl modified nucleotide with phosphorothioate linkage
  modified_base 90: mod_base = OTHER; note = Nucleotide with phosphorothioate linkage
  modified_base 91: mod_base = OTHER; note = 2'-O-methyl modified nucleotide with phosphorothioate linkage
  modified_base 92: mod_base = OTHER; note = 2'-O-methyl modified nucleotide with phosphorothioate linkage
  modified_base 93: mod_base = OTHER; note = 2'-O-methyl modified nucleotide
aaggctgtgctgaccatcgagtctttgtactctgttcgcagaagctacaaagataaggcttcatgccgaaatcatttctcgtcgatggtcagc

SEQ ID NO: 27118 - RNA, 93 nt, synthetic construct
  source 1..93: mol_type = other RNA
  modified_base 1: mod_base = OTHER; note = 2'-O-methyl modified nucleotide with phosphorothioate linkage
  modified_base 2: mod_base = OTHER; note = 2'-O-methyl modified nucleotide with phosphorothioate linkage
  modified_base 3: mod_base = OTHER; note = 2'-O-methyl modified nucleotide with phosphorothioate linkage
  modified_base 90: mod_base = OTHER; note = Nucleotide with phosphorothioate linkage
  modified_base 91: mod_base = OTHER; note = 2'-O-methyl modified nucleotide with phosphorothioate linkage
  modified_base 92: mod_base = OTHER; note = 2'-O-methyl modified nucleotide with phosphorothioate linkage
  modified_base 93: mod_base = OTHER; note = 2'-O-methyl modified nucleotide
aaggctgtgctgaccatcgagtctttgtactctgggagcagaagctacaaagataaggcttcatgccgaaatcatttctcgtcgatggtcagc

SEQ ID NO: 27119 - RNA, 93 nt, synthetic construct
  source 1..93: mol_type = other RNA
  modified_base 1: mod_base = OTHER; note = 2'-O-methyl modified nucleotide with phosphorothioate linkage
  modified_base 2: mod_base = OTHER; note = 2'-O-methyl modified nucleotide with phosphorothioate linkage
  modified_base 3: mod_base = OTHER; note = 2'-O-methyl modified nucleotide with phosphorothioate linkage
  modified_base 90: mod_base = OTHER; note = Nucleotide with phosphorothioate linkage
  modified_base 91: mod_base = OTHER; note = 2'-O-methyl modified nucleotide with phosphorothioate linkage
  modified_base 92: mod_base = OTHER; note = 2'-O-methyl modified nucleotide with phosphorothioate linkage
  modified_base 93: mod_base = OTHER; note = 2'-O-methyl modified nucleotide
aaggctgtgctgaccatcgagtctttgtactctgtgaacagaagctacaaagataaggcttcatgccgaaatcatttctcgtcgatggtcagc

SEQ ID NO: 27120 - RNA, 93 nt, synthetic construct
  source 1..93: mol_type = other RNA
  modified_base 1: mod_base = OTHER; note = 2'-O-methyl modified nucleotide with phosphorothioate linkage
  modified_base 2: mod_base = OTHER; note = 2'-O-methyl modified nucleotide with phosphorothioate linkage
  modified_base 3: mod_base = OTHER; note = 2'-O-methyl modified nucleotide with phosphorothioate linkage
  modified_base 90: mod_base = OTHER; note = Nucleotide with phosphorothioate linkage
  modified_base 91: mod_base = OTHER; note = 2'-O-methyl modified nucleotide with phosphorothioate linkage
  modified_base 92: mod_base = OTHER; note = 2'-O-methyl modified nucleotide with phosphorothioate linkage
  modified_base 93: mod_base = OTHER; note = 2'-O-methyl modified nucleotide
aaggctgtgctgaccatcgagtctttgtactctgcaaccagaagctacaaagataaggcttcatgccgaaatcatttctcgtcgatggtcagc

SEQ ID NO: 27121 - RNA, 94 nt, synthetic construct
  source 1..94: mol_type = other RNA
  modified_base 1: mod_base = OTHER; note = 2'-O-methyl modified nucleotide with phosphorothioate linkage
  modified_base 2: mod_base = OTHER; note = 2'-O-methyl modified nucleotide with phosphorothioate linkage
  modified_base 3: mod_base = OTHER; note = 2'-O-methyl modified nucleotide with phosphorothioate linkage
  modified_base 91: mod_base = OTHER; note = Nucleotide with phosphorothioate linkage
  modified_base 92: mod_base = OTHER; note = 2'-O-methyl modified nucleotide with phosphorothioate linkage
  modified_base 93: mod_base = OTHER; note = 2'-O-methyl modified nucleotide with phosphorothioate linkage
  modified_base 94: mod_base = OTHER; note = 2'-O-methyl modified nucleotide
aaggctgtgctgaccatcgagtctttgtactctggacaacagaagctacaaagataaggcttcatgccgaaatcatttctcgtcgatggtcagc

SEQ ID NO: 27122 - RNA, 94 nt, synthetic construct
  source 1..94: mol_type = other RNA
  modified_base 1: mod_base = OTHER; note = 2'-O-methyl modified nucleotide with phosphorothioate linkage
  modified_base 2: mod_base = OTHER; note = 2'-O-methyl modified nucleotide with phosphorothioate linkage
  modified_base 3: mod_base = OTHER; note = 2'-O-methyl modified nucleotide with phosphorothioate linkage
  modified_base 91: mod_base = OTHER; note = Nucleotide with phosphorothioate linkage
  modified_base 92: mod_base = OTHER; note = 2'-O-methyl modified nucleotide with phosphorothioate linkage
  modified_base 93: mod_base = OTHER; note = 2'-O-methyl modified nucleotide with phosphorothioate linkage
  modified_base 94: mod_base = OTHER; note = 2'-O-methyl modified nucleotide
aaggctgtgctgaccatcgagtctttgtactctggaagacagaagctacaaagataaggcttcatgccgaaatcatttctcgtcgatggtcagc

SEQ ID NO: 27123 - RNA, 95 nt, synthetic construct
  source 1..95: mol_type = other RNA
  modified_base 1: mod_base = OTHER; note = 2'-O-methyl modified nucleotide with phosphorothioate linkage
  modified_base 2: mod_base = OTHER; note = 2'-O-methyl modified nucleotide with phosphorothioate linkage
  modified_base 3: mod_base = OTHER; note = 2'-O-methyl modified nucleotide with phosphorothioate linkage
  modified_base 92: mod_base = OTHER; note = Nucleotide with phosphorothioate linkage
  modified_base 93: mod_base = OTHER; note = 2'-O-methyl modified nucleotide with phosphorothioate linkage
  modified_base 94: mod_base = OTHER; note = 2'-O-methyl modified nucleotide with phosphorothioate linkage
  modified_base 95: mod_base = OTHER; note = 2'-O-methyl modified nucleotide
aaggctgtgctgaccatcgagtctttgtactctcggtaccgagaagctacaaagataaggcttcatgccgaaatcatttctcgtcgatggtcagc

SEQ ID NO: 27124 - RNA, 97 nt, synthetic construct
  source 1..97: mol_type = other RNA
  modified_base 1: mod_base = OTHER; note = 2'-O-methyl modified nucleotide with phosphorothioate linkage
  modified_base 2: mod_base = OTHER; note = 2'-O-methyl modified nucleotide with phosphorothioate linkage
  modified_base 3: mod_base = OTHER; note = 2'-O-methyl modified nucleotide with phosphorothioate linkage
  modified_base 94: mod_base = OTHER; note = Nucleotide with phosphorothioate linkage
  modified_base 95: mod_base = OTHER; note = 2'-O-methyl modified nucleotide with phosphorothioate linkage
  modified_base 96: mod_base = OTHER; note = 2'-O-methyl modified nucleotide with phosphorothioate linkage
  modified_base 97: mod_base = OTHER; note = 2'-O-methyl modified nucleotide
aaggctgtgctgaccatcgagtctttgtactctgcggtaccgcagaagctacaaagataaggcttcatgccgaaatcatttctcgtcgatggtcagc

SEQ ID NO: 27125 - RNA, 99 nt, synthetic construct
  source 1..99: mol_type = other RNA
  modified_base 1: mod_base = OTHER; note = 2'-O-methyl modified nucleotide with phosphorothioate linkage
  modified_base 2: mod_base = OTHER; note = 2'-O-methyl modified nucleotide with phosphorothioate linkage
  modified_base 3: mod_base = OTHER; note = 2'-O-methyl modified nucleotide with phosphorothioate linkage
  modified_base 96: mod_base = OTHER; note = Nucleotide with phosphorothioate linkage
  modified_base 97: mod_base = OTHER; note = 2'-O-methyl modified nucleotide with phosphorothioate linkage
  modified_base 98: mod_base = OTHER; note = 2'-O-methyl modified nucleotide with phosphorothioate linkage
  modified_base 99: mod_base = OTHER; note = 2'-O-methyl modified nucleotide
aaggctgtgctgaccatcgagtctttgtactctcgcggtaccgcgagaagctacaaagataaggcttcatgccgaaatcatttctcgtcgatggtcagc

SEQ ID NO: 27126 - RNA, 101 nt, synthetic construct
  source 1..101: mol_type = other RNA
  modified_base 1: mod_base = OTHER; note = 2'-O-methyl modified nucleotide with phosphorothioate linkage
  modified_base 2: mod_base = OTHER; note = 2'-O-methyl modified nucleotide with phosphorothioate linkage
  modified_base 3: mod_base = OTHER; note = 2'-O-methyl modified nucleotide with phosphorothioate linkage
  modified_base 98: mod_base = OTHER; note = Nucleotide with phosphorothioate linkage
  modified_base 99: mod_base = OTHER; note = 2'-O-methyl modified nucleotide with phosphorothioate linkage
  modified_base 100: mod_base = OTHER; note = 2'-O-methyl modified nucleotide with phosphorothioate linkage
  modified_base 101: mod_base = OTHER; note = 2'-O-methyl modified nucleotide
aaggctgtgctgaccatcgagtctttgtactctgcgcggtaccgcgcagaagctacaaagataaggcttcatgccgaaatcatttctcgtcgatggtcagc

SEQ ID NO: 27127 - RNA, 103 nt, synthetic construct
  source 1..103: mol_type = other RNA
  modified_base 1: mod_base = OTHER; note = 2'-O-methyl modified nucleotide with phosphorothioate linkage
  modified_base 2: mod_base = OTHER; note = 2'-O-methyl modified nucleotide with phosphorothioate linkage
  modified_base 3: mod_base = OTHER; note = 2'-O-methyl modified nucleotide with phosphorothioate linkage
  modified_base 100: mod_base = OTHER; note = Nucleotide with phosphorothioate linkage
  modified_base 101: mod_base = OTHER; note = 2'-O-methyl modified nucleotide with phosphorothioate linkage
  modified_base 102: mod_base = OTHER; note = 2'-O-methyl modified nucleotide with phosphorothioate linkage
  modified_base 103: mod_base = OTHER; note = 2'-O-methyl modified nucleotide
aaggctgtgctgaccatcgagtctttgtactctcgcgcggtaccgcgcgagaagctacaaagataaggcttcatgccgaaatcatttctcgtcgatggtcagc

SEQ ID NO: 27128 - RNA, 101 nt, synthetic construct
  source 1..101: mol_type = other RNA
  modified_base 1: mod_base = OTHER; note = 2'-O-methyl modified nucleotide with phosphorothioate linkage
  modified_base 2: mod_base = OTHER; note = 2'-O-methyl modified nucleotide with phosphorothioate linkage
  modified_base 3: mod_base = OTHER; note = 2'-O-methyl modified nucleotide with phosphorothioate linkage
  modified_base 98: mod_base = OTHER; note = Nucleotide with phosphorothioate linkage
  modified_base 99: mod_base = OTHER; note = 2'-O-methyl modified nucleotide with phosphorothioate linkage
  modified_base 100: mod_base = OTHER; note = 2'-O-methyl modified nucleotide with phosphorothioate linkage
  modified_base 101: mod_base = OTHER; note = 2'-O-methyl modified nucleotide
aaggctgtgctgaccatcgagtctttgtactctgggacttcggtcccagaagctacaaagataaggcttcatgccgaaatcatttctcgtcgatggtcagc

SEQ ID NO: 27129 - RNA, 99 nt, synthetic construct
  source 1..99: mol_type = other RNA
  modified_base 1: mod_base = OTHER; note = 2'-O-methyl modified nucleotide with phosphorothioate linkage
  modified_base 2: mod_base = OTHER; note = 2'-O-methyl modified nucleotide with phosphorothioate linkage
  modified_base 3: mod_base = OTHER; note = 2'-O-methyl modified nucleotide with phosphorothioate linkage
  modified_base 96: mod_base = OTHER; note = Nucleotide with phosphorothioate linkage
  modified_base 97: mod_base = OTHER; note = 2'-O-methyl modified nucleotide with phosphorothioate linkage
  modified_base 98: mod_base = OTHER; note = 2'-O-methyl modified nucleotide with phosphorothioate linkage
  modified_base 99: mod_base = OTHER; note = 2'-O-methyl modified nucleotide
aaggctgtgctgaccatcgagtctttgtactctggacttcggtccagaagctacaaagataaggcttcatgccgaaatcatttctcgtcgatggtcagc

SEQ ID NO: 27130 - RNA, 97 nt, synthetic construct
  source 1..97: mol_type = other RNA
  modified_base 1: mod_base = OTHER; note = 2'-O-methyl modified nucleotide with phosphorothioate linkage
  modified_base 2: mod_base = OTHER; note = 2'-O-methyl modified nucleotide with phosphorothioate linkage
  modified_base 3: mod_base = OTHER; note = 2'-O-methyl modified nucleotide with phosphorothioate linkage
  modified_base 94: mod_base = OTHER; note = Nucleotide with phosphorothioate linkage
  modified_base 95: mod_base = OTHER; note = 2'-O-methyl modified nucleotide with phosphorothioate linkage
  modified_base 96: mod_base = OTHER; note = 2'-O-methyl modified nucleotide with phosphorothioate linkage
  modified_base 97: mod_base = OTHER; note = 2'-O-methyl modified nucleotide
aaggctgtgctgaccatcgagtctttgtactcggacttcggtccgaagctacaaagataaggcttcatgccgaaatcatttctcgtcgatggtcagc

SEQ ID NO: 27131 - RNA, 89 nt, synthetic construct
  source 1..89: mol_type = other RNA
  modified_base 1: mod_base = OTHER; note = 2'-O-methyl modified nucleotide with phosphorothioate linkage
  modified_base 2: mod_base = OTHER; note = 2'-O-methyl modified nucleotide with phosphorothioate linkage
  modified_base 3: mod_base = OTHER; note = 2'-O-methyl modified nucleotide with phosphorothioate linkage
  modified_base 86: mod_base = OTHER; note = Nucleotide with phosphorothioate linkage
  modified_base 87: mod_base = OTHER; note = 2'-O-methyl modified nucleotide with phosphorothioate linkage
  modified_base 88: mod_base = OTHER; note = 2'-O-methyl modified nucleotide with phosphorothioate linkage
  modified_base 89: mod_base = OTHER; note = 2'-O-methyl modified nucleotide
aaggctgtgctgaccatcgagtctttgtactctggtaccagaagctacaaagataaggcttcatgccgaaatcattctcgtcgatggtc

SEQ ID NO: 27132 - RNA, 93 nt, synthetic construct; identical to SEQ ID NO: 27091
  source 1..93: mol_type = other RNA
  modified_base 1: mod_base = OTHER; note = 2'-O-methyl modified nucleotide with phosphorothioate linkage
  modified_base 2: mod_base = OTHER; note = 2'-O-methyl modified nucleotide with phosphorothioate linkage
  modified_base 3: mod_base = OTHER; note = 2'-O-methyl modified nucleotide with phosphorothioate linkage
  modified_base 90: mod_base = OTHER; note = Nucleotide with phosphorothioate linkage
  modified_base 91: mod_base = OTHER; note = 2'-O-methyl modified nucleotide with phosphorothioate linkage
  modified_base 92: mod_base = OTHER; note = 2'-O-methyl modified nucleotide with phosphorothioate linkage
  modified_base 93: mod_base = OTHER; note = 2'-O-methyl modified nucleotide

SEQ ID NO: 27133 - RNA, 96 nt, synthetic construct
  source 1..96: mol_type = other RNA
  modified_base 1: mod_base = OTHER; note = 2'-O-methyl modified nucleotide with phosphorothioate linkage
  modified_base 2: mod_base = OTHER; note = 2'-O-methyl modified nucleotide with phosphorothioate linkage
  modified_base 3: mod_base = OTHER; note = 2'-O-methyl modified nucleotide with phosphorothioate linkage
  modified_base 93: mod_base = OTHER; note = Nucleotide with phosphorothioate linkage
  modified_base 94: mod_base = OTHER; note = 2'-O-methyl modified nucleotide with phosphorothioate linkage
  modified_base 95: mod_base = OTHER; note = 2'-O-methyl modified nucleotide with phosphorothioate linkage
  modified_base 96: mod_base = OTHER; note = 2'-O-methyl modified nucleotide
aaggctgtgctgaccatcgagtctttgtactctggtaccagaagctacaaagataaggcttcatgccgaaatcatccctttctcgtcgatggtcag

SEQ ID NO: 27134 - RNA, 92 nt, synthetic construct; identical to SEQ ID NO: 27001
  source 1..92: mol_type = other RNA
  modified_base 1: mod_base = OTHER; note = 2'-O-methyl modified nucleotide with phosphorothioate linkage
  modified_base 2: mod_base = OTHER; note = 2'-O-methyl modified nucleotide with phosphorothioate linkage
  modified_base 3: mod_base = OTHER; note = 2'-O-methyl modified nucleotide with phosphorothioate linkage
  modified_base 89: mod_base = OTHER; note = Nucleotide with phosphorothioate linkage
  modified_base 90: mod_base = OTHER; note = 2'-O-methyl modified nucleotide with phosphorothioate linkage
  modified_base 91: mod_base = OTHER; note = 2'-O-methyl modified nucleotide with phosphorothioate linkage
  modified_base 92: mod_base = OTHER; note = 2'-O-methyl modified nucleotide

SEQ ID NO: 27135 - RNA, 92 nt, synthetic construct; identical to SEQ ID NO: 27001
  source 1..92: mol_type = other RNA
  modified_base 1: mod_base = OTHER; note = 2'-O-methyl modified nucleotide with phosphorothioate linkage
  modified_base 2: mod_base = OTHER; note = 2'-O-methyl modified nucleotide with phosphorothioate linkage
  modified_base 3: mod_base = OTHER; note = 2'-O-methyl modified nucleotide with phosphorothioate linkage
  modified_base 89: mod_base = OTHER; note = Nucleotide with phosphorothioate linkage
  modified_base 90: mod_base = OTHER; note = 2'-O-methyl modified nucleotide with phosphorothioate linkage
  modified_base 91: mod_base = OTHER; note = 2'-O-methyl modified nucleotide with phosphorothioate linkage
  modified_base 92: mod_base = OTHER; note = 2'-O-methyl modified nucleotide

SEQ ID NO: 27136 - RNA, 92 nt, synthetic construct; identical to SEQ ID NO: 27001
  source 1..92: mol_type = other RNA
  modified_base 1: mod_base = OTHER; note = 2'-O-methyl modified nucleotide with phosphorothioate linkage
  modified_base 2: mod_base = OTHER; note = 2'-O-methyl modified nucleotide with phosphorothioate linkage
  modified_base 3: mod_base = OTHER; note = 2'-O-methyl modified nucleotide with phosphorothioate linkage
  modified_base 32: mod_base = OTHER; note = 2'-O-methyl modified nucleotide
  modified_base 33: mod_base = OTHER; note = 2'-O-methyl modified nucleotide
  modified_base 34: mod_base = OTHER; note = 2'-O-methyl modified nucleotide
  modified_base 35: mod_base = OTHER; note = 2'-O-methyl modified nucleotide
  modified_base 36: mod_base = OTHER; note = 2'-O-methyl modified nucleotide
  modified_base 37: mod_base = OTHER; note = 2'-O-methyl modified nucleotide
  modified_base 38: mod_base = OTHER; note = 2'-O-methyl modified nucleotide
  modified_base 39: mod_base = OTHER; note = 2'-O-methyl modified nucleotide
  modified_base 40: mod_base = OTHER; note = 2'-O-methyl modified nucleotide
  modified_base 41: mod_base = OTHER; note = 2'-O-methyl modified nucleotide
  modified_base 89: mod_base = OTHER; note = Nucleotide with phosphorothioate linkage
  modified_base 90: mod_base = OTHER; note = 2'-O-methyl modified nucleotide with phosphorothioate linkage
  modified_base 91: mod_base = OTHER; note = 2'-O-methyl modified nucleotide with phosphorothioate linkage
  modified_base 92: mod_base = OTHER; note = 2'-O-methyl modified nucleotide

SEQ ID NO: 27137 - RNA, 92 nt, synthetic construct; identical to SEQ ID NO: 27001
  source 1..92: mol_type = other RNA
  modified_base 1: mod_base = OTHER; note = 2'-O-methyl modified nucleotide with phosphorothioate linkage
  modified_base 2: mod_base = OTHER; note = 2'-O-methyl modified nucleotide with phosphorothioate linkage
  modified_base 3: mod_base = OTHER; note = 2'-O-methyl modified nucleotide with phosphorothioate linkage
  modified_base 24: mod_base = OTHER; note = 2'-O-methyl modified nucleotide
  modified_base 25: mod_base = OTHER; note = 2'-O-methyl modified nucleotide
  modified_base 26: mod_base = OTHER; note = 2'-O-methyl modified nucleotide
  modified_base 33: mod_base = OTHER; note = 2'-O-methyl modified nucleotide
  modified_base 34: mod_base = OTHER; note = 2'-O-methyl modified nucleotide
  modified_base 35: mod_base = OTHER; note = 2'-O-methyl modified nucleotide
  modified_base 36: mod_base = OTHER; note = 2'-O-methyl modified nucleotide
  modified_base 37: mod_base = OTHER; note = 2'-O-methyl modified nucleotide
  modified_base 38: mod_base = OTHER; note = 2'-O-methyl modified nucleotide
  modified_base 39: mod_base = OTHER; note = 2'-O-methyl modified nucleotide
  modified_base 40: mod_base = OTHER; note = 2'-O-methyl modified nucleotide
  modified_base 41: mod_base = OTHER; note = 2'-O-methyl modified nucleotide
  modified_base 42: mod_base = OTHER; note = 2'-O-methyl modified nucleotide
  modified_base 43: mod_base = OTHER; note = 2'-O-methyl modified nucleotide
  modified_base 44: mod_base = OTHER; note = 2'-O-methyl modified nucleotide
  modified_base 54: mod_base = OTHER; note = 2'-O-methyl modified nucleotide
  modified_base 55: mod_base = OTHER; note = 2'-O-methyl modified nucleotide
  modified_base 56: mod_base = OTHER; note = 2'-O-methyl modified nucleotide
  modified_base 57: mod_base = OTHER; note = 2'-O-methyl modified nucleotide
  modified_base 58: mod_base = OTHER; note = 2'-O-methyl modified nucleotide
  modified_base 59: mod_base = OTHER; note = 2'-O-methyl modified nucleotide
  modified_base 60: mod_base = OTHER; note = 2'-O-methyl modified nucleotide
  modified_base 61: mod_base = OTHER; note = 2'-O-methyl modified nucleotide
  modified_base 62: mod_base = OTHER; note = 2'-O-methyl modified nucleotide
  modified_base 89: mod_base = OTHER; note = Nucleotide with phosphorothioate linkage
  modified_base 90: mod_base = OTHER; note = 2'-O-methyl modified nucleotide with phosphorothioate linkage
  modified_base 91: mod_base = OTHER; note = 2'-O-methyl modified nucleotide with phosphorothioate linkage
  modified_base 92: mod_base = OTHER; note = 2'-O-methyl modified nucleotide

SEQ ID NO: 27138 - RNA, 92 nt, synthetic construct; identical to SEQ ID NO: 27001
  source 1..92: mol_type = other RNA
  modified_base 1: mod_base = OTHER; note = 2'-O-methyl modified nucleotide with phosphorothioate linkage
  modified_base 2: mod_base = OTHER; note = 2'-O-methyl modified nucleotide with phosphorothioate linkage
  modified_base 3: mod_base = OTHER; note = 2'-O-methyl modified nucleotide with phosphorothioate linkage
  modified_base 24: mod_base = OTHER; note = 2'-O-methyl modified nucleotide
  modified_base 25: mod_base = OTHER; note = 2'-O-methyl modified nucleotide
  modified_base 26: mod_base = OTHER; note = 2'-O-methyl modified nucleotide
  modified_base 33: mod_base = OTHER; note = 2'-O-methyl modified nucleotide
  modified_base 34: mod_base = OTHER; note = 2'-O-methyl modified nucleotide
  modified_base 35: mod_base = OTHER; note = 2'-O-methyl modified nucleotide
  modified_base 36: mod_base = OTHER; note = 2'-O-methyl modified nucleotide
  modified_base 37: mod_base = OTHER; note = 2'-O-methyl modified nucleotide
  modified_base 38: mod_base = OTHER; note = 2'-O-methyl modified nucleotide
  modified_base 39: mod_base = OTHER; note = 2'-O-methyl modified nucleotide
  modified_base 40: mod_base = OTHER; note = 2'-O-methyl modified nucleotide
  modified_base 41: mod_base = OTHER; note = 2'-O-methyl modified nucleotide
  modified_base 42: mod_base = OTHER; note = 2'-O-methyl modified nucleotide
  modified_base 43: mod_base = OTHER; note = 2'-O-methyl modified nucleotide
  modified_base 44: mod_base = OTHER; note = 2'-O-methyl modified nucleotide
  modified_base 54: mod_base = OTHER; note = 2'-O-methyl modified nucleotide
  modified_base 55: mod_base = OTHER; note = 2'-O-methyl modified nucleotide
  modified_base 56: mod_base = OTHER; note = 2'-O-methyl modified nucleotide
  modified_base 57: mod_base = OTHER; note = 2'-O-methyl modified nucleotide
  modified_base 58: mod_base = OTHER; note = 2'-O-methyl modified nucleotide
  modified_base 59: mod_base = OTHER; note = 2'-O-methyl modified nucleotide
  modified_base 60: mod_base = OTHER; note = 2'-O-methyl modified nucleotide
  modified_base 61: mod_base = OTHER; note = 2'-O-methyl modified nucleotide
  modified_base 62: mod_base = OTHER; note = 2'-O-methyl modified nucleotide
  modified_base 74: mod_base = OTHER; note = 2'-O-methyl modified nucleotide
  modified_base 89: mod_base = OTHER; note = Nucleotide with phosphorothioate linkage
  modified_base 90: mod_base = OTHER; note = 2'-O-methyl modified nucleotide with phosphorothioate linkage
  modified_base 91: mod_base = OTHER; note = 2'-O-methyl modified nucleotide with phosphorothioate linkage
  modified_base 92: mod_base = OTHER; note = 2'-O-methyl modified nucleotide

SEQ ID NO: 27139 - RNA, 92 nt, synthetic construct; identical to SEQ ID NO: 27001
  source 1..92: mol_type = other RNA
  modified_base 1: mod_base = OTHER; note = 2'-O-methyl modified nucleotide with phosphorothioate linkage
  modified_base 2: mod_base = OTHER; note = 2'-O-methyl modified nucleotide with phosphorothioate linkage
  modified_base 3: mod_base = OTHER; note = 2'-O-methyl modified nucleotide with phosphorothioate linkage
  modified_base 25: mod_base = OTHER; note = 2'-O-methyl modified nucleotide
  modified_base 27: mod_base = OTHER; note = 2'-O-methyl modified nucleotide
  modified_base 29: mod_base = OTHER; note = 2'-O-methyl modified nucleotide
  modified_base 31: mod_base = OTHER; note = 2'-O-methyl modified nucleotide
  modified_base 32: mod_base = OTHER; note = 2'-O-methyl modified nucleotide
  modified_base 33: mod_base = OTHER; note = 2'-O-methyl modified nucleotide
  modified_base 34: mod_base = OTHER; note = 2'-O-methyl modified nucleotide
  modified_base 35: mod_base = OTHER; note = 2'-O-methyl modified nucleotide
  modified_base 36: mod_base = OTHER; note = 2'-O-methyl modified nucleotide
  modified_base 37: mod_base = OTHER; note = 2'-O-methyl modified nucleotide
  modified_base 38: mod_base = OTHER; note = 2'-O-methyl modified nucleotide
  modified_base 39: mod_base = OTHER; note = 2'-O-methyl modified nucleotide
  modified_base 40: mod_base = OTHER; note = 2'-O-methyl modified nucleotide
  modified_base 41: mod_base = OTHER; note = 2'-O-methyl modified nucleotide
  modified_base 42: mod_base = OTHER; note = 2'-O-methyl modified nucleotide
  modified_base 44: mod_base = OTHER; note = 2'-O-methyl modified nucleotide
  modified_base 46: mod_base = OTHER; note = 2'-O-methyl modified nucleotide
  modified_base 48: mod_base = OTHER; note = 2'-O-methyl modified nucleotide
  modified_base 50: mod_base = OTHER; note = 2'-O-methyl modified nucleotide
  modified_base 52: mod_base = OTHER; note = 2'-O-methyl modified nucleotide
  modified_base 54: mod_base = OTHER; note = 2'-O-methyl modified nucleotide
  modified_base 56: mod_base = OTHER; note = 2'-O-methyl modified nucleotide
  modified_base 58: mod_base = OTHER; note = 2'-O-methyl modified nucleotide
  modified_base 60: mod_base = OTHER; note = 2'-O-methyl modified nucleotide
  modified_base 62: mod_base = OTHER; note = 2'-O-methyl modified nucleotide
  modified_base 89: mod_base = OTHER; note = Nucleotide with phosphorothioate linkage
  modified_base 90: mod_base = OTHER; note = 2'-O-methyl modified nucleotide with phosphorothioate linkage
  modified_base 91: mod_base = OTHER; note = 2'-O-methyl modified nucleotide with phosphorothioate linkage
  modified_base 92: mod_base = OTHER; note = 2'-O-methyl modified nucleotide

SEQ ID NO: 27140 - RNA, 92 nt, synthetic construct; identical to SEQ ID NO: 27001
  source 1..92: mol_type = other RNA
  modified_base 1: mod_base = OTHER; note = 2'-O-methyl modified nucleotide with phosphorothioate linkage
  modified_base 2: mod_base = OTHER; note = 2'-O-methyl modified nucleotide with phosphorothioate linkage
  modified_base 3: mod_base = OTHER; note = 2'-O-methyl modified nucleotide with phosphorothioate linkage
  modified_base 24: mod_base = OTHER; note = 2'-O-methyl modified nucleotide
  modified_base 25: mod_base = OTHER; note = 2'-O-methyl modified nucleotide
  modified_base 26: mod_base = OTHER; note = 2'-O-methyl modified nucleotide
  modified_base 33: mod_base = OTHER; note = 2'-O-methyl modified nucleotide
  modified_base 34: mod_base = OTHER; note = 2'-O-methyl modified nucleotide
  modified_base 35: mod_base = OTHER; note = 2'-O-methyl modified nucleotide
  modified_base 36: mod_base = OTHER; note = 2'-O-methyl modified nucleotide
  modified_base 37: mod_base = OTHER; note = 2'-O-methyl modified nucleotide
  modified_base 38: mod_base = OTHER; note = 2'-O-methyl modified nucleotide
  modified_base 39: mod_base = OTHER; note = 2'-O-methyl modified nucleotide
  modified_base 40: mod_base = OTHER; note = 2'-O-methyl modified nucleotide
  modified_base 41: mod_base = OTHER; note = 2'-O-methyl modified nucleotide
  modified_base 42: mod_base = OTHER; note = 2'-O-methyl modified nucleotide
  modified_base 43: mod_base = OTHER; note = 2'-O-methyl modified nucleotide
  modified_base 44: mod_base = OTHER; note = 2'-O-methyl modified nucleotide
  modified_base 46: mod_base = OTHER; note = 2'-O-methyl modified nucleotide
  modified_base 48: mod_base = OTHER; note = 2'-O-methyl modified nucleotide
  modified_base 50: mod_base = OTHER; note = 2'-O-methyl modified nucleotide
  modified_base 52: mod_base = OTHER; note = 2'-O-methyl modified nucleotide
  modified_base 54: mod_base = OTHER; note = 2'-O-methyl modified nucleotide
  modified_base 55: mod_base = OTHER; note = 2'-O-methyl modified nucleotide
  modified_base 56: mod_base = OTHER; note = 2'-O-methyl modified nucleotide
  modified_base 57: mod_base = OTHER; note = 2'-O-methyl modified nucleotide
  modified_base 58: mod_base = OTHER; note = 2'-O-methyl modified nucleotide
  modified_base 59: mod_base = OTHER; note = 2'-O-methyl modified nucleotide
  modified_base 60: mod_base = OTHER; note = 2'-O-methyl modified nucleotide
  modified_base 61: mod_base = OTHER; note = 2'-O-methyl modified nucleotide
  modified_base 62: mod_base = OTHER; note = 2'-O-methyl modified nucleotide
  modified_base 89: mod_base = OTHER; note = Nucleotide with phosphorothioate linkage
  modified_base 90: mod_base = OTHER; note = 2'-O-methyl modified nucleotide with phosphorothioate linkage
  modified_base 91: mod_base = OTHER; note = 2'-O-methyl modified nucleotide with phosphorothioate linkage
  modified_base 92: mod_base = OTHER; note = 2'-O-methyl modified nucleotide

SEQ ID NO: 27141 - RNA, 92 nt, synthetic construct; identical to SEQ ID NO: 27035
  source 1..92: mol_type = other RNA
  modified_base 1: mod_base = OTHER; note = 2'-O-methyl modified nucleotide with phosphorothioate linkage
  modified_base 2: mod_base = OTHER; note = 2'-O-methyl modified nucleotide with phosphorothioate linkage
  modified_base 3: mod_base = OTHER; note = 2'-O-methyl modified nucleotide with phosphorothioate linkage
  modified_base 24: mod_base = OTHER; note = 2'-O-methyl modified nucleotide
  modified_base 26: mod_base = OTHER; note = 2'-O-methyl modified nucleotide
  modified_base 28: mod_base = OTHER; note = 2'-O-methyl modified nucleotide
  modified_base 30: mod_base = OTHER; note = 2'-O-methyl modified nucleotide
  modified_base 32: mod_base = OTHER; note = 2'-O-methyl modified nucleotide
  modified_base 33: mod_base = OTHER; note = 2'-O-methyl modified nucleotide
  modified_base 34: mod_base = OTHER; note = 2'-O-methyl modified nucleotide
  modified_base 35: mod_base = OTHER; note = 2'-O-methyl modified nucleotide
  modified_base 36: mod_base = OTHER; note = 2'-O-methyl modified nucleotide
  modified_base 37: mod_base = OTHER; note = 2'-O-methyl modified nucleotide
  modified_base 38: mod_base = OTHER; note = 2'-O-methyl modified nucleotide
  modified_base 39: mod_base = OTHER; note = 2'-O-methyl modified nucleotide
  modified_base 40: mod_base = OTHER; note = 2'-O-methyl modified nucleotide
  modified_base 41: mod_base = OTHER; note = 2'-O-methyl modified nucleotide
  modified_base 42: mod_base = OTHER; note = 2'-O-methyl modified nucleotide
  modified_base 44: mod_base = OTHER; note = 2'-O-methyl modified nucleotide
  modified_base 46: mod_base = OTHER; note = 2'-O-methyl modified nucleotide
  modified_base 48: mod_base = OTHER; note = 2'-O-methyl modified nucleotide
  modified_base 50: mod_base = OTHER; note = 2'-O-methyl modified nucleotide
  modified_base 52: mod_base = OTHER; note = 2'-O-methyl modified nucleotide
  modified_base 54: mod_base = OTHER; note = 2'-O-methyl modified nucleotide
  modified_base 56: mod_base = OTHER; note = 2'-O-methyl modified nucleotide
  modified_base 58: mod_base = OTHER; note = 2'-O-methyl modified nucleotide
  modified_base 60: mod_base = OTHER; note = 2'-O-methyl modified nucleotide
  modified_base 62: mod_base = OTHER; note = 2'-O-methyl modified nucleotide
  modified_base 89: mod_base = OTHER; note = Nucleotide with phosphorothioate linkage
  modified_base 90: mod_base = OTHER; note = 2'-O-methyl modified nucleotide with phosphorothioate linkage
  modified_base 91: mod_base = OTHER; note = 2'-O-methyl modified nucleotide with phosphorothioate linkage
  modified_base 92: mod_base = OTHER; note = 2'-O-methyl modified nucleotide

SEQ ID NO: 27142 - RNA, 92 nt, synthetic construct; identical to SEQ ID NO: 27001
  source 1..92: mol_type = other RNA
  modified_base 1: mod_base = OTHER; note = 2'-O-methyl modified nucleotide with phosphorothioate linkage
  modified_base 2: mod_base = OTHER; note = 2'-O-methyl modified nucleotide with phosphorothioate linkage
  modified_base 3: mod_base = OTHER; note = 2'-O-methyl modified nucleotide with phosphorothioate linkage
  modified_base 24: mod_base = OTHER; note = 2'-O-methyl modified nucleotide
  modified_base 25: mod_base = OTHER; note = 2'-O-methyl modified nucleotide
  modified_base 26: mod_base = OTHER; note = 2'-O-methyl modified nucleotide
  modified_base 28: mod_base = OTHER; note = 2'-O-methyl modified nucleotide
  modified_base 30: mod_base = OTHER; note = 2'-O-methyl modified nucleotide
  modified_base 32: mod_base = OTHER; note = 2'-O-methyl modified nucleotide
  modified_base 33: mod_base = OTHER; note = 2'-O-methyl modified nucleotide
  modified_base 34: mod_base = OTHER; note = 2'-O-methyl modified nucleotide
  modified_base 35: mod_base = OTHER; note = 2'-O-methyl modified nucleotide
  modified_base 36: mod_base = OTHER; note = 2'-O-methyl modified nucleotide
  modified_base 37: mod_base = OTHER; note = 2'-O-methyl modified nucleotide
  modified_base 38: mod_base = OTHER; note = 2'-O-methyl modified nucleotide
  modified_base 39: mod_base = OTHER; note = 2'-O-methyl modified nucleotide
  modified_base 40: mod_base = OTHER; note = 2'-O-methyl modified nucleotide
  modified_base 41: mod_base = OTHER; note = 2'-O-methyl modified nucleotide
  modified_base 42: mod_base = OTHER; note = 2'-O-methyl modified nucleotide
  modified_base 43: mod_base = OTHER; note = 2'-O-methyl modified nucleotide
  modified_base 44: mod_base = OTHER; note = 2'-O-methyl modified nucleotide
  modified_base 46: mod_base = OTHER; note = 2'-O-methyl modified nucleotide
  modified_base 48: mod_base = OTHER; note = 2'-O-methyl modified nucleotide
  modified_base 50: mod_base = OTHER; note = 2'-O-methyl modified nucleotide
  modified_base 52: mod_base = OTHER; note = 2'-O-methyl modified nucleotide
  modified_base 54: mod_base = OTHER; note = 2'-O-methyl modified nucleotide
  modified_base 55: mod_base = OTHER; note = 2'-O-methyl modified nucleotide
  modified_base 56: mod_base = OTHER; note = 2'-O-methyl modified nucleotide
  modified_base 57: mod_base = OTHER; note = 2'-O-methyl modified nucleotide
  modified_base 58: mod_base = OTHER; note = 2'-O-methyl modified nucleotide
  modified_base 59: mod_base = OTHER; note = 2'-O-methyl modified nucleotide
  modified_base 60: mod_base = OTHER; note = 2'-O-methyl modified nucleotide
  modified_base 61: mod_base = OTHER; note = 2'-O-methyl modified nucleotide
  modified_base 62: mod_base = OTHER; note = 2'-O-methyl modified nucleotide
  modified_base 89: mod_base = OTHER; note = Nucleotide with phosphorothioate linkage
  modified_base 90: mod_base = OTHER; note = 2'-O-methyl modified nucleotide with phosphorothioate linkage
  modified_base 91: mod_base = OTHER; note = 2'-O-methyl modified nucleotide with phosphorothioate linkage
  modified_base 92: mod_base = OTHER; note = 2'-O-methyl modified nucleotide

SEQ ID NO: 27143 - RNA, 100 nt, synthetic construct
  source 1..100: mol_type = other RNA
  modified_base 1: mod_base = OTHER; note = 2'-O-methyl modified nucleotide with phosphorothioate linkage
  modified_base 2: mod_base = OTHER; note = 2'-O-methyl modified nucleotide with phosphorothioate linkage
  modified_base 3: mod_base = OTHER; note = 2'-O-methyl modified nucleotide with phosphorothioate linkage
  modified_base 32: mod_base = OTHER; note = 2'-O-methyl modified nucleotide
  modified_base 33: mod_base = OTHER; note = 2'-O-methyl modified nucleotide
  modified_base 34: mod_base = OTHER; note = 2'-O-methyl modified nucleotide
  modified_base 35: mod_base = OTHER; note = 2'-O-methyl modified nucleotide
  modified_base 36: mod_base = OTHER; note = 2'-O-methyl modified nucleotide
  modified_base 37: mod_base = OTHER; note = 2'-O-methyl modified nucleotide
  modified_base 38: mod_base = OTHER; note = 2'-O-methyl modified nucleotide
  modified_base 39: mod_base = OTHER; note = 2'-O-methyl modified nucleotide
  modified_base 40: mod_base = OTHER; note = 2'-O-methyl modified nucleotide
  modified_base 41: mod_base = OTHER; note = 2'-O-methyl modified nucleotide
  modified_base 42: mod_base = OTHER; note = 2'-O-methyl modified nucleotide
  modified_base 43: mod_base = OTHER; note = 2'-O-methyl modified nucleotide
  modified_base 44: mod_base = OTHER; note = 2'-O-methyl modified nucleotide
  modified_base 45: mod_base = OTHER; note = 2'-O-methyl modified nucleotide
  modified_base 46: mod_base = OTHER; note = 2'-O-methyl modified nucleotide
  modified_base 47: mod_base = OTHER; note = 2'-O-methyl modified nucleotide
  modified_base 48: mod_base = OTHER; note = 2'-O-methyl modified nucleotide
  modified_base 49: mod_base = OTHER; note = 2'-O-methyl modified nucleotide
  modified_base 97: mod_base = OTHER; note = Nucleotide with phosphorothioate linkage
  modified_base 98: mod_base = OTHER; note = 2'-O-methyl modified nucleotide with phosphorothioate linkage
  modified_base 99: mod_base = OTHER; note = 2'-O-methyl modified nucleotide with phosphorothioate linkage
  modified_base 100: mod_base = OTHER; note = 2'-O-methyl modified nucleotide
aaggctgtgctgaccatcgagtctttgtactctgggacttcggtcccagaagctacaaagataaggcttcatgccgaaatcatttctcgtcgatggtcag

SEQ ID NO: 27144 - RNA, 100 nt, synthetic construct; identical to SEQ ID NO: 27143
  source 1..100: mol_type = other RNA
  modified_base 1: mod_base = OTHER; note = 2'-O-methyl modified nucleotide with phosphorothioate linkage
  modified_base 2: mod_base = OTHER; note = 2'-O-methyl modified nucleotide with phosphorothioate linkage
  modified_base 3: mod_base = OTHER; note = 2'-O-methyl modified nucleotide with phosphorothioate linkage
  modified_base 24: mod_base = OTHER; note = 2'-O-methyl modified nucleotide
  modified_base 25: mod_base = OTHER; note = 2'-O-methyl modified nucleotide
  modified_base 26: mod_base = OTHER; note = 2'-O-methyl modified nucleotide
  modified_base 33: mod_base = OTHER; note = 2'-O-methyl modified nucleotide
  modified_base 34: mod_base = OTHER; note = 2'-O-methyl modified nucleotide
  modified_base 35: mod_base = OTHER; note = 2'-O-methyl modified nucleotide
  modified_base 36: mod_base = OTHER; note = 2'-O-methyl modified nucleotide
  modified_base 37: mod_base = OTHER; note = 2'-O-methyl modified nucleotide
  modified_base 38: mod_base = OTHER; note = 2'-O-methyl modified nucleotide
  modified_base 39: mod_base = OTHER; note = 2'-O-methyl modified nucleotide
  modified_base 40: mod_base = OTHER; note = 2'-O-methyl modified nucleotide
  modified_base 41: mod_base = OTHER; note = 2'-O-methyl modified nucleotide
  modified_base 42: mod_base = OTHER; note = 2'-O-methyl modified nucleotide
  modified_base 43: mod_base = OTHER; note = 2'-O-methyl modified nucleotide
  modified_base 44: mod_base = OTHER; note = 2'-O-methyl modified nucleotide
  modified_base 46: mod_base = OTHER; note = 2'-O-methyl modified nucleotide
  modified_base 47: mod_base = OTHER; note = 2'-O-methyl modified nucleotide
  modified_base 48: mod_base = OTHER; note = 2'-O-methyl modified nucleotide
  modified_base 49: mod_base = OTHER; note = 2'-O-methyl modified nucleotide
  modified_base 50: mod_base = OTHER; note = 2'-O-methyl modified nucleotide
  modified_base 51: mod_base = OTHER; note = 2'-O-methyl modified nucleotide
  modified_base 52: mod_base = OTHER; note = 2'-O-methyl modified nucleotide
  modified_base 62: mod_base = OTHER; note = 2'-O-methyl modified nucleotide
  modified_base 63: mod_base = OTHER; note = 2'-O-methyl modified nucleotide
  modified_base 64: mod_base = OTHER; note = 2'-O-methyl modified nucleotide
  modified_base 65: mod_base = OTHER; note = 2'-O-methyl modified nucleotide
  modified_base 66: mod_base = OTHER; note = 2'-O-methyl modified nucleotide
  modified_base 67: mod_base = OTHER; note = 2'-O-methyl modified nucleotide
  modified_base 68: mod_base = OTHER; note = 2'-O-methyl modified nucleotide
  modified_base 69: mod_base = OTHER; note = 2'-O-methyl modified nucleotide
  modified_base 70: mod_base = OTHER; note = 2'-O-methyl modified nucleotide
  modified_base 97: mod_base = OTHER; note = Nucleotide with phosphorothioate linkage
  modified_base 98: mod_base = OTHER; note = 2'-O-methyl modified nucleotide with phosphorothioate linkage
  modified_base 99: mod_base = OTHER; note = 2'-O-methyl modified nucleotide with phosphorothioate linkage
  modified_base 100: mod_base = OTHER; note = 2'-O-methyl modified nucleotide

SEQ ID NO: 27145 - RNA, 93 nt, synthetic construct
  source 1..93: mol_type = other RNA
  modified_base 1: mod_base = OTHER; note = 2'-O-methyl modified nucleotide with phosphorothioate linkage
  modified_base 2: mod_base = OTHER; note = 2'-O-methyl modified nucleotide with phosphorothioate linkage
  modified_base 3: mod_base = OTHER; note = 2'-O-methyl modified nucleotide with phosphorothioate linkage
  modified_base 90: mod_base = OTHER; note = Nucleotide with phosphorothioate linkage
  modified_base 91: mod_base = OTHER; note = 2'-O-methyl modified nucleotide with phosphorothioate linkage
  modified_base 92: mod_base = OTHER; note = 2'-O-methyl modified nucleotide with phosphorothioate linkage
  modified_base 93: mod_base = OTHER; note = 2'-O-methyl modified nucleotide
aaggctgtgctgaccatcgagtctttgtactctggtaccagaagctacaaagataaggcttcatgccgaaatcatctcgtcgatggtcagcac

SEQ ID NO: 27146 - RNA, 92 nt, synthetic construct
  source 1..92: mol_type = other RNA
  modified_base 1: mod_base = OTHER; note = 2'-O-methyl modified nucleotide with phosphorothioate linkage
  modified_base 2: mod_base = OTHER; note = 2'-O-methyl modified nucleotide with phosphorothioate linkage
  modified_base 3: mod_base = OTHER; note = 2'-O-methyl modified nucleotide with phosphorothioate linkage
  modified_base 89: mod_base = OTHER; note = Nucleotide with phosphorothioate linkage
  modified_base 90: mod_base = OTHER; note = 2'-O-methyl modified nucleotide with phosphorothioate linkage
  modified_base 91: mod_base = OTHER; note = 2'-O-methyl modified nucleotide with phosphorothioate linkage
  modified_base 92: mod_base = OTHER; note = 2'-O-methyl modified nucleotide
aaggctgtgctgaccatcgagtctttgtactctggtaccagaagctacaaagataaggcttcatgccgaaatcatctcgtcgatggtcagca

SEQ ID NO: 27147 - RNA, 91 nt, synthetic construct
  source 1..91: mol_type = other RNA
  modified_base 1: mod_base = OTHER; note = 2'-O-methyl modified nucleotide with phosphorothioate linkage
  modified_base 2: mod_base = OTHER; note = 2'-O-methyl modified nucleotide with phosphorothioate linkage
  modified_base 3: mod_base = OTHER; note = 2'-O-methyl modified nucleotide with phosphorothioate linkage
  modified_base 88: mod_base = OTHER; note = Nucleotide with phosphorothioate linkage
  modified_base 89: mod_base = OTHER; note = 2'-O-methyl modified nucleotide with phosphorothioate linkage
  modified_base 90: mod_base = OTHER; note = 2'-O-methyl modified nucleotide with phosphorothioate linkage
  modified_base 91: mod_base = OTHER; note = 2'-O-methyl modified nucleotide
aaggctgtgctgaccatcgagtctttgtactctggtaccagaagctacaaagataaggcttcatgccgaaatcatctcgtcgatggtcagc

SEQ ID NO: 27148 - RNA, 90 nt, synthetic construct
  source 1..90: mol_type = other RNA
  modified_base 1: mod_base = OTHER; note = 2'-O-methyl modified nucleotide with phosphorothioate linkage
  modified_base 2: mod_base = OTHER; note = 2'-O-methyl modified nucleotide with phosphorothioate linkage
  modified_base 3: mod_base = OTHER; note = 2'-O-methyl modified nucleotide with phosphorothioate linkage
  modified_base 87: mod_base = OTHER; note = Nucleotide with phosphorothioate linkage
  modified_base 88: mod_base = OTHER; note = 2'-O-methyl modified nucleotide with phosphorothioate linkage
  modified_base 89: mod_base = OTHER; note = 2'-O-methyl modified nucleotide with phosphorothioate linkage
  modified_base 90: mod_base = OTHER; note = 2'-O-methyl modified nucleotide
aaggctgtgctgaccatcgagtctttgtactctggtaccagaagctacaaagataaggcttcatgccgaaatcatctcgtcgatggtcag

SEQ ID NO: 27149 - RNA, 89 nt, synthetic construct
  source 1..89: mol_type = other RNA
  modified_base 1: mod_base = OTHER; note = 2'-O-methyl modified nucleotide with phosphorothioate linkage
  modified_base 2: mod_base = OTHER; note = 2'-O-methyl modified nucleotide with phosphorothioate linkage
  modified_base 3: mod_base = OTHER; note = 2'-O-methyl modified nucleotide with phosphorothioate linkage
  modified_base 86: mod_base = OTHER; note = Nucleotide with phosphorothioate linkage
  modified_base 87: mod_base = OTHER; note = 2'-O-methyl modified nucleotide with phosphorothioate linkage
  modified_base 88: mod_base = OTHER; note = 2'-O-methyl modified nucleotide with phosphorothioate linkage
  modified_base 89: mod_base = OTHER; note = 2'-O-methyl modified nucleotide
aaggctgtgctgaccatcgagtctttgtactctggtaccagaagctacaaagataaggcttcatgccgaaatcatctcgtcgatggtca

SEQ ID NO: 27150 - RNA, 88 nt, synthetic construct
  source 1..88: mol_type = other RNA
  modified_base 1: mod_base = OTHER; note = 2'-O-methyl modified nucleotide with phosphorothioate linkage
  modified_base 2: mod_base = OTHER; note = 2'-O-methyl modified nucleotide with phosphorothioate linkage
  modified_base 3: mod_base = OTHER; note = 2'-O-methyl modified nucleotide with phosphorothioate linkage
  modified_base 85: mod_base = OTHER; note = Nucleotide with phosphorothioate linkage
  modified_base 86: mod_base = OTHER; note = 2'-O-methyl modified nucleotide with phosphorothioate linkage
  modified_base 87: mod_base = OTHER; note = 2'-O-methyl modified nucleotide with phosphorothioate linkage
  modified_base 88: mod_base = OTHER; note = 2'-O-methyl modified nucleotide
aaggctgtgctgaccatcgagtctttgtactctggtaccagaagctacaaagataaggcttcatgccgaaatcatctcgtcgatggtc

SEQ ID NO: 27151 - RNA, 95 nt, synthetic construct
  source 1..95: mol_type = other RNA
  modified_base 1: mod_base = OTHER; note = 2'-O-methyl modified nucleotide with phosphorothioate linkage
  modified_base 2: mod_base = OTHER; note = 2'-O-methyl modified nucleotide with phosphorothioate linkage
  modified_base 3: mod_base = OTHER; note = 2'-O-methyl modified nucleotide with phosphorothioate linkage
  modified_base 92: mod_base = OTHER; note = Nucleotide with phosphorothioate linkage
  modified_base 93: mod_base = OTHER; note = 2'-O-methyl modified nucleotide with phosphorothioate linkage
  modified_base 94: mod_base = OTHER; note = 2'-O-methyl modified nucleotide with phosphorothioate linkage
  modified_base 95: mod_base = OTHER; note = 2'-O-methyl modified nucleotide
aaggctgtgctgaccatcgagtctttgtactctggtaccagaagctacaaagataaggcttcatgccgaaatcattctcgtcgatggtcagcaca

SEQ ID NO: 27152 - RNA, 94 nt, synthetic construct
  source 1..94: mol_type = other RNA
  modified_base 1: mod_base = OTHER; note = 2'-O-methyl modified nucleotide with phosphorothioate linkage
  modified_base 2: mod_base = OTHER; note = 2'-O-methyl modified nucleotide with phosphorothioate linkage
  modified_base 3: mod_base = OTHER; note = 2'-O-methyl modified nucleotide with phosphorothioate linkage
  modified_base 91: mod_base = OTHER; note = Nucleotide with phosphorothioate linkage
  modified_base 92: mod_base = OTHER; note = 2'-O-methyl modified nucleotide with phosphorothioate linkage
  modified_base 93: mod_base = OTHER; note = 2'-O-methyl modified nucleotide with phosphorothioate linkage
  modified_base 94: mod_base = OTHER; note = 2'-O-methyl modified nucleotide
aaggctgtgctgaccatcgagtctttgtactctggtaccagaagctacaaagataaggcttcatgccgaaatcattctcgtcgatggtcagcac

SEQ ID NO: 27153 - RNA, 93 nt, synthetic construct
  source 1..93: mol_type = other RNA
  modified_base 1: mod_base = OTHER; note = 2'-O-methyl modified nucleotide with phosphorothioate linkage
  modified_base 2: mod_base = OTHER; note = 2'-O-methyl modified nucleotide with phosphorothioate linkage
  modified_base 3: mod_base = OTHER; note = 2'-O-methyl modified nucleotide with phosphorothioate linkage
  modified_base 90: mod_base = OTHER; note = Nucleotide with phosphorothioate linkage
  modified_base 91: mod_base = OTHER; note = 2'-O-methyl modified nucleotide with phosphorothioate linkage
  modified_base 92: mod_base = OTHER; note = 2'-O-methyl modified nucleotide with phosphorothioate linkage
  modified_base 93: mod_base = OTHER; note = 2'-O-methyl modified nucleotide
aaggctgtgctgaccatcgagtctttgtactctggtaccagaagctacaaagataaggcttcatgccgaaatcattctcgtcgatggtcagca

SEQ ID NO: 27154 - RNA, 92 nt, synthetic construct
  source 1..92: mol_type = other RNA
  modified_base 1: mod_base = OTHER; note = 2'-O-methyl modified nucleotide with phosphorothioate linkage
  modified_base 2: mod_base = OTHER; note = 2'-O-methyl modified nucleotide with phosphorothioate linkage
  modified_base 3: mod_base = OTHER; note = 2'-O-methyl modified nucleotide with phosphorothioate linkage
  modified_base 89: mod_base = OTHER; note = Nucleotide with phosphorothioate linkage
  modified_base 90: mod_base = OTHER; note = 2'-O-methyl modified nucleotide with phosphorothioate linkage
  modified_base 91: mod_base = OTHER; note = 2'-O-methyl modified nucleotide with phosphorothioate linkage
  modified_base 92: mod_base = OTHER; note = 2'-O-methyl modified nucleotide
aaggctgtgctgaccatcgagtctttgtactctggtaccagaagctacaaagataaggcttcatgccgaaatcattctcgtcgatggtcagc

SEQ ID NO: 27155 - RNA, 91 nt, synthetic construct
  source 1..91: mol_type = other RNA
  modified_base 1: mod_base = OTHER; note = 2'-O-methyl modified nucleotide with phosphorothioate linkage
  modified_base 2: mod_base = OTHER; note = 2'-O-methyl modified nucleotide with phosphorothioate linkage
  modified_base 3: mod_base = OTHER; note = 2'-O-methyl modified nucleotide with phosphorothioate linkage
  modified_base 88: mod_base = OTHER; note = Nucleotide with phosphorothioate linkage
  modified_base 89: mod_base = OTHER; note = 2'-O-methyl modified nucleotide with phosphorothioate linkage
  modified_base 90: mod_base = OTHER; note = 2'-O-methyl modified nucleotide with phosphorothioate linkage
  modified_base 91: mod_base = OTHER; note = 2'-O-methyl modified nucleotide
aaggctgtgctgaccatcgagtctttgtactctggtaccagaagctacaaagataaggcttcatgccgaaatcattctcgtcgatggtcag

SEQ ID NO: 27156 - RNA, 90 nt, synthetic construct
  source 1..90: mol_type = other RNA
  modified_base 1: mod_base = OTHER; note = 2'-O-methyl modified nucleotide with phosphorothioate linkage
  modified_base 2: mod_base = OTHER; note = 2'-O-methyl modified nucleotide with phosphorothioate linkage
  modified_base 3: mod_base = OTHER; note = 2'-O-methyl modified nucleotide with phosphorothioate linkage
  modified_base 87: mod_base = OTHER; note = Nucleotide with phosphorothioate linkage
  modified_base 88: mod_base = OTHER; note = 2'-O-methyl modified nucleotide with phosphorothioate linkage
  modified_base 89: mod_base = OTHER; note = 2'-O-methyl modified nucleotide with phosphorothioate linkage
  modified_base 90: mod_base = OTHER; note = 2'-O-methyl modified nucleotide
aaggctgtgctgaccatcgagtctttgtactctggtaccagaagctacaaagataaggcttcatgccgaaatcattctcgtcgatggtca

SEQ ID NO: 27157 - RNA, 89 nt, synthetic construct; identical to SEQ ID NO: 27131
  source 1..89: mol_type = other RNA
  modified_base 1: mod_base = OTHER; note = 2'-O-methyl modified nucleotide with phosphorothioate linkage
  modified_base 2: mod_base = OTHER; note = 2'-O-methyl modified nucleotide with phosphorothioate linkage
  modified_base 3: mod_base = OTHER; note = 2'-O-methyl modified nucleotide with phosphorothioate linkage
  modified_base 86: mod_base = OTHER; note = Nucleotide with phosphorothioate linkage
  modified_base 87: mod_base = OTHER; note = 2'-O-methyl modified nucleotide with phosphorothioate linkage
  modified_base 88: mod_base = OTHER; note = 2'-O-methyl modified nucleotide with phosphorothioate linkage
  modified_base 89: mod_base = OTHER; note = 2'-O-methyl modified nucleotide

SEQ ID NO: 27158 - RNA, 95 nt, synthetic construct
  source 1..95: mol_type = other RNA
  modified_base 1: mod_base = OTHER; note = 2'-O-methyl modified nucleotide with phosphorothioate linkage
  modified_base 2: mod_base = OTHER; note = 2'-O-methyl modified nucleotide with phosphorothioate linkage
  modified_base 3: mod_base = OTHER; note = 2'-O-methyl modified nucleotide with phosphorothioate linkage
  modified_base 92: mod_base = OTHER; note = Nucleotide with phosphorothioate linkage
  modified_base 93: mod_base = OTHER; note = 2'-O-methyl modified nucleotide with phosphorothioate linkage
  modified_base 94: mod_base = OTHER; note = 2'-O-methyl modified nucleotide with phosphorothioate linkage
  modified_base 95: mod_base = OTHER; note = 2'-O-methyl modified nucleotide
aaggctgtgctgaccatcgagtctttgtactctggtaccagaagctacaaagataaggcttcatgccgaaatcatttctcgtcgatggtcagcac

SEQ ID NO: 27159 - RNA, 94 nt, synthetic construct
  source 1..94: mol_type = other RNA
  modified_base 1: mod_base = OTHER; note = 2'-O-methyl modified nucleotide with phosphorothioate linkage
  modified_base 2: mod_base = OTHER; note = 2'-O-methyl modified nucleotide with phosphorothioate linkage
  modified_base 3: mod_base = OTHER; note = 2'-O-methyl modified nucleotide with phosphorothioate linkage
  modified_base 91: mod_base = OTHER; note = Nucleotide with phosphorothioate linkage
  modified_base 92: mod_base = OTHER; note = 2'-O-methyl modified nucleotide with phosphorothioate linkage
  modified_base 93: mod_base = OTHER; note = 2'-O-methyl modified nucleotide with phosphorothioate linkage
  modified_base 94: mod_base = OTHER; note = 2'-O-methyl modified nucleotide
aaggctgtgctgaccatcgagtctttgtactctggtaccagaagctacaaagataaggcttcatgccgaaatcatttctcgtcgatggtcagca

SEQ ID NO: 27160 - RNA, 93 nt, synthetic construct; identical to SEQ ID NO: 27091
  source 1..93: mol_type = other RNA
  modified_base 1: mod_base = OTHER; note = 2'-O-methyl modified nucleotide with phosphorothioate linkage
  modified_base 2: mod_base = OTHER; note = 2'-O-methyl modified nucleotide with phosphorothioate linkage
  modified_base 3: mod_base = OTHER; note = 2'-O-methyl modified nucleotide with phosphorothioate linkage
  modified_base 90: mod_base = OTHER; note = Nucleotide with phosphorothioate linkage
  modified_base 91: mod_base = OTHER; note = 2'-O-methyl modified nucleotide with phosphorothioate linkage
  modified_base 92: mod_base = OTHER; note = 2'-O-methyl modified nucleotide with phosphorothioate linkage
  modified_base 93: mod_base = OTHER; note = 2'-O-methyl modified nucleotide

SEQ ID NO: 27161 - RNA, 92 nt, synthetic construct; identical to SEQ ID NO: 27001
  source 1..92: mol_type = other RNA
  modified_base 1: mod_base = OTHER; note = 2'-O-methyl modified nucleotide with phosphorothioate linkage
  modified_base 2: mod_base = OTHER; note = 2'-O-methyl modified nucleotide with phosphorothioate linkage
  modified_base 3: mod_base = OTHER; note = 2'-O-methyl modified nucleotide with phosphorothioate linkage
  modified_base 89: mod_base = OTHER; note = Nucleotide with phosphorothioate linkage
  modified_base 90: mod_base = OTHER; note = 2'-O-methyl modified nucleotide with phosphorothioate linkage
  modified_base 91: mod_base = OTHER; note = 2'-O-methyl modified nucleotide with phosphorothioate linkage
  modified_base 92: mod_base = OTHER; note = 2'-O-methyl modified nucleotide

SEQ ID NO: 27162 - RNA, 91 nt, synthetic construct
  source 1..91: mol_type = other RNA
  modified_base 1: mod_base = OTHER; note = 2'-O-methyl modified nucleotide with phosphorothioate linkage
  modified_base 2: mod_base = OTHER; note = 2'-O-methyl modified nucleotide with phosphorothioate linkage
  modified_base 3: mod_base = OTHER; note = 2'-O-methyl modified nucleotide with phosphorothioate linkage
  modified_base 88: mod_base = OTHER; note = Nucleotide with phosphorothioate linkage
  modified_base 89: mod_base = OTHER; note = 2'-O-methyl modified nucleotide with phosphorothioate linkage
  modified_base 90: mod_base = OTHER; note = 2'-O-methyl modified nucleotide with phosphorothioate linkage
  modified_base 91: mod_base = OTHER; note = 2'-O-methyl modified nucleotide
aaggctgtgctgaccatcgagtctttgtactctggtaccagaagctacaaagataaggcttcatgccgaaatcatttctcgtcgatggtca

SEQ ID NO: 27163 - RNA, 90 nt, synthetic construct
  source 1..90: mol_type = other RNA
  modified_base 1: mod_base = OTHER; note = 2'-O-methyl modified nucleotide with phosphorothioate linkage
  modified_base 2: mod_base = OTHER; note = 2'-O-methyl modified nucleotide with phosphorothioate linkage
  modified_base 3: mod_base = OTHER; note = 2'-O-methyl modified nucleotide with phosphorothioate linkage
  modified_base 87: mod_base = OTHER; note = Nucleotide with phosphorothioate linkage
  modified_base 88: mod_base = OTHER; note = 2'-O-methyl modified nucleotide with phosphorothioate linkage
  modified_base 89: mod_base = OTHER; note = 2'-O-methyl modified nucleotide with phosphorothioate linkage
  modified_base 90: mod_base = OTHER; note = 2'-O-methyl modified nucleotide
aaggctgtgctgaccatcgagtctttgtactctggtaccagaagctacaaagataaggcttcatgccgaaatcatttctcgtcgatggtc

SEQ ID NO: 27164 - RNA, 97 nt, synthetic construct
  source 1..97: mol_type = other RNA
  modified_base 1: mod_base = OTHER; note = 2'-O-methyl modified nucleotide with phosphorothioate linkage
  modified_base 2: mod_base = OTHER; note = 2'-O-methyl modified nucleotide with phosphorothioate linkage
  modified_base 3: mod_base = OTHER; note = 2'-O-methyl modified nucleotide with phosphorothioate linkage
  modified_base 94: mod_base = OTHER; note = Nucleotide with phosphorothioate linkage
  modified_base 95: mod_base = OTHER; note = 2'-O-methyl modified nucleotide with phosphorothioate linkage
  modified_base 96: mod_base = OTHER; note = 2'-O-methyl modified nucleotide with phosphorothioate linkage
  modified_base 97: mod_base = OTHER; note = 2'-O-methyl modified nucleotide
aaggctgtgctgaccatcgagtctttgtactctggtaccagaagctacaaagataaggcttcatgccgaaatcactttctcgtcgatggtcagcaca

SEQ ID NO: 27165 - RNA, 96 nt, synthetic construct
  source 1..96: mol_type = other RNA
  modified_base 1: mod_base = OTHER; note = 2'-O-methyl modified nucleotide with phosphorothioate linkage
  modified_base 2: mod_base = OTHER; note = 2'-O-methyl modified nucleotide with phosphorothioate linkage
  modified_base 3: mod_base = OTHER; note = 2'-O-methyl modified nucleotide with phosphorothioate linkage
  modified_base 93: mod_base = OTHER; note = Nucleotide with phosphorothioate linkage
  modified_base 94: mod_base = OTHER; note = 2'-O-methyl modified nucleotide with phosphorothioate linkage
  modified_base 95: mod_base = OTHER; note = 2'-O-methyl modified nucleotide with phosphorothioate linkage
  modified_base 96: mod_base = OTHER; note = 2'-O-methyl modified nucleotide
aaggctgtgctgaccatcgagtctttgtactctggtaccagaagctacaaagataaggcttcatgccgaaatcactttctcgtcgatggtcagcac

SEQ ID NO: 27166 - RNA, 95 nt, synthetic construct
  source 1..95: mol_type = other RNA
  modified_base 1: mod_base = OTHER; note = 2'-O-methyl modified nucleotide with phosphorothioate linkage
  modified_base 2: mod_base = OTHER; note = 2'-O-methyl modified nucleotide with phosphorothioate linkage
  modified_base 3: mod_base = OTHER; note = 2'-O-methyl modified nucleotide with phosphorothioate linkage
  modified_base 92: mod_base = OTHER; note = Nucleotide with phosphorothioate linkage
  modified_base 93: mod_base = OTHER; note = 2'-O-methyl modified nucleotide with phosphorothioate linkage
  modified_base 94: mod_base = OTHER; note = 2'-O-methyl modified nucleotide with phosphorothioate linkage
  modified_base 95: mod_base = OTHER; note = 2'-O-methyl modified nucleotide
aaggctgtgctgaccatcgagtctttgtactctggtaccagaagctacaaagataaggcttcatgccgaaatcactttctcgtcgatggtcagca

SEQ ID NO: 27167 - RNA, 94 nt, synthetic construct
  source 1..94: mol_type = other RNA
  modified_base 1: mod_base = OTHER; note = 2'-O-methyl modified nucleotide with phosphorothioate linkage
  modified_base 2: mod_base = OTHER; note = 2'-O-methyl modified nucleotide with phosphorothioate linkage
  modified_base 3: mod_base = OTHER; note = 2'-O-methyl modified nucleotide with phosphorothioate linkage
  modified_base 91: mod_base = OTHER; note = Nucleotide with phosphorothioate linkage
  modified_base 92: mod_base = OTHER; note = 2'-O-methyl modified nucleotide with phosphorothioate linkage
  modified_base 93: mod_base = OTHER; note = 2'-O-methyl modified nucleotide with phosphorothioate linkage
  modified_base 94: mod_base = OTHER; note = 2'-O-methyl modified nucleotide
aaggctgtgctgaccatcgagtctttgtactctggtaccagaagctacaaagataaggcttcatgccgaaatcactttctcgtcgatggtcagc

SEQ ID NO: 27168 - RNA, 93 nt, synthetic construct
  source 1..93: mol_type = other RNA
  modified_base 1: mod_base = OTHER; note = 2'-O-methyl modified nucleotide with phosphorothioate linkage
  modified_base 2: mod_base = OTHER; note = 2'-O-methyl modified nucleotide with phosphorothioate linkage
  modified_base 3: mod_base = OTHER; note = 2'-O-methyl modified nucleotide with phosphorothioate linkage
  modified_base 90: mod_base = OTHER; note = Nucleotide with phosphorothioate linkage
  modified_base 91: mod_base = OTHER; note = 2'-O-methyl modified nucleotide with phosphorothioate linkage
  modified_base 92: mod_base = OTHER; note = 2'-O-methyl modified nucleotide with phosphorothioate linkage
  modified_base 93: mod_base = OTHER; note = 2'-O-methyl modified nucleotide
aaggctgtgctgaccatcgagtctttgtactctggtaccagaagctacaaagataaggcttcatgccgaaatcactttctcgtcgatggtcag

SEQ ID NO: 27169 - RNA, 92 nt, synthetic construct
  source 1..92: mol_type = other RNA
  modified_base 1: mod_base = OTHER; note = 2'-O-methyl modified nucleotide with phosphorothioate linkage
  modified_base 2: mod_base = OTHER; note = 2'-O-methyl modified nucleotide with phosphorothioate linkage
  modified_base 3: mod_base = OTHER; note = 2'-O-methyl modified nucleotide with phosphorothioate linkage
  modified_base 89: mod_base = OTHER; note = Nucleotide with phosphorothioate linkage
  modified_base 90: mod_base = OTHER; note = 2'-O-methyl modified nucleotide with phosphorothioate linkage
  modified_base 91: mod_base = OTHER; note = 2'-O-methyl modified nucleotide with phosphorothioate linkage
  modified_base 92: mod_base = OTHER; note = 2'-O-methyl modified nucleotide
aaggctgtgctgaccatcgagtctttgtactctggtaccagaagctacaaagataaggcttcatgccgaaatcactttctcgtcgatggtca

SEQ ID NO: 27170 - RNA, 91 nt, synthetic construct
  source 1..91: mol_type = other RNA
  modified_base 1: mod_base = OTHER; note = 2'-O-methyl modified nucleotide with phosphorothioate linkage
  modified_base 2: mod_base = OTHER; note = 2'-O-methyl modified nucleotide with phosphorothioate linkage
  modified_base 3: mod_base = OTHER; note = 2'-O-methyl modified nucleotide with phosphorothioate linkage
  modified_base 88: mod_base = OTHER; note = Nucleotide with phosphorothioate linkage
  modified_base 89: mod_base = OTHER; note = 2'-O-methyl modified nucleotide with phosphorothioate linkage
  modified_base 90: mod_base = OTHER; note = 2'-O-methyl modified nucleotide with phosphorothioate linkage
  modified_base 91: mod_base = OTHER; note = 2'-O-methyl modified nucleotide
aaggctgtgctgaccatcgagtctttgtactctggtaccagaagctacaaagataaggcttcatgccgaaatcactttctcgtcgatggtc

SEQ ID NO: 27171 - RNA, 94 nt, synthetic construct
  source 1..94: mol_type = other RNA
  modified_base 1: mod_base = OTHER; note = 2'-O-methyl modified nucleotide with phosphorothioate linkage
  modified_base 2: mod_base = OTHER; note = 2'-O-methyl modified nucleotide with phosphorothioate linkage
  modified_base 3: mod_base = OTHER; note = 2'-O-methyl modified nucleotide with phosphorothioate linkage
  modified_base 91: mod_base = OTHER; note = Nucleotide with phosphorothioate linkage
  modified_base 92: mod_base = OTHER; note = 2'-O-methyl modified nucleotide with phosphorothioate linkage
  modified_base 93: mod_base = OTHER; note = 2'-O-methyl modified nucleotide with phosphorothioate linkage
  modified_base 94: mod_base = OTHER; note = 2'-O-methyl modified nucleotide
aaggctgtgctgaccatcgagtctttgtactctggtaccagaagctacaaagataaggcttcatgccgaaatcacctttctcgtcgatggtcag

SEQ ID NO: 27172 - RNA, 93 nt, synthetic construct
  source 1..93: mol_type = other RNA
  modified_base 1: mod_base = OTHER; note = 2'-O-methyl modified nucleotide with phosphorothioate linkage
  modified_base 2: mod_base = OTHER; note = 2'-O-methyl modified nucleotide with phosphorothioate linkage
  modified_base 3: mod_base = OTHER; note = 2'-O-methyl modified nucleotide with phosphorothioate linkage
  modified_base 90: mod_base = OTHER; note = Nucleotide with phosphorothioate linkage
  modified_base 91: mod_base = OTHER; note = 2'-O-methyl modified nucleotide with phosphorothioate linkage
  modified_base 92: mod_base = OTHER; note = 2'-O-methyl modified nucleotide with phosphorothioate linkage
  modified_base 93: mod_base = OTHER; note = 2'-O-methyl modified nucleotide
aaggctgtgctgaccatcgagtctttgtactctggtaccagaagctacaaagataaggcttcatgccgaaatcacctttctcgtcgatggtca

SEQ ID NO: 27173 - RNA, 92 nt, synthetic construct
  source 1..92: mol_type = other RNA
  modified_base 1: mod_base = OTHER; note = 2'-O-methyl modified nucleotide with phosphorothioate linkage
  modified_base 2: mod_base = OTHER; note = 2'-O-methyl modified nucleotide with phosphorothioate linkage
  modified_base 3: mod_base = OTHER; note = 2'-O-methyl modified nucleotide with phosphorothioate linkage
  modified_base 89: mod_base = OTHER; note = Nucleotide with phosphorothioate linkage
  modified_base 90: mod_base = OTHER; note = 2'-O-methyl modified nucleotide with phosphorothioate linkage
  modified_base 91: mod_base = OTHER; note = 2'-O-methyl modified nucleotide with phosphorothioate linkage
  modified_base 92: mod_base = OTHER; note = 2'-O-methyl modified nucleotide
aaggctgtgctgaccatcgagtctttgtactctggtaccagaagctacaaagataaggcttcatgccgaaatcacctttctcgtcgatggtc

SEQ ID NO: 27174 - RNA, 95 nt, synthetic construct
  source 1..95: mol_type = other RNA
  modified_base 1: mod_base = OTHER; note = 2'-O-methyl modified nucleotide with phosphorothioate linkage
  modified_base 2: mod_base = OTHER; note = 2'-O-methyl modified nucleotide with phosphorothioate linkage
  modified_base 3: mod_base = OTHER; note = 2'-O-methyl modified nucleotide with phosphorothioate linkage
  modified_base 92: mod_base = OTHER; note = Nucleotide with phosphorothioate linkage
  modified_base 93: mod_base = OTHER; note = 2'-O-methyl modified nucleotide with phosphorothioate linkage
  modified_base 94: mod_base = OTHER; note = 2'-O-methyl modified nucleotide with phosphorothioate linkage
  modified_base 95: mod_base = OTHER; note = 2'-O-methyl modified nucleotide
aaggctgtgctgaccatcgagtctttgtactctggtaccagaagctacaaagataaggcttcatgccgaaatcaccctttctcgtcgatggtcag

SEQ ID NO: 27175 - RNA, 94 nt, synthetic construct
  source 1..94: mol_type = other RNA
  modified_base 1: mod_base = OTHER; note = 2'-O-methyl modified nucleotide with phosphorothioate linkage
  modified_base 2: mod_base = OTHER; note = 2'-O-methyl modified nucleotide with phosphorothioate linkage
  modified_base 3: mod_base = OTHER; note = 2'-O-methyl modified nucleotide with phosphorothioate linkage
  modified_base 91: mod_base = OTHER; note = Nucleotide with phosphorothioate linkage
  modified_base 92: mod_base = OTHER; note = 2'-O-methyl modified nucleotide with phosphorothioate linkage
  modified_base 93: mod_base = OTHER; note = 2'-O-methyl modified nucleotide with phosphorothioate linkage
  modified_base 94: mod_base = OTHER; note = 2'-O-methyl modified nucleotide
aaggctgtgctgaccatcgagtctttgtactctggtaccagaagctacaaagataaggcttcatgccgaaatcaccctttctcgtcgatggtca

SEQ ID NO: 27176 - RNA, 93 nt, synthetic construct
  source 1..93: mol_type = other RNA
  modified_base 1: mod_base = OTHER; note = 2'-O-methyl modified nucleotide with phosphorothioate linkage
  modified_base 2: mod_base = OTHER; note = 2'-O-methyl modified nucleotide with phosphorothioate linkage
  modified_base 3: mod_base = OTHER; note = 2'-O-methyl modified nucleotide with phosphorothioate linkage
  modified_base 90: mod_base = OTHER; note = Nucleotide with phosphorothioate linkage
  modified_base 91: mod_base = OTHER; note = 2'-O-methyl modified nucleotide with phosphorothioate linkage
  modified_base 92: mod_base = OTHER; note = 2'-O-methyl modified nucleotide with phosphorothioate linkage
  modified_base 93: mod_base = OTHER; note = 2'-O-methyl modified nucleotide
aaggctgtgctgaccatcgagtctttgtactctggtaccagaagctacaaagataaggcttcatgccgaaatcaccctttctcgtcgatggtc

SEQ ID NO: 27177 - RNA, 96 nt, synthetic construct; identical to SEQ ID NO: 27133
  source 1..96: mol_type = other RNA
  modified_base 1: mod_base = OTHER; note = 2'-O-methyl modified nucleotide with phosphorothioate linkage
  modified_base 2: mod_base = OTHER; note = 2'-O-methyl modified nucleotide with phosphorothioate linkage
  modified_base 3: mod_base = OTHER; note = 2'-O-methyl modified nucleotide with phosphorothioate linkage
  modified_base 93: mod_base = OTHER; note = Nucleotide with phosphorothioate linkage
  modified_base 94: mod_base = OTHER; note = 2'-O-methyl modified nucleotide with phosphorothioate linkage
  modified_base 95: mod_base = OTHER; note = 2'-O-methyl modified nucleotide with phosphorothioate linkage
  modified_base 96: mod_base = OTHER; note = 2'-O-methyl modified nucleotide

SEQ ID NO: 27178 - RNA, 95 nt, synthetic construct
  source 1..95: mol_type = other RNA
  modified_base 1: mod_base = OTHER; note = 2'-O-methyl modified nucleotide with phosphorothioate linkage
  modified_base 2: mod_base = OTHER; note = 2'-O-methyl modified nucleotide with phosphorothioate linkage
  modified_base 3: mod_base = OTHER; note = 2'-O-methyl modified nucleotide with phosphorothioate linkage
  modified_base 92: mod_base = OTHER; note = Nucleotide with phosphorothioate linkage
  modified_base 93: mod_base = OTHER; note = 2'-O-methyl modified nucleotide with phosphorothioate linkage
  modified_base 94: mod_base = OTHER; note = 2'-O-methyl modified nucleotide with phosphorothioate linkage
  modified_base 95: mod_base = OTHER; note = 2'-O-methyl modified nucleotide
aaggctgtgctgaccatcgagtctttgtactctggtaccagaagctacaaagataaggcttcatgccgaaatcatccctttctcgtcgatggtca

SEQ ID NO: 27179 - RNA, 94 nt, synthetic construct
  source 1..94: mol_type = other RNA
  modified_base 1: mod_base = OTHER; note = 2'-O-methyl modified nucleotide with phosphorothioate linkage
  modified_base 2: mod_base = OTHER; note = 2'-O-methyl modified nucleotide with phosphorothioate linkage
  modified_base 3: mod_base = OTHER; note = 2'-O-methyl modified nucleotide with phosphorothioate linkage
  modified_base 91: mod_base = OTHER; note = Nucleotide with phosphorothioate linkage
  modified_base 92: mod_base = OTHER; note = 2'-O-methyl modified nucleotide with phosphorothioate linkage
  modified_base 93: mod_base = OTHER; note = 2'-O-methyl modified nucleotide with phosphorothioate linkage
  modified_base 94: mod_base = OTHER; note = 2'-O-methyl modified nucleotide
aaggctgtgctgaccatcgagtctttgtactctggtaccagaagctacaaagataaggcttcatgccgaaatcatccctttctcgtcgatggtc

SEQ ID NO: 27180 - RNA, 98 nt, synthetic construct
  source 1..98: mol_type = other RNA
  modified_base 1: mod_base = OTHER; note = 2'-O-methyl modified nucleotide with phosphorothioate linkage
  modified_base 2: mod_base = OTHER; note = 2'-O-methyl modified nucleotide with phosphorothioate linkage
  modified_base 3: mod_base = OTHER; note = 2'-O-methyl modified nucleotide with phosphorothioate linkage
  modified_base 95: mod_base = OTHER; note = Nucleotide with phosphorothioate linkage
  modified_base 96: mod_base = OTHER; note = 2'-O-methyl modified nucleotide with phosphorothioate linkage
  modified_base 97: mod_base = OTHER; note = 2'-O-methyl modified nucleotide with phosphorothioate linkage
  modified_base 98: mod_base = OTHER; note = 2'-O-methyl modified nucleotide
aaggctgtgctgaccatcgagtctttgtactctggtaccagaagctacaaagataaggcttcatgccgaaatcaagtccctttctcgtcgatggtcag

SEQ ID NO: 27181 - RNA, 101 nt, synthetic construct
  source 1..101: mol_type = other RNA
  modified_base 1: mod_base = OTHER; note = 2'-O-methyl modified nucleotide with phosphorothioate linkage
  modified_base 2: mod_base = OTHER; note = 2'-O-methyl modified nucleotide with phosphorothioate linkage
  modified_base 3: mod_base = OTHER; note = 2'-O-methyl modified nucleotide with phosphorothioate linkage
  modified_base 98: mod_base = OTHER; note = Nucleotide with phosphorothioate linkage
  modified_base 99: mod_base = OTHER; note = 2'-O-methyl modified nucleotide with phosphorothioate linkage
  modified_base 100: mod_base = OTHER; note = 2'-O-methyl modified nucleotide with phosphorothioate linkage
  modified_base 101: mod_base = OTHER; note = 2'-O-methyl modified nucleotide
aaggctgtgctgaccatcgagtctttgtactctggtaccagaagctacaaagataaggcttcatgccgaaatcatcagtccctttctcgtcgatggtcagc

SEQ ID NO: 27182 - RNA, 100 nt, synthetic construct
  source 1..100: mol_type = other RNA
  modified_base 1: mod_base = OTHER; note = 2'-O-methyl modified nucleotide with phosphorothioate linkage
  modified_base 2: mod_base = OTHER; note = 2'-O-methyl modified nucleotide with phosphorothioate linkage
  modified_base 3: mod_base = OTHER; note = 2'-O-methyl modified nucleotide with phosphorothioate linkage
  modified_base 97: mod_base = OTHER; note = Nucleotide with phosphorothioate linkage
  modified_base 98: mod_base = OTHER; note = 2'-O-methyl modified nucleotide with phosphorothioate linkage
  modified_base 99: mod_base = OTHER; note = 2'-O-methyl modified nucleotide with phosphorothioate linkage
  modified_base 100: mod_base = OTHER; note = 2'-O-methyl modified nucleotide
aaggctgtgctgaccatcgagtctttgtactctggtaccagaagctacaaagataaggcttcatgccgaaatcatcagtccctttctcgtcgatggtcag

SEQ ID NO: 27183 - RNA, 103 nt, synthetic construct
  source 1..103: mol_type = other RNA
  modified_base 1: mod_base = OTHER; note = 2'-O-methyl modified nucleotide with phosphorothioate linkage
  modified_base 2: mod_base = OTHER; note = 2'-O-methyl modified nucleotide with phosphorothioate linkage
  modified_base 3: mod_base = OTHER; note = 2'-O-methyl modified nucleotide with phosphorothioate linkage
  modified_base 100: mod_base = OTHER; note = Nucleotide with phosphorothioate linkage
  modified_base 101: mod_base = OTHER; note = 2'-O-methyl modified nucleotide with phosphorothioate linkage
  modified_base 102: mod_base = OTHER; note = 2'-O-methyl modified nucleotide with phosphorothioate linkage
  modified_base 103: mod_base = OTHER; note = 2'-O-methyl modified nucleotide
aaggctgtgctgaccatcgagtctttgtactctggtaccagaagctacaaagataaggcttcatgccgaaatcacttcagtccctttctcgtcgatggtcagc

SEQ ID NO: 27184 - RNA, 102 nt, synthetic construct
  source 1..102: mol_type = other RNA
  modified_base 1: mod_base = OTHER; note = 2'-O-methyl modified nucleotide with phosphorothioate linkage
  modified_base 2: mod_base = OTHER; note = 2'-O-methyl modified nucleotide with phosphorothioate linkage
  modified_base 3: mod_base = OTHER; note = 2'-O-methyl modified nucleotide with phosphorothioate linkage
  modified_base 99: mod_base = OTHER; note = Nucleotide with phosphorothioate linkage
  modified_base 100: mod_base = OTHER; note = 2'-O-methyl modified nucleotide with phosphorothioate linkage
  modified_base 101: mod_base = OTHER; note = 2'-O-methyl modified nucleotide with phosphorothioate linkage
  modified_base 102: mod_base = OTHER; note = 2'-O-methyl modified nucleotide
aaggctgtgctgaccatcgagtctttgtactctggtaccagaagctacaaagataaggcttcatgccgaaatcacttcagtccctttctcgtcgatggtcag

SEQ ID NO: 27185-28000 - skipped (816 entries)

SEQ ID NO: 28001 - RNA, 92 nt, synthetic construct; identical to SEQ ID NO: 27001
  source 1..92: mol_type = other RNA

SEQ ID NO: 28002 - RNA, 92 nt, synthetic construct; identical to SEQ ID NO: 27001
  source 1..92: mol_type = other RNA

SEQ ID NO: 28003 - RNA, 92 nt, synthetic construct; identical to SEQ ID NO: 27001
  source 1..92: mol_type = other RNA

SEQ ID NO: 28004 - RNA, 92 nt, synthetic construct; identical to SEQ ID NO: 27001
  source 1..92: mol_type = other RNA

SEQ ID NO: 28005 - RNA, 92 nt, synthetic construct; identical to SEQ ID NO: 27001
  source 1..92: mol_type = other RNA

SEQ ID NO: 28006 - RNA, 92 nt, synthetic construct; identical to SEQ ID NO: 27001
  source 1..92: mol_type = other RNA

SEQ ID NO: 28007 - RNA, 92 nt, synthetic construct; identical to SEQ ID NO: 27001
  source 1..92: mol_type = other RNA

SEQ ID NO: 28008 - RNA, 92 nt, synthetic construct; identical to SEQ ID NO: 27001
  source 1..92: mol_type = other RNA

SEQ ID NO: 28009 - RNA, 92 nt, synthetic construct; identical to SEQ ID NO: 27001
  source 1..92: mol_type = other RNA

SEQ ID NO: 28010 - RNA, 92 nt, synthetic construct; identical to SEQ ID NO: 27001
  source 1..92: mol_type = other RNA

SEQ ID NO: 28011 - RNA, 92 nt, synthetic construct; identical to SEQ ID NO: 27001
  source 1..92: mol_type = other RNA

SEQ ID NO: 28012 - RNA, 92 nt, synthetic construct; identical to SEQ ID NO: 27001
  source 1..92: mol_type = other RNA

SEQ ID NO: 28013 - RNA, 92 nt, synthetic construct; identical to SEQ ID NO: 27001
  source 1..92: mol_type = other RNA

SEQ ID NO: 28014 - RNA, 92 nt, synthetic construct; identical to SEQ ID NO: 27001
  source 1..92: mol_type = other RNA

SEQ ID NO: 28015 - RNA, 92 nt, synthetic construct; identical to SEQ ID NO: 27001
  source 1..92: mol_type = other RNA

SEQ ID NO: 28016 - RNA, 92 nt, synthetic construct; identical to SEQ ID NO: 27001
  source 1..92: mol_type = other RNA

SEQ ID NO: 28017 - RNA, 92 nt, synthetic construct; identical to SEQ ID NO: 27001
  source 1..92: mol_type = other RNA

SEQ ID NO: 28018 - RNA, 92 nt, synthetic construct; identical to SEQ ID NO: 27001
  source 1..92: mol_type = other RNA

SEQ ID NO: 28019 - RNA, 92 nt, synthetic construct; identical to SEQ ID NO: 27001
  source 1..92: mol_type = other RNA

SEQ ID NO: 28020 - RNA, 92 nt, synthetic construct; identical to SEQ ID NO: 27001
  source 1..92: mol_type = other RNA

SEQ ID NO: 28021 - RNA, 92 nt, synthetic construct; identical to SEQ ID NO: 27001
  source 1..92: mol_type = other RNA

SEQ ID NO: 28022 - RNA, 92 nt, synthetic construct; identical to SEQ ID NO: 27001
  source 1..92: mol_type = other RNA

SEQ ID NO: 28023 - RNA, 92 nt, synthetic construct; identical to SEQ ID NO: 27001
  source 1..92: mol_type = other RNA

SEQ ID NO: 28024 - RNA, 92 nt, synthetic construct; identical to SEQ ID NO: 27001
  source 1..92: mol_type = other RNA

SEQ ID NO: 28025 - RNA, 92 nt, synthetic construct; identical to SEQ ID NO: 27001
  source 1..92: mol_type = other RNA

SEQ ID NO: 28026 - RNA, 92 nt, synthetic construct; identical to SEQ ID NO: 27001
  source 1..92: mol_type = other RNA

SEQ ID NO: 28027 - RNA, 92 nt, synthetic construct; identical to SEQ ID NO: 27001
  source 1..92: mol_type = other RNA

SEQ ID NO: 28028 - RNA, 92 nt, synthetic construct; identical to SEQ ID NO: 27001
  source 1..92: mol_type = other RNA

SEQ ID NO: 28029 - RNA, 92 nt, synthetic construct; identical to SEQ ID NO: 27001
  source 1..92: mol_type = other RNA

SEQ ID NO: 28030 - RNA, 92 nt, synthetic construct; identical to SEQ ID NO: 27001
  source 1..92: mol_type = other RNA

SEQ ID NO: 28031 - RNA, 92 nt, synthetic construct; identical to SEQ ID NO: 27001
  source 1..92: mol_type = other RNA

SEQ ID NO: 28032 - RNA, 92 nt, synthetic construct; identical to SEQ ID NO: 27001
  source 1..92: mol_type = other RNA

SEQ ID NO: 28033 - RNA, 92 nt, synthetic construct; identical to SEQ ID NO: 27001
  source 1..92: mol_type = other RNA

SEQ ID NO: 28034 - RNA, 92 nt, synthetic construct; identical to SEQ ID NO: 27001
  source 1..92: mol_type = other RNA

SEQ ID NO: 28035 - RNA, 92 nt, synthetic construct; identical to SEQ ID NO: 27035
  source 1..92: mol_type = other RNA

SEQ ID NO: 28036 - RNA, 92 nt, synthetic construct; identical to SEQ ID NO: 27001
  source 1..92: mol_type = other RNA

SEQ ID NO: 28037 - RNA, 92 nt, synthetic construct; identical to SEQ ID NO: 27001
  source 1..92: mol_type = other RNA

SEQ ID NO: 28038 - RNA, 92 nt, synthetic construct; identical to SEQ ID NO: 27001
  source 1..92: mol_type = other RNA

SEQ ID NO: 28039 - RNA, 92 nt, synthetic construct; identical to SEQ ID NO: 27001
  source 1..92: mol_type = other RNA

SEQ ID NO: 28040 - RNA, 92 nt, synthetic construct; identical to SEQ ID NO: 27001
  source 1..92: mol_type = other RNA

SEQ ID NO: 28041 - RNA, 92 nt, synthetic construct; identical to SEQ ID NO: 27001
  source 1..92: mol_type = other RNA

SEQ ID NO: 28042 - RNA, 92 nt, synthetic construct; identical to SEQ ID NO: 27001
  source 1..92: mol_type = other RNA

SEQ ID NO: 28043 - RNA, 92 nt, synthetic construct; identical to SEQ ID NO: 27001
  source 1..92: mol_type = other RNA

SEQ ID NO: 28044 - RNA, 92 nt, synthetic construct; identical to SEQ ID NO: 27001
  source 1..92: mol_type = other RNA

SEQ ID NO: 28045 - RNA, 92 nt, synthetic construct; identical to SEQ ID NO: 27001
  source 1..92: mol_type = other RNA

SEQ ID NO: 28046 - RNA, 92 nt, synthetic construct; identical to SEQ ID NO: 27001
  source 1..92: mol_type = other RNA

SEQ ID NO: 28047 - RNA, 92 nt, synthetic construct; identical to SEQ ID NO: 27001
  source 1..92: mol_type = other RNA

SEQ ID NO: 28048 - RNA, 92 nt, synthetic construct; identical to SEQ ID NO: 27001
  source 1..92: mol_type = other RNA

SEQ ID NO: 28049 - RNA, 92 nt, synthetic construct; identical to SEQ ID NO: 27001
  source 1..92: mol_type = other RNA

SEQ ID NO: 28050 - RNA, 92 nt, synthetic construct; identical to SEQ ID NO: 27001
  source 1..92: mol_type = other RNA

SEQ ID NO: 28051 - RNA, 92 nt, synthetic construct; identical to SEQ ID NO: 27001
  source 1..92: mol_type = other RNA

SEQ ID NO: 28052 - RNA, 92 nt, synthetic construct; identical to SEQ ID NO: 27001
  source 1..92: mol_type = other RNA

SEQ ID NO: 28053 - RNA, 92 nt, synthetic construct; identical to SEQ ID NO: 27001
  source 1..92: mol_type = other RNA

SEQ ID NO: 28054 - RNA, 92 nt, synthetic construct; identical to SEQ ID NO: 27001
  source 1..92: mol_type = other RNA

SEQ ID NO: 28055 - RNA, 92 nt, synthetic construct; identical to SEQ ID NO: 27001
  source 1..92: mol_type = other RNA

SEQ ID NO: 28056 - RNA, 92 nt, synthetic construct; identical to SEQ ID NO: 27001
  source 1..92: mol_type = other RNA

SEQ ID NO: 28057 - RNA, 92 nt, synthetic construct; identical to SEQ ID NO: 27001
  source 1..92: mol_type = other RNA

SEQ ID NO: 28058 - RNA, 92 nt, synthetic construct; identical to SEQ ID NO: 27001
  source 1..92: mol_type = other RNA

SEQ ID NO: 28059 - RNA, 92 nt, synthetic construct; identical to SEQ ID NO: 27001
  source 1..92: mol_type = other RNA

SEQ ID NO: 28060 - RNA, 92 nt, synthetic construct; identical to SEQ ID NO: 27001
  source 1..92: mol_type = other RNA

SEQ ID NO: 28061 - RNA, 92 nt, synthetic construct; identical to SEQ ID NO: 27001
  source 1..92: mol_type = other RNA

SEQ ID NO: 28062 - RNA, 92 nt, synthetic construct; identical to SEQ ID NO: 27001
  source 1..92: mol_type = other RNA

SEQ ID NO: 28063-28090 - skipped (28 entries)

SEQ ID NO: 28091 - RNA, 93 nt, synthetic construct; identical to SEQ ID NO: 27091
  source 1..93: mol_type = other RNA

SEQ ID NO: 28092 - RNA, 93 nt, synthetic construct; identical to SEQ ID NO: 27092
  source 1..93: mol_type = other RNA

SEQ ID NO: 28093 - RNA, 93 nt, synthetic construct; identical to SEQ ID NO: 27093
  source 1..93: mol_type = other RNA

SEQ ID NO: 28094 - RNA, 93 nt, synthetic construct; identical to SEQ ID NO: 27094
  source 1..93: mol_type = other RNA

SEQ ID NO: 28095 - RNA, 93 nt, synthetic construct; identical to SEQ ID NO: 27095
  source 1..93: mol_type = other RNA

SEQ ID NO: 28096 - RNA, 93 nt, synthetic construct; identical to SEQ ID NO: 27096
  source 1..93: mol_type = other RNA

SEQ ID NO: 28097 - RNA, 93 nt, synthetic construct; identical to SEQ ID NO: 27097
  source 1..93: mol_type = other RNA

SEQ ID NO: 28098 - RNA, 93 nt, synthetic construct; identical to SEQ ID NO: 27098
  source 1..93: mol_type = other RNA

SEQ ID NO: 28099 - RNA, 93 nt, synthetic construct; identical to SEQ ID NO: 27099
  source 1..93: mol_type = other RNA

SEQ ID NO: 28100 - RNA, 93 nt, synthetic construct; identical to SEQ ID NO: 27100
  source 1..93: mol_type = other RNA

SEQ ID NO: 28101 - RNA, 93 nt, synthetic construct; identical to SEQ ID NO: 27101
  source 1..93: mol_type = other RNA

SEQ ID NO: 28102 - RNA, 93 nt, synthetic construct; identical to SEQ ID NO: 27102
  source 1..93: mol_type = other RNA

SEQ ID NO: 28103 - RNA, 93 nt, synthetic construct; identical to SEQ ID NO: 27103
  source 1..93: mol_type = other RNA

SEQ ID NO: 28104 - RNA, 93 nt, synthetic construct; identical to SEQ ID NO: 27104
  source 1..93: mol_type = other RNA

SEQ ID NO: 28105 - RNA, 93 nt, synthetic construct; identical to SEQ ID NO: 27105
  source 1..93: mol_type = other RNA

SEQ ID NO: 28106 - RNA, 93 nt, synthetic construct; identical to SEQ ID NO: 27106
  source 1..93: mol_type = other RNA

SEQ ID NO: 28107 - RNA, 93 nt, synthetic construct; identical to SEQ ID NO: 27107
  source 1..93: mol_type = other RNA

SEQ ID NO: 28108 - RNA, 93 nt, synthetic construct; identical to SEQ ID NO: 27108
  source 1..93: mol_type = other RNA

SEQ ID NO: 28109 - RNA, 93 nt, synthetic construct; identical to SEQ ID NO: 27109
  source 1..93: mol_type = other RNA

SEQ ID NO: 28110 - RNA, 93 nt, synthetic construct; identical to SEQ ID NO: 27110
  source 1..93: mol_type = other RNA

SEQ ID NO: 28111 - RNA, 93 nt, synthetic construct; identical to SEQ ID NO: 27111
  source 1..93: mol_type = other RNA

SEQ ID NO: 28112 - RNA, 93 nt, synthetic construct; identical to SEQ ID NO: 27112
  source 1..93: mol_type = other RNA

SEQ ID NO: 28113 - RNA, 93 nt, synthetic construct; identical to SEQ ID NO: 27113
  source 1..93: mol_type = other RNA

SEQ ID NO: 28114 - RNA, 93 nt, synthetic construct; identical to SEQ ID NO: 27114
  source 1..93: mol_type = other RNA

SEQ ID NO: 28115 - RNA, 93 nt, synthetic construct; identical to SEQ ID NO: 27115
  source 1..93: mol_type = other RNA

SEQ ID NO: 28116 - RNA, 93 nt, synthetic construct; identical to SEQ ID NO: 27116
  source 1..93: mol_type = other RNA

SEQ ID NO: 28117 - RNA, 93 nt, synthetic construct; identical to SEQ ID NO: 27117
  source 1..93: mol_type = other RNA

SEQ ID NO: 28118 - RNA, 93 nt, synthetic construct; identical to SEQ ID NO: 27118
  source 1..93: mol_type = other RNA

SEQ ID NO: 28119 - RNA, 93 nt, synthetic construct; identical to SEQ ID NO: 27119
  source 1..93: mol_type = other RNA

SEQ ID NO: 28120 - RNA, 93 nt, synthetic construct; identical to SEQ ID NO: 27120
  source 1..93: mol_type = other RNA

SEQ ID NO: 28121 - RNA, 94 nt, synthetic construct; identical to SEQ ID NO: 27121
  source 1..94: mol_type = other RNA

SEQ ID NO: 28122 - RNA, 94 nt, synthetic construct; identical to SEQ ID NO: 27122
  source 1..94: mol_type = other RNA

SEQ ID NO: 28123 - RNA, 95 nt, synthetic construct; identical to SEQ ID NO: 27123
  source 1..95: mol_type = other RNA

SEQ ID NO: 28124 - RNA, 97 nt, synthetic construct; identical to SEQ ID NO: 27124
  source 1..97: mol_type = other RNA

SEQ ID NO: 28125 - RNA, 99 nt, synthetic construct; identical to SEQ ID NO: 27125
  source 1..99: mol_type = other RNA

SEQ ID NO: 28126 - RNA, 101 nt, synthetic construct; identical to SEQ ID NO: 27126
  source 1..101: mol_type = other RNA

SEQ ID NO: 28127 - RNA, 103 nt, synthetic construct; identical to SEQ ID NO: 27127
  source 1..103: mol_type = other RNA

SEQ ID NO: 28128 - RNA, 101 nt, synthetic construct; identical to SEQ ID NO: 27128
  source 1..101: mol_type = other RNA

SEQ ID NO: 28129 - RNA, 99 nt, synthetic construct; identical to SEQ ID NO: 27129
  source 1..99: mol_type = other RNA

SEQ ID NO: 28130 - RNA, 97 nt, synthetic construct; identical to SEQ ID NO: 27130
  source 1..97: mol_type = other RNA

SEQ ID NO: 28131 - RNA, 89 nt, synthetic construct; identical to SEQ ID NO: 27131
  source 1..89: mol_type = other RNA

SEQ ID NO: 28132 - RNA, 93 nt, synthetic construct; identical to SEQ ID NO: 27091
  source 1..93: mol_type = other RNA

SEQ ID NO: 28133 - RNA, 96 nt, synthetic construct; identical to SEQ ID NO: 27133
  source 1..96: mol_type = other RNA

SEQ ID NO: 28134 - RNA, 92 nt, synthetic construct; identical to SEQ ID NO: 27001
  source 1..92: mol_type = other RNA

SEQ ID NO: 28135 - RNA, 92 nt, synthetic construct; identical to SEQ ID NO: 27001
  source 1..92: mol_type = other RNA

SEQ ID NO: 28136 - RNA, 92 nt, synthetic construct; identical to SEQ ID NO: 27001
  source 1..92: mol_type = other RNA

SEQ ID NO: 28137 - RNA, 92 nt, synthetic construct; identical to SEQ ID NO: 27001
  source 1..92: mol_type = other RNA

SEQ ID NO: 28138 - RNA, 92 nt, synthetic construct; identical to SEQ ID NO: 27001
  source 1..92: mol_type = other RNA

SEQ ID NO: 28139 - RNA, 92 nt, synthetic construct; identical to SEQ ID NO: 27001
  source 1..92: mol_type = other RNA

SEQ ID NO: 28140 - RNA, 92 nt, synthetic construct; identical to SEQ ID NO: 27001
  source 1..92: mol_type = other RNA

SEQ ID NO: 28141 - RNA, 92 nt, synthetic construct; identical to SEQ ID NO: 27035
  source 1..92: mol_type = other RNA

SEQ ID NO: 28142 - RNA, 92 nt, synthetic construct; identical to SEQ ID NO: 27001
  source 1..92: mol_type = other RNA

SEQ ID NO: 28143 - RNA, 100 nt, synthetic construct; identical to SEQ ID NO: 27143
  source 1..100: mol_type = other RNA

SEQ ID NO: 28144 - RNA, 100 nt, synthetic construct; identical to SEQ ID NO: 27143
  source 1..100: mol_type = other RNA

SEQ ID NO: 28145 - RNA, 93 nt, synthetic construct; identical to SEQ ID NO: 27145
  source 1..93: mol_type = other RNA

SEQ ID NO: 28146 - RNA, 92 nt, synthetic construct; identical to SEQ ID NO: 27146
  source 1..92: mol_type = other RNA

SEQ ID NO: 28147 - RNA, 91 nt, synthetic construct; identical to SEQ ID NO: 27147
  source 1..91: mol_type = other RNA

SEQ ID NO: 28148 - RNA, 90 nt, synthetic construct; identical to SEQ ID NO: 27148
  source 1..90: mol_type = other RNA

SEQ ID NO: 28149 - RNA, 89 nt, synthetic construct; identical to SEQ ID NO: 27149
  source 1..89: mol_type = other RNA

SEQ ID NO: 28150 - RNA, 88 nt, synthetic construct; identical to SEQ ID NO: 27150
  source 1..88: mol_type = other RNA

SEQ ID NO: 28151 - RNA, 95 nt, synthetic construct; identical to SEQ ID NO: 27151
  source 1..95: mol_type = other RNA

SEQ ID NO: 28152 - RNA, 94 nt, synthetic construct; identical to SEQ ID NO: 27152
  source 1..94: mol_type = other RNA

SEQ ID NO: 28153 - RNA, 93 nt, synthetic construct; identical to SEQ ID NO: 27153
  source 1..93: mol_type = other RNA

SEQ ID NO: 28154 - RNA, 92 nt, synthetic construct; identical to SEQ ID NO: 27154
  source 1..92: mol_type = other RNA

SEQ ID NO: 28155 - RNA, 91 nt, synthetic construct; identical to SEQ ID NO: 27155
  source 1..91: mol_type = other RNA

SEQ ID NO: 28156 - RNA, 90 nt, synthetic construct; identical to SEQ ID NO: 27156
  source 1..90: mol_type = other RNA

SEQ ID NO: 28157 - RNA, 89 nt, synthetic construct; identical to SEQ ID NO: 27131
  source 1..89: mol_type = other RNA

SEQ ID NO: 28158 - RNA, 95 nt, synthetic construct; identical to SEQ ID NO: 27158
  source 1..95: mol_type = other RNA

SEQ ID NO: 28159 - RNA, 94 nt, synthetic construct; identical to SEQ ID NO: 27159
  source 1..94: mol_type = other RNA

SEQ ID NO: 28160 - RNA, 93 nt, synthetic construct; identical to SEQ ID NO: 27091
  source 1..93: mol_type = other RNA

SEQ ID NO: 28161 - RNA, 92 nt, synthetic construct; identical to SEQ ID NO: 27001
  source 1..92: mol_type = other RNA

SEQ ID NO: 28162 - RNA, 91 nt, synthetic construct; identical to SEQ ID NO: 27162
  source 1..91: mol_type = other RNA

SEQ ID NO: 28163 - RNA, 90 nt, synthetic construct; identical to SEQ ID NO: 27163
  source 1..90: mol_type = other RNA

SEQ ID NO: 28164 - RNA, 97 nt, synthetic construct; identical to SEQ ID NO: 27164
  source 1..97: mol_type = other RNA

SEQ ID NO: 28165 - RNA, 96 nt, synthetic construct; identical to SEQ ID NO: 27165
  source 1..96: mol_type = other RNA

SEQ ID NO: 28166 - RNA, 95 nt, synthetic construct; identical to SEQ ID NO: 27166
  source 1..95: mol_type = other RNA

SEQ ID NO: 28167 - RNA, 94 nt, synthetic construct; identical to SEQ ID NO: 27167
  source 1..94: mol_type = other RNA

SEQ ID NO: 28168 - RNA, 93 nt, synthetic construct; identical to SEQ ID NO: 27168
  source 1..93: mol_type = other RNA

SEQ ID NO: 28169 - RNA, 92 nt, synthetic construct; identical to SEQ ID NO: 27169
  source 1..92: mol_type = other RNA

SEQ ID NO: 28170 - RNA, 91 nt, synthetic construct; identical to SEQ ID NO: 27170
  source 1..91: mol_type = other RNA

SEQ ID NO: 28171 - RNA, 94 nt, synthetic construct; identical to SEQ ID NO: 27171
  source 1..94: mol_type = other RNA

SEQ ID NO: 28172 - RNA, 93 nt, synthetic construct; identical to SEQ ID NO: 27172
  source 1..93: mol_type = other RNA

SEQ ID NO: 28173 - RNA, 92 nt, synthetic construct; identical to SEQ ID NO: 27173
  source 1..92: mol_type = other RNA

SEQ ID NO: 28174 - RNA, 95 nt, synthetic construct; identical to SEQ ID NO: 27174
  source 1..95: mol_type = other RNA

SEQ ID NO: 28175 - RNA, 94 nt, synthetic construct; identical to SEQ ID NO: 27175
  source 1..94: mol_type = other RNA

SEQ ID NO: 28176 - RNA, 93 nt, synthetic construct; identical to SEQ ID NO: 27176
  source 1..93: mol_type = other RNA

SEQ ID NO: 28177 - RNA, 96 nt, synthetic construct; identical to SEQ ID NO: 27133
  source 1..96: mol_type = other RNA

SEQ ID NO: 28178 - RNA, 95 nt, synthetic construct; identical to SEQ ID NO: 27178
  source 1..95: mol_type = other RNA

SEQ ID NO: 28179 - RNA, 94 nt, synthetic construct; identical to SEQ ID NO: 27179
  source 1..94: mol_type = other RNA

SEQ ID NO: 28180 - RNA, 98 nt, synthetic construct; identical to SEQ ID NO: 27180
  source 1..98: mol_type = other RNA

SEQ ID NO: 28181 - RNA, 101 nt, synthetic construct; identical to SEQ ID NO: 27181
  source 1..101: mol_type = other RNA

SEQ ID NO: 28182 - RNA, 100 nt, synthetic construct; identical to SEQ ID NO: 27182
  source 1..100: mol_type = other RNA

SEQ ID NO: 28183 - RNA, 103 nt, synthetic construct; identical to SEQ ID NO: 27183
  source 1..103: mol_type = other RNA

SEQ ID NO: 28184 - RNA, 102 nt, synthetic construct; identical to SEQ ID NO: 27184
  source 1..102: mol_type = other RNA

SEQ ID NO: 28185 - RNA, 100 nt, synthetic construct; identical to SEQ ID NO: 27143
  source 1..100: mol_type = other RNA
  modified_base 1: mod_base = OTHER; note = 2'-O-methyl modified nucleotide with phosphorothioate linkage
  modified_base 2: mod_base = OTHER; note = 2'-O-methyl modified nucleotide with phosphorothioate linkage
  modified_base 3: mod_base = OTHER; note = 2'-O-methyl modified nucleotide with phosphorothioate linkage
  modified_base 97: mod_base = OTHER; note = Nucleotide with phosphorothioate linkage
  modified_base 98: mod_base = OTHER; note = 2'-O-methyl modified nucleotide with phosphorothioate linkage
  modified_base 99: mod_base = OTHER; note = 2'-O-methyl modified nucleotide with phosphorothioate linkage
  modified_base 100: mod_base = OTHER; note = 2'-O-methyl modified nucleotide

SEQ ID NO: 28186 - RNA, 100 nt, synthetic construct
  source 1..100: mol_type = other RNA
  modified_base 1: mod_base = OTHER; note = 2'-O-methyl modified nucleotide with phosphorothioate linkage
  modified_base 2: mod_base = OTHER; note = 2'-O-methyl modified nucleotide with phosphorothioate linkage
  modified_base 3: mod_base = OTHER; note = 2'-O-methyl modified nucleotide with phosphorothioate linkage
  modified_base 97: mod_base = OTHER; note = Nucleotide with phosphorothioate linkage
  modified_base 98: mod_base = OTHER; note = 2'-O-methyl modified nucleotide with phosphorothioate linkage
  modified_base 99: mod_base = OTHER; note = 2'-O-methyl modified nucleotide with phosphorothioate linkage
  modified_base 100: mod_base = OTHER; note = 2'-O-methyl modified nucleotide
aaggctgtgctgaccatcgagtctttgtactctgcgcgagcacgcgcagaagctacaaagataaggcttcatgccgaaatcatttctcgtcgatggtcag

SEQ ID NO: 28187 - RNA, 100 nt, synthetic construct; identical to SEQ ID NO: 28186
  source 1..100: mol_type = other RNA
  modified_base 1: mod_base = OTHER; note = 2'-O-methyl modified nucleotide with phosphorothioate linkage
  modified_base 2: mod_base = OTHER; note = 2'-O-methyl modified nucleotide with phosphorothioate linkage
  modified_base 3: mod_base = OTHER; note = 2'-O-methyl modified nucleotide with phosphorothioate linkage
  modified_base 32: mod_base = OTHER; note = 2'-O-methyl modified nucleotide
  modified_base 33: mod_base = OTHER; note = 2'-O-methyl modified nucleotide
  modified_base 34: mod_base = OTHER; note = 2'-O-methyl modified nucleotide
  modified_base 35: mod_base = OTHER; note = 2'-O-methyl modified nucleotide
  modified_base 36: mod_base = OTHER; note = 2'-O-methyl modified nucleotide
  modified_base 37: mod_base = OTHER; note = 2'-O-methyl modified nucleotide
  modified_base 38: mod_base = OTHER; note = 2'-O-methyl modified nucleotide
  modified_base 39: mod_base = OTHER; note = 2'-O-methyl modified nucleotide
  modified_base 40: mod_base = OTHER; note = 2'-O-methyl modified nucleotide
  modified_base 41: mod_base = OTHER; note = 2'-O-methyl modified nucleotide
  modified_base 42: mod_base = OTHER; note = 2'-O-methyl modified nucleotide
  modified_base 43: mod_base = OTHER; note = 2'-O-methyl modified nucleotide
  modified_base 44: mod_base = OTHER; note = 2'-O-methyl modified nucleotide
  modified_base 45: mod_base = OTHER; note = 2'-O-methyl modified nucleotide
  modified_base 46: mod_base = OTHER; note = 2'-O-methyl modified nucleotide
  modified_base 47: mod_base = OTHER; note = 2'-O-methyl modified nucleotide
  modified_base 48: mod_base = OTHER; note = 2'-O-methyl modified nucleotide
  modified_base 49: mod_base = OTHER; note = 2'-O-methyl modified nucleotide
  modified_base 97: mod_base = OTHER; note = Nucleotide with phosphorothioate linkage
  modified_base 98: mod_base = OTHER; note = 2'-O-methyl modified nucleotide with phosphorothioate linkage
  modified_base 99: mod_base = OTHER; note = 2'-O-methyl modified nucleotide with phosphorothioate linkage
  modified_base 100: mod_base = OTHER; note = 2'-O-methyl modified nucleotide

SEQ ID NO: 28188 - RNA, 100 nt, synthetic construct; identical to SEQ ID NO: 27143
  source 1..100: mol_type = other RNA

SEQ ID NO: 28189 - RNA, 100 nt, synthetic construct; identical to SEQ ID NO: 28186
  source 1..100: mol_type = other RNA

SEQ ID NO: 28190 - RNA, 100 nt, synthetic construct; identical to SEQ ID NO: 28186
  source 1..100: mol_type = other RNA

SEQ ID NO: 28191-28199 - skipped (9 entries)

SEQ ID NO: 28200 - RNA, 96 nt, synthetic construct
  source 1..96: mol_type = other RNA
aaggctgtgctgaccatcgagtctttgtactctggtaccagaagctacaaagataaggcttcatgccgaaatcacgtcgatggtcagcacagcctt

SEQ ID NO: 28201 - RNA, 95 nt, synthetic construct
  source 1..95: mol_type = other RNA
aaggctgtgctgaccatcgagtctttgtactctggtaccagaagctacaaagataaggcttcatgccgaaatcacgtcgatggtcagcacagcct

SEQ ID NO: 28202 - RNA, 94 nt, synthetic construct
  source 1..94: mol_type = other RNA
aaggctgtgctgaccatcgagtctttgtactctggtaccagaagctacaaagataaggcttcatgccgaaatcacgtcgatggtcagcacagcc

SEQ ID NO: 28203 - RNA, 93 nt, synthetic construct
  source 1..93: mol_type = other RNA
aaggctgtgctgaccatcgagtctttgtactctggtaccagaagctacaaagataaggcttcatgccgaaatcacgtcgatggtcagcacagc

SEQ ID NO: 28204 - RNA, 92 nt, synthetic construct
  source 1..92: mol_type = other RNA
aaggctgtgctgaccatcgagtctttgtactctggtaccagaagctacaaagataaggcttcatgccgaaatcacgtcgatggtcagcacag

SEQ ID NO: 28205 - RNA, 91 nt, synthetic construct
  source 1..91: mol_type = other RNA
aaggctgtgctgaccatcgagtctttgtactctggtaccagaagctacaaagataaggcttcatgccgaaatcacgtcgatggtcagcaca

SEQ ID NO: 28206 - RNA, 90 nt, synthetic construct
  source 1..90: mol_type = other RNA
aaggctgtgctgaccatcgagtctttgtactctggtaccagaagctacaaagataaggcttcatgccgaaatcacgtcgatggtcagcac

SEQ ID NO: 28207 - RNA, 89 nt, synthetic construct
  source 1..89: mol_type = other RNA
aaggctgtgctgaccatcgagtctttgtactctggtaccagaagctacaaagataaggcttcatgccgaaatcacgtcgatggtcagca

SEQ ID NO: 28208 - RNA, 88 nt, synthetic construct
  source 1..88: mol_type = other RNA
aaggctgtgctgaccatcgagtctttgtactctggtaccagaagctacaaagataaggcttcatgccgaaatcacgtcgatggtcagc

SEQ ID NO: 28209 - RNA, 87 nt, synthetic construct
  source 1..87: mol_type = other RNA
aaggctgtgctgaccatcgagtctttgtactctggtaccagaagctacaaagataaggcttcatgccgaaatcacgtcgatggtcag

SEQ ID NO: 28210 - RNA, 86 nt, synthetic construct
  source 1..86: mol_type = other RNA
aaggctgtgctgaccatcgagtctttgtactctggtaccagaagctacaaagataaggcttcatgccgaaatcacgtcgatggtca

SEQ ID NO: 28211 - RNA, 85 nt, synthetic construct
  source 1..85: mol_type = other RNA
aaggctgtgctgaccatcgagtctttgtactctggtaccagaagctacaaagataaggcttcatgccgaaatcacgtcgatggtc

SEQ ID NO: 28212 - RNA, 97 nt, synthetic construct
  source 1..97: mol_type = other RNA
aaggctgtgctgaccatcgagtctttgtactctggtaccagaagctacaaagataaggcttcatgccgaaatcatcgtcgatggtcagcacagcctt

SEQ ID NO: 28213 - RNA, 96 nt, synthetic construct
  source 1..96: mol_type = other RNA
aaggctgtgctgaccatcgagtctttgtactctggtaccagaagctacaaagataaggcttcatgccgaaatcatcgtcgatggtcagcacagcct

SEQ ID NO: 28214 - RNA, 95 nt, synthetic construct
  source 1..95: mol_type = other RNA
aaggctgtgctgaccatcgagtctttgtactctggtaccagaagctacaaagataaggcttcatgccgaaatcatcgtcgatggtcagcacagcc

SEQ ID NO: 28215 - RNA, 94 nt, synthetic construct
  source 1..94: mol_type = other RNA
aaggctgtgctgaccatcgagtctttgtactctggtaccagaagctacaaagataaggcttcatgccgaaatcatcgtcgatggtcagcacagc

SEQ ID NO: 28216 - RNA, 93 nt, synthetic construct
  source 1..93: mol_type = other RNA
aaggctgtgctgaccatcgagtctttgtactctggtaccagaagctacaaagataaggcttcatgccgaaatcatcgtcgatggtcagcacag

SEQ ID NO: 28217 - RNA, 92 nt, synthetic construct
  source 1..92: mol_type = other RNA
aaggctgtgctgaccatcgagtctttgtactctggtaccagaagctacaaagataaggcttcatgccgaaatcatcgtcgatggtcagcaca

SEQ ID NO: 28218 - RNA, 91 nt, synthetic construct
  source 1..91: mol_type = other RNA
aaggctgtgctgaccatcgagtctttgtactctggtaccagaagctacaaagataaggcttcatgccgaaatcatcgtcgatggtcagcac

SEQ ID NO: 28219 - RNA, 90 nt, synthetic construct
  source 1..90: mol_type = other RNA
aaggctgtgctgaccatcgagtctttgtactctggtaccagaagctacaaagataaggcttcatgccgaaatcatcgtcgatggtcagca

SEQ ID NO: 28220 - RNA, 89 nt, synthetic construct
  source 1..89: mol_type = other RNA
aaggctgtgctgaccatcgagtctttgtactctggtaccagaagctacaaagataaggcttcatgccgaaatcatcgtcgatggtcagc

SEQ ID NO: 28221 - RNA, 88 nt, synthetic construct
  source 1..88: mol_type = other RNA
aaggctgtgctgaccatcgagtctttgtactctggtaccagaagctacaaagataaggcttcatgccgaaatcatcgtcgatggtcag

SEQ ID NO: 28222 - RNA, 87 nt, synthetic construct
  source 1..87: mol_type = other RNA
aaggctgtgctgaccatcgagtctttgtactctggtaccagaagctacaaagataaggcttcatgccgaaatcatcgtcgatggtca

SEQ ID NO: 28223 - RNA, 86 nt, synthetic construct
  source 1..86: mol_type = other RNA
aaggctgtgctgaccatcgagtctttgtactctggtaccagaagctacaaagataaggcttcatgccgaaatcatcgtcgatggtc

SEQ ID NO: 28224 - RNA, 98 nt, synthetic construct
  source 1..98: mol_type = other RNA
aaggctgtgctgaccatcgagtctttgtactctggtaccagaagctacaaagataaggcttcatgccgaaatcactcgtcgatggtcagcacagcctt

SEQ ID NO: 28225 - RNA, 97 nt, synthetic construct
  source 1..97: mol_type = other RNA
aaggctgtgctgaccatcgagtctttgtactctggtaccagaagctacaaagataaggcttcatgccgaaatcactcgtcgatggtcagcacagcct

SEQ ID NO: 28226 - RNA, 96 nt, synthetic construct
  source 1..96: mol_type = other RNA
aaggctgtgctgaccatcgagtctttgtactctggtaccagaagctacaaagataaggcttcatgccgaaatcactcgtcgatggtcagcacagcc

SEQ ID NO: 28227 - RNA, 95 nt, synthetic construct
  source 1..95: mol_type = other RNA
aaggctgtgctgaccatcgagtctttgtactctggtaccagaagctacaaagataaggcttcatgccgaaatcactcgtcgatggtcagcacagc

SEQ ID NO: 28228 - RNA, 94 nt, synthetic construct
  source 1..94: mol_type = other RNA
aaggctgtgctgaccatcgagtctttgtactctggtaccagaagctacaaagataaggcttcatgccgaaatcactcgtcgatggtcagcacag

SEQ ID NO: 28229 - RNA, 93 nt, synthetic construct
  source 1..93: mol_type = other RNA
aaggctgtgctgaccatcgagtctttgtactctggtaccagaagctacaaagataaggcttcatgccgaaatcactcgtcgatggtcagcaca

SEQ ID NO: 28230 - RNA, 92 nt, synthetic construct
  source 1..92: mol_type = other RNA
aaggctgtgctgaccatcgagtctttgtactctggtaccagaagctacaaagataaggcttcatgccgaaatcactcgtcgatggtcagcac

SEQ ID NO: 28231 - RNA, 91 nt, synthetic construct
  source 1..91: mol_type = other RNA
aaggctgtgctgaccatcgagtctttgtactctggtaccagaagctacaaagataaggcttcatgccgaaatcactcgtcgatggtcagca

SEQ ID NO: 28232 - RNA, 90 nt, synthetic construct
  source 1..90: mol_type = other RNA
aaggctgtgctgaccatcgagtctttgtactctggtaccagaagctacaaagataaggcttcatgccgaaatcactcgtcgatggtcagc

SEQ ID NO: 28233 - RNA, 89 nt, synthetic construct
  source 1..89: mol_type = other RNA
aaggctgtgctgaccatcgagtctttgtactctggtaccagaagctacaaagataaggcttcatgccgaaatcactcgtcgatggtcag

SEQ ID NO: 28234 - RNA, 88 nt, synthetic construct
  source 1..88: mol_type = other RNA
aaggctgtgctgaccatcgagtctttgtactctggtaccagaagctacaaagataaggcttcatgccgaaatcactcgtcgatggtca

SEQ ID NO: 28235 - RNA, 87 nt, synthetic construct
  source 1..87: mol_type = other RNA
aaggctgtgctgaccatcgagtctttgtactctggtaccagaagctacaaagataaggcttcatgccgaaatcactcgtcgatggtc

SEQ ID NO: 28236 - RNA, 99 nt, synthetic construct
  source 1..99: mol_type = other RNA
aaggctgtgctgaccatcgagtctttgtactctggtaccagaagctacaaagataaggcttcatgccgaaatcatctcgtcgatggtcagcacagcctt

SEQ ID NO: 28237 - RNA, 98 nt, synthetic construct
  source 1..98: mol_type = other RNA
aaggctgtgctgaccatcgagtctttgtactctggtaccagaagctacaaagataaggcttcatgccgaaatcatctcgtcgatggtcagcacagcct

SEQ ID NO: 28238 - RNA, 97 nt, synthetic construct
  source 1..97: mol_type = other RNA
aaggctgtgctgaccatcgagtctttgtactctggtaccagaagctacaaagataaggcttcatgccgaaatcatctcgtcgatggtcagcacagcc

SEQ ID NO: 28239 - RNA, 96 nt, synthetic construct
  source 1..96: mol_type = other RNA
aaggctgtgctgaccatcgagtctttgtactctggtaccagaagctacaaagataaggcttcatgccgaaatcatctcgtcgatggtcagcacagc

SEQ ID NO: 28240 - RNA, 95 nt, synthetic construct
  source 1..95: mol_type = other RNA
aaggctgtgctgaccatcgagtctttgtactctggtaccagaagctacaaagataaggcttcatgccgaaatcatctcgtcgatggtcagcacag

SEQ ID NO: 28241 - RNA, 94 nt, synthetic construct
  source 1..94: mol_type = other RNA
aaggctgtgctgaccatcgagtctttgtactctggtaccagaagctacaaagataaggcttcatgccgaaatcatctcgtcgatggtcagcaca

SEQ ID NO: 28242 - RNA, 93 nt, synthetic construct; identical to SEQ ID NO: 27145
  source 1..93: mol_type = other RNA

SEQ ID NO: 28243 - RNA, 92 nt, synthetic construct; identical to SEQ ID NO: 27146
  source 1..92: mol_type = other RNA

SEQ ID NO: 28244 - RNA, 91 nt, synthetic construct; identical to SEQ ID NO: 27147
  source 1..91: mol_type = other RNA

SEQ ID NO: 28245 - RNA, 90 nt, synthetic construct; identical to SEQ ID NO: 27148
  source 1..90: mol_type = other RNA

SEQ ID NO: 28246 - RNA, 89 nt, synthetic construct; identical to SEQ ID NO: 27149
  source 1..89: mol_type = other RNA

SEQ ID NO: 28247 - RNA, 88 nt, synthetic construct; identical to SEQ ID NO: 27150
  source 1..88: mol_type = other RNA

SEQ ID NO: 28248 - RNA, 100 nt, synthetic construct
  source 1..100: mol_type = other RNA
aaggctgtgctgaccatcgagtctttgtactctggtaccagaagctacaaagataaggcttcatgccgaaatcattctcgtcgatggtcagcacagcctt

SEQ ID NO: 28249 - RNA, 99 nt, synthetic construct
  source 1..99: mol_type = other RNA
aaggctgtgctgaccatcgagtctttgtactctggtaccagaagctacaaagataaggcttcatgccgaaatcattctcgtcgatggtcagcacagcct

SEQ ID NO: 28250 - RNA, 98 nt, synthetic construct
  source 1..98: mol_type = other RNA
aaggctgtgctgaccatcgagtctttgtactctggtaccagaagctacaaagataaggcttcatgccgaaatcattctcgtcgatggtcagcacagcc

SEQ ID NO: 28251 - RNA, 97 nt, synthetic construct
  source 1..97: mol_type = other RNA
aaggctgtgctgaccatcgagtctttgtactctggtaccagaagctacaaagataaggcttcatgccgaaatcattctcgtcgatggtcagcacagc

SEQ ID NO: 28252 - RNA, 96 nt, synthetic construct
  source 1..96: mol_type = other RNA
aaggctgtgctgaccatcgagtctttgtactctggtaccagaagctacaaagataaggcttcatgccgaaatcattctcgtcgatggtcagcacag

SEQ ID NO: 28253 - RNA, 95 nt, synthetic construct; identical to SEQ ID NO: 27151
  source 1..95: mol_type = other RNA

SEQ ID NO: 28254 - RNA, 94 nt, synthetic construct; identical to SEQ ID NO: 27152
  source 1..94: mol_type = other RNA

SEQ ID NO: 28255 - RNA, 93 nt, synthetic construct; identical to SEQ ID NO: 27153
  source 1..93: mol_type = other RNA

SEQ ID NO: 28256 - RNA, 92 nt, synthetic construct; identical to SEQ ID NO: 27154
  source 1..92: mol_type = other RNA

SEQ ID NO: 28257 - RNA, 91 nt, synthetic construct; identical to SEQ ID NO: 27155
  source 1..91: mol_type = other RNA

SEQ ID NO: 28258 - RNA, 90 nt, synthetic construct; identical to SEQ ID NO: 27156
  source 1..90: mol_type = other RNA

SEQ ID NO: 28259 - RNA, 89 nt, synthetic construct; identical to SEQ ID NO: 27131
  source 1..89: mol_type = other RNA

SEQ ID NO: 28260 - RNA, 101 nt, synthetic construct
  source 1..101: mol_type = other RNA
aaggctgtgctgaccatcgagtctttgtactctggtaccagaagctacaaagataaggcttcatgccgaaatcatttctcgtcgatggtcagcacagcctt

SEQ ID NO: 28261 - RNA, 100 nt, synthetic construct
  source 1..100: mol_type = other RNA
aaggctgtgctgaccatcgagtctttgtactctggtaccagaagctacaaagataaggcttcatgccgaaatcatttctcgtcgatggtcagcacagcct

SEQ ID NO: 28262 - RNA, 99 nt, synthetic construct
  source 1..99: mol_type = other RNA
aaggctgtgctgaccatcgagtctttgtactctggtaccagaagctacaaagataaggcttcatgccgaaatcatttctcgtcgatggtcagcacagcc

SEQ ID NO: 28263 - RNA, 98 nt, synthetic construct
  source 1..98: mol_type = other RNA
aaggctgtgctgaccatcgagtctttgtactctggtaccagaagctacaaagataaggcttcatgccgaaatcatttctcgtcgatggtcagcacagc

SEQ ID NO: 28264 - RNA, 97 nt, synthetic construct
  source 1..97: mol_type = other RNA
aaggctgtgctgaccatcgagtctttgtactctggtaccagaagctacaaagataaggcttcatgccgaaatcatttctcgtcgatggtcagcacag

SEQ ID NO: 28265 - RNA, 96 nt, synthetic construct
  source 1..96: mol_type = other RNA
aaggctgtgctgaccatcgagtctttgtactctggtaccagaagctacaaagataaggcttcatgccgaaatcatttctcgtcgatggtcagcaca

SEQ ID NO: 28266 - RNA, 95 nt, synthetic construct; identical to SEQ ID NO: 27158
  source 1..95: mol_type = other RNA

SEQ ID NO: 28267 - RNA, 94 nt, synthetic construct; identical to SEQ ID NO: 27159
  source 1..94: mol_type = other RNA

SEQ ID NO: 28268 - RNA, 93 nt, synthetic construct; identical to SEQ ID NO: 27091
  source 1..93: mol_type = other RNA

SEQ ID NO: 28269 - RNA, 92 nt, synthetic construct; identical to SEQ ID NO: 27001
  source 1..92: mol_type = other RNA

SEQ ID NO: 28270 - RNA, 91 nt, synthetic construct; identical to SEQ ID NO: 27162
  source 1..91: mol_type = other RNA

SEQ ID NO: 28271 - RNA, 90 nt, synthetic construct; identical to SEQ ID NO: 27163
  source 1..90: mol_type = other RNA

SEQ ID NO: 28272 - RNA, 102 nt, synthetic construct
  source 1..102: mol_type = other RNA
aaggctgtgctgaccatcgagtctttgtactctggtaccagaagctacaaagataaggcttcatgccgaaatcactttctcgtcgatggtcagcacagcctt

SEQ ID NO: 28273 - RNA, 101 nt, synthetic construct
  source 1..101: mol_type = other RNA
aaggctgtgctgaccatcgagtctttgtactctggtaccagaagctacaaagataaggcttcatgccgaaatcactttctcgtcgatggtcagcacagcct

SEQ ID NO: 28274 - RNA, 100 nt, synthetic construct
  source 1..100: mol_type = other RNA
aaggctgtgctgaccatcgagtctttgtactctggtaccagaagctacaaagataaggcttcatgccgaaatcactttctcgtcgatggtcagcacagcc

SEQ ID NO: 28275 - RNA, 99 nt, synthetic construct
  source 1..99: mol_type = other RNA
aaggctgtgctgaccatcgagtctttgtactctggtaccagaagctacaaagataaggcttcatgccgaaatcactttctcgtcgatggtcagcacagc

SEQ ID NO: 28276 - RNA, 98 nt, synthetic construct
  source 1..98: mol_type = other RNA
aaggctgtgctgaccatcgagtctttgtactctggtaccagaagctacaaagataaggcttcatgccgaaatcactttctcgtcgatggtcagcacag

SEQ ID NO: 28277 - RNA, 97 nt, synthetic construct; identical to SEQ ID NO: 27164
  source 1..97: mol_type = other RNA

SEQ ID NO: 28278 - RNA, 96 nt, synthetic construct; identical to SEQ ID NO: 27165
  source 1..96: mol_type = other RNA

SEQ ID NO: 28279 - RNA, 95 nt, synthetic construct; identical to SEQ ID NO: 27166
  source 1..95: mol_type = other RNA

SEQ ID NO: 28280 - RNA, 94 nt, synthetic construct; identical to SEQ ID NO: 27167
  source 1..94: mol_type = other RNA

SEQ ID NO: 28281 - RNA, 93 nt, synthetic construct; identical to SEQ ID NO: 27168
  source 1..93: mol_type = other RNA

SEQ ID NO: 28282 - RNA, 92 nt, synthetic construct; identical to SEQ ID NO: 27169
  source 1..92: mol_type = other RNA

SEQ ID NO: 28283 - RNA, 91 nt, synthetic construct; identical to SEQ ID NO: 27170
  source 1..91: mol_type = other RNA

SEQ ID NO: 28284 - RNA, 103 nt, synthetic construct
  source 1..103: mol_type = other RNA
aaggctgtgctgaccatcgagtctttgtactctggtaccagaagctacaaagataaggcttcatgccgaaatcacctttctcgtcgatggtcagcacagcctt

SEQ ID NO: 28285 - RNA, 102 nt, synthetic construct
  source 1..102: mol_type = other RNA
aaggctgtgctgaccatcgagtctttgtactctggtaccagaagctacaaagataaggcttcatgccgaaatcacctttctcgtcgatggtcagcacagcct

SEQ ID NO: 28286 - RNA, 101 nt, synthetic construct
  source 1..101: mol_type = other RNA
aaggctgtgctgaccatcgagtctttgtactctggtaccagaagctacaaagataaggcttcatgccgaaatcacctttctcgtcgatggtcagcacagcc

SEQ ID NO: 28287 - RNA, 100 nt, synthetic construct
  source 1..100: mol_type = other RNA
aaggctgtgctgaccatcgagtctttgtactctggtaccagaagctacaaagataaggcttcatgccgaaatcacctttctcgtcgatggtcagcacagc

SEQ ID NO: 28288 - RNA, 99 nt, synthetic construct
  source 1..99: mol_type = other RNA
aaggctgtgctgaccatcgagtctttgtactctggtaccagaagctacaaagataaggcttcatgccgaaatcacctttctcgtcgatggtcagcacag

SEQ ID NO: 28289 - RNA, 98 nt, synthetic construct
  source 1..98: mol_type = other RNA
aaggctgtgctgaccatcgagtctttgtactctggtaccagaagctacaaagataaggcttcatgccgaaatcacctttctcgtcgatggtcagcaca

SEQ ID NO: 28290 - RNA, 97 nt, synthetic construct
  source 1..97: mol_type = other RNA
aaggctgtgctgaccatcgagtctttgtactctggtaccagaagctacaaagataaggcttcatgccgaaatcacctttctcgtcgatggtcagcac

SEQ ID NO: 28291 - RNA, 96 nt, synthetic construct
  source 1..96: mol_type = other RNA
aaggctgtgctgaccatcgagtctttgtactctggtaccagaagctacaaagataaggcttcatgccgaaatcacctttctcgtcgatggtcagca

SEQ ID NO: 28292 - RNA, 95 nt, synthetic construct
  source 1..95: mol_type = other RNA
aaggctgtgctgaccatcgagtctttgtactctggtaccagaagctacaaagataaggcttcatgccgaaatcacctttctcgtcgatggtcagc

SEQ ID NO: 28293 - RNA, 94 nt, synthetic construct; identical to SEQ ID NO: 27171
  source 1..94: mol_type = other RNA

SEQ ID NO: 28294 - RNA, 93 nt, synthetic construct; identical to SEQ ID NO: 27172
  source 1..93: mol_type = other RNA

SEQ ID NO: 28295 - RNA, 92 nt, synthetic construct; identical to SEQ ID NO: 27173
  source 1..92: mol_type = other RNA

SEQ ID NO: 28296 - RNA, 104 nt, synthetic construct
  source 1..104: mol_type = other RNA
aaggctgtgctgaccatcgagtctttgtactctggtaccagaagctacaaagataaggcttcatgccgaaatcaccctttctcgtcgatggtcagcacagcctt

SEQ ID NO: 28297 - RNA, 103 nt, synthetic construct
  source 1..103: mol_type = other RNA
aaggctgtgctgaccatcgagtctttgtactctggtaccagaagctacaaagataaggcttcatgccgaaatcaccctttctcgtcgatggtcagcacagcct

SEQ ID NO: 28298 - RNA, 102 nt, synthetic construct
  source 1..102: mol_type = other RNA
aaggctgtgctgaccatcgagtctttgtactctggtaccagaagctacaaagataaggcttcatgccgaaatcaccctttctcgtcgatggtcagcacagcc

SEQ ID NO: 28299 - RNA, 101 nt, synthetic construct
  source 1..101: mol_type = other RNA
aaggctgtgctgaccatcgagtctttgtactctggtaccagaagctacaaagataaggcttcatgccgaaatcaccctttctcgtcgatggtcagcacagc

SEQ ID NO: 28300 - RNA, 100 nt, synthetic construct
  source 1..100: mol_type = other RNA
aaggctgtgctgaccatcgagtctttgtactctggtaccagaagctacaaagataaggcttcatgccgaaatcaccctttctcgtcgatggtcagcacag

SEQ ID NO: 28301 - RNA, 99 nt, synthetic construct
  source 1..99: mol_type = other RNA
aaggctgtgctgaccatcgagtctttgtactctggtaccagaagctacaaagataaggcttcatgccgaaatcaccctttctcgtcgatggtcagcaca

SEQ ID NO: 28302 - RNA, 98 nt, synthetic construct
  source 1..98: mol_type = other RNA
aaggctgtgctgaccatcgagtctttgtactctggtaccagaagctacaaagataaggcttcatgccgaaatcaccctttctcgtcgatggtcagcac

SEQ ID NO: 28303 - RNA, 97 nt, synthetic construct
  source 1..97: mol_type = other RNA
aaggctgtgctgaccatcgagtctttgtactctggtaccagaagctacaaagataaggcttcatgccgaaatcaccctttctcgtcgatggtcagca

SEQ ID NO: 28304 - RNA, 96 nt, synthetic construct
  source 1..96: mol_type = other RNA
aaggctgtgctgaccatcgagtctttgtactctggtaccagaagctacaaagataaggcttcatgccgaaatcaccctttctcgtcgatggtcagc

SEQ ID NO: 28305 - RNA, 95 nt, synthetic construct; identical to SEQ ID NO: 27174
  source 1..95: mol_type = other RNA

SEQ ID NO: 28306 - RNA, 94 nt, synthetic construct; identical to SEQ ID NO: 27175
  source 1..94: mol_type = other RNA

SEQ ID NO: 28307 - RNA, 93 nt, synthetic construct; identical to SEQ ID NO: 27176
  source 1..93: mol_type = other RNA

SEQ ID NO: 28308 - RNA, 105 nt, synthetic construct
  source 1..105: mol_type = other RNA
aaggctgtgctgaccatcgagtctttgtactctggtaccagaagctacaaagataaggcttcatgccgaaatcatccctttctcgtcgatggtcagcacagcctt

SEQ ID NO: 28309 - RNA, 104 nt, synthetic construct
  source 1..104: mol_type = other RNA
aaggctgtgctgaccatcgagtctttgtactctggtaccagaagctacaaagataaggcttcatgccgaaatcatccctttctcgtcgatggtcagcacagcct

SEQ ID NO: 28310 - RNA, 103 nt, synthetic construct
  source 1..103: mol_type = other RNA
aaggctgtgctgaccatcgagtctttgtactctggtaccagaagctacaaagataaggcttcatgccgaaatcatccctttctcgtcgatggtcagcacagcc

SEQ ID NO: 28311 - RNA, 102 nt, synthetic construct
  source 1..102: mol_type = other RNA
aaggctgtgctgaccatcgagtctttgtactctggtaccagaagctacaaagataaggcttcatgccgaaatcatccctttctcgtcgatggtcagcacagc

SEQ ID NO: 28312 - RNA, 101 nt, synthetic construct
  source 1..101: mol_type = other RNA
aaggctgtgctgaccatcgagtctttgtactctggtaccagaagctacaaagataaggcttcatgccgaaatcatccctttctcgtcgatggtcagcacag

SEQ ID NO: 28313 - RNA, 100 nt, synthetic construct
  source 1..100: mol_type = other RNA
aaggctgtgctgaccatcgagtctttgtactctggtaccagaagctacaaagataaggcttcatgccgaaatcatccctttctcgtcgatggtcagcaca

SEQ ID NO: 28314 - RNA, 99 nt, synthetic construct
  source 1..99: mol_type = other RNA
aaggctgtgctgaccatcgagtctttgtactctggtaccagaagctacaaagataaggcttcatgccgaaatcatccctttctcgtcgatggtcagcac

SEQ ID NO: 28315 - RNA, 98 nt, synthetic construct
  source 1..98: mol_type = other RNA
aaggctgtgctgaccatcgagtctttgtactctggtaccagaagctacaaagataaggcttcatgccgaaatcatccctttctcgtcgatggtcagca

SEQ ID NO: 28316 - RNA, 97 nt, synthetic construct
  source 1..97: mol_type = other RNA
aaggctgtgctgaccatcgagtctttgtactctggtaccagaagctacaaagataaggcttcatgccgaaatcatccctttctcgtcgatggtcagc

SEQ ID NO: 28317 - RNA, 96 nt, synthetic construct; identical to SEQ ID NO: 27133
  source 1..96: mol_type = other RNA

SEQ ID NO: 28318 - RNA, 95 nt, synthetic construct; identical to SEQ ID NO: 27178
  source 1..95: mol_type = other RNA

SEQ ID NO: 28319 - RNA, 94 nt, synthetic construct; identical to SEQ ID NO: 27179
  source 1..94: mol_type = other RNA

SEQ ID NO: 28320 - RNA, 106 nt, synthetic construct
  source 1..106: mol_type = other RNA
aaggctgtgctgaccatcgagtctttgtactctggtaccagaagctacaaagataaggcttcatgccgaaatcagtccctttctcgtcgatggtcagcacagcctt

SEQ ID NO: 28321 - RNA, 105 nt, synthetic construct
  source 1..105: mol_type = other RNA
aaggctgtgctgaccatcgagtctttgtactctggtaccagaagctacaaagataaggcttcatgccgaaatcagtccctttctcgtcgatggtcagcacagcct

SEQ ID NO: 28322 - RNA, 104 nt, synthetic construct
  source 1..104: mol_type = other RNA
aaggctgtgctgaccatcgagtctttgtactctggtaccagaagctacaaagataaggcttcatgccgaaatcagtccctttctcgtcgatggtcagcacagcc

SEQ ID NO: 28323 - RNA, 103 nt, synthetic construct
  source 1..103: mol_type = other RNA
aaggctgtgctgaccatcgagtctttgtactctggtaccagaagctacaaagataaggcttcatgccgaaatcagtccctttctcgtcgatggtcagcacagc

SEQ ID NO: 28324 - RNA, 102 nt, synthetic construct
  source 1..102: mol_type = other RNA
aaggctgtgctgaccatcgagtctttgtactctggtaccagaagctacaaagataaggcttcatgccgaaatcagtccctttctcgtcgatggtcagcacag

SEQ ID NO: 28325 - RNA, 101 nt, synthetic construct
  source 1..101: mol_type = other RNA
aaggctgtgctgaccatcgagtctttgtactctggtaccagaagctacaaagataaggcttcatgccgaaatcagtccctttctcgtcgatggtcagcaca

SEQ ID NO: 28326 - RNA, 100 nt, synthetic construct
  source 1..100: mol_type = other RNA
aaggctgtgctgaccatcgagtctttgtactctggtaccagaagctacaaagataaggcttcatgccgaaatcagtccctttctcgtcgatggtcagcac

SEQ ID NO: 28327 - RNA, 99 nt, synthetic construct
  source 1..99: mol_type = other RNA
aaggctgtgctgaccatcgagtctttgtactctggtaccagaagctacaaagataaggcttcatgccgaaatcagtccctttctcgtcgatggtcagca

SEQ ID NO: 28328 - RNA, 98 nt, synthetic construct
  source 1..98: mol_type = other RNA
aaggctgtgctgaccatcgagtctttgtactctggtaccagaagctacaaagataaggcttcatgccgaaatcagtccctttctcgtcgatggtcagc

SEQ ID NO: 28329 - RNA, 97 nt, synthetic construct
  source 1..97: mol_type = other RNA
aaggctgtgctgaccatcgagtctttgtactctggtaccagaagctacaaagataaggcttcatgccgaaatcagtccctttctcgtcgatggtcag

SEQ ID NO: 28330 - RNA, 96 nt, synthetic construct
  source 1..96: mol_type = other RNA
aaggctgtgctgaccatcgagtctttgtactctggtaccagaagctacaaagataaggcttcatgccgaaatcagtccctttctcgtcgatggtca

SEQ ID NO: 28331 - RNA, 95 nt, synthetic construct
  source 1..95: mol_type = other RNA
aaggctgtgctgaccatcgagtctttgtactctggtaccagaagctacaaagataaggcttcatgccgaaatcagtccctttctcgtcgatggtc

SEQ ID NO: 28332 - RNA, 107 nt, synthetic construct
  source 1..107: mol_type = other RNA
aaggctgtgctgaccatcgagtctttgtactctggtaccagaagctacaaagataaggcttcatgccgaaatcaagtccctttctcgtcgatggtcagcacagcctt

SEQ ID NO: 28333 - RNA, 106 nt, synthetic construct
  source 1..106: mol_type = other RNA
aaggctgtgctgaccatcgagtctttgtactctggtaccagaagctacaaagataaggcttcatgccgaaatcaagtccctttctcgtcgatggtcagcacagcct

SEQ ID NO: 28334 - RNA, 105 nt, synthetic construct
  source 1..105: mol_type = other RNA
aaggctgtgctgaccatcgagtctttgtactctggtaccagaagctacaaagataaggcttcatgccgaaatcaagtccctttctcgtcgatggtcagcacagcc

SEQ ID NO: 28335 - RNA, 104 nt, synthetic construct
  source 1..104: mol_type = other RNA
aaggctgtgctgaccatcgagtctttgtactctggtaccagaagctacaaagataaggcttcatgccgaaatcaagtccctttctcgtcgatggtcagcacagc

SEQ ID NO: 28336 - RNA, 103 nt, synthetic construct
  source 1..103: mol_type = other RNA
aaggctgtgctgaccatcgagtctttgtactctggtaccagaagctacaaagataaggcttcatgccgaaatcaagtccctttctcgtcgatggtcagcacag

SEQ ID NO: 28337 - RNA, 102 nt, synthetic construct
  source 1..102: mol_type = other RNA
aaggctgtgctgaccatcgagtctttgtactctggtaccagaagctacaaagataaggcttcatgccgaaatcaagtccctttctcgtcgatggtcagcaca

SEQ ID NO: 28338 - RNA, 101 nt, synthetic construct
  source 1..101: mol_type = other RNA
aaggctgtgctgaccatcgagtctttgtactctggtaccagaagctacaaagataaggcttcatgccgaaatcaagtccctttctcgtcgatggtcagcac

SEQ ID NO: 28339 - RNA, 100 nt, synthetic construct
  source 1..100: mol_type = other RNA
aaggctgtgctgaccatcgagtctttgtactctggtaccagaagctacaaagataaggcttcatgccgaaatcaagtccctttctcgtcgatggtcagca

SEQ ID NO: 28340 - RNA, 99 nt, synthetic construct
  source 1..99: mol_type = other RNA
aaggctgtgctgaccatcgagtctttgtactctggtaccagaagctacaaagataaggcttcatgccgaaatcaagtccctttctcgtcgatggtcagc

SEQ ID NO: 28341 - RNA, 98 nt, synthetic construct; identical to SEQ ID NO: 27180
  source 1..98: mol_type = other RNA

SEQ ID NO: 28342 - RNA, 97 nt, synthetic construct
  source 1..97: mol_type = other RNA
aaggctgtgctgaccatcgagtctttgtactctggtaccagaagctacaaagataaggcttcatgccgaaatcaagtccctttctcgtcgatggtca

SEQ ID NO: 28343 - RNA, 96 nt, synthetic construct
  source 1..96: mol_type = other RNA
aaggctgtgctgaccatcgagtctttgtactctggtaccagaagctacaaagataaggcttcatgccgaaatcaagtccctttctcgtcgatggtc

SEQ ID NO: 28344 - RNA, 108 nt, synthetic construct
  source 1..108: mol_type = other RNA
aaggctgtgctgaccatcgagtctttgtactctggtaccagaagctacaaagataaggcttcatgccgaaatcacagtccctttctcgtcgatggtcagcacagcctt

SEQ ID NO: 28345 - RNA, 107 nt, synthetic construct
  source 1..107: mol_type = other RNA
aaggctgtgctgaccatcgagtctttgtactctggtaccagaagctacaaagataaggcttcatgccgaaatcacagtccctttctcgtcgatggtcagcacagcct

SEQ ID NO: 28346 - RNA, 106 nt, synthetic construct
  source 1..106: mol_type = other RNA
aaggctgtgctgaccatcgagtctttgtactctggtaccagaagctacaaagataaggcttcatgccgaaatcacagtccctttctcgtcgatggtcagcacagcc

SEQ ID NO: 28347 - RNA, 105 nt, synthetic construct
  source 1..105: mol_type = other RNA
aaggctgtgctgaccatcgagtctttgtactctggtaccagaagctacaaagataaggcttcatgccgaaatcacagtccctttctcgtcgatggtcagcacagc

SEQ ID NO: 28348 - RNA, 104 nt, synthetic construct
  source 1..104: mol_type = other RNA
aaggctgtgctgaccatcgagtctttgtactctggtaccagaagctacaaagataaggcttcatgccgaaatcacagtccctttctcgtcgatggtcagcacag

SEQ ID NO: 28349 - RNA, 103 nt, synthetic construct
  source 1..103: mol_type = other RNA
aaggctgtgctgaccatcgagtctttgtactctggtaccagaagctacaaagataaggcttcatgccgaaatcacagtccctttctcgtcgatggtcagcaca

SEQ ID NO: 28350 - RNA, 102 nt, synthetic construct
  source 1..102: mol_type = other RNA
aaggctgtgctgaccatcgagtctttgtactctggtaccagaagctacaaagataaggcttcatgccgaaatcacagtccctttctcgtcgatggtcagcac

SEQ ID NO: 28351 - RNA, 101 nt, synthetic construct
  source 1..101: mol_type = other RNA
aaggctgtgctgaccatcgagtctttgtactctggtaccagaagctacaaagataaggcttcatgccgaaatcacagtccctttctcgtcgatggtcagca

SEQ ID NO: 28352 - RNA, 100 nt, synthetic construct
  source 1..100: mol_type = other RNA
aaggctgtgctgaccatcgagtctttgtactctggtaccagaagctacaaagataaggcttcatgccgaaatcacagtccctttctcgtcgatggtcagc

SEQ ID NO: 28353 - RNA, 99 nt, synthetic construct
  source 1..99: mol_type = other RNA
aaggctgtgctgaccatcgagtctttgtactctggtaccagaagctacaaagataaggcttcatgccgaaatcacagtccctttctcgtcgatggtcag

SEQ ID NO: 28354 - RNA, 98 nt, synthetic construct
  source 1..98: mol_type = other RNA
aaggctgtgctgaccatcgagtctttgtactctggtaccagaagctacaaagataaggcttcatgccgaaatcacagtccctttctcgtcgatggtca

SEQ ID NO: 28355 - RNA, 97 nt, synthetic construct
  source 1..97: mol_type = other RNA
aaggctgtgctgaccatcgagtctttgtactctggtaccagaagctacaaagataaggcttcatgccgaaatcacagtccctttctcgtcgatggtc

SEQ ID NO: 28356 - RNA, 109 nt, synthetic construct
  source 1..109: mol_type = other RNA
aaggctgtgctgaccatcgagtctttgtactctggtaccagaagctacaaagataaggcttcatgccgaaatcatcagtccctttctcgtcgatggtcagcacagcctt

SEQ ID NO: 28357 - RNA, 108 nt, synthetic construct
  source 1..108: mol_type = other RNA
aaggctgtgctgaccatcgagtctttgtactctggtaccagaagctacaaagataaggcttcatgccgaaatcatcagtccctttctcgtcgatggtcagcacagcct

SEQ ID NO: 28358 - RNA, 107 nt, synthetic construct
  source 1..107: mol_type = other RNA
aaggctgtgctgaccatcgagtctttgtactctggtaccagaagctacaaagataaggcttcatgccgaaatcatcagtccctttctcgtcgatggtcagcacagcc

SEQ ID NO: 28359 - RNA, 106 nt, synthetic construct
  source 1..106: mol_type = other RNA
aaggctgtgctgaccatcgagtctttgtactctggtaccagaagctacaaagataaggcttcatgccgaaatcatcagtccctttctcgtcgatggtcagcacagc

SEQ ID NO: 28360 - RNA, 105 nt, synthetic construct
  source 1..105: mol_type = other RNA
aaggctgtgctgaccatcgagtctttgtactctggtaccagaagctacaaagataaggcttcatgccgaaatcatcagtccctttctcgtcgatggtcagcacag

SEQ ID NO: 28361 - RNA, 104 nt, synthetic construct
  source 1..104: mol_type = other RNA
aaggctgtgctgaccatcgagtctttgtactctggtaccagaagctacaaagataaggcttcatgccgaaatcatcagtccctttctcgtcgatggtcagcaca

SEQ ID NO: 28362 - RNA, 103 nt, synthetic construct
  source 1..103: mol_type = other RNA
aaggctgtgctgaccatcgagtctttgtactctggtaccagaagctacaaagataaggcttcatgccgaaatcatcagtccctttctcgtcgatggtcagcac

SEQ ID NO: 28363 - RNA, 102 nt, synthetic construct
  source 1..102: mol_type = other RNA
aaggctgtgctgaccatcgagtctttgtactctggtaccagaagctacaaagataaggcttcatgccgaaatcatcagtccctttctcgtcgatggtcagca

SEQ ID NO: 28364 - RNA, 101 nt, synthetic construct; identical to SEQ ID NO: 27181
  source 1..101: mol_type = other RNA

SEQ ID NO: 28365 - RNA, 100 nt, synthetic construct; identical to SEQ ID NO: 27182
  source 1..100: mol_type = other RNA

SEQ ID NO: 28366 - RNA, 99 nt, synthetic construct
  source 1..99: mol_type = other RNA
aaggctgtgctgaccatcgagtctttgtactctggtaccagaagctacaaagataaggcttcatgccgaaatcatcagtccctttctcgtcgatggtca

SEQ ID NO: 28367 - RNA, 98 nt, synthetic construct
  source 1..98: mol_type = other RNA
aaggctgtgctgaccatcgagtctttgtactctggtaccagaagctacaaagataaggcttcatgccgaaatcatcagtccctttctcgtcgatggtc

SEQ ID NO: 28368 - RNA, 110 nt, synthetic construct
  source 1..110: mol_type = other RNA
aaggctgtgctgaccatcgagtctttgtactctggtaccagaagctacaaagataaggcttcatgccgaaatcattcagtccctttctcgtcgatggtcagcacagcctt

SEQ ID NO: 28369 - RNA, 109 nt, synthetic construct
  source 1..109: mol_type = other RNA
aaggctgtgctgaccatcgagtctttgtactctggtaccagaagctacaaagataaggcttcatgccgaaatcattcagtccctttctcgtcgatggtcagcacagcct

SEQ ID NO: 28370 - RNA, 108 nt, synthetic construct
  source 1..108: mol_type = other RNA
aaggctgtgctgaccatcgagtctttgtactctggtaccagaagctacaaagataaggcttcatgccgaaatcattcagtccctttctcgtcgatggtcagcacagcc

SEQ ID NO: 28371 - RNA, 107 nt, synthetic construct
  source 1..107: mol_type = other RNA
aaggctgtgctgaccatcgagtctttgtactctggtaccagaagctacaaagataaggcttcatgccgaaatcattcagtccctttctcgtcgatggtcagcacagc

SEQ ID NO: 28372 - RNA, 106 nt, synthetic construct
  source 1..106: mol_type = other RNA
aaggctgtgctgaccatcgagtctttgtactctggtaccagaagctacaaagataaggcttcatgccgaaatcattcagtccctttctcgtcgatggtcagcacag

SEQ ID NO: 28373 - RNA, 105 nt, synthetic construct
  source 1..105: mol_type = other RNA
aaggctgtgctgaccatcgagtctttgtactctggtaccagaagctacaaagataaggcttcatgccgaaatcattcagtccctttctcgtcgatggtcagcaca

SEQ ID NO: 28374 - RNA, 104 nt, synthetic construct
  source 1..104: mol_type = other RNA
aaggctgtgctgaccatcgagtctttgtactctggtaccagaagctacaaagataaggcttcatgccgaaatcattcagtccctttctcgtcgatggtcagcac

SEQ ID NO: 28375 - RNA, 103 nt, synthetic construct
  source 1..103: mol_type = other RNA
aaggctgtgctgaccatcgagtctttgtactctggtaccagaagctacaaagataaggcttcatgccgaaatcattcagtccctttctcgtcgatggtcagca

SEQ ID NO: 28376 - RNA, 102 nt, synthetic construct
  source 1..102: mol_type = other RNA
aaggctgtgctgaccatcgagtctttgtactctggtaccagaagctacaaagataaggcttcatgccgaaatcattcagtccctttctcgtcgatggtcagc

SEQ ID NO: 28377 - RNA, 101 nt, synthetic construct
  source 1..101: mol_type = other RNA
aaggctgtgctgaccatcgagtctttgtactctggtaccagaagctacaaagataaggcttcatgccgaaatcattcagtccctttctcgtcgatggtcag

SEQ ID NO: 28378 - RNA, 100 nt, synthetic construct
  source 1..100: mol_type = other RNA
aaggctgtgctgaccatcgagtctttgtactctggtaccagaagctacaaagataaggcttcatgccgaaatcattcagtccctttctcgtcgatggtca

SEQ ID NO: 28379 - RNA, 99 nt, synthetic construct
  source 1..99: mol_type = other RNA
aaggctgtgctgaccatcgagtctttgtactctggtaccagaagctacaaagataaggcttcatgccgaaatcattcagtccctttctcgtcgatggtc

SEQ ID NO: 28380 - RNA, 111 nt, synthetic construct
  source 1..111: mol_type = other RNA
aaggctgtgctgaccatcgagtctttgtactctggtaccagaagctacaaagataaggcttcatgccgaaatcacttcagtccctttctcgtcgatggtcagcacagcctt

SEQ ID NO: 28381 - RNA, 110 nt, synthetic construct
  source 1..110: mol_type = other RNA
aaggctgtgctgaccatcgagtctttgtactctggtaccagaagctacaaagataaggcttcatgccgaaatcacttcagtccctttctcgtcgatggtcagcacagcct

SEQ ID NO: 28382 - RNA, 109 nt, synthetic construct
  source 1..109: mol_type = other RNA
aaggctgtgctgaccatcgagtctttgtactctggtaccagaagctacaaagataaggcttcatgccgaaatcacttcagtccctttctcgtcgatggtcagcacagcc

SEQ ID NO: 28383 - RNA, 108 nt, synthetic construct
  source 1..108: mol_type = other RNA
aaggctgtgctgaccatcgagtctttgtactctggtaccagaagctacaaagataaggcttcatgccgaaatcacttcagtccctttctcgtcgatggtcagcacagc

SEQ ID NO: 28384 - RNA, 107 nt, synthetic construct
  source 1..107: mol_type = other RNA
aaggctgtgctgaccatcgagtctttgtactctggtaccagaagctacaaagataaggcttcatgccgaaatcacttcagtccctttctcgtcgatggtcagcacag

SEQ ID NO: 28385 - RNA, 106 nt, synthetic construct
  source 1..106: mol_type = other RNA
aaggctgtgctgaccatcgagtctttgtactctggtaccagaagctacaaagataaggcttcatgccgaaatcacttcagtccctttctcgtcgatggtcagcaca

SEQ ID NO: 28386 - RNA, 105 nt, synthetic construct
  source 1..105: mol_type = other RNA
aaggctgtgctgaccatcgagtctttgtactctggtaccagaagctacaaagataaggcttcatgccgaaatcacttcagtccctttctcgtcgatggtcagcac

SEQ ID NO: 28387 - RNA, 104 nt, synthetic construct
  source 1..104: mol_type = other RNA
aaggctgtgctgaccatcgagtctttgtactctggtaccagaagctacaaagataaggcttcatgccgaaatcacttcagtccctttctcgtcgatggtcagca

SEQ ID NO: 28388 - RNA, 103 nt, synthetic construct; identical to SEQ ID NO: 27183
  source 1..103: mol_type = other RNA

SEQ ID NO: 28389 - RNA, 102 nt, synthetic construct; identical to SEQ ID NO: 27184
  source 1..102: mol_type = other RNA

SEQ ID NO: 28390 - RNA, 101 nt, synthetic construct
  source 1..101: mol_type = other RNA
aaggctgtgctgaccatcgagtctttgtactctggtaccagaagctacaaagataaggcttcatgccgaaatcacttcagtccctttctcgtcgatggtca

SEQ ID NO: 28391 - RNA, 100 nt, synthetic construct
  source 1..100: mol_type = other RNA
aaggctgtgctgaccatcgagtctttgtactctggtaccagaagctacaaagataaggcttcatgccgaaatcacttcagtccctttctcgtcgatggtc

SEQ ID NO: 28392 - RNA, 112 nt, synthetic construct
  source 1..112: mol_type = other RNA
aaggctgtgctgaccatcgagtctttgtactctggtaccagaagctacaaagataaggcttcatgccgaaatcagcttcagtccctttctcgtcgatggtcagcacagcctt

SEQ ID NO: 28393 - RNA, 111 nt, synthetic construct
  source 1..111: mol_type = other RNA
aaggctgtgctgaccatcgagtctttgtactctggtaccagaagctacaaagataaggcttcatgccgaaatcagcttcagtccctttctcgtcgatggtcagcacagcct

SEQ ID NO: 28394 - RNA, 110 nt, synthetic construct
  source 1..110: mol_type = other RNA
aaggctgtgctgaccatcgagtctttgtactctggtaccagaagctacaaagataaggcttcatgccgaaatcagcttcagtccctttctcgtcgatggtcagcacagcc

SEQ ID NO: 28395 - RNA, 109 nt, synthetic construct
  source 1..109: mol_type = other RNA
aaggctgtgctgaccatcgagtctttgtactctggtaccagaagctacaaagataaggcttcatgccgaaatcagcttcagtccctttctcgtcgatggtcagcacagc

SEQ ID NO: 28396 - RNA, 108 nt, synthetic construct
  source 1..108: mol_type = other RNA
aaggctgtgctgaccatcgagtctttgtactctggtaccagaagctacaaagataaggcttcatgccgaaatcagcttcagtccctttctcgtcgatggtcagcacag

SEQ ID NO: 28397 - RNA, 107 nt, synthetic construct
  source 1..107: mol_type = other RNA
aaggctgtgctgaccatcgagtctttgtactctggtaccagaagctacaaagataaggcttcatgccgaaatcagcttcagtccctttctcgtcgatggtcagcaca

SEQ ID NO: 28398 - RNA, 106 nt, synthetic construct
  source 1..106: mol_type = other RNA
aaggctgtgctgaccatcgagtctttgtactctggtaccagaagctacaaagataaggcttcatgccgaaatcagcttcagtccctttctcgtcgatggtcagcac

SEQ ID NO: 28399 - RNA, 105 nt, synthetic construct
  source 1..105: mol_type = other RNA
aaggctgtgctgaccatcgagtctttgtactctggtaccagaagctacaaagataaggcttcatgccgaaatcagcttcagtccctttctcgtcgatggtcagca

SEQ ID NO: 28400 - RNA, 104 nt, synthetic construct
  source 1..104: mol_type = other RNA
aaggctgtgctgaccatcgagtctttgtactctggtaccagaagctacaaagataaggcttcatgccgaaatcagcttcagtccctttctcgtcgatggtcagc

SEQ ID NO: 28401 - RNA, 103 nt, synthetic construct
  source 1..103: mol_type = other RNA
aaggctgtgctgaccatcgagtctttgtactctggtaccagaagctacaaagataaggcttcatgccgaaatcagcttcagtccctttctcgtcgatggtcag

SEQ ID NO: 28402 - RNA, 102 nt, synthetic construct
  source 1..102: mol_type = other RNA
aaggctgtgctgaccatcgagtctttgtactctggtaccagaagctacaaagataaggcttcatgccgaaatcagcttcagtccctttctcgtcgatggtca

SEQ ID NO: 28403 - RNA, 101 nt, synthetic construct
  source 1..101: mol_type = other RNA
aaggctgtgctgaccatcgagtctttgtactctggtaccagaagctacaaagataaggcttcatgccgaaatcagcttcagtccctttctcgtcgatggtc

SEQ ID NO: 28404 - RNA, 113 nt, synthetic construct
  source 1..113: mol_type = other RNA
aaggctgtgctgaccatcgagtctttgtactctggtaccagaagctacaaagataaggcttcatgccgaaatcaagcttcagtccctttctcgtcgatggtcagcacagcctt

SEQ ID NO: 28405 - RNA, 112 nt, synthetic construct
  source 1..112: mol_type = other RNA
aaggctgtgctgaccatcgagtctttgtactctggtaccagaagctacaaagataaggcttcatgccgaaatcaagcttcagtccctttctcgtcgatggtcagcacagcct

SEQ ID NO: 28406 - RNA, 111 nt, synthetic construct
  source 1..111: mol_type = other RNA
aaggctgtgctgaccatcgagtctttgtactctggtaccagaagctacaaagataaggcttcatgccgaaatcaagcttcagtccctttctcgtcgatggtcagcacagcc

SEQ ID NO: 28407 - RNA, 110 nt, synthetic construct
  source 1..110: mol_type = other RNA
aaggctgtgctgaccatcgagtctttgtactctggtaccagaagctacaaagataaggcttcatgccgaaatcaagcttcagtccctttctcgtcgatggtcagcacagc

SEQ ID NO: 28408 - RNA, 109 nt, synthetic construct
  source 1..109: mol_type = other RNA
aaggctgtgctgaccatcgagtctttgtactctggtaccagaagctacaaagataaggcttcatgccgaaatcaagcttcagtccctttctcgtcgatggtcagcacag

SEQ ID NO: 28409 - RNA, 108 nt, synthetic construct
  source 1..108: mol_type = other RNA
aaggctgtgctgaccatcgagtctttgtactctggtaccagaagctacaaagataaggcttcatgccgaaatcaagcttcagtccctttctcgtcgatggtcagcaca

SEQ ID NO: 28410 - RNA, 107 nt, synthetic construct
  source 1..107: mol_type = other RNA
aaggctgtgctgaccatcgagtctttgtactctggtaccagaagctacaaagataaggcttcatgccgaaatcaagcttcagtccctttctcgtcgatggtcagcac

SEQ ID NO: 28411 - RNA, 106 nt, synthetic construct
  source 1..106: mol_type = other RNA
aaggctgtgctgaccatcgagtctttgtactctggtaccagaagctacaaagataaggcttcatgccgaaatcaagcttcagtccctttctcgtcgatggtcagca

SEQ ID NO: 28412 - RNA, 105 nt, synthetic construct
  source 1..105: mol_type = other RNA
aaggctgtgctgaccatcgagtctttgtactctggtaccagaagctacaaagataaggcttcatgccgaaatcaagcttcagtccctttctcgtcgatggtcagc

SEQ ID NO: 28413 - RNA, 104 nt, synthetic construct
  source 1..104: mol_type = other RNA
aaggctgtgctgaccatcgagtctttgtactctggtaccagaagctacaaagataaggcttcatgccgaaatcaagcttcagtccctttctcgtcgatggtcag

SEQ ID NO: 28414 - RNA, 103 nt, synthetic construct
  source 1..103: mol_type = other RNA
aaggctgtgctgaccatcgagtctttgtactctggtaccagaagctacaaagataaggcttcatgccgaaatcaagcttcagtccctttctcgtcgatggtca

SEQ ID NO: 28415 - RNA, 102 nt, synthetic construct
  source 1..102: mol_type = other RNA
aaggctgtgctgaccatcgagtctttgtactctggtaccagaagctacaaagataaggcttcatgccgaaatcaagcttcagtccctttctcgtcgatggtc

SEQ ID NO: 28416 - RNA, 114 nt, synthetic construct
  source 1..114: mol_type = other RNA
aaggctgtgctgaccatcgagtctttgtactctggtaccagaagctacaaagataaggcttcatgccgaaatcacagcttcagtccctttctcgtcgatggtcagcacagcctt

SEQ ID NO: 28417 - RNA, 113 nt, synthetic construct
  source 1..113: mol_type = other RNA
aaggctgtgctgaccatcgagtctttgtactctggtaccagaagctacaaagataaggcttcatgccgaaatcacagcttcagtccctttctcgtcgatggtcagcacagcct

SEQ ID NO: 28418 - RNA, 112 nt, synthetic construct
  source 1..112: mol_type = other RNA
aaggctgtgctgaccatcgagtctttgtactctggtaccagaagctacaaagataaggcttcatgccgaaatcacagcttcagtccctttctcgtcgatggtcagcacagcc

SEQ ID NO: 28419 - RNA, 111 nt, synthetic construct
  source 1..111: mol_type = other RNA
aaggctgtgctgaccatcgagtctttgtactctggtaccagaagctacaaagataaggcttcatgccgaaatcacagcttcagtccctttctcgtcgatggtcagcacagc

SEQ ID NO: 28420 - RNA, 110 nt, synthetic construct
  source 1..110: mol_type = other RNA
aaggctgtgctgaccatcgagtctttgtactctggtaccagaagctacaaagataaggcttcatgccgaaatcacagcttcagtccctttctcgtcgatggtcagcacag

SEQ ID NO: 28421 - RNA, 109 nt, synthetic construct
  source 1..109: mol_type = other RNA
aaggctgtgctgaccatcgagtctttgtactctggtaccagaagctacaaagataaggcttcatgccgaaatcacagcttcagtccctttctcgtcgatggtcagcaca

SEQ ID NO: 28422 - RNA, 108 nt, synthetic construct
  source 1..108: mol_type = other RNA
aaggctgtgctgaccatcgagtctttgtactctggtaccagaagctacaaagataaggcttcatgccgaaatcacagcttcagtccctttctcgtcgatggtcagcac

SEQ ID NO: 28423 - RNA, 107 nt, synthetic construct
  source 1..107: mol_type = other RNA
aaggctgtgctgaccatcgagtctttgtactctggtaccagaagctacaaagataaggcttcatgccgaaatcacagcttcagtccctttctcgtcgatggtcagca

SEQ ID NO: 28424 - RNA, 106 nt, synthetic construct
  source 1..106: mol_type = other RNA
aaggctgtgctgaccatcgagtctttgtactctggtaccagaagctacaaagataaggcttcatgccgaaatcacagcttcagtccctttctcgtcgatggtcagc

SEQ ID NO: 28425 - RNA, 105 nt, synthetic construct
  source 1..105: mol_type = other RNA
aaggctgtgctgaccatcgagtctttgtactctggtaccagaagctacaaagataaggcttcatgccgaaatcacagcttcagtccctttctcgtcgatggtcag

SEQ ID NO: 28426 - RNA, 104 nt, synthetic construct
  source 1..104: mol_type = other RNA
aaggctgtgctgaccatcgagtctttgtactctggtaccagaagctacaaagataaggcttcatgccgaaatcacagcttcagtccctttctcgtcgatggtca

SEQ ID NO: 28427 - RNA, 103 nt, synthetic construct
  source 1..103: mol_type = other RNA
aaggctgtgctgaccatcgagtctttgtactctggtaccagaagctacaaagataaggcttcatgccgaaatcacagcttcagtccctttctcgtcgatggtc

SEQ ID NO: 28428 - RNA, 115 nt, synthetic construct
  source 1..115: mol_type = other RNA
aaggctgtgctgaccatcgagtctttgtactctggtaccagaagctacaaagataaggcttcatgccgaaatcagcagcttcagtccctttctcgtcgatggtcagcacagcctt

SEQ ID NO: 28429 - RNA, 114 nt, synthetic construct
  source 1..114: mol_type = other RNA
aaggctgtgctgaccatcgagtctttgtactctggtaccagaagctacaaagataaggcttcatgccgaaatcagcagcttcagtccctttctcgtcgatggtcagcacagcct

SEQ ID NO: 28430 - RNA, 113 nt, synthetic construct
  source 1..113: mol_type = other RNA
aaggctgtgctgaccatcgagtctttgtactctggtaccagaagctacaaagataaggcttcatgccgaaatcagcagcttcagtccctttctcgtcgatggtcagcacagcc

SEQ ID NO: 28431 - RNA, 112 nt, synthetic construct
  source 1..112: mol_type = other RNA
aaggctgtgctgaccatcgagtctttgtactctggtaccagaagctacaaagataaggcttcatgccgaaatcagcagcttcagtccctttctcgtcgatggtcagcacagc

SEQ ID NO: 28432 - RNA, 111 nt, synthetic construct
  source 1..111: mol_type = other RNA
aaggctgtgctgaccatcgagtctttgtactctggtaccagaagctacaaagataaggcttcatgccgaaatcagcagcttcagtccctttctcgtcgatggtcagcacag

SEQ ID NO: 28433 - RNA, 110 nt, synthetic construct
  source 1..110: mol_type = other RNA
aaggctgtgctgaccatcgagtctttgtactctggtaccagaagctacaaagataaggcttcatgccgaaatcagcagcttcagtccctttctcgtcgatggtcagcaca

SEQ ID NO: 28434 - RNA, 109 nt, synthetic construct
  source 1..109: mol_type = other RNA
aaggctgtgctgaccatcgagtctttgtactctggtaccagaagctacaaagataaggcttcatgccgaaatcagcagcttcagtccctttctcgtcgatggtcagcac

SEQ ID NO: 28435 - RNA, 108 nt, synthetic construct
  source 1..108: mol_type = other RNA
aaggctgtgctgaccatcgagtctttgtactctggtaccagaagctacaaagataaggcttcatgccgaaatcagcagcttcagtccctttctcgtcgatggtcagca

SEQ ID NO: 28436 - RNA, 107 nt, synthetic construct
  source 1..107: mol_type = other RNA
aaggctgtgctgaccatcgagtctttgtactctggtaccagaagctacaaagataaggcttcatgccgaaatcagcagcttcagtccctttctcgtcgatggtcagc

SEQ ID NO: 28437 - RNA, 106 nt, synthetic construct
  source 1..106: mol_type = other RNA
aaggctgtgctgaccatcgagtctttgtactctggtaccagaagctacaaagataaggcttcatgccgaaatcagcagcttcagtccctttctcgtcgatggtcag

SEQ ID NO: 28438 - RNA, 105 nt, synthetic construct
  source 1..105: mol_type = other RNA
aaggctgtgctgaccatcgagtctttgtactctggtaccagaagctacaaagataaggcttcatgccgaaatcagcagcttcagtccctttctcgtcgatggtca

SEQ ID NO: 28439 - RNA, 104 nt, synthetic construct
  source 1..104: mol_type = other RNA
aaggctgtgctgaccatcgagtctttgtactctggtaccagaagctacaaagataaggcttcatgccgaaatcagcagcttcagtccctttctcgtcgatggtc

SEQ ID NO: 28440 - RNA, 116 nt, synthetic construct
  source 1..116: mol_type = other RNA
aaggctgtgctgaccatcgagtctttgtactctggtaccagaagctacaaagataaggcttcatgccgaaatcaagcagcttcagtccctttctcgtcgatggtcagcacagcctt

SEQ ID NO: 28441 - RNA, 115 nt, synthetic construct
  source 1..115: mol_type = other RNA
aaggctgtgctgaccatcgagtctttgtactctggtaccagaagctacaaagataaggcttcatgccgaaatcaagcagcttcagtccctttctcgtcgatggtcagcacagcct

SEQ ID NO: 28442 - RNA, 114 nt, synthetic construct
  source 1..114: mol_type = other RNA
aaggctgtgctgaccatcgagtctttgtactctggtaccagaagctacaaagataaggcttcatgccgaaatcaagcagcttcagtccctttctcgtcgatggtcagcacagcc

SEQ ID NO: 28443 - RNA, 113 nt, synthetic construct
  source 1..113: mol_type = other RNA
aaggctgtgctgaccatcgagtctttgtactctggtaccagaagctacaaagataaggcttcatgccgaaatcaagcagcttcagtccctttctcgtcgatggtcagcacagc

SEQ ID NO: 28444 - RNA, 112 nt, synthetic construct
  source 1..112: mol_type = other RNA
aaggctgtgctgaccatcgagtctttgtactctggtaccagaagctacaaagataaggcttcatgccgaaatcaagcagcttcagtccctttctcgtcgatggtcagcacag

SEQ ID NO: 28445 - RNA, 111 nt, synthetic construct
  source 1..111: mol_type = other RNA
aaggctgtgctgaccatcgagtctttgtactctggtaccagaagctacaaagataaggcttcatgccgaaatcaagcagcttcagtccctttctcgtcgatggtcagcaca

SEQ ID NO: 28446 - RNA, 110 nt, synthetic construct
  source 1..110: mol_type = other RNA
aaggctgtgctgaccatcgagtctttgtactctggtaccagaagctacaaagataaggcttcatgccgaaatcaagcagcttcagtccctttctcgtcgatggtcagcac

SEQ ID NO: 28447 - RNA, 109 nt, synthetic construct
  source 1..109: mol_type = other RNA
aaggctgtgctgaccatcgagtctttgtactctggtaccagaagctacaaagataaggcttcatgccgaaatcaagcagcttcagtccctttctcgtcgatggtcagca

SEQ ID NO: 28448 - RNA, 108 nt, synthetic construct
  source 1..108: mol_type = other RNA
aaggctgtgctgaccatcgagtctttgtactctggtaccagaagctacaaagataaggcttcatgccgaaatcaagcagcttcagtccctttctcgtcgatggtcagc

SEQ ID NO: 28449 - RNA, 107 nt, synthetic construct
  source 1..107: mol_type = other RNA
aaggctgtgctgaccatcgagtctttgtactctggtaccagaagctacaaagataaggcttcatgccgaaatcaagcagcttcagtccctttctcgtcgatggtcag

SEQ ID NO: 28450 - RNA, 106 nt, synthetic construct
  source 1..106: mol_type = other RNA
aaggctgtgctgaccatcgagtctttgtactctggtaccagaagctacaaagataaggcttcatgccgaaatcaagcagcttcagtccctttctcgtcgatggtca

SEQ ID NO: 28451 - RNA, 105 nt, synthetic construct
  source 1..105: mol_type = other RNA
aaggctgtgctgaccatcgagtctttgtactctggtaccagaagctacaaagataaggcttcatgccgaaatcaagcagcttcagtccctttctcgtcgatggtc

SEQ ID NO: 28452 - RNA, 117 nt, synthetic construct
  source 1..117: mol_type = other RNA
aaggctgtgctgaccatcgagtctttgtactctggtaccagaagctacaaagataaggcttcatgccgaaatcacagcagcttcagtccctttctcgtcgatggtcagcacagcctt

SEQ ID NO: 28453 - RNA, 116 nt, synthetic construct
  source 1..116: mol_type = other RNA
aaggctgtgctgaccatcgagtctttgtactctggtaccagaagctacaaagataaggcttcatgccgaaatcacagcagcttcagtccctttctcgtcgatggtcagcacagcct

SEQ ID NO: 28454 - RNA, 115 nt, synthetic construct
  source 1..115: mol_type = other RNA
aaggctgtgctgaccatcgagtctttgtactctggtaccagaagctacaaagataaggcttcatgccgaaatcacagcagcttcagtccctttctcgtcgatggtcagcacagcc

SEQ ID NO: 28455 - RNA, 114 nt, synthetic construct
  source 1..114: mol_type = other RNA
aaggctgtgctgaccatcgagtctttgtactctggtaccagaagctacaaagataaggcttcatgccgaaatcacagcagcttcagtccctttctcgtcgatggtcagcacagc

SEQ ID NO: 28456 - RNA, 113 nt, synthetic construct
  source 1..113: mol_type = other RNA
aaggctgtgctgaccatcgagtctttgtactctggtaccagaagctacaaagataaggcttcatgccgaaatcacagcagcttcagtccctttctcgtcgatggtcagcacag

SEQ ID NO: 28457 - RNA, 112 nt, synthetic construct
  source 1..112: mol_type = other RNA
aaggctgtgctgaccatcgagtctttgtactctggtaccagaagctacaaagataaggcttcatgccgaaatcacagcagcttcagtccctttctcgtcgatggtcagcaca

SEQ ID NO: 28458 - RNA, 111 nt, synthetic construct
  source 1..111: mol_type = other RNA
aaggctgtgctgaccatcgagtctttgtactctggtaccagaagctacaaagataaggcttcatgccgaaatcacagcagcttcagtccctttctcgtcgatggtcagcac

SEQ ID NO: 28459 - RNA, 110 nt, synthetic construct
  source 1..110: mol_type = other RNA
aaggctgtgctgaccatcgagtctttgtactctggtaccagaagctacaaagataaggcttcatgccgaaatcacagcagcttcagtccctttctcgtcgatggtcagca

SEQ ID NO: 28460 - RNA, 109 nt, synthetic construct
  source 1..109: mol_type = other RNA
aaggctgtgctgaccatcgagtctttgtactctggtaccagaagctacaaagataaggcttcatgccgaaatcacagcagcttcagtccctttctcgtcgatggtcagc

SEQ ID NO: 28461 - RNA, 108 nt, synthetic construct
  source 1..108: mol_type = other RNA
aaggctgtgctgaccatcgagtctttgtactctggtaccagaagctacaaagataaggcttcatgccgaaatcacagcagcttcagtccctttctcgtcgatggtcag

SEQ ID NO: 28462 - RNA, 107 nt, synthetic construct
  source 1..107: mol_type = other RNA
aaggctgtgctgaccatcgagtctttgtactctggtaccagaagctacaaagataaggcttcatgccgaaatcacagcagcttcagtccctttctcgtcgatggtca

SEQ ID NO: 28463 - RNA, 106 nt, synthetic construct
  source 1..106: mol_type = other RNA
aaggctgtgctgaccatcgagtctttgtactctggtaccagaagctacaaagataaggcttcatgccgaaatcacagcagcttcagtccctttctcgtcgatggtc

SEQ ID NO: 28464 - RNA, 118 nt, synthetic construct
  source 1..118: mol_type = other RNA
aaggctgtgctgaccatcgagtctttgtactctggtaccagaagctacaaagataaggcttcatgccgaaatcaccagcagcttcagtccctttctcgtcgatggtcagcacagcctt

SEQ ID NO: 28465 - RNA, 117 nt, synthetic construct
  source 1..117: mol_type = other RNA
aaggctgtgctgaccatcgagtctttgtactctggtaccagaagctacaaagataaggcttcatgccgaaatcaccagcagcttcagtccctttctcgtcgatggtcagcacagcct

SEQ ID NO: 28466 - RNA, 116 nt, synthetic construct
  source 1..116: mol_type = other RNA
aaggctgtgctgaccatcgagtctttgtactctggtaccagaagctacaaagataaggcttcatgccgaaatcaccagcagcttcagtccctttctcgtcgatggtcagcacagcc

SEQ ID NO: 28467 - RNA, 115 nt, synthetic construct
  source 1..115: mol_type = other RNA
aaggctgtgctgaccatcgagtctttgtactctggtaccagaagctacaaagataaggcttcatgccgaaatcaccagcagcttcagtccctttctcgtcgatggtcagcacagc

SEQ ID NO: 28468 - RNA, 114 nt, synthetic construct
  source 1..114: mol_type = other RNA
aaggctgtgctgaccatcgagtctttgtactctggtaccagaagctacaaagataaggcttcatgccgaaatcaccagcagcttcagtccctttctcgtcgatggtcagcacag

SEQ ID NO: 28469 - RNA, 113 nt, synthetic construct
  source 1..113: mol_type = other RNA
aaggctgtgctgaccatcgagtctttgtactctggtaccagaagctacaaagataaggcttcatgccgaaatcaccagcagcttcagtccctttctcgtcgatggtcagcaca

SEQ ID NO: 28470 - RNA, 112 nt, synthetic construct
  source 1..112: mol_type = other RNA
aaggctgtgctgaccatcgagtctttgtactctggtaccagaagctacaaagataaggcttcatgccgaaatcaccagcagcttcagtccctttctcgtcgatggtcagcac

SEQ ID NO: 28471 - RNA, 111 nt, synthetic construct
  source 1..111: mol_type = other RNA
aaggctgtgctgaccatcgagtctttgtactctggtaccagaagctacaaagataaggcttcatgccgaaatcaccagcagcttcagtccctttctcgtcgatggtcagca

SEQ ID NO: 28472 - RNA, 110 nt, synthetic construct
  source 1..110: mol_type = other RNA
aaggctgtgctgaccatcgagtctttgtactctggtaccagaagctacaaagataaggcttcatgccgaaatcaccagcagcttcagtccctttctcgtcgatggtcagc

SEQ ID NO: 28473 - RNA, 109 nt, synthetic construct
  source 1..109: mol_type = other RNA
aaggctgtgctgaccatcgagtctttgtactctggtaccagaagctacaaagataaggcttcatgccgaaatcaccagcagcttcagtccctttctcgtcgatggtcag

SEQ ID NO: 28474 - RNA, 108 nt, synthetic construct
  source 1..108: mol_type = other RNA
aaggctgtgctgaccatcgagtctttgtactctggtaccagaagctacaaagataaggcttcatgccgaaatcaccagcagcttcagtccctttctcgtcgatggtca

SEQ ID NO: 28475 - RNA, 107 nt, synthetic construct
  source 1..107: mol_type = other RNA
aaggctgtgctgaccatcgagtctttgtactctggtaccagaagctacaaagataaggcttcatgccgaaatcaccagcagcttcagtccctttctcgtcgatggtc

SEQ ID NO: 28476 - RNA, 119 nt, synthetic construct
  source 1..119: mol_type = other RNA
aaggctgtgctgaccatcgagtctttgtactctggtaccagaagctacaaagataaggcttcatgccgaaatcacccagcagcttcagtccctttctcgtcgatggtcagcacagcctt

SEQ ID NO: 28477 - RNA, 118 nt, synthetic construct
  source 1..118: mol_type = other RNA
aaggctgtgctgaccatcgagtctttgtactctggtaccagaagctacaaagataaggcttcatgccgaaatcacccagcagcttcagtccctttctcgtcgatggtcagcacagcct

SEQ ID NO: 28478 - RNA, 117 nt, synthetic construct
  source 1..117: mol_type = other RNA
aaggctgtgctgaccatcgagtctttgtactctggtaccagaagctacaaagataaggcttcatgccgaaatcacccagcagcttcagtccctttctcgtcgatggtcagcacagcc

SEQ ID NO: 28479 - RNA, 116 nt, synthetic construct
  source 1..116: mol_type = other RNA
aaggctgtgctgaccatcgagtctttgtactctggtaccagaagctacaaagataaggcttcatgccgaaatcacccagcagcttcagtccctttctcgtcgatggtcagcacagc

SEQ ID NO: 28480 - RNA, 115 nt, synthetic construct
  source 1..115: mol_type = other RNA
aaggctgtgctgaccatcgagtctttgtactctggtaccagaagctacaaagataaggcttcatgccgaaatcacccagcagcttcagtccctttctcgtcgatggtcagcacag

SEQ ID NO: 28481 - RNA, 114 nt, synthetic construct
  source 1..114: mol_type = other RNA
aaggctgtgctgaccatcgagtctttgtactctggtaccagaagctacaaagataaggcttcatgccgaaatcacccagcagcttcagtccctttctcgtcgatggtcagcaca

SEQ ID NO: 28482 - RNA, 113 nt, synthetic construct
  source 1..113: mol_type = other RNA
aaggctgtgctgaccatcgagtctttgtactctggtaccagaagctacaaagataaggcttcatgccgaaatcacccagcagcttcagtccctttctcgtcgatggtcagcac

SEQ ID NO: 28483 - RNA, 112 nt, synthetic construct
  source 1..112: mol_type = other RNA
aaggctgtgctgaccatcgagtctttgtactctggtaccagaagctacaaagataaggcttcatgccgaaatcacccagcagcttcagtccctttctcgtcgatggtcagca

SEQ ID NO: 28484 - RNA, 111 nt, synthetic construct
  source 1..111: mol_type = other RNA
aaggctgtgctgaccatcgagtctttgtactctggtaccagaagctacaaagataaggcttcatgccgaaatcacccagcagcttcagtccctttctcgtcgatggtcagc

SEQ ID NO: 28485 - RNA, 110 nt, synthetic construct
  source 1..110: mol_type = other RNA
aaggctgtgctgaccatcgagtctttgtactctggtaccagaagctacaaagataaggcttcatgccgaaatcacccagcagcttcagtccctttctcgtcgatggtcag

SEQ ID NO: 28486 - RNA, 109 nt, synthetic construct
  source 1..109: mol_type = other RNA
aaggctgtgctgaccatcgagtctttgtactctggtaccagaagctacaaagataaggcttcatgccgaaatcacccagcagcttcagtccctttctcgtcgatggtca

SEQ ID NO: 28487 - RNA, 108 nt, synthetic construct
  source 1..108: mol_type = other RNA
aaggctgtgctgaccatcgagtctttgtactctggtaccagaagctacaaagataaggcttcatgccgaaatcacccagcagcttcagtccctttctcgtcgatggtc

SEQ ID NO: 28488 - RNA, 120 nt, synthetic construct
  source 1..120: mol_type = other RNA
aaggctgtgctgaccatcgagtctttgtactctggtaccagaagctacaaagataaggcttcatgccgaaatcaccccagcagcttcagtccctttctcgtcgatggtcagcacagcctt

SEQ ID NO: 28489 - RNA, 119 nt, synthetic construct
  source 1..119: mol_type = other RNA
aaggctgtgctgaccatcgagtctttgtactctggtaccagaagctacaaagataaggcttcatgccgaaatcaccccagcagcttcagtccctttctcgtcgatggtcagcacagcct

SEQ ID NO: 28490 - RNA, 118 nt, synthetic construct
  source 1..118: mol_type = other RNA
aaggctgtgctgaccatcgagtctttgtactctggtaccagaagctacaaagataaggcttcatgccgaaatcaccccagcagcttcagtccctttctcgtcgatggtcagcacagcc

SEQ ID NO: 28491 - RNA, 117 nt, synthetic construct
  source 1..117: mol_type = other RNA
aaggctgtgctgaccatcgagtctttgtactctggtaccagaagctacaaagataaggcttcatgccgaaatcaccccagcagcttcagtccctttctcgtcgatggtcagcacagc

SEQ ID NO: 28492 - RNA, 116 nt, synthetic construct
  source 1..116: mol_type = other RNA
aaggctgtgctgaccatcgagtctttgtactctggtaccagaagctacaaagataaggcttcatgccgaaatcaccccagcagcttcagtccctttctcgtcgatggtcagcacag

SEQ ID NO: 28493 - RNA, 115 nt, synthetic construct
  source 1..115: mol_type = other RNA
aaggctgtgctgaccatcgagtctttgtactctggtaccagaagctacaaagataaggcttcatgccgaaatcaccccagcagcttcagtccctttctcgtcgatggtcagcaca

SEQ ID NO: 28494 - RNA, 114 nt, synthetic construct
  source 1..114: mol_type = other RNA
aaggctgtgctgaccatcgagtctttgtactctggtaccagaagctacaaagataaggcttcatgccgaaatcaccccagcagcttcagtccctttctcgtcgatggtcagcac

SEQ ID NO: 28495 - RNA, 113 nt, synthetic construct
  source 1..113: mol_type = other RNA
aaggctgtgctgaccatcgagtctttgtactctggtaccagaagctacaaagataaggcttcatgccgaaatcaccccagcagcttcagtccctttctcgtcgatggtcagca

SEQ ID NO: 28496 - RNA, 112 nt, synthetic construct
  source 1..112: mol_type = other RNA
aaggctgtgctgaccatcgagtctttgtactctggtaccagaagctacaaagataaggcttcatgccgaaatcaccccagcagcttcagtccctttctcgtcgatggtcagc

SEQ ID NO: 28497 - RNA, 111 nt, synthetic construct
  source 1..111: mol_type = other RNA
aaggctgtgctgaccatcgagtctttgtactctggtaccagaagctacaaagataaggcttcatgccgaaatcaccccagcagcttcagtccctttctcgtcgatggtcag

SEQ ID NO: 28498 - RNA, 110 nt, synthetic construct
  source 1..110: mol_type = other RNA
aaggctgtgctgaccatcgagtctttgtactctggtaccagaagctacaaagataaggcttcatgccgaaatcaccccagcagcttcagtccctttctcgtcgatggtca

SEQ ID NO: 28499 - RNA, 109 nt, synthetic construct
  source 1..109: mol_type = other RNA
aaggctgtgctgaccatcgagtctttgtactctggtaccagaagctacaaagataaggcttcatgccgaaatcaccccagcagcttcagtccctttctcgtcgatggtc

SEQ ID NO: 28500 - RNA, 121 nt, synthetic construct
  source 1..121: mol_type = other RNA
aaggctgtgctgaccatcgagtctttgtactctggtaccagaagctacaaagataaggcttcatgccgaaatcagccccagcagcttcagtccctttctcgtcgatggtcagcacagcctt

SEQ ID NO: 28501 - RNA, 120 nt, synthetic construct
  source 1..120: mol_type = other RNA
aaggctgtgctgaccatcgagtctttgtactctggtaccagaagctacaaagataaggcttcatgccgaaatcagccccagcagcttcagtccctttctcgtcgatggtcagcacagcct

SEQ ID NO: 28502 - RNA, 119 nt, synthetic construct
  source 1..119: mol_type = other RNA
aaggctgtgctgaccatcgagtctttgtactctggtaccagaagctacaaagataaggcttcatgccgaaatcagccccagcagcttcagtccctttctcgtcgatggtcagcacagcc

SEQ ID NO: 28503 - RNA, 118 nt, synthetic construct
  source 1..118: mol_type = other RNA
aaggctgtgctgaccatcgagtctttgtactctggtaccagaagctacaaagataaggcttcatgccgaaatcagccccagcagcttcagtccctttctcgtcgatggtcagcacagc

SEQ ID NO: 28504 - RNA, 117 nt, synthetic construct
  source 1..117: mol_type = other RNA
aaggctgtgctgaccatcgagtctttgtactctggtaccagaagctacaaagataaggcttcatgccgaaatcagccccagcagcttcagtccctttctcgtcgatggtcagcacag

SEQ ID NO: 28505 - RNA, 116 nt, synthetic construct
  source 1..116: mol_type = other RNA
aaggctgtgctgaccatcgagtctttgtactctggtaccagaagctacaaagataaggcttcatgccgaaatcagccccagcagcttcagtccctttctcgtcgatggtcagcaca

SEQ ID NO: 28506 - RNA, 115 nt, synthetic construct
  source 1..115: mol_type = other RNA
aaggctgtgctgaccatcgagtctttgtactctggtaccagaagctacaaagataaggcttcatgccgaaatcagccccagcagcttcagtccctttctcgtcgatggtcagcac

SEQ ID NO: 28507 - RNA, 114 nt, synthetic construct
  source 1..114: mol_type = other RNA
aaggctgtgctgaccatcgagtctttgtactctggtaccagaagctacaaagataaggcttcatgccgaaatcagccccagcagcttcagtccctttctcgtcgatggtcagca

SEQ ID NO: 28508 - RNA, 113 nt, synthetic construct
  source 1..113: mol_type = other RNA
aaggctgtgctgaccatcgagtctttgtactctggtaccagaagctacaaagataaggcttcatgccgaaatcagccccagcagcttcagtccctttctcgtcgatggtcagc

SEQ ID NO: 28509 - RNA, 112 nt, synthetic construct
  source 1..112: mol_type = other RNA
aaggctgtgctgaccatcgagtctttgtactctggtaccagaagctacaaagataaggcttcatgccgaaatcagccccagcagcttcagtccctttctcgtcgatggtcag

SEQ ID NO: 28510 - RNA, 111 nt, synthetic construct
  source 1..111: mol_type = other RNA
aaggctgtgctgaccatcgagtctttgtactctggtaccagaagctacaaagataaggcttcatgccgaaatcagccccagcagcttcagtccctttctcgtcgatggtca

SEQ ID NO: 28511 - RNA, 110 nt, synthetic construct
  source 1..110: mol_type = other RNA
aaggctgtgctgaccatcgagtctttgtactctggtaccagaagctacaaagataaggcttcatgccgaaatcagccccagcagcttcagtccctttctcgtcgatggtc

SEQ ID NO: 28512 - RNA, 122 nt, synthetic construct
  source 1..122: mol_type = other RNA
aaggctgtgctgaccatcgagtctttgtactctggtaccagaagctacaaagataaggcttcatgccgaaatcaggccccagcagcttcagtccctttctcgtcgatggtcagcacagcctt

SEQ ID NO: 28513 - RNA, 121 nt, synthetic construct
  source 1..121: mol_type = other RNA
aaggctgtgctgaccatcgagtctttgtactctggtaccagaagctacaaagataaggcttcatgccgaaatcaggccccagcagcttcagtccctttctcgtcgatggtcagcacagcct

SEQ ID NO: 28514 - RNA, 120 nt, synthetic construct
  source 1..120: mol_type = other RNA
aaggctgtgctgaccatcgagtctttgtactctggtaccagaagctacaaagataaggcttcatgccgaaatcaggccccagcagcttcagtccctttctcgtcgatggtcagcacagcc

SEQ ID NO: 28515 - RNA, 119 nt, synthetic construct
  source 1..119: mol_type = other RNA
aaggctgtgctgaccatcgagtctttgtactctggtaccagaagctacaaagataaggcttcatgccgaaatcaggccccagcagcttcagtccctttctcgtcgatggtcagcacagc

SEQ ID NO: 28516 - RNA, 118 nt, synthetic construct
  source 1..118: mol_type = other RNA
aaggctgtgctgaccatcgagtctttgtactctggtaccagaagctacaaagataaggcttcatgccgaaatcaggccccagcagcttcagtccctttctcgtcgatggtcagcacag

SEQ ID NO: 28517 - RNA, 117 nt, synthetic construct
  source 1..117: mol_type = other RNA
aaggctgtgctgaccatcgagtctttgtactctggtaccagaagctacaaagataaggcttcatgccgaaatcaggccccagcagcttcagtccctttctcgtcgatggtcagcaca

SEQ ID NO: 28518 - RNA, 116 nt, synthetic construct
  source 1..116: mol_type = other RNA
aaggctgtgctgaccatcgagtctttgtactctggtaccagaagctacaaagataaggcttcatgccgaaatcaggccccagcagcttcagtccctttctcgtcgatggtcagcac

SEQ ID NO: 28519 - RNA, 115 nt, synthetic construct
  source 1..115: mol_type = other RNA
aaggctgtgctgaccatcgagtctttgtactctggtaccagaagctacaaagataaggcttcatgccgaaatcaggccccagcagcttcagtccctttctcgtcgatggtcagca

SEQ ID NO: 28520 - RNA, 114 nt, synthetic construct
  source 1..114: mol_type = other RNA
aaggctgtgctgaccatcgagtctttgtactctggtaccagaagctacaaagataaggcttcatgccgaaatcaggccccagcagcttcagtccctttctcgtcgatggtcagc

SEQ ID NO: 28521 - RNA, 113 nt, synthetic construct
  source 1..113: mol_type = other RNA
aaggctgtgctgaccatcgagtctttgtactctggtaccagaagctacaaagataaggcttcatgccgaaatcaggccccagcagcttcagtccctttctcgtcgatggtcag

SEQ ID NO: 28522 - RNA, 112 nt, synthetic construct
  source 1..112: mol_type = other RNA
aaggctgtgctgaccatcgagtctttgtactctggtaccagaagctacaaagataaggcttcatgccgaaatcaggccccagcagcttcagtccctttctcgtcgatggtca

SEQ ID NO: 28523 - RNA, 111 nt, synthetic construct
  source 1..111: mol_type = other RNA
aaggctgtgctgaccatcgagtctttgtactctggtaccagaagctacaaagataaggcttcatgccgaaatcaggccccagcagcttcagtccctttctcgtcgatggtc

SEQ ID NO: 28524 - RNA, 123 nt, synthetic construct
  source 1..123: mol_type = other RNA
aaggctgtgctgaccatcgagtctttgtactctggtaccagaagctacaaagataaggcttcatgccgaaatcatggccccagcagcttcagtccctttctcgtcgatggtcagcacagcctt

SEQ ID NO: 28525 - RNA, 122 nt, synthetic construct
  source 1..122: mol_type = other RNA
aaggctgtgctgaccatcgagtctttgtactctggtaccagaagctacaaagataaggcttcatgccgaaatcatggccccagcagcttcagtccctttctcgtcgatggtcagcacagcct

SEQ ID NO: 28526 - RNA, 121 nt, synthetic construct
  source 1..121: mol_type = other RNA
aaggctgtgctgaccatcgagtctttgtactctggtaccagaagctacaaagataaggcttcatgccgaaatcatggccccagcagcttcagtccctttctcgtcgatggtcagcacagcc

SEQ ID NO: 28527 - RNA, 120 nt, synthetic construct
  source 1..120: mol_type = other RNA
aaggctgtgctgaccatcgagtctttgtactctggtaccagaagctacaaagataaggcttcatgccgaaatcatggccccagcagcttcagtccctttctcgtcgatggtcagcacagc

SEQ ID NO: 28528 - RNA, 119 nt, synthetic construct
  source 1..119: mol_type = other RNA
aaggctgtgctgaccatcgagtctttgtactctggtaccagaagctacaaagataaggcttcatgccgaaatcatggccccagcagcttcagtccctttctcgtcgatggtcagcacag

SEQ ID NO: 28529 - RNA, 118 nt, synthetic construct
  source 1..118: mol_type = other RNA
aaggctgtgctgaccatcgagtctttgtactctggtaccagaagctacaaagataaggcttcatgccgaaatcatggccccagcagcttcagtccctttctcgtcgatggtcagcaca

SEQ ID NO: 28530 - RNA, 117 nt, synthetic construct
  source 1..117: mol_type = other RNA
aaggctgtgctgaccatcgagtctttgtactctggtaccagaagctacaaagataaggcttcatgccgaaatcatggccccagcagcttcagtccctttctcgtcgatggtcagcac

SEQ ID NO: 28531 - RNA, 116 nt, synthetic construct
  source 1..116: mol_type = other RNA
aaggctgtgctgaccatcgagtctttgtactctggtaccagaagctacaaagataaggcttcatgccgaaatcatggccccagcagcttcagtccctttctcgtcgatggtcagca

SEQ ID NO: 28532 - RNA, 115 nt, synthetic construct
  source 1..115: mol_type = other RNA
aaggctgtgctgaccatcgagtctttgtactctggtaccagaagctacaaagataaggcttcatgccgaaatcatggccccagcagcttcagtccctttctcgtcgatggtcagc

SEQ ID NO: 28533 - RNA, 114 nt, synthetic construct
  source 1..114: mol_type = other RNA
aaggctgtgctgaccatcgagtctttgtactctggtaccagaagctacaaagataaggcttcatgccgaaatcatggccccagcagcttcagtccctttctcgtcgatggtcag

SEQ ID NO: 28534 - RNA, 113 nt, synthetic construct
  source 1..113: mol_type = other RNA
aaggctgtgctgaccatcgagtctttgtactctggtaccagaagctacaaagataaggcttcatgccgaaatcatggccccagcagcttcagtccctttctcgtcgatggtca

SEQ ID NO: 28535 - RNA, 112 nt, synthetic construct
  source 1..112: mol_type = other RNA
aaggctgtgctgaccatcgagtctttgtactctggtaccagaagctacaaagataaggcttcatgccgaaatcatggccccagcagcttcagtccctttctcgtcgatggtc

SEQ ID NO: 28536 - RNA, 124 nt, synthetic construct
  source 1..124: mol_type = other RNA
aaggctgtgctgaccatcgagtctttgtactctggtaccagaagctacaaagataaggcttcatgccgaaatcaatggccccagcagcttcagtccctttctcgtcgatggtcagcacagcctt

SEQ ID NO: 28537 - RNA, 123 nt, synthetic construct
  source 1..123: mol_type = other RNA
aaggctgtgctgaccatcgagtctttgtactctggtaccagaagctacaaagataaggcttcatgccgaaatcaatggccccagcagcttcagtccctttctcgtcgatggtcagcacagcct

SEQ ID NO: 28538 - RNA, 122 nt, synthetic construct
  source 1..122: mol_type = other RNA
aaggctgtgctgaccatcgagtctttgtactctggtaccagaagctacaaagataaggcttcatgccgaaatcaatggccccagcagcttcagtccctttctcgtcgatggtcagcacagcc

SEQ ID NO: 28539 - RNA, 121 nt, synthetic construct
  source 1..121: mol_type = other RNA
aaggctgtgctgaccatcgagtctttgtactctggtaccagaagctacaaagataaggcttcatgccgaaatcaatggccccagcagcttcagtccctttctcgtcgatggtcagcacagc

SEQ ID NO: 28540 - RNA, 120 nt, synthetic construct
  source 1..120: mol_type = other RNA
aaggctgtgctgaccatcgagtctttgtactctggtaccagaagctacaaagataaggcttcatgccgaaatcaatggccccagcagcttcagtccctttctcgtcgatggtcagcacag

SEQ ID NO: 28541 - RNA, 119 nt, synthetic construct
  source 1..119: mol_type = other RNA
aaggctgtgctgaccatcgagtctttgtactctggtaccagaagctacaaagataaggcttcatgccgaaatcaatggccccagcagcttcagtccctttctcgtcgatggtcagcaca

SEQ ID NO: 28542 - RNA, 118 nt, synthetic construct
  source 1..118: mol_type = other RNA
aaggctgtgctgaccatcgagtctttgtactctggtaccagaagctacaaagataaggcttcatgccgaaatcaatggccccagcagcttcagtccctttctcgtcgatggtcagcac

SEQ ID NO: 28543 - RNA, 117 nt, synthetic construct
  source 1..117: mol_type = other RNA
aaggctgtgctgaccatcgagtctttgtactctggtaccagaagctacaaagataaggcttcatgccgaaatcaatggccccagcagcttcagtccctttctcgtcgatggtcagca

SEQ ID NO: 28544 - RNA, 116 nt, synthetic construct
  source 1..116: mol_type = other RNA
aaggctgtgctgaccatcgagtctttgtactctggtaccagaagctacaaagataaggcttcatgccgaaatcaatggccccagcagcttcagtccctttctcgtcgatggtcagc

SEQ ID NO: 28545 - RNA, 115 nt, synthetic construct
  source 1..115: mol_type = other RNA
aaggctgtgctgaccatcgagtctttgtactctggtaccagaagctacaaagataaggcttcatgccgaaatcaatggccccagcagcttcagtccctttctcgtcgatggtcag

SEQ ID NO: 28546 - RNA, 114 nt, synthetic construct
  source 1..114: mol_type = other RNA
aaggctgtgctgaccatcgagtctttgtactctggtaccagaagctacaaagataaggcttcatgccgaaatcaatggccccagcagcttcagtccctttctcgtcgatggtca

SEQ ID NO: 28547 - RNA, 113 nt, synthetic construct
  source 1..113: mol_type = other RNA
aaggctgtgctgaccatcgagtctttgtactctggtaccagaagctacaaagataaggcttcatgccgaaatcaatggccccagcagcttcagtccctttctcgtcgatggtc

SEQ ID NO: 28548 - RNA, 125 nt, synthetic construct
  source 1..125: mol_type = other RNA
aaggctgtgctgaccatcgagtctttgtactctggtaccagaagctacaaagataaggcttcatgccgaaatcacatggccccagcagcttcagtccctttctcgtcgatggtcagcacagcctt

SEQ ID NO: 28549 - RNA, 124 nt, synthetic construct
  source 1..124: mol_type = other RNA
aaggctgtgctgaccatcgagtctttgtactctggtaccagaagctacaaagataaggcttcatgccgaaatcacatggccccagcagcttcagtccctttctcgtcgatggtcagcacagcct

SEQ ID NO: 28550 - RNA, 123 nt, synthetic construct
  source 1..123: mol_type = other RNA
aaggctgtgctgaccatcgagtctttgtactctggtaccagaagctacaaagataaggcttcatgccgaaatcacatggccccagcagcttcagtccctttctcgtcgatggtcagcacagcc

SEQ ID NO: 28551 - RNA, 122 nt, synthetic construct
  source 1..122: mol_type = other RNA
aaggctgtgctgaccatcgagtctttgtactctggtaccagaagctacaaagataaggcttcatgccgaaatcacatggccccagcagcttcagtccctttctcgtcgatggtcagcacagc

SEQ ID NO: 28552 - RNA, 121 nt, synthetic construct
  source 1..121: mol_type = other RNA
aaggctgtgctgaccatcgagtctttgtactctggtaccagaagctacaaagataaggcttcatgccgaaatcacatggccccagcagcttcagtccctttctcgtcgatggtcagcacag

SEQ ID NO: 28553 - RNA, 120 nt, synthetic construct
  source 1..120: mol_type = other RNA
aaggctgtgctgaccatcgagtctttgtactctggtaccagaagctacaaagataaggcttcatgccgaaatcacatggccccagcagcttcagtccctttctcgtcgatggtcagcaca

SEQ ID NO: 28554 - RNA, 119 nt, synthetic construct
  source 1..119: mol_type = other RNA
aaggctgtgctgaccatcgagtctttgtactctggtaccagaagctacaaagataaggcttcatgccgaaatcacatggccccagcagcttcagtccctttctcgtcgatggtcagcac

SEQ ID NO: 28555 - RNA, 118 nt, synthetic construct
  source 1..118: mol_type = other RNA
aaggctgtgctgaccatcgagtctttgtactctggtaccagaagctacaaagataaggcttcatgccgaaatcacatggccccagcagcttcagtccctttctcgtcgatggtcagca

SEQ ID NO: 28556 - RNA, 117 nt, synthetic construct
  source 1..117: mol_type = other RNA
aaggctgtgctgaccatcgagtctttgtactctggtaccagaagctacaaagataaggcttcatgccgaaatcacatggccccagcagcttcagtccctttctcgtcgatggtcagc

SEQ ID NO: 28557 - RNA, 116 nt, synthetic construct
  source 1..116: mol_type = other RNA
aaggctgtgctgaccatcgagtctttgtactctggtaccagaagctacaaagataaggcttcatgccgaaatcacatggccccagcagcttcagtccctttctcgtcgatggtcag

SEQ ID NO: 28558 - RNA, 115 nt, synthetic construct
  source 1..115: mol_type = other RNA
aaggctgtgctgaccatcgagtctttgtactctggtaccagaagctacaaagataaggcttcatgccgaaatcacatggccccagcagcttcagtccctttctcgtcgatggtca

SEQ ID NO: 28559 - RNA, 114 nt, synthetic construct
  source 1..114: mol_type = other RNA
aaggctgtgctgaccatcgagtctttgtactctggtaccagaagctacaaagataaggcttcatgccgaaatcacatggccccagcagcttcagtccctttctcgtcgatggtc

SEQ ID NO: 28560 - RNA, 126 nt, synthetic construct
  source 1..126: mol_type = other RNA
aaggctgtgctgaccatcgagtctttgtactctggtaccagaagctacaaagataaggcttcatgccgaaatcaacatggccccagcagcttcagtccctttctcgtcgatggtcagcacagcctt

SEQ ID NO: 28561 - RNA, 125 nt, synthetic construct
  source 1..125: mol_type = other RNA
aaggctgtgctgaccatcgagtctttgtactctggtaccagaagctacaaagataaggcttcatgccgaaatcaacatggccccagcagcttcagtccctttctcgtcgatggtcagcacagcct

SEQ ID NO: 28562 - RNA, 124 nt, synthetic construct
  source 1..124: mol_type = other RNA
aaggctgtgctgaccatcgagtctttgtactctggtaccagaagctacaaagataaggcttcatgccgaaatcaacatggccccagcagcttcagtccctttctcgtcgatggtcagcacagcc

SEQ ID NO: 28563 - RNA, 123 nt, synthetic construct
  source 1..123: mol_type = other RNA
aaggctgtgctgaccatcgagtctttgtactctggtaccagaagctacaaagataaggcttcatgccgaaatcaacatggccccagcagcttcagtccctttctcgtcgatggtcagcacagc

SEQ ID NO: 28564 - RNA, 122 nt, synthetic construct
  source 1..122: mol_type = other RNA
aaggctgtgctgaccatcgagtctttgtactctggtaccagaagctacaaagataaggcttcatgccgaaatcaacatggccccagcagcttcagtccctttctcgtcgatggtcagcacag

SEQ ID NO: 28565 - RNA, 121 nt, synthetic construct
  source 1..121: mol_type = other RNA
aaggctgtgctgaccatcgagtctttgtactctggtaccagaagctacaaagataaggcttcatgccgaaatcaacatggccccagcagcttcagtccctttctcgtcgatggtcagcaca

SEQ ID NO: 28566 - RNA, 120 nt, synthetic construct
  source 1..120: mol_type = other RNA
aaggctgtgctgaccatcgagtctttgtactctggtaccagaagctacaaagataaggcttcatgccgaaatcaacatggccccagcagcttcagtccctttctcgtcgatggtcagcac

SEQ ID NO: 28567 - RNA, 119 nt, synthetic construct
  source 1..119: mol_type = other RNA
aaggctgtgctgaccatcgagtctttgtactctggtaccagaagctacaaagataaggcttcatgccgaaatcaacatggccccagcagcttcagtccctttctcgtcgatggtcagca

SEQ ID NO: 28568 - RNA, 118 nt, synthetic construct
  source 1..118: mol_type = other RNA
aaggctgtgctgaccatcgagtctttgtactctggtaccagaagctacaaagataaggcttcatgccgaaatcaacatggccccagcagcttcagtccctttctcgtcgatggtcagc

SEQ ID NO: 28569 - RNA, 117 nt, synthetic construct
  source 1..117: mol_type = other RNA
aaggctgtgctgaccatcgagtctttgtactctggtaccagaagctacaaagataaggcttcatgccgaaatcaacatggccccagcagcttcagtccctttctcgtcgatggtcag

SEQ ID NO: 28570 - RNA, 116 nt, synthetic construct
  source 1..116: mol_type = other RNA
aaggctgtgctgaccatcgagtctttgtactctggtaccagaagctacaaagataaggcttcatgccgaaatcaacatggccccagcagcttcagtccctttctcgtcgatggtca

SEQ ID NO: 28571 - RNA, 115 nt, synthetic construct
  source 1..115: mol_type = other RNA
aaggctgtgctgaccatcgagtctttgtactctggtaccagaagctacaaagataaggcttcatgccgaaatcaacatggccccagcagcttcagtccctttctcgtcgatggtc

SEQ ID NO: 28572 - RNA, 127 nt, synthetic construct
  source 1..127: mol_type = other RNA
aaggctgtgctgaccatcgagtctttgtactctggtaccagaagctacaaagataaggcttcatgccgaaatcaaacatggccccagcagcttcagtccctttctcgtcgatggtcagcacagcctt

SEQ ID NO: 28573 - RNA, 126 nt, synthetic construct
  source 1..126: mol_type = other RNA
aaggctgtgctgaccatcgagtctttgtactctggtaccagaagctacaaagataaggcttcatgccgaaatcaaacatggccccagcagcttcagtccctttctcgtcgatggtcagcacagcct

SEQ ID NO: 28574 - RNA, 125 nt, synthetic construct
  source 1..125: mol_type = other RNA
aaggctgtgctgaccatcgagtctttgtactctggtaccagaagctacaaagataaggcttcatgccgaaatcaaacatggccccagcagcttcagtccctttctcgtcgatggtcagcacagcc

SEQ ID NO: 28575 - RNA, 124 nt, synthetic construct
  source 1..124: mol_type = other RNA
aaggctgtgctgaccatcgagtctttgtactctggtaccagaagctacaaagataaggcttcatgccgaaatcaaacatggccccagcagcttcagtccctttctcgtcgatggtcagcacagc

SEQ ID NO: 28576 - RNA, 123 nt, synthetic construct
  source 1..123: mol_type = other RNA
aaggctgtgctgaccatcgagtctttgtactctggtaccagaagctacaaagataaggcttcatgccgaaatcaaacatggccccagcagcttcagtccctttctcgtcgatggtcagcacag

SEQ ID NO: 28577 - RNA, 122 nt, synthetic construct
  source 1..122: mol_type = other RNA
aaggctgtgctgaccatcgagtctttgtactctggtaccagaagctacaaagataaggcttcatgccgaaatcaaacatggccccagcagcttcagtccctttctcgtcgatggtcagcaca

SEQ ID NO: 28578 - RNA, 121 nt, synthetic construct
  source 1..121: mol_type = other RNA
aaggctgtgctgaccatcgagtctttgtactctggtaccagaagctacaaagataaggcttcatgccgaaatcaaacatggccccagcagcttcagtccctttctcgtcgatggtcagcac

SEQ ID NO: 28579 - RNA, 120 nt, synthetic construct
  source 1..120: mol_type = other RNA
aaggctgtgctgaccatcgagtctttgtactctggtaccagaagctacaaagataaggcttcatgccgaaatcaaacatggccccagcagcttcagtccctttctcgtcgatggtcagca

SEQ ID NO: 28580 - RNA, 119 nt, synthetic construct
  source 1..119: mol_type = other RNA
aaggctgtgctgaccatcgagtctttgtactctggtaccagaagctacaaagataaggcttcatgccgaaatcaaacatggccccagcagcttcagtccctttctcgtcgatggtcagc

SEQ ID NO: 28581 - RNA, 118 nt, synthetic construct
  source 1..118: mol_type = other RNA
aaggctgtgctgaccatcgagtctttgtactctggtaccagaagctacaaagataaggcttcatgccgaaatcaaacatggccccagcagcttcagtccctttctcgtcgatggtcag

SEQ ID NO: 28582 - RNA, 117 nt, synthetic construct
  source 1..117: mol_type = other RNA
aaggctgtgctgaccatcgagtctttgtactctggtaccagaagctacaaagataaggcttcatgccgaaatcaaacatggccccagcagcttcagtccctttctcgtcgatggtca

SEQ ID NO: 28583 - RNA, 116 nt, synthetic construct
  source 1..116: mol_type = other RNA
aaggctgtgctgaccatcgagtctttgtactctggtaccagaagctacaaagataaggcttcatgccgaaatcaaacatggccccagcagcttcagtccctttctcgtcgatggtc

SEQ ID NO: 28584 - RNA, 128 nt, synthetic construct
  source 1..128: mol_type = other RNA
aaggctgtgctgaccatcgagtctttgtactctggtaccagaagctacaaagataaggcttcatgccgaaatcaaaacatggccccagcagcttcagtccctttctcgtcgatggtcagcacagcctt

SEQ ID NO: 28585 - RNA, 127 nt, synthetic construct
  source 1..127: mol_type = other RNA
aaggctgtgctgaccatcgagtctttgtactctggtaccagaagctacaaagataaggcttcatgccgaaatcaaaacatggccccagcagcttcagtccctttctcgtcgatggtcagcacagcct

SEQ ID NO: 28586 - RNA, 126 nt, synthetic construct
  source 1..126: mol_type = other RNA
aaggctgtgctgaccatcgagtctttgtactctggtaccagaagctacaaagataaggcttcatgccgaaatcaaaacatggccccagcagcttcagtccctttctcgtcgatggtcagcacagcc

SEQ ID NO: 28587 - RNA, 125 nt, synthetic construct
  source 1..125: mol_type = other RNA
aaggctgtgctgaccatcgagtctttgtactctggtaccagaagctacaaagataaggcttcatgccgaaatcaaaacatggccccagcagcttcagtccctttctcgtcgatggtcagcacagc

SEQ ID NO: 28588 - RNA, 124 nt, synthetic construct
  source 1..124: mol_type = other RNA
aaggctgtgctgaccatcgagtctttgtactctggtaccagaagctacaaagataaggcttcatgccgaaatcaaaacatggccccagcagcttcagtccctttctcgtcgatggtcagcacag

SEQ ID NO: 28589 - RNA, 123 nt, synthetic construct
  source 1..123: mol_type = other RNA
aaggctgtgctgaccatcgagtctttgtactctggtaccagaagctacaaagataaggcttcatgccgaaatcaaaacatggccccagcagcttcagtccctttctcgtcgatggtcagcaca

SEQ ID NO: 28590 - RNA, 122 nt, synthetic construct
  source 1..122: mol_type = other RNA
aaggctgtgctgaccatcgagtctttgtactctggtaccagaagctacaaagataaggcttcatgccgaaatcaaaacatggccccagcagcttcagtccctttctcgtcgatggtcagcac

SEQ ID NO: 28591 - RNA, 121 nt, synthetic construct
  source 1..121: mol_type = other RNA
aaggctgtgctgaccatcgagtctttgtactctggtaccagaagctacaaagataaggcttcatgccgaaatcaaaacatggccccagcagcttcagtccctttctcgtcgatggtcagca

SEQ ID NO: 28592 - RNA, 120 nt, synthetic construct
  source 1..120: mol_type = other RNA
aaggctgtgctgaccatcgagtctttgtactctggtaccagaagctacaaagataaggcttcatgccgaaatcaaaacatggccccagcagcttcagtccctttctcgtcgatggtcagc

SEQ ID NO: 28593 - RNA, 119 nt, synthetic construct
  source 1..119: mol_type = other RNA
aaggctgtgctgaccatcgagtctttgtactctggtaccagaagctacaaagataaggcttcatgccgaaatcaaaacatggccccagcagcttcagtccctttctcgtcgatggtcag

SEQ ID NO: 28594 - RNA, 118 nt, synthetic construct
  source 1..118: mol_type = other RNA
aaggctgtgctgaccatcgagtctttgtactctggtaccagaagctacaaagataaggcttcatgccgaaatcaaaacatggccccagcagcttcagtccctttctcgtcgatggtca

SEQ ID NO: 28595 - RNA, 117 nt, synthetic construct
  source 1..117: mol_type = other RNA
aaggctgtgctgaccatcgagtctttgtactctggtaccagaagctacaaagataaggcttcatgccgaaatcaaaacatggccccagcagcttcagtccctttctcgtcgatggtc

SEQ ID NO: 28596 - RNA, 129 nt, synthetic construct
  source 1..129: mol_type = other RNA
aaggctgtgctgaccatcgagtctttgtactctggtaccagaagctacaaagataaggcttcatgccgaaatcaaaaacatggccccagcagcttcagtccctttctcgtcgatggtcagcacagcctt

SEQ ID NO: 28597 - RNA, 128 nt, synthetic construct
  source 1..128: mol_type = other RNA
aaggctgtgctgaccatcgagtctttgtactctggtaccagaagctacaaagataaggcttcatgccgaaatcaaaaacatggccccagcagcttcagtccctttctcgtcgatggtcagcacagcct

SEQ ID NO: 28598 - RNA, 127 nt, synthetic construct
  source 1..127: mol_type = other RNA
aaggctgtgctgaccatcgagtctttgtactctggtaccagaagctacaaagataaggcttcatgccgaaatcaaaaacatggccccagcagcttcagtccctttctcgtcgatggtcagcacagcc

SEQ ID NO: 28599 - RNA, 126 nt, synthetic construct
  source 1..126: mol_type = other RNA
aaggctgtgctgaccatcgagtctttgtactctggtaccagaagctacaaagataaggcttcatgccgaaatcaaaaacatggccccagcagcttcagtccctttctcgtcgatggtcagcacagc

SEQ ID NO: 28600 - RNA, 125 nt, synthetic construct
  source 1..125: mol_type = other RNA
aaggctgtgctgaccatcgagtctttgtactctggtaccagaagctacaaagataaggcttcatgccgaaatcaaaaacatggccccagcagcttcagtccctttctcgtcgatggtcagcacag

SEQ ID NO: 28601 - RNA, 124 nt, synthetic construct
  source 1..124: mol_type = other RNA
aaggctgtgctgaccatcgagtctttgtactctggtaccagaagctacaaagataaggcttcatgccgaaatcaaaaacatggccccagcagcttcagtccctttctcgtcgatggtcagcaca

SEQ ID NO: 28602 - RNA, 123 nt, synthetic construct
  source 1..123: mol_type = other RNA
aaggctgtgctgaccatcgagtctttgtactctggtaccagaagctacaaagataaggcttcatgccgaaatcaaaaacatggccccagcagcttcagtccctttctcgtcgatggtcagcac

SEQ ID NO: 28603 - RNA, 122 nt, synthetic construct
  source 1..122: mol_type = other RNA
aaggctgtgctgaccatcgagtctttgtactctggtaccagaagctacaaagataaggcttcatgccgaaatcaaaaacatggccccagcagcttcagtccctttctcgtcgatggtcagca

SEQ ID NO: 28604 - RNA, 121 nt, synthetic construct
  source 1..121: mol_type = other RNA
aaggctgtgctgaccatcgagtctttgtactctggtaccagaagctacaaagataaggcttcatgccgaaatcaaaaacatggccccagcagcttcagtccctttctcgtcgatggtcagc

SEQ ID NO: 28605 - RNA, 120 nt, synthetic construct
  source 1..120: mol_type = other RNA
aaggctgtgctgaccatcgagtctttgtactctggtaccagaagctacaaagataaggcttcatgccgaaatcaaaaacatggccccagcagcttcagtccctttctcgtcgatggtcag

SEQ ID NO: 28606 - RNA, 119 nt, synthetic construct
  source 1..119: mol_type = other RNA
aaggctgtgctgaccatcgagtctttgtactctggtaccagaagctacaaagataaggcttcatgccgaaatcaaaaacatggccccagcagcttcagtccctttctcgtcgatggtca

SEQ ID NO: 28607 - RNA, 118 nt, synthetic construct
  source 1..118: mol_type = other RNA
aaggctgtgctgaccatcgagtctttgtactctggtaccagaagctacaaagataaggcttcatgccgaaatcaaaaacatggccccagcagcttcagtccctttctcgtcgatggtc

SEQ ID NO: 28608 - RNA, 130 nt, synthetic construct
  source 1..130: mol_type = other RNA
aaggctgtgctgaccatcgagtctttgtactctggtaccagaagctacaaagataaggcttcatgccgaaatcaaaaaacatggccccagcagcttcagtccctttctcgtcgatggtcagcacagcctt

SEQ ID NO: 28609 - RNA, 129 nt, synthetic construct
  source 1..129: mol_type = other RNA
aaggctgtgctgaccatcgagtctttgtactctggtaccagaagctacaaagataaggcttcatgccgaaatcaaaaaacatggccccagcagcttcagtccctttctcgtcgatggtcagcacagcct

SEQ ID NO: 28610 - RNA, 128 nt, synthetic construct
  source 1..128: mol_type = other RNA
aaggctgtgctgaccatcgagtctttgtactctggtaccagaagctacaaagataaggcttcatgccgaaatcaaaaaacatggccccagcagcttcagtccctttctcgtcgatggtcagcacagcc

SEQ ID NO: 28611 - RNA, 127 nt, synthetic construct
  source 1..127: mol_type = other RNA
aaggctgtgctgaccatcgagtctttgtactctggtaccagaagctacaaagataaggcttcatgccgaaatcaaaaaacatggccccagcagcttcagtccctttctcgtcgatggtcagcacagc

SEQ ID NO: 28612 - RNA, 126 nt, synthetic construct
  source 1..126: mol_type = other RNA
aaggctgtgctgaccatcgagtctttgtactctggtaccagaagctacaaagataaggcttcatgccgaaatcaaaaaacatggccccagcagcttcagtccctttctcgtcgatggtcagcacag

SEQ ID NO: 28613 - RNA, 125 nt, synthetic construct
  source 1..125: mol_type = other RNA
aaggctgtgctgaccatcgagtctttgtactctggtaccagaagctacaaagataaggcttcatgccgaaatcaaaaaacatggccccagcagcttcagtccctttctcgtcgatggtcagcaca

SEQ ID NO: 28614 - RNA, 124 nt, synthetic construct
  source 1..124: mol_type = other RNA
aaggctgtgctgaccatcgagtctttgtactctggtaccagaagctacaaagataaggcttcatgccgaaatcaaaaaacatggccccagcagcttcagtccctttctcgtcgatggtcagcac

SEQ ID NO: 28615 - RNA, 123 nt, synthetic construct
  source 1..123: mol_type = other RNA
aaggctgtgctgaccatcgagtctttgtactctggtaccagaagctacaaagataaggcttcatgccgaaatcaaaaaacatggccccagcagcttcagtccctttctcgtcgatggtcagca

SEQ ID NO: 28616 - RNA, 122 nt, synthetic construct
  source 1..122: mol_type = other RNA
aaggctgtgctgaccatcgagtctttgtactctggtaccagaagctacaaagataaggcttcatgccgaaatcaaaaaacatggccccagcagcttcagtccctttctcgtcgatggtcagc

SEQ ID NO: 28617 - RNA, 121 nt, synthetic construct
  source 1..121: mol_type = other RNA
aaggctgtgctgaccatcgagtctttgtactctggtaccagaagctacaaagataaggcttcatgccgaaatcaaaaaacatggccccagcagcttcagtccctttctcgtcgatggtcag

SEQ ID NO: 28618 - RNA, 120 nt, synthetic construct
  source 1..120: mol_type = other RNA
aaggctgtgctgaccatcgagtctttgtactctggtaccagaagctacaaagataaggcttcatgccgaaatcaaaaaacatggccccagcagcttcagtccctttctcgtcgatggtca

SEQ ID NO: 28619 - RNA, 119 nt, synthetic construct
  source 1..119: mol_type = other RNA
aaggctgtgctgaccatcgagtctttgtactctggtaccagaagctacaaagataaggcttcatgccgaaatcaaaaaacatggccccagcagcttcagtccctttctcgtcgatggtc

SEQ ID NO: 28620 - RNA, 131 nt, synthetic construct
  source 1..131: mol_type = other RNA
aaggctgtgctgaccatcgagtctttgtactctggtaccagaagctacaaagataaggcttcatgccgaaatcataaaaacatggccccagcagcttcagtccctttctcgtcgatggtcagcacagcctt

SEQ ID NO: 28621 - RNA, 130 nt, synthetic construct
  source 1..130: mol_type = other RNA
aaggctgtgctgaccatcgagtctttgtactctggtaccagaagctacaaagataaggcttcatgccgaaatcataaaaacatggccccagcagcttcagtccctttctcgtcgatggtcagcacagcct

SEQ ID NO: 28622 - RNA, 129 nt, synthetic construct
  source 1..129: mol_type = other RNA
aaggctgtgctgaccatcgagtctttgtactctggtaccagaagctacaaagataaggcttcatgccgaaatcataaaaacatggccccagcagcttcagtccctttctcgtcgatggtcagcacagcc

SEQ ID NO: 28623 - RNA, 128 nt, synthetic construct
  source 1..128: mol_type = other RNA
aaggctgtgctgaccatcgagtctttgtactctggtaccagaagctacaaagataaggcttcatgccgaaatcataaaaacatggccccagcagcttcagtccctttctcgtcgatggtcagcacagc

SEQ ID NO: 28624 - RNA, 127 nt, synthetic construct
  source 1..127: mol_type = other RNA
aaggctgtgctgaccatcgagtctttgtactctggtaccagaagctacaaagataaggcttcatgccgaaatcataaaaacatggccccagcagcttcagtccctttctcgtcgatggtcagcacag

SEQ ID NO: 28625 - RNA, 126 nt, synthetic construct
  source 1..126: mol_type = other RNA
aaggctgtgctgaccatcgagtctttgtactctggtaccagaagctacaaagataaggcttcatgccgaaatcataaaaacatggccccagcagcttcagtccctttctcgtcgatggtcagcaca

SEQ ID NO: 28626 - RNA, 125 nt, synthetic construct
  source 1..125: mol_type = other RNA
aaggctgtgctgaccatcgagtctttgtactctggtaccagaagctacaaagataaggcttcatgccgaaatcataaaaacatggccccagcagcttcagtccctttctcgtcgatggtcagcac

SEQ ID NO: 28627 - RNA, 124 nt, synthetic construct
  source 1..124: mol_type = other RNA
aaggctgtgctgaccatcgagtctttgtactctggtaccagaagctacaaagataaggcttcatgccgaaatcataaaaacatggccccagcagcttcagtccctttctcgtcgatggtcagca

SEQ ID NO: 28628 - RNA, 123 nt, synthetic construct
  source 1..123: mol_type = other RNA
aaggctgtgctgaccatcgagtctttgtactctggtaccagaagctacaaagataaggcttcatgccgaaatcataaaaacatggccccagcagcttcagtccctttctcgtcgatggtcagc

SEQ ID NO: 28629 - RNA, 122 nt, synthetic construct
  source 1..122: mol_type = other RNA
aaggctgtgctgaccatcgagtctttgtactctggtaccagaagctacaaagataaggcttcatgccgaaatcataaaaacatggccccagcagcttcagtccctttctcgtcgatggtcag

SEQ ID NO: 28630 - RNA, 121 nt, synthetic construct
  source 1..121: mol_type = other RNA
aaggctgtgctgaccatcgagtctttgtactctggtaccagaagctacaaagataaggcttcatgccgaaatcataaaaacatggccccagcagcttcagtccctttctcgtcgatggtca

SEQ ID NO: 28631 - RNA, 120 nt, synthetic construct
  source 1..120: mol_type = other RNA
aaggctgtgctgaccatcgagtctttgtactctggtaccagaagctacaaagataaggcttcatgccgaaatcataaaaacatggccccagcagcttcagtccctttctcgtcgatggtc

SEQ ID NO: 28632 - RNA, 132 nt, synthetic construct
  source 1..132: mol_type = other RNA
aaggctgtgctgaccatcgagtctttgtactctggtaccagaagctacaaagataaggcttcatgccgaaatcactaaaaacatggccccagcagcttcagtccctttctcgtcgatggtcagcacagcctt

SEQ ID NO: 28633 - RNA, 131 nt, synthetic construct
  source 1..131: mol_type = other RNA
aaggctgtgctgaccatcgagtctttgtactctggtaccagaagctacaaagataaggcttcatgccgaaatcactaaaaacatggccccagcagcttcagtccctttctcgtcgatggtcagcacagcct

SEQ ID NO: 28634 - RNA, 130 nt, synthetic construct
  source 1..130: mol_type = other RNA
aaggctgtgctgaccatcgagtctttgtactctggtaccagaagctacaaagataaggcttcatgccgaaatcactaaaaacatggccccagcagcttcagtccctttctcgtcgatggtcagcacagcc

SEQ ID NO: 28635 - RNA, 129 nt, synthetic construct
  source 1..129: mol_type = other RNA
aaggctgtgctgaccatcgagtctttgtactctggtaccagaagctacaaagataaggcttcatgccgaaatcactaaaaacatggccccagcagcttcagtccctttctcgtcgatggtcagcacagc

SEQ ID NO: 28636 - RNA, 128 nt, synthetic construct
  source 1..128: mol_type = other RNA
aaggctgtgctgaccatcgagtctttgtactctggtaccagaagctacaaagataaggcttcatgccgaaatcactaaaaacatggccccagcagcttcagtccctttctcgtcgatggtcagcacag

SEQ ID NO: 28637 - RNA, 127 nt, synthetic construct
  source 1..127: mol_type = other RNA
aaggctgtgctgaccatcgagtctttgtactctggtaccagaagctacaaagataaggcttcatgccgaaatcactaaaaacatggccccagcagcttcagtccctttctcgtcgatggtcagcaca

SEQ ID NO: 28638 - RNA, 126 nt, synthetic construct
  source 1..126: mol_type = other RNA
aaggctgtgctgaccatcgagtctttgtactctggtaccagaagctacaaagataaggcttcatgccgaaatcactaaaaacatggccccagcagcttcagtccctttctcgtcgatggtcagcac

SEQ ID NO: 28639 - RNA, 125 nt, synthetic construct
  source 1..125: mol_type = other RNA
aaggctgtgctgaccatcgagtctttgtactctggtaccagaagctacaaagataaggcttcatgccgaaatcactaaaaacatggccccagcagcttcagtccctttctcgtcgatggtcagca

SEQ ID NO: 28640 - RNA, 124 nt, synthetic construct
  source 1..124: mol_type = other RNA
aaggctgtgctgaccatcgagtctttgtactctggtaccagaagctacaaagataaggcttcatgccgaaatcactaaaaacatggccccagcagcttcagtccctttctcgtcgatggtcagc

SEQ ID NO: 28641 - RNA, 123 nt, synthetic construct
  source 1..123: mol_type = other RNA
aaggctgtgctgaccatcgagtctttgtactctggtaccagaagctacaaagataaggcttcatgccgaaatcactaaaaacatggccccagcagcttcagtccctttctcgtcgatggtcag

SEQ ID NO: 28642 - RNA, 122 nt, synthetic construct
  source 1..122: mol_type = other RNA
aaggctgtgctgaccatcgagtctttgtactctggtaccagaagctacaaagataaggcttcatgccgaaatcactaaaaacatggccccagcagcttcagtccctttctcgtcgatggtca

SEQ ID NO: 28643 - RNA, 121 nt, synthetic construct
  source 1..121: mol_type = other RNA
aaggctgtgctgaccatcgagtctttgtactctggtaccagaagctacaaagataaggcttcatgccgaaatcactaaaaacatggccccagcagcttcagtccctttctcgtcgatggtc

SEQ ID NO: 28644 - RNA, 133 nt, synthetic construct
  source 1..133: mol_type = other RNA
aaggctgtgctgaccatcgagtctttgtactctggtaccagaagctacaaagataaggcttcatgccgaaatcatctaaaaacatggccccagcagcttcagtccctttctcgtcgatggtcagcacagcctt

SEQ ID NO: 28645 - RNA, 132 nt, synthetic construct
  source 1..132: mol_type = other RNA
aaggctgtgctgaccatcgagtctttgtactctggtaccagaagctacaaagataaggcttcatgccgaaatcatctaaaaacatggccccagcagcttcagtccctttctcgtcgatggtcagcacagcct

SEQ ID NO: 28646 - RNA, 131 nt, synthetic construct
  source 1..131: mol_type = other RNA
aaggctgtgctgaccatcgagtctttgtactctggtaccagaagctacaaagataaggcttcatgccgaaatcatctaaaaacatggccccagcagcttcagtccctttctcgtcgatggtcagcacagcc

SEQ ID NO: 28647 - RNA, 130 nt, synthetic construct
  source 1..130: mol_type = other RNA
aaggctgtgctgaccatcgagtctttgtactctggtaccagaagctacaaagataaggcttcatgccgaaatcatctaaaaacatggccccagcagcttcagtccctttctcgtcgatggtcagcacagc

SEQ ID NO: 28648 - RNA, 129 nt, synthetic construct
  source 1..129: mol_type = other RNA
aaggctgtgctgaccatcgagtctttgtactctggtaccagaagctacaaagataaggcttcatgccgaaatcatctaaaaacatggccccagcagcttcagtccctttctcgtcgatggtcagcacag

SEQ ID NO: 28649 - RNA, 128 nt, synthetic construct
  source 1..128: mol_type = other RNA
aaggctgtgctgaccatcgagtctttgtactctggtaccagaagctacaaagataaggcttcatgccgaaatcatctaaaaacatggccccagcagcttcagtccctttctcgtcgatggtcagcaca

SEQ ID NO: 28650 - RNA, 127 nt, synthetic construct
  source 1..127: mol_type = other RNA
aaggctgtgctgaccatcgagtctttgtactctggtaccagaagctacaaagataaggcttcatgccgaaatcatctaaaaacatggccccagcagcttcagtccctttctcgtcgatggtcagcac

SEQ ID NO: 28651 - RNA, 126 nt, synthetic construct
  source 1..126: mol_type = other RNA
aaggctgtgctgaccatcgagtctttgtactctggtaccagaagctacaaagataaggcttcatgccgaaatcatctaaaaacatggccccagcagcttcagtccctttctcgtcgatggtcagca

SEQ ID NO: 28652 - RNA, 125 nt, synthetic construct
  source 1..125: mol_type = other RNA
aaggctgtgctgaccatcgagtctttgtactctggtaccagaagctacaaagataaggcttcatgccgaaatcatctaaaaacatggccccagcagcttcagtccctttctcgtcgatggtcagc

SEQ ID NO: 28653 - RNA, 124 nt, synthetic construct
  source 1..124: mol_type = other RNA
aaggctgtgctgaccatcgagtctttgtactctggtaccagaagctacaaagataaggcttcatgccgaaatcatctaaaaacatggccccagcagcttcagtccctttctcgtcgatggtcag

SEQ ID NO: 28654 - RNA, 123 nt, synthetic construct
  source 1..123: mol_type = other RNA
aaggctgtgctgaccatcgagtctttgtactctggtaccagaagctacaaagataaggcttcatgccgaaatcatctaaaaacatggccccagcagcttcagtccctttctcgtcgatggtca

SEQ ID NO: 28655 - RNA, 122 nt, synthetic construct
  source 1..122: mol_type = other RNA
aaggctgtgctgaccatcgagtctttgtactctggtaccagaagctacaaagataaggcttcatgccgaaatcatctaaaaacatggccccagcagcttcagtccctttctcgtcgatggtc

SEQ ID NO: 28656 - RNA, 134 nt, synthetic construct
  source 1..134: mol_type = other RNA
aaggctgtgctgaccatcgagtctttgtactctggtaccagaagctacaaagataaggcttcatgccgaaatcactctaaaaacatggccccagcagcttcagtccctttctcgtcgatggtcagcacagcctt

SEQ ID NO: 28657 - RNA, 133 nt, synthetic construct
  source 1..133: mol_type = other RNA
aaggctgtgctgaccatcgagtctttgtactctggtaccagaagctacaaagataaggcttcatgccgaaatcactctaaaaacatggccccagcagcttcagtccctttctcgtcgatggtcagcacagcct

SEQ ID NO: 28658 - RNA, 132 nt, synthetic construct
  source 1..132: mol_type = other RNA
aaggctgtgctgaccatcgagtctttgtactctggtaccagaagctacaaagataaggcttcatgccgaaatcactctaaaaacatggccccagcagcttcagtccctttctcgtcgatggtcagcacagcc

SEQ ID NO: 28659 - RNA, 131 nt, synthetic construct
  source 1..131: mol_type = other RNA
aaggctgtgctgaccatcgagtctttgtactctggtaccagaagctacaaagataaggcttcatgccgaaatcactctaaaaacatggccccagcagcttcagtccctttctcgtcgatggtcagcacagc

SEQ ID NO: 28660 - RNA, 130 nt, synthetic construct
  source 1..130: mol_type = other RNA
aaggctgtgctgaccatcgagtctttgtactctggtaccagaagctacaaagataaggcttcatgccgaaatcactctaaaaacatggccccagcagcttcagtccctttctcgtcgatggtcagcacag

SEQ ID NO: 28661 - RNA, 129 nt, synthetic construct
  source 1..129: mol_type = other RNA
aaggctgtgctgaccatcgagtctttgtactctggtaccagaagctacaaagataaggcttcatgccgaaatcactctaaaaacatggccccagcagcttcagtccctttctcgtcgatggtcagcaca

SEQ ID NO: 28662 - RNA, 128 nt, synthetic construct
  source 1..128: mol_type = other RNA
aaggctgtgctgaccatcgagtctttgtactctggtaccagaagctacaaagataaggcttcatgccgaaatcactctaaaaacatggccccagcagcttcagtccctttctcgtcgatggtcagcac

SEQ ID NO: 28663 - RNA, 127 nt, synthetic construct
  source 1..127: mol_type = other RNA
aaggctgtgctgaccatcgagtctttgtactctggtaccagaagctacaaagataaggcttcatgccgaaatcactctaaaaacatggccccagcagcttcagtccctttctcgtcgatggtcagca

SEQ ID NO: 28664 - RNA, 126 nt, synthetic construct
  source 1..126: mol_type = other RNA
aaggctgtgctgaccatcgagtctttgtactctggtaccagaagctacaaagataaggcttcatgccgaaatcactctaaaaacatggccccagcagcttcagtccctttctcgtcgatggtcagc

SEQ ID NO: 28665 - RNA, 125 nt, synthetic construct
  source 1..125: mol_type = other RNA
aaggctgtgctgaccatcgagtctttgtactctggtaccagaagctacaaagataaggcttcatgccgaaatcactctaaaaacatggccccagcagcttcagtccctttctcgtcgatggtcag

SEQ ID NO: 28666 - RNA, 124 nt, synthetic construct
  source 1..124: mol_type = other RNA
aaggctgtgctgaccatcgagtctttgtactctggtaccagaagctacaaagataaggcttcatgccgaaatcactctaaaaacatggccccagcagcttcagtccctttctcgtcgatggtca

SEQ ID NO: 28667 - RNA, 123 nt, synthetic construct
  source 1..123: mol_type = other RNA
aaggctgtgctgaccatcgagtctttgtactctggtaccagaagctacaaagataaggcttcatgccgaaatcactctaaaaacatggccccagcagcttcagtccctttctcgtcgatggtc

SEQ ID NO: 28668 - RNA, 135 nt, synthetic construct
  source 1..135: mol_type = other RNA
aaggctgtgctgaccatcgagtctttgtactctggtaccagaagctacaaagataaggcttcatgccgaaatcacctctaaaaacatggccccagcagcttcagtccctttctcgtcgatggtcagcacagcctt

SEQ ID NO: 28669 - RNA, 134 nt, synthetic construct
  source 1..134: mol_type = other RNA
aaggctgtgctgaccatcgagtctttgtactctggtaccagaagctacaaagataaggcttcatgccgaaatcacctctaaaaacatggccccagcagcttcagtccctttctcgtcgatggtcagcacagcct

SEQ ID NO: 28670 - RNA, 133 nt, synthetic construct
  source 1..133: mol_type = other RNA
aaggctgtgctgaccatcgagtctttgtactctggtaccagaagctacaaagataaggcttcatgccgaaatcacctctaaaaacatggccccagcagcttcagtccctttctcgtcgatggtcagcacagcc

SEQ ID NO: 28671 - RNA, 132 nt, synthetic construct
  source 1..132: mol_type = other RNA
aaggctgtgctgaccatcgagtctttgtactctggtaccagaagctacaaagataaggcttcatgccgaaatcacctctaaaaacatggccccagcagcttcagtccctttctcgtcgatggtcagcacagc

SEQ ID NO: 28672 - RNA, 131 nt, synthetic construct
  source 1..131: mol_type = other RNA
aaggctgtgctgaccatcgagtctttgtactctggtaccagaagctacaaagataaggcttcatgccgaaatcacctctaaaaacatggccccagcagcttcagtccctttctcgtcgatggtcagcacag

SEQ ID NO: 28673 - RNA, 130 nt, synthetic construct
  source 1..130: mol_type = other RNA
aaggctgtgctgaccatcgagtctttgtactctggtaccagaagctacaaagataaggcttcatgccgaaatcacctctaaaaacatggccccagcagcttcagtccctttctcgtcgatggtcagcaca

SEQ ID NO: 28674 - RNA, 129 nt, synthetic construct
  source 1..129: mol_type = other RNA
aaggctgtgctgaccatcgagtctttgtactctggtaccagaagctacaaagataaggcttcatgccgaaatcacctctaaaaacatggccccagcagcttcagtccctttctcgtcgatggtcagcac

SEQ ID NO: 28675 - RNA, 128 nt, synthetic construct
  source 1..128: mol_type = other RNA
aaggctgtgctgaccatcgagtctttgtactctggtaccagaagctacaaagataaggcttcatgccgaaatcacctctaaaaacatggccccagcagcttcagtccctttctcgtcgatggtcagca

SEQ ID NO: 28676 - RNA, 127 nt, synthetic construct
  source 1..127: mol_type = other RNA
aaggctgtgctgaccatcgagtctttgtactctggtaccagaagctacaaagataaggcttcatgccgaaatcacctctaaaaacatggccccagcagcttcagtccctttctcgtcgatggtcagc

SEQ ID NO: 28677 - RNA, 126 nt, synthetic construct
  source 1..126: mol_type = other RNA
aaggctgtgctgaccatcgagtctttgtactctggtaccagaagctacaaagataaggcttcatgccgaaatcacctctaaaaacatggccccagcagcttcagtccctttctcgtcgatggtcag

SEQ ID NO: 28678 - RNA, 125 nt, synthetic construct
  source 1..125: mol_type = other RNA
aaggctgtgctgaccatcgagtctttgtactctggtaccagaagctacaaagataaggcttcatgccgaaatcacctctaaaaacatggccccagcagcttcagtccctttctcgtcgatggtca

SEQ ID NO: 28679 - RNA, 124 nt, synthetic construct
  source 1..124: mol_type = other RNA
aaggctgtgctgaccatcgagtctttgtactctggtaccagaagctacaaagataaggcttcatgccgaaatcacctctaaaaacatggccccagcagcttcagtccctttctcgtcgatggtc

SEQ ID NO: 28680 - RNA, 136 nt, synthetic construct
  source 1..136: mol_type = other RNA
aaggctgtgctgaccatcgagtctttgtactctggtaccagaagctacaaagataaggcttcatgccgaaatcagcctctaaaaacatggccccagcagcttcagtccctttctcgtcgatggtcagcacagcctt

SEQ ID NO: 28681 - RNA, 135 nt, synthetic construct
  source 1..135: mol_type = other RNA
aaggctgtgctgaccatcgagtctttgtactctggtaccagaagctacaaagataaggcttcatgccgaaatcagcctctaaaaacatggccccagcagcttcagtccctttctcgtcgatggtcagcacagcct

SEQ ID NO: 28682 - RNA, 134 nt, synthetic construct
  source 1..134: mol_type = other RNA
aaggctgtgctgaccatcgagtctttgtactctggtaccagaagctacaaagataaggcttcatgccgaaatcagcctctaaaaacatggccccagcagcttcagtccctttctcgtcgatggtcagcacagcc

SEQ ID NO: 28683 - RNA, 133 nt, synthetic construct
  source 1..133: mol_type = other RNA
aaggctgtgctgaccatcgagtctttgtactctggtaccagaagctacaaagataaggcttcatgccgaaatcagcctctaaaaacatggccccagcagcttcagtccctttctcgtcgatggtcagcacagc

SEQ ID NO: 28684 - RNA, 132 nt, synthetic construct
  source 1..132: mol_type = other RNA
aaggctgtgctgaccatcgagtctttgtactctggtaccagaagctacaaagataaggcttcatgccgaaatcagcctctaaaaacatggccccagcagcttcagtccctttctcgtcgatggtcagcacag

SEQ ID NO: 28685 - RNA, 131 nt, synthetic construct
  source 1..131: mol_type = other RNA
aaggctgtgctgaccatcgagtctttgtactctggtaccagaagctacaaagataaggcttcatgccgaaatcagcctctaaaaacatggccccagcagcttcagtccctttctcgtcgatggtcagcaca

SEQ ID NO: 28686 - RNA, 130 nt, synthetic construct
  source 1..130: mol_type = other RNA
aaggctgtgctgaccatcgagtctttgtactctggtaccagaagctacaaagataaggcttcatgccgaaatcagcctctaaaaacatggccccagcagcttcagtccctttctcgtcgatggtcagcac

SEQ ID NO: 28687 - RNA, 129 nt, synthetic construct
  source 1..129: mol_type = other RNA
aaggctgtgctgaccatcgagtctttgtactctggtaccagaagctacaaagataaggcttcatgccgaaatcagcctctaaaaacatggccccagcagcttcagtccctttctcgtcgatggtcagca

SEQ ID NO: 28688 - RNA, 128 nt, synthetic construct
  source 1..128: mol_type = other RNA
aaggctgtgctgaccatcgagtctttgtactctggtaccagaagctacaaagataaggcttcatgccgaaatcagcctctaaaaacatggccccagcagcttcagtccctttctcgtcgatggtcagc

SEQ ID NO: 28689 - RNA, 127 nt, synthetic construct
  source 1..127: mol_type = other RNA
aaggctgtgctgaccatcgagtctttgtactctggtaccagaagctacaaagataaggcttcatgccgaaatcagcctctaaaaacatggccccagcagcttcagtccctttctcgtcgatggtcag

SEQ ID NO: 28690 - RNA, 126 nt, synthetic construct
  source 1..126: mol_type = other RNA
aaggctgtgctgaccatcgagtctttgtactctggtaccagaagctacaaagataaggcttcatgccgaaatcagcctctaaaaacatggccccagcagcttcagtccctttctcgtcgatggtca

SEQ ID NO: 28691 - RNA, 125 nt, synthetic construct
  source 1..125: mol_type = other RNA
aaggctgtgctgaccatcgagtctttgtactctggtaccagaagctacaaagataaggcttcatgccgaaatcagcctctaaaaacatggccccagcagcttcagtccctttctcgtcgatggtc

SEQ ID NO: 28692 - RNA, 137 nt, synthetic construct
  source 1..137: mol_type = other RNA
aaggctgtgctgaccatcgagtctttgtactctggtaccagaagctacaaagataaggcttcatgccgaaatcaggcctctaaaaacatggccccagcagcttcagtccctttctcgtcgatggtcagcacagcctt

SEQ ID NO: 28693 - RNA, 136 nt, synthetic construct
  source 1..136: mol_type = other RNA
aaggctgtgctgaccatcgagtctttgtactctggtaccagaagctacaaagataaggcttcatgccgaaatcaggcctctaaaaacatggccccagcagcttcagtccctttctcgtcgatggtcagcacagcct

SEQ ID NO: 28694 - RNA, 135 nt, synthetic construct
  source 1..135: mol_type = other RNA
aaggctgtgctgaccatcgagtctttgtactctggtaccagaagctacaaagataaggcttcatgccgaaatcaggcctctaaaaacatggccccagcagcttcagtccctttctcgtcgatggtcagcacagcc

SEQ ID NO: 28695 - RNA, 134 nt, synthetic construct
  source 1..134: mol_type = other RNA
aaggctgtgctgaccatcgagtctttgtactctggtaccagaagctacaaagataaggcttcatgccgaaatcaggcctctaaaaacatggccccagcagcttcagtccctttctcgtcgatggtcagcacagc

SEQ ID NO: 28696 - RNA, 133 nt, synthetic construct
  source 1..133: mol_type = other RNA
aaggctgtgctgaccatcgagtctttgtactctggtaccagaagctacaaagataaggcttcatgccgaaatcaggcctctaaaaacatggccccagcagcttcagtccctttctcgtcgatggtcagcacag

SEQ ID NO: 28697 - RNA, 132 nt, synthetic construct
  source 1..132: mol_type = other RNA
aaggctgtgctgaccatcgagtctttgtactctggtaccagaagctacaaagataaggcttcatgccgaaatcaggcctctaaaaacatggccccagcagcttcagtccctttctcgtcgatggtcagcaca

SEQ ID NO: 28698 - RNA, 131 nt, synthetic construct
  source 1..131: mol_type = other RNA
aaggctgtgctgaccatcgagtctttgtactctggtaccagaagctacaaagataaggcttcatgccgaaatcaggcctctaaaaacatggccccagcagcttcagtccctttctcgtcgatggtcagcac

SEQ ID NO: 28699 - RNA, 130 nt, synthetic construct
  source 1..130: mol_type = other RNA
aaggctgtgctgaccatcgagtctttgtactctggtaccagaagctacaaagataaggcttcatgccgaaatcaggcctctaaaaacatggccccagcagcttcagtccctttctcgtcgatggtcagca

SEQ ID NO: 28700 - RNA, 129 nt, synthetic construct
  source 1..129: mol_type = other RNA
aaggctgtgctgaccatcgagtctttgtactctggtaccagaagctacaaagataaggcttcatgccgaaatcaggcctctaaaaacatggccccagcagcttcagtccctttctcgtcgatggtcagc

SEQ ID NO: 28701 - RNA, 128 nt, synthetic construct
  source 1..128: mol_type = other RNA
aaggctgtgctgaccatcgagtctttgtactctggtaccagaagctacaaagataaggcttcatgccgaaatcaggcctctaaaaacatggccccagcagcttcagtccctttctcgtcgatggtcag

SEQ ID NO: 28702 - RNA, 127 nt, synthetic construct
  source 1..127: mol_type = other RNA
aaggctgtgctgaccatcgagtctttgtactctggtaccagaagctacaaagataaggcttcatgccgaaatcaggcctctaaaaacatggccccagcagcttcagtccctttctcgtcgatggtca

SEQ ID NO: 28703 - RNA, 126 nt, synthetic construct
  source 1..126: mol_type = other RNA
aaggctgtgctgaccatcgagtctttgtactctggtaccagaagctacaaagataaggcttcatgccgaaatcaggcctctaaaaacatggccccagcagcttcagtccctttctcgtcgatggtc

SEQ ID NO: 28704 - RNA, 138 nt, synthetic construct
  source 1..138: mol_type = other RNA
aaggctgtgctgaccatcgagtctttgtactctggtaccagaagctacaaagataaggcttcatgccgaaatcatggcctctaaaaacatggccccagcagcttcagtccctttctcgtcgatggtcagcacagcctt

SEQ ID NO: 28705 - RNA, 137 nt, synthetic construct
  source 1..137: mol_type = other RNA
aaggctgtgctgaccatcgagtctttgtactctggtaccagaagctacaaagataaggcttcatgccgaaatcatggcctctaaaaacatggccccagcagcttcagtccctttctcgtcgatggtcagcacagcct

SEQ ID NO: 28706 - RNA, 136 nt, synthetic construct
  source 1..136: mol_type = other RNA
aaggctgtgctgaccatcgagtctttgtactctggtaccagaagctacaaagataaggcttcatgccgaaatcatggcctctaaaaacatggccccagcagcttcagtccctttctcgtcgatggtcagcacagcc

SEQ ID NO: 28707 - RNA, 135 nt, synthetic construct
  source 1..135: mol_type = other RNA
aaggctgtgctgaccatcgagtctttgtactctggtaccagaagctacaaagataaggcttcatgccgaaatcatggcctctaaaaacatggccccagcagcttcagtccctttctcgtcgatggtcagcacagc

SEQ ID NO: 28708 - RNA, 134 nt, synthetic construct
  source 1..134: mol_type = other RNA
aaggctgtgctgaccatcgagtctttgtactctggtaccagaagctacaaagataaggcttcatgccgaaatcatggcctctaaaaacatggccccagcagcttcagtccctttctcgtcgatggtcagcacag

SEQ ID NO: 28709 - RNA, 133 nt, synthetic construct
  source 1..133: mol_type = other RNA
aaggctgtgctgaccatcgagtctttgtactctggtaccagaagctacaaagataaggcttcatgccgaaatcatggcctctaaaaacatggccccagcagcttcagtccctttctcgtcgatggtcagcaca

SEQ ID NO: 28710 - RNA, 132 nt, synthetic construct
  source 1..132: mol_type = other RNA
aaggctgtgctgaccatcgagtctttgtactctggtaccagaagctacaaagataaggcttcatgccgaaatcatggcctctaaaaacatggccccagcagcttcagtccctttctcgtcgatggtcagcac

SEQ ID NO: 28711 - RNA, 131 nt, synthetic construct
  source 1..131: mol_type = other RNA
aaggctgtgctgaccatcgagtctttgtactctggtaccagaagctacaaagataaggcttcatgccgaaatcatggcctctaaaaacatggccccagcagcttcagtccctttctcgtcgatggtcagca

SEQ ID NO: 28712 - RNA, 130 nt, synthetic construct
  source 1..130: mol_type = other RNA
aaggctgtgctgaccatcgagtctttgtactctggtaccagaagctacaaagataaggcttcatgccgaaatcatggcctctaaaaacatggccccagcagcttcagtccctttctcgtcgatggtcagc

SEQ ID NO: 28713 - RNA, 129 nt, synthetic construct
  source 1..129: mol_type = other RNA
aaggctgtgctgaccatcgagtctttgtactctggtaccagaagctacaaagataaggcttcatgccgaaatcatggcctctaaaaacatggccccagcagcttcagtccctttctcgtcgatggtcag

SEQ ID NO: 28714 - RNA, 128 nt, synthetic construct
  source 1..128: mol_type = other RNA
aaggctgtgctgaccatcgagtctttgtactctggtaccagaagctacaaagataaggcttcatgccgaaatcatggcctctaaaaacatggccccagcagcttcagtccctttctcgtcgatggtca

SEQ ID NO: 28715 - RNA, 127 nt, synthetic construct
  source 1..127: mol_type = other RNA
aaggctgtgctgaccatcgagtctttgtactctggtaccagaagctacaaagataaggcttcatgccgaaatcatggcctctaaaaacatggccccagcagcttcagtccctttctcgtcgatggtc

SEQ ID NO: 28716 - RNA, 139 nt, synthetic construct
  source 1..139: mol_type = other RNA
aaggctgtgctgaccatcgagtctttgtactctggtaccagaagctacaaagataaggcttcatgccgaaatcaatggcctctaaaaacatggccccagcagcttcagtccctttctcgtcgatggtcagcacagcctt

SEQ ID NO: 28717 - RNA, 138 nt, synthetic construct
  source 1..138: mol_type = other RNA
aaggctgtgctgaccatcgagtctttgtactctggtaccagaagctacaaagataaggcttcatgccgaaatcaatggcctctaaaaacatggccccagcagcttcagtccctttctcgtcgatggtcagcacagcct

SEQ ID NO: 28718 - RNA, 137 nt, synthetic construct
  source 1..137: mol_type = other RNA
aaggctgtgctgaccatcgagtctttgtactctggtaccagaagctacaaagataaggcttcatgccgaaatcaatggcctctaaaaacatggccccagcagcttcagtccctttctcgtcgatggtcagcacagcc

SEQ ID NO: 28719 - RNA, 136 nt, synthetic construct
  source 1..136: mol_type = other RNA
aaggctgtgctgaccatcgagtctttgtactctggtaccagaagctacaaagataaggcttcatgccgaaatcaatggcctctaaaaacatggccccagcagcttcagtccctttctcgtcgatggtcagcacagc

SEQ ID NO: 28720 - RNA, 135 nt, synthetic construct
  source 1..135: mol_type = other RNA
aaggctgtgctgaccatcgagtctttgtactctggtaccagaagctacaaagataaggcttcatgccgaaatcaatggcctctaaaaacatggccccagcagcttcagtccctttctcgtcgatggtcagcacag

SEQ ID NO: 28721 - RNA, 134 nt, synthetic construct
  source 1..134: mol_type = other RNA
aaggctgtgctgaccatcgagtctttgtactctggtaccagaagctacaaagataaggcttcatgccgaaatcaatggcctctaaaaacatggccccagcagcttcagtccctttctcgtcgatggtcagcaca

SEQ ID NO: 28722 - RNA, 133 nt, synthetic construct
  source 1..133: mol_type = other RNA
aaggctgtgctgaccatcgagtctttgtactctggtaccagaagctacaaagataaggcttcatgccgaaatcaatggcctctaaaaacatggccccagcagcttcagtccctttctcgtcgatggtcagcac

SEQ ID NO: 28723 - RNA, 132 nt, synthetic construct
  source 1..132: mol_type = other RNA
aaggctgtgctgaccatcgagtctttgtactctggtaccagaagctacaaagataaggcttcatgccgaaatcaatggcctctaaaaacatggccccagcagcttcagtccctttctcgtcgatggtcagca

SEQ ID NO: 28724 - RNA, 131 nt, synthetic construct
  source 1..131: mol_type = other RNA
aaggctgtgctgaccatcgagtctttgtactctggtaccagaagctacaaagataaggcttcatgccgaaatcaatggcctctaaaaacatggccccagcagcttcagtccctttctcgtcgatggtcagc
